United States Patent Application Publication US 2023/0026259 A1 - sequence listing, part 19

SEQ ID NO: 87670 - protein, 1407 aa, Homo sapiens
  Payload ID: 17540
  Gene Symbol: TNS2
  Gene Name: tensin 2
  Uniprot ID: Q63HR2
  ENSP ID: ENSP00000447021
MKSSGPVERLLRALGRRDSSRAASRPRKAEPHSFREKVFRKKPPVCAVCKVTIDGTGVSCRVCKVATHRKCEAKVTSACQALPPVELRRNTAPVRRIEHLGSTKSLNHSKQRSTLPRSFSLDPLMERRWDLDLTYVTERILAAAFPARPDEQRHRGHLRELAHVLQSKHRDKYLLFNLSEKRHDLTRLNPKVQDFGWPELHAPPLDKLCSICKAMETWLSADPQHVVVLYCKGNKGKLGVIVSAYMHYSKISAGADQALATLTMRKFCEDKVATELQPSQRRYISYFSGLLSGSIRMNSSPLFLHYVLIPMLPAFEPGTGFQPFLKIYQSMQLVYTSGVYHIAGPGPQQLCISLEPALLLKGDVMVTCYHKGGRGTDRTLVFRVQFHTCTIHGPQLTFPKDQLDEAWTDERFPFQASVEFVFSSSPEKIKGSTPRNDPSVSVDYNTTEPAVRWDSYENFNQHHEDSVDGSLTHTRGPLDGSPYAQVQRPPRQTPPAPSPEPPPPPMLSVSSDSGHSSTLTTEPAAESPGRPPPTAAERQELDRLLGGCGVASGGRGAGRETAILDDEEQPTVGGGPHLGVYPGHRPGLSRHCSCRQGYREPCGVPNGGYYRPEGTLERRRLAYGGYEGSPQGYAEASMEKRRLCRSLSEGLYPYPPEMGKPATGDFGYRAPGYREVVILEDPGLPALYPCPACEEKLALPTAALYGLRLEREAGEGWASEAGKPLLHPVRPGHPLPLLLPACGHHHAPMPDYSCLKPPKAGEEGHEGCSYTMCPEGRYGHPGYPALVTYSYGGAVPSYCPAYGRVPHSCGSPGEGRGYPSPGAHSPRAGSISPGSPPYPQSRKLSYEIPTEEGGDRYPLPGHLASAGPLASAESLEPVSWREGPSGHSTLPRSPRDAPCSASSELSGPSTPLHTSSPVQGKESTRRQDTRSPTSAPTQRLSPGEALPPVSQAGTGKAPELPSGSGPEPLAPSPVSPTFPPSSPSDWPQERSPGGHSDGASPRSPVPTTLPGLRHAPWQGPRGPPDSPDGSPLTPVPSQMPWLVASPEPPQSSPTPAFPLAASYDTNGLSQPPLPEKRHLPGPGQQPGPWGPEQASSPARGISHHVTFAPLLSDNVPQTPEPPTQESQSNVKFVQDTSKFWYKPHLSRDQAIALLKDKDPGAFLIRDSHSFQGAYGLALKVATPPPSAQPWKGDPVEQLVRHFLIETGPKGVKIKGCPSEPYFGSLSALVSQHSISPISLPCCLRIPSKDPLEETPEAPVPTNMSTAADLLRQACSVLYLTSVETESLTGPQAVARASSAALSCSPRPTPAVVHFKVSAQGITLTDNQRKLFFRRHYPVNSITFSSTDPQDRRWTNPDGTTSKIFGFVAKKPGSPWENVCHLFAELDPDQPAGAIVTFITKVLLGQRK

SEQ ID NO: 87671 - protein, 34 aa, Homo sapiens
  Payload ID: 17540
  Gene Symbol: TNS2
  Gene Name: tensin 2
  ENSP ID: ENSP00000449165
  MOD_RES (1)..(1): Any amino acid
XESTRRQDTRSPTSAPTQRLSPGEALPPVSQLAQ

SEQ ID NO: 87672 - protein, 1344 aa, Homo sapiens
  Payload ID: 17540
  Gene Symbol: TNS2
  Gene Name: tensin 2
  ENSP ID: ENSP00000449361
MKSSGPVERLLRALGRRDSSRAASRPRKAEPHSFREKVFRKKPPVCAVCKVTIDGTGVSCRVCKVATHRKCEAKVTSACQALPPVELRRNTAPVRRIEHLGSTKSLNHSKQRSTLPRSFSLDPLMERRWDLDLTYVTERILAAAFPARPDEQRHRGHLRELAHVLQSKHRDKYLLFNLSEKRHDLTRLNPKVQDFGWPELHAPPLDKLCSICKAMETWLSADPQHVVVLYCKGNKGKLGVIVSAYMHYSKISAGADQALATLTMRKFCEDKVATELQPSQRRYISYFSGLLSGSIRMNSSPLFLHYVLIPMLPAFEPGTGFQPFLKIYQSMQLVYTSGVYHIAGPGPQQLCISLEPALLLKGDVMVTCYHKGGRGTDRTLVFRVQFHTCTIHGPQLTFPKDQLDEAWTDERFPFQASVEFVFSSSPEKIKGSTPRNDPSVSVDYNTTEPAVRWDSYENFNQHHEDSVDGSLTHTRGPLDGSPYAQVQRPPRQTPPAPSPEPPPPPMLSVSSDSGHSSTLTTEPAAESPGRPPPTAAERQELDRLLGGCGVASGGRGAGRETAILDDEEQPTVGGGPHLGVYPGHRPGLSRHCSCRQGYREPCGVPNGGYYRPEGTLERRRLAYGGYEGSPQGYAEASMEKRRLCRSLSEGLYPYPPEMGKPATGDFGYRAPGYREVVILEDPGLPALYPCPACEEKLALPTAALYGLRLEREAGEGWASEAGKPLLHPVRPGHPLPLLLPACGHHHAPMPDYSCLKPPKAGEEGHEGCSYTMCPEGRKLSYEIPTEEGGDRYPLPGHLASAGPLASAESLEPVSWREGPSGHSTLPRSPRDAPCSASSELSGPSTPLHTSSPVQGKESTRRQDTRSPTSAPTQRLSPGEALPPVSQAGTGKAPELPSGSGPEPLAPSPVSPTFPPSSPSDWPQERSPGGHSDGASPRSPVPTTLPGLRHAPWQGPRGPPDSPDGSPLTPVPSQMPWLVASPEPPQSSPTPAFPLAASYDTNGLSQPPLPEKRHLPGPGQQPGPWGPEQASSPARGISHHVTFAPLLSDNVPQTPEPPTQESQSNVKFVQDTSKFWYKPHLSRDQAIALLKDKDPGAFLIRDSHSFQGAYGLALKVATPPPSAQPWKGDPVEQLVRHFLIETGPKGVKIKGCPSEPYFGSLSALVSQHSISPISLPCCLRIPSKDPLEETPEAPVPTNMSTAADLLRQGAACSVLYLTSVETESLTGPQAVARASSAALSCSPRPTPAVVHFKVSAQGITLTDNQRKLFFRRHYPVNSITFSSTDPQDRRWTNPDGTTSKIFGFVAKKPGSPWENVCHLFAELDPDQPAGAIVTFITKVLLGQRK

SEQ ID NO: 87673 - protein, 1312 aa, Homo sapiens
  Payload ID: 17540
  Gene Symbol: TNS2
  Gene Name: tensin 2
  Uniprot ID: Q63HR2
  ENSP ID: ENSP00000449363
MKSSGPVERLLRALGRRDSSRAASRPRKAEPHSFREKVFRKKPPVCAVCKVTIDGTGVSCRVCKVATHRKCEAKVTSACQALPPVELRRNTAPVRRIEHLGSTKSLNHSKQRSTLPRSFSLDPLMERRWDLDLTYVTERILAAAFPARPDEQRHRGHLRELAHVLQSKHRDKYLLFNLSEKRHDLTRLNPKVQDFGWPELHAPPLDKLCSICKAMETWLSADPQHVVVLYCKGNKGKLGVIVSAYMHYSKISAGADQALATLTMRKFCEDKVATELQPSQRRYISYFSGLLSGSIRMNSSPLFLHYVLIPMLPAFEPGTGFQPFLKIYQSMQLVYTSGVYHIAGPGPQQLCISLEPALLLKGDVMVTCYHKGGRGTDRTLVFRVQFHTCTIHGPQLTFPKDQLDEAWTDERFPFQASVEFVFSSSPEKIKGSTPRNDPSVSVDYNTTEPAVRWDSYENFNQHHEDSVDGSLTHTRGPLDGSPYAQVQRPPRQTPPAPSPEPPPPPMLSVSSDSGHSSTLTTEPAAESPGRPPPTAAERQELDRLLGGCGVASGGRGAGRETAILDDEEQPTVGGGPHLGVYPGHRPGLSRHCSCRQGYREPCGVPNGGYYRPEGTLERRRLAYGGYEGSPQGYAEASMEKRRLCRSLSEGLYPYPPEMGKPATGDFGYRAPGYREVVILEDPGLPALYPCPACEEKLALPTAALYGLRLEREAGEGWASEAGKPLLHPVRPGHPLPLLLPACGHHHAPMPDYSCLKPPKAGEEGHEGCSYTMCPEESLEPVSWREGPSGHSTLPRSPRDAPCSASSELSGPSTPLHTSSPVQGKESTRRQDTRSPTSAPTQRLSPGEALPPVSQAGTGKAPELPSGSGPEPLAPSPVSPTFPPSSPSDWPQERSPGGHSDGASPRSPVPTTLPGLRHAPWQGPRGPPDSPDGSPLTPVPSQMPWLVASPEPPQSSPTPAFPLAASYDTNGLSQPPLPEKRHLPGPGQQPGPWGPEQASSPARGISHHVTFAPLLSDNVPQTPEPPTQESQSNVKFVQDTSKFWYKPHLSRDQAIALLKDKDPGAFLIRDSHSFQGAYGLALKVATPPPSAQPWKGDPVEQLVRHFLIETGPKGVKIKGCPSEPYFGSLSALVSQHSISPISLPCCLRIPSKDPLEETPEAPVPTNMSTAADLLRQGAACSVLYLTSVETESLTGPQAVARASSAALSCSPRPTPAVVHFKVSAQGITLTDNQRKLFFRRHYPVNSITFSSTDPQDRRWTNPDGTTSKIFGFVAKKPGSPWENVCHLFAELDPDQPAGAIVTFITKVLLGQRK

SEQ ID NO: 87674 - protein, 197 aa, Homo sapiens
  Payload ID: 17540
  Gene Symbol: TNS2
  Gene Name: tensin 2
  ENSP ID: ENSP00000473388
  MOD_RES (1)..(1): Any amino acid
XALLLKGDVMVTCYHKGGRGTDRTLVFRVQFHTCTIHGPQLTFPKDQLDEAWTDERFPFQASVEFVFSSSPEKIKGSTPRNDPSVSVDYNTTEPAVRWDSYENFNQHHEDSVDGAQAACRVGGSLTHTRGPLDGSPYAQVQRPPRQTPPAPSPEPPPPPMLSVSSDSGHSSTLTTEPAAESPGRPPPTAAERQELDR

SEQ ID NO: 87675 - protein, 1445 aa, Homo sapiens
  Payload ID: 17541
  Gene Symbol: TNS3
  Gene Name: tensin 3
  Uniprot ID: Q68CZ2
  ENSP ID: ENSP00000312143
MEEGHGLDLTYITERIIAVSFPAGCSEESYLHNLQEVTRMLKSKHGDNYLVLNLSEKRYDLTKLNPKIMDVGWPELHAPPLDKMCTICKAQESWLNSNLQHVVVIHCRGGKGRIGVVISSYMHFTNVSASADQALDRFAMKKFYDDKVSALMQPSQKRYVQFLSGLLSGSVKMNASPLFLHFVILHGTPNFDTGGVCRPFLKLYQAMQPVYTSGIYNVGPENPSRICIVIEPAQLLKGDVMVKCYHKKYRSATRDVIFRLQFHTGAVQGYGLVFGKEDLDNASKDDRFPDYGKVELVFSATPEKIQGSEHLYNDHGVIVDYNTTDPLIRWDSYENLSADGEVLHTQGPVDGSLYAKVRKKSSSDPGIPGGPQAIPATNSPDHSDHTLSVSSDSGHSTASARTDKTEERLAPGTRRGLSAQEKAELDQLLSGFGLEDPGSSLKEMTDARSKYSGTRHVVPAQVHVNGDAALKDRETDILDDEMPHHDLHSVDSLGTLSSSEGPQSAHLGPFTCHKSSQNSLLSDGFGSNVGEDPQGTLVPDLGLGMDGPYERERTFGSREPKQPQPLLRKPSVSAQMQAYGQSSYSTQTWVRQQQMVVAHQYSFAPDGEARLVSRCPADNPGLVQAQPRVPLTPTRGTSSRVAVQRGVGSGPHPPDTQQPSPSKAFKPRFPGDQVVNGAGPELSTGPSPGSPTLDIDQSIEQLNRLILELDPTFEPIPTHMNALGSQANGSVSPDSVGGGLRASSRLPDTGEGPSRATGRQGSSAEQPLGGRLRKLSLGQYDNDAGGQLPFSKCAWGKAGVDYAPNLPPFPSPADVKETMTPGYPQDLDIIDGRILSSKESMCSTPAFPVSPETPYVKTALRHPPFSPPEPPLSSPASQHKGGREPRSCPETLTHAVGMSESPIGPKSTMLRADASSTPSFQQAFASSCTISSNGPGQRRESSSSAERQWVESSPKPMVSLLGSGRPTGSPLSAEFSGTRKDSPVLSCFPPSELQAPFHSHELSLAEPPDSLAPPSSQAFLGFGTAPVGSGLPPEEDLGALLANSHGASPTPSIPLTATGAADNGFLSHNFLTVAPGHSSHHSPGLQGQGVTLPGQPPLPEKKRASEGDRSLGSVSPSSSGFSSPHSGSTISIPFPNVLPDFSKASEAASPLPDSPGDKLVIVKFVQDTSKFWYKADISREQAIAMLKDKEPGSFIVRDSHSFRGAYGLAMKVATPPPSVLQLNKKAGDLANELVRHFLIECTPKGVRLKGCSNEPYFGSLTALVCQHSITPLALPCKLLIPERDPLEEIAESSPQTAANSAAELLKQGAACNVWYLNSVEMESLTGHQAIQKALSITLVQEPPPVSTVVHFKVSAQGITLTDNQRKLFFRRHYPVNSVIFCALDPQDRKWIKDGPSSKVFGFVARKQGSATDNVCHLFAEHDPEQPASAIVNFVSKVMIGSPKKV

SEQ ID NO: 87676 - protein, 21 aa, Homo sapiens
  Payload ID: 17541
  Gene Symbol: TNS3
  Gene Name: tensin 3
  ENSP ID: ENSP00000387990
  MOD_RES (1)..(1): Any amino acid
XIFCALDPQDRKWIKDGPSSK

SEQ ID NO: 87677 - protein, 108 aa, Homo sapiens
  Payload ID: 17541
  Gene Symbol: TNS3
  Gene Name: tensin 3
  ENSP ID: ENSP00000388142
MEEGHGLDLTYITERIIAVSFPAGCSEESYLHNLQEVTRMLKSKHGDNYLVLNLSEKRYDLTKLNPKIMDVGWPELHAPPLDKMCTICKAQESWLNSNLQHVVVIHCR

SEQ ID NO: 87678 - protein, 250 aa, Homo sapiens
  Payload ID: 17541
  Gene Symbol: TNS3
  Gene Name: tensin 3
  Uniprot ID: Q68CZ2
  ENSP ID: ENSP00000388318
MEEGHGLDLTYITERIIAVSFPAGCSEESYLHNLQEVTRMLKSKHGDNYLVLNLSEKRYDLTKLNPKIMDVGWPELHAPPLDKMCTICKAQESWLNSNLQHVVVIHCRGGKGRIGVVISSYMHFTNVSASADQALDRFAMKKFYDDKVSALMQPSQKRYVQFLSGLLSGSVKMNASPLFLHFVILHGTPNFDTGGVCRPFLKLYQAMQPVYTSGIYNVGPENPSRICIVIEPAQLLKGDVMVMNYNIANI

SEQ ID NO: 87679 - protein, 250 aa, Homo sapiens; identical to SEQ ID NO: 87678
  Payload ID: 17541
  Gene Symbol: TNS3
  Gene Name: tensin 3
  Uniprot ID: Q68CZ2
  ENSP ID: ENSP00000389285

SEQ ID NO: 87680 - protein, 544 aa, Homo sapiens
  Payload ID: 17541
  Gene Symbol: TNS3
  Gene Name: tensin 3
  ENSP ID: ENSP00000396914
MPEELTSSLHAFKNKAFKKSKVCGVCKQIIDGQGISCRACKYSCHKKCEAKVVIPCGVQVRLEQAPGSSTLSSSLCRDKPLRPVILSPTMEEGHGLDLTYITERIIAVSFPAGCSEESYLHNLQEVTRMLKSKHGDNYLVLNLSEKRYDLTKLNPKIMDVGWPELHAPPLDKMCTICKAQESWLNSNLQHVVVIHCRGGKGRIGVVISSYMHFTNVSASADQALDRFAMKKFYDDKVSALMQPSQKRYVQFLSGLLSGSVKMNASPLFLHFVILHGTPNFDTGGVCRPFLKLYQAMQPVYTSGIYNVGPENPSRICIVIEPAQLLKGDVMVKCYHKKYRSATRDVIFRLQFHTGAVQGYGLVFGKEDLDNASKDDRFPDYGKVELVFSATPEKIQGSEHLYNDHGVIVDYNTTDPLIRWDSYENLSADGEVLHTQGPVDGSLYAKVRKKSSSDPGIPGGPQAIPATNSPDHSDHTLSVSSDSGHSTASARTDKTEERLAPGTRRGLSAQEKAELDQLLSGFGLEDPGSSLKEMTDARSKYSGTR

SEQ ID NO: 87681 - protein, 114 aa, Homo sapiens
  Payload ID: 17541
  Gene Symbol: TNS3
  Gene Name: tensin 3
  ENSP ID: ENSP00000407464
MCSRQRSGFGCITNWWKMGTRHPAHPAQPEELTSSLHAFKNKAFKKSKVCGVCKQIIDGQGISCRACKYSCHKKCEAKVVIPCGVQVRLEQAPGSSTLSSSLCRDKPLRPVILS

SEQ ID NO: 87682 - protein, 138 aa, Homo sapiens
  Payload ID: 17541
  Gene Symbol: TNS3
  Gene Name: tensin 3
  ENSP ID: ENSP00000409415
MEEGHGLDLTYITERIIAVSFPAGCSEESYLHNLQEVTRMLKSKHGDNYLVLNLSEKRYDLTKLNPKIMDVGWPELHAPPLDKMCTICKAQESWLNSNLQHVVVIHCRGGKGRIGVVISSYMHFTNVSASADQALDRF

SEQ ID NO: 87683 - protein, 1249 aa, Homo sapiens
  Payload ID: 17541
  Gene Symbol: TNS3
  Gene Name: tensin 3
  ENSP ID: ENSP00000414358
MNWLCRNQDPNPPPQPEELTSSLHAFKNKAFKKSKVCGVCKQIIDGQGISCRACKYSCHKKCEAKVVIPCGVQVRLEQAPGSSTLSSSLCRDKPLRPVILSPTMEEGHGLDLTYITERIIAVSFPAGCSEESYLHNLQEVTRMLKSKHGDNYLVLNLSEKRYDLTKLNPKIMDVGWPELHAPPLDKMCTICKAQESWLNSNLQHVVVIHCRGGKGRIGVVISSYMHFTNVSASADQALDRFAMKKFYDDKVSALMQPSQKRYVQFLSGLLSGSVKMNASPLFLHFVILHGTPNFDTGGVCRPFLKLYQAMQPVYTSGIYNVGPENPSRICIVIEPAQLLKGDVMVKCYHKKYRSATRDVIFRLQFHTGAVQGYGLVFGKEDLDNASKDDRFPDYGKVELVFSATPEKIQGSEHLYNDHGVIVDYNTTDPLIRWDSYENLSADGEVLHTQGPVDGSLYAKVRKKSSSDPGIPGGPQAIPATNSPDHSDHTLSVSSDSGHSTASARTDKTEERLAPGTRRGLSAQEKAELDQLLSGFGLEDPGSSLKEMTDARSKYSGTRHVVPAQVHVNGDAALKDRETDILDDEMPHHDLHSVDSLGTLSSSEGPQSAHLGPFTCHKSSQNSLLSDGFGSNVGEDPQGTLVPDLGLGMDGPYERERTFGSREPKQPQPLLRKPSVSAQMQAYGQSSYSTQTWVRQQQMVVAHQYSFAPDGEARLVSRCPADNPGLVQAQPRVPLTPTRGTSSRVAVQRGVGSGPHPPDTQQPSPSKAFKPRFPGDQVVNGAGPELSTGPSPGSPTLDIDQSIEQLNRLILELDPTFEPIPTHMNALGSQANGSVSPDSVGGGLRASSRLPDTGEGPSRATGRQGSSAEQPLGGRLRKLSLGQYDNDAGGQLPFSKCAWGKAGVDYAPNLPPFPSPADVKETMTPGYPQDLDIIDGRILSSKESMCSTPAFPVSPETPYVKTALRHPPFSPPEPPLSSPASQHKGGREPRSCPETLTHAVGMSESPIGPKSTMLRADASSTPSFQQAFASSCTISSNGPGQRRESSSSAERQWVESSPKPMVSLLGSGRPTGSPLSAEFSGTRKDSPVLSCFPPSELQAPFHSHELSLAEPPDSLAPPSSQAFLGFGTAPVGSGLPPEEDLGALLANSHGASPTPSIPLTATGAADNGFLSHNFLTVAPGHSSHHSPGLQGQGVTLPGQPPLPEKKRASEGDRSLGSVSPSSSGFSSPHSGSTISIPFPNVLPDFSKASE

SEQ ID NO: 87684 - protein, 715 aa, Homo sapiens
  Payload ID: 17542
  Gene Symbol: TNS4
  Gene Name: tensin 4
  Uniprot ID: Q8IZW8
  ENSP ID: ENSP00000254051
MSQVMSSPLLAGGHAVSLAPCDEPRRTLHPAPSPSLPPQCSYYTTEGWGAQALMAPVPCMGPPGRLQQAPQVEAKATCFLPSPGEKALGTPEDLDSYIDFSLESLNQMILELDPTFQLLPPGTGGSQAELAQSTMSMRKKEESEALDIKYIEVTSARSRCHDGPQHCSSPSVTPPFGSLRSGGLLLSRDVPRETRSSSESLIFSGNQGRGHQRPLPPSEGLSPRPPNSPSISIPCMGSKASSPHGLGSPLVASPRLEKRLGGLAPQRGSRISVLSASPVSDVSYMFGSSQSLLHSSNSSHQSSSRSLESPANSSSSLHSLGSVSLCTRPSDFQAPRNPTLTMGQPRTPHSPPLAKEHASSCPPSITNSMVDIPIVLINGCPEPGSSPPQRTPGHQNSVQPGAASPSNPCPATRSNSQTLSDAPFTTCPEGPARDMQPTMKFVMDTSKYWFKPNITREQAIELLRKEEPGAFVIRDSSSYRGSFGLALKVQEVPASAQSRPGEDSNDLIRHFLIESSAKGVHLKGADEEPYFGSLSAFVCQHSIMALALPCKLTIPQRELGGADGASDSTDSPASCQKKSAGCHTLYLSSVSVETLTGALAVQKAISTTFERDILPTPTVVHFKVTEQGITLTDVQRKVFFRRHYPLTTLRFCGMDPEQRKWQKYCKPSWIFGFVAKSQTEPQENVCHLFAEYDMVQPASQVIGLVTALLQDAERM

SEQ ID NO: 87685 - protein, 33 aa, Homo sapiens
  Payload ID: 17542
  Gene Symbol: TNS4
  Gene Name: tensin 4
  ENSP ID: ENSP00000463456
  MOD_RES (1)..(1): Any amino acid
XVFFRRHYPLTTLRFCGMDPEQRKWQKYCKPSW

SEQ ID NO: 87686 - protein, 188 aa, Homo sapiens
  Payload ID: 17543
  Gene Symbol: TDGF1
  Gene Name: teratocarcinoma-derived growth factor 1
  Uniprot ID: P13385
  ENSP ID: ENSP00000296145
MDCRKMARFSYSVIWIMAISKVFELGLVAGLGHQEFARPSRGYLAFRDDSIWPQEEPAIRPRSSQRVPPMGIQHSKELNRTCCLNGGTCMLGSFCACPPSFYGRNCEHDVRKENCGSVPHDTWLPKKCSLCKCWHGQLRCFPQAFLPGCDGLVMDEHLVASRTPELPPSARTTTFMLVGICLSIQSYY

SEQ ID NO: 87687 - protein, 172 aa, Homo sapiens
  Payload ID: 17543
  Gene Symbol: TDGF1
  Gene Name: teratocarcinoma-derived growth factor 1
  ENSP ID: ENSP00000446375
MAISKVFELGLVAGLGHQEFARPSRGYLAFRDDSIWPQEEPAIRPRSSQRVPPMGIQHSKELNRTCCLNGGTCMLGSFCACPPSFYGRNCEHDVRKENCGSVPHDTWLPKKCSLCKCWHGQLRCFPQAFLPGCDGLVMDEHLVASRTPELPPSARTTTFMLVGICLSIQSYY

SEQ ID NO: 87688 - protein, 451 aa, Homo sapiens
  Payload ID: 17544
  Gene Symbol: TINF2
  Gene Name: TERF1 (TRF1)-interacting nuclear factor 2
  Uniprot ID: Q9BSI4
  ENSP ID: ENSP00000267415
MATPLVAGPAALRFAAAASWQVVRGRCVEHFPRVLEFLRSLRAVAPGLVRYRHHERLCMGLKAKVVVELILQGRPWAQVLKALNHHFPESGPIVRDPKATKQDLRKILEAQETFYQQVKQLSEAPVDLASKLQELEQEYGEPFLAAMEKLLFEYLCQLEKALPTPQAQQLQDVLSWMQPGVSITSSLAWRQYGVDMGWLLPECSVTDSVNLAEPMEQNPPQQQRLALHNPLPKAKPGTHLPQGPSSRTHPEPLAGRHFNLAPLGRRRVQSQWASTRGGHKERPTVMLFPFRNLGSPTQVISKPESKEEHAIYTADLAMGTRAASTGKSKSPCQTLGGRALKENPVDLPATEQKENCLDCYMDPLRLSLLPPRARKPVCPPSLCSSVITIGDLVLDSDEEENGQGEGKESLENYQKTKFDTLIPTLCEYLPPSGHGAIPVSSCDCRDSSRPL

SEQ ID NO: 87689 - protein, 354 aa, Homo sapiens
  Payload ID: 17544
  Gene Symbol: TINF2
  Gene Name: TERF1 (TRF1)-interacting nuclear factor 2
  Uniprot ID: Q9BSI4
  ENSP ID: ENSP00000382350
MATPLVAGPAALRFAAAASWQVVRGRCVEHFPRVLEFLRSLRAVAPGLVRYRHHERLCMGLKAKVVVELILQGRPWAQVLKALNHHFPESGPIVRDPKATKQDLRKILEAQETFYQQVKQLSEAPVDLASKLQELEQEYGEPFLAAMEKLLFEYLCQLEKALPTPQAQQLQDVLSWMQPGVSITSSLAWRQYGVDMGWLLPECSVTDSVNLAEPMEQNPPQQQRLALHNPLPKAKPGTHLPQGPSSRTHPEPLAGRHFNLAPLGRRRVQSQWASTRGGHKERPTVMLFPFRNLGSPTQVISKPESKEEHAIYTADLAMGTRAASTGKSKSPCQTLGGRALKENPVDLPATEQKE

SEQ ID NO: 87690 - protein, 146 aa, Homo sapiens
  Payload ID: 17544
  Gene Symbol: TINF2
  Gene Name: TERF1 (TRF1)-interacting nuclear factor 2
  ENSP ID: ENSP00000452724
MEKLLFEYLCQLEKALPTPQAQQLQDVLSWMQPGVSITSSLAWRQYGVDMGWLLPECSVTDSVNLAEPMEQNPPQQQRLALHNPLPKAKPGTHLPQGPSSRTHPEPLAGRHFNLAPLGRRRVQSQWASTRGGHKERPTVMLFPFRN

SEQ ID NO: 87691 - protein, 274 aa, Homo sapiens
  Payload ID: 17544
  Gene Symbol: TINF2
  Gene Name: TERF1 (TRF1)-interacting nuclear factor 2
  ENSP ID: ENSP00000452800
  MOD_RES (1)..(1): Any amino acid
XAAASWQVVRGRCVEHFPRVLEFLRSLRAVAPGLVRYRHHERLCMGLKAKVVVELILQGRPWAQVLKALNHHFPESGPIVRDPKATKQDLRKILEAQETFYQQVKQLSEAPVDLASKLQELEQEYGEPFLAAMEKLLFEYLCQLEKALPTPQAQQLQDVLSWMQPGVSITSSLAWRQYGVDMGWLLPECSVTDSVNLAEPMEQNPPQQQRLALHNPLPKAKPGTHLPQGPSSRTHPEPLAGRHFNLAPLGRRRTLGGRALKENPVDLPATEQKE

SEQ ID NO: 87692 - protein, 140 aa, Homo sapiens
  Payload ID: 17544
  Gene Symbol: TINF2
  Gene Name: TERF1 (TRF1)-interacting nuclear factor 2
  ENSP ID: ENSP00000453025
MATPLVAGPAALRFAAAASWQVVRGRCVEHFPRVLEFLRSLRAVAPGLVRYRHHERLCMGLKAKVVVELILQGRPWAQVLKALNHHFPESGPIVRDPKATKQDLRKILEAQETFYQQVKQLSEAPVDLASKLQSALLLTQ

SEQ ID NO: 87693 - protein, 85 aa, Homo sapiens
  Payload ID: 17544
  Gene Symbol: TINF2
  Gene Name: TERF1 (TRF1)-interacting nuclear factor 2
  ENSP ID: ENSP00000453113
GGRALKENPVDLPATEQKENCLDCYMDPLRLSLLPPRARKPVCPPSLCSSVITIGDLVLDSDEEENGQGEGKVSGKEQKAGKGDG

SEQ ID NO: 87694 - protein, 91 aa, Homo sapiens
  Payload ID: 17544
  Gene Symbol: TINF2
  Gene Name: TERF1 (TRF1)-interacting nuclear factor 2
  ENSP ID: ENSP00000453157
MATPLVAGPAALRFAAAASWQVVRGRCVEHFPRVLEFLRSLRAVAPGLVRYRHHERLCMGLKAKTKQDLRKILEAQETFYQQVKQLSEAPV

SEQ ID NO: 87695 - protein, 71 aa, Homo sapiens
  Payload ID: 17544
  Gene Symbol: TINF2
  Gene Name: TERF1 (TRF1)-interacting nuclear factor 2
  ENSP ID: ENSP00000453675
MATPLVAGPAALRFAAAASWQVVRGRCVEHFPRVLEFLRSLRAVAPGLVRYRHHERLCMGLKAKSALLLTQ

SEQ ID NO: 87696 - protein, 140 aa, Homo sapiens; identical to SEQ ID NO: 87692
  Payload ID: 17544
  Gene Symbol: TINF2
  Gene Name: TERF1 (TRF1)-interacting nuclear factor 2
  ENSP ID: ENSP00000486681

SEQ ID NO: 87697 - protein, 165 aa, Homo sapiens
  Payload ID: 17545
  Gene Symbol: TUT1
  Gene Name: terminal uridylyl transferase 1, U6 snRNA-specific
  ENSP ID: ENSP00000278279
MAAVDSDVESLPRGGFRCCLCHVTTANRPSLDAHLGGRKHRHLVELRAARKAQGLRSVFVSGFPRDVDSAQLSEYFLAFGPVASVVMDKDKPVPKAPESPSLDSALASPLDPQALACTPASPPDSQPPASPQDSEALDFETPSSSLAPQTPDSALASETLASPQS

SEQ ID NO: 87698 - protein, 912 aa, Homo sapiens
  Payload ID: 17545
  Gene Symbol: TUT1
  Gene Name: terminal uridylyl transferase 1, U6 snRNA-specific
  ENSP ID: ENSP00000308000
MSLPIGSAEVASERVELWRSGFRWWQRCLCFCRYRRVAMAAVDSDVESLPRGGFRCCLCHVTTANRPSLDAHLGGRKHRHLVELRAARKAQGLRSVFVSGFPRDVDSAQLSEYFLAFGPVASVVMDKDKGVFAIVEMGDVGAREAVLSQSQHSLGGHRLRVRPREQKEFQSPASKSPKGAAPDSHQLAKALAEAADVGAQMIKLVGLRELSEAERQLRSLVVALMQEVFTEFFPGCVVHPFGSSINSFDVHGCDLDLFLDLGDLEEPQPVPKAPESPSLDSALASPLDPQALACTPASPPDSQPPASPQDSEALDFETPSSSLAPQTPDSALASETLASPQSLPPASPLLEDREEGDLGKASELAETPKEEKAEGAAMLELVGSILRGCVPGVYRVQTVPSARRPVVKFCHRPSGLHGDVSLSNRLALHNSRFLSLCSELDGRVRPLVYTLRCWAQGRGLSGSGPLLSNYALTLLVIYFLQTRDPPVLPTVSQLTQKAGEGEQVEVDGWDCSFPRDASRLEPSINVEPLSSLLAQFFSCVSCWDLRGSLLSLREGQALPVAGGLPSNLWEGLRLGPLNLQDPFDLSHNVAANVTSRVAGRLQNCCRAAANYCRSLQYQRRSSRGRDWGLLPLLQPSSPSSLLSATPIPLPLAPFTQLTAALVQVFREALGCHIEQATKRTRSEGGGTGESSQGGTSKRLKVDGQKNCCEEGKEEQQGCAGDGGEDRVEEMVIEVGEMVQDWAMQSPGQPGDLPLTTGKHGAPGEEGQPSHAALAERGPKGHEAAQEWSQGEAGKGASLPSSASWRCALWHRVWQGRRRARRRLQQQTKEGAGGGAGTRAGWLATEAQVTQELKGLSGGEERPETEPLLSFVASVSPADRMLTVTPLQDPQGLFPDLHHFLQVFLPQAIRHLK

SEQ ID NO: 87699 - protein, 874 aa, Homo sapiens
  Payload ID: 17545
  Gene Symbol: TUT1
  Gene Name: terminal uridylyl transferase 1, U6 snRNA-specific
  Uniprot ID: Q9H6E5
  ENSP ID: ENSP00000419607
MAAVDSDVESLPRGGFRCCLCHVTTANRPSLDAHLGGRKHRHLVELRAARKAQGLRSVFVSGFPRDVDSAQLSEYFLAFGPVASVVMDKDKGVFAIVEMGDVGAREAVLSQSQHSLGGHRLRVRPREQKEFQSPASKSPKGAAPDSHQLAKALAEAADVGAQMIKLVGLRELSEAERQLRSLVVALMQEVFTEFFPGCVVHPFGSSINSFDVHGCDLDLFLDLGDLEEPQPVPKAPESPSLDSALASPLDPQALACTPASPPDSQPPASPQDSEALDFETPSSSLAPQTPDSALASETLASPQSLPPASPLLEDREEGDLGKASELAETPKEEKAEGAAMLELVGSILRGCVPGVYRVQTVPSARRPVVKFCHRPSGLHGDVSLSNRLALHNSRFLSLCSELDGRVRPLVYTLRCWAQGRGLSGSGPLLSNYALTLLVIYFLQTRDPPVLPTVSQLTQKAGEGEQVEVDGWDCSFPRDASRLEPSINVEPLSSLLAQFFSCVSCWDLRGSLLSLREGQALPVAGGLPSNLWEGLRLGPLNLQDPFDLSHNVAANVTSRVAGRLQNCCRAAANYCRSLQYQRRSSRGRDWGLLPLLQPSSPSSLLSATPIPLPLAPFTQLTAALVQVFREALGCHIEQATKRTRSEGGGTGESSQGGTSKRLKVDGQKNCCEEGKEEQQGCAGDGGEDRVEEMVIEVGEMVQDWAMQSPGQPGDLPLTTGKHGAPGEEGQPSHAALAERGPKGHEAAQEWSQGEAGKGASLPSSASWRCALWHRVWQGRRRARRRLQQQTKEGAGGGAGTRAGWLATEAQVTQELKGLSGGEERPETEPLLSFVASVSPADRMLTVTPLQDPQGLFPDLHHFLQVFLPQAIRHLK

SEQ ID NO: 87700 - protein, 100 aa, Homo sapiens
  Payload ID: 17545
  Gene Symbol: TUT1
  Gene Name: terminal uridylyl transferase 1, U6 snRNA-specific
  ENSP ID: ENSP00000419792
MAAVDSDVESLPRGGFRCCLCHVTTANRPSLDAHLGGRKHRHLVELRAARKAQGLRSVFVSGFPRDVDSAQLSEYFLAFGPVASVVMDKDKGLAVSQAGV

SEQ ID NO: 87701 - protein, 143 aa, Homo sapiens
  Payload ID: 17545
  Gene Symbol: TUT1
  Gene Name: terminal uridylyl transferase 1, U6 snRNA-specific
  ENSP ID: ENSP00000420739
MDKDKGVFAIVEMGDVGAREAVLSQSQHSLGGHRLRVRPREQKEFQSPASKSPKGAAPDSHQLAKALAEAADVGAQMIKLVGLRELSEAERQLRSLVVALMQEVFTEFFPGCVVHPFGSSINSFDVHGCDLDLFLDLGDLEEP

SEQ ID NO: 87702 - protein, 214 aa, Homo sapiens
  Payload ID: 17546
  Gene Symbol: TESC
  Gene Name: tescalcin
  Uniprot ID: Q96BS2
  ENSP ID: ENSP00000334785
MGAAHSASEEVRELEGKTGFSSDQIEQLHRRFKQLSGDQPTIRKENFNNVPDLELNPIRSKIVRAFFDNRNLRKGPSGLADEINFEDFLTIMSYFRPIDTTMDEEQVELSRKEKLRFLFHMYDSDSDGRITLEEYRNVVEELLSGNPHIEKESARSIADGAMMEAASVCMGQMEPDQVYEGITFEDFLKIWQGIDIETKMHVRFLNMETMALCH

SEQ ID NO: 87703 - protein, 135 aa, Homo sapiens
  Payload ID: 17546
  Gene Symbol: TESC
  Gene Name: tescalcin
  ENSP ID: ENSP00000432608
MGAAHSASEEVRELEGKTGFSSDQIEQLHRRFKQLSGDQPTIRKENFNNVPDLELNPIRSKIVRAFFDNRNLRKGPSGLADEINFEDFLTIMSYFRPIDTTMDEEQVELSRKEKLRSCGFLGLEGGCAVDVKQGP

SEQ ID NO: 87704 - protein, 163 aa, Homo sapiens
  Payload ID: 17546
  Gene Symbol: TESC
  Gene Name: tescalcin
  Uniprot ID: Q96BS2
  ENSP ID: ENSP00000432716
MGAAHSASEEVRELEGKTGFSSDQIEQLHRRFKQLSGDQPTIRKENFNNVPDLELNPIRSKIVRAFFDNRNLRKGPSGLADEINFEDFLTIMSYFRPIDTTMDEEQVELSRKEKLRFLFHMYDSDSDGRITLEEYRNVKWSRSCCRETLTSRRSPLAPSPTGP

SEQ ID NO: 87705 - protein, 187 aa, Homo sapiens
  Payload ID: 17546
  Gene Symbol: TESC
  Gene Name: tescalcin
  Uniprot ID: Q96BS2
  ENSP ID: ENSP00000445689
MGAAHSASEEVRELEGKTGFSSDQIEQLHRRFKQLSGDQPTIRNLRKGPSGLADEINFEDFLTIMSYFRPIDTTMDEEQVELSRKEKLRFLFHMYDSDSDGRITLEEYRNVVEELLSGNPHIEKESARSIADGAMMEAASVCMGQMEPDQVYEGITFEDFLKIWQGIDIETKMHVRFLNMETMALCH

SEQ ID NO: 87706 - protein, 81 aa, Homo sapiens
  Payload ID: 17546
  Gene Symbol: TESC
  Gene Name: tescalcin
  ENSP ID: ENSP00000450386
PHVRLGQRRPHHSGRISKCKVVEELLSGNPHIEKESARSIADGAMMEAASVCMGQMIWQGIDIETKMHVRFLNMETMALCH

SEQ ID NO: 87707 - protein, 421 aa, Homo sapiens
  Payload ID: 17547
  Gene Symbol: TES
  Gene Name: testin LIM domain protein
  Uniprot ID: Q9UGI8
  ENSP ID: ENSP00000350937
MDLENKVKKMGLGHEQGFGAPCLKCKEKCEGFELHFWRKICRNCKCGQEEHDVLLSNEEDRKVGKLFEDTKYTTLIAKLKSDGIPMYKRNVMILTNPVAAKKNVSINTVTYEWAPPVQNQALARQYMQMLPKEKQPVAGSEGAQYRKKQLAKQLPAHDQDPSKCHELSPREVKEMEQFVKKYKSEALGVGDVKLPCEMDAQGPKQMNIPGGDRSTPAAVGAMEDKSAEHKRTQYSCYCCKLSMKEGDPAIYAERAGYDKLWHPACFVCSTCHELLVDMIYFWKNEKLYCGRHYCDSEKPRCAGCDELIFSNEYTQAENQNWHLKHFCCFDCDSILAGEIYVMVNDKPVCKPCYVKNHAVVCQGCHNAIDPEVQRVTYNNFSWHASTECFLCSCCSKCLIGQKFMPVEGMVFCSVECKKRMS

SEQ ID NO: 87708 - protein, 412 aa, Homo sapiens
  Payload ID: 17547
  Gene Symbol: TES
  Gene Name: testin LIM domain protein
  Uniprot ID: Q9UGI8
  ENSP ID: ENSP00000377121
MGLGHEQGFGAPCLKCKEKCEGFELHFWRKICRNCKCGQEEHDVLLSNEEDRKVGKLFEDTKYTTLIAKLKSDGIPMYKRNVMILTNPVAAKKNVSINTVTYEWAPPVQNQALARQYMQMLPKEKQPVAGSEGAQYRKKQLAKQLPAHDQDPSKCHELSPREVKEMEQFVKKYKSEALGVGDVKLPCEMDAQGPKQMNIPGGDRSTPAAVGAMEDKSAEHKRTQYSCYCCKLSMKEGDPAIYAERAGYDKLWHPACFVCSTCHELLVDMIYFWKNEKLYCGRHYCDSEKPRCAGCDELIFSNEYTQAENQNWHLKHFCCFDCDSILAGEIYVMVNDKPVCKPCYVKNHAVVCQGCHNAIDPEVQRVTYNNFSWHASTECFLCSCCSKCLIGQKFMPVEGMVFCSVECKKRMS

SEQ ID NO: 87709 - protein, 192 aa, Homo sapiens
  Payload ID: 17547
  Gene Symbol: TES
  Gene Name: testin LIM domain protein
  ENSP ID: ENSP00000377124
  MOD_RES (1)..(1): Any amino acid
XTPAAVGAMEDKSAEHKRTQYSCYCCKLSMKEGDPAIYAERAGYDKLWHPACFVCSTCHELLVDMIYFWKNEKLYCGRHYCDSEKPRCAGCDELIFSNEYTQAENQNWHLKHFCCFDCDSILAGEIYVMVNDKPVCKPCYVKNHAVVRSVLRIWLPQPALGLEFMLFLKPLTNGKQKAVLLSRKQIIPTTGC

SEQ ID NO: 87710 - protein, 79 aa, Homo sapiens
  Payload ID: 17547
  Gene Symbol: TES
  Gene Name: testin LIM domain protein
  ENSP ID: ENSP00000413002
MYKRNVMILTNPVAAKKNVSINTVTYEWAPPVQNQALARQYMQMLPKEKQPVAGSEGAQYRKKQLAKQLPAHDQDPSKC

SEQ ID NO: 87711 - protein, 44 aa, Homo sapiens
  Payload ID: 17547
  Gene Symbol: TES
  Gene Name: testin LIM domain protein
  ENSP ID: ENSP00000420220
MDLENKVKKMGLGHEQGFGAPCLKCKEKCEGFELHFWSPAIAAN

SEQ ID NO: 87712 - protein, 1692 aa, Homo sapiens
  Payload ID: 17548
  Gene Symbol: TOPAZ1
  Gene Name: testis and ovary specific PAZ domain containing 1
  Uniprot ID: Q8N9V7
  ENSP ID: ENSP00000310303
MRRPPPLGPTTASGPEGNVRNLQKRQAPGPGAAGGCGPEAGGCRENKQKRRMVARATPGRGEVESDKSVAASGAGKAARRQVEGRRGPVSPSDSSDPRGLEAAKEAELPLQTERHTKEKRKVTEASSDDPQPGLDLVRKESLTSSESFQTVECLQSLGKESIIEGIKRRIRNKKLKSLENPPLKITENEATQNIKVEFQDELYKNTPKYSCNILSPEVENNSVLKLRDCNCFPHSKGCNDENNLPYKPDGGCMHVAENFSKKENLRSLAEKSDTNSIPQLLQTEENVMGVNKLLPEESDLYQSKTNGLLSCLQHEKNKYSIEESSVGRKPRKRMKLSEKADETVTEMNFSNEYNKSELMLQENQMIADGKEAETKSPLNVLRKVSHNTVSLMDHLLSVPETVEKETSSEHHVNAVFQKTIEPLLKEETENASEPLGYESMASKEDFKSMKSFIGKSPNEYHIERRSSREDLRSASEELKLSCQRTIPMTGKRTWPYYSCARISAWCWKKASLPESSYFLRGSQESCRQVDVPKHQTNQTHLTDSKLLLQSSLTETNTESSSKEKLDSNSNCLSSVSAVEPTLMVIKEPIIKDDKKIKSEELSRRGSEVISNTTEDTQLTSETQSLTGNKKKARGNLTKLNLTATSKDGQEANNSAGKTIHRKACIAQQTFIVPDLVKILNTGRLTNFKIPLLKNKSEKRKEVNAKSSEREAYSPLELLDNLSGADVRQNRSKENVSMMMLGPQTLSIRNSVTPVQASSDSFYNKKSYSISPSFTKQGNNSKPSNHVSEPGNIVSNKEVASLTVENNAFSCDPGYVEKSPSFCCNEQETFRPVSSEVRGRKITKNFSEVGFPDILKAYEDDVLLIDVIQDDPDLFGVSNEGELSFTSEVPKISQEPNVAGEHQSTDSKYMETPVKKEPSDDLRELPVLDCGWIKPDICASNSAESEIKRDPKDVNTSLGEVANETSENETLGDFSEQIKGSDLDEKHRFTDKVITKEEKENIYEVCKSKDSRNADFMVGECQFAVPVPKPLCLLVPPLNLSGRQEDTILNTWMNDFRFLGKHSVLKLQNPETCEIFKREKNVGVFQKSLGLMIPYKYCKFHFNTLRGCERPLCKFAHVPEQGDEKVCMDVFKKYININELCLLQRAVNIFMEYYRKFPPGVYFDLQVLNDLLNSLLKHCLLKEVFQIVNLSIMVKMLPSLKILLNIFEYVATMKLRNAVPALIDIFCKLVEAGMVLDPEHFNYIVKLLYQVQASKQEITAVLEMKSRLQMRRFKKNWKCDLDSALNKLEHCKEKGDWTKLGKLYINVKMGCEKFADFQTFCACIAETLTKNYEDERPDIPFCEFAETVSKDPQNSKVDKGVLGRIGISAMYFYHKLLQWSKGRKVLEKLYELKIHFTSLKGLIGPEKLASRCQIVNVAAEIFLKSGSLDGAIWVMRESEWIINTPLWPCDRLDVLNRHNLLCTIAHEILAKSLYRQTFEVLQNLPGFQNSQETVEVSQYSLLFNKLLGSCIESSSLGMSSSVAEFMISKSIPIDFSFLRRLITSLGRSRLWLKARAHYKSALSLGCYPPLEGNLYRKLLLIPSYLSEIEMLLAIEIFMVSNASSIQSPGTSTQILQIVLKRCEDNQSRSNDDYQAAVERLIMAARISDPKLFVKHMTVNVNKEQVYSLEHCSALKWLKENMKWAGKVWLFSNH

SEQ ID NO: 87713 - protein, 185 aa, Homo sapiens
  Payload ID: 17549
  Gene Symbol: TDRP
  Gene Name: testis development related protein
  Uniprot ID: Q86YL5
  ENSP ID: ENSP00000315111
MWKLGRGRVLLDEPPEEEDGLRGGPPPAAAAAAQAQVQGASFRGWKEVTSLFNKDDEQHLLERCKSPKSKGTNLRLKEELKAEKKSGFWDNLVLKQNIQSKKPDEIEGWEPPKLALEDISADPEDTVGGHPSWSGWEDDAKGSTKYTSLASSANSSRWSLRAAGRLVSIRRQSKGHLTDSPEEAE

SEQ ID NO: 87714 - protein, 198 aa, Homo sapiens
  Payload ID: 17549
  Gene Symbol: TDRP
  Gene Name: testis development related protein
  Uniprot ID: Q86YL5
  ENSP ID: ENSP00000408126
MWKLGRGRVLLDEPPEEEDGLRGGPPPAAAAAAQAQVQGASFRGWKEVTSLFNKDDEQHLLERCKSPKSKGTNLRLKEELKAEKKSGFWDNLVLKQNIQSKKPDEIEGWEPPKLALEDISADPEDTVGGHPSWSGWEDDAKGSTKYTSLASSANSSRWSLRAAGRLIKEVWINFSQLIISFRKHCLAHYRELRLCIKY

SEQ ID NO: 87715 - protein, 198 aa, Homo sapiens; identical to SEQ ID NO: 87714
  Payload ID: 17549
  Gene Symbol: TDRP
  Gene Name: testis development related protein
  Uniprot ID: Q86YL5
  ENSP ID: ENSP00000430325

SEQ ID NO: 87716 - protein, 185 aa, Homo sapiens; identical to SEQ ID NO: 87713
  Payload ID: 17549
  Gene Symbol: TDRP
  Gene Name: testis development related protein
  Uniprot ID: Q86YL5
  ENSP ID: ENSP00000479558

SEQ ID NO: 87717 - protein, 929 aa, Homo sapiens
  Payload ID: 17550
  Gene Symbol: TEX10
  Gene Name: testis expressed 10
  Uniprot ID: Q9NXF1
  ENSP ID: ENSP00000364037
MTKKRKRQHDFQKVKLKVGKKKPKLQNATPTNFKTKTIHLPEQLKEDGTLPTNNRKLNIKDLLSQMHHYNAGVKQSALLGLKDLLSQYPFIIDAHLSNILSEVTAVFTDKDANVRLAAVQLLQFLAPKIRAEQISPFFPLVSAHLSSAMTHITEGIQEDSLKVLDILLEQYPALITGRSSILLKNFVELISHQQLSKGLINRDRSQSWILSVNPNRRLTSQQWRLKVLVRLSKFLQALADGSSRLRESEGLQEQKENPHATSNSIFINWKEHANDQQHIQVYENGGSQPNVSSQFRLRYLVGGLSGVDEGLSSTENLKGFIEIIIPLLIECWVEAVPPQLATPVGNGIEREPLQVMQQVLNIISLLWKLSKQQDETHKLESWLRKNYLIDFKHHFMSRFPYVLKEITKHKRKEPNKSIKHCTVLSNNIDHLLLNLTLSDIMVSLANASTLQKDCSWIEMIRKFVTETLEDGSRLNSKQLNRLLGVSWRLMQIQPNREDTETLIKAVYTLYQQRGLILPVRTLLLKFFSKIYQTEELRSCRFRYRSKVLSRWLAGLPLQLAHLGSRNPELSTQLIDIIHTAAARANKELLKSLQATALRIYDPQEGAVVVLPADSQQRLVQLVYFLPSLPADLLSRLSRCCIMGRLSSSLAAMLIGILHMRSSFSGWKYSAKDWLMSDVDYFSFLFSTLTGFSKEELTWLQSLRGVPHVIQTQLSPVLLYLTDLDQFLHHWDVTEAVFHSLLVIPARSQNFDILQSAISKHLVGLTVIPDSTAGCVFGVICKLLDHTCVVSETLLPFLASCCYSLLYFLLTIEKGEAEHLRKRDKLWGVCVSILALLPRVLRLMLQSLRVNRVGPEELPVVGQLLRLLLQHAPLRTHMLTNAILVQQIIKNITTLKSGSVQEQWLTDLHYCFNVYITGHPQGPSALATVY

SEQ ID NO: 87718 - protein, 171 aa, Homo sapiens
  Payload ID: 17550
  Gene Symbol: TEX10
  Gene Name: testis expressed 10
  ENSP ID: ENSP00000399872
MQQVLNIISLLWKLSKQQDETHKLESWLRKNYLIDFKHHFMSRFPYVLKEITKHKRKEPNKSIKHCTVLSNNIDHLLLNLTLSDIMVSLANASTLQKDCSWIEMIRKFVTETLEDGSRLNSKQLNRLLGVSWRLMQIQPNREDTETLIKAVYTLYQQRGLILPVRTLLLKF

SEQ ID NO: 87719 - protein, 913 aa, Homo sapiens
  Payload ID: 17550
  Gene Symbol: TEX10
  Gene Name: testis expressed 10
  Uniprot ID: Q9NXF1
  ENSP ID: ENSP00000444555
MSRMTKKRKRQHDFQKVKLKVGKKKPKLQNATPTNFKTKTIHLPEQLKEDGTLPTNNRKLNIKDLLSQMHHYNAGVKQSALLGLKDLLSQYPFIIDAHLSNILSEVTAVFTDKDANVRLAAVQLLQFLAPKIRAEQISPFFPLVSAHLSSAMTHITEGIQEDSLKVLDILLEQYPALITGRSSILLKNFVELISHQQLSKGLINRDRSQSWILSVNPNRRLTSQQWRLKVLVRLSKFLQALADGSSRLRESEGLQEQKENPHATSNSIFINWKEHANDQQHIQVYENGGSQPNVSSQFRLRYLVGGLSGVDEGLSSTENLKGFIEIIIPLLIECWVEAVPPQLATPVGNGIEREPLQVMQQVLNIISLLWKLSKQQDETHKLESWLRKNYLIDFKHHFMSRFPYVLKEITKHKRKEPNKSIKHCTVLSNNIDHLLLNLTLSDIMVSLANASTLQKDCSWIEMIRKFVTETLEDGSRLNSKQLNRLLGVSWRLMQIQPNREDTETLIKAVYTLYQQRGLILPVRTLLLKFFSKIYQTEELRSCRFRYRSKVLSRWLAGLPLQLAHLGSRNPELSTQLIDIIHTAAARANKELLKSLQATALRIYDPQEGAVVVLPADSQQRLVQLVYFLPSLPADLLSRLSRCCIMGRLSSSLAAMLIGILHMRSSFSGWKYSAKDWLMSDVDYFSFLFSTLTGFSKEELTWLQSLRGVPHVIQTQLSPVLLYLTDLDQFLHHWDVTEAVFHSLLVIPARSQNFDILQSAISKHLVGLTVIPDSTAGCVFGVICKLLDHTCVVSETLLPFLASCCYSLLYFLLTIEKGEAEHLRKRLMLQSLRVNRVGPEELPVVGQLLRLLLQHAPLRTHMLTNAILVQQIIKNITTLKSGSVQEQWLTDLHYCFNVYITGHPQGPSALATVY

SEQ ID NO: 87720 - protein, 267 aa, Homo sapiens
  Payload ID: 17551
  Gene Symbol: TEX101
  Gene Name: testis expressed 101
  Uniprot ID: Q9BY14
  ENSP ID: ENSP00000472308
MGARQIQTSSSQTSPEEAMGTPRIQHLLILLVLGASLLTSGLELYCQKGLSMTVEADPANMFNWTTEEVETCDKGALCQETILIIKAGTETAILATKGCIPEGEEAITIVQHSSPPGLIVTSYSNYCEDSFCNDKDSLSQFWEFSETTASTVSTTLHCPTCVALGTCFSAPSLPCPNGTTRCYQGKLEITGGGIESSVEVKGCTAMIGCRLMSGILAVGPMFVREACPHQLLTQPRKTENGATCLPIPVWGLQLLLPLLLPSFIHFS

SEQ ID NO: 87721 - protein, 249 aa, Homo sapiens
  Payload ID: 17551
  Gene Symbol: TEX101
  Gene Name: testis expressed 101
  Uniprot ID: Q9BY14
  ENSP ID: ENSP00000472769
MGTPRIQHLLILLVLGASLLTSGLELYCQKGLSMTVEADPANMFNWTTEEVETCDKGALCQETILIIKAGTETAILATKGCIPEGEEAITIVQHSSPPGLIVTSYSNYCEDSFCNDKDSLSQFWEFSETTASTVSTTLHCPTCVALGTCFSAPSLPCPNGTTRCYQGKLEITGGGIESSVEVKGCTAMIGCRLMSGILAVGPMFVREACPHQLLTQPRKTENGATCLPIPVWGLQLLLPLLLPSFIHFS

SEQ ID NO: 87722 - protein, 940 aa, Homo sapiens
  Payload ID: 17552
  Gene Symbol: TEX11
  Gene Name: testis expressed 11
  Uniprot ID: Q8IYF3
  ENSP ID: ENSP00000340995
MISAHCNLRLLCSSDSSASASQVAGTTEVVENLVTNDNSPNIPEAIDRLFSDIANINRESMAEITDIQIEEMAVNLWNWALTIGGGWLVNEEQKIRLHYVACKLLSMCEASFASEQSIQRLIMMNMRIGKEWLDAGNFLIADECFQAAVASLEQLYVKLIQRSSPEADLTMEKITVESDHFRVLSYQAESAVAQGDFQRASMCVLQCKDMLMRLPQMTSSLHHLCYNFGVETQKNNKYEESSFWLSQSYDIGKMDKKSTGPEMLAKVLRLLATNYLDWDDTKYYDKALNAVNLANKEHLSSPGLFLKMKILLKGETSNEELLEAVMEILHLDMPLDFCLNIAKLLMDHERESVGFHFLTIIHERFKSSENIGKVLILHTDMLLQRKEELLAKEKIEEIFLAHQTGRQLTAESMNWLHNILWRQAASSFEVQNYTDALQWYYYSLRFYSTDEMDLDFTKLQRNMACCYLNLQQLDKAKEAVAEAERHDPRNVFTQFYIFKIAVIEGNSERALQAIITLENILTDEESEDNDLVAERGSPTMLLSLAAQFALENGQQIVAEKALEYLAQHSEDQEQVLTAVKCLLRFLLPKIAEMPESEDKKKEMDRLLTCLNRAFVKLSQPFGEEALSLESRANEAQWFRKTAWNLAVQCDKDPVMMREFFILSYKMSQFCPSDQVILIARKTCLLMAVAVDLEQGRKASTAFEQTMFLSRALEEIQTCNDIHNFLKQTGTFSNDSCEKLLLLYEFEVRAKLNDPLLESFLESVWELPHLETKTFETIAIIAMEKPAHYPLIALKALKKALLLYKKEEPIDISQYSKCMHNLVNLSVPDGASNVELCPLEEVWGYFEDALSHISRTKDYPEMEILWLMVKSWNTGVLMFSRSKYASAEKWCGLALRFLNHLTSFKESYETQMNMLYSQLVEALSNNKGPVFHEHGYWSKSD

SEQ ID NO: 87723 - protein, 615 aa, Homo sapiens
  Payload ID: 17552
  Gene Symbol: TEX11
  Gene Name: testis expressed 11
  Uniprot ID: Q8IYF3
  ENSP ID: ENSP00000363440
MEILHLDMPLDFCLNIAKLLMDHERESVGFHFLTIIHERFKSSENIGKVLILHTDMLLQRKEELLAKEKIEEIFLAHQTGRQLTAESMNWLHNILWRQAASSFEVQNYTDALQWYYYSLRFYSTDEMDLDFTKLQRNMACCYLNLQQLDKAKEAVAEAERHDPRNVFTQFYIFKIAVIEGNSERALQAIITLENILTDEESEDNDLVAERGSPTMLLSLAAQFALENGQQIVAEKALEYLAQHSEDQEQVLTAVKCLLRFLLPKIAEMPESEDKKKEMDRLLTCLNRAFVKLSQPFGEEALSLESRANEAQWFRKTAWNLAVQCDKDPVMMREFFILSYKMSQFCPSDQVILIARKTCLLMAVAVDLEQGRKASTAFEQTMFLSRALEEIQTCNDIHNFLKQTGTFSNDSCEKLLLLYEFEVRAKLNDPLLESFLESVWELPHLETKTFETIAIIAMEKPAHYPLIALKALKKALLLYKKEEPIDISQYSKCMHNLVNLSVPDGASNVELCPLEEVWGYFEDALSHISRTKDYPEMEILWLMVKSWNTGVLMFSRSKYASAEKWCGLALRFLNHLTSFKESYETQMNMLYSQLVEALSNNKGPVFHEHGYWSKSD

SEQ ID NO: 87724 - protein, 925 aa, Homo sapiens
  Payload ID: 17552
  Gene Symbol: TEX11
  Gene Name: testis expressed 11
  Uniprot ID: Q8IYF3
  ENSP ID: ENSP00000363453
MDNDDFFSMDFKEVVENLVTNDNSPNIPEAIDRLFSDIANINRESMAEITDIQIEEMAVNLWNWALTIGGGWLVNEEQKIRLHYVACKLLSMCEASFASEQSIQRLIMMNMRIGKEWLDAGNFLIADECFQAAVASLEQLYVKLIQRSSPEADLTMEKITVESDHFRVLSYQAESAVAQGDFQRASMCVLQCKDMLMRLPQMTSSLHHLCYNFGVETQKNNKYEESSFWLSQSYDIGKMDKKSTGPEMLAKVLRLLATNYLDWDDTKYYDKALNAVNLANKEHLSSPGLFLKMKILLKGETSNEELLEAVMEILHLDMPLDFCLNIAKLLMDHERESVGFHFLTIIHERFKSSENIGKVLILHTDMLLQRKEELLAKEKIEEIFLAHQTGRQLTAESMNWLHNILWRQAASSFEVQNYTDALQWYYYSLRFYSTDEMDLDFTKLQRNMACCYLNLQQLDKAKEAVAEAERHDPRNVFTQFYIFKIAVIEGNSERALQAIITLENILTDEESEDNDLVAERGSPTMLLSLAAQFALENGQQIVAEKALEYLAQHSEDQEQVLTAVKCLLRFLLPKIAEMPESEDKKKEMDRLLTCLNRAFVKLSQPFGEEALSLESRANEAQWFRKTAWNLAVQCDKDPVMMREFFILSYKMSQFCPSDQVILIARKTCLLMAVAVDLEQGRKASTAFEQTMFLSRALEEIQTCNDIHNFLKQTGTFSNDSCEKLLLLYEFEVRAKLNDPLLESFLESVWELPHLETKTFETIAIIAMEKPAHYPLIALKALKKALLLYKKEEPIDISQYSKCMHNLVNLSVPDGASNVELCPLEEVWGYFEDALSHISRTKDYPEMEILWLMVKSWNTGVLMFSRSKYASAEKWCGLALRFLNHLTSFKESYETQMNMLYSQLVEALSNNKGPVFHEHGYWSKSD

SEQ ID NO: 87725 - protein, 940 aa, Homo sapiens; identical to SEQ ID NO: 87722
  Payload ID: 17552
  Gene Symbol: TEX11
  Gene Name: testis expressed 11
  Uniprot ID: Q8IYF3
  ENSP ID: ENSP00000379226

SEQ ID NO: 87726 - protein, 123 aa, Homo sapiens
  Payload ID: 17553
  Gene Symbol: TEX12
  Gene Name: testis expressed 12
  Uniprot ID: Q9BXU0
  ENSP ID: ENSP00000280358
MMANHLVKPDNRNCKRPRELESPVPDSPQLSSLGKSDSSFSEISGLFYKDEALEKDLNDVSKEINLMLSTYAKLLSERAAVDASYIDEIDELFKEANAIENFLIQKREFLRQRFTVIANTLHR

SEQ ID NO: 87727 - protein, 123 aa, Homo sapiens; identical to SEQ ID NO: 87726
  Payload ID: 17553
  Gene Symbol: TEX12
  Gene Name: testis expressed 12
  Uniprot ID: Q9BXU0
  ENSP ID: ENSP00000436893

SEQ ID NO: 87728 - protein, 409 aa, Homo sapiens
  Payload ID: 17554
  Gene Symbol: TEX13A
  Gene Name: testis expressed 13A
  Uniprot ID: Q9BXU3
  ENSP ID: ENSP00000471604
MALRPEDPSSGFRHSNVVAFINEKMARHTKGPEFYLENISLSWEKVEDKLRAILEDSEVPSEVKEACTWGSLALGVRFAHRQAQLQRHRVRWLHGFAKLHKSAAQALASDLKKLREQQETERKEAASRLRMAQTSLVEVQKERDKELVSPHEWEQGAGWPGLATAGGVCTEGAAEEEEEAAVAAAGAAGGKGAEEEQRDVEVVAAPVEAMAPPVEAGAAPMETQFPHVEARAASMETTEKLERILLQLLGDADQEKYTYWGQKEGDLRSVETATSYFSGTTNPWSRASSEPLPVQLPASYSYSYSSPFSSFSDIPTISPPQATVTAPVPPQLPSDWEAFDTSLWSDGGPHRIDHQEHPRDRRYSEPHQQRPPVYRRPGDWDCPWCNAVNFSRRDTCFDCGKGIWLQKPH

SEQ ID NO: 87729 - protein, 409 aa, Homo sapiens; identical to SEQ ID NO: 87728
  Payload ID: 17554
  Gene Symbol: TEX13A
  Gene Name: testis expressed 13A
  Uniprot ID: Q9BXU3
  ENSP ID: ENSP00000477478

SEQ ID NO: 87730 - protein, 312 aa, Homo sapiens
  Payload ID: 17555
  Gene Symbol: TEX13B
  Gene Name: testis expressed 13B
  Uniprot ID: Q9BXU2
  ENSP ID: ENSP00000303777
MALRPEDPSSGFRHGNVVAFIIEKMARHTKGPEFYFENISLSWEEVEDKLRAILEDSEVPSEVKEACTWGSLALGVRFAHRQGQLQNRRVQWLQGFAKLHRSAALVLASNLTELKEQQEMECNEATFQLQLTETSLAEVQRERDMLRWKLFHAELAPPQGQGQATVFPGLATAGGDWTEGAGEQEKEAVAAAGAAGGKGEERYAEAGPAPAEVLQGLGGGFRQPLGAIVAGKLHLCGAEGERSQVSTNSHVCLLWAWVHSLTGASSCPAPYLIHILIPMPFVRLLSHTQYTPFTSKGHRTGSNSDAFQLGGL

SEQ ID NO: 87731 - protein, 1497 aa, Homo sapiens
  Payload ID: 17556
  Gene Symbol: TEX14
  Gene Name: testis expressed 14
  Uniprot ID: Q8IWB6
  ENSP ID: ENSP00000240361
MSRAVRLPVPCPVQLGTLRNDSLEAQLHEYVKQGNYVKVKKILKKGIYVDAVNSLGQTALFVAALLGLRKFVDVLVDYGSDPNHRCFDGSTPVHAAAFSGNQWILSKLLDAGGDLRLHDERGQNPKTWALTAGKERSTQIVEFMQRCASHMQAIIQGFSYDLLKKIDSPQRLVYSPSWCGGLVQGNPNGSPNRLLKAGVISAQNIYSFGFGKAMPWFQFYLTGATQMAYLGSLPVIGEKEVIQADDEPTFSFFSGPYMVMTNLVWNGSRVTVKELNLPTHPHCSRLRLADLLIAEQEHSSKLRHPYLLQLMAVCLSQDLEKTRLVYERITIGTLFSVLHERRSQFPVLHMEVIVHLLLQISDALRYLHFQGFIHRSLSSYAVHIISPGEARLTNLEYMLESEDRGVQRDLTRVPLPTQLYNWAAPEVILQKAATVKSDIYSFSMIMQEILTDDIPWKGLDGSVVKKAVVSGNYLEADVRLPKPYYDIVKSGIHVKQKDRTMNLQDIRYILKNDLKDFTGAQRTQPTESPRVQRYGLHPDVNVYLGLTSEHPRETPDMEIIELKEMGSQPHSPRVHSLFTEGTLDPQAPDPCLMARETQNQDAPCPAPFMAEEASSPSTGQPSLCSFEINEIYSGCLILEDDIEEPPGAASSLEADGPNQVDELKSMEEELDKMEREACCFGSEDESSSKAETEYSFDDWDWQNGSLSSLSLPESTREAKSNLNNMSTTEEYLISKCVLDLKIMQTIMHENDDRLRNIEQILDEVEMKQKEQEERMSLWATSREFTNAYKLPLAVGPPSLNYIPPVLQLSGGQKPDTSGNYPTLPRFPRMLPTLCDPGKQNTDEQFQCTQGAKDSLETSRIQNTSSQGRPRESTAQAKATQFNSALFTLSSHRQGPSASPSCHWDSTRMSVEPVSSEIYNAESRNKDDGKVHLKWKMEVKEMAKKAATGQLTVPPWHPQSSLTLESEAENEPDALLQPPIRSPENTDWQRVIEYHRENDEPRGNGKFDKTGNNDCDSDQHGRQPRLGSFTSIRHPSPRQKEQPEHSEAFQASSDTLVAVEKSYSHQSMQSTCSPESSEDITDEFLTPDGEYFYSSTAQENLALETSSPIEEDFEGIQGAFAQPQVSGEEKFQMRKILGKNAEILPRSQFQPVRSTEDEQEETSKESPKELKEKDISLTDIQDLSSISYEPDSSFKEASCKTPKINHAPTSVSTPLSPGSVSSAASQYKDCLESITFQVKTEFASCWNSQEFIQTLSDDFISVRERAKKLDSLLTSSETPPSRLTGLKRLSSFIGAGSPSLVKACDSSPPHATQRRSLPKVEAFSQHHIDELPPPSQELLDDIELLKQQQGSSTVLHENTASDGGGTANDQRHLEEQETDSKKEDSSMLLSKETEDLGEDTERAHSTLDEDLERWLQPPEESVELQDLPKGSERETNIKDQKVGEEKRKREDSITPERRKSEGVLGTSEEDELKSCFWKRLGWSESSRIIVLDQSDLSD

SEQ ID NO: 87732 - protein, 1451 aa, Homo sapiens
  Payload ID: 17556
  Gene Symbol: TEX14
  Gene Name: testis expressed 14
  Uniprot ID: Q8IWB6
  ENSP ID: ENSP00000268910
MSRAVRLPVPCPVQLGTLRNDSLEAQLHEYVKQGNYVKVKKILKKGIYVDAVNSLGQTALFVAALLGLRKFVDVLVDYGSDPNHRCFDGSTPVHAAAFSGNQWILSKLLDAGGDLRLHDERGQNPKTWALTAGKERSTQIVEFMQRCASHMQAIIQGFSYDLLKKIDSPQRLVYSPSWCGGLVQGNPNGSPNRLLKAGVISAQNIYSFGFGKFYLTGATQMAYLGSLPVIGEKEVIQADDEPTFSFFSGPYMVMTNLVWNGSRVTVKELNLPTHPHCSRLRLADLLIAEQEHSSKLRHPYLLQLMAVCLSQDLEKTRLVYERITIGTLFSVLHERRSQFPVLHMEVIVHLLLQISDALRYLHFQGFIHRSLSSYAVHIISPGEARLTNLEYMLESEDRGVQRDLTRVPLPTQLYNWAAPEVILQKAATVKSDIYSFSMIMQEILTDDIPWKGLDGSVVKKAVVSGNYLEADVRLPKPYYDIVKSGIHVKQKDRTMNLQDIRYILKNDLKDFTGAQRTQPTESPRVQRYGLHPDVNVYLGLTSEHPRETPDMEIIELKEMGSQPHSPRVHSLFTEGTLDPQAPDPCLMARETQNQDAPCPAPFMAEEASSPSTGQPSLCSFEINEIYSGCLILEDDIEEPPGAASSLEADGPNQVDELKSMEEELDKMEREACCFGSEDESSSKAETEYSFDDWDWQNGSLSSLSLPESTREAKSNLNNMSTTEEYLISKCVLDLKIMQTIMHENDDRLRNIEQILDEVEMKQKEQEERMSLWATSREFTNAYKLPLAVGPPSLNYIPPVLQLSGGQKPDTSGNYPTLPRFPRMLPTLCDPGKQNTDEQFQCTQGAKDSLETSRIQNTSSQGRPRESTAQAKATQFNSALFTLSSHRQGPSASPSCHWDSTRMSVEPVSSEIYNAESRNKDDGKVHLKWKMEVKEMAKKAATGQLTVPPWHPQSSLTLESEAENEPDALLQPPIRSPENTDWQRVIEYHRENDEPRGNGKFDKTGNNDCDSDQHGRQPRLGSFTSIRHPSPRQKEQPEHSEAFQASSDTLVAVEKSYSTSSPIEEDFEGIQGAFAQPQVSGEEKFQMRKILGKNAEILPRSQFQPVRSTEDEQEETSKESPKELKEKDISLTDIQDLSSISYEPDSSFKEASCKTPKINHAPTSVSTPLSPGSVSSAASQYKDCLESITFQVKTEFASCWNSQEFIQTLSDDFISVRERAKKLDSLLTSSETPPSRLTGLKRLSSFIGAGSPSLVKACDSSPPHATQRRSLPKVEAFSQHHIDELPPPSQELLDDIELLKQQQGSSTVLHENTASDGGGTANDQRHLEEQETDSKKEDSSMLLSKETEDLGEDTERAHSTLDEDLERWLQPPEESVELQDLPKGSERETNIKDQKVGEEKRKREDSITPERRKSEGVLGTSEEDELKSCFWKRLGWSESSRIIVLDQSDLSD

SEQ ID NO: 87733 - protein, 1491 aa, Homo sapiens
  Payload ID: 17556
  Gene Symbol: TEX14
  Gene Name: testis expressed 14
  Uniprot ID: Q8IWB6
  ENSP ID: ENSP00000374584
MSRAVRLPVPCPVQLGTLRNDSLEAQLHEYVKQGNYVKVKKILKKGIYVDAVNSLGQTALFVAALLGLRKFVDVLVDYGSDPNHRCFDGSTPVHAAAFSGNQWILSKLLDAGGDLRLHDERGQNPKTWALTAGKERSTQIVEFMQRCASHMQAIIQGFSYDLLKKIDSPQRLVYSPSWCGGLVQGNPNGSPNRLLKAGVISAQNIYSFGFGKFYLTGATQMAYLGSLPVIGEKEVIQADDEPTFSFFSGPYMVMTNLVWNGSRVTVKELNLPTHPHCSRLRLADLLIAEQEHSSKLRHPYLLQLMAVCLSQDLEKTRLVYERITIGTLFSVLHERRSQFPVLHMEVIVHLLLQISDALRYLHFQGFIHRSLSSYAVHIISPGEARLTNLEYMLESEDRGVQRDLTRVPLPTQLYNWAAPEVILQKAATVKSDIYSFSMIMQEILTDDIPWKGLDGSVVKKAVVSGNYLEADVRLPKPYYDIVKSGIHVKQKDRTMNLQDIRYILKNDLKDFTGAQRTQPTESPRVQRYGLHPDVNVYLGLTSEHPRETPDMEIIELKEMGSQPHSPRVHSLFTEGTLDPQAPDPCLMARETQNQDAPCPAPFMAEEASSPSTGQPSLCSFEINEIYSGCLILEDDIEEPPGAASSLEADGPNQVDELKSMEEELDKMEREACCFGSEDESSSKAETEYSFDDWDWQNGSLSSLSLPESTREAKSNLNNMSTTEEYLISKCVLDLKIMQTIMHENDDRLRNIEQILDEVEMKQKEQEERMSLWATSREFTNAYKLPLAVGPPSLNYIPPVLQLSGGQKPDTSGNYPTLPRFPRMLPTLCDPGKQNTDEQFQCTQGAKDSLETSRIQNTSSQGRPRESTAQAKATQFNSALFTLSSHRQGPSASPSCHWDSTRMSVEPVSSEIYNAESRNKDDGKVHLKWKMEVKEMAKKAATGQLTVPPWHPQSSLTLESEAENEPDALLQPPIRSPENTDWQRVIEYHRENDEPRGNGKFDKTGNNDCDSDQHGRQPRLGSFTSIRHPSPRQKEQPEHSEAFQASSDTLVAVEKSYSHQSMQSTCSPESSEDITDEFLTPDGEYFYSSTAQENLALETSSPIEEDFEGIQGAFAQPQVSGEEKFQMRKILGKNAEILPRSQFQPVRSTEDEQEETSKESPKELKEKDISLTDIQDLSSISYEPDSSFKEASCKTPKINHAPTSVSTPLSPGSVSSAASQYKDCLESITFQVKTEFASCWNSQEFIQTLSDDFISVRERAKKLDSLLTSSETPPSRLTGLKRLSSFIGAGSPSLVKACDSSPPHATQRRSLPKVEAFSQHHIDELPPPSQELLDDIELLKQQQGSSTVLHENTASDGGGTANDQRHLEEQETDSKKEDSSMLLSKETEDLGEDTERAHSTLDEDLERWLQPPEESVELQDLPKGSERETNIKDQKVGEEKRKREDSITPERRKSEGVLGTSEEDELKSCFWKRLGWSESSRIIVLDQSDLSD

SEQ ID NO: 87734 - protein, 152 aa, Homo sapiens
  Payload ID: 17556
  Gene Symbol: TEX14
  Gene Name: testis expressed 14
  ENSP ID: ENSP00000463243
  MOD_RES (1)..(1): Any amino acid
XKEASCKTPKINHAPTSVSTPLSPGSVSSAASQYKDCLESITFQVKTEFASCWNSQEFIQTLSDDFISVRERAKKLDSLLTSSETPPSRLTGLKRLSSFIGAGSPSLVKACDSSPPHATQRRSLPKVEAFSQHHIDELPPPSQELLDDIVAV

SEQ ID NO: 87735 - protein, 66 aa, Homo sapiens
  Payload ID: 17556
  Gene Symbol: TEX14
  Gene Name: testis expressed 14
  ENSP ID: ENSP00000463593
MSRAVRLPVPCPVQLGTLRNDSLEAQLHEYVKQGNYVKVKKILKKALELPQTALRSEEEWRSKEEN

SEQ ID NO: 87736 - protein, 2789 aa, Homo sapiens
  Payload ID: 17557
  Gene Symbol: TEX15
  Gene Name: testis expressed 15
  Uniprot ID: Q9BXT5
  ENSP ID: ENSP00000256246
MPSDAKDSVNGDLLLNWTSLKNILSGLNASFPLHNNTGSSTVTTSKSIKDPRLMRREESMGEQSSTAGLNEVLQFEKSSDNVNSEIKSTPSNSASSSEVVPGDCAVLTNGLDTPCFKTSVNDSQSWAHNMGSEDYDCIPPNKVTMAGQCKDQGNFSFPISVSNVVSEVENQNHSEEKAQRAQQESGNAYTKEYSSHIFQDSQSSDLKTIYQTGCQTSTVFPLKKKVSIDEYLQNTGKMKNFADLEDSSKHEEKQTSWKEIDNDFTNETKISPIDNYIVLHQEYKESESHNSFGKSCDKILITQELEITKSSTSTIKDKDELDHLALEWQITPSFESLSQKHPQHSVEYEGNIHTSLAIAQKLMELKLGKINQNYASIITEAFPKPKDIPQAKEMFIDTVISSYNIETAHDSSNCSITREHICVHRKNENEPVSLENIQRDYKETAYVEDRGQDHNLFCNSQLSNDIWLNVNFKKQTDRENQNEAKENSASCVENNIENIYGDKKQDSHTNENFSNIDEKEDKNYHNIEILSSEEFSTKFNLICREDNAVSAATALLESEEDTISAVKQKDTENTGRSVEHLASTTFPKTASSSVCVASNAAIQIASATMPALSLNNDDHQIYQFKETCSSESPDFGLLVKHRVSDCEIDTDKNKSQESFHQSINENLVLQSIELESEIEIELEDCDDAFIFQQDTHSHENMLCEEFVTSYKALKSRISWEGLLALDNGEMEVLESTTGRENSDQHYSKESNYFYSSTQNNETELTSPILLPDLQIKITNIFRPGFSPTADSLALKDSFCTHVTEATKPEINKEDGEILGFDIYSQPFGENADYPCEDKVDNIRQESGPVSNSEISLSFDLSRNTDVNHTSENQNSESLFTEPSNVTTIDDGSRCFFTKSKTDYNDTKNKKEVESRISKRKLHISSRDQNIPHKDLRRHKIYGRKRRLTSQDSSECFSSLSQGRIKTFSQSEKHIKSVLNILSDEASLCKSKCLSRKLDKAVVHLKKAHRRVHTSLQLITKVGEERKGPLPKSYAIICNNFWESCDLQGYSSVSQRKYYSTKHFSSKRKYDKRRKKRAPKADISKSLTHVSKHKSYKTSGEKKCLSRKSMASSVSKSHPTTSHMGEFCNQEHPESQLPVSSTSQSTSQSVYYNSSVSNPSLSEEHQPFSGKTAYLFSPDHSDEKLIEKENQIDTAFLSSTSKYEKLEKHSANHNVKDATKENSCDANEVINESNSVSLSCIKENINSSTGNDCDATCIGHTKAKTDVLISVLDSNVKHFLNDLYQQGNLILSDCKRNLEVKWTDPIERPKQNIITGNFLMGPLNLTLIASKKYSIPQLSAAAVTDSEGESSKSYLDKQRILTVDSFAASSTVPHCEQSCREKELLKTEQCSSGNCLHTDGNETNVTENYELDVASGTEEDKSYGENIVELSSSDSSLLLKDNVKGSSSETCIVKKDTEDRITWKVKQAEKAKDSVYKRSMTEGSTVNTEYKNQKNQISEESCLNEKIITTNLIDSHLSTKNTTTESVPLKNTVSNPLNKREKKGEIKVSKDSQSDLTLHSEIAYISKPGILGVNHTPILPAHSETCKVPTLLKKPASYVSDFKEKHCSANHTALIANLSQILQRADEASSLQILQEETKVCLNILPLFVEAFERKQECSVEQILISRELLVDQNLWNNCKHTLKPCAVDTLVELQMMMETIQFIENKKRHLEGEPTLRSLLWYDETLYAELLGKPRGFQQQSNFYPGFQGRLKYNAFCELQTYHDQLVELLEETKREKNSYYVFLKYKRQVNECEAIMEHCSDCFDFSLSVPFTCGVNFGDSLEDLEILRKSTLKLINVCGDSPKVHSYPGKQDHLWIIIEMISSKVNFIKNNEAVRVKISLYGLEHIFFDAAKNLVWKERTQSFSKKYSQKKDEERLLRVNKCAFSKLQKIYDTLSKDLNNEPISPIGLEEDTIIASRKSDHPINEATISIENSKFNSNLLAHPDICCISEILDQAEFADLKKLQDLTLRCTDHLEILKKYFQMLQDNNMDNIFITEENVLDVVINHSHEAIILKPEAIEMYIEIVMVSETIHFLKNSIAKKLDKQRFRGMLWFDLSLLPELVQCQEKMASFSFLKDNSTDVCLWKVIETAVSELKKDLDIICKYNEAVNCSYAIHLLSRELQELSEIKKLLKKSKYFISTYIDFVPYIASINYGSTVTELEYNYNQFSTLLKNVMSAPRKDLGKMAHIRKVMKTIEHMKMICTKNAELTISFFLCQMLYNRRKILQLKRKEKMNIHIVKPGENNNKFSISTMLPPVSECINKNISNSSKKRPSTVDKCEDSQEQQQDTTVSSCKKLKVDMKDVTKINREKATFKHPRTTGSHPKSENKIVPSSCDSLKRNHLTPKKVEMQRSLPGSLLPLENPKDTCASKSESKIDLTVSSDHFSGQQENLNSMKKRNVNFSAAETKSDKKDCAAFAICDQKSVHGTFSPDHGTLLQKFLKNSPDPTQKSCLSDINPETDVSLVPDASVLSKPIFCFVKDVHPDLEMNDTVFELQDNDIVNSSIKNSSCMTSPEPICIQNKIPTLQINKLQPTETESEDKYMKDTLNPNTVHTFGASGHITLNVNQGAEYSLSEQQNDKNSKVLMQNAATYWNELPQSACNPTYNSSEHLFGTSYPYSAWCVYQYSNSNGNAITQTYQGITSYEVQPSPSGLLTTVASTAQGTHSNLLYSQYFTYFAGEPQANGFVPVNGYFQSQIPASNFRQPIFSQYASHQPLPQATYPYLPNRFVPPEVPWVYAPWHQESFHPGH

SEQ ID NO: 87737 - protein, 164 aa, Homo sapiens
  Payload ID: 17558
  Gene Symbol: TEX19
  Gene Name: testis expressed 19
  Uniprot ID: Q8NA77
  ENSP ID: ENSP00000331500
MCPPVSMRYEEEGMSYLYASWMYQLQHGDQLSICFTCFKAAFLDFKDLLESEDWEEDNWDPELMEHTEAESEQEGSSGMELSWGQSPGQPVQGGSEAWGPGTLAAAPEGLEDAGLDPHFVPTELWPQEAVPLGLGLEDADWTQGLPWRFEELLTCSHWPSFFPS

SEQ ID NO: 87738 - protein, 1134 aa, Homo sapiens
  Payload ID: 17559
  Gene Symbol: TEX2
  Gene Name: testis expressed 2
  Uniprot ID: Q8IWB9
  ENSP ID: ENSP00000258991
MTSLYGRHAEKTTDMPKPSAPKVHVQRSVSRDTIAIHFSASGEEEEEEEEEFREYFEEGLDDQSIVTGLEAKEDLYLEPQVGHDPAGPAASPVLADGLSVSQAPAILPVSKNTVKLLESPVPAAQVLSTVPLAVSPGSSSSGPLASSPSVSSLSEQKTSSSSPLSSPSKSPILSSSASTSTLSSAKPFMSLVKSLSTEVEPKESPHPARHRHLMKTLVKSLSTDTSRQESDTVSYKPPDSKLNLHLFKQFTQPRNTGGDSKTAPSSPLTSPSDTRSFFKVPEMEAKIEDTKRRLSEVIYEPFQLLSKIIGEESGSHRPKALSSSASELSNLSSLNGHLESNNNYSIKEEECDSEGDGYGSDSNIPRSDHPKSTGEPTREIELKSSQGSSLKDLGLKTSSLVLEKCSLSALVSKEDEEFCELYTEDFDLETEGESKVDKLSDIPLKPEVLAEDGVVLDSEDEVDSAVQHPELPVKTLGFFIMCVYVYLILPLPHYVSGLFLGIGLGFMTAVCVIWFFTPPSAHKYHKLHKNLRHWNTRSLDIKEPEILKGWMNEIYNYDPETYHATLTHSVFVRLEGGTLRLSKPNKNISRRASYNEPKPEVTYISQKIYDLSDSKIYLVPKTLARKRIWNKKYPICIELGQQDDFMSKAQTDKETSEEKPPAEGSEDPKKPPRPQEGTRSSQRDQILYLFGRTGREKEEWFRRFILASKLKSEIKKSSGVSGGKPAPVFLAPGLLPAHSRHNSPSGHLTHSRSSSKGSVEEIMSQPKQKELAGSVRQKMLLDYSVYMGRCVPQESRSPQRSPLQSAESSPTAGKKLPEVPPSEEEEQEAWVNALLGRIFWDFLGEKYWSDLVSKKIQMKLSKIKLPYFMNELTLTELDMGVAVPKILQAFKPYVDHQGLWIDLEMSYNGSFLMTLETKMNLTKLGKEPLVEALKVGEIGKEGCRPRAFCLADSDEESSSAGSSEEDDAPEPSGGDKQLLPGAEGYVGGHRTSKIMRFVDKITKSKYFQKATETEFIKKKIEEVSNTPLLLTVEVQECRGTLAVNIPPPPTDRVWYGFRKPPHVELKARPKLGEREVTLVHVTDWIEKKLEQEFQKVFVMPNMDDVYITIMHSAMDPRSTSCLLKDPPVEAADQP

SEQ ID NO: 87739 - protein, 42 aa, Homo sapiens
  Payload ID: 17559
  Gene Symbol: TEX2
  Gene Name: testis expressed 2
  ENSP ID: ENSP00000462210
MTSLYGRHAEKTTDMPKPSAPKVHVQRSVSRDTIAIHFSASG

SEQ ID NO: 87740 - protein, 626 aa, Homo sapiens
  Payload ID: 17559
  Gene Symbol: TEX2
  Gene Name: testis expressed 2
  ENSP ID: ENSP00000462230
  MOD_RES (1)..(1): Any amino acid
XGIGLGFMTAVCVIWFFTPPSAHKYHKLHKNLRHWNTRSLDIKEPEILKGWMNEIYNYDPETYHATLTHSVFVRLEGGTLRLSKPNKNISRRASYNEPKPEVTYISQKIYDLSDSKIYLVPKTLARKRIWNKKYPICIELGQQDDFMSKAQTDKETSEEKPPAEGSEDPKKPPRPQEGTRSSQRDQILYLFGRTGREKEEWFRRFILASKLKSEIKKSSGVSGGKPGLLPAHSRHNSPSGHLTHSRSSSKGSVEEIMSQPKQKELAGSVRQKMLLDYSVYMGRCVPQESRSPQRSPLQSAESSPTAGKKLPEVPPSEEEEQEAWVNALLGRIFWDFLGEKYWSDLVSKKIQMKLSKIKLPYFMNELTLTELDMGVAVPKILQAFKPYVDHQGLWIDLEMSYNGSFLMTLETKMNLTKLGKEPLVEALKVGEIGKEGPRAFCLADSDEESSSAGSSEEDDAPEPSGGDKQLLPGAEGYVGGHRTSKIMRFVDKITKSKYFQKATETEFIKKKIEEVSNTPLLLTVEVQECRGTLAVNIPPPPTDRVWYGFRKPPHVELKARPKLGEREVTLVHVTDWIEKKLEQEFQKVFVMPNMDDVYITIMHSAMDPRSTSCLLKDPPVEAADQP

SEQ ID NO: 87741 - protein, 1127 aa, Homo sapiens
  Payload ID: 17559
  Gene Symbol: TEX2
  Gene Name: testis expressed 2
  Uniprot ID: Q8IWB9
  ENSP ID: ENSP00000462665
MTSLYGRHAEKTTDMPKPSAPKVHVQRSVSRDTIAIHFSASGEEEEEEEEEFREYFEEGLDDQSIVTGLEAKEDLYLEPQVGHDPAGPAASPVLADGLSVSQAPAILPVSKNTVKLLESPVPAAQVLSTVPLAVSPGSSSSGPLASSPSVSSLSEQKTSSSSPLSSPSKSPILSSSASTSTLSSAKPFMSLVKSLSTEVEPKESPHPARHRHLMKTLVKSLSTDTSRQESDTVSYKPPDSKLNLHLFKQFTQPRNTGGDSKTAPSSPLTSPSDTRSFFKVPEMEAKIEDTKRRLSEVIYEPFQLLSKIIGEESGSHRPKALSSSASELSNLSSLNGHLESNNNYSIKEEECDSEGDGYGSDSNIPRSDHPKSTGEPTREIELKSSQGSSLKDLGLKTSSLVLEKCSLSALVSKEDEEFCELYTEDFDLETEGESKVDKLSDIPLKPEVLAEDGVVLDSEDEVDSAVQHPELPVKTLGFFIMCVYVYLILPLPHYVSGLFLGIGLGFMTAVCVIWFFTPPSAHKYHKLHKNLRHWNTRSLDIKEPEILKGWMNEIYNYDPETYHATLTHSVFVRLEGGTLRLSKPNKNISRRASYNEPKPEVTYISQKIYDLSDSKIYLVPKTLARKRIWNKKYPICIELGQQDDFMSKAQTDKETSEEKPPAEGSEDPKKPPRPQEGTRSSQRDQILYLFGRTGREKEEWFRRFILASKLKSEIKKSSGVSGGKPGLLPAHSRHNSPSGHLTHSRSSSKGSVEEIMSQPKQKELAGSVRQKMLLDYSVYMGRCVPQESRSPQRSPLQSAESSPTAGKKLPEVPPSEEEEQEAWVNALLGRIFWDFLGEKYWSDLVSKKIQMKLSKIKLPYFMNELTLTELDMGVAVPKILQAFKPYVDHQGLWIDLEMSYNGSFLMTLETKMNLTKLGKEPLVEALKVGEIGKEGCRPRAFCLADSDEESSSAGSSEEDDAPEPSGGDKQLLPGAEGYVGGHRTSKIMRFVDKITKSKYFQKATETEFIKKKIEEVSNTPLLLTVEVQECRGTLAVNIPPPPTDRVWYGFRKPPHVELKARPKLGEREVTLVHVTDWIEKKLEQEFQKVFVMPNMDDVYITIMHSAMDPRSTSCLLKDPPVEAADQP

SEQ ID NO: 87742 - protein, 1127 aa, Homo sapiens; identical to SEQ ID NO: 87741
  Payload ID: 17559
  Gene Symbol: TEX2
  Gene Name: testis expressed 2
  Uniprot ID: Q8IWB9
  ENSP ID: ENSP00000463001

SEQ ID NO: 87743 - protein, 52 aa, Homo sapiens
  Payload ID: 17559
  Gene Symbol: TEX2
  Gene Name: testis expressed 2
  ENSP ID: ENSP00000463286
MTSLYGRHAEKTTDMPKPSAPKVHVQRSVSRDTIAIHFSASGEEEEEEEEEF

SEQ ID NO: 87744 - protein, 1127 aa, Homo sapiens [sequence omitted]

SEQ ID NO: 87745 - protein, 150 aa, Homo sapiens
  Payload ID: 17560
  Gene Symbol: TEX22
  Gene Name: testis expressed 22
  Uniprot ID: C9J3V5
  ENSP ID: ENSP00000397002
MDSRKLSPRGKKLESHLSQEHRRPPLGLIAAWGQPSIQSSVQQGLQTQDWVCEPPERRRPGRRWSVSIDERRRLATLGGRERPGAAGTQLHCRDVVQMVAQLVSEDVDKDVLLPHPLRSTESTNAFQAFLARSAPFWHNATFEASRSPPS

SEQ ID NO: 87746 - protein, 63 aa, Homo sapiens
  Payload ID: 17560
  Gene Symbol: TEX22
  Gene Name: testis expressed 22
  ENSP ID: ENSP00000449736
MDSRKLSPRGKKLESHLSQEHRRPPLGLIAAWGQPSIQSSVQQGLQTQDWTTSTLRTPPATHT

SEQ ID NO: 87747 - protein, 289 aa, Homo sapiens
  Payload ID: 17561
  Gene Symbol: TEX26
  Gene Name: testis expressed 26
  Uniprot ID: Q8N6G2
  ENSP ID: ENSP00000369840
MEQPGPRAPDPSLCHHNLQPTDDPNWDSYATTMRTAFTPKTGAVPALIRQNGIRRLGYTYSLSDPILNQTQYSDEYTWKSHSKEDLIKTETSRGIKSHKSHLNEDIFLWTLPHCQQTGTLKNCLPWKIPASMKEVNKALSNQFISLTKRDFVDRSKAQKIKKSSHLSLEWKKLLPQPPDTEFRRNYQIPAKIPELQDFSFKYGCYSSLPVASQGLVPSVLHSYLRNQEHTKKQTTYQSDYDKTYPDFLMLLNSFTSSQVKEYLQSLSYKDRQIIDRFIRTHCDTNKKKK

SEQ ID NO: 87748 - protein, 61 aa, Homo sapiens
  Payload ID: 17561
  Gene Symbol: TEX26
  Gene Name: testis expressed 26
  ENSP ID: ENSP00000435263
PGPRAPDPSLCHHNLQPTDDPNWDSYATTMRTAFTPKTGAVPALIRTFSCGHYLTVNKRGH

SEQ ID NO: 87749 - protein, 196 aa, Homo sapiens
  Payload ID: 17562
  Gene Symbol: TEX261
  Gene Name: testis expressed 261
  Uniprot ID: Q6UWH6
  ENSP ID: ENSP00000272438
MWFMYLLSWLSLFIQVAFITLAVAAGLYYLAELIEEYTVATSRIIKYMIWFSTAVLIGLYVFERFPTSMIGVGLFTNLVYFGLLQTFPFIMLTSPNFILSCGLVVVNHYLAFQFFAEEYYPFSEVLAYFTFCLWIIPFAFFVSLSAGENVLPSTMQPGDDVVSNYFTKGKRGKRLGILVVFSFIKEAILPSRQKIY

SEQ ID NO: 87750 - protein, 51 aa, Homo sapiens
  Payload ID: 17562
  Gene Symbol: TEX261
  Gene Name: testis expressed 261
  ENSP ID: ENSP00000410335
MWFMYLLSWLSLFIQVAFITLAVAAGLYYLAELIEEYTVATSRIIKYMIWD

SEQ ID NO: 87751 - protein, 313 aa, Homo sapiens
  Payload ID: 17563
  Gene Symbol: TEX264
  Gene Name: testis expressed 264
  Uniprot ID: Q9Y6I9
  ENSP ID: ENSP00000340969
MSDLLLLGLIGGLTLLLLLTLLAFAGYSGLLAGVEVSAGSPPIRNVTVAYKFHMGLYGETGRLFTESCSISPKLRSIAVYYDNPHMVPPDKCRCAVGSILSEGEESPSPELIDLYQKFGFKVFSFPAPSHVVTATFPYTTILSIWLATRRVHPALDTYIKERKLCAYPRLEIYQEDQIHFMCPLARQGDFYVPEMKETEWKWRGLVEAIDTQVDGTGADTMSDTSSVSLEVSPGSRETSAATLSPGASSRGWDDGDTRSEHSYSESGASGSSFEELDLEGEGPLGESRLDPGTEPLGTTKWLWEPTAPEKGKE

SEQ ID NO: 87752 - protein, 313 aa, Homo sapiens; identical to SEQ ID NO: 87751
  Payload ID: 17563
  Gene Symbol: TEX264
  Gene Name: testis expressed 264
  Uniprot ID: Q9Y6I9
  ENSP ID: ENSP00000378497

SEQ ID NO: 87753 - protein, 139 aa, Homo sapiens
  Payload ID: 17563
  Gene Symbol: TEX264
  Gene Name: testis expressed 264
  ENSP ID: ENSP00000393736
MSDLLLLGLIGGLTLLLLLTLLAFAGYSGLLAGVEVSAGSPPIRNVTVAYKFHMGLYGETGRLFTESCSISPKLRSIAVYYDNPHMVPPDKCRCAVGSILSEGEESPSPELIDLYQKFGFKVFSFPAPSHVVTATFPYT

SEQ ID NO: 87754 - protein, 313 aa, Homo sapiens; identical to SEQ ID NO: 87751
  Payload ID: 17563
  Gene Symbol: TEX264
  Gene Name: testis expressed 264
  Uniprot ID: Q9Y6I9
  ENSP ID: ENSP00000396628

SEQ ID NO: 87755 - protein, 313 aa, Homo sapiens; identical to SEQ ID NO: 87751
  Payload ID: 17563
  Gene Symbol: TEX264
  Gene Name: testis expressed 264
  Uniprot ID: Q9Y6I9
  ENSP ID: ENSP00000398802

SEQ ID NO: 87756 - protein, 151 aa, Homo sapiens
  Payload ID: 17563
  Gene Symbol: TEX264
  Gene Name: testis expressed 264
  ENSP ID: ENSP00000405783
MSDLLLLGLIGGLTLLLLLTLLAFAGYSGLLAGVEVSAGSPPIRNVTVAYKFHMGLYGETGRLFTESCSISPKLRSIAVYYDNPHMVPPDKCRCAVGSILSEGEESPSPELIDLYQKFGFKVFSFPAPSHVVTATFPYTTILSIWLATRRV

SEQ ID NO: 87757 - protein, 215 aa, Homo sapiens
  Payload ID: 17563
  Gene Symbol: TEX264
  Gene Name: testis expressed 264
  ENSP ID: ENSP00000407151
MSDLLLLGLIGGLTLLLLLTLLAFAGYSGLLAGVEVSAGSPPIRNVTVAYKFHMGLYGETGRLFTESCSISPKLRSIAVYYDNPHMVPPDKCRCAVGSILSEGEESPSPELIDLYQKFGFKVFSFPAPSHVVTATFPYTTILSIWLATRRVHPALDTYIKERKLCAYPRLEIYQEDQIHFMCPLARQGDFYVPEMKETEWKWRGLVEAIDTQVDG

SEQ ID NO: 87758 - protein, 313 aa, Homo sapiens; identical to SEQ ID NO: 87751
  Payload ID: 17563
  Gene Symbol: TEX264
  Gene Name: testis expressed 264
  Uniprot ID: Q9Y6I9
  ENSP ID: ENSP00000408186

SEQ ID NO: 87759 - protein, 104 aa, Homo sapiens
  Payload ID: 17563
  Gene Symbol: TEX264
  Gene Name: testis expressed 264
  ENSP ID: ENSP00000408989
MSDLLLLGLIGGLTLLLLLTLLAFAGYSGLLAGVEVSAGSPPIRNVTVAYKFHMGLYGETGRLFTESCSISPKLRSIAVYYDNPHMVPPDKCRCAVGSILSEGE

SEQ ID NO: 87760 - protein, 216 aa, Homo sapiens
  Payload ID: 17563
  Gene Symbol: TEX264
  Gene Name: testis expressed 264
  ENSP ID: ENSP00000415957
MSDLLLLGLIGGLTLLLLLTLLAFAGYSGLLAGVEVSAGSPPIRNVTVAYKFHMGLYGETGRLFTESCSISPKLRSIAVYYDNPHMVPPDKCRCAVGSILSEGEESPSPELIDLYQKFGFKVFSFPAPSHVVTATFPYTTILSIWLATRRVHPALDTYIKERKLCAYPRLEIYQEDQIHFMCPLARQGDFYVPEMKETEWKWRGLVEAIDTQVDGT

SEQ ID NO: 87761 - protein, 313 aa, Homo sapiens; identical to SEQ ID NO: 87751
  Payload ID: 17563
  Gene Symbol: TEX264
  Gene Name: testis expressed 264
  Uniprot ID: Q9Y6I9
  ENSP ID: ENSP00000477946

SEQ ID NO: 87762 - protein, 239 aa, Homo sapiens
  Payload ID: 17563
  Gene Symbol: TEX264
  Gene Name: testis expressed 264
  ENSP ID: ENSP00000478139
MSDLLLLGLIGGLTLLLLLTLLAFAGYSGLLAGVEVSAGSPPIRNVTVAYKFHMGLYGETGRLFTESCSISPKLRSIAVYYDNPHMERKLCAYPRLEIYQEDQIHFMCPLARQGDFYVPEMKETEWKWRGLVEAIDTQVDGTGADTMSDTSSVSLEVSPGSRETSAATLSPGASSRGWDDGDTRSEHSYSESGASGSSFEELDLEGEGPLGESRLDPGTEPLGTTKWLWEPTAPEKGKE

SEQ ID NO: 87763 - protein, 410 aa, Homo sapiens
  Payload ID: 17564
  Gene Symbol: TEX28
  Gene Name: testis expressed 28
  Uniprot ID: O15482
  ENSP ID: ENSP00000478834
MVLKAEHTRSPSATLPSNVPSCRSLSSSEDGPSGPSSLADGGLAHNLQDSVRHRILYLSEQLRVEKASRDGNTVSYLKLVSKADRHQVPHIQQAFEKVNQRASATIAQIEHRLHQCHQQLQELEEGCRPEGLLLMAESDPANCEPPSEKALLSEPPEPGGEDGPVNLPHASRPFILESRFQSLQQGTCLETEDVAQQQNLLLQKVKAELEEAKRFHISLQESYHSLKERSLTDLQLLLESLQEEKCRQALMEEQVNGRLQGQLNEIYNLKHNLACSEERMAYLSYERAKEIWEITETFKSRISKLEMLQQVTQLEAAEHLQSRPPQMLFKFLSPRLSLATVLLVFVSTLCACPSSLISSRLCTCTMLMLIGLGVLAWQRWRAIPATDWQEWVPSRCRLYSKDSGPPADGP

SEQ ID NO: 87764 - protein, 410 aa, Homo sapiens; identical to SEQ ID NO: 87763
  Payload ID: 17564
  Gene Symbol: TEX28
  Gene Name: testis expressed 28
  Uniprot ID: O15482
  ENSP ID: ENSP00000479148

SEQ ID NO: 87765 - protein, 410 aa, Homo sapiens; identical to SEQ ID NO: 87763
  Payload ID: 17564
  Gene Symbol: TEX28
  Gene Name: testis expressed 28
  Uniprot ID: O15482
  ENSP ID: ENSP00000482010

SEQ ID NO: 87766 - protein, 151 aa, Homo sapiens
  Payload ID: 17565
  Gene Symbol: TEX29
  Gene Name: testis expressed 29
  Uniprot ID: Q8N6K0
  ENSP ID: ENSP00000283547
MEYVLEVKNSPRHLLKQFTVCDVPLYDICDYNVSRDRCQELGCCFYEGVCYKKAVPIYIHVFSALIVIIAGAFVITIIYRVIQESRKEKAIPVDVALPQKSSEKAELASSSSKLGLKPASPGPPSAGPSMKSDEDKDDVTGTITEAEETED

SEQ ID NO: 87767 - protein, 84 aa, Homo sapiens
  Payload ID: 17565
  Gene Symbol: TEX29
  Gene Name: testis expressed 29
  ENSP ID: ENSP00000431661
MPAICQGRQEVTVQAQCARPLHLSAAAMEYVLEVKNSPRHLLKQFTVCDVPLYDICDYNVSRDRCQELGCCFYEGVCYKKAVPI

SEQ ID NO: 87768 - protein, 186 aa, Homo sapiens
  Payload ID: 17566
  Gene Symbol: TEX30
  Gene Name: testis expressed 30
  ENSP ID: ENSP00000365187
MNLPHLMSLASHLASHGFFCLRFTCKGLNIVHRIKAYKSVLNYLKTSGEYKLAGVFLGGRSMGSRAAASVMCHIEPDDGDDFVRGLICISYPLHHPKQQHKLRDEDLFRLKEPVLFVSGSADEMCEKNLLEKVAQKMQAPHKIHWIEKANHSMAVKGRSTNDVFKEINTQILFWIQEITEMDKKCH

SEQ ID NO: 87769 - protein, 186 aa, Homo sapiens; identical to SEQ ID NO: 87768
  Payload ID: 17566
  Gene Symbol: TEX30
  Gene Name: testis expressed 30
  ENSP ID: ENSP00000365189

SEQ ID NO: 87770 - protein, 72 aa, Homo sapiens
  Payload ID: 17566
  Gene Symbol: TEX30
  Gene Name: testis expressed 30
  ENSP ID: ENSP00000365190
MNLPHLMSLASHLASHGFFCLRFTCKGLNIVHRIKAYKSVLNYLKTSGEYKLAGVFLGELVGESGTENASSP

SEQ ID NO: 87771 - protein, 113 aa, Homo sapiens
  Payload ID: 17566
  Gene Symbol: TEX30
  Gene Name: testis expressed 30
  Uniprot ID: Q5JUR7
  ENSP ID: ENSP00000365195
MSHTEVKLKIPFGNKLLDAVCLVPNKSLTYGIILTHGASGDMNLPHLMSLASHLASHGFFCLRFTCKGLNIVHRIKAYKSVLNYLKTSGEYKLAGVFLGELVGESGTENASSP

SEQ ID NO: 87772 - protein, 113 aa, Homo sapiens; identical to SEQ ID NO: 87771
  Payload ID: 17566
  Gene Symbol: TEX30
  Gene Name: testis expressed 30
  Uniprot ID: Q5JUR7
  ENSP ID: ENSP00000365197

SEQ ID NO: 87773 - protein, 227 aa, Homo sapiens
  Payload ID: 17566
  Gene Symbol: TEX30
  Gene Name: testis expressed 30
  Uniprot ID: Q5JUR7
  ENSP ID: ENSP00000365200
MSHTEVKLKIPFGNKLLDAVCLVPNKSLTYGIILTHGASGDMNLPHLMSLASHLASHGFFCLRFTCKGLNIVHRIKAYKSVLNYLKTSGEYKLAGVFLGGRSMGSRAAASVMCHIEPDDGDDFVRGLICISYPLHHPKQQHKLRDEDLFRLKEPVLFVSGSADEMCEKNLLEKVAQKMQAPHKIHWIEKANHSMAVKGRSTNDVFKEINTQILFWIQEITEMDKKCH

SEQ ID NO: 87774 - protein, 280 aa, Homo sapiens
  Payload ID: 17567
  Gene Symbol: TEX33
  Gene Name: testis expressed 33
  Uniprot ID: O43247
  ENSP ID: ENSP00000371243
MELGHGAGTTTFTRAHLNDKEGQQDLDPWKAAYSSLDTSKFKNQGLSSPQPLPLGASAQGSSLGQCHLKEIPPPPPTAASRDSLGMDPQSRSLKNAGSRSSSRENRATSGEGAQPCQGTDDGPSLGAQDQRSTPTNQKGSIIPNNIRHKFGSNVVDQLVSEEQAQKAIDEVFEGQKRASSWPSRTQNPVEISSVFSDYYDLGYNMRSNLFRGAAEETKSLMKASYTPEVIEKSVRDLEHWHGRKTDDLGRWHQKNAMNLNLQKALEEKYGENSKSKSSKY

SEQ ID NO: 87775 - protein, 195 aa, Homo sapiens
  Payload ID: 17567
  Gene Symbol: TEX33
  Gene Name: testis expressed 33
  Uniprot ID: O43247
  ENSP ID: ENSP00000385179
MDPQSRSLKNAGSRSSSRENRATSGEGAQPCQGTDDGPSLGAQDQRSTPTNQKGSIIPNNIRHKFGSNVVDQLVSEEQAQKAIDEVFEGQKRASSWPSRTQNPVEISSVFSDYYDLGYNMRSNLFRGAAEETKSLMKASYTPEVIEKSVRDLEHWHGRKTDDLGRWHQKNAMNLNLQKALEEKYGENSKSKSSKY

SEQ ID NO: 87776 - protein, 280 aa, Homo sapiens; identical to SEQ ID NO: 87774
  Payload ID: 17567
  Gene Symbol: TEX33
  Gene Name: testis expressed 33
  Uniprot ID: O43247
  ENSP ID: ENSP00000386118

SEQ ID NO: 87777 - protein, 139 aa, Homo sapiens
  Payload ID: 17567
  Gene Symbol: TEX33
  Gene Name: testis expressed 33
  ENSP ID: ENSP00000406640
  MOD_RES (1)..(1): Any amino acid
XRTWTPGKRPTVPWTPPSSRTRAQKAIDEVFEGQKRASSWPSRTQNPVEISSVFSDYYDLGYNMRSNLFRGAAEETKSLMKASYTPEVIEKSVRDLEHWHGRKTDDLGRWHQKNAMNLNLQKALEEKYGENSKSKSSKY

SEQ ID NO: 87778 - protein, 233 aa, Homo sapiens
  Payload ID: 17568
  Gene Symbol: TEX35
  Gene Name: testis expressed 35
  Uniprot ID: Q5T0J7
  ENSP ID: ENSP00000323795
MSAKRAELKKTHLSKNYKAVCLELKPEPTKTFDYKAVKQEGRFTKAGVTQDLKNELREVREELKEKMEEIKQIKDLMDKDFDKLHEFVEIMKEMQKDMDEKMDILINTQKNYKLPLRRAPKEQQELRLMGKTHREPQLRPKKMDGASGVNGAPCALHKKTMAPQKTKQGSLDPLHHCGTCCEKCLLCALKNNYNRGNIPSEASGLYKGGEEPVTTQPSVGHAVPAPKSQTEGR

SEQ ID NO: 87779 - protein, 215 aa, Homo sapiens
  Payload ID: 17568
  Gene Symbol: TEX35
  Gene Name: testis expressed 35
  Uniprot ID: Q5T0J7
  ENSP ID: ENSP00000356611
MSAKRAELKKTHLVKERHCWTSKNYKAVCLELKPEPTKTFDYKAVKQEGRFTKAGVTQDLKNELREVREELKEKMEEIKQIKDLMDKDFDKLHEFVEIMKEMQKDMDEKMDILINTQKNYKLPLRRAPKEQQELRLMGKTHREPQLRPKKMDGASGVNGAPCALHKKTMAPQKTKQGSLDPLHHCGTCCEKCLLCALKNNYNRGIYAAVGLLDLW

SEQ ID NO: 87780 - protein, 201 aa, Homo sapiens
  Payload ID: 17568
  Gene Symbol: TEX35
  Gene Name: testis expressed 35
  Uniprot ID: Q5T0J7
  ENSP ID: ENSP00000356613
MSAKRAELKKTHLSKNYKAVCLELKPEPTKTFDYKAVKQEGRFTKAGVTQDLKNELREVREELKEKMEEIKQIKDLMDKDFDKLHEFVEIMKEMQKDMDEKMDILINTQKNYKLPLRRAPKEQQELRLMGKTHREPQLRPKKMDGASGVNGAPCALHKKTMAPQKTKQGSLDPLHHCGTCCVSETLPEPSTGARPLAPAPW

SEQ ID NO: 87781 - protein, 99 aa, Homo sapiens
  Payload ID: 17568
  Gene Symbol: TEX35
  Gene Name: testis expressed 35
  ENSP ID: ENSP00000356614
MSAKRAELKKTHLSKNYKAVCLELKPEPTKVRSPFEAMQAARPEIHGEVTRSQGSFADPSGQDLSQTFDYKAVKQEGRFTKAGRTPRLLEELSLLLLPL

SEQ ID NO: 87782 - protein, 212 aa, Homo sapiens
  Payload ID: 17568
  Gene Symbol: TEX35
  Gene Name: testis expressed 35
  Uniprot ID: Q5T0J7
  ENSP ID: ENSP00000356615
MSAKRAELKKTHLSKNYKAVCLELKPEPTKTFDYKAVKQEGRFTKAGVTQDLKNELREVREELKEKMEEIKQIKDLMDKDFDKLHEFVEIMKEMQKDMDEKMDILINTQKNYKLPLRRAPKEQQELRLMGKTHREPQLRPKKMDGASGVNGAPCALHKKTMAPQKTKQGSLDPLHHCGTCCEKCLLCALKNNYNRAQLQNLPAVPIHHLQAP

SEQ ID NO: 87783 - protein, 50 aa, Homo sapiens
  Payload ID: 17568
  Gene Symbol: TEX35
  Gene Name: testis expressed 35
  ENSP ID: ENSP00000413991
KTGLTGSPSSLWDLLREMFVVCSKEQLQSGGKYSHQVWAPFSPLASGAAF

SEQ ID NO: 87784 - protein, 88 aa, Homo sapiens
  Payload ID: 17568
  Gene Symbol: TEX35
  Gene Name: testis expressed 35
  ENSP ID: ENSP00000430720
MSAKRAELKKTHLSKNYKAVCLELKPEPTKTFDYKAVKQEGRFTKAGVTQDLKNELREVREELKEKMEEIKQPCLSSLLDKGSNGQGF

SEQ ID NO: 87785 - protein, 186 aa, Homo sapiens
  Payload ID: 17569
  Gene Symbol: TEX36
  Gene Name: testis expressed 36
  Uniprot ID: Q5VZQ5
  ENSP ID: ENSP00000357811
MTKGRRFNPPSDKDGRWFPHIGLTQKTPESITSATSKEPQSPHLPRQAEGKLPPIYKVREKQAVNNQFPFSVHDNRHSLENSGCYLDSGLGRKKISPDKRQHVSRNFNLWACDYVPSCLDGFSNNQISYVYKEAMVVSSFRRFPRCYKEIWNAFTFLPERSYTEVLKKKPKVRFTVDKKVVSSLES

SEQ ID NO: 87786 - protein, 129 aa, Homo sapiens
  Payload ID: 17569
  Gene Symbol: TEX36
  Gene Name: testis expressed 36
  ENSP ID: ENSP00000431764
MTKGRRFNPPSDKDGRWFPHIGLTQKTPESITSATSKEPQSPHLPRQAEGKLPPIYKVREKQAVNNQFPFSVHDNRHSLENSGCYLDSERMTATDPQGEPDKRQEFYEPVRTQSIPHPGLRTNAPLLAV

SEQ ID NO: 87787 - protein, 99 aa, Homo sapiens
  Payload ID: 17569
  Gene Symbol: TEX36
  Gene Name: testis expressed 36
  ENSP ID: ENSP00000434299
MTKGRRFNPPSDKDGRWFPHIGLTQKTPESITSATSKEPQSPHLPRQAEGKLPPIYKVREKQAVNNQFPFSVHDNRHSLENSGCYLDSFADGLSWDFSL

SEQ ID NO: 87788 - protein, 180 aa, Homo sapiens
  Payload ID: 17570
  Gene Symbol: TEX37
  Gene Name: testis expressed 37
  Uniprot ID: Q96LM6
  ENSP ID: ENSP00000307142
MAGVKYPGQDPVDLDIYQSSHMVDYQPYRKHKYSRVTPQEQAKLDAQLRDKEFYRPIPNPNPKLTDGYPAFKRPHMTAKDLGLPGFFPSQEHEATREDERKFTSTCHFTYPASHDLHLAQGDPNQVLQSADFPCLVDPKHQPAAEMAKGYLLLPGCPCLHCHIVKVPILNRWGPLMPFYQ

SEQ ID NO: 87789 - protein, 206 aa, Homo sapiens
  Payload ID: 17571
  Gene Symbol: TEX38
  Gene Name: testis expressed 38
  Uniprot ID: Q6PEX7
  ENSP ID: ENSP00000455854
MDSQQEDLRFPGMWVSLYFGILGLCSVITGGCIIFLHWRKNLRREEHAQQWVEVMRAATFTYSPLLYWINKRRRYGMNAAINTGPAPAVTKTETEVQNPDVLWDLDIPEGRSHADQDSNPKAEAPAPLQPALQLAPQQPQARSPFPLPIFQEVPFAPPLCNLPPLLNHSVSYPLATCPERNVLFHSLLNLAQEDHSFNAKPFPSEL

SEQ ID NO: 87790 - protein, 152 aa, Homo sapiens
  Payload ID: 17571
  Gene Symbol: TEX38
  Gene Name: testis expressed 38
  ENSP ID: ENSP00000456524
MRAATFTYSPLLYWINKRRRYGMNAAINTGPAPAVTKTETEVQNPDVLWDLDIPEGRSHADQDSNPKAEAPAPLQPALQLAPQQPQARSPFPLPIFQEVPFAPPLCNLPPLLNHSVSYPLATCPERNVLFHSLLNLAQEDHSFNAKPFPSEL

SEQ ID NO: 87791 - protein, 130 aa, Homo sapiens
  Payload ID: 17571
  Gene Symbol: TEX38
  Gene Name: testis expressed 38
  ENSP ID: ENSP00000456892
MNAAINTGPAPAVTKTETEVQNPDVLWDLDIPEGRSHADQDSNPKAEAPAPLQPALQLAPQQPQARSPFPLPIFQEVPFAPPLCNLPPLLNHSVSYPLATCPERNVLFHSLLNLAQEDHSFNAKPFPSEL

SEQ ID NO: 87792 - protein, 139 aa, Homo sapiens
  Payload ID: 17571
  Gene Symbol: TEX38
  Gene Name: testis expressed 38
  ENSP ID: ENSP00000457220
MWLPPHHLRAQFTLWVSLYFGILGLCSVITGGCIIFLHWRKNLRREEHAQQWVEVMRAATFTYSPLLYWINKRRRYGMNAAINTGPAPAVTKTETEVQNPDVLWDLDIPEGRSHADQDSNPKAEAPAPLQPALQLAPQQ

SEQ ID NO: 87793 - protein, 158 aa, Homo sapiens
  Payload ID: 17572
  Gene Symbol: TEX40
  Gene Name: testis expressed 40
  ENSP ID: ENSP00000443917
MPLSEVCEGFDEEGRNISKTRGWHSPGRGSLDEGYKASHKPEELDEHALVELELHRGSSMEINLGEKDTASQIEAEKSSSMSSLNIAKHMPHRAYWAEQQSRLPLPLMELMENEALEILTKALRSYQLGIGRDHFLTKELQRYIEGLKKRRSKRLYVN

SEQ ID NO: 87794 - protein, 134 aa, Homo sapiens
  Payload ID: 17573
  Gene Symbol: TEX43
  Gene Name: testis expressed 43
  Uniprot ID: Q6ZNM6
  ENSP ID: ENSP00000349669
MASGKDTCPTLPKLTNNCSDESLYKSANKYEEIHLPRFSLKQGMIPRRYVMPWKENMIFRNVNLKQAEVCGIHTGPLEDSLFLNHSERLCHGEDRKVVFQKGPPEIKIADMPLHSPLSRYQSTVISHGFRRRLV

SEQ ID NO: 87795 - protein, 391 aa, Homo sapiens
  Payload ID: 17574
  Gene Symbol: TEX9
  Gene Name: testis expressed 9
  Uniprot ID: Q8N6V9
  ENSP ID: ENSP00000342169
MAGRSLCLTRSSVPGTPFPPPVQQPSTPGPDLLALEEEYKRLNAELQAKTADVVQQAKEIIRDRQEVRSRPVSTQMKSCDDEDDYSLRGLLPSEGIVHLHSETKPKTKNIDPVNKVQNKLHSANKGRKTNSSVKLKYSDVQTADDVAIPEDFSDFSLAKTISKIEGQLEEEGLPEYIDDIFSGVSNDIGTEAQIRFLKAKLHVMQEELDNVVCECNKKEDEIQNLKSQVKNFEEDFMRQQRTINMQQSQVEKYKTLFEEANKKYDGLQQQLSSVERELENKRRLQKQAASSQSATEVRLNRALEEAEKYKLELSKLRQNNKDIANEEHKKIEVLKSENKKLEKQKGELMIGFKKQLKLIDVLKRQKMHIEAAKMLSFTEEEFMKALEWGNS

SEQ ID NO: 87796 - protein, 316 aa, Homo sapiens
  Payload ID: 17574
  Gene Symbol: TEX9
  Gene Name: testis expressed 9
  Uniprot ID: Q8N6V9
  ENSP ID: ENSP00000438745
MKSCDDEDDYSLRGLLPSEGIVHLHSETKPKTKNIDPVNKVQNKLHSANKGRKTNSSVKLKYSDVQTADDVAIPEDFSDFSLAKTISKIEGQLEEEGLPEYIDDIFSGVSNDIGTEAQIRFLKAKLHVMQEELDNVVCECNKKEDEIQNLKSQVKNFEEDFMRQQRTINMQQSQVEKYKTLFEEANKKYDGLQQQLSSVERELENKRRLQKQAASSQSATEVRLNRALEEAEKYKLELSKLRQNNKDIANEEHKKIEVLKSENKKLEKQKGELMIGFKKQLKLIDVLKRQKMHIEAAKMLSFTEEEFMKALEWGNS

SEQ ID NO: 87797 - protein, 104 aa, Homo sapiens
  Payload ID: 17574
  Gene Symbol: TEX9
  Gene Name: testis expressed 9
  ENSP ID: ENSP00000452791
MKSCDDEDDYSLRGLLPSEGIVHLHSETKPKTKNIDPVNKVQNKLHSANKGRKTNSSVKLKYSDVQTADDVAIPEDFSDFSLAKTISKIEGQLEEEGLPEYIDD

SEQ ID NO: 87798 - protein, 208 aa, Homo sapiens
  Payload ID: 17574
  Gene Symbol: TEX9
  Gene Name: testis expressed 9
  ENSP ID: ENSP00000453398
MKSCDDEDDYSLRGLLPSEGIVHLHSETKPKTKNIDPVNKVQNKLHSANKGRKTNSSVKLKYSDVQTADDVAIPEDFSDFSLAKTISKIEGQLEEEGLPEYIDDIFSGVSNDIGTEAQIRFLKAKLHVMQEELDNVVCECNKKEDEIQNLKSQVKNFEEDFMRQQRTINMQQSQVEKYKTLFEEANKKYDGLQQQLSSVERVIIWYFS

SEQ ID NO: 87799 - protein, 79 aa, Homo sapiens
  Payload ID: 17574
  Gene Symbol: TEX9
  Gene Name: testis expressed 9
  ENSP ID: ENSP00000453431
MAGRSLCLTVSSTPGSWGASGFRRLGRLTSFNFGSESLWLFYREAAFQGLRSRHPFSNPLHLDPTSSPWRKNISKKFGG

SEQ ID NO: 87800 - protein, 102 aa, Homo sapiens
  Payload ID: 17574
  Gene Symbol: TEX9
  Gene Name: testis expressed 9
  ENSP ID: ENSP00000453960
MQQSQVEKYKTLFEEANKKYDGLQQQLSSVERELENKRRLQKQAASSQSATEVRLNRALEEAEKYKLELSKLRQNNKMHIEAAKMLSFTEEEFMKALEWGNS

SEQ ID NO: 87801 - protein, 283 aa, Homo sapiens
  Payload ID: 17574
  Gene Symbol: TEX9
  Gene Name: testis expressed 9
  ENSP ID: ENSP00000456593
MAGRSLCLTRSSVPGTPFPPPVQQPSTPGPDLLALEEEYKRLNAELQAKTADVVQQAKEIIRDRQEVRSRPVSTQMKSCDDEDDYSLRGLLPSEGIVHLHSETKPKTKNIDPVNKVQNKLHSANKGRKTNSSVKLKYSDVQTADDVAIPEDFSDFSLAKTISKIEGQLEEEGLPEYIDDIFSGVSNDIGTEAQIRFLKAKLHVMQEELDNVVCECNKKEDEIQNLKSQVKNFEEDFMRQQRTINMQQSQVEKYKTLFEEANKKYDGLQQQLSSVERVIIWYFS

SEQ ID NO: 87802 - protein, 294 aa, Homo sapiens
  Payload ID: 17575
  Gene Symbol: TSPY1
  Gene Name: testis specific protein, Y-linked 1
  Uniprot ID: Q01534
  ENSP ID: ENSP00000389324
MRPEGSLTYRVPERLRQGFCGVGRAAQALVCASAKEGTAFRMEAVQEGAAGVESEQAALGEEAVLLLDDIMAEVEVVAEEEGLVERREEAQRAQQAVPGPGPMTPESAPEELLAVQVELEPVNAQARKAFSRQREKMERRRKPHLDRRGAVIQSVPGFWANVIANHPQMSALITDEDEDMLSYMVSLEVGEEKHPVHLCKIMLFFRSNPYFQNKVITKEYLVNITEYRASHSTPIEWYPDYEVEAYRRRHHNSSLNFFNWFSDHNFAGSNKIAESPDRSYVRTCGAIPCNTTRG

SEQ ID NO: 87803 - protein, 308 aa, Homo sapiens
  Payload ID: 17575
  Gene Symbol: TSPY1
  Gene Name: testis specific protein, Y-linked 1
  Uniprot ID: Q01534
  ENSP ID: ENSP00000403304
MRPEGSLTYRVPERLRQGFCGVGRAAQALVCASAKEGTAFRMEAVQEGAAGVESEQAALGEEAVLLLDDIMAEVEVVAEEEGLVERREEAQRAQQAVPGPGPMTPESAPEELLAVQVELEPVNAQARKAFSRQREKMERRRKPHLDRRGAVIQSVPGFWANVIANHPQMSALITDEDEDMLSYMVSLEVGEEKHPVHLCKIMLFFRSNPYFQNKVITKEYLVNITEYRASHSTPIEWYPDYEVEAYRRRHHNSSLNFFNWFSDHNFAGSNKIAEILCKDLWRNPLQYYKRMKPPEEGTETSGDSQLLS

SEQ ID NO: 87804 - protein, 221 aa, Homo sapiens
  Payload ID: 17575
  Gene Symbol: TSPY1
  Gene Name: testis specific protein, Y-linked 1
  ENSP ID: ENSP00000406010
MRPEGSLTYRVPERLRQGFCGVGRAAQALVELEPVNAQARKAFSRQREKMERRRKPHLDRRGAVIQSVPGFWANVIANHPQMSALITDEDEDMLSYMVSLEVGEEKHPVHLCKIMLFFRSNPYFQNKVITKEYLVNITEYRASHSTPIEWYPDYEVEAYRRRHHNSSLNFFNWFSDHNFAGSNKIAEILCKDLWRNPLQYYKRMKPPEEGTETSGDSQLLS

SEQ ID NO: 87805 - protein, 308 aa, Homo sapiens
  Payload ID: 17575
  Gene Symbol: TSPY1
  Gene Name: testis specific protein, Y-linked 1
  ENSP ID: ENSP00000473286
MRPEGSLTYRVPERLRQGFCGVGRAAQALVCASAKEGTAFRMEAVQEGAAGVESEQAALGEEAVLLLDDIMAEVEVVAEEEGLVERREEAQRAQQAVPGPGPMTPESAPEELLAVQVELEPVNAQARKAFSRQREKMERRRKPHLDRRGAVIQSVPGFWANVIANHPQMSALITDEDEDMLSYMVSLEVEEEKHPVHLCKIMLFFRSNPYFQNKVITKEYLVNITEYRASHSTPIEWYPDYEVEAYRRRHHNSSLNFFNWFSDHNFAGSNKIAEILCKDLWRNPLQYYKRMKPPEEGTETSGDSQLLS

SEQ ID NO: 87806 - protein, 294 aa, Homo sapiens
  Payload ID: 17576
  Gene Symbol: TSPY10
  Gene Name: testis specific protein, Y-linked 10
  ENSP ID: ENSP00000397151
MRPEGSLTYRVPERLRQGFCGVGRAAQALVCASAKEGTAFRMEAVQEGAAGVESEQAALGEEAVLLLDDIMAEVEVVAEEEGLVERREEAQRAQQAVPGPGPMTPESALEELLAVQVELEPVNAQARKAFSRQREKMERRRKPHLDRRGAVIQSVPGFWANVIANHPQMSALITDEDEDMLSYMVSLEVEEEKHPVHLCKIMLFFRSNPYFQNKVITKEYLVNITEYRASHSTPIEWYPDYEVEAYRRRHHNSSLNFFNWFSDHNFAGSNKIAESPDRSYVRTCGAIPCNTTRG

SEQ ID NO: 87807 - protein, 308 aa, Homo sapiens
  Payload ID: 17576
  Gene Symbol: TSPY10
  Gene Name: testis specific protein, Y-linked 10
  ENSP ID: ENSP00000406407
MRPEGSLTYRVPERLRQGFCGVGRAAQALVCASAKEGTAFRMEAVQEGAAGVESEQAALGEEAVLLLDDIMAEVEVVAEEEGLVERREEAQRAQQAVPGPGPMTPESALEELLAVQVELEPVNAQARKAFSRQREKMERRRKPHLDRRGAVIQSVPGFWANVIANHPQMSALITDEDEDMLSYMVSLEVEEEKHPVHLCKIMLFFRSNPYFQNKVITKEYLVNITEYRASHSTPIEWYPDYEVEAYRRRHHNSSLNFFNWFSDHNFAGSNKIAEILCKDLWRNPLQYYKRMKPPEEGTETSGDSQLLS

SEQ ID NO: 87808 - protein, 308 aa, Homo sapiens
  Payload ID: 17577
  Gene Symbol: TSPY2
  Gene Name: testis specific protein, Y-linked 2
  Uniprot ID: A6NKD2
  ENSP ID: ENSP00000314077
MRPEGSLTYRVPERLRQGSCGVGRAAQALVCASAKEGTAFRMEAVQEGAAGVESEQAALGEEAVLLLDDIMAEVEVVAEEEGLVERREEAQRAQQAVPGPGPMTPESALEELLAVQVELEPVNAQARKAFSRQREKMERRRKPHLDRRGAVIQSVPGFWANVIANHPQMSALITDEDEDMLSYMVSLEVEEEKHRVHLCKIMLFFRSNPYFQNKVITKEYLVNITEYRASHSTPIEWYPDYEVEAYRRRHHNSSLNFFNWFSDHNFAGSNKIAEILCKDLWRNPLQYYKRMKPPEEGTETSGDSQLLS

SEQ ID NO: 87809 - protein, 294 aa, Homo sapiens
  Payload ID: 17577
  Gene Symbol: TSPY2
  Gene Name: testis specific protein, Y-linked 2
  ENSP ID: ENSP00000372512
MRPEGSLTYRVPERLRQGSCGVGRAAQALVCASAKEGTAFRMEAVQEGAAGVESEQAALGEEAVLLLDDIMAEVEVVAEEEGLVERREEAQRAQQAVPGPGPMTPESALEELLAVQVELEPVNAQARKAFSRQREKMERRRKPHLDRRGAVIQSVPGFWANVIANHPQMSALITDEDEDMLSYMVSLEVEEEKHRVHLCKIMLFFRSNPYFQNKVITKEYLVNITEYRASHSTPIEWYPDYEVEAYRRRHHNSSLNFFNWFSDHNFAGSNKIAESPDRSYVRTCGAIPCNTTRG

SEQ ID NO: 87810 - protein, 221 aa, Homo sapiens
  Payload ID: 17577
  Gene Symbol: TSPY2
  Gene Name: testis specific protein, Y-linked 2
  ENSP ID: ENSP00000414049
MRPEGSLTYRVPERLRQGSCGVGRAAQALVELEPVNAQARKAFSRQREKMERRRKPHLDRRGAVIQSVPGFWANVIANHPQMSALITDEDEDMLSYMVSLEVEEEKHRVHLCKIMLFFRSNPYFQNKVITKEYLVNITEYRASHSTPIEWYPDYEVEAYRRRHHNSSLNFFNWFSDHNFAGSNKIAEILCKDLWRNPLQYYKRMKPPEEGTETSGDSQLLS

SEQ ID NO: 87811 - protein, 308 aa, Homo sapiens; identical to SEQ ID NO: 87807
  Payload ID: 17578
  Gene Symbol: TSPY3
  Gene Name: testis specific protein, Y-linked 3
  Uniprot ID: P0CV98
  ENSP ID: ENSP00000398163

SEQ ID NO: 87812 - protein, 294 aa, Homo sapiens; identical to SEQ ID NO: 87806
  Payload ID: 17578
  Gene Symbol: TSPY3
  Gene Name: testis specific protein, Y-linked 3
  ENSP ID: ENSP00000412988

SEQ ID NO: 87813 - protein, 300 aa, Homo sapiens
  Payload ID: 17579
  Gene Symbol: TSPY4
  Gene Name: testis specific protein, Y-linked 4
  ENSP ID: ENSP00000372471
MRPEGSLTYRVPERLRQGFCGVGRAAQALVCASAKEGTAFRMEAVQEGAAGVESEQAALGEEAVLLLDDIMAEVEVVAEVEVVAEEEGLVERREEAQRAQQAVPGPGPMTPESALEELLAVQVELEPVNAQARKAFSRQREKMERRRKPHLDRRGAVIQSVPGFWANVIANHPQMSALITDEDEDMLSYMVSLEVEEEKHPVHLCKIMLFFRSNPYFQNKVITKEYLVNITEYRASHSTPIEWYPDYEVEAYRRRHHNSSLNFFNWFSDHNFAGSNKIAESPDRSYVRTCGAIPCNTTRG

SEQ ID NO: 87814 - protein, 314 aa, Homo sapiens
  Payload ID: 17579
  Gene Symbol: TSPY4
  Gene Name: testis specific protein, Y-linked 4
  Uniprot ID: P0CV99
  ENSP ID: ENSP00000399668
MRPEGSLTYRVPERLRQGFCGVGRAAQALVCASAKEGTAFRMEAVQEGAAGVESEQAALGEEAVLLLDDIMAEVEVVAEVEVVAEEEGLVERREEAQRAQQAVPGPGPMTPESALEELLAVQVELEPVNAQARKAFSRQREKMERRRKPHLDRRGAVIQSVPGFWANVIANHPQMSALITDEDEDMLSYMVSLEVEEEKHPVHLCKIMLFFRSNPYFQNKVITKEYLVNITEYRASHSTPIEWYPDYEVEAYRRRHHNSSLNFFNWFSDHNFAGSNKIAEILCKDLWRNPLQYYKRMKPPEEGTETSGDSQLLS

SEQ ID NO: 87815 - protein, 308 aa, Homo sapiens
  Payload ID: 17580
  Gene Symbol: TSPY8
  Gene Name: testis specific protein, Y-linked 8
  Uniprot ID: P0CW00
  ENSP ID: ENSP00000287721
MRPEGSLTYWVPERLRQGFCGVGRAAQALVCASAKEGTAFRMEAVQEGAAGVESEQAALGEEAVLLLDDIMAEVEVVAEEEGLVERREEAQRAQQAVPGPGPMTPESALEELLAVQVELEPVNAQARKAFSRQREKMERRRKPHLDRRGAVIQSVPGFWANVIANHPQMSALITDEDEDMLSYMVSLEVEEEKHPVHLCKIMLFFRSNPYFQNKVITKEYLVNITEYRASHSTPIEWYLDYEVEAYRRRHHNSSLNFFNWFSDHNFAGSNKIAEILCKDLWRNPLQYYKRMKPPEEGTETSGDSQLLS

SEQ ID NO: 87816 - protein, 294 aa, Homo sapiens
  Payload ID: 17580
  Gene Symbol: TSPY8
  Gene Name: testis specific protein, Y-linked 8
  ENSP ID: ENSP00000372462
MRPEGSLTYWVPERLRQGFCGVGRAAQALVCASAKEGTAFRMEAVQEGAAGVESEQAALGEEAVLLLDDIMAEVEVVAEEEGLVERREEAQRAQQAVPGPGPMTPESALEELLAVQVELEPVNAQARKAFSRQREKMERRRKPHLDRRGAVIQSVPGFWANVIANHPQMSALITDEDEDMLSYMVSLEVEEEKHPVHLCKIMLFFRSNPYFQNKVITKEYLVNITEYRASHSTPIEWYLDYEVEAYRRRHHNSSLNFFNWFSDHNFAGSNKIAESPDRSYVRTCGAIPCNTTRG

SEQ ID NO: 87817 - protein, 308 aa, Homo sapiens
  Payload ID: 17580
  Gene Name: testis specific protein, Y-linked 8
  ENSP ID: ENSP00000372467
MRPEGSLTYWVPERLRQGFCGVGRAAQALVCASAKEGTAFRMEAVQEGAAGVESEQAALGEEAVLLLDDIMAEVEVVAEEEGLVERREEAQRAQQAVPGPGPMTPESALEELLAVQVELEPVNAQARKAFSRQREKMERRRKPHLDRRGAVIQSVPGFWANVIANHPQMSALITDEDEDMLSYMVSLEVEEEKHPVHLCKIMLFFRSNPYFQNKVITKEYLVNITEYRASHSTPIEWYPDYEVEAYRRRHHNSSLNFFNWFSDHNFAGSNKIAEILCKDLWRNPLQYYKRMKPPEEGTETSGDSQLLS

SEQ ID NO: 87818 - protein, 314 aa, Homo sapiens
  Payload ID: 17581
  Gene Name: testis specific protein, Y-linked 9, pseudogene
  ENSP ID: ENSP00000473619
MRPEGSLTYRVPERLRQGFCGVGRAAQALVCASAKEGTAFRMEAVQEGAAGVESEQAALGEEAVLLLDDIMAEVEVVAEVEVVAEEEGLVERREEAQRAQQAVPGPGPMTPESALEELLAVQVELEPVNAQARKAFSRQREKMERRRKPQLDRRGAVIQSVPGFWANVIANHPQMSALITDEDEDMLSYMVSLEVEEEKHPVHLCKIMLFFRSNPYFQNKVITKEYLVNITEYRASHSTPIEWYPDYEVEAYRRRHHNSSLNFFNWFSDHNFAGSNKIAEILCKDLWRNPLQYYKRMKPPEEGTETSGDSQLLS

SEQ ID NO: 87819 - protein, 698 aa, Homo sapiens
  Payload ID: 17582
  Gene Name: testis specific, 10
  Uniprot ID: Q9BZW7
  ENSP ID: ENSP00000347161
MMRSRSKSPRRPSPTARGANCDVELLKTTTRDREELKCMLEKYERHLAEIQGNVKVLKSERDKIFLLYEQAQEEITRLRREMMKSCKSPKSTTAHAILRRVETERDVAFTDLRRMTTERDSLRERLKIAQETAFNEKAHLEQRIEELECTVHNLDDERMEQMSNMTLMKETISTVEKEMKSLARKAMDTESELGRQKAENNSLRLLYENTEKDLSDTQRHLAKKKYELQLTQEKIMCLDEKIDNFTRQNIAQREEISILGGTLNDLAKEKECLQACLDKKSENIASLGESLAMKEKTISGMKNIIAEMEQASRQCTEALIVCEQDVSRMRRQLDETNDELAQIARERDILAHDNDNLQEQFAKAKQENQALSKKLNDTHNELNDIKQKVQDTNLEVNKLKNILKSEESENRQMMEQLRKANEDAENWENKARQSEADNNTLKLELITAEAEGNRLKEKVDSLNREVEQHLNAERSYKSQISTLHKSVVKMEEELQKVQFEKVSALADLSSTRELCIKLDSSKELLNRQLVAKDQEIEMRENELDSAHSEIELLRSQMANERISMQNLEALLVANRDKEYQSQIALQEKESEIQLLKEHLCLAENKMAIQSRDVAQFRNVVTQLEADLDITKRQLGTERFERERAVQELRRQNYSSNAYHMSSTMKPNTKCHSPERAHHRSPDRGLDRSLEENLCYRDF

SEQ ID NO: 87820 - protein, 690 aa, Homo sapiens
  Payload ID: 17582
  Gene Name: testis specific, 10
  ENSP ID: ENSP00000377122
MMRSRSKSPRRPSPTARGANCDVELLKTTTRDREELKCMLEKYERHLAEIQGNVKVLKSERDKIFLLYEQAQEEITRLRREMMKSCKSPKSTTAHAILRRVETERDVAFTDLRRMTTERDSLRERLKIAQETAFNEKAHLEQRIEELECTVHNLDDERMEQMSNMTLMKETISTVEKEMKSLARKAMDTESELGRQKAENNSLRLLYENTEKDLSDTQRHLAKKKYELQLTQEKIMCLDEKIDNFTRQNIAQREEISILGGTLNDLAKEKECLQACLDKKSENIASLGESLAMKEKTISGMKNIIAEMEQASRQCTEALIVCEQDVSRMRRQLDETNDELAQIARERDILAHDNDNLQEQFAKAKQENQALSKKLNDTHNELNDIKQKVQDTNLEVNKLKNILKSEESENRQMMEQLRKANEDAENWENKARQSEADNNTLKLELITAEAEGNRLKEKVDSLNREVEQHLNAERSYKSQISTLHKSVVKMEEELQKVQFEKVSALADLSSTRELCIKLDSSKELLNRQLVAKDQEIEMRENELDSAHSEIELLRSQMANERISMQNLEALLVANRDKEYQSQIALQEKESEIQLLKEHLCLAENKMAIQSRDVAQFRNVVTQLEADLDITKRQLGTERFERERAVQELRRQNYSSNAYHMSSTMKPNTKCHSPERAHHRSPDRGLDRSLE

SEQ ID NO: 87821 - protein, 698 aa, Homo sapiens; identical to SEQ ID NO: 87819
  Payload ID: 17582
  Gene Name: testis specific, 10
  Uniprot ID: Q9BZW7
  ENSP ID: ENSP00000377123

SEQ ID NO: 87822 - protein, 620 aa, Homo sapiens
  Payload ID: 17582
  Gene Name: testis specific, 10
  ENSP ID: ENSP00000386508
MMRSRSKSPRRPSPTARGANCDVELLKTTTRDREELKCMLEKYERHLAEIQGNVKVLKSERDKIFLLYEQAQEEITRLRREMMKSCKSPKSTTAHAILRRVETERDVAFTDLRRMTTERDSLRERLKIAQETAFNEKAHLEQRIEELECTVHNLDDERMEQMSNMTLMKETISTVEKEMKSLARKAMDTESELGRQKAENNSLRLLYENTEKDLSDTQRHLAKKKYELQLTQEKIMCLDEKIDNFTRQNIAQREEISILGGTLNDLAKEKECLQACLDKKSENIASLGESLAMKEKTISGMKNIIAEMEQASRQCTEALIVCEQDVSRMRRQLDETNDELAQIARERDILAHDNDNLQEQFAKAKQENQALSKKLNDTHNELNDIKQKVQDTNLEVNKLKNILKSEESENRQMMEQLRKANEDAENWENKARQSEADNNTLKLELITAEAEGNRLKEKVDSLNREVEQRENELDSAHSEIELLRSQMANERISMQNLEALLVANRDKEYQSQIALQEKESEIQLLKEHLCLAENKMAIQSRDVAQFRNVVTQLEADLDITKRQLGTERFERERAVQELRRQNYSSNAYHMSSTMKPNTKCHSPERAHHRSPDRGLDRSLE

SEQ ID NO: 87823 - protein, 698 aa, Homo sapiens; identical to SEQ ID NO: 87819
  Payload ID: 17582
  Gene Name: testis specific, 10
  Uniprot ID: Q9BZW7
  ENSP ID: ENSP00000386956

SEQ ID NO: 87824 - protein, 403 aa, Homo sapiens
  Payload ID: 17583
  Gene Name: testis specific, 10 interacting protein
  Uniprot ID: Q3SY00
  ENSP ID: ENSP00000477317
MGQDTDMLNTYQQLVRTPSVRPGQDVRLQAPGTRTGLLKLLSTVSQDKQGCLGSGDGVPNQDLQQRSQSSRQTAKKDRKPRGQSKKGQGSEESEDHFPLLPRKPSFPFQWAWESIATDVRAVLQPSSPTPGHQALPMPSSFSQRQSRRKSTANLPEAHGCCWKTEAQNLKARQQLGAWGGVSIPTGKGELGSEPPSGLQLPGRRPGSGSASDKQVQLQSLGAEEAERGLSSGVLPQRPRRGSISEEEQFSEATEEAEEGEHRTPCRRRAGCQRKGQISGEEASDEGEVQGQSQGSSPSFNNLRRRQWRKTRAKELQGPWDLEKLHRQLQRDLDCGSHQEPAAGLGAAAAGGAAAGRAAAGPDTACTAAGGPLPGSLRTQREPGPWGGPAQAGGAEAPGATALC

SEQ ID NO: 87825 - protein, 114 aa, Homo sapiens
  Payload ID: 17583
  Gene Name: testis specific, 10 interacting protein
  ENSP ID: ENSP00000482640
MGQDTDMLNTYQQLVRTPSVRPGQDVRLQAPGTRTGLLKLLSTVSQDKQEPAAGLGAAAAGGAAAGRAAAGPDTACTAAGGPLPGSLRTQREPGPWGGPAQAGGAEAPGATALC

SEQ ID NO: 87826 - protein, 49 aa, Homo sapiens
  Payload ID: 17583
  Gene Name: testis specific, 10 interacting protein
  ENSP ID: ENSP00000483400
DMLNTYQQLVRTPSVRPGQDVRLQAPGTRTGLLKLLSTVSQDKQVREAQ

SEQ ID NO: 87827 - protein, 556 aa, Homo sapiens
  Payload ID: 17583
  Gene Name: testis specific, 10 interacting protein
  Uniprot ID: Q3SY00
  ENSP ID: ENSP00000484252
MGQDTDMLNTYQQLVRTPSVRPGQDVRLQAPGTRTGLLKLLSTVSQDKQGCLGSGDGVPNQDLQQRSQSSRQTAKKDRKPRGQSKKGQGSEESEDHFPLLPRKPSFPFQWAWESIATDVRAVLQPSSPTPGHQALPMPSSFSQRQSRRKSTANLPEAHGCCWKTEAQNLKARQQLGAWGGVSIPTGKGELGSEPPSGLQLPGRRPGSGSASDKQVQLQSLGAEEAERGLSSGVLPQRPRRGSISEEEQFSEATEEAEEGEHRTPCRRRAGCQRKGQISGEEASDEGEVQGQSQGSSPSFNNLRRRQWRKTRAKELQGPWDLEKLHRQLQRDLDCGPQKLPWKTLRAAFQASKRNGKAYASGYDETFVSANLPNRTFHKRQEATRSLLQAWERQRQEERQQAELRRARTQHVQRQVAHCLAAYAPRGSRGPGAAQRKLEELRRQERQRFAEYQAELQGIQHRVQARPFLFQQAMQANARLTVTRRFSQVLSALGLDEEQLLSEAGKVDREGTPRKPRSHRSMGVRMEHSPQRPPRTEPTGSQPDRHYNPSLDPECSP

SEQ ID NO: 87828 - protein, 275 aa, Homo sapiens
  Payload ID: 17584
  Gene Name: testis specific, 13
  Uniprot ID: Q96PP4
  ENSP ID: ENSP00000348996
MSQKRQTKFQNGKSKTSENSSAKREKGMVVNSKEISDAVGQSKFVLENLRHYTVHPNLAQYYKPLKATALQKFLAQNRKNTSFMLKVTQYDQDKTLLIMTNNPPPCSITQQDKESASKYFSKELLLKVMESHHQHKPTENLWLPRMPQKKKLRSKLKPIFPLILSDDPTSKREQWFRFSTDNDFKSEGKYSKVYALRTQKKMYPQLTFAPVHERDMRKDASKKSASERPISKVIREPLTLASLLEDMPTRTAPGESAFRNGRAPQWIIKKATVIG

SEQ ID NO: 87829 - protein, 275 aa, Homo sapiens; identical to SEQ ID NO: 87828
  Payload ID: 17584
  Gene Name: testis specific, 13
  Uniprot ID: Q96PP4
  ENSP ID: ENSP00000406047

SEQ ID NO: 87830 - protein, 58 aa, Homo sapiens
  Payload ID: 17584
  Gene Name: testis specific, 13
  ENSP ID: ENSP00000407352
MSQKRQTKFQNGKSKTSENSSAKREKGMVVNSKEISDAVGQSKFVLENLRHYTVHPNL

SEQ ID NO: 87831 - protein, 76 aa, Homo sapiens
  Payload ID: 17584
  Gene Name: testis specific, 13
  ENSP ID: ENSP00000415856
MSQKRQTKFQNGKSKTSENSSAKREKGMVVNSKEISDAVGQSKFVLENLRHYTVHPNLAQYYKPLKATALQKFLAQ

SEQ ID NO: 87832 - protein, 298 aa, Homo sapiens
  Payload ID: 17585
  Gene Name: testis, prostate and placenta expressed
  Uniprot ID: Q6URK8
  ENSP ID: ENSP00000290871
MGIVCAQCSFILLLSIIRARPPPFLFCPLSSQRTESPYKPVHLGLGPTDKVAAIAMARIIDLVPWDDGSTHVYASPAILLPMERQRNQLAGVKQQLYHPALPTLRHMDRDTVKACLPDEHCQSTTYCRKDEFDNAHFTLLGVPNKPLQCLDITATGQKLRNRYHEGKLAPIAPGINRVDWPCFTRAIEDWSHFVSSAGEFKLPCLRKRAEGLSGYAVRYLKPDVTQTWRQEALCGAWAGRPCSPDSPRPYPCCPPQYCLSQNPSLDRYGQKPLPFDSLNTFRSFGSSYSRVNYLTPWH

SEQ ID NO: 87833 - protein, 271 aa, Homo sapiens
  Payload ID: 17585
  Gene Name: testis, prostate and placenta expressed
  Uniprot ID: Q6URK8
  ENSP ID: ENSP00000401917
MGIVCAQCSFILLLSIIRARPPPFLFCPLSSQRTESPYKPVHLGLGPTDKVAAIAMARIIDLVPWDDGSTHVYASPAILLPMERQRNQLAGVKQQLYHPALPTLRHMDRDTVKACLPDEHCQSTTYCRKDEFDNAHFTLLGVPNKPLQCLDITATGQKLRNRYHEGKLAPIAPGINRVDWPCFTRAIEDWSHFVSSAGEFKLPCLRKRAEGLSGYAVRYLKPDVTQTWRYCLSQNPSLDRYGQKPLPFDSLNTFRSFGSSYSRVNYLTPWH

SEQ ID NO: 87834 - protein, 626 aa, Homo sapiens
  Payload ID: 17586
  Gene Name: testis-specific kinase 1
  Uniprot ID: Q15569
  ENSP ID: ENSP00000338127
MAGERPPLRGPGPGPGEVPGEGPPGPGGTGGGPGRGRPSSYRALRSAVSSLARVDDFHCAEKIGAGFFSEVYKVRHRQSGQVMVLKMNKLPSNRGNTLREVQLMNRLRHPNILRFMGVCVHQGQLHALTEYMNGGTLEQLLSSPEPLSWPVRLHLALDIARGLRYLHSKGVFHRDLTSKNCLVRREDRGFTAVVGDFGLAEKIPVYREGARKEPLAVVGSPYWMAPEVLRGELYDEKADVFAFGIVLCELIARVPADPDYLPRTEDFGLDVPAFRTLVGDDCPLPFLLLAIHCCNLEPSTRAPFTEITQHLEWILEQLPEPAPLTRTALTHNQGSVARGGPSATLPRPDPRLSRSRSDLFLPPSPESPPNWGDNLTRVNPFSLREDLRGGKIKLLDTPSKPVLPLVPPSPFPSTQLPLVTTPETLVQPGTPARRCRSLPSSPELPRRMETALPGPGPPAVGPSAEEKMECEGSSPEPEPPGPAPQLPLAVATDNFISTCSSASQPWSPRSGPVLNNNPPAVVVNSPQGWAGEPWNRAQHSLPRAAALERTEPSPPPSAPREPDEGLPCPGCCLGPFSFGFLSMCPRPTPAVARYRNLNCEAGSLLCHRGHHAKPPTPSLQLPGARS

SEQ ID NO: 87835 - protein, 626 aa, Homo sapiens; identical to SEQ ID NO: 87834
  Payload ID: 17586
  Gene Name: testis-specific kinase 1
  Uniprot ID: Q15569
  ENSP ID: ENSP00000481045

SEQ ID NO: 87836 - protein, 542 aa, Homo sapiens
  Payload ID: 17587
  Gene Name: testis-specific kinase 2
  Uniprot ID: Q96S53
  ENSP ID: ENSP00000361156
MDRSKRNSIAGFPPRVERLEEFEGGGGGEGNVSQVGRVWPSSYRALISAFSRLTRLDDFTCEKIGSGFFSEVFKVRHRASGQVMALKMNTLSSNRANMLKEVQLMNRLSHPNILRFMGVCVHQGQLHALTEYINSGNLEQLLDSNLHLPWTVRVKLAYDIAVGLSYLHFKGIFHRDLTSKNCLIKRDENGYSAVVADFGLAEKIPDVSMGSEKLAVVGSPFWMAPEVLRDEPYNEKADVFSYGIILCEIIARIQADPDYLPRTEMDPKLRPSFVEIGKTLEEILSRLQEEEQERDRKLQPTARGLLEKAPGVKRLSSLDDKIPHKSPCPRRTIWLSRSQSDIFSRKPPRTVSVLDPYYRPRDGAARTPKVNPFSARQDLMGGKIKFFDLPSKSVISLVFDLDAPGPGTMPLADWQEPLAPPIRRWRSLPGSPEFLHQEACPFVGREESLSDGPPPRLSSLKYRVKEIPPFRASALPAAQAHEAMDCSILQEENGFGSRPQGTSPCPAGASEEMEVEERPAGSTPATFSTSGIGLQTQGKQDG

SEQ ID NO: 87837 - protein, 571 aa, Homo sapiens
  Payload ID: 17587
  Gene Name: testis-specific kinase 2
  Uniprot ID: Q96S53
  ENSP ID: ENSP00000361158
MDRSKRNSIAGFPPRVERLEEFEGGGGGEGNVSQVGRVWPSSYRALISAFSRLTRLDDFTCEKIGSGFFSEVFKVRHRASGQVMALKMNTLSSNRANMLKEVQLMNRLSHPNILRFMGVCVHQGQLHALTEYINSGNLEQLLDSNLHLPWTVRVKLAYDIAVGLSYLHFKGIFHRDLTSKNCLIKRDENGYSAVVADFGLAEKIPDVSMGSEKLAVVGSPFWMAPEVLRDEPYNEKADVFSYGIILCEIIARIQADPDYLPRTENFGLDYDAFQHMVGDCPPDFLQLTFNCCNMDPKLRPSFVEIGKTLEEILSRLQEEEQERDRKLQPTARGLLEKAPGVKRLSSLDDKIPHKSPCPRRTIWLSRSQSDIFSRKPPRTVSVLDPYYRPRDGAARTPKVNPFSARQDLMGGKIKFFDLPSKSVISLVFDLDAPGPGTMPLADWQEPLAPPIRRWRSLPGSPEFLHQEACPFVGREESLSDGPPPRLSSLKYRVKEIPPFRASALPAAQAHEAMDCSILQEENGFGSRPQGTSPCPAGASEEMEVEERPAGSTPATFSTSGIGLQTQGKQDG

SEQ ID NO: 87838 - protein, 367 aa, Homo sapiens
  Payload ID: 17588
  Gene Name: testis-specific serine kinase 1B
  Uniprot ID: Q9BXA7
  ENSP ID: ENSP00000375081
MDDAAVLKRRGYLLGINLGEGSYAKVKSAYSERLKFNVAIKIIDRKKAPADFLEKFLPREIEILAMLNHCSIIKTYEIFETSHGKVYIVMELAVQGDLLELIKTRGALHEDEARKKFHQLSLAIKYCHDLDVVHRDLKCDNLLLDKDFNIKLSDFSFSKRCLRDDSGRMALSKTFCGSPAYAAPEVLQGIPYQPKVYDIWSLGVILYIMVCGSMPYDDSNIKKMLRIQKEHRVNFPRSKHLTGECKDLIYHMLQPDVNRRLHIDEILSHCWMQPKARGSPSVAINKEGESSRGTEPLWTPEPGSDKKSATKLEPEGEAQPQAQPETKPEGTAMQMSRQSEILGFPSKPSTMETEEGPPQQPPETRAQ

SEQ ID NO: 87839 - protein, 358 aa, Homo sapiens
  Payload ID: 17589
  Gene Name: testis-specific serine kinase 2
  Uniprot ID: Q96PF2
  ENSP ID: ENSP00000382544
MDDATVLRKKGYIVGINLGKGSYAKVKSAYSERLKFNVAVKIIDRKKTPTDFVERFLPREMDILATVNHGSIIKTYEIFETSDGRIYIIMELGVQGDLLEFIKCQGALHEDVARKMFRQLSSAVKYCHDLDIVHRDLKCENLLLDKDFNIKLSDFGFSKRCLRDSNGRIILSKTFCGSAAYAAPEVLQSIPYQPKVYDIWSLGVILYIMVCGSMPYDDSDIRKMLRIQKEHRVDFPRSKNLTCECKDLIYRMLQPDVSQRLHIDEILSHSWLQPPKPKATSSASFKREGEGKYRAECKLDTKTGLRPDHRPDHKLGAKTQHRLLVVPENENRMEDRLAETSRAKDHHISGAEVGKAST

SEQ ID NO: 87840 - protein, 268 aa, Homo sapiens
  Payload ID: 17590
  Gene Name: testis-specific serine kinase 3
  Uniprot ID: Q96PN8
  ENSP ID: ENSP00000362634
MEDFLLSNGYQLGKTIGEGTYSKVKEAFSKKHQRKVAIKVIDKMGGPEEFIQRFLPRELQIVRTLDHKNIIQVYEMLESADGKICLVMELAEGGDVFDCVLNGGPLPESRAKALFRQMVEAIRYCHGCGVAHRDLKCENALLQGFNLKLTDFGFAKVLPKSHRELSQTFCGSTAYAAPEVLQGIPHDSKKGDVWSMGVVLYVMLCASLPFDDTDIPKMLWQQQKGVSFPTHLSISADCQDLLKRLLEPDMILRPSIEEVSWHPWLAST

SEQ ID NO: 87841 - protein, 35 aa, Homo sapiens
  Payload ID: 17590
  Gene Name: testis-specific serine kinase 3
  ENSP ID: ENSP00000459187
MLESADGKICLVMELAEGGDVFDCVLNGGPLPESR

SEQ ID NO: 87842 - protein, 328 aa, Homo sapiens
  Payload ID: 17591
  Gene Name: testis-specific serine kinase 4
  Uniprot ID: Q6SA08
  ENSP ID: ENSP00000287913
MGKGDVLEAAPTTTAYHSLMDEYGYEVGKAIGHGSYGSVYEAFYTKQKVMVAVKIISKKKASDDYLNKFLPREIQVMKVLRHKYLINFYRAIESTSRVYIILELAQGGDVLEWIQRYGACSEPLAGKWFSQLTLGIAYLHSKSIVHRDLKLENLLLDKWENVKISDFGFAKMVPSNQPVGCSPSYRQVNCFSHLSQTYCGSFAYACPEILRGLPYNPFLSDTWSMGVILYTLVVAHLPFDDTNLKKLLRETQKEVTFPANHTISQECKNLILQMLRQATKRATILDIIKDSWVLKFQPEQPTHEIRLLEAMCQLHNTTKQHQSLQITT

SEQ ID NO: 87843 - protein, 338 aa, Homo sapiens
  Payload ID: 17591
  Gene Name: testis-specific serine kinase 4
  Uniprot ID: Q6SA08
  ENSP ID: ENSP00000339179
MGKGDVLEAAPTTTAYHSLMDEYGYEVGKAIGHGSYGSVYEAFYTKQKVMVAVKIISKKKASDDYLNKFLPREIQVMKVLRHKYLINFYRAIESTSRVYIILELAQGGDVLEWIQRYGACSEPLAGKWFSQLTLGIAYLHSKSIVHRLMPSLSAAGRDLKLENLLLDKWENVKISDFGFAKMVPSNQPVGCSPSYRQVNCFSHLSQTYCGSFAYACPEILRGLPYNPFLSDTWSMGVILYTLVVAHLPFDDTNLKKLLRETQKEVTFPANHTISQECKNLILQMLRQATKRATILDIIKDSWVLKFQPEQPTHEIRLLEAMCQLHNTTKQHQSLQITT

SEQ ID NO: 87844 - protein, 135 aa, Homo sapiens
  Payload ID: 17591
  Gene Name: testis-specific serine kinase 4
  ENSP ID: ENSP00000412180
MGKGDVLEAAPTTTAYHSLMDEYGYEVGKAIGHGSYGSVYEAFYTKQKVMVAVKIISKKKASDDYLNKFLPREIQNLILQMLRQATKRATILDIIKDSWVLKFQPEQPTHEIRLLEAMCQLHNTTKQHQSLQITT

SEQ ID NO: 87845 - protein, 108 aa, Homo sapiens
  Payload ID: 17591
  Gene Name: testis-specific serine kinase 4
  ENSP ID: ENSP00000450752
  MOD_RES (1)..(1): Any amino acid
XYRQVNCFSHLSQTYCGSFAYACPEILRGLPYNPFLSDTWSMGVILYTLVVAHLPFDDTNLKKLLRETQKEVTFPANHTISQECKVQLLIACVAQWRKTQARPLSPLL

SEQ ID NO: 87846 - protein, 143 aa, Homo sapiens
  Payload ID: 17591
  Gene Name: testis-specific serine kinase 4
  ENSP ID: ENSP00000451121
  MOD_RES (1)..(1): Any amino acid
XLEAAPTTTAYHSLMDEYGYEVGKAIGHGSYGSVYEAFYTKQKVMVAVKIISKKKASDDYLNKFLPREIQVMKVLRHKYLINFYRAIESTSRVYIILELAQGGDVLEWIQRYGACSEPLAGKWFSQLTLGIAYLHSKSIVHRT

SEQ ID NO: 87847 - protein, 252 aa, Homo sapiens
  Payload ID: 17591
  Gene Name: testis-specific serine kinase 4
  Uniprot ID: Q6SA08
  ENSP ID: ENSP00000452054
MKVLRHKYLINFYRAIESTSRVYIILELAQGGDVLEWIQRYGACSEPLAGKWFSQLTLGIAYLHSKSIVHRDLKLENLLLDKWENVKISDFGFAKMVPSNQPVGCSPSYRQVNCFSHLSQTYCGSFAYACPEILRGLPYNPFLSDTWSMGVILYTLVVAHLPFDDTNLKKLLRETQKEVTFPANHTISQECKNLILQMLRQATKRATILDIIKDSWVLKFQPEQPTHEIRLLEAMCQLHNTTKQHQSLQITT

SEQ ID NO: 87848 - protein, 273 aa, Homo sapiens
  Payload ID: 17592
  Gene Name: testis-specific serine kinase 6
  Uniprot ID: Q9BXA6
  ENSP ID: ENSP00000466056
MSGDKLLSELGYKLGRTIGEGSYSKVKVATSKKYKGTVAIKVVDRRRAPPDFVNKFLPRELSILRGVRHPHIVHVFEFIEVCNGKLYIVMEAAATDLLQAVQRNGRIPGVQARDLFAQIAGAVRYLHDHHLVHRDLKCENVLLSPDERRVKLTDFGFGRQAHGYPDLSTTYCGSAAYASPEVLLGIPYDPKKYDVWSMGVVLYVMVTGCMPFDDSDIAGLPRRQKRGVLYPEGLELSERCKALIAELLQFSPSARPSAGQVARNCWLRAGDSG

SEQ ID NO: 87849 - protein, 273 aa, Homo sapiens; identical to SEQ ID NO: 87848
  Payload ID: 17592
  Gene Name: testis-specific serine kinase 6
  Uniprot ID: Q9BXA6
  ENSP ID: ENSP00000466477

SEQ ID NO: 87850 - protein, 109 aa, Homo sapiens
  Payload ID: 17592
  Gene Name: testis-specific serine kinase 6
  ENSP ID: ENSP00000473413
PDLSTTYCGSAAYASPEVLLGIPYDPKKYDVWSMGVVLYVMVTGCMPFDDSDIAGLPRRQKRGVLYPEGLELSERCKALIAELLQFSPSARPSAGQVARNCWLRAGDSG

SEQ ID NO: 87851 - protein, 592 aa, Homo sapiens
  Payload ID: 17593
  Gene Name: testis-specific serine kinase substrate
  Uniprot ID: Q9UJT2
  ENSP ID: ENSP00000246801
MASVVVKTIWQSKEIHEAGDTPTGVESCSQLVPEAPRRVTSRAKGIPKKKKAVSFHGVEPQMSHQPMHWCLNLKRSSACTNVSLLNLAAMEPTDSTGTDSTVEDLSGQLTLAGPPASPTLPWDPDDADITEILSGVNSGLVRAKDSITSLKEKTNRVNQHVQSLQSECSVLSENLERRRQEAEELEGYCIQLKENCWKVTRSVEDAEIKTNVLKQNSALLEEKLRYLQQQLQDETPRRQEAELQEPEEKQEPEEKQEPEEKQKPEAGLSWNSLGPAATSQGCPGPPGSPDKPSRPHGLVPAGWGMGPRAGEGPYVSEQELQKLFTGIEELRREVSSLTARWHQEEGAVQEALRLLGGLGGRVDGFLGQWERAQREQAQTARDLQELRGRADELCTMVERSAVSVASLRSELEGLGPLKPILEEFGRQFQNSRRGPDLSMNLDRSHQGNCARCASQGSQLSTESLQQLLDRALTSLVDEVKQRGLTPACPSCQRLHKKILELERQALAKHVRAEALSSTLRLAQDEALRAKNLLLTDKMKPEEKMATLDHLHLKMCSLHDHLSNLPLEGSTGTMGGGSSAGTPPKQGGSAPEQ

SEQ ID NO: 87852 - protein, 392 aa, Homo sapiens
  Payload ID: 17593
  Gene Name: testis-specific serine kinase substrate
  ENSP ID: ENSP00000351691
MGDSCPAVTFRSQKENRAGLQEKLRYLQQQLQDETPRRQEAELQEPEEKQEPEEKQEPEEKQKPEAGLSWNSLGPAATSQGCPGPPGSPDKPSRPHGLVPAGWGMGPRAGEGPYVSEQELQKLFTGIEELRREVSSLTARWHQEEGAVQEALRLLGGLGGRVDGFLGQWERAQREQAQTARDLQELRGRADELCTMVERSAVSVASLRSELEGLGPLKPILEEFGRQFQNSRRGPDLSMNLDRSHQGNCARCASQGSQLSTESLQQLLDRALTSLVDEVKQRGLTPACPSCQRLHKKILELERQALAKHVRAEALSSTLRLAQDEALRAKNLLLTDKMKPEEKMATLDHLHLKMCSLHDHLSNLPLEGSTGTMGGGSSAGTPPKQGGSAPEQ

SEQ ID NO: 87853 - protein, 2136 aa, Homo sapiens
  Payload ID: 17594
  Gene Name: tet methylcytosine dioxygenase 1
  Uniprot ID: Q8NFU7
  ENSP ID: ENSP00000362748
MSRSRHARPSRLVRKEDVNKKKKNSQLRKTTKGANKNVASVKTLSPGKLKQLIQERDVKKKTEPKPPVPVRSLLTRAGAARMNLDRTEVLFQNPESLTCNGFTMALRSTSLSRRLSQPPLVVAKSKKVPLSKGLEKQHDCDYKILPALGVKHSENDSVPMQDTQVLPDIETLIGVQNPSLLKGKSQETTQFWSQRVEDSKINIPTHSGPAAEILPGPLEGTRCGEGLFSEETLNDTSGSPKMFAQDTVCAPFPQRATPKVTSQGNPSIQLEELGSRVESLKLSDSYLDPIKSEHDCYPTSSLNKVIPDLNLRNCLALGGSTSPTSVIKFLLAGSKQATLGAKPDHQEAFEATANQQEVSDTTSFLGQAFGAIPHQWELPGADPVHGEALGETPDLPEIPGAIPVQGEVFGTILDQQETLGMSGSVVPDLPVFLPVPPNPIATFNAPSKWPEPQSTVSYGLAVQGAIQILPLGSGHTPQSSSNSEKNSLPPVMAISNVENEKQVHISFLPANTQGFPLAPERGLFHASLGIAQLSQAGPSKSDRGSSQVSVTSTVHVVNTTVVTMPVPMVSTSSSSYTTLLPTLEKKKRKRCGVCEPCQQKTNCGECTYCKNRKNSHQICKKRKCEELKKKPSVVVPLEVIKENKRPQREKKPKVLKADFDNKPVNGPKSESMDYSRCGHGEEQKLELNPHTVENVTKNEDSMTGIEVEKWTQNKKSQLTDHVKGDFSANVPEAEKSKNSEVDKKRTKSPKLFVQTVRNGIKHVHCLPAETNVSFKKFNIEEFGKTLENNSYKFLKDTANHKNAMSSVATDMSCDHLKGRSNVLVFQQPGFNCSSIPHSSHSIINHHASIHNEGDQPKTPENIPSKEPKDGSPVQPSLLSLMKDRRLTLEQVVAIEALTQLSEAPSENSSPSKSEKDEESEQRTASLLNSCKAILYTVRKDLQDPNLQGEPPKLNHCPSLEKQSSCNTVVFNGQTTTLSNSHINSATNQASTKSHEYSKVTNSLSLFIPKSNSSKIDTNKSIAQGIITLDNCSNDLHQLPPRNNEVEYCNQLLDSSKKLDSDDLSCQDATHTQIEEDVATQLTQLASIIKINYIKPEDKKVESTPTSLVTCNVQQKYNQEKGTIQQKPPSSVHNNHGSSLTKQKNPTQKKTKSTPSRDRRKKKPTVVSYQENDRQKWEKLSYMYGTICDIWIASKFQNFGQFCPHDFPTVFGKISSSTKIWKPLAQTRSIMQPKTVFPPLTQIKLQRYPESAEEKVKVEPLDSLSLFHLKTESNGKAFTDKAYNSQVQLTVNANQKAHPLTQPSSPPNQCANVMAGDDQIRFQQVVKEQLMHQRLPTLPGISHETPLPESALTLRNVNVVCSGGITVVSTKSEEEVCSSSFGTSEFSTVDSAQKNFNDYAMNFFTNPTKNLVSITKDSELPTCSCLDRVIQKDKGPYYTHLGAGPSVAAVREIMENRYGQKGNAIRIEIVVYTGKEGKSSHGCPIAKWVLRRSSDEEKVLCLVRQRTGHHCPTAVMVVLIMVWDGIPLPMADRLYTELTENLKSYNGHPTDRRCTLNENRTCTCQGIDPETCGASFSFGCSWSMYFNGCKFGRSPSPRRFRIDPSSPLHEKNLEDNLQSLATRLAPIYKQYAPVAYQNQVEYENVARECRLGSKEGRPFSGVTACLDFCAHPHRDIHNMNNGSTVVCTLTREDNRSLGVIPQDEQLHVLPLYKLSDTDEFGSKEGMEAKIKSGAIEVLAPRRKKRTCFTQPVPRSGKKRAAMMTEVLAHKIRAVEKKPIPRIKRKNNSTTTNNSKPSSLPTLGSNTETVQPEVKSETEPHFILKSSDNTKTYSLMPSAPHPVKEASPGFSWSPKTASATPAPLKNDATASCGFSERSSTPHCTMPSGRLSGANAAAADGPGISQLGEVAPLPTLSAPVMEPLINSEPSTGVTEPLTPHQPNHQPSFLTSPQDLASSPMEEDEQHSEADEPPSDEPLSDDPLSPAEEKLPHIDEYWSDSEHIFLDANIGGVAIAPAHGSVLIECARRELHATTPVEHPNRNHPTRLSLVFYQHKNLNKPQHGFELNKIKFEAKEAKNKKMKASEQKDQAANEGPEQSSEVNELNQIPSHKALTLTHDNVVTVSPYALTHVAGPYNHWV

SEQ ID NO: 87854 - protein, 1194 aa, Homo sapiens
  Payload ID: 17595
  Gene Name: tet methylcytosine dioxygenase 2
  Uniprot ID: Q6N021
  ENSP ID: ENSP00000265149
MEQDRTNHVEGNRLSPFLIPSPPICQTEPLATKLQNGSPLPERAHPEVNGDTKWHSFKSYYGIPCMKGSQNSRVSPDFTQESRGYSKCLQNGGIKRTVSEPSLSGLLQIKKLKQDQKANGERRNFGVSQERNPGESSQPNVSDLSDKKESVSSVAQENAVKDFTSFSTHNCSGPENPELQILNEQEGKSANYHDKNIVLLKNKAVLMPNGATVSASSVEHTHGELLEKTLSQYYPDCVSIAVQKTTSHINAINSQATNELSCEITHPSHTSGQINSAQTSNSELPPKPAAVVSEACDADDADNASKLAAMLNTCSFQKPEQLQQQKSVFEICPSPAENNIQGTTKLASGEEFCSGSSSNLQAPGGSSERYLKQNEMNGAYFKQSSVFTKDSFSATTTPPPPSQLLLSPPPPLPQVPQLPSEGKSTLNGGVLEEHHHYPNQSNTTLLREVKIEGKPEAPPSQSPNPSTHVCSPSPMLSERPQNNCVNRNDIQTAGTMTVPLCSEKTRPMSEHLKHNPPIFGSSGELQDNCQQLMRNKEQEILKGRDKEQTRDLVPPTQHYLKPGWIELKAPRFHQAESHLKRNEASLPSILQYQPNLSNQMTSKQYTGNSNMPGGLPRQAYTQKTTQLEHKSQMYQVEMNQGQSQGTVDQHLQFQKPSHQVHFSKTDHLPKAHVQSLCGTRFHFQQRADSQTEKLMSPVLKQHLNQQASETEPFSNSHLLQHKPHKQAAQTQPSQSSHLPQNQQQQQKLQIKNKEEILQTFPHPQSNNDQQREGSFFGQTKVEECFHGENQYSKSSEFETHNVQMGLEEVQNINRRNSPYSQTMKSSACKIQVSCSNNTHLVSENKEQTTHPELFAGNKTQNLHHMQYFPNNVIPKQDLLHRCFQEQEQKSQQASVLQGYKNRNQDMSGQQAAQLAQQRYLIHNHANVFPVPDQGGSHTQTPPQKDTQKHAALRWHLLQKQEQQQTQQPQTESCHSQMHRPIKVEPGCKPHACMHTAPPENKTWKKVTKQENPPASCDNVQQKSIIETMEQHLKQFHAKSLFDHKALTLKSQKQVKVEMSGPVTVLTRQTTAAELDSHTPALEQQTTSSEKTPTKRTAASVLNNFIESPSKLLDTPIKNLLDTPVKTQYDFPSCRCVGLDRRVKLLGLKESSILVKKAKVLRDVLLLSGWFAEAAVKRSYCVWCGSELATPVRLQ

SEQ ID NO: 87855 - protein, 1165 aa, Homo sapiens
  Payload ID: 17595
  Gene Name: tet methylcytosine dioxygenase 2
  Uniprot ID: Q6N021
  ENSP ID: ENSP00000306705
MEQDRTNHVEGNRLSPFLIPSPPICQTEPLATKLQNGSPLPERAHPEVNGDTKWHSFKSYYGIPCMKGSQNSRVSPDFTQESRGYSKCLQNGGIKRTVSEPSLSGLLQIKKLKQDQKANGERRNFGVSQERNPGESSQPNVSDLSDKKESVSSVAQENAVKDFTSFSTHNCSGPENPELQILNEQEGKSANYHDKNIVLLKNKAVLMPNGATVSASSVEHTHGELLEKTLSQYYPDCVSIAVQKTTSHINAINSQATNELSCEITHPSHTSGQINSAQTSNSELPPKPAAVVSEACDADDADNASKLAAMLNTCSFQKPEQLQQQKSVFEICPSPAENNIQGTTKLASGEEFCSGSSSNLQAPGGSSERYLKQNEMNGAYFKQSSVFTKDSFSATTTPPPPSQLLLSPPPPLPQVPQLPSEGKSTLNGGVLEEHHHYPNQSNTTLLREVKIEGKPEAPPSQSPNPSTHVCSPSPMLSERPQNNCVNRNDIQTAGTMTVPLCSEKTRPMSEHLKHNPPIFGSSGELQDNCQQLMRNKEQEILKGRDKEQTRDLVPPTQHYLKPGWIELKAPRFHQAESHLKRNEASLPSILQYQPNLSNQMTSKQYTGNSNMPGGLPRQAYTQKTTQLEHKSQMYQVEMNQGQSQGTVDQHLQFQKPSHQVHFSKTDHLPKAHVQSLCGTRFHFQQRADSQTEKLMSPVLKQHLNQQASETEPFSNSHLLQHKPHKQAAQTQPSQSSHLPQNQQQQQKLQIKNKEEILQTFPHPQSNNDQQREGSFFGQTKVEECFHGENQYSKSSEFETHNVQMGLEEVQNINRRNSPYSQTMKSSACKIQVSCSNNTHLVSENKEQTTHPELFAGNKTQNLHHMQYFPNNVIPKQDLLHRCFQEQEQKSQQASVLQGYKNRNQDMSGQQAAQLAQQRYLIHNHANVFPVPDQGGSHTQTPPQKDTQKHAALRWHLLQKQEQQQTQQPQTESCHSQMHRPIKVEPGCKPHACMHTAPPENKTWKKVTKQENPPASCDNVQQKSIIETMEQHLKQFHAKSLFDHKALTLKSQKQVKVEMSGPVTVLTRQTTAAELDSHTPALEQQTTSSEKTPTKRTAASVLNNFIESPSKLLDTPIKNLLDTPVKTQYDFPSCRCVGKCQKCTETHGVYPELANLSSDMGFSFFF

SEQ ID NO: 87856 - protein, 2002 aa, Homo sapiens
  Payload ID: 17595
  Gene Name: tet methylcytosine dioxygenase 2
  Uniprot ID: Q6N021
  ENSP ID: ENSP00000369351
MEQDRTNHVEGNRLSPFLIPSPPICQTEPLATKLQNGSPLPERAHPEVNGDTKWHSFKSYYGIPCMKGSQNSRVSPDFTQESRGYSKCLQNGGIKRTVSEPSLSGLLQIKKLKQDQKANGERRNFGVSQERNPGESSQPNVSDLSDKKESVSSVAQENAVKDFTSFSTHNCSGPENPELQILNEQEGKSANYHDKNIVLLKNKAVLMPNGATVSASSVEHTHGELLEKTLSQYYPDCVSIAVQKTTSHINAINSQATNELSCEITHPSHTSGQINSAQTSNSELPPKPAAVVSEACDADDADNASKLAAMLNTCSFQKPEQLQQQKSVFEICPSPAENNIQGTTKLASGEEFCSGSSSNLQAPGGSSERYLKQNEMNGAYFKQSSVFTKDSFSATTTPPPPSQLLLSPPPPLPQVPQLPSEGKSTLNGGVLEEHHHYPNQSNTTLLREVKIEGKPEAPPSQSPNPSTHVCSPSPMLSERPQNNCVNRNDIQTAGTMTVPLCSEKTRPMSEHLKHNPPIFGSSGELQDNCQQLMRNKEQEILKGRDKEQTRDLVPPTQHYLKPGWIELKAPRFHQAESHLKRNEASLPSILQYQPNLSNQMTSKQYTGNSNMPGGLPRQAYTQKTTQLEHKSQMYQVEMNQGQSQGTVDQHLQFQKPSHQVHFSKTDHLPKAHVQSLCGTRFHFQQRADSQTEKLMSPVLKQHLNQQASETEPFSNSHLLQHKPHKQAAQTQPSQSSHLPQNQQQQQKLQIKNKEEILQTFPHPQSNNDQQREGSFFGQTKVEECFHGENQYSKSSEFETHNVQMGLEEVQNINRRNSPYSQTMKSSACKIQVSCSNNTHLVSENKEQTTHPELFAGNKTQNLHHMQYFPNNVIPKQDLLHRCFQEQEQKSQQASVLQGYKNRNQDMSGQQAAQLAQQRYLIHNHANVFPVPDQGGSHTQTPPQKDTQKHAALRWHLLQKQEQQQTQQPQTESCHSQMHRPIKVEPGCKPHACMHTAPPENKTWKKVTKQENPPASCDNVQQKSIIETMEQHLKQFHAKSLFDHKALTLKSQKQVKVEMSGPVTVLTRQTTAAELDSHTPALEQQTTSSEKTPTKRTAASVLNNFIESPSKLLDTPIKNLLDTPVKTQYDFPSCRCVEQIIEKDEGPFYTHLGAGPNVAAIREIMEERFGQKGKAIRIERVIYTGKEGKSSQGCPIAKWVVRRSSSEEKLLCLVRERAGHTCEAAVIVILILVWEGIPLSLADKLYSELTETLRKYGTLTNRRCALNEERTCACQGLDPETCGASFSFGCSWSMYYNGCKFARSKIPRKFKLLGDDPKEEEKLESHLQNLSTLMAPTYKKLAPDAYNNQIEYEHRAPECRLGLKEGRPFSGVTACLDFCAHAHRDLHNMQNGSTLVCTLTREDNREFGGKPEDEQLHVLPLYKVSDVDEFGSVEAQEEKKRSGAIQVLSSFRRKVRMLAEPVKTCRQRKLEAKKAAAEKLSSLENSSNKNEKEKSAPSRTKQTENASQAKQLAELLRLSGPVMQQSQQPQPLQKQPPQPQQQQRPQQQQPHHPQTESVNSYSASGSTNPYMRRPNPVSPYPNSSHTSDIYGSTSPMNFYSTSSQAAGSYLNSSNPMNPYPGLLNQNTQYPSYQCNGNLSVDNCSPYLGSYSPQSQPMDLYRYPSQDPLSKLSLPPIHTLYQPRFGNSQSFTSKYLGYGNQNMQGDGFSSCTIRPNVHHVGKLPPYPTHEMDGHFMGATSRLPPNLSNPNMDYKNGEHHSPSHIIHNYSAAPGMFNSSLHALHLQNKENDMLSHTANGLSKMLPALNHDRTACVQGGLHKLSDANGQEKQPLALVQGVASGAEDNDEVWSDSEQSFLDPDIGGVAVAPTHGSILIECAKRELHATTPLKNPNRNHPTRISLVFYQHKSMNEPKHGLALWEAKMAEKAREKEEECEKYGPDYVPQKSHGKKVKREPAEPHETSEPTYLRFIKSLAERTMSVTTDSTVTTSPYAFTRVTGPYNRYI

SEQ ID NO: 87857 - protein, 637 aa, Homo sapiens
  Payload ID: 17595
  Gene Name: tet methylcytosine dioxygenase 2
  ENSP ID: ENSP00000378245
MEQDRTNHVEGNRLSPFLIPSPPICQTEPLATKLQNGSPLPERAHPEVNGDTKWHSFKSYYGIPCMKGSQNSRVSPDFTQESRGYSKCLQNGGIKRTVSEPSLSGLLQIKKLKQDQKANGERRNFGVSQERNPGESSQPNVSDLSDKKESVSSVAQENAVKDFTSFSTHNCSGPENPELQILNEQEGKSANYHDKNIVLLKNKAVLMPNGATVSASSVEHTHGELLEKTLSQYYPDCVSIAVQKTTSHINAINSQATNELSCEITHPSHTSGQINSAQTSNSELPPKPAAVVSEACDADDADNASKLAAMLNTCSFQKPEQLQQQKSVFEICPSPAENNIQGTTKLASGEEFCSGSSSNLQAPGGSSERYLKQNEMNGAYFKQSSVFTKDSFSATTTPPPPSQLLLSPPPPLPQVPQLPSEGKSTLNGGVLEEHHHYPNQSNTTLLREVKIEGKPEAPPSQSPNPSTHVCSPSPMLSERPQNNCVNRNDIQTAGTMTVPLCSEKTRPMSEHLKHNPPIFGSSGELQDNCQQLMRNKEQEILKGRDKEQTRDLVPPTQHYLKPGWIELKAPRFHQAESHLKRNEASLPSILQYQPNLSNQMTSKQYTGNSNMPGGLPRQAYTQKTTQLSTSHKCTKLK

SEQ ID NO: 87858 - protein, 1167 aa, Homo sapiens
  Payload ID: 17595
  Gene Name: tet methylcytosine dioxygenase 2
  ENSP ID: ENSP00000391448
MEQDRTNHVEGNRLSPFLIPSPPICQTEPLATKLQNGSPLPERAHPEVNGDTKWHSFKSYYGIPCMKGSQNSRVSPDFTQESRGYSKCLQNGGIKRTVSEPSLSGLLQIKKLKQDQKANGERRNFGVSQERNPGESSQPNVSDLSDKKESVSSVAQENAVKDFTSFSTHNCSGPENPELQILNEQEGKSANYHDKNIVLLKNKAVLMPNGATVSASSVEHTHGELLEKTLSQYYPDCVSIAVQKTTSHINAINSQATNELSCEITHPSHTSGQINSAQTSNSELPPKPAAVVSEACDADDADNASKLAAMLNTCSFQKPEQLQQQKSVFEICPSPAENNIQGTTKLASGEEFCSGSSSNLQAPGGSSERYLKQNEMNGAYFKQSSVFTKDSFSATTTPPPPSQLLLSPPPPLPQVPQLPSEGKSTLNGGVLEEHHHYPNQSNTTLLREVKIEGKPEAPPSQSPNPSTHVCSPSPMLSERPQNNCVNRNDIQTAGTMTVPLCSEKTRPMSEHLKHNPPIFGSSGELQDNCQQLMRNKEQEILKGRDKEQTRDLVPPTQHYLKPGWIELKAPRFHQAESHLKRNEASLPSILQYQPNLSNQMTSKQYTGNSNMPGGLPRQAYTQKTTQLEHKSQMYQVEMNQGQSQGTVDQHLQFQKPSHQVHFSKTDHLPKAHVQSLCGTRFHFQQRADSQTEKLMSPVLKQHLNQQASETEPFSNSHLLQHKPHKQAAQTQPSQSSHLPQNQQQQQKLQIKNKEEILQTFPHPQSNNDQQREGSFFGQTKVEECFHGENQYSKSSEFETHNVQMGLEEVQNINRRNSPYSQTMKSSACKIQVSCSNNTHLVSENKEQTTHPELFAGNKTQNLHHMQYFPNNVIPKQDLLHRCFQEQEQKSQQASVLQGYKNRNQDMSGQQAAQLAQQRYLIHNHANVFPVPDQGGSHTQTPPQKDTQKHAALRWHLLQKQEQQQTQQPQTESCHSQMHRPIKVEPGCKPHACMHTAPPENKTWKKVTKQENPPASCDNVQQKSIIETMEQHLKQFHAKSLFDHKALTLKSQKQVKVEMSGPVTVLTRQTTAAELDSHTPALEQQTTSSEKTPTKRTAASVLNNFIESPSKLLDTPIKNLLDTPVKTQYDFPSCRCVEQIIEKDEGPFYTHLGAGPNVAAIREIMEER

SEQ ID NO: 87859 - protein, 2023 aa, Homo sapiens
  Payload ID: 17595
  Gene Name: tet methylcytosine dioxygenase 2
  ENSP ID: ENSP00000425443
MIQEEQIQLEGSLVDGPEASLMEQDRTNHVEGNRLSPFLIPSPPICQTEPLATKLQNGSPLPERAHPEVNGDTKWHSFKSYYGIPCMKGSQNSRVSPDFTQESRGYSKCLQNGGIKRTVSEPSLSGLLQIKKLKQDQKANGERRNFGVSQERNPGESSQPNVSDLSDKKESVSSVAQENAVKDFTSFSTHNCSGPENPELQILNEQEGKSANYHDKNIVLLKNKAVLMPNGATVSASSVEHTHGELLEKTLSQYYPDCVSIAVQKTTSHINAINSQATNELSCEITHPSHTSGQINSAQTSNSELPPKPAAVVSEACDADDADNASKLAAMLNTCSFQKPEQLQQQKSVFEICPSPAENNIQGTTKLASGEEFCSGSSSNLQAPGGSSERYLKQNEMNGAYFKQSSVFTKDSFSATTTPPPPSQLLLSPPPPLPQVPQLPSEGKSTLNGGVLEEHHHYPNQSNTTLLREVKIEGKPEAPPSQSPNPSTHVCSPSPMLSERPQNNCVNRNDIQTAGTMTVPLCSEKTRPMSEHLKHNPPIFGSSGELQDNCQQLMRNKEQEILKGRDKEQTRDLVPPTQHYLKPGWIELKAPRFHQAESHLKRNEASLPSILQYQPNLSNQMTSKQYTGNSNMPGGLPRQAYTQKTTQLEHKSQMYQVEMNQGQSQGTVDQHLQFQKPSHQVHFSKTDHLPKAHVQSLCGTRFHFQQRADSQTEKLMSPVLKQHLNQQASETEPFSNSHLLQHKPHKQAAQTQPSQSSHLPQNQQQQQKLQIKNKEEILQTFPHPQSNNDQQREGSFFGQTKVEECFHGENQYSKSSEFETHNVQMGLEEVQNINRRNSPYSQTMKSSACKIQVSCSNNTHLVSENKEQTTHPELFAGNKTQNLHHMQYFPNNVIPKQDLLHRCFQEQEQKSQQASVLQGYKNRNQDMSGQQAAQLAQQRYLIHNHANVFPVPDQGGSHTQTPPQKDTQKHAALRWHLLQKQEQQQTQQPQTESCHSQMHRPIKVEPGCKPHACMHTAPPENKTWKKVTKQENPPASCDNVQQKSIIETMEQHLKQFHAKSLFDHKALTLKSQKQVKVEMSGPVTVLTRQTTAAELDSHTPALEQQTTSSEKTPTKRTAASVLNNFIESPSKLLDTPIKNLLDTPVKTQYDFPSCRCVEQIIEKDEGPFYTHLGAGPNVAAIREIMEERFGQKGKAIRIERVIYTGKEGKSSQGCPIAKWVVRRSSSEEKLLCLVRERAGHTCEAAVIVILILVWEGIPLSLADKLYSELTETLRKYGTLTNRRCALNEERTCACQGLDPETCGASFSFGCSWSMYYNGCKFARSKIPRKFKLLGDDPKEEEKLESHLQNLSTLMAPTYKKLAPDAYNNQIEYEHRAPECRLGLKEGRPFSGVTACLDFCAHAHRDLHNMQNGSTLVCTLTREDNREFGGKPEDEQLHVLPLYKVSDVDEFGSVEAQEEKKRSGAIQVLSSFRRKVRMLAEPVKTCRQRKLEAKKAAAEKLSSLENSSNKNEKEKSAPSRTKQTENASQAKQLAELLRLSGPVMQQSQQPQPLQKQPPQPQQQQRPQQQQPHHPQTESVNSYSASGSTNPYMRRPNPVSPYPNSSHTSDIYGSTSPMNFYSTSSQAAGSYLNSSNPMNPYPGLLNQNTQYPSYQCNGNLSVDNCSPYLGSYSPQSQPMDLYRYPSQDPLSKLSLPPIHTLYQPRFGNSQSFTSKYLGYGNQNMQGDGFSSCTIRPNVHHVGKLPPYPTHEMDGHFMGATSRLPPNLSNPNMDYKNGEHHSPSHIIHNYSAAPGMFNSSLHALHLQNKENDMLSHTANGLSKMLPALNHDRTACVQGGLHKLSDANGQEKQPLALVQGVASGAEDNDEVWSDSEQSFLDPDIGGVAVAPTHGSILIECAKRELHATTPLKNPNRNHPTRISLVFYQHKSMNEPKHGLALWEAKMAEKAREKEEECEKYGPDYVPQKSHGKKVKREPAEPHETSEPTYLRFIKSLAERTMSVTTDSTVTTSPYAFTRVTGPYNRYI

SEQ ID NO: 87860 - protein, 110 aa, Homo sapiens
  Payload ID: 17595
  Gene Name: tet methylcytosine dioxygenase 2
  ENSP ID: ENSP00000426885
MEQDRTNHVEGNRLSPFLIPSPPICQTEPLATKLQNGSPLPERAHPEVNGDTKWHSFKSYYGIPCMKGSQNSRVSPDFTQESRGYSKCLQNGGIKRTVSEPSLSGLLQIK

SEQ ID NO: 87861 - protein, 2002 aa, Homo sapiens; identical to SEQ ID NO: 87856
  Payload ID: 17595
  Gene Name: tet methylcytosine dioxygenase 2
  Uniprot ID: Q6N021
  ENSP ID: ENSP00000442788

SEQ ID NO: 87862 - protein, 1702 aa, Homo sapiens
  Payload ID: 17596
  Gene Name: tet methylcytosine dioxygenase 3
  ENSP ID: ENSP00000307803
MHQRRPAEVEIKAGEGAGPWGQGAAVKTGSELSPVDGPVPGQMDSGPVYHGDSRQLSASGVPVNGAREPAGPSLLGTGGPWRVDQKPDWEAAPGPAHTARLEDAHDLVAFSAVAEAVSSYGALSTRLYETFNREMSREAGNNSRGPRPGPEGCSAGSEDLDTLQTALALARHGMKPPNCNCDGPECPDYLEWLEGKIKSVVMEGGEERPRLPGPLPPGEAGLPAPSTRPLLSSEVPQISPQEGLPLSQSALSIAKEKNISLQTAIAIEALTQLSSALPQPSHSTPQASCPLPEALSPPAPFRSPQSYLRAPSWPVVPPEEHSSFAPDSSAFPPATPRTEFPEAWGTDTPPATPRSSWPMPRPSPDPMAELEQLLGSASDYIQSVFKRPEALPTKPKVKVEAPSSSPAPAPSPVLQREAPTPSSEPDTHQKAQTALQQHLHHKRSLFLEQVHDTSFPAPSEPSAPGWWPPPSSPVPRLPDRPPKEKKKKLPTPAGGPVGTEKAAPGIKPSVRKPIQIKKSRPREAQPLFPPVRQIVLEGLRSPASQEVQAHPPAPLPASQGSAVPLPPEPSLALFAPSPSRDSLLPPTQEMRSPSPMTALQPGSTGPLPPADDKLEELIRQFEAEFGDSFGLPGPPSVPIQDPENQQTCLPAPESPFATRSPKQIKIESSGAVTVLSTTCFHSEEGGQEATPTKAENPLTPTLSGFLESPLKYLDTPTKSLLDTPAKRAQAEFPTCDCVEQIVEKDEGPYYTHLGSGPTVASIRELMEERYGEKGKAIRIEKVIYTGKEGKSSRGCPIAKWVIRRHTLEEKLLCLVRHRAGHHCQNAVIVILILAWEGIPRSLGDTLYQELTDTLRKYGNPTSRRCGLNDDRTCACQGKDPNTCGASFSFGCSWSMYFNGCKYARSKTPRKFRLAGDNPKEEEVLRKSFQDLATEVAPLYKRLAPQAYQNQVTNEEIAIDCRLGLKEGRPFAGVTACMDFCAHAHKDQHNLYNGCTVVCTLTKEDNRCVGKIPEDEQLHVLPLYKMANTDEFGSEENQNAKVGSGAIQVLTAFPREVRRLPEPAKSCRQRQLEARKAAAEKKKIQKEKLSTPEKIKQEALELAGITSDPGLSLKGGLSQQGLKPSLKVEPQNHFSSFKYSGNAVVESYSVLGNCRPSDPYSMNSVYSYHSYYAQPSLTSVNGFHSKYALPSFSYYGFPSSNPVFPSQFLGPGAWGHSGSSGSFEKKPDLHALHNSLSPAYGGAEFAELPSQAVPTDAHHPTPHHQQPAYPGPKEYLLPKAPLLHSVSRDPSPFAQSSNCYNRSIKQEPVDPLTQAEPVPRDAGKMGKTPLSEVSQNGGPSHLWGQYSGGPSMSPKRTNGVGGSWGVFSSGESPAIVPDKLSSFGASCLAPSHFTDGQWGLFPGEGQQAASHSGGRLRGKPWSPCKFGNSTSALAGPSLTEKPWALGAGDFNSALKGSPGFQDKLWNPMKGEEGRIPAAGASQLDRAWQSFGLPLGSSEKLFGALKSEEKLWDPFSLEEGPAEEPPSKGAVKEEKGGGGAEEEEEELWSDSEHNFLDENIGGVAVAPAHGSILIECARRELHATTPLKKPNRCHPTRISLVFYQHKNLNQPNHGLALWEAKMKQLAERARARQEEAARLGLGQQEAKLYGKKRKWGGTVVAEPQQKEKKGVVPTRQALAVPTDSAVTVSSYAYTKVTGPYSRWI

SEQ ID NO: 87863 - protein, 1795 aa, Homo sapiens
  Payload ID: 17596
  Gene Name: tet methylcytosine dioxygenase 3
  Uniprot ID: O43151
  ENSP ID: ENSP00000386869
MSQFQVPLAVQPDLPGLYDFPQRQVMVGSFPGSGLSMAGSESQLRGGGDGRKKRKRCGTCEPCRRLENCGACTSCTNRRTHQICKLRKCEVLKKKVGLLKEVEIKAGEGAGPWGQGAAVKTGSELSPVDGPVPGQMDSGPVYHGDSRQLSASGVPVNGAREPAGPSLLGTGGPWRVDQKPDWEAAPGPAHTARLEDAHDLVAFSAVAEAVSSYGALSTRLYETFNREMSREAGNNSRGPRPGPEGCSAGSEDLDTLQTALALARHGMKPPNCNCDGPECPDYLEWLEGKIKSVVMEGGEERPRLPGPLPPGEAGLPAPSTRPLLSSEVPQISPQEGLPLSQSALSIAKEKNISLQTAIAIEALTQLSSALPQPSHSTPQASCPLPEALSPPAPFRSPQSYLRAPSWPVVPPEEHSSFAPDSSAFPPATPRTEFPEAWGTDTPPATPRSSWPMPRPSPDPMAELEQLLGSASDYIQSVFKRPEALPTKPKVKVEAPSSSPAPAPSPVLQREAPTPSSEPDTHQKAQTALQQHLHHKRSLFLEQVHDTSFPAPSEPSAPGWWPPPSSPVPRLPDRPPKEKKKKLPTPAGGPVGTEKAAPGIKPSVRKPIQIKKSRPREAQPLFPPVRQIVLEGLRSPASQEVQAHPPAPLPASQGSAVPLPPEPSLALFAPSPSRDSLLPPTQEMRSPSPMTALQPGSTGPLPPADDKLEELIRQFEAEFGDSFGLPGPPSVPIQDPENQQTCLPAPESPFATRSPKQIKIESSGAVTVLSTTCFHSEEGGQEATPTKAENPLTPTLSGFLESPLKYLDTPTKSLLDTPAKRAQAEFPTCDCVEQIVEKDEGPYYTHLGSGPTVASIRELMEERYGEKGKAIRIEKVIYTGKEGKSSRGCPIAKWVIRRHTLEEKLLCLVRHRAGHHCQNAVIVILILAWEGIPRSLGDTLYQELTDTLRKYGNPTSRRCGLNDDRTCACQGKDPNTCGASFSFGCSWSMYFNGCKYARSKTPRKFRLAGDNPKEEEVLRKSFQDLATEVAPLYKRLAPQAYQNQVTNEEIAIDCRLGLKEGRPFAGVTACMDFCAHAHKDQHNLYNGCTVVCTLTKEDNRCVGKIPEDEQLHVLPLYKMANTDEFGSEENQNAKVGSGAIQVLTAFPREVRRLPEPAKSCRQRQLEARKAAAEKKKIQKEKLSTPEKIKQEALELAGITSDPGLSLKGGLSQQGLKPSLKVEPQNHFSSFKYSGNAVVESYSVLGNCRPSDPYSMNSVYSYHSYYAQPSLTSVNGFHSKYALPSFSYYGFPSSNPVFPSQFLGPGAWGHSGSSGSFEKKPDLHALHNSLSPAYGGAEFAELPSQAVPTDAHHPTPHHQQPAYPGPKEYLLPKAPLLHSVSRDPSPFAQSSNCYNRSIKQEPVDPLTQAEPVPRDAGKMGKTPLSEVSQNGGPSHLWGQYSGGPSMSPKRTNGVGGSWGVFSSGESPAIVPDKLSSFGASCLAPSHFTDGQWGLFPGEGQQAASHSGGRLRGKPWSPCKFGNSTSALAGPSLTEKPWALGAGDFNSALKGSPGFQDKLWNPMKGEEGRIPAAGASQLDRAWQSFGLPLGSSEKLFGALKSEEKLWDPFSLEEGPAEEPPSKGAVKEEKGGGGAEEEEEELWSDSEHNFLDENIGGVAVAPAHGSILIECARRELHATTPLKKPNRCHPTRISLVFYQHKNLNQPNHGLALWEAKMKQLAERARARQEEAARLGLGQQEAKLYGKKRKWGGTVVAEPQQKEKKGVVPTRQALAVPTDSAVTVSSYAYTKVTGPYSRWI

SEQ ID NO: 87864 - protein, 411 aa, Homo sapiens
  Payload ID: 17597
  Gene Name: tetra-peptide repeat homeobox 1
  Uniprot ID: Q8N7U7
  ENSP ID: ENSP00000323455
MLSLREQQLQVWFKNRRAKLARERRLQQQPQRVPGQRGRGARAAPLVPAASASAPQRGPSGILPAAEPTICSLHQAWGGPGCRAQKGIPAALSPGPGPIPAPIPGPAQIPGPLPGSIPGPIPGPAQIPSPIPAPIPGPISGPVQIPGPFRGPIPGPISGPAPIPGPISGPFSGPNPGPIPGPNPGPIPGPISGPIPGPISVPIPGPIPGPISGPISGPNPGPIPGPIPGPISGPNPGPIPGPISGPNPGLIPGPIPGPISGPGPIIGPIPSPAQIPGPGRLQGPGPILSPGRMRSPGSLPGLAPILGPGSGPGSGSVPAPIPGPGSLPAPAPLWPQSPDASDFLPDTQLFPHFTELLLPLDPLEGSSVSTMTSQYQEGDDSMGKKHSGSQPQEEGGSVNENHSGPRLLLDL

SEQ ID NO: 87865 - protein, 401 aa, Homo sapiens
  Payload ID: 17597
  Gene Name: tetra-peptide repeat homeobox 1
  ENSP ID: ENSP00000438712
MLSLREQQLQVWFKNRRAKLARERRLQQQPQRVPGQRGRGARAAPLVPAASASAPQRGPSGILPAAEPTICSLHQAWGGPGCRAQKGIPAALSPGPGPIPAPIPGPAQIPGPLPGSIPGPIPGPAQIPSPIPAPIPGPISGPVQIPGPFRGPIPGPISGPFSGPNPGPIPGPNPGPIPGPISGPIPGPISVPIPGPIPGPISGPISGPNPGPIPGPIPGPISGPNPGPIPGPISGPNPGLIPGPIPGPISGPGPIIGPIPSPAQIPGPGRLQGPGPILSPGRMRSPGSLPGLAPILGPGSGPGSGSVPAPIPGPGSLPAPAPLWPQSPDASDFLPDTQLFPHFTELLLPLDPLEGSSVSTMTSQYQEGDDSMGKKHSGSQPQEEGGSVNENHSGPRLLLDL

SEQ ID NO: 87866 - protein, 508 aa, Homo sapiens
  Payload ID: 17597
  Gene Name: tetra-peptide repeat homeobox 1
  ENSP ID: ENSP00000438832
MDEAGNHHSEQTITRTENQTPHALAHRRMGPCLSCSQLYSQYLGLSQTHSSPPLALDPPRRQRQERTVYTESQQKVLEFYFQKDQYPNYDQRLNLAEMLSLREQQLQVWFKNRRAKLARERRLQQQPQRVPGQRGRGARAAPLVPAASASAPQRGPSGILPAAEPTICSLHQAWGGPGCRAQKGIPAALSPGPGPIPAPIPGPAQIPGPLPGSIPGPIPGPAQIPSPIPAPIPGPISGPVQIPGPFRGPIPGPISGPAPIPGPISGPFSGPNPGPIPGPNPGPIPGPISGPIPGPISVPIPGPIPGPISGPISGPNPGPIPGPIPGPISGPNPGPIPGPISGPNPGLIPGPIPGPISGPGPIIGPIPSPAQIPGPGRLQGPGPILSPGRMRSPGSLPGLAPILGPGSGPGSGSVPAPIPGPGSLPAPAPLWPQSPDASDFLPDTQLFPHFTELLLPLDPLEGSSVSTMTSQYQEGDDSMGKKHSGSQPQEEGGSVNENHSGPRLLLDL

SEQ ID NO: 87867 - protein, 139 aa, Homo sapiens
  Payload ID: 17598
  Gene Name: tetra-peptide repeat homeobox-like
  ENSP ID: ENSP00000322097
MQDPRHPQGLPLSPGLPKRQRQDRTIYNWKQQEVLENHFKEEQYPDYDTRQELAEMLNLREYQVQVWFKNRRAKRSRERWFQKQLQQLQKHPQQQHPQQQHPQQQLQQQQPQQQPQQQQPQQQPQQQQPQQQQLHQQPQ

SEQ ID NO: 87868 - protein, 139 aa, Homo sapiens; identical to SEQ ID NO: 87867
  Payload ID: 17598
  Gene Name: tetra-peptide repeat homeobox-like
  ENSP ID: ENSP00000400448

SEQ ID NO: 87869 - protein, 139 aa, Homo sapiens; identical to SEQ ID NO: 87867
  Payload ID: 17598
  Gene Name: tetra-peptide repeat homeobox-like
  ENSP ID: ENSP00000400824

SEQ ID NO: 87870 - protein, 139 aa, Homo sapiens; identical to SEQ ID NO: 87867
  Payload ID: 17598
  Gene Name: tetra-peptide repeat homeobox-like
  ENSP ID: ENSP00000432662

SEQ ID NO: 87871 - protein, 97 aa, Homo sapiens
  Payload ID: 17598
  Gene Name: tetra-peptide repeat homeobox-like
  ENSP ID: ENSP00000435219
MQDPRHPQGLPLSPGLPKRQRQDRTIYNWKQQEVLENHFKEEQYPDYDTRQELAEMLNLREYQVQVWFKNRRAKRSRERWFQKQLQQLQKHPQQQHP

SEQ ID NO: 87872 - protein, 89 aa, Homo sapiens
  Payload ID: 17598
  Gene Name: tetra-peptide repeat homeobox-like
  ENSP ID: ENSP00000435227
MQDPRHPQGLPLSPGLPKRQRQDRTIYNWKQQEVLENHFKEEQYPDYDTRQELAEMLNLREYQVQVWFKNRRAKRSRERWFQKQLQQLQ

SEQ ID NO: 87873 - protein, 121 aa, Homo sapiens
  Payload ID: 17598
  Gene Name: tetra-peptide repeat homeobox-like
  ENSP ID: ENSP00000435438
MQDPRHPQGLPLSPGLPKRQRQDRTIYNWKQQEVLENHFKEEQYPDYDTRQELAEMLNLREYQVQVWFKNRRAKRSRERWFQKQLQQLQKHPQQQHPQQQHPQQQLQQQQPQQQPQQQQPQ

SEQ ID NO: 87874 - protein, 67 aa, Homo sapiens
  Payload ID: 17598
  Gene Name: tetra-peptide repeat homeobox-like
  ENSP ID: ENSP00000435511
MQDPRHPQGLPLSPGLPKRQRQDRTIYNWKQQEVLENHFKEEQYPDYDTRQELAEMLNLREYQVQVW

SEQ ID NO: 87875 - protein, 58 aa, Homo sapiens
  Payload ID: 17598
  Gene Name: tetra-peptide repeat homeobox-like
  ENSP ID: ENSP00000435853
MQDPRHPQGLPLSPGLPKRQRQDRTIYNWKQQEVLENHFKEEQYPDYDTRQELAEMLN

SEQ ID NO: 87876 - protein, 84 aa, Homo sapiens
  Payload ID: 17598
  Gene Name: tetra-peptide repeat homeobox-like
  ENSP ID: ENSP00000436919
MQDPRHPQGLPLSPGLPKRQRQDRTIYNWKQQEVLENHFKEEQYPDYDTRQELAEMLNLREYQVQVWFKNRRAKRSRERWFQKQ

SEQ ID NO: 87877 - protein, 66 aa, Homo sapiens
  Payload ID: 17598
  Gene Name: tetra-peptide repeat homeobox-like
  ENSP ID: ENSP00000437227
MQDPRHPQGLPLSPGLPKRQRQDRTIYNWKQQEVLENHFKEEQYPDYDTRQELAEMLNLREYQVQV

SEQ ID NO: 87878 - protein, 241 aa, Homo sapiens
  Payload ID: 17599
  Gene Name: tetraspanin 1
  Uniprot ID: O60635
  ENSP ID: ENSP00000361072
MQCFSFIKTMMILFNLLIFLCGAALLAVGIWVSIDGASFLKIFGPLSSSAMQFVNVGYFLIAAGVVVFALGFLGCYGAKTESKCALVTFFFILLLIFIAEVAAAVVALVYTTMAEHFLTLLVVPAIKKDYGSQEDFTQVWNTTMKGLKCCGFTNYTDFEDSPYFKENSAFPPFCCNDNVTNTANETCTKQKAHDQKVEGCFNQLLYDIRTNAVTVGGVAAGIGGLELAAMIVSMYLYCNLQ

SEQ ID NO: 87879 - protein, 393 aa, Homo sapiens
  Payload ID: 17600
  Gene Name: tetraspanin 10
  ENSP ID: ENSP00000480492
MHRLAQGRSQDQPSSPATEEPANLSRRLCWGLSVPASRMEEGERSPLLSQETAGQKPLSVHRPPTSGCLGPVPREDQAEAWGCSCCPPETKHQALSGTPKKGPAPSLSPGSSCVKYLIFLSNFPFSLLGLLALAIGLWGLAVKGSLGSDLGGPLPADPMLGLALGGLVVSAVSLAGYLGALCENTCLLRGFSGGILAFLVLEAVAGALVVALWGPLQDSLEHTLRVAIAHYQDDPDLRFLLDQVQLGLRCCGAASYQDWQQNLYFNCSSPGVQACSLPASCCIDPREDGASVNDQCGFGVLRLDADAAQRVVYLEGCGPPLRRWLRANLAASGGYAIAVVLLQGAELLLAARLLGALAARRGAAYGPGARGEDRAGPQSPSPGAPPAAKPARG

SEQ ID NO: 87880 - protein, 235 aa, Homo sapiens
  Payload ID: 17600
  Gene Name: tetraspanin 10
  ENSP ID: ENSP00000482695
MEEGERSPLLSQETAGQKPLSVHRPPTSGCLGPVPREDQAEAWGCSCCPPETKHQALSGTPKKGPAPSLSPGSSCVKYLIFLSNFPFSLLGLLALAIGLWGLAVKGSLGSDLGGPLPADPMLGLALGGLVVSAVSLAGYLGALCENTCLLRGFSGGILAFLVLEAVAGALVVALWGPLQDSLEHTLRVAIAHYQDDPDLRFLLDQVQLGLRCCGAASYQDWQQNLYCLSSPCSSQ

SEQ ID NO: 87881 - protein, 355 aa, Homo sapiens
  Payload ID: 17600
  Gene Name: tetraspanin 10
  ENSP ID: ENSP00000484664
MEEGERSPLLSQETAGQKPLSVHRPPTSGCLGPVPREDQAEAWGCSCCPPETKHQALSGTPKKGPAPSLSPGSSCVKYLIFLSNFPFSLLGLLALAIGLWGLAVKGSLGSDLGGPLPADPMLGLALGGLVVSAVSLAGYLGALCENTCLLRGFSGGILAFLVLEAVAGALVVALWGPLQDSLEHTLRVAIAHYQDDPDLRFLLDQVQLGLRCCGAASYQDWQQNLYFNCSSPGVQACSLPASCCIDPREDGASVNDQCGFGVLRLDADAAQRVVYLEGCGPPLRRWLRANLAASGGYAIAVVLLQGAELLLAARLLGALAARRGAAYGPGARGEDRAGPQSPSPGAPPAAKPARG

SEQ ID NO: 87882 - protein, 253 aa, Homo sapiens
  Payload ID: 17601
  Gene Name: tetraspanin 11
  Uniprot ID: A1L157
  ENSP ID: ENSP00000261177
MAHYKTEQDDWLIIYLKYLLFVFNFFFWVGGAAVLAVGIWTLVEKSGYLSVLASSTFAASAYILIFAGVLVMVTGFLGFGAILWERKGCLSTYFCLLLVIFLVELVAGVLAHVYYQRLSDELKQHLNRTLAENYGQPGATQITASVDRLQQDFKCCGSNSSADWQHSTYILLREAEGRQVPDSCCKTVVVRCGQRAHPSNIYKVEGGCLTKLEQFLADHLLLMGAVGIGVACLQICGMVLTCCLHQRLQRHFY

SEQ ID NO: 87883 - protein, 253 aa, Homo sapiens; identical to SEQ ID NO: 87882
  Payload ID: 17601
  Gene Name: tetraspanin 11
  Uniprot ID: A1L157
  ENSP ID: ENSP00000437403

SEQ ID NO: 87884 - protein, 41 aa, Homo sapiens
  Payload ID: 17601
  Gene Name: tetraspanin 11
  ENSP ID: ENSP00000443890
MAHYKTEQDDWLIIYLKYLLFVFNFFFWVSEFCTHILFPEH

SEQ ID NO: 87885 - protein, 182 aa, Homo sapiens
  Payload ID: 17601
  Gene Name: tetraspanin 11
  ENSP ID: ENSP00000445503
MVTGFLGFGAILWERKGCLSTYFCLLLVIFLVELVAGVLAHVYYQRLSDELKQHLNRTLAENYGQPGATQITASVDRLQQDFKCCGSNSSADWQHSTYILLREAEGRQVPDSCCKTVVVRCGQRAHPSNIYKVEGGCLTKLEQFLADHLLLMGAVGIGVACLQICGMVLTCCLHQRLQRHFY

SEQ ID NO: 87886 - protein, 305 aa, Homo sapiens
  Payload ID: 17602
  Gene Name: tetraspanin 12
  Uniprot ID: O95859
  ENSP ID: ENSP00000222747
MAREDSVKCLRCLLYALNLLFWLMSISVLAVSAWMRDYLNNVLTLTAETRVEEAVILTYFPVVHPVMIAVCCFLIIVGMLGYCGTVKRNLLLLAWYFGSLLVIFCVELACGVWTYEQELMVPVQWSDMVTLKARMTNYGLPRYRWLTHAWNFFQREFKCCGVVYFTDWLEMTEMDWPPDSCCVREFPGCSKQAHQEDLSDLYQEGCGKKMYSFLRGTKQLQVLRFLGISIGVTQILAMILTITLLWALYYDRREPGTDQMMSLKNDNSQHLSCPSVELLKPSLSRIFEHTSMANSFNTHFEMEEL

SEQ ID NO: 87887 - protein, 95 aa, Homo sapiens
  Payload ID: 17602
  Gene Name: tetraspanin 12
  ENSP ID: ENSP00000388819
MAREDSVKCLRCLLYALNLLFWLMSISVLAVSAWMRDYLNNVLTLTAETRVEEAVILTYFPVVHPVMIAVCCFLIIVGMLGYCGTVKRNLLLLAW

SEQ ID NO: 87888 - protein, 42 aa, Homo sapiens
  Payload ID: 17602
  Gene Name: tetraspanin 12
  ENSP ID: ENSP00000397411
NLLLLAWYFGSLLVIFCVELACGVWTYEQELMSEESHLAIEQ

SEQ ID NO: 87889 - protein, 305 aa, Homo sapiens; identical to SEQ ID NO: 87886
  Payload ID: 17602
  Gene Name: tetraspanin 12
  Uniprot ID: O95859
  ENSP ID: ENSP00000397699

SEQ ID NO: 87890 - protein, 120 aa, Homo sapiens
  Payload ID: 17602
  Gene Name: tetraspanin 12
  ENSP ID: ENSP00000399059
MAREDSVKCLRCLLYALNLLFWLMSISVLAVSAWMRDYLNNVLTLTAETRVEEAVILTYFPVVHPVMIAVCCFLIIVGMLGYCGTVKRNLLLLAWYFGSLLVIFCVELACGVWTYEQELM

SEQ ID NO: 87891 - protein, 112 aa, Homo sapiens
  Payload ID: 17602
  Gene Name: tetraspanin 12
  ENSP ID: ENSP00000404942
MAREDSVKCLRCLLYALNLLFWLMSISVLAVSAWMRDYLNNVLTLTAETRVEEAVILTYFPVVHPVMIAVCCFLIIVGMLGYCGTVKRNLLLLAWYFGSLLVIFCVELACGV

SEQ ID NO: 87892 - protein, 147 aa, Homo sapiens
  Payload ID: 17602
  Gene Name: tetraspanin 12
  ENSP ID: ENSP00000411158
MAREDSVKCLRCLLYALNLLFWLMSISVLAVSAWMRDYLNNVLTLTAETRVEEAVILTYFPVVHPVMIAVCCFLIIVGMLGYCGTVKRNLLLLAWYFGSLLVIFCVELACGVWTYEQELMVPVQWSDMVTLKARMTNYGLPRYRWLT

SEQ ID NO: 87893 - protein, 204 aa, Homo sapiens
  Payload ID: 17603
  Gene Name: tetraspanin 13
  Uniprot ID: O95857
  ENSP ID: ENSP00000262067
MVCGGFACSKNCLCALNLLYTLVSLLLIGIAAWGIGFGLISSLRVVGVVIAVGIFLFLIALVGLIGAVKHHQVLLFFYMIILLLVFIVQFSVSCACLALNQEQQGQLLEVGWNNTASARNDIQRNLNCCGFRSVNPNDTCLASCVKSDHSCSPCAPIIGEYAGEVLRFVGGIGLFFSFTEILGVWLTYRYRNQKDPRANPSAFL

SEQ ID NO: 87894 - protein, 213 aa, Homo sapiens
  Payload ID: 17604
  Gene Name: tetraspanin 14
  ENSP ID: ENSP00000344076
MHYYRYSNAKVSCWYKYLLFSYNIIFWLAGVVFLGVGLWAWSEKGVLSDLTKVTRMHGIDPVVLVLMVGVVMFTLGFAGCVGALRENICLLNFNQCCGAYGPEDWDLNVYFNCSGASYSREKCGVPFSCCVPDPAQKVVNTQCGYDVRIQLKSKWDESIFTKGCIQALESWLPRNIYIVAGVFIAISLLQIFGIFLARTLISDIEAVKAGHHF

SEQ ID NO: 87895 - protein, 270 aa, Homo sapiens
  Payload ID: 17604
  Gene Name: tetraspanin 14
  Uniprot ID: Q8NG11
  ENSP ID: ENSP00000361229
MHYYRYSNAKVSCWYKYLLFSYNIIFWLAGVVFLGVGLWAWSEKGVLSDLTKVTRMHGIDPVVLVLMVGVVMFTLGFAGCVGALRENICLLNFFCGTIVLIFFLELAVAVLAFLFQDWVRDRFREFFESNIKSYRDDIDLQNLIDSLQKANQCCGAYGPEDWDLNVYFNCSGASYSREKCGVPFSCCVPDPAQKVVNTQCGYDVRIQLKSKWDESIFTKGCIQALESWLPRNIYIVAGVFIAISLLQIFGIFLARTLISDIEAVKAGHHF

SEQ ID NO: 87896 - protein, 223 aa, Homo sapiens
  Payload ID: 17604
  Gene Name: tetraspanin 14
  ENSP ID: ENSP00000361230
MERKVLPCFLCLFQGVLSDLTKVTRMHGIDPVVLVLMVGVVMFTLGFAGCVGALRENICLLNFFCGTIVLIFFLELAVAVLAFLFQDWVRDRFREFFESNIKSYRDDIDLQNLIDSLQKANQCCGAYGPEDWDLNVYFNCSGASYSREKCGVPFSCCVPDPAQKVVNTQCGYDVRIQLKSKWDESIFTKGCIQALESWLPRNIYIVAGVFIAISLLQIFGIFL

SEQ ID NO: 87897 - protein, 270 aa, Homo sapiens; identical to SEQ ID NO: 87895
  Payload ID: 17604
  Gene Name: tetraspanin 14
  Uniprot ID: Q8NG11
  ENSP ID: ENSP00000361231

SEQ ID NO: 87898 - protein, 253 aa, Homo sapiens
  Payload ID: 17604
  Gene Name: tetraspanin 14
  Uniprot ID: Q8NG11
  ENSP ID: ENSP00000361237
MHYYRYSNAKVSCWYKYLLFSYNIIFWGVLSDLTKVTRMHGIDPVVLVLMVGVVMFTLGFAGCVGALRENICLLNFFCGTIVLIFFLELAVAVLAFLFQDWVRDRFREFFESNIKSYRDDIDLQNLIDSLQKANQCCGAYGPEDWDLNVYFNCSGASYSREKCGVPFSCCVPDPAQKVVNTQCGYDVRIQLKSKWDESIFTKGCIQALESWLPRNIYIVAGVFIAISLLQIFGIFLARTLISDIEAVKAGHHF

SEQ ID NO: 87899 - protein, 270 aa, Homo sapiens; identical to SEQ ID NO: 87895
  Payload ID: 17604
  Gene Name: tetraspanin 14
  Uniprot ID: Q8NG11
  ENSP ID: ENSP00000396270

SEQ ID NO: 87900 - protein, 147 aa, Homo sapiens
  Payload ID: 17604
  Gene Name: tetraspanin 14
  Uniprot ID: Q8NG11
  ENSP ID: ENSP00000418195
MHYYRYSNAKVSCWYKYLLFSYNIIFWNQCCGAYGPEDWDLNVYFNCSGASYSREKCGVPFSCCVPDPAQKVVNTQCGYDVRIQLKSKWDESIFTKGCIQALESWLPRNIYIVAGVFIAISLLQIFGIFLARTLISDIEAVKAGHHF

SEQ ID NO: 87901 - protein, 253 aa, Homo sapiens; identical to SEQ ID NO: 87898
  Payload ID: 17604
  Gene Name: tetraspanin 14
  Uniprot ID: Q8NG11
  ENSP ID: ENSP00000480263

SEQ ID NO: 87902 - protein, 294 aa, Homo sapiens
  Payload ID: 17605
  Gene Name: tetraspanin 15
  Uniprot ID: O95858
  ENSP ID: ENSP00000362387
MPRGDSEQVRYCARFSYLWLKFSLIIYSTVFWLIGALVLSVGIYAEVERQKYKTLESAFLAPAIILILLGVVMFMVSFIGVLASLRDNLYLLQAFMYILGICLIMELIGGVVALTFRNQTIDFLNDNIRRGIENYYDDLDFKNIMDFVQKKFKCCGGEDYRDWSKNQYHDCSAPGPLACGVPYTCCIRNTTEVVNTMCGYKTIDKERFSVQDVIYVRGCTNAVIIWFMDNYTIMAGILLGILLPQFLGVLLTLLYITRVEDIIMEHSVTDGLLGPGAKPSVEAAGTGCCLCYPN

SEQ ID NO: 87903 - protein, 160 aa, Homo sapiens
  Payload ID: 17605
  Gene Name: tetraspanin 15
  ENSP ID: ENSP00000404528
LQAFMYILGICLIMELIGGVVALTFRNQTIDFLNDNIRRGIENYYDDLDFKNIMDFVQKKFKCCGGEDYRDWSKNQYHDCSAPGPLACGVPYTCCIRNTTEVVNTMCGYKTIDKERFSVQDVIYVRGCTNAVIIWFMDNYTIMAGILLGILLPQITGVSD

SEQ ID NO: 87904 - protein, 245 aa, Homo sapiens
  Payload ID: 17606
  Gene Name: tetraspanin 16
  Uniprot ID: Q9UKR8
  ENSP ID: ENSP00000319486
MAEIHTPYSSLKKLLSLLNGFVAVSGIILVGLGIGGKCGGASLTNVLGLSSAYLLHVGNLCLVMGCITVLLGCAGWYGATKESRGTLLFCILSMVIVLIMEVTAATVVLLFFPIVGDVALEHTFVTLRKNYRGYNEPDDYSTQWNLVMEKLKCCGVNNYTDFSGSSFEMTTGHTYPRSCCKSIGSVSCDGRDVSPNVIHQKGCFHKLLKITKTQSFTLSGSSLGAAVIQRWGSRYVAQAGLELLA

SEQ ID NO: 87905 - protein, 160 aa, Homo sapiens
  Payload ID: 17606
  Gene Name: tetraspanin 16
  Uniprot ID: Q9UKR8
  ENSP ID: ENSP00000338759
MAEIHTPYSSLKKLLSLLNGFVAVSGIILVGLGIGGKCGGASLTNVLGLSSAYLLHVGNLCLVMGCITVLLGCAGWYGATKESRGTLLFCILSMVIVLIMEVTAATVVLLFFPIVGDVALEHTFVTLRKNYRGYNEPDDYSTQWNLVMEKGLSKYFFSSL

SEQ ID NO: 87906 - protein, 38 aa, Homo sapiens
  Payload ID: 17606
  Gene Name: tetraspanin 16
  ENSP ID: ENSP00000466520
RDVSPNVIHQKKLRLGEGTSLVQDHRALAELEFEAPLA

SEQ ID NO: 87907 - protein, 219 aa, Homo sapiens
  Payload ID: 17606
  Gene Name: tetraspanin 16
  Uniprot ID: Q9UKR8
  ENSP ID: ENSP00000466751
MAEIHTPYSSLKKLLSLLNGFVAVSGIILVGLGIGGKCGGASLTNVLGLSSAYLLHVGNLCLVMGCITVLLGCAGWYGATKESRGTLLFVGDVALEHTFVTLRKNYRGYNEPDDYSTQWNLVMEKLKCCGVNNYTDFSGSSFEMTTGHTYPRSCCKSIGSVSCDGRDVSPNVIHQKGCFHKLLKITKTQSFTLSGSSLGAAVIQLPGILATLLLFIKLG

SEQ ID NO: 87908 - protein, 244 aa, Homo sapiens
  Payload ID: 17606
  Gene Name: tetraspanin 16
  Uniprot ID: Q9UKR8
  ENSP ID: ENSP00000467341
MAEIHTPYSSLKKLLSLLNGFVAVSGIILVGLGIGGKCGGASLTNVLGLSSAYLLHVGNLCLVMGCITVLLGCAGWYGATKESRGTLLFCILSMVIVLIMEVTAATVVLLFFPIVGDVALEHTFVTLRKNYRGYNEPDDYSTQWNLVMEKLKCCGVNNYTDFSGSSFEMTTGHTYPRSCCKSIGSVSCDGRDVSPNVIHQKGCFHKLLKITKTQSFTLSGSSLGAAVIQLPGILATLLLFIKLG

SEQ ID NO: 87909 - protein, 160 aa, Homo sapiens; identical to SEQ ID NO: 87905
  Payload ID: 17606
  Gene Name: tetraspanin 16
  Uniprot ID: Q9UKR8
  ENSP ID: ENSP00000480759

SEQ ID NO: 87910 - protein, 188 aa, Homo sapiens
  Payload ID: 17607
  Gene Name: tetraspanin 17
  Uniprot ID: Q96FV3
  ENSP ID: ENSP00000298564
MPGKHQHFQEPEVGCCGKYFLFGFNIVFWFSVFLGLIFFLELATGILAFVFKDWIRDQLNLFINNNVKAYRDDIDLQNLIDFAQEYEDVLNTQCGYDVRLKLELEQQGFIHTKGCVGQFEKWLQDNLIVVAGVFMGIALLQVPLWPHVPLPLPGPPSLSPHLSSVLQIFGICLAQNLVSDIKAVKANW

SEQ ID NO: 87911 - protein, 332 aa, Homo sapiens
  Payload ID: 17607
  Gene Name: tetraspanin 17
  ENSP ID: ENSP00000309036
MPGKHQHFQEPEVGCCGKYFLFGFNIVFWVLGALFLAIGLWAWGEKGVLSNISALTDLGGLDPVWLFVVVGGVMSVLGFAGCIGALRENTFLLKFFSVFLGLIFFLELATGILAFVFKDWIRDQLNLFINNNVKAYRDDIDLQNLIDFAQEYWSCCGARGPNDWNLNIYFNCTDLNPSRERCGVPFSCCVRDPAEDVLNTQCGYDVRLKLVRGELEQQGFIHTKGCVGQFEKWLQDNLIVVAGVFMGIALLQIFGICLAQNLVSDIKAVKANWSKWNDDFENHWLTPTISEVLSTAGPQQNSLTGAPGPAPPSRHVFFGLGGLYPEPTFKNW

SEQ ID NO: 87912 - protein, 329 aa, Homo sapiens
  Payload ID: 17607
  Gene Name: tetraspanin 17
  Uniprot ID: Q96FV3
  ENSP ID: ENSP00000422053
MPGKHQHFQEPEVGCCGKYFLFGFNIVFWVLGALFLAIGLWAWGEKGVLSNISALTDLGGLDPVWLFVVVGGVMSVLGFAGCIGALRENTFLLKFFSVFLGLIFFLELATGILAFVFKDWIRDQLNLFINNNVKAYRDDIDLQNLIDFAQEYWSCCGARGPNDWNLNIYFNCTDLNPSRERCGVPFSCCVRDPAEDVLNTQCGYDVRLKLELEQQGFIHTKGCVGQFEKWLQDNLIVVAGVFMGIALLQIFGICLAQNLVSDIKAVKANWSKWNDDFENHWLTPTISEVLSTAGPQQNSLTGAPGPAPPSRHVFFGLGGLYPEPTFKNW

SEQ ID NO: 87913 - protein, 203 aa, Homo sapiens
  Payload ID: 17607
  Gene Name: tetraspanin 17
  ENSP ID: ENSP00000423610
  MOD_RES (1)..(1): Any amino acid
XGKHQHFQEPEVGCCGKYFLFGFNIVFWFSVFLGLIFFLELATGILAFVFKDWIRDQLNLFINNNVKAYRDDIDLQNLIDFAQEYWSCCGARGPNDWNLNIYFNCTDLNPSRERCGVPFSCCVRDPAEDVLNTQCGYDVRLKLELEQQGFIHTKGCVGQFEKWLQDNLIVVAGVFMGIALLQIFGICLAQNLVSDIKAVKANW

SEQ ID NO: 87914 - protein, 257 aa, Homo sapiens
  Payload ID: 17607
  Gene Name: tetraspanin 17
  ENSP ID: ENSP00000423957
MPGKHQHFQEPEVGCCGKYFLFGFNIVFWVLGALFLAIGLWAWGEKGVLSNISALTDLGGLDPVWLFVVVGGVMSVLGFAGCIGALRENTFLLKFLATGILAFVFKDWIRDQLNLFINNNVKAYRDDIDLQNLIDFAQEYWSCCGARGPNDWNLNIYFNCTDLNPSRERCGVPFSCCVRDPAEDVLNTQCGYDVRLKLELEQQGFIHTKGCVGQFEKWLQDNLIVVAGVFMGIALLQIFGICLAQNLVSDIKAVKAN

SEQ ID NO: 87915 - protein, 309 aa, Homo sapiens
  Payload ID: 17607
  Gene Name: tetraspanin 17
  ENSP ID: ENSP00000425212
MPGKHQHFQEPEVGCCGKYFLFGFNIVFWVLGALFLAIGLWAWGEKGVLSNISALTDLGGLDPVWLFVVVGGVMSVLGFAGCIGALRENTFLLKFDWIRDQLNLFINNNVKAYRDDIDLQNLIDFAQEYWSCCGARGPNDWNLNIYFNCTDLNPSRERCGVPFSCCVRDPAEDVLNTQCGYDVRLKLVRGELEQQGFIHTKGCVGQFEKWLQDNLIVVAGVFMGIALLQIFGICLAQNLVSDIKAVKANWSKWNDDFENHWLTPTISEVLSTAGPQQNSLTGAPGPAPPSRHVFFGLGGLYPEPTFKNW

SEQ ID NO: 87916 - protein, 58 aa, Homo sapiens
  Payload ID: 17607
  Gene Name: tetraspanin 17
  ENSP ID: ENSP00000425975
MPGKHQHFQEPEVGCCGKYFLFGFNIVFWVSAGCWEPCSWLSASGPGVRRAFSRTSQR

SEQ ID NO: 87917 - protein, 263 aa, Homo sapiens
  Payload ID: 17607
  Gene Name: tetraspanin 17
  Uniprot ID: Q96FV3
  ENSP ID: ENSP00000426650
MPGKHQHFQEPEVGCCGKYFLFGFNIVFWVLGALFLAIGLWAWGEKGVLSNISALTDLGGLDPVWLFVVVGGVMSVLGFAGCIGALRENTFLLKFFSVFLGLIFFLELATGILAFVFKDWIRDQLNLFINNNVKAYRDDIDLQNLIDFAQEYWSCCGARGPNDWNLNIYFNCTDLNPSRERCGVPFSCCVRDPAEDVLNTQCGYDVRLKLELEQQGFIHTKGCVGQFEKWLQDNLIVVAGVFMGIALLQIFGICLAQNLEQME

SEQ ID NO: 87918 - protein, 248 aa, Homo sapiens
  Payload ID: 17608
  Gene Name: tetraspanin 18
  Uniprot ID: Q96SJ8
  ENSP ID: ENSP00000339820
MEGDCLSCMKYLMFVFNFFIFLGGACLLAIGIWVMVDPTGFREIVAANPLLLTGAYILLAMGGLLFLLGFLGCCGAVRENKCLLLFFFLFILIIFLAELSAAILAFIFRENLTREFFTKELTKHYQGNNDTDVFSATWNSVMITFGCCGVNGPEDFKFASVFRLLTLDSEEVPEACCRREPQSRDGVLLSREECLLGRSLFLNKQGCYTVILNTFETYVYLAGALAIGVLAIELFAMIFAMCLFRGIQ

SEQ ID NO: 87919 - protein, 157 aa, Homo sapiens
  Payload ID: 17608
  Gene Name: tetraspanin 18
  ENSP ID: ENSP00000427942
MPEELPRWSTMEGDCLSCMKYLMFVFNFFIFLGGACLLAIGIWVMVDPTGFREIVAANPLLLTGAYILLAMGGLLFLLGFLGCCGAVRENKCLLLFFFLFILIIFLAELSAAILAFIFRENLTREFFTKELTKHYQGNNDTDVFSATWNSVMITVSD

SEQ ID NO: 87920 - protein, 271 aa, Homo sapiens
  Payload ID: 17608
  Gene Name: tetraspanin 18
  ENSP ID: ENSP00000429020
  MOD_RES (1)..(1): Any amino acid
XWSTMEGDCLSCMKYLMFVFNFFIFLGGACLLAIGIWVMVDPTGFREIVAANPLLLTGAYILLAMGGLLFLLGFLGCCGAVRENKCLLLFFFLFILIIFLAELSAAILAFIFRENLTREFFTKELTKHYQGNNDTDVFSATWNSVMITFGCCGVNGPEDFKFASVFRLLTLDSEEVPEACCRREPQSRDGVLLSREECLLGRSLFLNKQGCYTVILNTFETYVYLAGALAIGVLAIEEERAHSVSQATGILYQLPASPQAFQSPGTLGATA

SEQ ID NO: 87921 - protein, 248 aa, Homo sapiens; identical to SEQ ID NO: 87918
  Payload ID: 17608
  Gene Name: tetraspanin 18
  Uniprot ID: Q96SJ8
  ENSP ID: ENSP00000429993

SEQ ID NO: 87922 - protein, 76 aa, Homo sapiens
  Payload ID: 17608
  Gene Name: tetraspanin 18
  ENSP ID: ENSP00000430343
MPEELPRWSTMEGDCLSCMKYLMFVFNFFIFLGGACLLAIGIWVMVDPTGFREIVAANPLLLTGAYILLAMGGLLF

SEQ ID NO: 87923 - protein, 138 aa, Homo sapiens
  Payload ID: 17608
  Gene Name: tetraspanin 18
  ENSP ID: ENSP00000433362
MEGDCLSCMKYLMFVFNFFIFFFLFILIIFLAELSAAILAFIFRENLTREFFTKELTKHYQGNNDTDVFSATWNSVMITFGCCGVNGPEDFKFASVFRLLTLDSEEVPEACCRREPQSRDGVLLSREECLLGRSLFLN

SEQ ID NO: 87924 - protein, 146 aa, Homo sapiens
  Payload ID: 17608
  Gene Name: tetraspanin 18
  ENSP ID: ENSP00000433592
MEGDCLSCMKYLMFVFNFFIFLGGACLLAIGIWVMVDPTGFREIVAANPLLLTGAYILLAMGGLLFLLGFLGCCGAVRENKCLLLFFFLFILIIFLAELSAAILAFIFRENLTREFFTKELTKHYQGNNDTDVFSATWNSVMITVS

SEQ ID NO: 87925 - protein, 79 aa, Homo sapiens
  Payload ID: 17608
  Gene Name: tetraspanin 18
  ENSP ID: ENSP00000434625
MEGDCLSCMKYLMFVFNFFIFLGGACLLAIGIWVMVDPTGFREIVAANPLLLTGAYILLAMGGLLFLLGFLGCCGAVRE

SEQ ID NO: 87926 - protein, 53 aa, Homo sapiens
  Payload ID: 17609
  Gene Name: tetraspanin 19
  ENSP ID: ENSP00000408184
MLRNNKTIIIKYFLNLINGAFLVLGLLFMGFGAWLLLDRNNFLTAFGGVSLCH

SEQ ID NO: 87927 - protein, 248 aa, Homo sapiens
  Payload ID: 17609
  Gene Name: tetraspanin 19
  Uniprot ID: P0C672
  ENSP ID: ENSP00000433816
MLRNNKTIIIKYFLNLINGAFLVLGLLFMGFGAWLLLDRNNFLTAFDENNHFIVPISQILIGMGSSTVLFCLLGYIGIHNEIRWLLIVYAVLITWTFAVQVVLSAFIITKKEEVQQLWHDKIDFVISEYGSKDKPEDITKWTILNALQKTLQCCGQHNYTDWIKNKNKENSGQVPCSCTKSTLRKWFCDEPLNATYLEGCENKISAWYNVNVLTLIGINFGLLTSEVFQVSLTVCFFKNIKNIIHAEM

SEQ ID NO: 87928 - protein, 69 aa, Homo sapiens
  Payload ID: 17609
  Gene Name: tetraspanin 19
  ENSP ID: ENSP00000440661
  MOD_RES (1)..(1): Any amino acid
XCCGQHNYTDWIKNKNKENSGQVPCSCTKSTLRKWFCDEPLNATYLEVFQVSLTVCFFKNIKNIIHAEM

SEQ ID NO: 87929 - protein, 88 aa, Homo sapiens
  Payload ID: 17609
  Gene Name: tetraspanin 19
  ENSP ID: ENSP00000446898
MLRNNKTIIIKYFLNLINGAFLVLGLLFMGFGAWLLLDRNNFLTAFDENNHFIVPISQILIGMGSSTVLFCLLGYIGIHNEIRWLLIV

SEQ ID NO: 87930 - protein, 159 aa, Homo sapiens
  Payload ID: 17609
  Gene Name: tetraspanin 19
  ENSP ID: ENSP00000449663
MLRNNKTIIIKYFLNLINGAFLVLGLLFMGFGAWLLLDRNNFLTAFDENNHFIVPISQILIGMGSSTVLFCLLGYIGIHNEIRWLLIVVESRSVTRLECSGTISAHCNLHLPDSSDSPASDSEVAGITVCSIDNMDLCCSGCTFSIHHHKERGGSATMA

SEQ ID NO: 87931 - protein, 196 aa, Homo sapiens
  Payload ID: 17610
  Gene Name: tetraspanin 2
  ENSP ID: ENSP00000358528
MGRFRGGLRCIKYLLLGFNLLFWLAGSAVIAFGLWFRFGGAIKELSSEDKSPEYFYVGLYVLVGAGALMMAVGFFGCCGAMRESQCVLGSAIRHVQTMYEEAYNDYLKDRGKGNGTLITFHSTFQCCGKESSEQVQPTCPKELLGHKNCIDEIETIISVKLQLIGIVGIGIAGLTIFGMIFSMVLCCAIRNSRDVI

SEQ ID NO: 87932 - protein, 221 aa, Homo sapiens
  Payload ID: 17610
  Gene Name: tetraspanin 2
  Uniprot ID: O60636
  ENSP ID: ENSP00000358529
MGRFRGGLRCIKYLLLGFNLLFWLAGSAVIAFGLWFRFGGAIKELSSEDKSPEYFYVGLYVLVGAGALMMAVGFFGCCGAMRESQCVLGSFFTCLLVIFAAEVTTGVFAFIGKGVAIRHVQTMYEEAYNDYLKDRGKGNGTLITFHSTFQCCGKESSEQVQPTCPKELLGHKNCIDEIETIISVKLQLIGIVGIGIAGLTIFGMIFSMVLCCAIRNSRDVI

SEQ ID NO: 87933 - protein, 187 aa, Homo sapiens
  Payload ID: 17610
  Gene Name: tetraspanin 2
  ENSP ID: ENSP00000415256
GLRCIKYLLLGFNLLFWLAGSAVIAFGLWFRFGGAIKELSSEDKSPEYFYVGLYVLVGAGALMMAVGFFGCCGAMRESQCVLGSFFTCLLVIFAAEVTTGVFAFIGKGVAIRHVQTMYEEAYNDYLKDRGKGNGTLITFHSTFQCCGKESSEQVQPTCPKELLGHKIFGMIFSMVLCCAIRNSRDVI

SEQ ID NO: 87934 - protein, 253 aa, Homo sapiens
  Payload ID: 17611
  Gene Name: tetraspanin 3
  Uniprot ID: O60637
  ENSP ID: ENSP00000267970
MGQCGITSSKTVLVFLNLIFWGAAGILCYVGAYVFITYDDYDHFFEDVYTLIPAVVIIAVGALLFIIGLIGCCATIRESRCGLATFVIILLLVFVTEVVVVVLGYVYRAKVENEVDRSIQKVYKTYNGTNPDAASRAIDYVQRQLHCCGIHNYSDWENTDWFKETKNQSVPLSCCRETASNCNGSLAHPSDLYAEGCEALVVKKLQEIMMHVIWAALAFAAIQLLGMLCACIVLCRRSRDPAYELLITGGTYA

SEQ ID NO: 87935 - protein, 228 aa, Homo sapiens
  Payload ID: 17611
  Gene Name: tetraspanin 3
  Uniprot ID: O60637
  ENSP ID: ENSP00000341329
MGQCGITSSKTVLVFLNLIFWGAAGILCYVGAYVFITYDDYDHFFEDVYTLIPAVVIIAVGALLFIIGLIGCCATIRESRCGLATVENEVDRSIQKVYKTYNGTNPDAASRAIDYVQRQLHCCGIHNYSDWENTDWFKETKNQSVPLSCCRETASNCNGSLAHPSDLYAEGCEALVVKKLQEIMMHVIWAALAFAAIQLLGMLCACIVLCRRSRDPAYELLITGGTYA

SEQ ID NO: 87936 - protein, 189 aa, Homo sapiens
  Payload ID: 17611
  Gene Name: tetraspanin 3
  Uniprot ID: O60637
  ENSP ID: ENSP00000407243
MGQCGITSSKTVLVFLNLIFWFVIILLLVFVTEVVVVVLGYVYRAKVENEVDRSIQKVYKTYNGTNPDAASRAIDYVQRQLHCCGIHNYSDWENTDWFKETKNQSVPLSCCRETASNCNGSLAHPSDLYAEGCEALVVKKLQEIMMHVIWAALAFAAIQLLGMLCACIVLCRRSRDPAYELLITGGTYA

SEQ ID NO: 87937 - protein, 164 aa, Homo sapiens
  Payload ID: 17611
  Gene Name: tetraspanin 3
  ENSP ID: ENSP00000452835
MGQCGITSSKTVLVFLNLIFWVENEVDRSIQKVYKTYNGTNPDAASRAIDYVQRQLHCCGIHNYSDWENTDWFKETKNQSVPLSCCRETASNCNGSLAHPSDLYAEGCEALVVKKLQEIMMHVIWAALAFAAIQLLGMLCACIVLCRRSRDPAYELLITGGTYA

SEQ ID NO: 87938 - protein, 45 aa, Homo sapiens
  Payload ID: 17611
  Gene Name: tetraspanin 3
  ENSP ID: ENSP00000453613
MMHVIWAALAFAAIQLLGMLCACIVLCRRSRDPAYELLITGGTYA

SEQ ID NO: 87939 - protein, 45 aa, Homo sapiens; identical to SEQ ID NO: 87938
  Payload ID: 17611
  Gene Name: tetraspanin 3
  ENSP ID: ENSP00000453868

SEQ ID NO: 87940 - protein, 210 aa, Homo sapiens
  Payload ID: 17612
  Gene Name: tetraspanin 31
  Uniprot ID: Q12999
  ENSP ID: ENSP00000257910
MVCGGFACSKNALCALNVVYMLVSLLLIGVAAWGKGLGLVSSIHIIGGVIAVGVFLLLIAVAGLVGAVNHHQVLLFFYMIILGLVFIFQFVISCSCLAINRSKQTDVINASWWVMSNKTRDELERSFDCCGLFNLTTLYQQDYDFCTAICKSQSPTCQMCGEKFLKHSDEALKILGGVGLFFSFTEILGVWLAMRFRNQKDPRANPSAFL

SEQ ID NO: 87941 - protein, 128 aa, Homo sapiens
  Payload ID: 17612
  Gene Name: tetraspanin 31
  ENSP ID: ENSP00000446482
MVCGGFACSKNALCALNVVYMLVSLLLIGVAAWGKGLGLVSSIHIIGGVIAVGVFLLLIAVAGLVGAVNHHQVLLFFYMIILGLVFIFQFVISCSCLAINRSKQIILRCTASGLLGYLLPLGCLVNFP

SEQ ID NO: 87942 - protein, 126 aa, Homo sapiens
  Payload ID: 17612
  Gene Name: tetraspanin 31
  ENSP ID: ENSP00000448209
MVCGGFACSKNALCALNVVYMLVSLLLIGVAAWGKGLGLVSSIHIIGGVIAVGVFLLLIAVAGLICKSQSPTCQMCGEKFLKHSDEALKILGGVGLFFSFTEILGVWLAMRFRNQKDPRANPSAFL

SEQ ID NO: 87943 - protein, 86 aa, Homo sapiens
  Payload ID: 17612
  Gene Name: tetraspanin 31
  ENSP ID: ENSP00000449131
MIILGLVFIFQFVISCSCLAINRSKQTDVINASWWVMSNKTRDELERSFDCCGLFNLTTLYQQDYDFCTAICKSQSPTCQMCGEKF

SEQ ID NO: 87944 - protein, 127 aa, Homo sapiens
  Payload ID: 17612
  Gene Name: tetraspanin 31
  ENSP ID: ENSP00000449199
MVCGGFACSKNALCALNVVYMTDVINASWWVMSNKTRDELERSFDCCGLFNLTTLYQQDYDFCTAICKSQSPTCQMCGEKFLKHSDEALKILGGVGLFFSFTEILGVWLAMRFRNQKDPRANPSAFL

SEQ ID NO: 87945 - protein, 72 aa, Homo sapiens
  Payload ID: 17612
  Gene Name: tetraspanin 31
  ENSP ID: ENSP00000449312
MIILGLVFIFQFVISCSCLAINRSKQTDVINASWWVMSNKTRDELERSFDCCGLFNLTTLYQQDYDFCTAIC

SEQ ID NO: 87946 - protein, 113 aa, Homo sapiens
  Payload ID: 17612
  Gene Name: tetraspanin 31
  ENSP ID: ENSP00000450195
MVCGGFACSKNALCALNVVYMLVSLLLIGVAAWGKGLGLVSSIHIIGGVIAVGVFLLLIAVAGLVGAVNHHQVLLFFYMIILGLVFIFQFVISCSCLAINRSKQMSSMLLGGS

SEQ ID NO: 87947 - protein, 320 aa, Homo sapiens
  Payload ID: 17613
  Gene Name: tetraspanin 32
  Uniprot ID: Q96QS1
  ENSP ID: ENSP00000182290
MGPWSRVRVAKCQMLVTCFFILLLGLSVATMVTLTYFGAHFAVIRRASLEKNPYQAVHQWAFSAGLSLVGLLTLGAVLSAAATVREAQGLMAGGFLCFSLAFCAQVQVVFWRLHSPTQVEDAMLDTYDLVYEQAMKGTSHVRRQELAAIQDVFLCCGKKSPFSRLGSTEADLCQGEEAAREDCLQGIRSFLRTHQQVASSLTSIGLALTVSALLFSSFLWFAIRCGCSLDRKGKYTLTPRACGRQPQEPSLLRCSQGGPTHCLHSEAVAIGPRGCSGSLRWLQESDAAPLPLSCHLAAHRALQGRSRGGLSGCPERGLSD

SEQ ID NO: 87948 - protein, 143 aa, Homo sapiens
  Payload ID: 17613
  Gene Name: tetraspanin 32
  ENSP ID: ENSP00000343285
MPHTLSLPYPQLLGLSVATMVTLTYFGAHFAVIRRASLEKNPYQAVHQWAFSAGLSLVGLLTLGAVLSAAATVREAQGLMAGGFLCFSLAFCAQVQVVFWRLHSPTQVEDAMLDTYDLVYEQAMKVSVLWEEVSFQPSGEHRG

SEQ ID NO: 87949 - protein, 265 aa, Homo sapiens
  Payload ID: 17613
  Gene Name: tetraspanin 32
  ENSP ID: ENSP00000370509
MVTLTYFGAHFAVIRRASLEKNPYQAVHQWAFSAGLSLVGLLTLGAVLSAAATVREAQGLMAGVEDAMLDTYDLVYEQAMKGTSHVRRQELAAIQDVFLCCGKKSPFSRLGSTEADLCQGEEAAREDCLQGIRSFLRTHQQVASSLTSIGLALTVSALLFSSFLWFAIRCGCSLDRKGKYTLTPRACGRQPQEPSLLRCSQGGPTHCLHSEAVAIGPRGCSGSLRWLQESDAAPLPLSCHLAAHRALQGRSRGGLSGCPERGLSD

SEQ ID NO: 87950 - protein, 253 aa, Homo sapiens
  Payload ID: 17613
  Gene Name: tetraspanin 32
  Uniprot ID: Q96QS1
  ENSP ID: ENSP00000370513
MGPWSRVRVAKCQMLVTCFFILLLGLSVATMVTLTYFGAHFAVIRRASLEKNPYQAVHQWAFSAGLSLVGLLTLGAVLSAAATVREAQGLMAGGFLCFSLAFCAQVQVVFWRLHSPTQVEDAMLDTYDLVYEQAMKGTSHVRRQELAAIQDVFLCCGKKSPFSRLGSTEADLCQGEEAAREDCLQGIRSFLRTHQQVASSLTSIGLALTVSALLFSSFLWFAIRCGCSLDRKGKYTLTPRSPGQKSRWAQWVP

SEQ ID NO: 87951 - protein, 258 aa, Homo sapiens
  Payload ID: 17613
  Gene Name: tetraspanin 32
  Uniprot ID: Q96QS1
  ENSP ID: ENSP00000395018
MGPWSRVRVAKCQMLVTCFFILLLGLSVATMVTLTYFGAHFAVIRRASLEKNPYQAVHQWAFSAGLSLVGLLTLGAVLSAAATVREAQGLMAGGFLCFSLAFCAQVQVVFWRLHSPTQVEDAMLDTYDLVYEQAMKGTSHVRRQELAAIQDVFLCCGKKSPFSRLGSTEADLCQGEEAAREDCLQGIRSFLRTHQQVASSLTSIGLALTLGPQGQIHPDPTSMWPPAPGAQPLEMLPGWTHTLSPLRSSCYWSKRMLG

SEQ ID NO: 87952 - protein, 137 aa, Homo sapiens
  Payload ID: 17613
  Gene Name: tetraspanin 32
  ENSP ID: ENSP00000405001
MGPWSRVRVAKCQMLVTCFFILVTAAGPLCGHHGDSYLLRGPLCCHPPSVPGEEPVPGCAPMGLLCGVEPGGPPDSGSRAERCSHREGGPGPHGRGLPVLLPGVLRTGAGGVLETPQPHPAPILPSWMLTCLEEGPA

SEQ ID NO: 87953 - protein, 309 aa, Homo sapiens
  Payload ID: 17613
  Gene Name: tetraspanin 32
  ENSP ID: ENSP00000405205
MPHTLSLPYPQLLGLSVATMVTLTYFGAHFAVIRRASLEKNPYQAVHQWAFSAGLSLVGLLTLGAVLSAAATVREAQGLMAGGFLCFSLAFCAQVQVVFWRLHSPTQVEDAMLDTYDLVYEQAMKGTSHVRRQELAAIQDVFLCCGKKSPFSRLGSTEADLCQGEEAAREDCLQGIRSFLRTHQQVASSLTSIGLALTVSALLFSSFLWFAIRCGCSLDRKGKYTLTPRACGRQPQEPSLLRCSQGGPTHCLHSEAVAIGPRGCSGSLRWLQESDAAPLPLSCHLAAHRALQGRSRGGLSGCPERGLSD

SEQ ID NO: 87954 - protein, 265 aa, Homo sapiens; identical to SEQ ID NO: 87949
  Payload ID: 17613
  Gene Name: tetraspanin 32
  ENSP ID: ENSP00000482901

SEQ ID NO: 87955 - protein, 283 aa, Homo sapiens
  Payload ID: 17614
  Gene Name: tetraspanin 33
  Uniprot ID: Q86UF1
  ENSP ID: ENSP00000483872
MARRPRAPAASGEEFSFVSPLVKYLLFFFNMLFWVISMVMVAVGVYARLMKHAEAALACLAVDPAILLIVVGVLMFLLTFCGCIGSLRENICLLQTFSLCLTAVFLLQLAAGILGFVFSDKARGKVSEIINNAIVHYRDDLDLQNLIDFGQKKFSCCGGISYKDWSQNMYFNCSEDNPSRERCSVPYSCCLPTPDQAVINTMCGQGMQAFDYLEASKVIYTNGCIDKLVNWIHSNLFLLGGVALGLAIPQLVGILLSQILVNQIKDQIKLQLYNQQHRADPWY

SEQ ID NO: 87956 - protein, 204 aa, Homo sapiens
  Payload ID: 17615
  Gene Name: tetraspanin 4
  ENSP ID: ENSP00000324304
MARACLQAVKYLMFAFNLLFWLGGCGVLGVGIWLAATQGSFATLSSSFPSLSAANLLIITGAFVMAIGFVGCLGAIKENKCLLLTFFLLLLLVFLLEATIAILFFAYTDKFRCCGVSNYTDWFEVYNATRVPDSCCLEFSESCGLHAPGTWWKAPCYETVKVWLQENLLAVGIFGLCTALVQILGLTFAMTMYCQVVKADTYCA

SEQ ID NO: 87957 - protein, 174 aa, Homo sapiens
  Payload ID: 17615
  Gene Name: tetraspanin 4
  ENSP ID: ENSP00000380551
MAIGFVGCLGAIKENKCLLLTFFLLLLLVFLLEATIAILFFAYTDKIDRYAQQDLKKGLHLYGTQGNVGLTNAWSIIQTDFRCCGVSNYTDWFEVYNATRVPDSCCLEFSESCGLHAPGTWWKAPCYETVKVWLQENLLAVGIFGLCTALVQILGLTFAMTMYCQVVKADTYCA

SEQ ID NO: 87958 - protein, 238 aa, Homo sapiens
  Payload ID: 17615
  Gene Name: tetraspanin 4
  Uniprot ID: O14817
  ENSP ID: ENSP00000380552
MARACLQAVKYLMFAFNLLFWLGGCGVLGVGIWLAATQGSFATLSSSFPSLSAANLLIITGAFVMAIGFVGCLGAIKENKCLLLTFFLLLLLVFLLEATIAILFFAYTDKIDRYAQQDLKKGLHLYGTQGNVGLTNAWSIIQTDFRCCGVSNYTDWFEVYNATRVPDSCCLEFSESCGLHAPGTWWKAPCYETVKVWLQENLLAVGIFGLCTALVQILGLTFAMTMYCQVVKADTYCA

SEQ ID NO: 87959 - protein, 238 aa, Homo sapiens; identical to SEQ ID NO: 87958
  Payload ID: 17615
  Gene Name: tetraspanin 4
  Uniprot ID: O14817
  ENSP ID: ENSP00000380553

SEQ ID NO: 87960 - protein, 238 aa, Homo sapiens; identical to SEQ ID NO: 87958
  Payload ID: 17615
  Gene Name: tetraspanin 4
  Uniprot ID: O14817
  ENSP ID: ENSP00000380554

SEQ ID NO: 87961 - protein, 238 aa, Homo sapiens; identical to SEQ ID NO: 87958
  Payload ID: 17615
  Gene Name: tetraspanin 4
  Uniprot ID: O14817
  ENSP ID: ENSP00000380555

SEQ ID NO: 87962 - protein, 238 aa, Homo sapiens; identical to SEQ ID NO: 87958
  Payload ID: 17615
  Gene Name: tetraspanin 4
  Uniprot ID: O14817
  ENSP ID: ENSP00000380558

SEQ ID NO: 87963 - protein, 238 aa, Homo sapiens; identical to SEQ ID NO: 87958
  Payload ID: 17615
  Gene Name: tetraspanin 4
  Uniprot ID: O14817
  ENSP ID: ENSP00000386513

SEQ ID NO: 87964 - protein, 257 aa, Homo sapiens
  Payload ID: 17615
  Gene Name: tetraspanin 4
  ENSP ID: ENSP00000386899
MTPRSAGTSAHGAELKRCGMARACLQAVKYLMFAFNLLFWLGGCGVLGVGIWLAATQGSFATLSSSFPSLSAANLLIITGAFVMAIGFVGCLGAIKENKCLLLTFFLLLLLVFLLEATIAILFFAYTDKIDRYAQQDLKKGLHLYGTQGNVGLTNAWSIIQTDFRCCGVSNYTDWFEVYNATRVPDSCCLEFSESCGLHAPGTWWKAPCYETVKVWLQENLLAVGIFGLCTALVQILGLTFAMTMYCQVVKADTYCA

SEQ ID NO: 87965 - protein, 174 aa, Homo sapiens; identical to SEQ ID NO: 87957
  Payload ID: 17615
  Gene Name: tetraspanin 4
  ENSP ID: ENSP00000431943

SEQ ID NO: 87966 - protein, 100 aa, Homo sapiens
  Payload ID: 17615
  Gene Name: tetraspanin 4
  ENSP ID: ENSP00000433980
MAIGFVGCLGAIKENKCLLLTFFLLLLLVFLLEATIAILFFAYTDKIDRYAQQDLKKGLHLYGTQGNVGLTNAWSIIQTDFRCCGVSNYTDWFEVYNATR

SEQ ID NO: 87967 - protein, 132 aa, Homo sapiens
  Payload ID: 17615
  Gene Name: tetraspanin 4
  ENSP ID: ENSP00000434818
MARACLQAVKYLMFAFNLLFWFFLLLLLVFLLEATIAILFFAYTDKIDRYAQQDLKKGLHLYGTQGNVGLTNAWSIIQTDFRCCGVSNYTDWFEVYNATRVPDSCCLEFSESCGLHAPGTWWKAPCYETVKV

SEQ ID NO: 87968 - protein, 159 aa, Homo sapiens
  Payload ID: 17615
  Gene Name: tetraspanin 4
  ENSP ID: ENSP00000436260
MARACLQAVKYLMFAFNLLFWLGGCGVLGVGIWLAATQGSFATLSSSFPSLSAANLLIITGAFVMAIGFVGCLGAIKENKCLLLTFFLLLLLVFLLEATIAILFFAYTDKIDRYAQQDLKKGLHLYGTQGNVGLTNAWSIIQTDFRCCGVSNYTDWFEV

SEQ ID NO: 87969 - protein, 85 aa, Homo sapiens
  Payload ID: 17615
  Gene Name: tetraspanin 4
  ENSP ID: ENSP00000437266
MARACLQAVKYLMFAFNLLFWLGGCGVLGVGIWLAATQGSFATLSSSFPSLSAANLLIITGAFVMAIGFVGCLGAIKENKCLLLT

SEQ ID NO: 87970 - protein, 268 aa, Homo sapiens
  Payload ID: 17616
  Gene Name: tetraspanin 5
  Uniprot ID: P62079
  ENSP ID: ENSP00000307701
MSGKHYKGPEVSCCIKYFIFGFNVIFWFLGITFLGIGLWAWNEKGVLSNISSITDLGGFDPVWLFLVVGGVMFILGFAGCIGALRENTFLLKFFSVFLGIIFFLELTAGVLAFVFKDWIKDQLYFFINNNIRAYRDDIDLQNLIDFTQEYWQCCGAFGADDWNLNIYFNCTDSNASRERCGVPFSCCTKDPAEDVINTQCGYDARQKPEVDQQIVIYTKGCVPQFEKWLQDNLTIVAGIFIGIALLQIFGICLAQNLVSDIEAVRASW

SEQ ID NO: 87971 - protein, 193 aa, Homo sapiens
  Payload ID: 17616
  Gene Name: tetraspanin 5
  ENSP ID: ENSP00000421808
MSGKHYKGPEVSCCIKYFIFGFNVIFWFLGITFLGIGLWAWNEKGVLSNISSITDLGGFDPVWLFLVVGGVMFILGFAGCIGALRENTFLLKFFSVFLGIIFFLELTAGVLAFVFKDWIKDQLYFFINNNIRAYRDDIDLQNLIDFTQEYIPMQVESDVAFHSPAALKIPQKMSSTLSVAMMPGKNQKLTSRL

SEQ ID NO: 87972 - protein, 87 aa, Homo sapiens
  Payload ID: 17616
  Gene Name: tetraspanin 5
  ENSP ID: ENSP00000422351
  MOD_RES (1)..(1): Any amino acid
XVSCCIKYFIFGFNVIFWFLGITFLGIGLWAWNEKGVLSNISSITDLGGFDPVWLFLVVGGVMFILGFAGCIGALRENTFLLKFDKQ

SEQ ID NO: 87973 - protein, 38 aa, Homo sapiens
  Payload ID: 17616
  Gene Name: tetraspanin 5
  ENSP ID: ENSP00000422548
MFILGFAGCIGALRENTFLLKFLKSPVLTEQAENYTFL

SEQ ID NO: 87974 - protein, 110 aa, Homo sapiens
  Payload ID: 17616
  Gene Name: tetraspanin 5
  ENSP ID: ENSP00000423504
MFILGFAGCIGALRENTFLLKFFSVFLGIIFFLELTAGVLAFVFKDWIKDQLYFFINNNIRAYRDDIDLQNLIDFTQEYWQCCGAFGADDWNLNIYFNCTDSNASRERCG

SEQ ID NO: 87975 - protein, 197 aa, Homo sapiens
  Payload ID: 17616
  Gene Name: tetraspanin 5
  ENSP ID: ENSP00000423916
MFILGFAGCIGALRENTFLLKFFSVFLGIIFFLELTAGVLAFVFKDWIKDQLYFFINNNIRAYRDDIDLQNLIDFTQEYWQCCGAFGADDWNLNIYFNCTDSNASRERCGVPFSCCTKDPAEDVINTQCGYDARQKPEVDQQIVIYTKGCVPQFEKWLQDNLTIVAGIFIGIALLQIFGICLAQNLVSDIEAVRASW

SEQ ID NO: 87976 - protein, 60 aa, Homo sapiens
  Payload ID: 17616
  Gene Name: tetraspanin 5
  ENSP ID: ENSP00000426248
MFILGFAGCIGALRENTFLLKFFSVFLGIIFFLELTAGVLAFVFKDWIKDQLYFFINNNI

SEQ ID NO: 87977 - protein, 245 aa, Homo sapiens
  Payload ID: 17617
  Gene Name: tetraspanin 6
  Uniprot ID: O43657
  ENSP ID: ENSP00000362111
MASPSRRLQTKPVITCFKSVLLIYTFIFWITGVILLAVGIWGKVSLENYFSLLNEKATNVPFVLIATGTVIILLGTFGCFATCRASAWMLKLYAMFLTLVFLVELVAAIVGFVFRHEIKNSFKNNYEKALKQYNSTGDYRSHAVDKIQNTLHCCGVTDYRDWTDTNYYSEKGFPKSCCKLEDCTPQRDADKVNNEGCFIKVMTIIESEMGVVAGISFGVACFQLIGIFLAYCLSRAITNNQYEIV

SEQ ID NO: 87978 - protein, 129 aa, Homo sapiens
  Payload ID: 17617
  Gene Name: tetraspanin 6
  ENSP ID: ENSP00000482130
MLKLYAMFLTLVFLVELVAAIVGFVFRHEIKNSFKNNYEKALKQYNSTGDYRSHAVDKIQNTLHCCGVTDYRDWTDTNYYSEKGFPKSCCKLEDCTPQRDADKVNNELIGIFLAYCLSRAITNNQYEIV

SEQ ID NO: 87979 - protein, 137 aa, Homo sapiens
  Payload ID: 17617
  Gene Name: tetraspanin 6
  ENSP ID: ENSP00000482894
MLKLYAMFLTLVFLVELVAAIVGFVFRHEIKNSFKNNYEKALKQYNSTGDYRSHAVDKIQNTLHCCGVTDYRDWTDTNYYSEKGFPKSCCKLEDCTPQRDADKVNNEGCFIKVMTIIESEMGVVAGISFGVACFQDI

SEQ ID NO: 87980 - protein, 266 aa, Homo sapiens
  Payload ID: 17618
  Gene Name: tetraspanin 7
  ENSP ID: ENSP00000286824
MASRRMETKPVITCLKTLLIIYSFVFWKEKAAGFCGRQDVAMALITGVILLAVGVWGKLTLGTYISLIAENSTNAPYVLIGTGTTIVVFGLFGCFATCRGSPWMLKLYAMFLSLVFLAELVAGISGFVFRHEIKDTFLRTYTDAMQTYNGNDERSRAVDHVQRSLSCCGVQNYTNWSTSPYFLEHGIPPSCCMNETDCNPQDLHNLTVAATKVNQKGCYDLVTSFMETNMGIIAGVAFGIAFSQLIGMLLACCLSRFITANQYEMV

SEQ ID NO: 87981 - protein, 249 aa, Homo sapiens
  Payload ID: 17618
  Gene Name: tetraspanin 7
  Uniprot ID: P41732
  ENSP ID: ENSP00000367743
MASRRMETKPVITCLKTLLIIYSFVFWITGVILLAVGVWGKLTLGTYISLIAENSTNAPYVLIGTGTTIVVFGLFGCFATCRGSPWMLKLYAMFLSLVFLAELVAGISGFVFRHEIKDTFLRTYTDAMQTYNGNDERSRAVDHVQRSLSCCGVQNYTNWSTSPYFLEHGIPPSCCMNETDCNPQDLHNLTVAATKVNQKGCYDLVTSFMETNMGIIAGVAFGIAFSQLIGMLLACCLSRFITANQYEMV

SEQ ID NO: 87982 - protein, 45 aa, Homo sapiens
  Payload ID: 17618
  Gene Name: tetraspanin 7
  ENSP ID: ENSP00000418586
MASRRMETKPVITCLKTLLIIYSFVFWPCLLKRIRSWVSPHLHNK

SEQ ID NO: 87983 - protein, 63 aa, Homo sapiens
  Payload ID: 17618
  Gene Name: tetraspanin 7
  ENSP ID: ENSP00000419290
MASRRMETKPVITCLKTLLIIYSFVFWPYFCFETGAQCCMRYRESARWQTGLFAMVKEEAEIY

SEQ ID NO: 87984 - protein, 43 aa, Homo sapiens
  Payload ID: 17618
  Gene Name: tetraspanin 7
  ENSP ID: ENSP00000419321
MASRRMETKPVITCLKTLLIIYSFVFWIHSHPKFTRTQPIKGS

SEQ ID NO: 87985 - protein, 237 aa, Homo sapiens
  Payload ID: 17619
  Gene Name: tetraspanin 8
  Uniprot ID: P19075
  ENSP ID: ENSP00000247829
MAGVSACIKYSMFTFNFLFWLCGILILALAIWVRVSNDSQAIFGSEDVGSSSYVAVDILIAVGAIIMILGFLGCCGAIKESRCMLLLFFIGLLLILLLQVATGILGAVFKSKSDRIVNETLYENTKLLSATGESEKQFQEAIIVFQEEFKCCGLVNGAADWGNNFQHYPELCACLDKQRPCQSYNGKQVYKETCISFIKDFLAKNLIIVIGISFGLAVIEILGLVFSMVLYCQIGNK

SEQ ID NO: 87986 - protein, 237 aa, Homo sapiens; identical to SEQ ID NO: 87985
  Payload ID: 17619
  Gene Name: tetraspanin 8
  Uniprot ID: P19075
  ENSP ID: ENSP00000377003

SEQ ID NO: 87987 - protein, 237 aa, Homo sapiens; identical to SEQ ID NO: 87985
  Payload ID: 17619
  Gene Name: tetraspanin 8
  Uniprot ID: P19075
  ENSP ID: ENSP00000447160

SEQ ID NO: 87988 - protein, 239 aa, Homo sapiens
  Payload ID: 17620
  Gene Name: tetraspanin 9
  Uniprot ID: O75954
  ENSP ID: ENSP00000011898
MARGCLCCLKYMMFLFNLIFWLCGCGLLGVGIWLSVSQGNFATFSPSFPSLSAANLVIAIGTIVMVTGFLGCLGAIKENKCLLLSFFIVLLVILLAELILLILFFVYMDKVNENAKKDLKEGLLLYHTENNVGLKNAWNIIQAEMRCCGVTDYTDWYPVLGENTVPDRCCMENSQGCGRNATTPLWRTGCYEKVKMWFDDNKHVLGTVGMCILIMQILGMAFSMTLFQHIHRTGKKYDA

SEQ ID NO: 87989 - protein, 271 aa, Homo sapiens
  Payload ID: 17620
  Gene Name: tetraspanin 9
  ENSP ID: ENSP00000384488
MARGCLCCLKYMMFLFNLIFWLCGCGLLGVGIWLSVSQGNFATFSPSFPSLSAANLVIAIGTIVMVTGFLGCLGAIKENKCLLLSFFIVLLVILLAELILLILFFVYMDKVNENAKKDLKEGLLLYHTENNVGLKNAWNIIQAEMRCCGVTDYTDWYPVLGENTVPDRCCMENSQGCGRNATTPLWRTGCYEKVKMWFDDNKHVLGTVGMCILIMQVRGASPAASPTLLASASEGRKHREVKAVLVHGGGSGIHHSYSSLAAVPATVSAEL

SEQ ID NO: 87990 - protein, 59 aa, Homo sapiens
  Payload ID: 17620
  Gene Name: tetraspanin 9
  ENSP ID: ENSP00000412908
MARGCLCCLKYMMFLFNLIFWDPPVGENGLTGLAEGGSVFSCQEVVESGGHLARPALSI

SEQ ID NO: 87991 - protein, 239 aa, Homo sapiens; identical to SEQ ID NO: 87988
  Payload ID: 17620
  Gene Name: tetraspanin 9
  Uniprot ID: O75954
  ENSP ID: ENSP00000444799

SEQ ID NO: 87992 - protein, 2925 aa, Homo sapiens
  Payload ID: 17621
  Gene Name: tetratricopeptide repeat and ankyrin repeat containing 1
  Uniprot ID: O15050
  ENSP ID: ENSP00000416168
MWDPRAARVPPRDLAVLLCNKSNAFFSLGKWNEAFVAAKECLQWDPTYVKGYYRAGYSLLRLHQPYEAARMFFEGLRLVQRSQDQAPVADFLVGVFTTMSSDSIVLQSFLPCFDHIFTTGFPTEVWQSVIEKLAKKGLWHSFLLLSAKKDRLPRNIHVPELSLKSLFEKYVFIGLYEKMEQVPKLVQWLISIGASVETIGPYPLHALMRLCIQARENHLFRWLMDHKPEWKGRINQKDGDGCTVLHVVAAHSPGYLVKRQTEDVQMLLRFGADPTLLDRQSRSVVDVLKRNKNFKAIEKINSHLEKLATCSKDLSGFSNGDGPTSENDIFRKVLEQLVKYMNSGNRLLHKNFLKQEVVQRFLRLLSTLQEIPPDLVCDINQDCATTVFKFLLEKQRWPEVLLLLTRKVSGEPPLGDCLIKDCNFSDLDICTIIPHLSTWDQRKKQLLGCLIDSGALPDGLQESQERPVVTCLKHEDFELAFLLLTKGADPRAISLTEGDTPLHAALHIFLEIKADIGFSFLSHLLDLFWSNPTEFDYLNPNVQDSNGNTLMHILFQKGMLKRVKKLLDLLVKFDINFNLKNKEGKDARHRIKKNDSLLLAWNKALMENRRRSRQDSAAHLGKLSKSTAPGHTSQLKSQGSFKSVPCGATARTLPEGSAVPDSWETLPGTQVTRKEPGALRPCSLRDCLMQDITVLIQQVEVDPSFPEDCLQSSEPLEAGAGKEGKKDDKPTLGAGAPDCSEVGEGHAQVGLGALQLVPDDNRGKEGNDDQDDWSTQEIEACLQDFDNMTWEIECTSEMLKKLSSKVMTKVIKKKIILAIQQLGNGEWTQGLQKRLKHLKGSIQLFEAKLDKGARMLWELAIDFSPRCSENPEKIIATEQNTCAMEKSGRIYTEIIRIWDIVLDHCKLADSIKAICNAYNRGLSCVLRKKLKGINKGQVSANMKIQKRIPRCYVEDTEAEKGREHVNPEYFPPASAVETEYNIMKFHSFSTNMAFNILNDTTATVEYPFRVGELEYAVIDLNPRPLEPIILIGRSGTGKTTCCLYRLWKKFHVYWEKAEQAGSPLLAKQVWLKRRLEVEPGKESPGGEEEEEEEDEEEEDSIEVETVESIDEQEYEACAGGAGVEPAGDGQAAEVCAPEHPHQLEHLHQIFVTKNHVLCQEVQRNFIELSKSTKATSHYKPLDPNIHKLQDLRDENFPLFVTSKQLLLLLDASLPKPFFLRNEDGSLKRTIIGWSAQEESTIPSWQEDEEEAEVDGDYSEEDKAVEMRTGDSDPRVYVTFEVFKNEIWPKMTKGRTAYNPALIWKEIKSFLKGSFEALSCPHGRLTEEVYKKLGRKRCPNFKEDRSEIYSLFSLYQQIRSQKGYFDEEDVLYNISRRLSKLRVLPWSIHELYGDEIQDFTQAELALLMKCINDPNSMFLTGDTAQSIMKGVAFRFSDLRSLFHYASRNTIDKQCAVRKPKKIHQLYQNYRSHSGILNLASGVVDLLQFYFPESFDRLPRDSGLFDGPKPTVLESCSVSDLAILLRGNKRKTQPIEFGAHQVILVANETAKEKIPEELGLALVLTIYEAKGLEFDDVLLYNFFTDSEAYKEWKIISSFTPTSTDSREENRPLVEVPLDKPGSSQGRSLMVNPEMYKLLNGELKQLYTAITRARVNLWIFDENREKRAPAFKYFIRRDFVQVVKTDENKDFDDSMFVKTSTPAEWIAQGDYYAKHQCWKVAAKCYQKGGAFEKEKLALAHDTALSMKSKKVSPKEKQLEYLELAKTYLECKEPTLSLKCLSYAKEFQLSAQLCERLGKIRDAAYFYKRSQCYKDAFRCFEQIQEFDLALKMYCQEELFEEAAIAVEKYEEMLKTKTLPISKLSYSASQFYLEAAAKYLSANKMKEMMAVLSKLDIEDQLVFLKSRKRLAEAADLLNREGRREEAALLMKQHGCLLEAARLTADKDFQASCLLGAARLNVARDSDIEHTKDILREALDICYQTGQLSGIAEAHFLQGVILRDFQKLRDAFFKFDTLNHSAGVVEALYEAASQCEAEPEKILGLAPGGLEILLSLVRALKRVTNNAEKEMVKSCFEFFGISQVDAKYCQIAQNDPGPILRIIFDLDLNLREKKTKDHFLIMTDQVKLALNKHLLGRLCQITRSLLGKTYRGVCMRFIVGLKCEDENCEHFHRPLRRCEAKCLVQSKMNLVAINGLLLEAKKVFPKILAEELKEIDYILSTDMYGLCKSILDVLFPKHFHQRVLSENPMACKEILKPNYKSFRFYRFALKEYIHFLFENESARNRRESTDLWLSAMQAFLLSSNYPEEFEKLLHQEEDNYNRELKALESEKDERGRGRGSRIKGIEGKFGMLAPNRDDENMDKTHLCFIRLLENCIDQFYVYRNPEDYKRLFFRFMNVLIKRCKEPLIPSIGNTVALLEFQFIHCGVVLARLWKNVILCLPKSYIALLHYWEFLFSKKDKELGDVFSIIQEYKPKDVTRAIQDFRFHLSYLAKVLCGYENVNFNVLLDAFSEIDYVVSGEAERTLVLCLVMLVNAEEILQPYCKPLLYRHFREIESRLQLMSMDCPGQVPERLLKVVKRVLVAVNVKSVAEALQDLLFERDEEYLMDCDWRWDPVHTKGSIVRGLYYEEVRLNRLLCLDPVDYFAEPECEFGQDEMDELALEDRDHVLATILSQKQRKASIQRKLRRACLVVSLCISWRRRVGTQMERVREEAREPRAGNFKKADVDRTQCDLCGVKFTRGPENYFSPSKAFEGAASEVAVLSRAELEREECQERNSESYEQHIHLEHHQRQQVAYQKYSEFFHEKVDPAIDEGKLVVQDIEQSVWIHSHVGSKEHSHMLQKVQEHIKRVSDMVEDLYRRKAWAGAEEAMTRLVNILILSVRDARDWLMKTETRLKKEGIVQEDDYENEVEDFGELRPRRRSRKCGKQRKY

SEQ ID NO: 87993 - protein, 137 aa, Homo sapiens
  Payload ID: 17621
  Gene Name: tetratricopeptide repeat and ankyrin repeat containing 1
  ENSP ID: ENSP00000485569
MDLTAYAELLKESGNQVLKNGNFSLAIRKYDEAIQILLQLYQWGVPPRDLAVLLCNKSNAFFSLGKWNEAFVAAKECLQWDPTYVKGYYRAGYSLLRLHQPYEAARMFFEGLRLVQRSQDQAPVADFLVGVFTTMSS

SEQ ID NO: 87994 - protein, 292 aa, Homo sapiens
  Payload ID: 17622
  Gene Name: tetratricopeptide repeat domain 1
  Uniprot ID: Q99614
  ENSP ID: ENSP00000231238
MGEKSENCGVPEDLLNGLKVTDTQEAECAGPPVPDPKNQHSQSKLLRDDEAHLQEDQGEEECFHDCSASFEEEPGADKVENKSNEDVNSSELDEEYLIELEKNMSDEEKQKRREESTRLKEEGNEQFKKGDYIEAESSYSRALEMCPSCFQKERSILFSNRAAARMKQDKKEMAINDCSKAIQLNPSYIRAILRRAELYEKTDKLDEALEDYKSILEKDPSIHQAREACMRLPKQIEERNERLKEEMLGKLKDLGNLVLRPFGLSTENFQIKQDSSTGSYSINFVQNPNNNR

SEQ ID NO: 87995 - protein, 163 aa, Homo sapiens
  Payload ID: 17622
  Gene Name: tetratricopeptide repeat domain 1
  ENSP ID: ENSP00000428613
DKKEMAINDCSKAIQLNPSYIRAILRRAELYEKTDKLDEALEDYKSILEKDPSIHQAREACMRLPKQIEERNERLKEEMLGKLKDLGNLVLRPFGLSTENFQIKQDSSTGSWCLCSWCPRFWLSYVQEEAHLLRLTFLIIHTHSPAKASPEPNKPVGWETAQT

SEQ ID NO: 87996 - protein, 292 aa, Homo sapiens; identical to SEQ ID NO: 87994
  Payload ID: 17622
  Gene Name: tetratricopeptide repeat domain 1
  Uniprot ID: Q99614
  ENSP ID: ENSP00000429225

SEQ ID NO: 87997 - protein, 732 aa, Homo sapiens
  Payload ID: 17623
  Gene Name: tetratricopeptide repeat domain 12
  Uniprot ID: Q9H892
  ENSP ID: ENSP00000315160
MDADKEKDLQKFLKNVDEISNLIQEMNSDDPVVQQKAVLETEKRLLLMEEDQEEDECRTTLNKTMISPPQTAMKSAEEINSEAFLASVEKDAKERAKRRRENKVLADALKEKGNEAFAEGNYETAILRYSEGLEKLKDMKVLYTNRAQAYMKLEDYEKALVDCEWALKCDEKCTKAYFHMGKANLALKNYSVSRECYKKILEINPKLQTQVKGYLNQVDLQEKADLQEKEAHELLDSGKNTAVTTKNLLETLSKPDQIPLFYAGGIEILTEMINECTEQTLFRMHNGFSIISDNEVIRRCFSTAGNDAVEEMVCVSVLKLWQAVCSRNEENQRVLVIHHDRARLLAALLSSKVLAIRQQSFALLLHLAQTESGRSLIINHLDLTRLLEALVSFLDFSDKEANTAMGLFTDLALEERFQVWFQANLPGVLPALTGVLKTDPKVSSSSALCQCIAIMGNLSAEPTTRRHMAACEEFGDGCLSLLARCEEDVDLFREVIYTLLGLMMNLCLQAPFVSEVWAVEVSRRCLSLLNSQDGGILTRAAGVLSRTLSSSLKIVEEALRAGVVKKMMKFLKTGGETASRYAIKILAICTNSYHEAREEVIRLDKKLSVMMKLLSSEDEVLVGNAALCLGNCMEVPNVASSLLKTDLLQVLLKLAGSDTQKTAVQVNAGIALGKLCTAEPRVPAESSHLQFGRESAAPEALSPRRWEEMFHMLVFSLSSVDPPPPPPQTCYP

SEQ ID NO: 87998 - protein, 669 aa, Homo sapiens
  Payload ID: 17623
  Gene Name: tetratricopeptide repeat domain 12
  ENSP ID: ENSP00000376743
MDADKEKDLQKFLKNVDEISNLIQEMNSDDPVVQQKAVLETEKRLLLMEEDQEEDECRTTLNKTMISPPQTAMKSAEEINSEAFLASVEKDAKERAKRRRENKVLADALKEKGNEAFAEGNYETAILRYSEGLEKLKDMKVLYTNRAQAYMKLEDYEKALVDCEWALKCDEKCTKAYFHMGKANLALKNYSVSRECYKKILEINPKLQTQVKGYLNQVDLQEKADLQEKEAHELLDSGKNTAVTTKNLLETLSKPDQIPLFYAGGIEILTEMINECTEQTLFRMHNGFSIISDNEVIRRCFSTAGNDAVEEMVCVSVLKLWQAVCSRNEENQRVLVIHHDRARLLAALLSSKVLAIRQQSFALLLHLAQTESGRSLIINHLDLTRLLEALVSFLDFSDKEANTAMGLFTDLALEERFQVWFQANLPGVLPALTGVLKTDPKVSSSSALCQCIAIMGNLSAEPTTRRHMAACEEFGDGCLSLLARCEEDVDLFREVIYTLLGLMMNLCLQAPFVSEVWAVEVSRRCLSLLNSQDGGILTRAAGVLSRTLSSSLKIVEEALRAGVVKKMMKFLKTGGETASRYAIKILAICTNSYHEAREEVIRLDKRAPTPPLETRLVPGNQSLLVQQAEELGFSILKRMWPGWNSITILKPQQRWQNSLGPHPSGCVYQ

SEQ ID NO: 87999 - protein, 202 aa, Homo sapiens
  Payload ID: 17623
  Gene Name: tetratricopeptide repeat domain 12
  ENSP ID: ENSP00000400039
MDADKEKDLQKFLKNVDEISNLIQEMNSDDPVVQQKAVLETEKRLLLMEEDQEEDECRTTLNKTMISPPQTAMKSAEEINSEAFLASVEKDAKERAKRRRENKVLADALKEKGNEAFAEGNYETAILRYSEGLEKLKDMKVLYTNRAQAYMKLEDYEKALVDCEWALKCDEKCTKAYFHMGKANLALKNYSVSRECYKKILE

SEQ ID NO: 88000 - protein, 167 aa, Homo sapiens
  Payload ID: 17623
  Gene Name: tetratricopeptide repeat domain 12
  ENSP ID: ENSP00000402004
MDADKEKDLQKFLKNVDEISNLIQEMNSDDPVVQQKAVLETEKRLLLMEEDQEEDECRTTLNKTMISPPQTAMKSAEEINSEAFLASVEKDAKERAKRRRENKVLADALKEKGNEAFAEGNYETAILRYSEGLEKLKDMKVLYTNRAQAYMKLEDYEKALVDCEWAL

SEQ ID NO: 88001 - protein, 107 aa, Homo sapiens
  Payload ID: 17623
  Gene Name: tetratricopeptide repeat domain 12
  ENSP ID: ENSP00000413335
MDADKEKDLQKFLKNVDEISNLIQEMNSDDPVVQQKAVLETEKRLLLMEEDQEEDECRTTLNKTMISPPQTAMKSAEEINSEAFLASVEKDAKERAKRRRENKVLAD

SEQ ID NO: 88002 - protein, 711 aa, Homo sapiens
  Payload ID: 17623
  Gene Name: tetratricopeptide repeat domain 12
  ENSP ID: ENSP00000419652
MDADKEKDLQKFLKNVDEISNLIQEMNSDDPVVQQKAVLETEKRLLLMEEDQEEDECRTTLNKTMISPPQTAMKSAEEINSEAFLASVEKDAKERAKRRRENKVLADALKEKGNEAFAEGNYETAILRYSEGLEKLKDMKVLYTNRAQAYMKLEDYEKALVDCEWALKSFSFMQCDEKCTKAYFHMGKANLALKNYSVSRECYKKILEINPKLQTQVKGYLNQVDLQEKADLQEKEAHELLDSGKNTAVTTKNLLETLSKPDQIPLFYAGGIEILTEMINECTEQTLFRMHNGFSIISDNEVIRRCFSTAGNDAVEEMVCVSVLKLWQAVCSRNEENQRVLVIHHDRARLLAALLSSKVLAIRQQSFALLLHLAQTESGRSLIINHLDLTRLLEALVSFLDFSDKEANTAMGLFTDLALEERFQVWFQANLPGVLPALTGVLKTDPKVSSSSALCQCIAIMGNLSAEPTTRRHMAACEEFGDGCLSLLARCEEDVDLFREVIYTLLGLMMNLCLQAPFVSEVWAVEVSRRCLSLLNSQDGGILTRAAGVLSRTLSSSLKIVEEALRAGVVKKMMKFLKTGGETASRYAIKILAICTNSYHEAREEVIRLDKKLSVMMKLLSSEDEVLVGNAALCLGNCMEVPNVASSLLKTDLLQVLLKLAGSDTQKTAVQVNAGIALGKLCTAEPRFAAQLRKLHGLEILNSTMKYISDS

SEQ ID NO: 88003 - protein, 181 aa, Homo sapiens
  Payload ID: 17623
  Gene Name: tetratricopeptide repeat domain 12
  ENSP ID: ENSP00000431806
MDADKEKDLQKFLKNVDEISNLIQEMNSDDPVVQQKAVLETEKRLLLMEEDQEEDECRTTLNKTMISPPQTAMKSAEEINSEAFLASVEKDAKERAKRRRENKVLADALKEKGNEAFAEGNYETAILRYSEGLEKLKDMKVLYTNRAQCDEKCTKAYFHMGKANLALKNYSVSRECYKKIL

SEQ ID NO: 88004 - protein, 84 aa, Homo sapiens
  Payload ID: 17623
  Gene Name: tetratricopeptide repeat domain 12
  ENSP ID: ENSP00000433274
  MOD_RES (1)..(1): Any amino acid
XKDMKVLYTNRAQAYMKLEDYEKALVDCEWALKCDEKCTKAYFHMGKANLALKNYSVSRECYKKILEINPKLQTQVFSLHSQAF

SEQ ID NO: 88005 - protein, 705 aa, Homo sapiens
  Payload ID: 17623
  Gene Name: tetratricopeptide repeat domain 12
  Uniprot ID: Q9H892
  ENSP ID: ENSP00000433757
MDADKEKDLQKFLKNVDEISNLIQEMNSDDPVVQQKAVLETEKRLLLMEEDQEEDECRTTLNKTMISPPQTAMKSAEEINSEAFLASVEKDAKERAKRRRENKVLADALKEKGNEAFAEGNYETAILRYSEGLEKLKDMKVLYTNRAQAYMKLEDYEKALVDCEWALKCDEKCTKAYFHMGKANLALKNYSVSRECYKKILEINPKLQTQVKGYLNQVDLQEKADLQEKEAHELLDSGKNTAVTTKNLLETLSKPDQIPLFYAGGIEILTEMINECTEQTLFRMHNGFSIISDNEVIRRCFSTAGNDAVEEMVCVSVLKLWQAVCSRNEENQRVLVIHHDRARLLAALLSSKVLAIRQQSFALLLHLAQTESGRSLIINHLDLTRLLEALVSFLDFSDKEANTAMGLFTDLALEERFQVWFQANLPGVLPALTGVLKTDPKVSSSSALCQCIAIMGNLSAEPTTRRHMAACEEFGDGCLSLLARCEEDVDLFREVIYTLLGLMMNLCLQAPFVSEVWAVEVSRRCLSLLNSQDGGILTRAAGVLSRTLSSSLKIVEEALRAGVVKKMMKFLKTGGETASRYAIKILAICTNSYHEAREEVIRLDKKLSVMMKLLSSEDEVLVGNAALCLGNCMEVPNVASSLLKTDLLQVLLKLAGSDTQKTAVQVNAGIALGKLCTAEPRFAAQLRKLHGLEILNSTMKYISDS

SEQ ID NO: 88006 - protein, 171 aa, Homo sapiens
  Payload ID: 17623
  Gene Name: tetratricopeptide repeat domain 12
  ENSP ID: ENSP00000433916
MNSDDPVVQQKAVLETEKRLLLMEEDQEEDECRTTLNKTMISPPQTAMKSAEEINSEAFLASVEKDAKERAKRRRENKVLADALKEKGNEAFAEGNYETAILRYSEGLEKLKDMKVLYTNRAQAYMKLEDYEKALVDCEWALKCDEKCTKAYFHMGKANLALKNYSVSREC

SEQ ID NO: 88007 - protein, 732 aa, Homo sapiens; identical to SEQ ID NO: 87997
  Payload ID: 17623
  Gene Name: tetratricopeptide repeat domain 12
  Uniprot ID: Q9H892
  ENSP ID: ENSP00000435291

SEQ ID NO: 88008 - protein, 254 aa, Homo sapiens
  Payload ID: 17623
  Gene Name: tetratricopeptide repeat domain 12
  ENSP ID: ENSP00000435308
MDADKEKDLQKFLKNVDEISNLIQEMNSDDPVVQQKAVLETEKRLLLMEEDQEEDECRTTLNKTMISPPQTAMKSAEEINSEAFLASVEKDAKERAKRRRENKVLADALKEKGNEAFAEGNYETAILRYSEGLEKLKDMKVLYTNRAQSRECYKKILEINPKLQTQVKGYLNQVDLQEKADLQEKEAHELLDSGKNTAVTTKNLLETLSKPDQIPLFYAGGIEILTEMINECTEQTLFRMHNGFSIISDNEVIR

SEQ ID NO: 88009 - protein, 82 aa, Homo sapiens
  Payload ID: 17623
  Gene Name: tetratricopeptide repeat domain 12
  ENSP ID: ENSP00000435730
EEALRAGVVKKMMKFLKTGGETASRYAIKILAICTNSYHEAREEVIRLDKKCLPRAVISNLEESLLHLKLCLLAGGKRCFTC

SEQ ID NO: 88010 - protein, 89 aa, Homo sapiens
  Payload ID: 17623
  Gene Name: tetratricopeptide repeat domain 12
  ENSP ID: ENSP00000436677
MLIKRKICRNFLKMWMKSSRECYKKILEINPKLQTQVKGYLNQVDLQEKADLQEKEAHELLDSGKNTAVTTKNLLETLSKPDQIPLFYA

SEQ ID NO: 88011 - protein, 150 aa, Homo sapiens
  Payload ID: 17623
  Gene Name: tetratricopeptide repeat domain 12
  ENSP ID: ENSP00000437030
MDADKEKDLQKFLKNVDEISNLIQEMNSDDPVVQQKAVLETEKRLLLMEEDQEEDECRTTLNKTMISPPQTAMKSAEEINSEAFLASVEKDAKERAKRRRENKVLADALKEKGNEAFAEGNYETAILRYSEGLEKLKDMKVLYTNRAQQW

SEQ ID NO: 88012 - protein, 860 aa, Homo sapiens
  Payload ID: 17624
  Gene Name: tetratricopeptide repeat domain 13
  Uniprot ID: Q8NBP0
  ENSP ID: ENSP00000355621
MAPAGCCCCCCFWGGAVAAAGAARRVLLLLLLGVLSAGLRPGALATEHYSPLSLLKQELQHRQQQEAPAGGGGCSPQSGDWGDQYSAECGESSFLNFHDSDCEPKGSSPCDSLLSLNTEKILSQAKSIAEQKRFPFATDNDSTNEELAIAYVLIGSGLYDEAIRHFSTMLQEEPDLVSAIYGRGIAYGKKGLHDIKNAELALFELSRVITLEPDRPEVFEQRAEILSPLGRINEAVNDLTKAIQLQPSARLYRHRGTLYFISEDYATAHEDFQQSLELNKNQPIAMLYKGLTFFHRGLLKEAIESFKEALKQKVDFIDAYKSLGQAYRELGNFEAATESFQKALLLNQNHVQTLQLRGMMLYHHGSLQEALKNFKRCLQLEPYNEVCQYMKGLSHVAMGQFYEGIKAQTKVMLNDPLPGQKASPEYLKVKYLREYSRYLHAHLDTPLTEYNIDVDLPGSFKDHWAKNLPFLIEDYEEQPGLQPHIKDVLHQNFESYKPEVQELICVADRLGSLMQYETPGFLPNKRIHRAMGLAALEVMQAVQRTWTNSKVRMNGKTRLMQWRDMFDIAVKWRRIADPDQPVLWLDQMPARSLSRGFNNHINLIRGQVINMRYLEYFEKILHFIKDRILVYHGANNPKGLLEVREALEKVHKVEDLLPIMKQFNTKTKDGFTVNTKVPSLKDQGKEYDGFTITITGDKVGNILFSVETQTTEERTQLYHAEIDALYKDLTAKGKVLILSSEFGEADAVCNLILSLVYYFYNLMPLSRGSSVIAYSVIVGALMASGKEVAGKIPKGKLVDFEAMTAPGSEAFSKVAKSWMNLKSISPSYKTLPSVSETFPTLRSMIEVLNTDSSPRCLKKL

SEQ ID NO: 88013 - protein, 806 aa, Homo sapiens
  Payload ID: 17624
  Gene Name: tetratricopeptide repeat domain 13
  Uniprot ID: Q8NBP0
  ENSP ID: ENSP00000355622
MAPAGCCCCCCFWGGAVAAAGAARRVLLLLLLGVLSAGLRPGALATEHYSPLSLLKQELQHRQQQEAPAGGGGCSPQSGDWGDQYSAECGESSFLNFHDSDCEPKGSSPCDSLLSLNTEKILSQAKSIAEQKRFPFATDNDSTNEELAIAYVLIGSGLYDEAIRHFSTMLQILSPLGRINEAVNDLTKAIQLQPSARLYRHRGTLYFISEDYATAHEDFQQSLELNKNQPIAMLYKGLTFFHRGLLKEAIESFKEALKQKVDFIDAYKSLGQAYRELGNFEAATESFQKALLLNQNHVQTLQLRGMMLYHHGSLQEALKNFKRCLQLEPYNEVCQYMKGLSHVAMGQFYEGIKAQTKVMLNDPLPGQKASPEYLKVKYLREYSRYLHAHLDTPLTEYNIDVDLPGSFKDHWAKNLPFLIEDYEEQPGLQPHIKDVLHQNFESYKPEVQELICVADRLGSLMQYETPGFLPNKRIHRAMGLAALEVMQAVQRTWTNSKVRMNGKTRLMQWRDMFDIAVKWRRIADPDQPVLWLDQMPARSLSRGFNNHINLIRGQVINMRYLEYFEKILHFIKDRILVYHGANNPKGLLEVREALEKVHKVEDLLPIMKFNTKTKDGFTVNTKVPSLKDQGKEYDGFTITITGDKVGNILFSVETQTTEERTQLYHAEIDALYKDLTAKGKVLILSSEFGEADAVCNLILSLVYYFYNLMPLSRGSSVIAYSVIVGALMASGKEVAGKIPKGKLVDFEAMTAPGSEAFSKVAKSWMNLKSISPSYKTLPSVSETFPTLRSMIEVLNTDSSPRCLKKL

SEQ ID NO: 88014 - protein, 123 aa, Homo sapiens
  Payload ID: 17624
  Gene Name: tetratricopeptide repeat domain 13
  ENSP ID: ENSP00000428447
DIAVKWRRIADPDQPVLWLDQMPARSLSRGFNNHINLIRGQVINMRYLEYFEKILHFIKDRILVYHGANNPKGLLEVREALEKVHKVEDLLPIMKVTLASEWQSMFLEEKKTNSTFLKRTQNY

SEQ ID NO: 88015 - protein, 166 aa, Homo sapiens
  Payload ID: 17624
  Gene Name: tetratricopeptide repeat domain 13
  ENSP ID: ENSP00000428622
MAPAGCCCCCCFWGGAVAAAGAARRVLLLLLLGVLSAGLRPGALATEHYSPLSLLKQELQHRQQQEAPAGGGGCSPQSGDWGDQYSAECGAIAYVLIGSGLYDEAIRHFSTMLQILSPLGRINEAVNDLTKAIQLQPSARLYRHRGTLYFISEDYATAHEDFQQSL

SEQ ID NO: 88016 - protein, 255 aa, Homo sapiens
  Payload ID: 17624
  Gene Name: tetratricopeptide repeat domain 13
  ENSP ID: ENSP00000430280
MAPAGCCCCCCFWGGAVAAAGAARRVLLLLLLGVLSAGLRPGALATEHYSPLSLLKQELQHRQQQEAPAGGGGCSPQSGDWGDQYSAECGESSFLNFHDSDCEPKGSSPCDSLLSLNTEKILSQAKSIAEQKRFPFATDNDSTNEELAIAYVLIGSGLYDEAIRHFSTMLQILSPLGRINEAVNDLTKAIQLQPSARLYRHRGTLYFISENEVESCAVIRQEPRNQRLLKAEEKSDFEELWRPSMLKLLNPSKKL

SEQ ID NO: 88017 - protein, 186 aa, Homo sapiens
  Payload ID: 17624
  Gene Name: tetratricopeptide repeat domain 13
  ENSP ID: ENSP00000430385
  MOD_RES (1)..(1): Any amino acid
XWGGAVAAAGAARRVLLLLLLGVLSAGLRPGALATEHYSPLSLLKQELQHRQQQEAPAGGGGCSPQSGDWGDQYSAECGESSFLNFHDSDCEPKGSSPCDSLLSLNTEKILSQAKSIAEQKRFPFATDNDSTNEELAIAYVLIGSGLYDEAIRHFSTMLQEAIESFKEALKQKVDFIDAYKSLGQA

SEQ ID NO: 88018 - protein, 150 aa, Homo sapiens
  Payload ID: 17624
  Gene Name: tetratricopeptide repeat domain 13
  ENSP ID: ENSP00000431120
MAPAGCCCCCCFWGGAVAAAGAARRVLLLLLLGVLSAGLRPGALATEHYSPLSLLKQELQHRQQQEAPAGGGGCSPQSGDWGDQYSAECGESSFLNFHDSDCEPKGSSPCDSLLSLNTEKILSQAKSIAEQKRFPFATDNDSTNEELDIY

SEQ ID NO: 88019 - protein, 770 aa, Homo sapiens
  Payload ID: 17625
  Gene Name: tetratricopeptide repeat domain 14
  Uniprot ID: Q96N46
  ENSP ID: ENSP00000296015
MDRDLLRQSLNCHGSSLLSLLRSEQQDNPHFRSLLGSAAEPARGPPPQHPLQGRKEKRVDNIEIQKFISKKADLLFALSWKSDAPATSEINEDSEDHYAIMPPLEQFMEIPSMDRRELFFRDIERGDIVIGRISSIREFGFFMVLICLGSGIMRDIAHLEITALCPLRDVPSHSNHGDPLSYYQTGDIIRAGIKDIDRYHEKLAVSLYSSSLPPHLSGIKLGVISSEELPLYYRRSVELNSNSLESYENVMQSSLGFVNPGVVEFLLEKLGIDESNPPSLMRGLQSKNFSEDDFASALRKKQSASWALKCVKIGVDYFKVGRHVDAMNEYNKALEIDKQNVEALVARGALYATKGSLNKAIEDFELALENCPTHRNARKYLCQTLVERGGQLEEEEKFLNAESYYKKALALDETFKDAEDALQKLHKYMQKSLELREKQAEKEEKQKTKKIETSAEKLRKLLKEEKRLKKKRRKSTSSSSVSSADESVSSSSSSSSSGHKRHKKHKRNRSESSRSSRRHSSRASSNQIDQNRKDECYPVPANTSASFLNHKQEVEKLLGKQDRLQYEKTQIKEKDRCPLSSSSLEIPDDFGGRSEDPRDFYNSYKTQAGSSKTEKPYKSERHFSSRRNSSDSFCRNSEDKIYGYRRFEKDIEGRKEHYRRWEPGSVRHSTSPASSEYSWKSVEKYKKYAHSGSRDFSRHEQRYRLNTNQGEYEREDNYGEDIKTEVPEEDALSSKEHSESSVKKNLPQNLLNIFNQIAEFEKEKGNKSKN

SEQ ID NO: 88020 - protein, 653 aa, Homo sapiens
  Payload ID: 17625
  Gene Name: tetratricopeptide repeat domain 14
  Uniprot ID: Q96N46
  ENSP ID: ENSP00000372027
MDRDLLRQSLNCHGSSLLSLLRSEQQDNPHFRSLLGSAAEPARGPPPQHPLQGRKEKRVDNIEIQKFISKKADLLFALSWKSDAPATSEINEDSEDHYAIMPPLEQFMEIPSMDRRELFFRDIERGDIVIGRISSIREFGFFMVLICLGSGIMRDIAHLEITALCPLRDVPSHSNHGDPLSYYQTGDIIRAGIKDIDRYHEKLAVSLYSSSLPPHLSGIKLGVISSEELPLYYRRSVELNSNSLESYENVMQSSLGFVNPGVVEFLLEKLGIDESNPPSLMRGLQSKNFSEDDFASALRKKQSASWALKCVKIGVDYFKVGRHVDAMNEYNKALEIDKQNVEALVARGALYATKGSLNKAIEDFELALENCPTHRNARKYLCQTLVERGGQLEEEEKFLNAESYYKKALALDETFKDAEDALQKLHKYMQKSLELREKQAEKEEKQKTKKIETSAEKLRKLLKEEKRLKKKRRKSTSSSSVSSADESVSSSSSSSSSGHKRHKKHKRNRSESSRSSRRHSSRASSNQIDQNRKDECYPVPANTSASFLNHKQEVEKLLGKQDRLQYEKTQIKEKDRCPLSSSSLEIPDDFGVYSYLFKKLTIKQPQAGPSGDIPEEGIVIIDDSSIHVTDPEDLQVGQDMEVEDSGIDDPDHG

SEQ ID NO: 88021 - protein, 439 aa, Homo sapiens
  Payload ID: 17625
  Gene Name: tetratricopeptide repeat domain 14
  Uniprot ID: Q96N46
  ENSP ID: ENSP00000413743
MDRDLLRQSLNCHGSSLLSLLRSEQQDNPHFRSLLGSAAEPARGPPPQHPLQGRKEKRVDNIEIQKFISKKADLLFALSWKSDAPATSEINEDSEDHYAIMPPLEQFMEIPSMDRRELFFRDIERGDIVIGRISSIREFGFFMVLICLGSGIMRDIAHLEITALCPLRDVPSHSNHGDPLSYYQTGDIIRAGIKDIDRYHEKLAVSLYSSSLPPHLSGIKLGVISSEELPLYYRRSVELNSNSLESYENVMQSSLGFVNPGVVEFLLEKLGIDESNPPSLMRGLQSKNFSEDDFASALRKKQSASWALKCVKIGVDYFKVGRHVDAMNEYNKALEIDKQNVEALVARGALYATKGSLNKAIEDFELALENCPTHRNARKYLCQTLVERGGQLEEEEKFLNAESYYKKALALDETFKDAEDALQKLHKYMQVIPYFLLEI

SEQ ID NO: 88022 - protein, 133 aa, Homo sapiens
  Payload ID: 17625
  Gene Name: tetratricopeptide repeat domain 14
  ENSP ID: ENSP00000417415
MPPLEQFMEIPSMDRRELFFRDIERGDIVIGRISSIREFGFFMVLICLGSGIMRDIAHLEITALCPLRDVPSHSNHGDPLSYYQTGDIIRAGIKDIDRYHEKLAVSLYSSSLPPHLSGIKLGVISSEELPLYY

SEQ ID NO: 88023 - protein, 185 aa, Homo sapiens
  Payload ID: 17625
  Gene Name: tetratricopeptide repeat domain 14
  ENSP ID: ENSP00000418126
MPPLEQFMEIPSMDRRELFFRDIERGDIVIGRISSIREFGFFMVLICLGSGIMRDIAHLEITALCPLRDVPSHSNHGDPLSYYQTGDIIRAGIKDIDRYHEKLAVSLYSSSLPPHLSGIKLGVISSEELPLYYRRSVELNSNSLESYENVMQSSLGFVNPGVVEFLLEKLGIDESNPPSLMRGLQ

SEQ ID NO: 88024 - protein, 439 aa, Homo sapiens; identical to SEQ ID NO: 88021
  Payload ID: 17625
  Gene Name: tetratricopeptide repeat domain 14
  Uniprot ID: Q96N46
  ENSP ID: ENSP00000419562

SEQ ID NO: 88025 - protein, 192 aa, Homo sapiens
  Payload ID: 17625
  Gene Name: tetratricopeptide repeat domain 14
  ENSP ID: ENSP00000420278
MDRDLLRQSLNCHGSSLLSLLRSEQQDNPHFRSLLGSAAEPARGPPPQHPLQGRKEKRVDNIEIQKFISKKADLLFALSWKSDAPATSEINEDSEDHYAIMPPLEQFMEIPSMDRRELFFRDIERGDIVIGRISSIREFGFFMVLICLGSGIMRDIAHLEITALCPLRDVPSHSNHGDPLSYYQTGDIIRGD

SEQ ID NO: 88026 - protein, 176 aa, Homo sapiens
  Payload ID: 17625
  Gene Name: tetratricopeptide repeat domain 14
  ENSP ID: ENSP00000420652
MDRDLLRQSLNCHGSSLLSLLRSEQQDNPHFRSLLGSAAEPARGPPPQHPLQGRKEKRVDNIEIQKFISKKADLLFALSWKSDAPATSEINEDSEDHYAIMPPLEQFMEIPSMDRRELFFRDIERGDIVIGRISSIREFGFFMVLICLGSGIMRDIAHLEITVVQLLAVSYQTTKI

SEQ ID NO: 88027 - protein, 175 aa, Homo sapiens
  Payload ID: 17625
  Gene Name: tetratricopeptide repeat domain 14
  ENSP ID: ENSP00000420732
MDRDLLRQSLNCHGSSLLSLLRSEQQDNPHFRSLLGSAAEPARGPPPQHPLQGRKEKRVDNIEIQKFISKKADLLFALSWKSDAPATSEINEDSEDHYAIMPPLEQFMEIPSMDRRELFFRDIERGDIVIGRISSIREFGFFMVLICLGSGIMRDIAHLEITVSYFCYLDCFCFC

SEQ ID NO: 88028 - protein, 873 aa, Homo sapiens
  Payload ID: 17626
  Gene Name: tetratricopeptide repeat domain 16
  Uniprot ID: Q8NEE8
  ENSP ID: ENSP00000362386
MTDSDEDALKVDQGPSRDIPKPWVIPAPKGILQHIFGTSHVFQSICDVKPKVTGLTVPLKVREYYSRGQQCLEQADWETAVLLFSRALHLDPQLVDFYALRAEAYLQLCDFSSAAQNLRRAYSLQQDNCKHLERLTFVLYLQGQCLFEQCAFLDALNVFSHAAELQPEKPCFRYRCMACLLALKQHQACLTLITNELKQDTTNADVYIFRARLYNFLQKPHLCYRDLHSALLLNPKHPQARMLLQKMVAQAQQARQDAGILAVQGKLQHALQRINRAIENNPLDPSLFLFRGTMYRRLQEFDGAVEDFLKVLDMVTEDQEDMVRQAQRQLLLTYNDFAVHCYRQGAYQEGVLLLNKALRDEQQEKGLYINRGDCFFQLGNLAFAEADYQQALALSPQDEGANTRMGLLQEKMGFCEQRRKQFQKAENHFSTAIRHNPQKAQYYLYRAKSRQLLQNIFGARQDVATVLLLNPKQPKLSLLMTNLFPGMSVEEVLSTQIAHLARLQLEQMVEGSLQAGSPQGIVGMLKRHELERQKALALQHSWKQGEPLIATSEELKATPEIPQVKPGSSEGEAEAPEEEEEKEKEKKEEKKSELIPSKVASLSDSYLDQTSSASSMSFRTTGTSETEMSAICQEYRSTSATAVTFSDSSLLKTQSSDSGNNREALSHGPRKIKATQGQRQSLSKTEPTQSQRRNSSKTKATIHKRNSSKTKATQSQRRNSSKTRATQGQGQSSSKTEATQGQRQSSSEIEATQGPRQEPSKTKTTRSPRQRPRKVKAARGRSWRPSKVDATQGRSRGLLRSSTKTEAFYDSNWSLSKTEYAQGQGQRSSKAEGAQGKSQGMSSTSSKAESTWGPSPSLSKTEVDQDLTYYEAV

SEQ ID NO: 88029 - protein, 1141 aa, Homo sapiens
  Payload ID: 17627
  Gene Name: tetratricopeptide repeat domain 17
  Uniprot ID: Q96AE7
  ENSP ID: ENSP00000039989
MAAAVGVRGRYELPPCSGPGWLLSLSALLSVAARGAFATTHWVVTEDGKIQQQVDSPMNLKHPHDLVILMRQEATVNYLKELEKQLVAQKIHIEENEDRDTGLEQRHNKEDPDCIKAKVPLGDLDLYDGTYITLESKDISPEDYIDTESPVPPDPEQPDCTKILELPYSIHAFQHLRGVQERVNLSAPLLPKEDPIFTYLSKRLGRSIDDIGHLIHEGLQKNTSSWVLYNMASFYWRIKNEPYQVVECAMRALHFSSRHNKDIALVNLANVLHRAHFSADAAVVVHAALDDSDFFTSYYTLGNIYAMLGEYNHSVLCYDHALQARPGFEQAIKRKHAVLCQQKLEQKLEAQHRSLQRTLNELKEYQKQHDHYLRQQEILEKHKLIQEEQILRNIIHETQMAKEAQLGNHQICRLVNQQHSLHCQWDQPVRYHRGDIFENVDYVQFGEDSSTSSMMSVNFDVQSNQSDINDSVKSSPVAHSILWIWGRDSDAYRDKQHILWPKRADCTESYPRVPVGGELPTYFLPPENKGLRIHELSSDDYSTEEEAQTPDCSITDFRKSHTLSYLVKELEVRMDLKAKMPDDHARKILLSRINNYTIPEEEIGSFLFHAINKPNAPIWLILNEAGLYWRAVGNSTFAIACLQRALNLAPLQYQDVPLVNLANLLIHYGLHLDATKLLLQALAINSSEPLTFLSLGNAYLALKNISGALEAFRQALKLTTKCPECENSLKLIRCMQFYPFLYNITSSVCSGTVVEESNGSDEMENSDETKMSEEILALVDEFQQAWPLEGFGGALEMKGRRLDLQGIRVLKKGPQDGVARSSCYGDCRSEDDEATEWITFQVKRVKKPKGDHKKTPGKKVETGQIENGHRYQANLEITGPKVASPGPQGKKRDYQRLGWPSPDECLKLRWVELTAIVSTWLAVSSKNIDITEHIDFATPIQQPAMEPLCNGNLPTSMHTLDHLHGVSNRASLHYTGESQLTEVLQNLGKDQYPQQSLEQIGTRIAKVLEKNQTSWVLSSMAALYWRVKGQGKKAIDCLRQALHYAPHQMKDVPLISLANILHNAKLWNDAVIVATMAVEIAPHFAVNHFTLGNVYVAMEEFEKALVWYESTLKLQPEFVPAKNRIQTIQCHLMLKKGRRSP

SEQ ID NO: 88030 - protein, 956 aa, Homo sapiens
  Payload ID: 17627
  Gene Name: tetratricopeptide repeat domain 17
  Uniprot ID: Q96AE7
  ENSP ID: ENSP00000299240
MAAAVGVRGRYELPPCSGPGWLLSLSALLSVAARGAFATTHWVVTEDGKIQQQVDSPMNLKHPHDLVILMRQEATVNYLKELEKQLVAQKIHIEENEDRDTGLEQRHNKEDPDCIKAKVPLGDLDLYDGTYITLESKDISPEDYIDTESPVPPDPEQPDCTKILELPYSIHAFQHLRGVQERVNLSAPLLPKEDPIFTYLSKRLGRSIDDIGHLIHEGLQKNTSSWVLYNMASFYWRIKNEPYQVVECAMRALHFSSRHNKDIALVNLANVLHRAHFSADAAVVVHAALDDSDFFTSYYTLGNIYAMLGEYNHSVLCYDHALQARPGFEQAIKRKHAVLCQQKLEQKLEAQHRSLQRTLNELKEYQKQHDHYLRQQEILEKHKLIQEEQILRNIIHETQMAKEAQLGNHQICRLVNQQHSLHCQWDQPVRYHRGDIFENVDYVQFGEDSSTSSMMSVNFDVQSNQSDINDSVKSSPVAHSILWIWGRDSDAYRDKQHILWPKRADCTESYPRVPVGGELPTYFLPPENKGLRIHELSSDDYSTEEEAQTPDCSITDFRKSHTLSYLVKELEVRMDLKAKMPDDHARKILLSRINNYTIPEEEIGSFLFHAINKPNAPIWLILNEAGLYWRAVGNSTFAIACLQRALNLAPLQYQDVPLVNLANLLIHYGLHLDATKLLLQALAINSSEPLTFLSLGNAYLALKNISGALEAFRQALKLTTKCPECENSLKLIRCMQFYPFLYNITSSVCSGNCHEKTLDNSHDKQKYFDNSQSLDAAEEEPSERGTEEDPVFSVENSGRDSDALRLESTVVEESNGSDEMENSDETKMSEEILALVDEFQQAWPLEGFGGALEMKGRRLDLQGIRVLKKGPQDGVARSSCYGDCRSEDDEATEWITFQVKRVKKPKGDHKKTPGKKVETGQIENGHRYQANLEITGPKVASPGPQGLLDWKTRKVP

SEQ ID NO: 88031 - protein, 172 aa, Homo sapiens
  Payload ID: 17627
  Gene Name: tetratricopeptide repeat domain 17
  ENSP ID: ENSP00000407314
  MOD_RES (1)..(1): Any amino acid
XVLQNLGKDQYPQQSLEQIGTRIAKVLEKASTAGLGMYPYQNQTSWVLSSMAALYWRVKGQGKKAIDCLRQALHYAPHQMKDVPLISLANILHNAKLWNDAVIVATMAVEIAPHFAVNHFTLGNVYVAMEEFEKALVWYESTLKLQPEFVPAKNRIQTIQCHLMLKKGRRSP

SEQ ID NO: 88032 - protein, 54 aa, Homo sapiens
  Payload ID: 17627
  Gene Name: tetratricopeptide repeat domain 17
  ENSP ID: ENSP00000432900
MAAAVGVRGRYELPPCSGPGWLLSLSALLSVAARGAFATTHWVVTEDGKIQQQL

SEQ ID NO: 88033 - protein, 140 aa, Homo sapiens
  Payload ID: 17627
  Gene Name: tetratricopeptide repeat domain 17
  ENSP ID: ENSP00000473320
  MOD_RES (1)..(1): Any amino acid
XGFEQAIKRKHAVLCQQKLEQKLEAQHRSLQRTLNELKEYQKQHDHYLRQQEILEKHKLIQEEQILRNIIHETQMAKEAQLGNHQICRLVNQQHSLHCQWDQPVRYHRGDIFENVDYVQVFFLVQSNSYKRLLYKDFLKL

SEQ ID NO: 88034 - protein, 380 aa, Homo sapiens
  Payload ID: 17628
  Gene Name: tetratricopeptide repeat domain 19
  Uniprot ID: Q6DKK2
  ENSP ID: ENSP00000261647
MFRLLSWSLGRGFLRAAGRRCRGCSARLLPGLAGGPGPEVQVPPSRVAPHGRGPGLLPLLAALAWFSRPAAAEEEEQQGADGAAAEDGADEAEAEIIQLLKRAKLSIMKDEPEEAELILHDALRLAYQTDNKKAITYTYDLMANLAFIRGQLENAEQLFKATMSYLLGGGMKQEDNAIIEISLKLASIYAAQNRQEFAVAGYEFCISTLEEKIEREKELAEDIMSVEEKANTHLLLGMCLDACARYLLFSKQPSQAQRMYEKALQISEEIQGERHPQTIVLMSDLATTLDAQGRFDEAYIYMQRASDLARQINHPELHMVLSNLAAVLMHRERYTQAKEIYQEALKQAKLKKDEISVQHIREELAELSKKSRPLTNSVKL

SEQ ID NO: 88035 - protein, 149 aa, Homo sapiens
  Payload ID: 17628
  Gene Name: tetratricopeptide repeat domain 19
  ENSP ID: ENSP00000465082
GRGGSMFRLLSWSLGRGFLRAAGRRCRGCSARLLPGLAGGPGPEVQVPPSRVAPHGRGPGLLPLLAALAWFSRPAAAEEEEQQGADGAAAEDGADEAEAEIIQLLKRAKLSIMKDEPEEAELILHDALRLAYQTDNKKAITYTYDLINW

SEQ ID NO: 88036 - protein, 99 aa, Homo sapiens
  Payload ID: 17628
  Gene Name: tetratricopeptide repeat domain 19
  ENSP ID: ENSP00000465627
SKQPSQAQRMYEKALQISEEIQGERHPQTIVLMSDLATTLDAQGRFDEAYIYMQRASDLARQINHPELHMVLSNLAAVLMHRAATTVLGPSKEAKATLG

SEQ ID NO: 88037 - protein, 166 aa, Homo sapiens
  Payload ID: 17628
  Gene Name: tetratricopeptide repeat domain 19
  ENSP ID: ENSP00000465754
  MOD_RES (1)..(1): Any amino acid
XQERVWPAVRRGRGGSMFRLLSWSLGRGFLRAAGRRCRGCSARLLPGLAGGPGPEVQVPPSRVAPHGRGPGLLPLLAALAWFSRPAAAEEEEQQGADGAAAEDGADEAEAEIIQLLKRAKVRRLRALRPAERGSLCERGLGVAAHYSLRLAEEWMEAPRVKLPRMS

SEQ ID NO: 88038 - protein, 172 aa, Homo sapiens
  Payload ID: 17628
  Gene Name: tetratricopeptide repeat domain 19
  ENSP ID: ENSP00000466261
  MOD_RES (1)..(1): Any amino acid
XRRVVGGQERVWPAVRRGRGGSMFRLLSWSLGRGFLRAAGRRCRGCSARLLPGLAGGPGPEVQVPPSRVAPHGRGPGLLPLLAALAWFSRPAAAEEEEQQGADGAAAEDGADEAEAEIIQLLKRAKVRRLRALRPAERGSLCERGLGVAAHYSLRLAEEWMEAPRVKLPRMS

SEQ ID NO: 88039 - protein, 63 aa, Homo sapiens
  Payload ID: 17628
  Gene Name: tetratricopeptide repeat domain 19
  ENSP ID: ENSP00000468372
  MOD_RES (1)..(1): Any amino acid
XGERHPQTIVLMSDLATTLDAQGRFDEAYIYMQRASDLARQINHPELHMVLSNLAAVLMHRGR

SEQ ID NO: 88040 - protein, 110 aa, Homo sapiens
  Payload ID: 17629
  Gene Name: tetratricopeptide repeat domain 21A
  ENSP ID: ENSP00000395118
MSSNDSSLMAGIIYYSQEKYFHHVQQAAAVGLEKFSNDPVLKFFKAYGVLKEGNVLHDAAELLRGPGGGEPDHCDFRELPASPRPEDAAVLSSAGLGADSRNGTQNPRKR

SEQ ID NO: 88041 - protein, 1320 aa, Homo sapiens
  Payload ID: 17629
  Gene Name: tetratricopeptide repeat domain 21A
  Uniprot ID: Q8NDW8
  ENSP ID: ENSP00000398211
MSSNDSSLMAGIIYYSQEKYFHHVQQAAAVGLEKFSNDPVLKFFKAYGVLKEEHIQDAISDLESIRHHPDVSLCSTMALIYAHKRCEIIDREAIQELEYSLKEIRKTVSGTALYYAGLFLWLIGRHDKAKEYIDRMLKISRGFREAYVLRGWVDLTSDKPHTAKKAIEYLEQGIQDTKDVLGLMGKAMYFMMQQNYSEALEVVNQITVTSGSFLPALVLKMQLFLARQDWEQTVEMGHRILEKDESNIDACQILTVHELAREGNMTTVSSLKTQKATNHVRNLIKALETREPENPSLHLKKIIVVSRLCGSHQVILGLVCSFIERTFMATPSYVHVATELGYLFILKNQVKEALLWYSEAMKLDKDGMAGLTGIILCHILEGHLEEAEYRLEFLKEVQKSLGKSEVLIFLQALLMSRKHKGEEETTALLKEAVELHFSSMQGIPLGSEYFEKLDPYFLVCIAKEYLLFCPKQPRLPGQIVSPLLKQVAVILNPVVKAAPALIDPLYLMAQVRYYSELENAQSILQRCLELDPASVDAHLLMCQIYLAQGNFGMCFHCLELGVSHNFQVRDHPLYHLIKARALNKAGDYPEAIKTLKMVIKLPALKKEEGRKFLRPSVQPSQRASILLELVEALRLNGELHEATKVMQDTINEFGGTPEENRITIANVDLVLSKGNVDVALNMLRNILPKQSCYMEAREKMANIYLQTLRDRRLYIRCYRELCEHLPGPHTSLLLGDALMSILEPEKALEVYDEAYRQNPHDASLASRIGHAYVKAHQYTEAIEYYEAAQKINGQDFLCCDLGKLLLKLKKVNKAEKVLKQALEHDIVQDIPSMMNDVKCLLLLAKVYKSHKKEAVIETLNKALDLQSRILKRVPLEQPEMIPSQKQLAASICIQFAEHYLAEKEYDKAVQSYKDVFSYLPTDNKVMLELAQLYLLQGHLDLCEQHCAILLQTEQNHETASVLMADLMFRKQKHEAAINLYHQVLEKAPDNFLVLHKLIDLLRRSGKLEDIPAFFELAKKVSSRVPLEPGFNYCRGIYCWHIGQPNEALKFLNKARKDSTWGQSAIYHMVQICLNPDNEVVGGEAFENQGAESNYMEKKELEQQGVSTAEKLLREFYPHSDSSQTQLRLLQGLCRLATREKANMEAALGSFIQIAQAEKDSVPALLALAQAYVFLKQIPKARMQLKRLAKTPWVLSEAEDLEKSWLLLADIYCQGSKFDLALELLRRCVQYNKSCYKAYEYMGFIMEKEQSYKDAVTNYKLAWKYSHHANPAIGFKLAFNYLKDKKFVEAIEICNDVLREHPDYPKIREEILEKARRSLRP

SEQ ID NO: 88042 - protein, 1143 aa, Homo sapiens
  Payload ID: 17629
  Gene Name: tetratricopeptide repeat domain 21A
  ENSP ID: ENSP00000405396
MSSNDSSLMAGIIYYSQEKYFHHVQQAAAVGLEKFSNDPVLKFFKAYGVLKEEHIQDAISDLESIRHHPDVSLCSTMALIYAHKRCEIIDREAIQELEYSLKEIRKTVSGTALYYAGLFLWLIGRHDKAKEYIDRMLKISRGFREAYVLRGWVDLTSDKPHTAKKAIEYLEQGIQDTKDVLGLMGKAMYFMMQQNYSEALEVVNQITVTSGSFLPALVLKMQLFLARQDWEQTVEMGHRILEKDESNIDACQILTVHELAREGNMTTATNHVRNLIKALETREPENPSLHLKKIIVVSRLCGSHQVILGLVCSFIERTFMATPSYVHVATELGYLFILKNQVKEALLWYSEAMKLDKDGMAGLTGIILCHILEGHLEEAEYRLEFLKEVQKSLGKSEVLIFLQALLMSRKHKGEEETTALLKEAVELHFSSMQGIPLGSEYFEKLDPYFLVCIAKEYLLFCPKQPRLPGQIVSPLLKQVAVILNPVVKAAPALIDPLYLMAQVRYYSGELENAQSILQRCLELDPASVDAHLLMCQIYLAQGNFGMCFHCLELGVSHNFQVRDHPLYHLIKARALNKAGDYPEAIKTLKMVIKLPALKKEEGRKFLRPSVQPSQRASILLELVEALRLNGELHEATKVMQDTINEFGGTPEENRITIANVDLVLSKGNVDVALNMLRNILPKQSCYMEAREKMANIYLQTLRDRRLYIRCYRELCEHLPGPHTSLLLGDALMSILEPEKALEVYDEAYRQNPHDASLASRIGHAYVKAHQYTEAIEYYEAAQKINGQDFLCCDLGKLLLKLKKVNKAEKVLKQALEHDIVQDIPSMMNDVKCLLLLAKVYKSHKKEAVIETLNKALDLQSRILKRVPLEQPEMIPSQKQLAASICIQFAEHYLAEKEYDKAVQSYKDVFSYLPTDNKVMLELAQLYLLQGHLDLCEQHCAILLQTEQNHETASVLMADLMFRKQKHEAAINLYHQVLEKAPDNFLVLHKLIDLLRRSGKLEDIPAFFELAKKVSSRVPLEPGFNYCRGIYCWHIGQPNEALKFLNKARKDSTWGQSAIYHMVQICLNPDNEVVGGEAFENQGAESNYMEKKELEQQGVSTAEKLLQGQRPCPAGLGTSLRVPEADPQGAYAVEAPGQDPLGAE

SEQ ID NO: 88043 - protein, 128 aa, Homo sapiens
  Payload ID: 17629
  Gene Name: tetratricopeptide repeat domain 21A
  ENSP ID: ENSP00000409299
MSSNDSSLMAGIIYYSQEKYFHHVQQAAAVGLEKFSNDPVLKFFKAYGVLKEEHIQDAISDLESIRHHPDVSLCSTMALIYAHKRCEIIGECHHAQPGLTHQGKESPAPEITQPLKGCQRRPRSNSGA

SEQ ID NO: 88044 - protein, 1272 aa, Homo sapiens
  Payload ID: 17629
  Gene Name: tetratricopeptide repeat domain 21A
  Uniprot ID: Q8NDW8
  ENSP ID: ENSP00000410882
MSSNDSSLMAGIIYYSQEKYFHHVQQAAAVGLEKFSNDPVLKFFKAYGVLKEEHIQDAISDLESIRHHPDVSLCSTMALIYAHKRCEIIDREAIQELEYSLKEIRKTVSGTALYYAGLFLWLIGRHDKAKEYIDRMLKISRGFREAMYFMMQQNYSEALEVVNQITVTSGSFLPALVLKMQLFLARQDWEQTVEMGHRILEKDESNIDACQILTVHELAREGNMTTATNHVRNLIKALETREPENPSLHLKKIIVVSRLCGSHQVILGLVCSFIERTFMATPSYVHVATELGYLFILKNQVKEALLWYSEAMKLDKDGMAGLTGIILCHILEGHLEEAEYRLEFLKEVQKSLGKSEVLIFLQALLMSRKHKGEEETTALLKEAVELHFSSMQGIPLGSEYFEKLDPYFLVCIAKEYLLFCPKQPRLPGQIVSPLLKQVAVILNPVVKAAPALIDPLYLMAQVRYYSGELENAQSILQRCLELDPASVDAHLLMCQIYLAQGNFGMCFHCLELGVSHNFQVRDHPLYHLIKARALNKAGDYPEAIKTLKMVIKLPALKKEEGRKFLRPSVQPSQRASILLELVEALRLNGELHEATKVMQDTINEFGGTPEENRITIANVDLVLSKGNVDVALNMLRNILPKQSCYMEAREKMANIYLQTLRDRRLYIRCYRELCEHLPGPHTSLLLGDALMSILEPEKALEVYDEAYRQNPHDASLASRIGHAYVKAHQYTEAIEYYEAAQKINGQDFLCCDLGKLLLKLKKVNKAEKVLKQALEHDIVQDIPSMMNDVKCLLLLAKVYKSHKKEAVIETLNKALDLQSRILKRVPLEQPEMIPSQKQLAASICIQFAEHYLAEKEYDKAVQSYKDVFSYLPTDNKVMLELAQLYLLQGHLDLCEQHCAILLQTEQNHETASVLMADLMFRKQKHEAAINLYHQVLEKAPDNFLVLHKLIDLLRRSGKLEDIPAFFELAKKVSSRVPLEPGFNYCRGIYCWHIGQPNEALKFLNKARKDSTWGQSAIYHMVQICLNPDNEVVGGEAFENQGAESNYMEKKELEQQGVSTAEKLLREFYPHSDSSQTQLRLLQGLCRLATREKANMEAALGSFIQIAQAEKDSVPALLALAQAYVFLKQIPKARMQLKRLAKTPWVLSEAEDLEKSWLLLADIYCQGSKFDLALELLRRCVQYNKSCYKAYEYMGFIMEKEQSYKDAVTNYKLAWKYSHHANPAIGFKLAFNYLKDKKFVEAIEICNDVLREHPDYPKIREEILEKARRSLRP

SEQ ID NO: 88045 - protein, 1316 aa, Homo sapiens
  Payload ID: 17630
  Gene Name: tetratricopeptide repeat domain 21B
  Uniprot ID: Q7Z4L5
  ENSP ID: ENSP00000243344
MDSQELKTLINYYCQERYFHHVLLVASEGIKRYGSDPVFRFYHAYGTLMEGKTQEALREFEAIKNKQDVSLCSLLALIYAHKMSPNPDREAILESDARVKEQRKGAGEKALYHAGLFLWHIGRHDKAREYIDRMIKISDGSKQGHVLKAWLDITRGKEPYTKKALKYFEEGLQDGNDTFALLGKAQCLEMRQNYSGALETVNQIIVNFPSFLPAFVKKMKLQLALQDWDQTVETAQRLLLQDSQNVEALRMQALYYVCREGDIEKASTKLENLGNTLDAMEPQNAQLFYNITLAFSRTCGRSQLILQKIQTLLERAFSLNPQQSEFATELGYQMILQGRVKEALKWYKTAMTLDETSVSALVGFIQCQLIEGQLQDADQQLEFLNEIQQSIGKSAELIYLHAVLAMKKNKRQEEVINLLNDVLDTHFSQLEGLPLGIQYFEKLNPDFLLEIVMEYLSFCPMQPASPGQPLCPLLRRCISVLETVVRTVPGLLQTVFLIAKVKYLSGDIEAAFNNLQHCLEHNPSYADAHLLLAQVYLSQEKVKLCSQSLELCLSYDFKVRDYPLYHLIKAQSQKKMGEIADAIKTLHMAMSLPGMKRIGASTKSKDRKTEVDTSHRLSIFLELIDVHRLNGEQHEATKVLQDAIHEFSGTSEEVRVTIANADLALAQGDIERALSILQNVTAEQPYFIEAREKMADIYLKHRKDKMLYITCFREIAERMANPRSFLLLGDAYMNILEPEEAIVAYEQALNQNPKDGTLASKMGKALIKTHNYSMAITYYEAALKTGQKNYLCYDLAELLLKLKWYDKAEKVLQHALAHEPVNELSALMEDGRCQVLLAKVYSKMEKLGDAITALQQARELQARVLKRVQMEQPDAVPAQKHLAAEICAEIAKHSVAQRDYEKAIKFYREALVHCETDNKIMLELARLYLAQDDPDSCLRQCALLLQSDQDNEAATMMMADLMFRKQDYEQAVFHLQQLLERKPDNYMTLSRLIDLLRRCGKLEDVPRFFSMAEKRNSRAKLEPGFQYCKGLYLWYTGEPNDALRHFNKARKDRDWGQNALYNMIEICLNPDNETVGGEVFENLDGDLGNSTEKQESVQLAVRTAEKLLKELKPQTVQGHVQLRIMENYCLMATKQKSNVEQALNTFTEIAASEKEHIPALLGMATAYMILKQTPRARNQLKRIAKMNWNAIDAEEFEKSWLLLADIYIQSAKYDMAEDLLKRCLRHNRSCCKAYEYMGYIMEKEQAYTDAALNYEMAWKYSNRTNPAVGYKLAFNYLKAKRYVDSIDICHQVLEAHPTYPKIRKDILDKARASLRP

SEQ ID NO: 88046 - protein, 283 aa, Homo sapiens
  Payload ID: 17630
  Gene Name: tetratricopeptide repeat domain 21B
  ENSP ID: ENSP00000376460
  MOD_RES (1)..(1): Any amino acid
XYTGEPNDALRHFNKARKDRDWGQNALYNMIEICLNPDNETVGGEVFENLDGDLGNSTEKQESVQLAVRTAEKLLKELKPQTVQGHVQLRIMENYCLMATKQKSNVEQALNTFTEIAASEKEHIPALLGMATAYMILKQTPRARNQLKRIAKMNWNAIDAEEFEKSWLLLADIYIQSAKYDMAEDLLKRCLRHNRSCCKAYEYMGYIMEKEQAYTDAALNYEMAWKYSNRTNPAVGYKLAFNYLKAKRYVDSIDICHQVLEAHPTYPKIRKDILDKARASLRP

SEQ ID NO: 88047 - protein, 372 aa, Homo sapiens
  Payload ID: 17631
  Gene Name: tetratricopeptide repeat domain 22
  Uniprot ID: Q5TAA0
  ENSP ID: ENSP00000360321
MAELEAVADDLDALIDDLDYLPGHFHLEMQLNFEPRSPAPQRARDLKLQREGLRQELQLAAAPQRPAVRHLLGAFAFYLEELDEARECFLEVAHEHPGNLNAWANLAHVYGRLGQEEEEEACAARLADLMGLAEEPEAAGDPQLRAARCLAEQGYAHGFDVGCASPEERARGLAAGIALYDKALGYGQQIPMEEKRGWYFTMATLYIRLDGIFLELGSEEQKRLPAFNRTLALLRQVLKSEDPRHRALAWCYLGMLLERKDTFSTTPMGVHDCGYSGTDPLDCFGKAIEIAKNQPPILNRLAKIFYFLGKQDMAIGTCNMALDVLRDPELNWQAYCTRAKRRGLTMLPRLVSNSWAQAVLPPRPPKVLEFQV

SEQ ID NO: 88048 - protein, 569 aa, Homo sapiens
  Payload ID: 17631
  Gene Name: tetratricopeptide repeat domain 22
  Uniprot ID: Q5TAA0
  ENSP ID: ENSP00000360323
MAELEAVADDLDALIDDLDYLPGHFHLEMQLNFEPRSPAPQRARDLKLQREGLRQELQLAAAPQRPAVRHLLGAFAFYLEELDEARECFLEVAHEHPGNLNAWANLAHVYGRLGQEEEEEACAARLADLMGLAEEPEAAGDPQLRAARCLAEQGYAHGFDVGCASPEERARGLAAGIALYDKALGYGQQIPMEEKRGWYFTMATLYIRLDGIFLELGSEEQKRLPAFNRTLALLRQVLKSEDPRHRALAWCYLGMLLERKDTFSTTPMGVHDCGYSGTDPLDCFGKAIEIAKNQPPILNRLAKIFYFLGKQDMAIGTCNMALDVLRDPELNWQAYCTRAKIHIRAYLHDLKRAKMGLGGMPDRNHLACAKADLEEVVRVCPGFKAYLDIGQVYYYMGVDAVQELLAVDEAALNQALVFLAKAGESELGATLPELQLLRGKCLRIKGEDANAAACFKRAVELDDAGSSHTDGFGCLLEALLAQWSQAQLSDGELGREVDAWLRRAQDKYPAARLRQELQRVWRGHTDEVLGLARALVAQGRPALVRLLFETMEREGEGASAPRDRRAVSF

SEQ ID NO: 88049 - protein, 170 aa, Homo sapiens
  Payload ID: 17631
  Gene Name: tetratricopeptide repeat domain 22
  ENSP ID: ENSP00000390300
EQKRLPAFNRTLALLRQVLKSEDPRHRALAWCYLGMLLERKDTFSTTPMGVHDCGYSGTDPLDCFGKAIEIAKNQPPILNRLAKIFYFLGKQDMAIGTCNMALDVLRDPELNWQAYCTRAKLPALVPDLPPRAHTEPMCLRKPTRSSQFTSLQAEESSHPLIFSTTIHMT

SEQ ID NO: 88050 - protein, 393 aa, Homo sapiens
  Payload ID: 17632
  Gene Name: tetratricopeptide repeat domain 23
  Uniprot ID: Q5W5X9
  ENSP ID: ENSP00000262074
MQESQETHISNHLDEVVAAVSITHRKKFQNKLLQTALFQPPREKLHLCEEKAKSYSNSHEYKQAVHELVRCVALTRICYGDSHWKLAEAHVNLAQGYLQLKGLSLQAKQHAEKARQILANSIVPPYSENTDVFKFSIELFHTMGRALLSLQKFKEAAENLTKAERLSKELLQCGRIIKEEWIEIEARIRLSFAQVYQGQKKSKEALSHYQAALEYVEISKGETSRECVPILRELAGVEQALGLHDVSINHFLQAHLIILSRSPSQVEAADSAHIVAHAAVASGRHEHHDVAEQYFQESMAHLKDSEGMGRTKFLSIQDEFCHFLQMTGQKERATSILRESLEAKVEAFGDFSPEVAETYRLLGGADLAQGNHSGARKKLKKGDLSFLLSATLP

SEQ ID NO: 88051 - protein, 447 aa, Homo sapiens
  Payload ID: 17632
  Gene Name: tetratricopeptide repeat domain 23
  Uniprot ID: Q5W5X9
  ENSP ID: ENSP00000377690
MQESQETHISNHLDEVVAAVSITHRKKFQNKLLQTALFQPPREKLHLCEEKAKSYSNSHEYKQAVHELVRCVALTRICYGDSHWKLAEAHVNLAQGYLQLKGLSLQAKQHAEKARQILANSIVPPYSENTDVFKFSIELFHTMGRALLSLQKFKEAAENLTKAERLSKELLQCGRIIKEEWIEIEARIRLSFAQVYQGQKKSKEALSHYQAALEYVEISKGETSRECVPILRELAGVEQALGLHDVSINHFLQAHLIILSRSPSQVEAADSAHIVAHAAVASGRHEHHDVAEQYFQESMAHLKDSEGMGRTKFLSIQDEFCHFLQMTGQKERATSILRESLEAKVEAFGDFSPEVAETYRLLGGADLAQGNHSGARKKLKKCLQIQTLLYGPQDKRTLATQQAMGMLSTAPKVASKPRQASKAKVAFCTSIPQDTLLGKARPGTTAD

SEQ ID NO: 88052 - protein, 447 aa, Homo sapiens; identical to SEQ ID NO: 88051
  Payload ID: 17632
  Gene Name: tetratricopeptide repeat domain 23
  Uniprot ID: Q5W5X9
  ENSP ID: ENSP00000377692

SEQ ID NO: 88053 - protein, 263 aa, Homo sapiens
  Payload ID: 17632
  Gene Name: tetratricopeptide repeat domain 23
  ENSP ID: ENSP00000389470
  MOD_RES (1)..(1): Any amino acid
XVEAADSAHIVAHAAVASGRHEHHDVAEQYFQESMAHLKDSEGMGRTKFLSIQDEFCHFLQMTGQKERATSILRESLEAKVEAFGDFSPEVAETYRLLGGADLAQGNHSGARKKLKKAITRATFKNRNWSPSSDPSEHPNQRSVTRRHPRSMLIPSQQGLRMRSSFSHSRETLVSCSQRHFHSLMIAAWCSTVSPDPDPLIWTAGQKDSGHPAGHGHAVHGPQGCFEAKAGIKSQSGLLHQHPSGHPAGEGPARHNSRLRPPP

SEQ ID NO: 88054 - protein, 393 aa, Homo sapiens; identical to SEQ ID NO: 88050
  Payload ID: 17632
  Gene Name: tetratricopeptide repeat domain 23
  Uniprot ID: Q5W5X9
  ENSP ID: ENSP00000433162

SEQ ID NO: 88055 - protein, 73 aa, Homo sapiens
  Payload ID: 17632
  Gene Name: tetratricopeptide repeat domain 23
  ENSP ID: ENSP00000436483
  MOD_RES (1)..(1): Any amino acid
XKRESNLDPERVPGSQSGSIWRFQSRGGRDIPAPGRSRPGAGEPQWGPQETEEESQEKAGSRRFCVTFSGMFC

SEQ ID NO: 88056 - protein, 53 aa, Homo sapiens
  Payload ID: 17632
  Gene Name: tetratricopeptide repeat domain 23
  ENSP ID: ENSP00000452882
MQESQETHISNHLDEVVAAVSITHRKKFQNKLLQTALFQPPREKLHLCEEKAK

SEQ ID NO: 88057 - protein, 447 aa, Homo sapiens; identical to SEQ ID NO: 88051
  Payload ID: 17632
  Gene Name: tetratricopeptide repeat domain 23
  Uniprot ID: Q5W5X9
  ENSP ID: ENSP00000452923

SEQ ID NO: 88058 - protein, 115 aa, Homo sapiens
  Payload ID: 17632
  Gene Name: tetratricopeptide repeat domain 23
  ENSP ID: ENSP00000453419
MQESQETHISNHLDEVVAAVSITHRKKFQNKLLQTALFQPPREKLHLCEEKAKSYSNSHEYKQAVHELVRCVALTRICYGDSHWKLAEAHVNLAQGYLQLKGLSLQAKQHAEKAR

SEQ ID NO: 88059 - protein, 56 aa, Homo sapiens
  Payload ID: 17632
  Gene Name: tetratricopeptide repeat domain 23
  ENSP ID: ENSP00000453673
MQESQETHISNHLDEVVAAVSITHRKKFQNKLLQTALFQPPREKLHLCEEKAKSYS

SEQ ID NO: 88060 - protein, 83 aa, Homo sapiens
  Payload ID: 17632
  Gene Name: tetratricopeptide repeat domain 23
  ENSP ID: ENSP00000453862
MQESQETHISNHLDEVVAAVSITHRKKFQNKLLQTALFQPPREKLHLCEEKAKSYSNSHEYKQAVHELVRCVALTRICYGDSH

SEQ ID NO: 88061 - protein, 151 aa, Homo sapiens
  Payload ID: 17632
  Gene Name: tetratricopeptide repeat domain 23
  ENSP ID: ENSP00000454017
MQESQETHISNHLDEVVAAVSITHRKKFQNKLLQTALFQPPREKLHLCEEKAKSYSNSHEYKQAVHELVRCVALTRICYGDSHWKLAEAHVNLAQGYLQLKGLSLQAKQHAEKARQILANSIVPPYSENTDVFKFSIELFHTMGRALLSLQ

SEQ ID NO: 88062 - protein, 157 aa, Homo sapiens
  Payload ID: 17632
  Gene Name: tetratricopeptide repeat domain 23
  ENSP ID: ENSP00000454175
MQESQETHISNHLDEVVAAVSITHRKKFQNKLLQTALFQPPREKLHLCEEKAKSYSNSHEYKQAVHELVRCVALTRICYGDSHWKLAEAHVNLAQGYLQLKGLSLQAKQHAEKARQILANSIVPPYSENTDVFKFSIELFHTMGRALLSLQKFKEAA

SEQ ID NO: 88063 - protein, 391 aa, Homo sapiens
  Payload ID: 17632
  Gene Name: tetratricopeptide repeat domain 23
  Uniprot ID: Q5W5X9
  ENSP ID: ENSP00000457901
MQESQETHISNHLDEVVAAVSITHRKKFQNKLLQTALFQPPREKLHLCEEKAKSYSNSHEYKQAVHELVRCVALTRICYGDSHWKLAEAHVNLAQGYLQLKGLSLQAKQHAEKARQILANSIVPPYSENTDVFKFSIELFHTMGRALLSLQKFKEAAENLTKAERLSKELLQCGRIIKEEWIEIEARIRLSFAQVYQGQKKSKEALSHYQAALEYVEISKGETSRECVPILRELAGVEQALGLHDVSINHFLQAHLIILSRSPSQVEAADSAHIVAHAAVASGRHEHHDVAEQYFQESMAHLKDSEGMGRTKFLSIQDEFCHFLQMTGQKERATSILRESLEAKVEAFGDFSPEVAETYRLLGGADLAQGNHSGARKKLKKVKLEPVLTRD

SEQ ID NO: 88064 - protein, 361 aa, Homo sapiens
  Payload ID: 17633
  Gene Name: tetratricopeptide repeat domain 23-like
  Uniprot ID: Q6PF05
  ENSP ID: ENSP00000422188
MQASPIRIPTVSNDIDWDFCFHMSQQTEIPAHQQTDELYPTGGCGESEEETKAKEKEKAIDCMSHPKEKLAQSQKKVAQLIKEKMNTQANKELIRCVILSRIIFGDHHWKCARALANLAYGYLTLRGLPVQAKKHATSAKNTLLTWKANTTSNKEKEEILEALVKLYYTLGVAWLLQNRGREAYFNLQKAERNMKELKELYKGGVCELQVSENDLTLALGRASLAIHRLNLALAYFEKAIGDVIAAKGDRTSDLISLYEEAAQIEQLRRNHNQAIQYLQQAHSVCVSLFTEVSPKTAEMSALLAKAYAMSGEAQHRDAVEIYFIRSINAYRATLGSEDFETLSTTEEFCKWLVQNGEKQDK

SEQ ID NO: 88065 - protein, 49 aa, Homo sapiens
  Payload ID: 17633
  Gene Name: tetratricopeptide repeat domain 23-like
  ENSP ID: ENSP00000424418
MQASPIRIPTVSNDIDWDFCFHMPPSSGQETCYISQEYTVDLEGKYDLK

SEQ ID NO: 88066 - protein, 287 aa, Homo sapiens
  Payload ID: 17633
  Gene Name: tetratricopeptide repeat domain 23-like
  Uniprot ID: Q6PF05
  ENSP ID: ENSP00000425242
MQASPIRIPTVSNDIDWDFCFHMSQQTEIPAHQQTDELYPTGGCGESEEETKAKEKEKAIDCMSHPKEKLAQSQKKVAQLIKEKMNTQANKELIRCVILSRIIFGDHHWKCARALANLAYGYLTLRGLPVQAKKHATSAKNTLLTWKANTTSNKEKEEILEALVKLYYTLGVAWLLQNRGREAYFNLQKAERNMKELKELYKGGVCELQVSENDLTLALGRASLAIHRLNLALAYFEKAIGDVIAAKGDRTSDLISLYEEAAQIEQLRRNHNQAIQYLQQMLLRYIS

SEQ ID NO: 88067 - protein, 287 aa, Homo sapiens; identical to SEQ ID NO: 88066
  Payload ID: 17633
  Gene Name: tetratricopeptide repeat domain 23-like
  Uniprot ID: Q6PF05
  ENSP ID: ENSP00000484792

SEQ ID NO: 88068 - protein, 582 aa, Homo sapiens
  Payload ID: 17634
  Gene Name: tetratricopeptide repeat domain 24
  Uniprot ID: A2A3L6
  ENSP ID: ENSP00000357219
MSSPNPEDVPRRPEPEPSSSNKKKKKRKWLRQEASIQALTRAGHGALQAGQNHEALNNFQRAFLLASKAPQTRDTPVLQACAFNLGAAYVETGDPARGLELLLRAHPEEKAQGRRHGDQCFNVALAYHALGELPQALAWYHRALGHYQPQGDQGEAWAKMGACYQALGQPELAAHCLQEASQAYAQERQLRAAALALGAAAGCMLKSGRHRVGEVVQVLEKSRRLAERSTERRLLGHLYNDLGLGYSQLQLFPLAVEAFLQALPLCWVPGEQATVLRNLGMAHNALGNYQEAREFHQKAADLHGSVGQRWEQGRSFGSLAFALSQLGDHKAARDNYLHALQAARDSGDMKGQWQACEGLGAAAARLGQYDQALKYYKEALAQCQKEPDSVRERLVAKLADTVRTRLAQVGLVQTHTLTSAPGRLQAPGGASQAEGTPAKAGSSTAGVQHRSSSGWEDEEFEEGHQKKKEERSANVPVRAGPGRPELCFLPGTVNHSHHLASSCPTFTKHTPCRGTVLGKASIYSPGPRAHLPFVGPGPPRAEYPSILVPNGPQANRSSRWPRESLSRSRQRRPMESGICTIV

SEQ ID NO: 88069 - protein, 582 aa, Homo sapiens; identical to SEQ ID NO: 88068
  Payload ID: 17634
  Gene Name: tetratricopeptide repeat domain 24
  Uniprot ID: A2A3L6
  ENSP ID: ENSP00000357220

SEQ ID NO: 88070 - protein, 382 aa, Homo sapiens
  Payload ID: 17635
  Gene Name: tetratricopeptide repeat domain 25
  ENSP ID: ENSP00000477931
MSDPEGETLRSTFPSYMAEGERLYLCGEFSKAAQSFSNALYLQDGDKNCLVARSKCFLKMGDLERSLKDAEASLQSDPAFCKGILQKAETLYTMGDFEFALVFYHRGYKLRPDREFRVGIQKAQEAINNSVGSPSSIKLENKGDLSFLSKQAENIKAQQKPQPMKHLLHPTKGEPKWKASLKSEKTVRQLLGELYVDKEYLEKLLLDEDLIKGTMKGGLTVEDLIMTGINYLDTHSNFWRQQKPIYARERDRKLMQEKWLRDHKRRPSQTAHYILKSLEDIDMLLTSGSAEGSLQKAEKVLKKVLEWNKEEVPNKDELVGNLYSCIGNAQIELGQMEAALQSHRKDLEIAKEYDLPDAKSRALDNIGRVFARVGKFQQAIDT

SEQ ID NO: 88071 - protein, 672 aa, Homo sapiens
  Payload ID: 17635
  Gene Name: tetratricopeptide repeat domain 25
  Uniprot ID: Q96NG3
  ENSP ID: ENSP00000478589
MSDPEGETLRSTFPSYMAEGERLYLCGEFSKAAQSFSNALYLQDGDKNCLVARSKCFLKMGDLERSLKDAEASLQSDPAFCKGILQKAETLYTMGDFEFALVFYHRGYKLRPDREFRVGIQKAQEAINNSVGSPSSIKLENKGDLSFLSKQAENIKAQQKPQPMKHLLHPTKGEPKWKASLKSEKTVRQLLGELYVDKEYLEKLLLDEDLIKGTMKGGLTVEDLIMTGINYLDTHSNFWRQQKPIYARERDRKLMQEKWLRDHKRRPSQTAHYILKSLEDIDMLLTSGSAEGSLQKAEKVLKKVLEWNKEEVPNKDELVGNLYSCIGNAQIELGQMEAALQSHRKDLEIAKEYDLPDAKSRALDNIGRVFARVGKFQQAIDTWEEKIPLAKTTLEKTWLFHEIGRCYLELDQAWQAQNYGEKSQQCAEEEGDIEWQLNASVLVAQAQVKLRDFESAVNNFEKALERAKLVHNNEAQQAIISALDDANKGIIRELRKTNYVENLKEKSEGEASLYEDRIITREKDMRRVRDEPEKVVKQWDHSEDEKETDEDDEAFGEALQSPASGKQSVEAGKARSDLGAVAKGLSGELGTRSGETGRKLLEAGRRESREIYRRPSGELEQRLSGEFSRQEPEELKKLSEVGRREPEELGKTQFGEIGETKKTGNEMEKEYE

SEQ ID NO: 88072 - protein, 20 aa, Homo sapiens
  Payload ID: 17635
  Gene Name: tetratricopeptide repeat domain 25
  ENSP ID: ENSP00000479460
SLKDAEASLQSDPAFCKVIA

SEQ ID NO: 88073 - protein, 664 aa, Homo sapiens
  Payload ID: 17635
  Gene Name: tetratricopeptide repeat domain 25
  ENSP ID: ENSP00000481958
MSDPEGETLRSTFPSYMAEGERLYLCGEFSKAAQSFSNALYLQDGDKNCLVARSKCFLKMGDLERSLKDAEASLQSDPAFCKGILQKAETLYTMGDFEFALVFYHRGYKLRPDREFRVGIQKAQEAINNSVGSPSSIKLENKGDLSFLSKQAENIKAQQKPQPMKHLLHPTKGEPKWKASLKSEKTVRQLLGELYVDKEYLEKLLLDEDLIKGTMKGGLTVEDLIMTGINYLDTHSNFWRQQKPIYARERDRKLMQEKWLRDHKRRPSQTAHYILKSLEDIDMLLTSGSAEGSLQKAEKVLKKVLEWNKEEVPNKDELVGNLYSCIGNAQIELGQMEAALQSHRKDLEIAKEYDLPDAKSRALDNIGRVFARVGKFQQAIDTWEEKIPLAKTTLEKTWLFHEIGRCYLELDQAWQAQNYGEKSQQCAEEEGDIEWQLNASVLVAQAQVKLRDFESAVNNFEKALERAKLVHNNEAQQAIISALDDANKGIIRELRKTNYVENLKEKSEGEASLYEDRIITREKDMRRVRDEPEKVVKQWDHSEDEKETDEDDEAFGEALQSPASGKQSVEAGKARSDLGAVAKGLSGELGTRSGETGRKLLEAGRRESREIYRRPSGELEQRLSGEFSRQEPEELKKLSEVGRREPEELGKTQFGEIGETKNRK

SEQ ID NO: 88074 - protein, 85 aa, Homo sapiens
  Payload ID: 17635
  Gene Name: tetratricopeptide repeat domain 25
  ENSP ID: ENSP00000484975
MSDPEGETLRSTFPSYMAEGERLYLCGEFSKAAQSFSNALYLQDGDKNCLVARSKCFLKMGDLERSLKDAEASLQSDPAFCKVIA

SEQ ID NO: 88075 - protein, 523 aa, Homo sapiens
  Payload ID: 17636
  Gene Name: tetratricopeptide repeat domain 26
  Uniprot ID: A0AVF1
  ENSP ID: ENSP00000339135
MMLSRAKPAVGRGVQHTDKRKKKGRKIPKLEELLSKRDFTGAITLLEEYENATKEENCNSEVWVNLACTYFFLGMYKQAEAAGFKASKSRLQNRLLFHLAHKFNDEKKLMSFHQNLQDVTEDQLSLASIHYMRSHYQEAIDIYKRILLDNREYLALNVYVALCYYKLDYYDVSQEVLAVYLQQIPDSTIALNLKACNHFRLYNGRAAEAELKSLMDNASSSFEFAKELIRHNLVVFRGGEGALQVLPPLVDVIPEARLNLVIYYLRQDDVQEAYNLIKDLEPTTPQEYILKGVVNAALGQEMGSRDHMKIAQQFFQLVGGSASECDTIPGRQCMASCFFLLKQFDDVLIYLNSFKSYFYNDDIFNFNYAQAKAATGNTSEGEEAFLLIQSEKMKNDYIYLSWLARCYIMNKKPRLAWELYLKMETSGESFSLLQLIANDCYKMGQFYYSAKAFDVLERLDPNPEYWEGKRGACVGIFQMIIAGREPKETLREVLHLLRSTGNTQVEYMIRIMKKWAKENRVSI

SEQ ID NO: 88076 - protein, 487 aa, Homo sapiens
  Payload ID: 17636
  Gene Name: tetratricopeptide repeat domain 26
  Uniprot ID: A0AVF1
  ENSP ID: ENSP00000410655
MMLSRAKPAVGRGVQHTDKRKKKGRKIPKLEELLSKRDFTGAITLLEFKRHVGEEEEDTNLWIGYCAFHLGDYKRALEEYENATKEENCNSEVWVNLACTYFFLGMYKQAEAAGFKASKSRLQNRLLFHLAHKFNDEKKLMSFHQNLQDVTEDQLSLASIHYMRSHYQEAIDIYKRILLDNREYLALNVYVALCYYKLDYYDVSQEVLAVYLQQIPDSTIALNLKACNHFRLYNGRAAEAELKSLMDNASSSFEFAKELIRHNLVVFRGGEGALQVLPPLVDVIPEARLNLVIYYLRQDDVQEAYNLIKDLEPTTPQEYILKGVVNAALGQEMGSRDHMKIAQQFFQLVGGSASECDTIPGRQCMASCFFLLKQFDDVLIYLNSFKSYFYNDDIFNFNYAQAKAATGNTSEGEEAFLLIQSEKMKNDYIYLSWLARCYIMNKKPRLAWELYLKMETSGESFSLLQLIANDCYKRDPSRSAPFTEKHR

SEQ ID NO: 88077 - protein, 423 aa, Homo sapiens
  Payload ID: 17636
  Gene Name: tetratricopeptide repeat domain 26
  ENSP ID: ENSP00000418788
MMLSRAKPAVGRGVQHTDKRKKKGRKIPKLEELLSKRDFTGAITLLEFKRHVGEEEEDTNLWIGYCAFHLGDYKRALEEYENATKEENCNSEVWVNLACTYFFLGMYKQAEAAGFKASKSRLQNRLLFHLAHKVVFRGGEGALQVLPPLVDVIPEARLNLVIYYLRQDDVQEAYNLIKDLEPTTPQEYILKGVVNAALGQEMGSRDHMKIAQQFFQLVGGSASECDTIPGRQCMASCFFLLKQFDDVLIYLNSFKSYFYNDDIFNFNYAQAKAATGNTSEGEEAFLLIQSEKMKNDYIYLSWLARCYIMNKKPRLAWELYLKMETSGESFSLLQLIANDCYKMGQFYYSAKAFDVLERLDPNPEYWEGKRGACVGIFQMIIAGREPKETLREVLHLLRSTGNTQVEYMIRIMKKWAKENRVSI

SEQ ID NO: 88078 - protein, 447 aa, Homo sapiens
  Payload ID: 17636
  Gene Name: tetratricopeptide repeat domain 26
  ENSP ID: ENSP00000419178
MMLSRAKPAVGRGVQHTDKRKKKGRKIPKLEELLSKRDFTGAITLLEFKRHVGEEEEDTNLWIGYCAFHLGDYKRALEEYENATKEENCNSEVWVNLACTYFFLGMYKQAEAAGFKASKSRLQNRLLFHLAHKAELKSLMDNASSSFEFAKELIRHNLVVFRGGEGALQVLPPLVDVIPEARLNLVIYYLRQDVQEAYNLIKDLEPTTPQEYILKGVVNAALGQEMGSRDHMKIAQQFFQLVGGSASECDTIPGRQCMASCFFLLKQFDDVLIYLNSFKSYFYNDDIFNFNYAQAKAATGNTSEGEEAFLLIQSEKMKNDYIYLSWLARCYIMNKKPRLAWELYLKMETSGESFSLLQLIANDCYKMGQFYYSAKAFDVLERLDPNPEYWEGKRGACVGIFQMIIAGREPKETLREVLHLLRSTGNTQVEYMIRIMKKWAKENRVSI

SEQ ID NO: 88079 - protein, 554 aa, Homo sapiens
  Payload ID: 17636
  Gene Name: tetratricopeptide repeat domain 26
  Uniprot ID: A0AVF1
  ENSP ID: ENSP00000419279
MMLSRAKPAVGRGVQHTDKRKKKGRKIPKLEELLSKRDFTGAITLLEFKRHVGEEEEDTNLWIGYCAFHLGDYKRALEEYENATKEENCNSEVWVNLACTYFFLGMYKQAEAAGFKASKSRLQNRLLFHLAHKFNDEKKLMSFHQNLQDVTEDQLSLASIHYMRSHYQEAIDIYKRILLDNREYLALNVYVALCYYKLDYYDVSQEVLAVYLQQIPDSTIALNLKACNHFRLYNGRAAEAELKSLMDNASSSFEFAKELIRHNLVVFRGGEGALQVLPPLVDVIPEARLNLVIYYLRQDDVQEAYNLIKDLEPTTPQEYILKGVVNAALGQEMGSRDHMKIAQQFFQLVGGSASECDTIPGRQCMASCFFLLKQFDDVLIYLNSFKSYFYNDDIFNFNYAQAKAATGNTSEGEEAFLLIQSEKMKNDYIYLSWLARCYIMNKKPRLAWELYLKMETSGESFSLLQLIANDCYKMGQFYYSAKAFDVLERLDPNPEYWEGKRGACVGIFQMIIAGREPKETLREVLHLLRSTGNTQVEYMIRIMKKWAKENRVSI

SEQ ID NO: 88080 - protein, 135 aa, Homo sapiens
  Payload ID: 17636
  Gene Name: tetratricopeptide repeat domain 26
  ENSP ID: ENSP00000419639
MMLSRAKPAVGRGVQHTDKRKKKGRKIPKLEELLSKRDFTGAITLLEFKRHVGEEEEDTNLWIGYCAFHLGDYKRALEEYENATKEENCNSEVWVNLACTYFFLGMYKQAEAAGFKASKSRLQNRLLFHLAHKEK

SEQ ID NO: 88081 - protein, 271 aa, Homo sapiens
  Payload ID: 17636
  Gene Name: tetratricopeptide repeat domain 26
  ENSP ID: ENSP00000443253
MMLSRAKPAVGRGVQHTDKRKKKGRKIPKLEELLSKRDFTGAITLLEFKRHVGEEEEDTNLWIGYCAFHLGDYKRALEEYENATKEENCNSEVWVNLACTYFFLGMYKQAEAAGFKASKSRLQNRLLFHLAHKFNDEKKLMSFHQNLQDVTEDQLSLASIHYMRSHYQEAIDIYKRILLDNREYLALNVYVALCYYKLDYYDVSQEVLAVYLQQIPDSTIALNLKACNHFRLYNGRAAEAELKSLMDNASSSFEFAKELIRHNLVNNDFPS

SEQ ID NO: 88082 - protein, 843 aa, Homo sapiens
  Payload ID: 17637
  Gene Name: tetratricopeptide repeat domain 27
  Uniprot ID: Q6P3X3
  ENSP ID: ENSP00000313953
MWTPELAILRGFPTEAERQQWKQEGVVGSESGSFLQLLLEGNYEAIFLNSMTQNIFNSTTTAEEKIDSYLEKQVVTFLDYSTDLDTTERQQLIFLLGVSSLQLFVQSNWTGPPVDLHPQDFLSSVLFQQFSEVKGLDAFVLSLLTLDGESIYSLTSKPILLLLARIILVNVRHKLTAIQSLPWWTLRCVNIHQHLLEERSPLLFTLAENCIDQVMKLQNLFVDDSGRYLAIQFHLECAYVFLYYYEYRKAKDQLDIAKDISQLQIDLTGALGKRTRFQENYVAQLILDVRREGDVLSNCEFTPAPTPQEHLTKNLELNDDTILNDIKLADCEQFQMPDLCAEEIAIILGICTNFQKNNPVHTLTEVELLAFTSCLLSQPKFWAIQTSALILRTKLEKGSTRRVERAMRQTQALADQFEDKTTSVLERLKIFYCCQVPPHWAIQRQLASLLFELGCTSSALQIFEKLEMWEDVVICYERAGQHGKAEEILRQELEKKETPSLYCLLGDVLGDHSCYDKAWELSRYRSARAQRSKALLHLRNKEFQECVECFERSVKINPMQLGVWFSLGCAYLALEDYQGSAKAFQRCVTLEPDNAEAWNNLSTSYIRLKQKVKAFRTLQEALKCNYEHWQIWENYILTSTDVGEFSEAIKAYHRLLDLRDKYKDVQVLKILVRAVIDGMTDRSGDVATGLKGKLQELFGRVTSRVTNDGEIWRLYAHVYGNGQSEKPDENEKAFQCLSKAYKCDTQSNCWEKDITSFKEVVQRALGLAHVAIKCSKNKSSSQEAVQMLSSVRLNLRGLLSKAKQLFTDVATGEMSRELADDITAMDTLVTELQDLSNQFRNQY

SEQ ID NO: 88083 - protein, 41 aa, Homo sapiens
  Payload ID: 17637
  Gene Name: tetratricopeptide repeat domain 27
  ENSP ID: ENSP00000392883
MWTPELAILRGFPTEAERQQWKQEGVVGSALIFKRITQCTH

SEQ ID NO: 88084 - protein, 115 aa, Homo sapiens
  Payload ID: 17637
  Gene Name: tetratricopeptide repeat domain 27
  ENSP ID: ENSP00000393327
MTQNIFNSTTTAEEKIDSYLEKQVVTFLDYSTDLDTTERQQLIFLLGVSSLQLFVQSNWTGPPVDLHPQDFLSSVLFQQFSEVKGLDAFVLSLLTLDGESIYSLTSKPILLLLAR

SEQ ID NO: 88085 - protein, 46 aa, Homo sapiens
  Payload ID: 17637
  Gene Name: tetratricopeptide repeat domain 27
  ENSP ID: ENSP00000398820
LGVWFSLGCAYLALEDYQGSAKAFQRCVTLEPDVCAYSTVLFTETL

SEQ ID NO: 88086 - protein, 71 aa, Homo sapiens
  Payload ID: 17637
  Gene Name: tetratricopeptide repeat domain 27
  ENSP ID: ENSP00000409230
PVHTLTEVELLAFTSCLLSQPKFWAIQTSALILRTKLEKGSTRRVERAMRQTQVAHDVHLSCHWGCYLIIQ

SEQ ID NO: 88087 - protein, 100 aa, Homo sapiens
  Payload ID: 17637
  Gene Name: tetratricopeptide repeat domain 27
  ENSP ID: ENSP00000410642
  MOD_RES (1)..(1): Any amino acid
XCYERAGQHGKAEEILRQELEKKETPSLYCLLGDVLGDHSCYDKAWELSRYRSARAQRSKALLHLRNKEFQECVECFERSVKINPMQGSGRPEEREKIGE

SEQ ID NO: 88088 - protein, 2481 aa, Homo sapiens
  Payload ID: 17638
  Gene Name: tetratricopeptide repeat domain 28
  Uniprot ID: Q96AY4
  ENSP ID: ENSP00000381003
MEQSPPPAPEPTQGPTPARSRRRREPESPPASAPIPLFGADTIGQRSPDGPVLSKAEFVEKVRQSNQACHDGDFHTAIVLYNEALAVDPQNCILYSNRSAAYMKIQQYDKALDDAIKARLLNPKWPKAYFRQGVALQYLGRHADALAAFASGLAQDPKSLQLLVGMVEAAMKSPMRDSLEPTYQQLQKMKLDKSPFVVVSVVGQELLTAGHHGASVVVLEAALKIGTCSLKLRGSVFSALSSAYWSLGNTEKSTGYMQQDLDVAKTLGDQTGECRAHGNLGSAFFSKGNYREALTNHRHQLVLAMKLKDREAASSALSSLGHVYTAIGDYPNALASHKQCVLLAKQSKDELSEARELGNMGAVYIAMGDFENAVQCHEQHLKIAKDLGNKREEARAYSNLGSAYHYRRNFDKAMSYHNYVLELAQELMEKAIEMRAYAGLGHAARCMQDLERAKQYHEQQLGIAEDLKDRAAEGRASSNLGIIHQMKGDYDTALKLHKTHLCIAQELSDYAAQGRAYGNMGNAYNALGMYDQAVKYHRQELQISMEVNDRASQASTHGNLAVAYQALGAHDRALQHYQNHLNIARELRDIQSEARALSNLGNFHCSRGEYVQAAPYYEQYLRLAPDLQDMEGEGKVCHNLGYAHYCLGNYQEAVKYYEQDLALAKDLHDKLSQAKAYCNLGLAFKALLNFSKAEECQKYLLSLAQSLNNSQAKFRALGNLGDIFICKKDINGAIKFYEQQLGLAHQVKDRRLEASAYAALGTAYRMIQKYDKALGYHTQELEVYQELSDLPGECRAHGHLAAVYMALGKYTMAFKCYEEQLDLGQKLKDPSLEAQVYGNMGITKMNMNVMEEAIGYFEQQLAMLQQLSGNESVLDRGRAYGNLGDCYEALGDYEEAIKYYEQYLSVAQSLNRMQDQAKAYRGLGNGHRAMGSLQQALVCFEKRLVVAHELGEAFNKAQAYGELGSLHSQLGNYEQAISCLERQLNIARDMKDRALESDAACGLGGVYQQMGEYDTALQYHQLDLQIAEETNNPTCQGRAYGNLGLTYESLGTFERAVVYQEQHLSIAAQMNDLAAKTVSYSSLGRTHHALQNYSQAVMYLQEGLRLAEQLGRREDEAKIRHGLGLSLWASGNLEEAQHQLYRASALFETIRHEAQLSTDYKLSLFDLQTSSYQALQRVLVSLGHHDEALAVAERGRTRAFADLLVERQTGQQDSDPYSPVTIDQILEMVNGQRGLVLYYSLAAGYLYSWLLAPGAGIVKFHEHYLGENTVENSSDFQASSSVTLPTATGSALEQHIASVREALGVESHYSRACASSETESEAGDIMDQQFEEMNNKLNSVTDPTGFLRMVRRNNLFNRSCQSMTSLFSNTVSPTQDGTSSLPRRQSSFAKPPLRALYDLLIAPMEGGLMHSSGPVGRHRQLILVLEGELYLIPFALLKGSSSNEYLYERFGLLAVPSIRSLSVQSKSHLRKNPPTYSSSTSMAAVIGNPKLPSAVMDRWLWGPMPSAEEEAYMVSELLGCQPLVGSVATKERVMSALTQAECVHFATHISWKLSALVLTPSMDGNPASSKSSFGHPYTIPESLRVQDDASDGESISDCPPLQELLLTAADVLDLQLPVKLVVLGSSQESNSKVTADGVIALTRAFLAAGAQCVLVSLWPVPVAASKMFIHAFYSSLLNGLKASAALGEAMKVVQSSKAFSHPSNWAGFMLIGSDVKLNSPSSLIGQALTEILQHPERARDALRVLLHLVEKSLQRIQNGQRNAMYTSQQSVENKVGGIPGWQALLTAVGFRLDPPTSGLPAAVFFPTSDPGDRLQQCSSTLQSLLGLPNPALQALCKLITASETGEQLISRAVKNMVGMLHQVLVQLQAGEKEQDLASAPIQVSISVQLWRLPGCHEFLAALGFDLCEVGQEEVILKTGKQANRRTVHFALQSLLSLFDSTELPKRLSLDSSSSLESLASAQSVSNALPLGYQQPPFSPTGADSIASDAISVYSLSSIASSMSFVSKPEGGSEGGGPGGRQDHDRSKNAYLQRSTLPRSQLPPQTRPAGNKDEEEYEGFSIISNEPLATYQENRNTCFSPDHKQPQPGTAGGMRVSVSSKGSISTPNSPVKMTLIPSPNSPFQKVGKLASSDTGESDQSSTETDSTVKSQEESNPKLDPQELAQKILEETQSHLIAVERLQRSGGQVSKSNNPEDGVQAPSSTAVFRASETSAFSRPVLSHQKSQPSPVTVKPKPPARSSSLPKVSSGYSSPTTSEMSIKDSPSQHSGRPSPGCDSQTSQLDQPLFKLKYPSSPYSAHISKSPRNMSPSSGHQSPAGSAPSPALSYSSAGSARSSPADAPDIDKLKMAAIDEKVQAVHNLKMFWQSTPQHSTGPMKIFRGAPGTMTSKRDVLSLLNLSPRHNKKEEGVDKLELKELSLQQHDGAPPKAPPNGHWRTETTSLGSLPLPAGPPATAPARPLRLPSGNGYKFLSPGRFFPSSKC

SEQ ID NO: 88089 - protein, 108 aa, Homo sapiens
  Payload ID: 17638
  Gene Name: tetratricopeptide repeat domain 28
  ENSP ID: ENSP00000388788
EQHIASVREALGVESHYSRACASSETESEAGDIMDQQFEEMNNKLNSVTDPTGFLRMVRRNNLFNRDATRFAEAWDWAWTHVLALPTSQPVKAGDTYLHQVMQAVVIN

SEQ ID NO: 88090 - protein, 301 aa, Homo sapiens
  Payload ID: 17638
  Gene Name: tetratricopeptide repeat domain 28
  ENSP ID: ENSP00000410244
DVKLNSPSSLIGQALTEILQHPERARDALRVLLHLVEKSLQRIQNGQRNAMYTSQQSVENKVGGIPGWQALLTAVGFRLDPPTSGLPAAVFFPTSDPGDRLQQCSSTLQSLLGLPNPALQALCKLITASETGEQLISRLHQVLVQLQAGEKEQDLASAPIQVSISVQLWRLPGCHEFLAALGFDLCEVGQEEVILKTGKQANRRTVHFALQSLLSLFDSTELPKRLSLDSSSSLESLASAQSVSNALPLGYQQPPFSPTGADSIASDAISVYSLSSIASSMSFVSKPEGGSEGGGPGGRQD

SEQ ID NO: 88091 - protein, 2354 aa, Homo sapiens
  Payload ID: 17638
  Gene Name: tetratricopeptide repeat domain 28
  ENSP ID: ENSP00000479834
AYFRQGVALQYLGRHADALAAFASGLAQDPKSLQLLVGMVEAAMKSPMRDSLEPTYQQLQKMKLDKSPFVVVSVVGQELLTAGHHGASVVVLEAALKIGTCSLKLRGSVFSALSSAYWSLGNTEKSTGYMQQDLDVAKTLGDQTGECRAHGNLGSAFFSKGNYREALTNHRHQLVLAMKLKDREAASSALSSLGHVYTAIGDYPNALASHKQCVLLAKQSKDELSEARELGNMGAVYIAMGDFENAVQCHEQHLKIAKDLGNKREEARAYSNLGSAYHYRRNFDKAMSYHNYVLELAQELMEKAIEMRAYAGLGHAARCMQDLERAKQYHEQQLGIAEDLKDRAAEGRASSNLGIIHQMKGDYDTALKLHKTHLCIAQELSDYAAQGRAYGNMGNAYNALGMYDQAVKYHRQELQISMEVNDRASQASTHGNLAVAYQALGAHDRALQHYQNHLNIARELRDIQSEARALSNLGNFHCSRGEYVQAAPYYEQYLRLAPDLQDMEGEGKVCHNLGYAHYCLGNYQEAVKYYEQDLALAKDLHDKLSQAKAYCNLGLAFKALLNFSKAEECQKYLLSLAQSLNNSQAKFRALGNLGDIFICKKDINGAIKFYEQQLGLAHQVKDRRLEASAYAALGTAYRMIQKYDKALGYHTQELEVYQELSDLPGECRAHGHLAAVYMALGKYTMAFKCYEEQLDLGQKLKDPSLEAQVYGNMGITKMNMNVMEEAIGYFEQQLAMLQQLSGNESVLDRGRAYGNLGDCYEALGDYEEAIKYYEQYLSVAQSLNRMQDQAKAYRGLGNGHRAMGSLQQALVCFEKRLVVAHELGEAFNKAQAYGELGSLHSQLGNYEQAISCLERQLNIARDMKDRALESDAACGLGGVYQQMGEYDTALQYHQLDLQIAEETNNPTCQGRAYGNLGLTYESLGTFERAVVYQEQHLSIAAQMNDLAAKTVSYSSLGRTHHALQNYSQAVMYLQEGLRLAEQLGRREDEAKIRHGLGLSLWASGNLEEAQHQLYRASALFETIRHEAQLSTDYKLSLFDLQTSSYQALQRVLVSLGHHDEALAVAERGRTRAFADLLVERQTGQQDSDPYSPVTIDQILEMVNGQRGLVLYYSLAAGYLYSWLLAPGAGIVKFHEHYLGENTVENSSDFQASSSVTLPTATGSALEQHIASVREALGVESHYSRACASSETESEAGDIMDQQFEEMNNKLNSVTDPTGFLRMVRRNNLFNRSCQSMTSLFSNTVSPTQDGTSSLPRRQSSFAKPPLRALYDLLIAPMEGGLMHSSGPVGRHRQLILVLEGELYLIPFALLKGSSSNEYLYERFGLLAVPSIRSLSVQSKSHLRKNPPTYSSSTSMAAVIGNPKLPSAVMDRWLWGPMPSAEEEAYMVSELLGCQPLVGSVATKERVMSALTQAECVHFATHISWKLSALVLTPSMDGNPASSKSSFGHPYTIPESLRVQDDASDGESISDCPPLQELLLTAADVLDLQLPVKLVVLGSSQESNSKVTADGVIALTRAFLAAGAQCVLVSLWPVPVAASKMFIHAFYSSLLNGLKASAALGEAMKVVQSSKAFSHPSNWAGFMLIGSDVKLNSPSSLIGQALTEILQHPERARDALRVLLHLVEKSLQRIQNGQRNAMYTSQQSVENKVGGIPGWQALLTAVGFRLDPPTSGLPAAVFFPTSDPGDRLQQCSSTLQSLLGLPNPALQALCKLITASETGEQLISRAVKNMVGMLHQVLVQLQAGEKEQDLASAPIQVSISVQLWRLPGCHEFLAALGFDLCEVGQEEVILKTGKQANRRTVHFALQSLLSLFDSTELPKRLSLDSSSSLESLASAQSVSNALPLGYQQPPFSPTGADSIASDAISVYSLSSIASSMSFVSKPEGGSEGGGPGGRQDHDRSKNAYLQRSTLPRSQLPPQTRPAGNKDEEEYEGFSIISNEPLATYQENRNTCFSPDHKQPQPGTAGGMRVSVSSKGSISTPNSPVKMTLIPSPNSPFQKVGKLASSDTGESDQSSTETDSTVKSQEESNPKLDPQELAQKILEETQSHLIAVERLQRSGGQVSKSNNPEDGVQAPSSTAVFRASETSAFSRPVLSHQKSQPSPVTVKPKPPARSSSLPKVSSGYSSPTTSEMSIKDSPSQHSGRPSPGCDSQTSQLDQPLFKLKYPSSPYSAHISKSPRNMSPSSGHQSPAGSAPSPALSYSSAGSARSSPADAPDIDKLKMAAIDEKVQAVHNLKMFWQSTPQHSTGPMKIFRGAPGTMTSKRDVLSLLNLSPRHNKKEEGVDKLELKELSLQQHDGAPPKAPPNGHWRTETTSLGSLPLPAGPPATAPARPLRLPSGNGYKFLSPGRFFPSSKC

SEQ ID NO: 88092 - protein, 475 aa, Homo sapiens
  Payload ID: 17639
  Gene Name: tetratricopeptide repeat domain 29
  Uniprot ID: Q8NA56
  ENSP ID: ENSP00000316740
MTTLPPLPMTRPKLTALARQKLPCSSRKIPRSQLIKEKDDIDHYLEVNFKGLSKEEVAAYRNSYKKNICVDMLRDGYHKSFTELFALMERWDALREAARVRSLFWLQKPLEEQPDKLDYLYHYLTRAEDAERKESFEDVHNNLYALACYFNNSEDKWVRNHFYERCFKIAQLIKIDCGKKEAEAHMHMGLLYEEDGQLLEAAEHYEAFHQLTQGRIWKDETGRSLNLLACESLLRTYRLLSDKMLENKEYKQAIKILIKASEIAKEGSDKKMEAEASYYLGLAHLAAEEYETALTVLDTYCKISTDLDDDLSLGRGYEAIAKVLQSQGEMTEAIKYLKKFVKIARNNFQSLDLVRASTMLGDIYNEKGYYNKASECFQQAFDTTVELMSMPLMDETKVHYGIAKAHQMMLTVNNYIESADLTSLNYLLSWKESRGNIEPDPVTEEFRGSTVEAVSQNSERLEELSRFPGDQKNET

SEQ ID NO: 88093 - protein, 319 aa, Homo sapiens
  Payload ID: 17639
  Gene Name: tetratricopeptide repeat domain 29
  ENSP ID: ENSP00000381861
MTTLPPLPMTRPKLTALARQKLPCSSRKIPRSQLIKEKDDIDHYLEVNFKGLSKEEVAAYRNSYKKNICVDMLRDGYHKSFTELFALMERWDALREAARVRSLFWLQKPLEEQPDKLDYLYHYLTRAEDAERKESFEDVHNNLYALACYFNNSEDKWVRNHFYERCFKIAQLIKIDCGKKEAEAHMHMGLLYEEDGQLLEAAEHYEAFHQLTQGRIWKDETGRSLNLLACESLLRTYRLLSDKMLENKEYKQAIKILIKASEIAKEGSDKKMEAEASYYLGLAHLAAEEYETALTVLDTYCKSPQTWMMISVWGEAMKP

SEQ ID NO: 88094 - protein, 363 aa, Homo sapiens
  Payload ID: 17639
  Gene Name: tetratricopeptide repeat domain 29
  ENSP ID: ENSP00000422648
MTTLPPLPMTRPKLTALARQKLPCSSRKIPRSQLIKEKDDIDHYLEVNFKGLSKEEVAAYRNSYKKNICVDMLRDGYHKSFTELFALMERWDALREAARVRSLFWLQKPLEEQPDKLDYLYHYLTRAEDAERKESFEDVHNNLYALACYFNNSEDKWVRNHFYERCFKIAQLIKIDCGKKEAEAHMHMGLLYEEDGQLLEAAEHYEAFHQLTQGRIWKDETGRSLNLLACESLLRTYRLLSDKMLENKEYKQAIKILIKASEIAKEGSDKKMEAEASYYLGLAHLAAEEYETALTVLDTYCKISTDLDDDLSLGRGYEAIAKVLQRDMSLSSNNSHLLALLLIWNILASFPGFEFLVDSVKAK

SEQ ID NO: 88095 - protein, 501 aa, Homo sapiens
  Payload ID: 17639
  Gene Name: tetratricopeptide repeat domain 29
  ENSP ID: ENSP00000423505
MIPMFTVTLEDSGTLWKSLHSSSESEMTTLPPLPMTRPKLTALARQKLPCSSRKIPRSQLIKEKDDIDHYLEVNFKGLSKEEVAAYRNSYKKNICVDMLRDGYHKSFTELFALMERWDALREAARVRSLFWLQKPLEEQPDKLDYLYHYLTRAEDAERKESFEDVHNNLYALACYFNNSEDKWVRNHFYERCFKIAQLIKIDCGKKEAEAHMHMGLLYEEDGQLLEAAEHYEAFHQLTQGRIWKDETGRSLNLLACESLLRTYRLLSDKMLENKEYKQAIKILIKASEIAKEGSDKKMEAEASYYLGLAHLAAEEYETALTVLDTYCKISTDLDDDLSLGRGYEAIAKVLQSQGEMTEAIKYLKKFVKIARNNFQSLDLVRASTMLGDIYNEKGYYNKASECFQQAFDTTVELMSMPLMDETKVHYGIAKAHQMMLTVNNYIESADLTSLNYLLSWKESRGNIEPDPVTEEFRGSTVEAVSQNSERLEELSRFPGDQKNET

SEQ ID NO: 88096 - protein, 93 aa, Homo sapiens
  Payload ID: 17639
  Gene Name: tetratricopeptide repeat domain 29
  ENSP ID: ENSP00000423646
MIPMFTVTLEDSGTLWKSLHSSSESEMTTLPPLPMTRPKLTALARQKLPCSSRKIPRSQLIKEKDDIDHYLEVNFKGLSKEEVAAYRNSYKKN

SEQ ID NO: 88097 - protein, 26 aa, Homo sapiens
  Payload ID: 17639
  Gene Name: tetratricopeptide repeat domain 29
  ENSP ID: ENSP00000425665
MTTLPPLPMTRPKLTALARQKLPCSS

SEQ ID NO: 88098 - protein, 474 aa, Homo sapiens
  Payload ID: 17639
  Gene Name: tetratricopeptide repeat domain 29
  ENSP ID: ENSP00000425778
MTTLPPLPMTRPKLTALARQKLPCSSRKIPRSQLIKEKDDIDHYLEVNFKGLSKEEVAAYRNSYKKNICVDMLRDGYHKSFTELFALMERWDALREAARVRSLFWLQKPLEEQPDKLDYLYHYLTRAEDAERKESFEDVHNNLYALACYFNNSEDKWVRNHFYERCFKIAQLIKIDCGKKEAEAHMHMGLLYEEDGQLLEAAEHYEAFHQLTQGRIWKDETGRSLNLLACESLLRTYRLLSDKMLENKEYKQAIKILIKASEIAKEGSDKKMEAEASYYLGLAHLAAEEYETALTVLDTYCKISTDLDDDLSLGRGYEAIAKVLQSQGEMTEAIKYLKKFVKIARNNFQSLDLVRASTMLGDIYNEKGYYNKASECFQQAFDTTVELMSMPLMDETKVHYGIAKAHQMMLTVNNYIESADLTSLNYLLSWKESRGNIEPDPVTEFRGSTVEAVSQNSERLEELSRFPGDQKNET

SEQ ID NO: 88099 - protein, 2025 aa, Homo sapiens
  Payload ID: 17640
  Gene Name: tetratricopeptide repeat domain 3
  Uniprot ID: P53804
  ENSP ID: ENSP00000346791
MDNFAEGDFTVADYALLEDCPHVDDCVFAAEFMSNDYVRVTQLYCDGVGVQYKDYIQSERNLEFDICSIWCSKPISVLQDYCDAIKINIFWPLLFQHQNSSVISRLHPCVDANNSRASEINLKKLQHLELMEDIVDLAKKVANDSFLIGGLLRIGCKIENKILAMEEALNWIKYAGDVTILTKLGSIDNCWPMLSIFFTEYKYHITKIVMEDCNLLEELKTQSCMDCIEEGELMKMKGNEEFSKERFDIAIIYYTRAIEYRPENYLLYGNRALCFLRTGQFRNALGDGKRATILKNTWPKGHYRYCDALSMLGEYDWALQANIKAQKLCKNDPEGIKDLIQQHVKLQKQIEDLQGRTANKDPIKAFYENRAYTPRSLSAPIFTTSLNFVEKERDFRKINHEMANGGNQNLKVADEALKVDDCDCHPEFSPPSSQPPKHKGKQKSRNNESEKFSSSSPLTLPADLKNILEKQFSKSSRAAHQDFANIMKMLRSLIQDGYMALLEQRCRSAAQAFTELLNGLDPQKIKQLNLAMINYVLVVYGLAISLLGIGQPEELSEAENQFKRIIEHYPSEGLDCLAYCGIGKVYLKKNRFLEALNHFEKARTLIYRLPGVLTWPTSNVIIEESQPQKIKMLLEKFVEECKFPPVPDAICCYQKCHGYSKIQIYITDPDFKGFIRISCCQYCKIEFHMNCWKKLKTTTFNDKIDKDFLQGICLTPDCEGVISKIIIFSSGGEVKCEFEHKVIKEKVPPRPILKQKCSSLEKLRLKEDKKLKRKIQKKEAKKLAQERMEEDLRESNPPKNEEQKETVDNVQRCQFLDDRILQCIKQYADKIKSGIQNTAMLLKELLSWKVLSTEDYTTCFSSRNFLNEAVDYVIRHLIQENNRVKTRIFLHVLSELKEVEPKLAAWIQKLNSFGLDATGTFFSRYGASLKLLDFSIMTFLWNEKYGHKLDSIEGKQLDYFSEPASLKEARCLIWLLEEHRDKFPALHSALDEFFDIMDSRCTVLRKQDSGEAPFSSTKVKNKSKKKKPKDSKPMLVGSGTTSVTSNNEIITSSEDHSNRNSDSAGPFAVPDHLRQDVEEFEALYDQHSNEYVVRNKKLWDMNPKQKCSTLYDYFSQFLEEHGPLDMSNKMFSAEYEFFPEETRQILEKAGGLKPFLLGCPRFVVIDNCIALKKVASRLKKKRKKKNIKTKVEEISKAGEYVRVKLQLNPAAREFKPDVKSKPVSDSSSAPAFENVKPKPVSANSPKPACEDVKAKPVSDNSSRQVSEDGQPKGVSSNSPKPGSEDANYKRVSCNSPKPVLEDVKPTYWAQSHLVTGYCTYLPFQRFDITQTPPAYINVLPGLPQYTSIYTPLASLSPEYQLPRSVPVVPSFVANDRADKNAAAYFEGHHLNAENVAGHQIASETQILEGSLGISVKSHCSTGDAHTVLSESNRNDEHCGNSNNKCEVIPESTSAVTNIPHVQMVAIQVSWNIIHQEVNTEPYNPFEERQGEISRIEKEHQVLQDQLQEVYENYEQIKLKGLEETRDLEEKLKRHLEENKISKTELDWFLQDLEREIKKWQQEKKEIQERLKSLKKKIKKVSNASEMYTQKNDGKEKEHELHLDQSLEISNTLTNEKMKIEEYIKKGKEDYEESHQRAVAAEVSVLENWKESEVYKLQIMESQAEAFLKKLGLISRDPAAYPDMESDIRSWELFLSNVTKEIEKAKSQFEEQIKAIKNGSRLSELSKVQISELSFPACNTVHPELLPESSGDDGQGLVTSASDVTGNHAALHRDPSVFSAGDSPGEAPSALLPGPPPGQPEATQLTGPKRAGQAALSERSPVADRKQPVPPGRAARSSQSPKKPFNSIIEHLSVVFPCYNSTELAGFIKKVRSKNKNSLSGLSIDEIVQRVTEHILDEQKKKKPNPGKDKRTYEPSSATPVTRSSQGSPSVVVAPSPKTKGQKAEDVPVRIALGASSCEICHEVFKSKNVRVLKCGHKYHKGCFKQWLKGQSACPACQGRDLLTEESPSGRGWPSQNQELPSCSSR

SEQ ID NO: 88100 - protein, 2025 aa, Homo sapiens; identical to SEQ ID NO: 88099
  Payload ID: 17640
  Gene Name: tetratricopeptide repeat domain 3
  Uniprot ID: P53804
  ENSP ID: ENSP00000347889

SEQ ID NO: 88101 - protein, 300 aa, Homo sapiens
  Payload ID: 17640
  Gene Name: tetratricopeptide repeat domain 3
  ENSP ID: ENSP00000381974
MDNFAEGDFTVADYALLEDCPHVDDCVFAAEFMSNDYVRVTQLYCDGVGVQYKDYIQSERNLEFDICSIWCSKPISVLQDYCDAIKINIFWPLLFQHQNSSVISRLHPCVDANNSRASEINLKKLQHLELMEDIVDLAKKVANDSFLIGGLLRIGCKIENKILAMEEALNWIKYAGDVTILTKLGSIDNCWPMLSIFFTEYKYHITKIVMEDCNLLEELKTQSCMDCIEEGELMKMKGNEEFSKERFDIAIIYYTRAIEYRPENYLLYGNRALCFLRTGQFRTHSHGRKFGKYKSLKRRK

SEQ ID NO: 88102 - protein, 2025 aa, Homo sapiens; identical to SEQ ID NO: 88099
  Payload ID: 17640
  Gene Name: tetratricopeptide repeat domain 3
  Uniprot ID: P53804
  ENSP ID: ENSP00000381981

SEQ ID NO: 88103 - protein, 298 aa, Homo sapiens
  Payload ID: 17640
  Gene Name: tetratricopeptide repeat domain 3
  ENSP ID: ENSP00000387880
  MOD_RES (1)..(1): Any amino acid
XNFLNEAVDYVIRHLIQENNRVKTRIFLHVLSELKEVEPKLAAWIQKLNSFGLDATGTFFSRYGASLKLLDFSIMTFLWNEKYGHKLDSIEGKQLDYFSEPASLKEARCLIWLLEEHRDKFPALHSALDEFFDIMDIFTASWERLHVTLTESINSRCTVLRKQDSGEAPFSSTKVKNKSKKKKPKDSKPMLVGSGTTSVTSNNEIITSSEDHSNRNSDSAGPFAVPDHLRQDVEEFEALYDQHSNEYVVRNKKLWDMNPKQKCSTLYDYFSQFLEEHGPLDMSNKMFSAEYEFFPEET

SEQ ID NO: 88104 - protein, 1165 aa, Homo sapiens
  Payload ID: 17640
  Gene Name: tetratricopeptide repeat domain 3
  ENSP ID: ENSP00000391891
MDNFAEGDFTVADYALLEDCPHVDDCVFAAEFMSNDYVRVTQLYCDGVGVQYKDYIQSERNLEFDICSIWCSKPISVLQDYCDAIKINIFWPLLFQHQNSSVISRLHPCVDANNSRASEINLKKLQHLELMEDIVDLAKKVAKILAMEEALNWIKYAGDVTILTKLGSIDNCWPMLSIFFTEYKYHITKIVMEDCNLLEELKTQSCMDCIEEGELMKMKGNEEFSKERFDIAIIYYTRAIEYRPENYLLYGNRALCFLRTGQFRNALGDGKRATILKNTWPKGHYRYCDALSMLGEYDWALQANIKAQKLCKNDPEGIKDLIQQHVKLQKQIEDLQGRTANKDPIKAFYENRAYTPRSLSAPIFTTSLNFVEKERDFRKINHEMANGGNQNLKVADEALKVDDCDCHPEFSPPSSQPPKHKGKQKSRNNESEKFSSSSPLTLPADLKNILEKQFSKSSRAAHQDFANIMKMLRSLIQDGYMALLEQRCRSAAQAFTELLNGLDPQKIKQLNLAMINYVLVVYGLAISLLGIGQPEELSEAENQFKRIIEHYPSEGLDCLAYCGIGKVYLKKNRFLEALNHFEKARTLIYRLPGVLTWPTSNVIIEESQPQKIKMLLEKFVEECKFPPVPDAICCYQKCHGYSKIQIYITDPDFKGFIRISCCQYCKIEFHMNCWKKLKTTTFNDKIDKDFLQGICLTPDCEGVISKIIIFSSGGEVKCEFEHKVIKEKVPPRPILKQKCSSLEKLRLKEDKKLKRKIQKKEAKKLAQERMEEDLRESNPPKNEEQKETVDNVQRCQFLDDRILQCIKQYADKIKSGIQNTAMLLKELLSWKVLSTEDYTTCFSSRNFLNEAVDYVIRHLIQENNRVKTRIFLHVLSELKEVEPKLAAWIQKLNSFGLDATGTFFSRYGASLKLLDFSIMTFLWNEKYGHKLDSIEGKQLDYFSEPASLKEARCLIWLLEEHRDKFPALHSALDEFFDIMDSRCTVLRKQDSGEAPFSSTKVKNKSKKKKPKDSKPMLVGSGTTSVTSNNEIITSSEDHSNRNSDSAGPFAVPDHLRQDVEEFEALYDQHSNEYVVRNKKLWDMNPKQKCSTLYDYFSQFLEEHGPLDMSNKMFSAEYEFFPEETRQILEKAGGLKPFLLGCPRFVVIDNCIALKKVASRLKKKRK

SEQ ID NO: 88105 - protein, 317 aa, Homo sapiens
  Payload ID: 17640
  Gene Name: tetratricopeptide repeat domain 3
  ENSP ID: ENSP00000393681
  MOD_RES (1)..(1): Any amino acid
XDPAAYPDMESDIRSWELFLSNVTKEIEKAKVHPELLPESSGDDGQGLVTSASDVTGNHAALHRDPSVFSAGDSPGEAPSALLPGPPPGQPEATQLTGPKRAGQAALSERSPVADRKQPVPPGRAARSSQSPKKPFNSIIEHLSVVFPCYNSTELAGFIKKVRSKNKNSLSGLSIDEIVQRVTEHILDEQKKKKPNPGKDKRTYEPSSATPVTRSSQGSPSVVVAPSPKTKGQKAEDVPVRIALGASSCEICHEVFKSKNVRVLKCGHKYHKGCFKQWLKGQSACPACQGRDLLTEESPSGRGWPSQNQELPSCSSR

SEQ ID NO: 88106 - protein, 1179 aa, Homo sapiens
  Payload ID: 17640
  Gene Name: tetratricopeptide repeat domain 3
  ENSP ID: ENSP00000403943
MDNFAEGDFTVADYALLEDCPHVDDCVFAAEFMSNDYVRVTQLYCDGVGVQYKDYIQSERNLEFDICSIWCSKPISVLQDYCDAIKINIFWPLLFQHQNSSVISRLHPCVDANNSRASEINLKKLQHLELMEDIVDLAKKVANDSFLIGGLLRIGCKIENKILAMEEALNWIKYAGDVTILTKLGSIDNCWPMLSIFFTEYKYHITKIVMEDCNLLEELKTQSCMDCIEEGELMKMKGNEEFSKERFDIAIIYYTRAIEYRPENYLLYGNRALCFLRTGQFRNALGDGKRATILKNTWPKGHYRYCDALSMLGEYDWALQANIKAQKLCKNDPEGIKDLIQQHVKLQKQIEDLQGRTANKDPIKAFYENRAYTPRSLSAPIFTTSLNFVEKERDFRKINHEMANGGNQNLKVADEALKVDDCDCHPEFSPPSSQPPKHKGKQKSRNNESEKFSSSSPLTLPADLKNILEKQFSKSSRAAHQDFANIMKMLRSLIQDGYMALLEQRCRSAAQAFTELLNGLDPQKIKQLNLAMINYVLVVYGLAISLLGIGQPEELSEAENQFKRIIEHYPSEGLDCLAYCGIGKVYLKKNRFLEALNHFEKARTLIYRLPGVLTWPTSNVIIEESQPQKIKMLLEKFVEECKFPPVPDAICCYQKCHGYSKIQIYITDPDFKGFIRISCCQYCKIEFHMNCWKKLKTTTFNDKIDKDFLQGICLTPDCEGVISKIIIFSSGGEVKCEFEHKVIKEKVPPRPILKQKCSSLEKLRLKEDKKLKRKIQKKEAKKLAQERMEEDLRESNPPKNEEQKETVDNVQRCQFLDDRILQCIKQYADKIKSGIQNTAMLLKELLSWKVLSTEDYTTCFSSRNFLNEAVDYVIRHLIQENNRVKTRIFLHVLSELKEVEPKLAAWIQKLNSFGLDATGTFFSRYGASLKLLDFSIMTFLWNEKYGHKLDSIEGKQLDYFSEPASLKEARCLIWLLEEHRDKFPALHSALDEFFDIMDSRCTVLRKQDSGEAPFSSTKVKNKSKKKKPKDSKPMLVGSGTTSVTSNNEIITSSEDHSNRNSDSAGPFAVPDHLRQDVEEFEALYDQHSNEYVVRNKKLWDMNPKQKCSTLYDYFSQFLEEHGPLDMSNKMFSAEYEFFPEETRQILEKAGGLKPFLLGCPRFVVIDNCIALKKVASRLK

SEQ ID NO: 88107 - protein, 780 aa, Homo sapiens
  Payload ID: 17640
  Gene Name: tetratricopeptide repeat domain 3
  ENSP ID: ENSP00000408456
MDNFAEGDFTVADYALLEDCPHVDDCVFAAEFMSNDYVRVTQLYCDGVGVQYKDYIQSERNLEFDICSIWCSKPISVLQDYCDAIKINIFWPLLFQHQNSSVISRLHPCVDANNSRASEINLKKLQHLELMEDIVDLAKKVANDSFLIGGLLRIGCKIENKILAMEEALNWIKYAGDVTILTKLGSIDNCWPMLSIFFTEYKYHITKIVMEDCNLLEELKTQSCMDCIEEGELMKMKGNEEFSKERFDIAIIYYTRAIEYRPENYLLYGNRALCFLRTGQFRNALGDGKRATILKNTWPKGHYRYCDALSMLGEYDWALQANIKAQKLCKNDPEGIKDLIQQHVKLQKQIEDLQGRTANKDPIKAFYENRAYTPRSLSAPIFTTSLNFVEKERDFRKINHEMANGGNQNLKVADEALKVDDCDCHPEFSPPSSQPPKHKGKQKSRNNESEKFSSSSPLTLPADLKNILEKQFSKSSRAAHQDFANIMKMLRSLIQDGYMALLEQRCRSAAQAFTELLNGLDPQKIKQLNLAMINYVLVVYGLAISLLGIGQPEELSEAENQFKRIIEHYPSEGLDCLAYCGIGKVYLKKNRFLEALNHFEKARTLIYRLPGVLTWPTSNVIIEESQPQKIKMLLEKFVEECKFPPVPDAICCYQKCHGYSKIQIYITDPDFKGFIRISCCQYCKIEFHMNCWKKLKTTTFNDKIDKDFLQGICLTPDCEGVISKIIIFSSGGEVKCEFEHKVIKEKVPPRPILKQKCSSLEKLRLKEDKKLKRKIQKKEA

SEQ ID NO: 88108 - protein, 277 aa, Homo sapiens
  Payload ID: 17640
  Gene Name: tetratricopeptide repeat domain 3
  ENSP ID: ENSP00000414658
  MOD_RES (1)..(1): Any amino acid
XTLIYRLPGVLTWPTSNVIIEESQPQKIKMLLEKFVEECKFPPVPDAICCYQKCHGYSKIQIYITDPDFKDFLQGICLTPDCEGVISKIIIFSSGGEVKCEFEHKVIKEKVPPRPILKQKCSSLEKLRLKEDKKLKRKIQKKEAKKLAQERMEEDLRESNPPKNEEQKETVDNVQRCQFLDDRILQCIKQYADKIKSGIQNTAMLLKELLSWKVLSTEDYTTCFSSRNFLNEAVDYVIRHLIQENNRVKTRIFLHVLSELKEVEPKLAAWIQKLNSF

SEQ ID NO: 88109 - protein, 612 aa, Homo sapiens
  Payload ID: 17640
  Gene Name: tetratricopeptide repeat domain 3
  ENSP ID: ENSP00000442875
MLGEYDWALQANIKAQKLCKNDPEGIKDLIQQHVKLQKQIEDLQGRTANKDPIKAFYENRAYTPRSLSAPIFTTSLNFVEKERDFRKINHEMANGGNQNLKVADEALKVDDCDCHPEFSPPSSQPPKHKGKQKSRNNESEKFSSSSPLTLPADLKNILEKQFSKSSRAAHQDFANIMKMLRSLIQDGYMALLEQRCRSAAQAFTELLNGLDPQKIKQLNLAMINYVLVVYGLAISLLGIGQPEELSEAENQFKRIIEHYPSEGLDCLAYCGIGKVYLKKNRFLEALNHFEKARTLIYRLPGVLTWPTSNVIIEESQPQKIKMLLEKFVEECKFPPVPDAICCYQKCHGYSKIQIYITDPDFKGFIRISCCQYCKIEFHMNCWKKLKTTTFNDKIDKDFLQGICLTPDCEGVISKIIIFSSGGEVKCEFEHKVIKEKVPPRPILKQKCSSLEKLRLKEDKKLKRKIQKKEAKKLAQERMEEDLRESNPPKNEEQKETVDNVQRCQFLDDRILQCIKQYADKIKSGIQNTAMLLKELLSWKVLSTEDYTTCFSSRNFLNEAVDYVIRHLIQENNRVKTRIFLHVLSELKEVEPKLAAWIQKLNSFGMSLYIPEQ

SEQ ID NO: 88110 - protein, 665 aa, Homo sapiens
  Payload ID: 17641
  Gene Name: tetratricopeptide repeat domain 30A
  Uniprot ID: Q86WT1
  ENSP ID: ENSP00000347915
MAGLSGAQIPDGEFTALVYRLIRDARYAEAVQLLGRELQRSPRSRAGLSLLGYCYYRLQEFALAAECYEQLGQLHPELEQYRLYQAQALYKACLYPEATRVAFLLLDNPAYHSRVLRLQAAIKYSEGDLPGSRSLVEQLLSGEGGEESGGDNETDGQVNLGCLLYKEGQYEAACSKFSATLQASGYQPDLSYNLALAYYSSRQYASALKHIAEIIERGIRQHPELGVGMTTEGFDVRSVGNTLVLHQTALVEAFNLKAAIEYQLRNYEVAQETLTDMPPRAEEELDPVTLHNQALMNMDARPTEGFEKLQFLLQQNPFPPETFGNLLLLYCKYEYFDLAADVLAENAHLTYKFLTPYLYDFLDALITCQTAPEEAFIKLDGLAGMLTEQLRRLTKQVQEARHNRDDEAIKKAVNEYDETMEKYIPVLMAQAKIYWNLENYPMVEKVFRKSVEFCNDHDVWKLNVAHVLFMQENKYKEAIGFYEPIVKKHYDNILNVSAIVLANLCVSYIMTSQNEEAEELMRKIEKEEEQLSYDDPNRKMYHLCIVNLVIGTLYCAKGNYEFGISRVIKSLEPYNKKLGTDTWYYAKRCFLSLLENMSKHMIVIHDSVIQECVQFLGHCELYGTNIPAVIEQPLEEERMHVGKNTVTDESRQLKALIYEIIGWNK

SEQ ID NO: 88111 - protein, 665 aa, Homo sapiens
  Payload ID: 17642
  Gene Name: tetratricopeptide repeat domain 30B
  Uniprot ID: Q8N4P2
  ENSP ID: ENSP00000386181
MAGLSGAQIPDGEFTAVVYRLIRNARYAEAVQLLGGELQRSPRSRAGLSLLGYCYYRLQEFALAAECYEQLGQLHPELEQYRLYQAQALYKACLYAEATRVAFLLLDNPAYHSRVLRLQAAIKYSEGDLPGSRSLVEQLPSREGGEESGGENETDGQINLGCLLYKEGQYEAACSKFFAALQASGYQPDLSYNLALAYYSSRQYASALKHIAEIIERGIRQHPELGVGMTTEGIDVRSVGNTLVLHQTALVEAFNLKAAIEYQLRNYEAAQEALTDMPPRAEEELDPVTLHNQALMNMDARPTEGFEKLQFLLQQNPFPPETFGNLLLLYCKYEYFDLAADVLAENAHLIYKFLTPYLYDFLDAVITCQTAPEEAFIKLDGLAGMLTEVLRKLTIQVQEARHNRDDEAIKKAVNEYDETMEKYIPVLMAQAKIYWNLENYPMVEKIFRKSVEFCNDHDVWKLNVAHVLFMQENKYKEAIGFYEPIVKKHYDNILNVSAIVLANLCVSYIMTSQNEEAEELMRKIEKEEEQLSYDDPDKKMYHLCIVNLVIGTLYCAKGNYDFGISRVIKSLEPYNKKLGTDTWYYAKRCFLSLLENMSKHTIMLRDSVIQECVQFLEHCELHGRNIPAVIEQPLEEERMHVGKNTVTYESRQLKALIYEIIGWNI

SEQ ID NO: 88112 - protein, 519 aa, Homo sapiens
  Payload ID: 17643
  Gene Name: tetratricopeptide repeat domain 31
  Uniprot ID: Q49AM3
  ENSP ID: ENSP00000233623
MAPIPKTVGRIKLDCSLRPSCPLEVAAAPKLCKEFGPEDYGEEDIVDFLRRLVESDPQGLHRIHVDGSSGRLQLWHHDYLLGHLDDEGKSTGQSDRGKGAEGLGTYCGLRKSFLYPPQESEPCPQSPSASATFPSVSDSLLQVAMPQKLLVTEEEANRLAEELVAEEERMKQKAEKKRLKKKRQKERKRQERLEQYCGEPKASTTSDGDESPPSSPGNPVQGQCGEEEDSLDLSSTFVSLALRKVGDWPLSARREKGLNQEPQGRGLALQKMGQEEESPPREERPQQSPKVQASPGLLAAALQQSQELAKLGTSFAQNGFYHEAVVLFTQALKLNPQDHRLFGNRSFCHERLGQPAWALADAQVALTLRPGWPRGLFRLGKALMGLQRFREAAAVFQETLRGGSQPDAARELRSCLLHLTLQGQRGGICAPPLSPGALQPLPHAELAPSGLPSLRCPRSTALRSPGLSPLLHYPSCHRSHPNQPLSQTQSRRPHPLKPQDPSKGWDILGLGLQHLSQAR

SEQ ID NO: 88113 - protein, 340 aa, Homo sapiens
  Payload ID: 17643
  Gene Name: tetratricopeptide repeat domain 31
  ENSP ID: ENSP00000387213
MAPIPKTVGRIKLDCSLRPSCPLEVAAAPKLCKEFGPEDYGEEDIVDFLRRLVESDPQGLHRIHVDGSSGRLQLWHHDYLLGHLDDEGKSTGQSDRGKGAEGLGTYCGLRKSFLYPPQESEPCPQSPSASATFPSVSDSLLQVAMPQKLLVTEEEANRLAEELVAEEERMKQKAEKKRLKKKRQKERKRQERLEQYCGEPKASTTSDGDESPPSSPGNPVQGQCGEEEDSLDLSSTFVSLALRKVGDWPLSARREKGLNQEPQGRGLALQKMGQEEESPPREERPQQSPKVQASPGLLAAALQQSQELAKLGTSFAQNGFYHEAVVLFTQALKLNPQDHR

SEQ ID NO: 88114 - protein, 246 aa, Homo sapiens
  Payload ID: 17643
  Gene Name: tetratricopeptide repeat domain 31
  ENSP ID: ENSP00000387843
  MOD_RES (1)..(1): Any amino acid
XGRGLALQKMGQEEESPPREERPQQSPKVQASPGLLAAALQQSQELAKLGTSFAQNGFYHEAVVLFTQALKLNPQDHRLFGNRSFCHERLGQPAWALADAQVALTLRPGWPRGLFRLGKALMGLQETLRGGSQPDAARELRSCLLHLTLGQRGGICAPPLSPGALQPLPHAELAPSGLPSLRCPRSTALRSPGLSPLLHYPSCHRSHPNQPLSQTQSRRPHPLKPQDPSKGWDILGLGLQHLSQAR

SEQ ID NO: 88115 - protein, 116 aa, Homo sapiens
  Payload ID: 17643
  Gene Name: tetratricopeptide repeat domain 31
  ENSP ID: ENSP00000388495
MAPIPKTVGRIKLDCSLRPSCPLEVAAAPKLCKEFGPEDYGEEITSWATWMMKGNQLDRVTGARGLRDWAPTVVSASPSCILPKSLSPALKAPLPLPPSPVSQTACFRWPCPRSSW

SEQ ID NO: 88116 - protein, 116 aa, Homo sapiens; identical to SEQ ID NO: 88115
  Payload ID: 17643
  Gene Name: tetratricopeptide repeat domain 31
  ENSP ID: ENSP00000389127

SEQ ID NO: 88117 - protein, 285 aa, Homo sapiens
  Payload ID: 17643
  Gene Name: tetratricopeptide repeat domain 31
  Uniprot ID: Q49AM3
  ENSP ID: ENSP00000416823
MAPIPKTVGRIKLDCSLRPSCPLEVAAAPKLCKEFGPEDYGEEDIVDFLRRLVESDPQGLHRIHVDGSSGRLQLWHHDYLLGHLDDEGKSTGQSDRGKGAEGLGTYCGLRKSFLYPPQESEPCPQSPSASATFPSVSDSLLQVAMPQKLLVTEEEANRLAEELVAEEERMKQKAEKKRLKKKRQKERKRQERLEQYCGEPKASTTSDGDESPPSSPGNPVQGQCGEEEDSLDLSSTFVSLALRKVGDWPLSARREKGLNQEPQGRGLALQKMGQEEESPPATSPC

SEQ ID NO: 88118 - protein, 151 aa, Homo sapiens
  Payload ID: 17644
  Gene Name: tetratricopeptide repeat domain 32
  Uniprot ID: Q5I0X7
  ENSP ID: ENSP00000333018
MEGQRQESHATLTLAQAHFNNGEYAEAEALYSAYIRRCACAASSDESPGSKCSPEDLATAYNNRGQIKYFRVDFYEAMDDYTSAIEVQPNFEVPYYNRGLILYRLGYFDDALEDFKKVLDLNPGFQDATLSLKQTILDKEEKQRRNVAKNY

SEQ ID NO: 88119 - protein, 52 aa, Homo sapiens
  Payload ID: 17644
  Gene Name: tetratricopeptide repeat domain 32
  ENSP ID: ENSP00000385708
MEGQRQESHATLTLAQAHFNNGEYAEAEALYSAYIRRCACAASSDESPGRIF

SEQ ID NO: 88120 - protein, 86 aa, Homo sapiens
  Payload ID: 17644
  Gene Name: tetratricopeptide repeat domain 32
  ENSP ID: ENSP00000412874
MDVSEGTTMSSSHSYLISSRQCWNHSDRLISKCSPEDLATAYNNRGQIKYFRVDFYEAMDDYTSAIEVQPNFEVPYYNRGLILYRL

SEQ ID NO: 88121 - protein, 262 aa, Homo sapiens
  Payload ID: 17645
  Gene Name: tetratricopeptide repeat domain 33
  Uniprot ID: Q6PID6
  ENSP ID: ENSP00000338533
MASFGWKRKIGEKVSKVTSQQFEAEAADEKDVVDNDEGNWLHAIKRRKEILLEGCAEKSKQLKDEGASLAENKRYREAIQKWDEALQLTPNDATLYEMKSQVLMSLHEMFPAVHAAEMAVQQNPHSWESWQTLGRAQLGLGEIILAIRSFQVALHIYPMNPEIWKEDLSWARTLQEQQKVAQRIKKSEAPAEVTHFSPKSIPDYDFESDEIVAVCAAIAEKEKTVSANKTMVIVSASGAIETVTEKEDGATPPDGSVFIKAR

SEQ ID NO: 88122 - protein, 566 aa, Homo sapiens
  Payload ID: 17646
  Gene Name: tetratricopeptide repeat domain 34
  Uniprot ID: A8MYJ7
  ENSP ID: ENSP00000383873
MLQRSPRAGPSRAQGRREAAETGGPTTQEGVACGVHQLATLLMELDSEDEASRLLAADALYRLGRLEETHKALLVALSRRPQAAPVLARLALLQLRRGFFYDANQLVKKLVQSGDTACLQPTLDVFCHEDRQLLQGHCHARALAILRARPGGADGRVHTKEAIAYLSLAIFAAGSQASESLLARARCYGFLGQKKTAMFDFNTVLRAEPGNVQALCGRALVHLALDQLQEAVDDIVSALKLGPGTVVPELRSLKPEAQALITQGLYSHCRALLSQLPDTGAPLEDKDTQGLLAVGEALIKIDSGQPHWHLLLADILMAQGSYEEAGTHLEKALHRAPTSEAARARLGLLQLKKGDVPGAARDLQSLAEVDAPDLSCLLHLLEASERQSLAQAAAQEAGTLLDAGQPRQALGYCSLSVLASGSSACHLRLRATCLAELQEFGRALRDLDHVLQEALGDGDLPRRAEDFCRQGRLLLSLGDEAAAAGAFAQALKLAPSLAQNSLCRQPGRAPTARMFLLRGQCCLEEQRHAEAWTAVESGLLVDPDHRGLKRLKARIRREASSGCWLQ

SEQ ID NO: 88123 - protein, 566 aa, Homo sapiens; identical to SEQ ID NO: 88122
  Payload ID: 17646
  Gene Name: tetratricopeptide repeat domain 34
  Uniprot ID: A8MYJ7
  ENSP ID: ENSP00000483029

SEQ ID NO: 88124 - protein, 189 aa, Homo sapiens
  Payload ID: 17647
  Gene Name: tetratricopeptide repeat domain 36
  Uniprot ID: A6NLP5
  ENSP ID: ENSP00000307640
MGTPNDQAVLQAIFNPDTPFGDIVGLDLGEEAEKEEREEDEVFPQAQLEQSKALELQGVMAAEAGDLSTALERFGQAICLLPERASAYNNRAQARRLQGDVAGALEDLERAVELSGGRGRAARQSFVQRGLLARLQGRDDDARRDFERAARLGSPFARRQLVLLNPYAALCNRMLADMMGQLRRPRDSR

SEQ ID NO: 88125 - protein, 48 aa, Homo sapiens
  Payload ID: 17647
  Gene Name: tetratricopeptide repeat domain 36
  ENSP ID: ENSP00000436858
MGTPNDQAVLQAIFNPDTPFGDIVGLDLGEEAEKEEREEENTTTRTED

SEQ ID NO: 88126 - protein, 48 aa, Homo sapiens; identical to SEQ ID NO: 88125
  Payload ID: 17647
  Gene Name: tetratricopeptide repeat domain 36
  ENSP ID: ENSP00000437178

SEQ ID NO: 88127 - protein, 1564 aa, Homo sapiens
  Payload ID: 17648
  Gene Name: tetratricopeptide repeat domain 37
  Uniprot ID: Q6PGP7
  ENSP ID: ENSP00000351596
MSSKEVKTALKSARDAIRNKEYKEALKHCKTVLKQEKNNYNAWVFIGVAAAELEQPDQAQSAYKKAAELEPDQLLAWQGLANLYEKYNHINAKDDLPGVYQKLLDLYESVDKQKWCDVCKKLVDLYYQEKKHLEVARTWHKLIKTRQEQGAENEELHQLWRKLTQFLAESTEDQNNETQQLLFTAFENALGLSDKIPSEDHQVLYRHFIQSLSKFPHESARLKKACEGMINIYPTVQYPLEVLCLHLIESGNLTDEGQQYCCRLVEMDSKSGPGLIGLGIKALQDKKYEDAVRNLTEGLKESPVCTSGWYHLAEAQVKMHRPKEAVLSCSQALKIVDNLGASGNSLYQRNLCLHLKAEALIKLSDYDSSEEAIRTLDQISDADNIPGLLVLKSLAYRNKGSFDEAAKIMEDLLSSYPDLAEVHALEALIHFTKKDYLQAEKCFQRALEKDTEVAEYHYQLGLTYWFMGEETRKDKTKALTHFLKAARLDTYMGKVFCYLGHYYRDVVGDKNRARGCYRKAFELDDTDAESGAAAVDLSVELEDMEMALAILTTVTQKASAGTAKWAWLRRGLYYLKAGQHSQAVADLQAALRADPKDFNCWESLGEAYLSRGGYTTALKSFTKASELNPESIYSVFKVAAIQQILGKYKEAVAQYQMIIKKKEDYVPALKGLGECHLMMAKAALVDYLDGKAVDYIEKALEYFTCALQHRADVSCLWKLAGDACTCLYAVAPSKVNVHVLGVLLGQKEGKQVLKKNELLHLGGRCYGRALKLMSTSNTWCDLGINYYRQAQHLAETGSNMNDLKELLEKSLHCLKKAVRLDSNNHLYWNALGVVACYSGIGNYALAQHCFIKSIQSEQINAVAWTNLGVLYLTNENIEQAHEAFKMAQSLDPSYLMCWIGQALIAEAVGSYDTMDLFRHTTELNMHTEGALGYAYWVCTTLQDKSNRETELYQYNILQMNAIPAAQVILNKYVERIQNYAPAFTMLGYLNEHLQLKKEAANAYQRAILLLQTAEDQDTYNVAIRNYGRLLCSTGEYDKAIQAFKSTPLEVLEDIIGFALALFMKGLYKESSKAYERALSIVESEQDKAHILTALAITEYKQGKTDVAKTLLFKCSILKEPTTESLQALCALGLAMQDATLSKAALNELLKHIKHKDSNYQRCLLTSAIYALQGRSVAVQKQISKAVHSNPGDPALWSLLSRVVAQYAQRNAKGGVVAGNVAHILDSNHGKKALLYTAVNQLAMGSSSAEDEKNTALKTIQKAALLSPGDPAIWAGLMAACHADDKLALVNNTQPKRIDLYLALLSAVSASIKDEKFFENYNQSLEKWSLSQAVTGLIDTGRISEAETLCTKNLKSNPDQPAVILLLRQVQCKPLLESQKPLPDAVLEELQKTVMSNSTSVPAWQWLAHVYQSQGMMRAAEMCYRKSLQLASQRGSWSGKLSSLLRLALLALKVCMANISNDHWPSLVQEATTEALKLCFCPLAVLLQALLQFKRKMGARETRRLLERVVYQPGYPKSIASTARWYLLRHLYAKDDYELIDVLVNNAKTHGDTRALELNQRLSSQ

SEQ ID NO: 88128 - protein, 33 aa, Homo sapiens
  Payload ID: 17648
  Gene Name: tetratricopeptide repeat domain 37
  ENSP ID: ENSP00000422749
DNIPGLLVLKSLAYRNKGSFDEAAKLKFMPLRL

SEQ ID NO: 88129 - protein, 130 aa, Homo sapiens
  Payload ID: 17648
  Gene Name: tetratricopeptide repeat domain 37
  ENSP ID: ENSP00000423141
TRQEQGAENEELHQLWRKLTQFLAESTEDQNNETQQLLFTAFENALGLSDKIPSEDHQVLYRHFIQSLSKFPHESARLKKACEGMINIYPTVQYPLEVLCLHLIESGNGFSYPNNSNSKGKCWNGKMGLA

SEQ ID NO: 88130 - protein, 611 aa, Homo sapiens
  Payload ID: 17648
  Gene Name: tetratricopeptide repeat domain 37
  ENSP ID: ENSP00000423742
MSSKEVKTALKSARDAIRNKEYKEALKHCKGLANLYEKYNHINAKDDLPGVYQKLLDLYESVDKQKWCDVCKKLVDLYYQEKKHLEVARTWHKLIKTRQEQGAENEELHQLWRKLTQFLAESTEDQNNETQQLLFTAFENALGLSDKIPSEDHQVLYRHFIQSLSKFPHESARLKKACEGMINIYPTVQYPLEVLCLHLIESGNLTDEGQQYCCRLVEMDSKSGPGLIGLGIKALQDKKYEDAVRNLTEGLKESPVCTSGWYHLAEAQVKMHRPKEAVLSCSQALKIVDNLGASGNSLYQRNLCLHLKAEALIKLSDYDSSEEAIRTLDQISDADNIPGLLVLKSLAYRNKGSFDEAAKIMEDLLSSYPDLAEVHALEALIHFTKKDYLQAEKCFQRALEKDTEVAEYHYQLGLTYWFMGEETRKDKTKALTHFLKAARLDTYMGKVFCYLGHYYRDVVGDKNRARGCYRKAFELDDTDAESGAAAVDLSVELEDMEMALAILTTVTQKASAGTAKWAWLRRGLYYLKAGQHSQAVADLQAALRADPKDFNCWESLGEAYLSRGGYTTALKSFTKASELNPESIYSVFKVAAIQQILGKYKEAVAQYQMII

SEQ ID NO: 88131 - protein, 95 aa, Homo sapiens
  Payload ID: 17648
  Gene Name: tetratricopeptide repeat domain 37
  ENSP ID: ENSP00000425403
MSSKEVKTALKSARDAIRNKEYKEALKHCKTVLKQEKNNYNAWVFIGVAAAELEQPDQAQSAYKKAAELEPDQLLAWQGLANLYEKYNHINAKDD

SEQ ID NO: 88132 - protein, 469 aa, Homo sapiens
  Payload ID: 17649
  Gene Name: tetratricopeptide repeat domain 38
  Uniprot ID: Q5R3I4
  ENSP ID: ENSP00000370419
MAAASPLRDCQAWKDARLPLSTTSNEACKLFDATLTQYVKWTNDKSLGGIEGCLSKLKAADPTFVMGHAMATGLVLIGTGSSVKLDKELDLAVKTMVEISRTQPLTRREQLHVSAVETFANGNFPKACELWEQILQDHPTDMLALKFSHDAYFYLGYQEQMRDSVARIYPFWTPDIPLSSYVKGIYSFGLMETNFYDQAEKLAKEALSINPTDAWSVHTVAHIHEMKAEIKDGLEFMQHSETFWKDSDMLACHNYWHWALYLIEKGEYEAALTIYDTHILPSLQANDAMLDVVDSCSMLYRLQMEGVSVGQRWQDVLPVARKHSRDHILLFNDAHFLMASLGAHDPQTTQELLTTLRDASESPGENCQHLLARDVGLPLCQALVEAEDGNPDRVLELLLPIRYRIVQLGGSNAQRDVFNQLLIHAALNCTSSVHKNVARSLLMERDALKPNSPLTERLIRKAATVHLMQ

SEQ ID NO: 88133 - protein, 53 aa, Homo sapiens
  Payload ID: 17649
  Gene Name: tetratricopeptide repeat domain 38
  ENSP ID: ENSP00000391236
MAAASPLRDCQAWKDARLPLSTTSNEACKLFDATLTQDSEWWVDSGGCSGDVF

SEQ ID NO: 88134 - protein, 119 aa, Homo sapiens
  Payload ID: 17649
  Gene Name: tetratricopeptide repeat domain 38
  ENSP ID: ENSP00000393531
  MOD_RES (1)..(1): Any amino acid
XFLMASLGAHDPQTTQELLTTLRDASESPGENCQHLLARDVGLPLCQALVEAEDGNPDRVLELLLPIRYRIVQLGGSNAQRDVFNQLLIHAALNCTSSVHKNVARGKVSLGHPGWNAVV

SEQ ID NO: 88135 - protein, 209 aa, Homo sapiens
  Payload ID: 17649
  Gene Name: tetratricopeptide repeat domain 38
  ENSP ID: ENSP00000406604
  MOD_RES (1)..(1): Any amino acid
XEGCLSKLKAADPTFVMGHAMATGLVLIGTGSSVKLDKELDLAVKTMVEISRTQPLTRREQLHVSAVETFANGNFPKACELWEQILQDHPTDMLALKFSHDAYFYLGYQEQMRDSVARIYPFWTPDIPLSSYVKGIYSFGLMETNFYDQAEKLAKEALSINPTDAWSVHTVAHIHEMKAEIKDGLEFMQHSETFWKGLVRRSEQPLQST

SEQ ID NO: 88136 - protein, 263 aa, Homo sapiens
  Payload ID: 17649
  Gene Name: tetratricopeptide repeat domain 38
  ENSP ID: ENSP00000410095
MAAASPLRDCQAWKDARLPLSTTSNEACKLFDATLTQYVKWTNDKSLGGIEGCLSKLKAADPTFVMGHAMATGLVLIGTGSSVKLDKELDLAVKTMVEISRTQPLTRREQLHVSAVETFANGNFPKACELWEQILQDHPTDMLALKFSHDAYFYLGYQEQMRDSVARIYPFWTPDIPLSSYVKGIYSFGLMETNFYDQAEKLAKEAPTLCLQHQHPTDNYWAGKAGCDGARSGNTWALCLQPQAGEGRRSQGRSRQAAGTGTA

SEQ ID NO: 88137 - protein, 53 aa, Homo sapiens; identical to SEQ ID NO: 88133
  Payload ID: 17649
  Gene Name: tetratricopeptide repeat domain 38
  ENSP ID: ENSP00000486276

SEQ ID NO: 88138 - protein, 550 aa, Homo sapiens
  Payload ID: 17650
  Gene Name: tetratricopeptide repeat domain 39A
  ENSP ID: ENSP00000262675
MTALDLFLTNQFSEALSYLKPRTKESMYHSLTYATILEMQAMMTFDPQDILLAGNMMKEAQMLCQRHRRKSSVTDSFSSLVNRPTLGQFTEEEIHAEVCYAECLLQRAALTFLQDENMVSFIKGGIKVRNSYQTYKELDSLVQSSQYCKGENHPHFEGGVKLGVGAFNLTLSMLPTRILRLLEFVGFSGNKDYGLLQLEEGASGHSFRSVLCVMLLLCYHTFLTFVLGTGNVNIEEAEKLLKPYLNRYPKGAIFLFFAGRIEVIKGNIDAAIRRFEECCEAQQHWKQFHHMCYWELMWCFTYKGQWKMSYFYADLLSKENCWSKATYIYMKAAYLSMFGKEDHKPFGDDEVELFRAVPGLKLKIAGKSLPTEKFAIRKSRRYFSSNPISLPVPALEMMYIWNGYAVIGKQPKLTDGILEIITKAEEMLEKGPENEYSVDDECLVKLLKGLCLKYLGRVQEAEENFRSISANEKKIKYDHYLIPNALLELALLLMEQDRNEEAIKLLESAKQNYKNYSMESRTHFRIQAATLQAKSSLENSSRSMVSSVSL

SEQ ID NO: 88139 - protein, 420 aa, Homo sapiens
  Payload ID: 17650
  Gene Name: tetratricopeptide repeat domain 39A
  Uniprot ID: Q5SRH9
  ENSP ID: ENSP00000262676
MDSSPSLPLIRTPESSLHEALDQCMTALDLFLTNQFSEALSYLKPRTKESMYHSLTYATILEMQAMMTFDPQDILLAGNMMKEAQMLCQRHRRKSSVTDSFSSLVNRPTLGQFTEEEIHAEVCYAECLLQRAALTFLQGSSHGGAVRPRALHDPSHACSCPPGPGRQHLFLLQDENMVSFIKGGIKVRNSYQTYKELDSLVQSSQYCKGENHPHFEGGVKLGVGAFNLTLSMLPTRILRLLEFVGFSGNKDYGLLQLEEGASGHSFRSVLCVMLLLCYHTFLTFVLGTGNVNIEEAEKLLKPYLNRYPKGAIFLFFAGRIEVIKGNIDAVSDGGPGRGWGSLGVSQTSRKSGTCDILRDRIDWGRGGGQERTNQRAGAGEALLAEQPGKTREEEAFVVPGILTGRYRTAALQWREVEGGA

SEQ ID NO: 88140 - protein, 426 aa, Homo sapiens
  Payload ID: 17650
  Gene Name: tetratricopeptide repeat domain 39A
  ENSP ID: ENSP00000360812
MTSAGGAPGALPAGTPESSLHEALDQCMTALDLFLTNQFSEALSYLKPRTKESMYHSLTYATILEMQAMMTFDPQDILLAGNMMKEAQMLCQRHRRKSSVTDSFSSLVNRPTLGQFTEEEIHAEVCYAECLLQRAALTFLQGSSHGGAVRPRALHDPSHACSCPPGPGRQHLFLLQDENMVSFIKGGIKVRNSYQTYKELDSLVQSSQYCKGENHPHFEGGVKLGVGAFNLTLSMLPTRILRLLEFVGFSGNKDYGLLQLEEGASGHSFRSVLCVMLLLCYHTFLTFVLGTGNVNIEEAEKLLKPYLNRYPKGAIFLFFAGRIEVIKGNIDAAIRRFEECCEAQQHWKQFHHMCYWELMWCFTYKGQWKMSYFYADLLSKENCWSKATYIYMKAAYLSMFGKEDHKPFGDDEVELFRWVPHRAPTV

SEQ ID NO: 88141 - protein, 578 aa, Homo sapiens
  Payload ID: 17650
  Gene Name: tetratricopeptide repeat domain 39A
  Uniprot ID: Q5SRH9
  ENSP ID: ENSP00000360815
MGQKGHKDSLYPCGGTPESSLHEALDQCMTALDLFLTNQFSEALSYLKPRTKESMYHSLTYATILEMQAMMTFDPQDILLAGNMMKEAQMLCQRHRRKSSVTDSFSSLVNRPTLGQFTEEEIHAEVCYAECLLQRAALTFLQDENMVSFIKGGIKVRNSYQTYKELDSLVQSSQYCKGENHPHFEGGVKLGVGAFNLTLSMLPTRILRLLEFVGFSGNKDYGLLQLEEGASGHSFRSVLCVMLLLCYHTFLTFVLGTGNVNIEEAEKLLKPYLNRYPKGAIFLFFAGRIEVIKGNIDAAIRRFEECCEAQQHWKQFHHMCYWELMWCFTYKGQWKMSYFYADLLSKENCWSKATYIYMKAAYLSMFGKEDHKPFGDDEVELFRAVPGLKLKIAGKSLPTEKFAIRKSRRYFSSNPISLPVPALEMMYIWNGYAVIGKQPKLTDGILEIITKAEEMLEKGPENEYSVDDECLVKLLKGLCLKYLGRVQEAEENFRSISANEKKIKYDHYLIPNALLELALLLMEQDRNEEAIKLLESAKQNYKNYSMESRTHFRIQAATLQAKSSLENSSRSMVSSVSL

SEQ ID NO: 88142 - protein, 188 aa, Homo sapiens
  Payload ID: 17650
  Gene Name: tetratricopeptide repeat domain 39A
  ENSP ID: ENSP00000370230
MTALDLFLTNQFSEALSYLKPRTKESMYHSLTYATILEMQAMMTFDPQDILLAGNMMKEAQMLCQRHRRKSSVTDSFSSLVNRPTLGQFTEEEIHAEVCYAECLLQRAALTFLQGSSHGGAVRPRALHDPSHACSCPPGPGRQHLFLLQDENMVSFIKGGIKVRNSYQTYKELDSLVQSSQYCKGENH

SEQ ID NO: 88143 - protein, 158 aa, Homo sapiens
  Payload ID: 17650
  Gene Name: tetratricopeptide repeat domain 39A
  ENSP ID: ENSP00000383830
MAFLTTWKEAASGKSDRRTPESSLHEALDQCMTALDLFLTNQFSEALSYLKPRTKESMYHSLTYATILEMQAMMTFDPQDILLAGNMMKEAQMLCQRHRRKSSVTDSFSSLVNRPTLGQFTEEEIHAEVCYAECLLQRAALTFLQGSSHGGAVRPRAL

SEQ ID NO: 88144 - protein, 227 aa, Homo sapiens
  Payload ID: 17650
  Gene Name: tetratricopeptide repeat domain 39A
  ENSP ID: ENSP00000388995
MTALDLFLTNQFSEALSYLKPRTKESMYHSLTYATILEMQAMMTFDPQDILLAGNMMKEAQMLCQRHRRKSSVTDSFSSLVNRPTLGQFTEEEIHAEVCYAECLLQRAALTFLQDENMVSFIKGGIKVRNSYQTYKELDSLVQSSQYCKGENHPHFEGGVKLGVGAFNLTLSMLPTRILRLLEFVGFSGNKDYGLLQLEEGASGHSFRSVLCVMLLLCYHTFLTFVL

SEQ ID NO: 88145 - protein, 613 aa, Homo sapiens
  Payload ID: 17650
  Gene Name: tetratricopeptide repeat domain 39A
  Uniprot ID: Q5SRH9
  ENSP ID: ENSP00000393952
MGQKGHKDSLYPCGGTPESSLHEALDQCMTALDLFLTNQFSEALSYLKPRTKESMYHSLTYATILEMQAMMTFDPQDILLAGNMMKEAQMLCQRHRRKSSVTDSFSSLVNRPTLGQFTEEEIHAEVCYAECLLQRAALTFLQGSSHGGAVRPRALHDPSHACSCPPGPGRQHLFLLQDENMVSFIKGGIKVRNSYQTYKELDSLVQSSQYCKGENHPHFEGGVKLGVGAFNLTLSMLPTRILRLLEFVGFSGNKDYGLLQLEEGASGHSFRSVLCVMLLLCYHTFLTFVLGTGNVNIEEAEKLLKPYLNRYPKGAIFLFFAGRIEVIKGNIDAAIRRFEECCEAQQHWKQFHHMCYWELMWCFTYKGQWKMSYFYADLLSKENCWSKATYIYMKAAYLSMFGKEDHKPFGDDEVELFRAVPGLKLKIAGKSLPTEKFAIRKSRRYFSSNPISLPVPALEMMYIWNGYAVIGKQPKLTDGILEIITKAEEMLEKGPENEYSVDDECLVKLLKGLCLKYLGRVQEAEENFRSISANEKKIKYDHYLIPNALLELALLLMEQDRNEEAIKLLESAKQNYKNYSMESRTHFRIQAATLQAKSSLENSSRSMVSSVSL

SEQ ID NO: 88146 - protein, 297 aa, Homo sapiens
  Payload ID: 17650
  Gene Name: tetratricopeptide repeat domain 39A
  ENSP ID: ENSP00000405803
MTSAGGAPGALPAGTPESSLHEALDQCMTALDLFLTNQFSEALSYLKPRTKESMYHSLTYATILEMQAMMTFDPQDILLAGNMMKEAQMLCQRHRRKSSVTDSFSSLVNRPTLGQFTEEEIHAEVCYAECLLQRAALTFLQDENMVSFIKGGIKVRNSYQTYKELDSLVQSSQYCKGENHPHFEGGVKLGVGAFNLTLSMLPTRILRLLEFVGFSGNKDYGLLQLEEGASGHSFRSVLCVMLLLCYHTFLTFVLGTGNVNIEEAEKLLKPYLNRYPKGAIFLFFAGRIEVIKGNIDA

SEQ ID NO: 88147 - protein, 581 aa, Homo sapiens
  Payload ID: 17650
  Gene Name: tetratricopeptide repeat domain 39A
  Uniprot ID: Q5SRH9
  ENSP ID: ENSP00000406144
MAFLTTWKEAASGKSDRRTPESSLHEALDQCMTALDLFLTNQFSEALSYLKPRTKESMYHSLTYATILEMQAMMTFDPQDILLAGNMMKEAQMLCQRHRRKSSVTDSFSSLVNRPTLGQFTEEEIHAEVCYAECLLQRAALTFLQDENMVSFIKGGIKVRNSYQTYKELDSLVQSSQYCKGENHPHFEGGVKLGVGAFNLTLSMLPTRILRLLEFVGFSGNKDYGLLQLEEGASGHSFRSVLCVMLLLCYHTFLTFVLGTGNVNIEEAEKLLKPYLNRYPKGAIFLFFAGRIEVIKGNIDAAIRRFEECCEAQQHWKQFHHMCYWELMWCFTYKGQWKMSYFYADLLSKENCWSKATYIYMKAAYLSMFGKEDHKPFGDDEVELFRAVPGLKLKIAGKSLPTEKFAIRKSRRYFSSNPISLPVPALEMMYIWNGYAVIGKQPKLTDGILEIITKAEEMLEKGPENEYSVDDECLVKLLKGLCLKYLGRVQEAEENFRSISANEKKIKYDHYLIPNALLELALLLMEQDRNEEAIKLLESAKQNYKNYSMESRTHFRIQAATLQAKSSLENSSRSMVSSVSL

SEQ ID NO: 88148 - protein, 279 aa, Homo sapiens
  Payload ID: 17650
  Gene Name: tetratricopeptide repeat domain 39A
  ENSP ID: ENSP00000408532
MTALDLFLTNQFSEALSYLKPRTKESMYHSLTYATILEMQAMMTFDPQDILLAGNMMKEAQMLCQRHRRKSSVTDSFSSLVNRPTLGQFTEEEIHAEVCYAECLLQRAALTFLQDENMVSFIKGGIKVRNSYQTYKELDSLVQSSQYCKGENHPHFEGGVKLGVGAFNLTLSMLPTRILRLLEFVGFSGNKDYGLLQLEEGASGHSFRSVLCVMLLLCYHTFLTFVLGTGNVNIEEAEKLLKPYLNRYPKGAIFLFFAGRIEVIKGNIDAAIRRFEECC

SEQ ID NO: 88149 - protein, 221 aa, Homo sapiens
  Payload ID: 17650
  Gene Name: tetratricopeptide repeat domain 39A
  Uniprot ID: Q5SRH9
  ENSP ID: ENSP00000431228
MKAAYLSMFGKEDHKPFGDDEVELFRAVPGLKLKIAGKSLPTEKFAIRKSRRYFSSNPISLPVPALEMMYIWNGYAVIGKQPKLTDGILEIITKAEEMLEKGPENEYSVDDECLVKLLKGLCLKYLGRVQEAEENFRSISANEKKIKYDHYLIPNALLELALLLMEQDRNEEAIKLLESAKQNYKNYSMESRTHFRIQAATLQAKSSLENSSRSMVSSVSL

SEQ ID NO: 88150 - protein, 168 aa, Homo sapiens
  Payload ID: 17650
  Gene Name: tetratricopeptide repeat domain 39A
  ENSP ID: ENSP00000432453
MAFLTTWKEAASGKSDRRTFPAWENPVVHRPVGTREPSGSPVTPESSLHEALDQCMTALDLFLTNQFSEALSYLKPRTKESMYHSLTYATILEMQAMMTFDPQDILLAGNMMKEAQMLCQRHRRKSSVTDSFSSLVNRPTLGQFTEEEIHAEVCYAECLLQRAALTFL

SEQ ID NO: 88151 - protein, 124 aa, Homo sapiens
  Payload ID: 17650
  Gene Name: tetratricopeptide repeat domain 39A
  ENSP ID: ENSP00000434483
MTALDLFLTNQFSEALSYLKPRTKESMYHSLTYATILEMQAMMTFDPQDILLAGNMMKEAQMLCQRHRRKSSVTDSFSSLVNRPTLGQFTEEEIHAEVCYAECLLQRAALTFLQGSSHGGAVRP

SEQ ID NO: 88152 - protein, 112 aa, Homo sapiens
  Payload ID: 17650
  Gene Name: tetratricopeptide repeat domain 39A
  ENSP ID: ENSP00000436659
MKAAYLSMFGKEDHKPFGDDEVELFRAVPGLKLKIAGKSLPTEKFAIRKSRRYFSSNPISLPVPALEMMYIWNGYAVIGKQPKLTDGILEIITKAEEMLEKGPENEYSVDDE

SEQ ID NO: 88153 - protein, 613 aa, Homo sapiens
  Payload ID: 17651
  Gene Name: tetratricopeptide repeat domain 39B
  Uniprot ID: Q5VTQ0
  ENSP ID: ENSP00000297615
MDAVLACRLRGRGNRVAALRPRPRPGGSAGPSPFALLCAGLSPEPRAGVGSEFPAWFLGGSSQRRNMALLGSRAELEADEDVFEDALETISMAKESMYHALGYSTIVVLQAVLTFEQQDIQNGISAMKDALQTCQKYRKKYTVVESFSSLLSRGSLEQLSEEEMHAEICYAECLLQKAALTFVQDENMINFIKGGLKIRTSYQIYKECLSILHEIQKNKLQQEFFYEFEGGVKLGSGAFNLMLSLLPARIIRLLEFIGFSGNRELGLLQLREGASGRSMRSALCCLTILAFHTYISLILGTGEVNVAEAERLLAPFLQQFPNGSLVLFYHARIELLKGNLEEAQEVFQKCISVQEEWKQFHHLCYWELMWINVFQQNWMQAYYYSDLLCKESKWSKATYVFLKAAILSMLPEEDVVATNENVVTLFRQVDSLKQRIAGKSIPTEKFAVRKARRYSASLPAPVKLILPALEMMYVWNGFSIVSKRKDLSENLLVTVEKAEAALQSQNFNSFSVDDECLVKLLKGCCLKNLQRPLQAELCYNHVVESEKLLKYDHYLVPFTLFELASLYKSQGEIDKAIKFLETARNNYKDYSLESRLHFRIQAALHLWRKPSSD

SEQ ID NO: 88154 - protein, 669 aa, Homo sapiens
  Payload ID: 17651
  Gene Name: tetratricopeptide repeat domain 39B
  Uniprot ID: Q5VTQ0
  ENSP ID: ENSP00000370231
MDAVLACRLRGRGNRVAALRPRPRPGGSAGPSPFALLCAGLSPEPRAGVGSEFPAWFLGGSSQRRNMALLGSRAELEADEDVFEDALETISISSHSDMATSSLHFASCDTQQAPRQRGASTVSSSSSTKVDLKSGLEECAVALNLFLSNKFTDALELLRPWAKESMYHALGYSTIVVLQAVLTFEQQDIQNGISAMKDALQTCQKYRKKYTVVESFSSLLSRGSLEQLSEEEMHAEICYAECLLQKAALTFVQDENMINFIKGGLKIRTSYQIYKECLSILHEIQKNKLQQEFFYEFEGGVKLGSGAFNLMLSLLPARIIRLLEFIGFSGNRELGLLQLREGASGRSMRSALCCLTILAFHTYISLILGTGEVNVAEAERLLAPFLQQFPNVRSVFQSAQEVFQKCISVQEEWKQFHHLCYWELMWINVFQQNWMQAYYYSDLLCKESKWSKATYVFLKAAILSMLPEEDVVATNENVVTLFRQVDSLKQRIAGKSIPTEKFAVRKARRYSASLPAPVKLILPALEMMYVWNGFSIVSKRKDLSENLLVTVEKAEAALQSQNFNSFSVDDECLVKLLKGCCLKNLQRPLQAELCYNHVVESEKLLKYDHYLVPFTLFELASLYKSQGEIDKAIKFLETARNNYKDYSLESRLHFRIQAALHLWRKPSSD

SEQ ID NO: 88155 - protein, 682 aa, Homo sapiens
  Payload ID: 17651
  Gene Name: tetratricopeptide repeat domain 39B
  Uniprot ID: Q5VTQ0
  ENSP ID: ENSP00000422496
MDAVLACRLRGRGNRVAALRPRPRPGGSAGPSPFALLCAGLSPEPRAGVGSEFPAWFLGGSSQRRNMALLGSRAELEADEDVFEDALETISISSHSDMATSSLHFASCDTQQAPRQRGASTVSSSSSTKVDLKSGLEECAVALNLFLSNKFTDALELLRPWAKESMYHALGYSTIVVLQAVLTFEQQDIQNGISAMKDALQTCQKYRKKYTVVESFSSLLSRGSLEQLSEEEMHAEICYAECLLQKAALTFVQDENMINFIKGGLKIRTSYQIYKECLSILHEIQKNKLQQEFFYEFEGGVKLGSGAFNLMLSLLPARIIRLLEFIGFSGNRELGLLQLREGASGRSMRSALCCLTILAFHTYISLILGTGEVNVAEAERLLAPFLQQFPNGSLVLFYHARIELLKGNLEEAQEVFQKCISVQEEWKQFHHLCYWELMWINVFQQNWMQAYYYSDLLCKESKWSKATYVFLKAAILSMLPEEDVVATNENVVTLFRQVDSLKQRIAGKSIPTEKFAVRKARRYSASLPAPVKLILPALEMMYVWNGFSIVSKRKDLSENLLVTVEKAEAALQSQNFNSFSVDDECLVKLLKGCCLKNLQRPLQAELCYNHVVESEKLLKYDHYLVPFTLFELASLYKSQGEIDKAIKFLETARNNYKDYSLESRLHFRIQAALHLWRKPSSD

SEQ ID NO: 88156 - protein, 517 aa, Homo sapiens
  Payload ID: 17651
  Gene Name: tetratricopeptide repeat domain 39B
  Uniprot ID: Q5VTQ0
  ENSP ID: ENSP00000423392
MYHALGYSTIVVLQAVLTFEQQDIQNGISAMKDALQTCQKYRKKYTVVESFSSLLSRGSLEQLSEEEMHAEICYAECLLQKAALTFVQDENMINFIKGGLKIRTSYQIYKECLSILHEIQKNKLQQEFFYEFEGGVKLGSGAFNLMLSLLPARIIRLLEFIGFSGNRELGLLQLREGASGRSMRSALCCLTILAFHTYISLILGTGEVNVAEAERLLAPFLQQFPNGSLVLFYHARIELLKGNLEEAQEVFQKCISVQEEWKQFHHLCYWELMWINVFQQNWMQAYYYSDLLCKESKWSKATYVFLKAAILSMLPEEDVVATNENVVTLFRQVDSLKQRIAGKSIPTEKFAVRKARRYSASLPAPVKLILPALEMMYVWNGFSIVSKRKDLSENLLVTVEKAEAALQSQNFNSFSVDDECLVKLLKGCCLKNLQRPLQAELCYNHVVESEKLLKYDHYLVPFTLFELASLYKSQGEIDKAIKFLETARNNYKDYSLESRLHFRIQAALHLWRKPSSD

SEQ ID NO: 88157 - protein, 517 aa, Homo sapiens; identical to SEQ ID NO: 88156
  Payload ID: 17651
  Gene Name: tetratricopeptide repeat domain 39B
  Uniprot ID: Q5VTQ0
  ENSP ID: ENSP00000426539

SEQ ID NO: 88158 - protein, 69 aa, Homo sapiens
  Payload ID: 17651
  Gene Name: tetratricopeptide repeat domain 39B
  ENSP ID: ENSP00000427314
AGLSPEPRAGVGSEFPAWFLGGSSQRRNMALLGSRAELEADEDVFEDALETISIWLKKKSGRREGKTSS

SEQ ID NO: 88159 - protein, 522 aa, Homo sapiens
  Payload ID: 17652
  Gene Name: tetratricopeptide repeat domain 39C
  Uniprot ID: Q8N584
  ENSP ID: ENSP00000306598
MSFGASFVSFLNAMMTFEEEKMQLACDDLKTTEKLCESEEAGVIETIKNKIKKNVDVRKSAPSMVDRLQRQIIIADCQVYLAVLSFVKQELSAYIKGGWILRKAWKIYNKCYLDINALQELYQKKLTEESLTSDAANDNHIVAEGVSEESLNRLKGAVSFGYGLFHLCISMVPPNLLKIINLLGFPGDRLQGLSSLMYASESKDMKAPLATLALLWYHTVVRPFFALDGSDNKAGLDEAKEILLKKEAAYPNSSLFMFFKGRIQRLECQINSALTSFHTALELAVDQREIQHVCLYEIGWCSMIELNFKDAFDSFERLKNESRWSQCYYAYLTAVCQGATGDVDGAQIVFKEVQKLFKRKNNQIEQFSVKKAERFRKQTPTKALCVLASIEVLYLWKALPNCSFPNLQRMSQACHEVDDSSVVGLKYLLLGAIHKCLGNSEDAVQYFQRAVKDELCRQNNLYVQPYACYELGCLLLDKPETVGRGRALLLQAKEDFSGYDFENRLHVRIHAALASLRELVPQ

SEQ ID NO: 88160 - protein, 583 aa, Homo sapiens
  Payload ID: 17652
  Gene Name: tetratricopeptide repeat domain 39C
  Uniprot ID: Q8N584
  ENSP ID: ENSP00000323645
MAGSEQQRPRRRDDGDSDAAAAAAAPLQDAELALAGINMLLNNGFRESDQLFKQYRNHSPLMSFGASFVSFLNAMMTFEEEKMQLACDDLKTTEKLCESEEAGVIETIKNKIKKNVDVRKSAPSMVDRLQRQIIIADCQVYLAVLSFVKQELSAYIKGGWILRKAWKIYNKCYLDINALQELYQKKLTEESLTSDAANDNHIVAEGVSEESLNRLKGAVSFGYGLFHLCISMVPPNLLKIINLLGFPGDRLQGLSSLMYASESKDMKAPLATLALLWYHTVVRPFFALDGSDNKAGLDEAKEILLKKEAAYPNSSLFMFFKGRIQRLECQINSALTSFHTALELAVDQREIQHVCLYEIGWCSMIELNFKDAFDSFERLKNESRWSQCYYAYLTAVCQGATGDVDGAQIVFKEVQKLFKRKNNQIEQFSVKKAERFRKQTPTKALCVLASIEVLYLWKALPNCSFPNLQRMSQACHEVDDSSVVGLKYLLLGAIHKCLGNSEDAVQYFQRAVKDELCRQNNLYVQPYACYELGCLLLDKPETVGRGRALLLQAKEDFSGYDFENRLHVRIHAALASLRELVPQ

SEQ ID NO: 88161 - protein, 276 aa, Homo sapiens
  Payload ID: 17652
  Gene Name: tetratricopeptide repeat domain 39C
  ENSP ID: ENSP00000443016
MHAPFRISCQVVWLFKIYLLMCQINSALTSFHTALELAVDQREIQHVCLYEIGWCSMIELNFKDAFDSFERLKNESRWSQCYYAYLTAVCQGATGDVDGAQIVFKEVQKLFKRKNNQIEQFSVKKAERFRKQTPTKALCVLASIEVLYLWKALPNCSFPNLQRMSQACHEVDDSSVVGLKYLLLGAIHKCLGNSEDAVQYFQRAVKDELCRQNNLYVQPYACYELGCLLLDKPETVGRGRALLLQAKEDFSGYDFENRLHVRIHAALASLRELVPQ

SEQ ID NO: 88162 - protein, 67 aa, Homo sapiens
  Payload ID: 17652
  Gene Name: tetratricopeptide repeat domain 39C
  ENSP ID: ENSP00000463283
MIELNFKDAFDSFERLKNESRWSQCYYAYLTAVCQGATGDVDGAQIVFKEVQKLFKRKNNQIEQFSV

SEQ ID NO: 88163 - protein, 43 aa, Homo sapiens
  Payload ID: 17652
  Gene Name: tetratricopeptide repeat domain 39C
  ENSP ID: ENSP00000463610
MSGWKTLSQQQQRDAPSKILLCGKSFLTSEKTSALPGETQRRL

SEQ ID NO: 88164 - protein, 76 aa, Homo sapiens
  Payload ID: 17652
  Gene Name: tetratricopeptide repeat domain 39C
  Uniprot ID: Q8N584
  ENSP ID: ENSP00000464344
MAGSEQQRPRRRDDGDSDAAAAAAAPLQDAELALAGINMLLNNGFRESDQLFKQYRKSFLTSEKTSALPGETQRRL

SEQ ID NO: 88165 - protein, 387 aa, Homo sapiens
  Payload ID: 17653
  Gene Name: tetratricopeptide repeat domain 4
  Uniprot ID: O95801
  ENSP ID: ENSP00000360329
MEQPGQDPTSDDVMDSFLEKFQSQPYRGGFHEDQWEKEFEKVPLFMSRAPSEIDPRENPDLACLQSIIFDEERSPEEQAKTYKDEGNDYFKEKDYKKAVISYTEGLKKKCADPDLNAVLYTNRAAAQYYLGNFRSALNDVTAARKLKPCHLKAIIRGALCHLELKHFAEAVNWCDEGLQIDAKEKKLLEMRAKADKLKRIEQRDVRKANLKEKKERNQNEALLQAIKARNIRLSEAACEDEDSASEGLGELFLDGLSTENPHGARLSLDGQGRLSWPVLFLYPEYAQSDFISAFHEDSRFIDHLMVMFGETPSWDLEQKYCPDNLEVYFEDEDRAELYRVPAKSTLLQVLQHQRYFVKALTPAFLVCVGSSPFCKNFLRGRKVYQIR

SEQ ID NO: 88166 - protein, 440 aa, Homo sapiens
  Payload ID: 17654
  Gene Name: tetratricopeptide repeat domain 5
  Uniprot ID: Q8N0Z6
  ENSP ID: ENSP00000258821
MMADEEEEVKPILQKLQELVDQLYSFRDCYFETHSVEDAGRKQQDVQKEMEKTLQQMEEVVGSVQGKAQVLMLTGKALNVTPDYSPKAEELLSKAVKLEPELVEAWNQLGEVYWKKGDVAAAHTCFSGALTHCRNKVSLQNLSMVLRQLRTDTEDEHSHHVMDSVRQAKLAVQMDVHDGRSWYILGNSYLSLYFSTGQNPKISQQALSAYAQAEKVDRKASSNPDLHLNRATLHKYEESYGEALEGFSRAAALDPAWPEPRQREQQLLEFLDRLTSLLESKGKVKTKKLQSMLGSLRPAHLGPCSDGHYQSASGQKVTLELKPLSTLQPGVNSGAVILGKVVFSLTTEEKVPFTFGLVDSDGPCYAVMVYNIVQSWGVLIGDSVAIPEPNLRLHRIQHKGKDYSFSSVRVETPLLLVVNGKPQGSSSQAVATVASRPQCE

SEQ ID NO: 88167 - protein, 128 aa, Homo sapiens
  Payload ID: 17654
  Gene Name: tetratricopeptide repeat domain 5
  ENSP ID: ENSP00000372496
MMADEEEEVKPILQKLQELVDQLYSFRDCYFETHSVEDAGRKQQDVQKEMEKTLQQMEEVVGSVQGKAQVLMLTGKALNVTPDYSPKAEELLSKAVKLEPELVEAWNQLVQEQSLLAKPVNGASSAAD

SEQ ID NO: 88168 - protein, 15 aa, Homo sapiens
  Payload ID: 17654
  Gene Name: tetratricopeptide repeat domain 5
  ENSP ID: ENSP00000451259
MEKTLQQMEEVVGSV

SEQ ID NO: 88169 - protein, 520 aa, Homo sapiens
  Payload ID: 17655
  Gene Name: tetratricopeptide repeat domain 6
  Uniprot ID: Q86TZ1
  ENSP ID: ENSP00000267368
MMKYYDLAKFTIYQIAEMDKGLSELSPMQQALIYSFCENHDKAIEVLDGISWNRAEMTMCALLAKVQMKAKRTKEAVEVLKKALDAISHSDKGPDATAISADCLYNLGLCYMEEGNLQMTYKLAITDLTTAISMDKNSYTAFYNRALCYTKIRELQMALTDYGIVLLLDATETVKLNTFLNRGLIYVELGQYGFALEDFKQAALISRTNGSLCHATAMCHHRINEFEEAVNFFTWALKINPCFLDAYVGRGNSYMEYGHDEATKQAQKDFLKALHINPAYIKARISFGYNLQAQGKFQKAWNHFTIAIDTDPKNYLAYEGRAVVCLQMGNNFAAMQDINAAMKISTTAEFLTNRGVIHEFMGHKQNAMKDYQDAITLNPKYSLAYFNAGNIYFHHRQFSQASDYFSKALKFDPENEYVLMNRAITNTILKKYEEAKEDFANVIESCPFWAAVYFNRAHFYYCLKQYELAEEDLNKALSLKPNDALVYNFRAKVRGKIGLIEEAMADYNQALDLEDYASVI

SEQ ID NO: 88170 - protein, 600 aa, Homo sapiens
  Payload ID: 17655
  Gene Name: tetratricopeptide repeat domain 6
  ENSP ID: ENSP00000371757
MDKGLSELSPMQQALIYSFCENHDKAIEVLDGISWNRAEMTMCALLAKVQMKAKRTKEAVEVLKKALDAISHSDKGPDATAISADCLYNLGLCYMEEGNLQMAFDSFTKAVKANPDFAESFYQRGLCKVKLHKDSSILDFNRAITLNPKHYQAYLSRVAFYGLKGRYSKAILNCNKAIKIYPESVRAYLYRGVLKYYNKTYKLAITDLTTAISMDKNSYTAFYNRALCYTKIRELQMALTDYGIVLLLDATETVKLNTFLNRGLIYVELGQYGFALEDFKQAALISRTNGSLCHATAMCHHRINEFEEAVNFFTWALKINPCFLDAYVGRGNSYMEYGHDEATKQAQKDFLKALHINPAYIKARISFGYNLQAQGKFQKAWNHFTIAIDTDPKNYLAYEGRAVVCLQMGNNFAAMQDINAAMKISTTAEFLTNRGVIHEFMGHKQNAMKDYQDAITLNPKYSLAYFNAGNIYFHHRQFSQASDYFSKALKFDPENEYVLMNRAITNTILKKYEEAKEDFANVIESCPFWAAVYFNRAHFYYCLKQYELAEEDLNKALSLKPNDALVYNFRAKVRGKIGLIEEAMADYNQALDLEDYASVI

SEQ ID NO: 88171 - protein, 520 aa, Homo sapiens; identical to SEQ ID NO: 88169
  Payload ID: 17655
  Gene Name: tetratricopeptide repeat domain 6
  Uniprot ID: Q86TZ1
  ENSP ID: ENSP00000417788

SEQ ID NO: 88172 - protein, 553 aa, Homo sapiens
  Payload ID: 17655
  Gene Name: tetratricopeptide repeat domain 6
  ENSP ID: ENSP00000419204
MMKYYDLAKFTIYQIAEMDKGLSELSPMQQALIYSFCENHDKAIEVLDGISWNRAEMTMCALLAKVQMKAKRTKEAVEVLKKALDAISHSDKGPDATAISADCLYNLGLCYMEEGNLQMAFDSFTKAVKANPDFAESFYQRGLCKVKLHKDSSILDFNRAITLNPKHYQAYLSRVAFYGLKGRYSKAILNCNKAIKIYPESVRAYLYRGVLKYYNKTYKLAITDLTTAISMDKNSYTAFYNRALCYTKIRELQMALTDYGIVLLLDATETVKLNTFLNRGLIYVELGQYGFALEDFKQAALISRTNGSLCHATAMCHHRINEFEEAVNFFTWALKINPCFLDAYVGRGNSYMEYGHDEATKQAQKDFLKALHINPAYIKARISFGYNLQAQGKFQKAWNHFTIAIDTDPKNYLAYEGRAVVCLQMGNNFAAMQDINAAMKISTTAEFLTNRGVIHEFMGHKQNAMKDYQDAITLNPKYSLAYFNAGNIYFHHRQFSQEESLGLAWSLSLDSFLRTGGATFSSGVNPLQTLHRRMSILSPLPPTCPRDEMDFTS

SEQ ID NO: 88173 - protein, 78 aa, Homo sapiens
  Payload ID: 17655
  Gene Name: tetratricopeptide repeat domain 6
  ENSP ID: ENSP00000450568
PKYSLAYFNAGNIYFHHRQFSQEESLGLAWSLSLDSFLRTGGATFSSGVNPLQTLHRRMSILSPLPPTCPRDEMDFTS

SEQ ID NO: 88174 - protein, 38 aa, Homo sapiens
  Payload ID: 17655
  Gene Name: tetratricopeptide repeat domain 6
  ENSP ID: ENSP00000450572
MKAQSTASMPPARPAPRAFPAPQPGRREDTLRLKALRC

SEQ ID NO: 88175 - protein, 1886 aa, Homo sapiens
  Payload ID: 17655
  Gene Name: tetratricopeptide repeat domain 6
  ENSP ID: ENSP00000451131
MSTIPRHFGLKYKEESYMFKELEKVRQETKKDFLRFKQKLASKPAVDESPVHSLHAPGPARPARVSCAAARTSRRYPSLKGPAMSAAALLQEVLGGAPRPSGLGEAAAPGKTRSFRPRDFYLRSSAFLRHQALKKPPVIASGFGTARPVVLLPPPEPPVKRRARGVLESSRHAAPRRVFHLGREREQSQEVAPLAGPCMAKERKASSVSAEDGYMEASSGRRKVRIRSNFVSESGAREAREAAGLGAQGEQESWPPSDAREAAWQALLPSRVIPTSIEEIIASLQSEAQLASDQTIKELIRSVLGQNYDITMEDISLMGKMYLKTSPMQAETPEIQAEYKFQMGAEESQMSVHKELSETMSSILQIEQEDIEWGPSEAESIVFKPQEISQVQPAEELSKPLEDGQPTSDSKEAKWVSLTAKSPEFLQIEGKEIKRMRKRKSLRPRKSSKPLCDKKLHKKIPQDYSMPHLHDLCTTIPAQELPVDLRLASRVYHTANRKGHDTLLGKFGTSFLDDRFTDEEQTDRILYGIPVMDDNQEYVHIPPTPQGIPPELAQGTRERAHKPHLEVLGEEMYAYPEFTKLFWNTAAPKFSVPESVMKETLYPKYESVQASRLLTDKLSYKSSVITLHQHSRTNFWCFLPRKSASFESIQKWFSAQPTQLRRVKSSVDLRKEKIIAPLEIKNDMQSSIKEVMFQKAKELKRQLQLTKQNKTEEPNYVKESIDDIFDNMCEKHSLRNLSLTLIEASKKAGISYIVYPKKKKMRWKKRLKQQKLIFVHEELSKPPKSLERSASHGILPGQKKYLFKVPLYERQIRCPSLPLYLNFEKFVQAKGGIPENIDPRTWALDRLIEYKDASIPVKEKDDKISVPEDPPERVKEPPKLKLNDYVESDLPQEVIKYYESEVKILTEEINDKTKYPAFAYCRRGAIYRKLGKLQSAMNDLQRVILLEPLFLNAYWHRHLIYLFQDKINEALDDLNYIHKYNKNNTEAYLSKAEIYRGKKDITLAILNYTQAIKSTPTDADIYFRRGEMYEITNKVLAIDDFSKCIFYDPKRTDALLKRGLFYCENENWFAAIEDFTALLNIDHQNSQARTYRGIAYVKWKFYKEATQDFSAAIHLDPNNWLALYYRGCLFRKSNPFRALQDYSVSALINDGYENLGCFLHRGIVYAHLKLWLLAICDFETVISLERTITLAYVNIGLIHLLHLDNYTEAIWQFSEAIRIDPLCIQSYLCRAETYFKLHKLKKAVNELSRAIHLQPDGIQLYIRRGQYLLMMKYYDLAKFTIYQIAEMDKGLSELSPMQQALIYSFCENHDKAIEVLDGISWNRAEMTMCALLAKVQMKAKRTKEAVEVLKKALDAISHSDKGPDATAISADCLYNLGLCYMEEGNLQMAFDSFTKAVKANPDFAESFYQRGLCKVKLHKDSSILDFNRAITLNPKHYQAYLSRVAFYGLKGRYSKAILNCNKAIKIYPESVRAYLYRGVLKYYNKTYKLAITDLTTAISMDKNSYTAFYNRALCYTKIRELQMALTDYGIVLLLDATETVKLNTFLNRGLIYVELGQYGFALEDFKQAALISRTNGSLCHATAMCHHRINEFEEAVNFFTWALKINPCFLDAYVGRGNSYMEYGHDEATKQAQKDFLKALHINPAYIKARISFGYNLQAQGKFQKAWNHFTIAIDTDPKNYLAYEGRAVVCLQMGNNFAAMQDINAAMKISTTAEFLTNRGVIHEFMGHKQNAMKDYQDAITLNPKYSLAYFNAGNIYFHHRQFSQASDYFSKALKFDPENEYVLMNRAITNTILKKYEEAKEDFANVIESCPFWAAVYFNRAHFYYCLKQYELAEEDLNKALSLKPNDALVYNFRAKVRGKIGLIEEAMADYNQALDLEDYASVI

SEQ ID NO: 88176 - protein, 440 aa, Homo sapiens
  Payload ID: 17655
  Gene Name: tetratricopeptide repeat domain 6
  ENSP ID: ENSP00000451566
MSTIPRHFGLKYKEESYMFKELEKVRQETKKDFLRFKQKLASKPAVDESPVHSLHAPGPARPARVSCAAARTSRRYPSLKGPAMSAAALLQEVLGGAPRPSGLGEAAAPGKTRSFRPRDFYLRSSAFLRHQALKKPPVIASGFGTARPVVLLPPPEPPVKRRARGVLESSRHAAPRRVFHLGREREQSQEVAPLAGPCMAKERKASSVSAEDGYMEASSGRRKVRIRSNFVSESGAREAREAAGLGAQGEQESWPPSDAREAAWQALLPSRVIPTSIEEIIASLQSEAQLASDQTIKELIRSVLGQNYDITMEDISLMGKMYLKTSPMQAETPEIQAEYKFQMGAEESQMSVHKELSETMSSILQIEQEDIEWGPSEAESIVFKPQEISQVQPAEELSKPLEDGQPTSDSKEAKWVSLTHTLYFLKGKITRILANRRKRN

SEQ ID NO: 88177 - protein, 858 aa, Homo sapiens
  Payload ID: 17656
  Gene Name: tetratricopeptide repeat domain 7A
  Uniprot ID: Q9ULT0
  ENSP ID: ENSP00000316699
MAAKGAHGSYLKVESELERCRAEGHWDRMPELVRQLQTLSMPGGGGNRRGSPSAAFTFPDTDDFGKLLLAEALLEQCLKENHAKIKDSMPLLEKNEPKMSEAKNYLSSILNHGRLSPQYMCEAMLILGKLHYVEGSYRDAISMYARAGIDDMSMENKPLYQMRLLSEAFVIKGLSLERLPNSIASRFRLTEREEEVITCFERASWIAQVFLQELEKTTNNSTSRHLKGCHPLDYELTYFLEAALQSAYVKNLKKGNIVKGMRELREVLRTVETKATQNFKVMAAKHLAGVLLHSLSEECYWSPLSHPLPEFMGKEESSFATQALRKPHLYEGDNLYCPKDNIEEALLLLLISESMATRDVVLSRVPEQEEDRTVSLQNAAAIYDLLSITLGRRGQYVMLSECLERAMKFAFGEFHLWYQVALSMVACGKSAYAVSLLRECVKLRPSDPTVPLMAAKVCIGSLRWLEEAEHFAMMVISLGEEAGEFLPKGYLALGLTYSLQATDATLKSKQDELHRKALQTLERAQQLAPSDPQVILYVSLQLALVRQISSAMEQLQEALKVRKDDAHALHLLALLFSAQKHHQHALDVVNMAITEHPENFNLMFTKVKLEQVLKGPEEALVTCRQVLRLWQTLYSFSQLGGLEKDGSFGEGLTMKKQSGMHLTLPDAHDADSGSRRASSIAASRLEEAMSELTMPSSVLKQGPMQLWTTLEQIWLQAAELFMEQQHLKEAGFCIQEAAGLFPTSHSVLYMRGRLAEVKGNLEEAKQLYKEALTVNPDGVRIMHSLGLMLSRLGHKSLAQKVLRDAVERQSTCHEAWQGLGEVLQAQGQNEAAVDCFLTALELEASSPVLPFSIIPREL

SEQ ID NO: 88178 - protein, 882 aa, Homo sapiens
  Payload ID: 17656
  Gene Name: tetratricopeptide repeat domain 7A
  Uniprot ID: Q9ULT0
  ENSP ID: ENSP00000378320
MAAKGAHGSYLKVESELERCRAEGHWDRMPELVRQLQTLSMPGGGGNRRGSPSAAFTFPDTDDFGKLLLAEALLEQCLKENHAKIKDSMPLLEKNEPKMSEAKNYLSSILNHGRLSPQYMCEAMLILGKLHYVEGSYRDAISMYARAGIDDMSMENKPLYQMRLLSEAFVIKGLSLERLPNSIASRFRLTEREEEVITCFERASWIAQVFLQELEKTTNNSTSRHLKGCHPLDYELTYFLEAALQSAYVKNLKKGNIVKGMRELREVLRTVETKATQNFKVMAAKHLAGVLLHSLSEECYWSPLSHPLPEFMGKEESSFATQALRKPHLYEGDNLYCPKDNIEEALLLLLISESMATRDVVLSRVPEQEEDRTVSLQNAAAIYDLLSITLGRRGQYVMLSECLERAMKFAFGEFHLWYQVALSMVACGKSAYAVSLLRECVKLRPSDPTVPLMAAKVCIGSLRWLEEAEHFAMMVISLGEEAGEFLPKGYLALGLTYSLQATDATLKSKQDELHRKALQTLERAQQLAPSDPQVILYVSLQLALVRQISSAMEQLQEALKVRKDDAHALHLLALLFSAQKHHQHALDVVNMAITEHPENFNLMFTKVKLEQVLKGPEEALVTCRQVLRLWQTLYSFSQLGDFRSPEGFQTPQRNICNSEIYRGGGLEKDGSFGEGLTMKKQSGMHLTLPDAHDADSGSRRASSIAASRLEEAMSELTMPSSVLKQGPMQLWTTLEQIWLQAAELFMEQQHLKEAGFCIQEAAGLFPTSHSVLYMRGRLAEVKGNLEEAKQLYKEALTVNPDGVRIMHSLGLMLSRLGHKSLAQKVLRDAVERQSTCHEAWQGLGEVLQAQGQNEAAVDCFLTALELEASSPVLPFSIIPREL

SEQ ID NO: 88179 - protein, 824 aa, Homo sapiens
  Payload ID: 17656
  Gene Name: tetratricopeptide repeat domain 7A
  ENSP ID: ENSP00000386307
MVPSSSRTPGFKQSSHHLRLPKCWDYRDDFGKLLLAEALLEQCLKENHAKIKDSMPLLEKNEPKMSEAKNYLSSILNHGRLSPQYMCEAMLILGKLHYVEGSYRDAISMYARAGIDDMSMENKPLYQMRLLSEAFVIKGLSLERLPNSIASRFRLTEREEEVITCFERASWIAQVFLQELEKTTNNSTSRHLKGCHPLDYELTYFLEAALQSAYVKNLKKGNIVKGMRELREVLRTVETKATQNFKVMAAKHLAGVLLHSLSEECYWSPLSHPLPEFMGKEESSFATQALRKPHLYEGDNLYCPKDNIEEALLLLLISESMATRDVVLSRVPEQEEDRTVSLQNAAAIYDLLSITLGRRGQYVMLSECLERAMKFAFGEFHLWYQVALSMVACGKSAYAVSLLRECVKLRPSDPTVPLMAAKVCIGSLRWLEEAEHFAMMVISLGEEAGEFLPKGYLALGLTYSLQATDATLKSKQDELHRKALQTLERAQQLAPSDPQVILYVSLQLALVRQISSAMEQLQEALKVRKDDAHALHLLALLFSAQKHHQHALDVVNMAITEHPENFNLMFTKVKLEQVLKGPEEALVTCRQVLRLWQTLYSFSQLGGLEKDGSFGEGLTMKKQSGMHLTLPDAHDADSGSRRASSIAASRLEEAMSELTMPSSVLKQGPMQLWTTLEQIWLQAAELFMEQQHLKEAGFCIQEAAGLFPTSHSVLYMRGRLAEVKGNLEEAKQLYKEALTVNPDGVRIMHSLGLMLSRLGHKSLAQKVLRDAVERQSTCHEAWQGLGEVLQAQGQNEAAVDCFLTALELEASSPVLPFSIIPREL

SEQ ID NO: 88180 - protein, 66 aa, Homo sapiens
  Payload ID: 17656
  Gene Name: tetratricopeptide repeat domain 7A
  ENSP ID: ENSP00000386521
  MOD_RES (1)..(1): Any amino acid
XHAKIKDSMPLLEKNEPKMSEAKNYLSSILNHGRLSGLAVLLRLVSNSWAQAILLLQPPEALGLQE

SEQ ID NO: 88181 - protein, 330 aa, Homo sapiens
  Payload ID: 17656
  Gene Name: tetratricopeptide repeat domain 7A
  ENSP ID: ENSP00000393022
  MOD_RES (1)..(1): Any amino acid
XAAKGAHGSYLKVESELERCRAEGHWDRMPELVRQLQTLSMPGGGGNRRGSPSAAFTFPDTDDFGKLLLAEALLEQCLKENHAKIKDSMPLLEKNEPKMSEAKNYLSSILNHGRLSPQYMCEAMLILGKLHYVEGSYRDAISMYARAGIDDMSMENKPLYQMRLLSEAFVIKGLSLERLPNSIASRFRLTEREEEVITCFERASWIAQVFLQELEKTTNNSTSRHLKGCHPLDYELTYFLEAALQSAYVKNLKKGNIVKGMRELREVLRTVETKATQNFKVPLLPQGQHRGSPPAPPHQRIHGNSRCGAEPGAGAGGGPDSELAECRSHL

SEQ ID NO: 88182 - protein, 108 aa, Homo sapiens
  Payload ID: 17656
  Gene Name: tetratricopeptide repeat domain 7A
  ENSP ID: ENSP00000401467
  MOD_RES (1)..(1): Any amino acid
XVVLSRVPEQEEDRTVSLQNAAAIYDLLSITLGRRGQYVMLSECLERAMKFAFGEFHLWYQVALSMVACGKSAYAVSLLRECVKLRPSDPTVPLMAAKVCIGSLRWPP

SEQ ID NO: 88183 - protein, 843 aa, Homo sapiens
  Payload ID: 17657
  Gene Name: tetratricopeptide repeat domain 7B
  Uniprot ID: Q86TV6
  ENSP ID: ENSP00000336127
MATKKAGSRLETEIERCRSECQWERIPELVKQLSAKLIANDDMAELLLGESKLEQYLKEHPLRQGASPRGPKPQLTEVRKHLTAALDRGNLKSEFLQESNLIMAKLNYVEGDYKEALNIYARVGLDDLPLTAVPPYRLRVIAEAYATKGLCLEKLPISSSTSNLHVDREQDVITCYEKAGDIALLYLQEIERVILSNIQNRSPKPGPAPHDQELGFFLETGLQRAHVLYFKNGNLTRGVGRFRELLRAVETRTTQNLRMTIARQLAEILLRGMCEQSYWNPLEDPPCQSPLDDPLRKGANTKTYTLTRRARVYSGENIFCPQENTEEALLLLLISESMANRDAVLSRIPEHKSDRLISLQSASVVYDLLTIALGRRGQYEMLSECLERAMKFAFEEFHLWYQFALSLMAAGKSARAVKVLKECIRLKPDDATIPLLAAKLCMGSLHWLEEAEKFAKTVVDVGEKTSEFKAKGYLALGLTYSLQATDASLRGMQEVLQRKALLAFQRAHSLSPTDHQAAFYLALQLAISRQIPEALGYVRQALQLQGDDANSLHLLALLLSAQKHYHDALNIIDMALSEYPENFILLFSKVKLQSLCRGPDEALLTCKHMLQIWKSCYNLTNPSDSGRGSSLLDRTIADRRQLNTITLPDFSDPETGSVHATSVAASRVEQALSEVASSLQSSAPKQGPLHPWMTLAQIWLHAAEVYIGIGKPAEATACTQEAANLFPMSHNVLYMRGQIAELRGSMDEARRWYEEALAISPTHVKSMQRLALILHQLGRYSLAEKILRDAVQVNSTAHEVWNGLGEVLQAQGNDAAATECFLTALELEASSPAVPFTIIPRVL

SEQ ID NO: 88184 - protein, 105 aa, Homo sapiens
  Payload ID: 17657
  Gene Name: tetratricopeptide repeat domain 7B
  ENSP ID: ENSP00000450520
  MOD_RES (1)..(1): Any amino acid
XPQENTEEALLLLLISESMANRDAVLSRIPEHKSDRLISLQSASVVYDLLTIALGRRGQYEMLSEGPQPVTHRSPSSFLPGSAACHLQTDPRGSGVCPPSSSASR

SEQ ID NO: 88185 - protein, 48 aa, Homo sapiens
  Payload ID: 17657
  Gene Name: tetratricopeptide repeat domain 7B
  ENSP ID: ENSP00000451201
MAKLNYVEGDYKEALNIYARVGLDDLPLTAVPPYRLRVIAEAYATKGL

SEQ ID NO: 88186 - protein, 204 aa, Homo sapiens
  Payload ID: 17657
  Gene Name: tetratricopeptide repeat domain 7B
  ENSP ID: ENSP00000451238
MAKLNYVEGDYKEALNIYARVGLDDLPLTAVPPYRLRVIAEAYATKGLCLEKLPISSSTSNLHVDREQDVITCYEKAGDIALLYLQEIERVILSNIQNRSPKPGPAPHDQELGFFLETGLQRAHVLYFKNGGTDGNIKEPRMWFRVIEQDETRNLTRGVGRFRELLRAVETRTTQNLRMTIARQLAEILLRGMCEQSYWNPLED

SEQ ID NO: 88187 - protein, 330 aa, Homo sapiens
  Payload ID: 17657
  Gene Name: tetratricopeptide repeat domain 7B
  ENSP ID: ENSP00000451440
IPEALGYVRQALQLQGDDANSLHLLALLLSAQKHYHDALNIIDMALSEYPENFILLFSKVKLQSLCRGPDEALLTCKHMLQIWKSCYNLTNPSDSGRGSSLLDRTIADRRQLNTITLPDFSDPETGNSPEAYFHGFPSLFSVSSVHATSVAASRVEQALSEVASSLQSSAPKQGPLHPWMTLAQIWLHAAEVYIGIGKPAEATACTQEAANLFPMSHNVLYMRGQIAELRGSMDEARRWYEEALAISPTHVKSMQRLALILHQLGRYSLAEKILRDAVQVNSTAHEVWNGLGEVLQAQGNDAAATECFLTALELEASSPAVPFTIIPRVL

SEQ ID NO: 88188 - protein, 417 aa, Homo sapiens
  Payload ID: 17657
  Gene Name: tetratricopeptide repeat domain 7B
  ENSP ID: ENSP00000451825
TIARQLAEILLRGMCEQSYWNPLEDPPCQSPLDDPLRKGANTKTYTLTRRARVYSGENIFCPQENTEEALLLLLISESMANRDAVLSRIPEHKSDRLISLQSASVVYDLLTIALGRRGQYEMLSECLERAMKFAFEEFHLWYQFALSLMAAGKSARAVKVLKECIRLKPDDATIPLLAAKLCMGSLHWLEEAEKFAKTVVDVGEKTSEFKAKGYLALGLTYSLQATDASLRGMQEVLQRKALLAFQRAHSLSPTDHQAAFYLALQLAISRQIPEALGYVRQALQLQGDDANSLHLLALLLSAQKHYHDALNIIDMALSEYPENFILLFSKVKLQSLCRGPDEALLTCKHMLQIWKSCYNLTNPSDSGRGSSLLDRTIADRRQLNTITLPDFSDPETGNQCSWIAFGEMLVDMGIQCI

SEQ ID NO: 88189 - protein, 175 aa, Homo sapiens
  Payload ID: 17657
  Gene Name: tetratricopeptide repeat domain 7B
  ENSP ID: ENSP00000451928
  MOD_RES (1)..(1): Any amino acid
XLTARSFKANRDAVLSRIPEHKSDRLISLQSASVVYDLLTIALGRRGQYEMLSECLERAMKFAFEEFHLWYQFALSLMAAGKSARAVKVLKECIRLKPDDATIPLLAAKLCMGSLHWLEEAEKFAKTVVDVGEKTSEFKAKGYLALGLTYSLQATDASLRGMQEVLQRKALLAFQ

SEQ ID NO: 88190 - protein, 271 aa, Homo sapiens
  Payload ID: 17657
  Gene Name: tetratricopeptide repeat domain 7B
  ENSP ID: ENSP00000452031
  MOD_RES (1)..(1): Any amino acid
XITLPDFSDPETVSDSSSSSSPLSRTESPLHLFVSSHLHSPKPDTFVWPPAAHSFSDAGPRREPSLCNSPEAYFHGFPSLFSVSSVHATSVAASRVEQALSEVASSLQSSAPKQGPLHPWMTLAQIWLHAAEVYIGIGKPAEATACTQEAANLFPMSHNVLYMRGQIAELRGSMDEARRWYEEALAISPTHVKSMQRLALILHQLGRYSLAEKILRDAVQVNSTAHEVWNGLGEVLQAQGNDAAATECFLTALELEASSPAVPFTIIPRVL

SEQ ID NO: 88191 - protein, 213 aa, Homo sapiens
  Payload ID: 17657
  Gene Name: tetratricopeptide repeat domain 7B
  ENSP ID: ENSP00000452594
LQSLCRGPDEALLTCKHMLQIWKSCYNLTNPSDSGRGSSLLDRTIADRRQLNTITLPDFSDPETGSVHATSVAASRVEQALSEVASSLQSSAPKQGPLHPWMTLAQIWLHAGPDPSPARPLQSGGEDPPGRGAGELDSPRGLERAGRGPPSSGQRCGGYGVLPDSLGAGGQQPRRALHHHPPRALSRRLPASPAAQASEALPGTRACAIAPRG

SEQ ID NO: 88192 - protein, 475 aa, Homo sapiens
  Payload ID: 17658
  Gene Name: tetratricopeptide repeat domain 8
  ENSP ID: ENSP00000298324
MSSEMEPLLLAWSYFRRRKFQLCADLCTQMLEKSPYDQAAWILKARALTEMVYIDEIDVDQEGIAEMMLDENAIAQVPRPGTSLKLPGTNQTGGPSQAVRPITQAGRPITGFLRPSTQSGRPGTMEQAIRTPRTAYTARPITSSSGRFVRLGTALFEYIFHHENDVKTALDLAALSTEHSQYKDWWWKVQIGKCYYRLGMYREAEKQFKSALKQQEMVDTFLYLAKVYVSLDQPVTALNLFKQGLDKFPGEVTLLCGIARIYEEMNNMSSAAEYYKEVLKQDNTHVEAIACIGSNHFYSDQPEIALRFYRRLLQMGIYNGQLFNNLGLCCFYAQQYDMTLTSFERALSLAENEEEAADVWYNLGHVAVGIGDTNLAHQCFRLALVNNNNHAEAYNNLAVLEMRKGHVEQARALLQTASSLAPHMYEPHFNFATISDKIGDLQRSYVAAQKSEAAFPDHVDTQHLIKQLRQHFAML

SEQ ID NO: 88193 - protein, 531 aa, Homo sapiens
  Payload ID: 17658
  Gene Name: tetratricopeptide repeat domain 8
  ENSP ID: ENSP00000337653
MSSEMEPLLLAWSYFRRRKFQLCADLCTQMLEKSPYDQAAWILKARALTEMVYIDEIDVDQEGIAEMMLDENAIAQVPRPGTSLKLPGTNQTGGPSQAVRPITQAGRPITGFLRPSTQSGRPGTMEQAIRTPRTAYTARPITSSSGRFVRLGTASMLTSPDGPFINLSRLNLTKYSQKPKLAKALFEYIFHHENDVKTIHLEDVVLHLGIYPFLLRNKNHIEKNALDLAALSTEHSQYKDWWWKVQIGKCYYRLGMYREAEKQFKSALKQQEMVDTFLYLAKVYVSLDQPVTALNLFKQGLDKFPGEVTLLCGIARIYEEMNNMSSAAEYYKEVLKQDNTHVEAIACIGSNHFYSDQPEIALRFYRRLLQMGIYNGQLFNNLGLCCFYAQQYDMTLTSFERALSLAENEEEAADVWYNLGHVAVGIGDTNLAHQCFRLALVNNNNHAEAYNNLAVLEMRKGHVEQARALLQTASSLAPHMYEPHFNFATISDKIGDLQRSYVAAQKSEAAFPDHVDTQHLIKQLRQHFAML

SEQ ID NO: 88194 - protein, 515 aa, Homo sapiens
  Payload ID: 17658
  Gene Name: tetratricopeptide repeat domain 8
  Uniprot ID: Q8TAM2
  ENSP ID: ENSP00000339486
MSSEMEPLLLAWSYFRRRKFQLCADLCTQMLEKSPYDQEPDPELPVHQAAWILKARALTEMVYIDEIDVDQEGIAEMMLDENAIAQVPRPGTSLKLPGTNQTGGPSQAVRPITQAGRPITGFLRPSTQSGRPGTMEQAIRTPRTAYTARPITSSSGRFVRLGTASMLTSPDGPFINLSRLNLTKYSQKPKLAKALFEYIFHHENDVKTALDLAALSTEHSQYKDWWWKVQIGKCYYRLGMYREAEKQFKSALKQQEMVDTFLYLAKVYVSLDQPVTALNLFKQGLDKFPGEVTLLCGIARIYEEMNNMSSAAEYYKEVLKQDNTHVEAIACIGSNHFYSDQPEIALRFYRRLLQMGIYNGQLFNNLGLCCFYAQQYDMTLTSFERALSLAENEEEAADVWYNLGHVAVGIGDTNLAHQCFRLALVNNNNHAEAYNNLAVLEMRKGHVEQARALLQTASSLAPHMYEPHFNFATISDKIGDLQRSYVAAQKSEAAFPDHVDTQHLIKQLRQHFAML

SEQ ID NO: 88195 - protein, 250 aa, Homo sapiens
  Payload ID: 17658
  Gene Name: tetratricopeptide repeat domain 8
  Uniprot ID: Q8TAM2
  ENSP ID: ENSP00000346427
MSSEMEPLLLAWSYFRRRKFQLCADLCTQMLEKSPYDQEMNNMSSAAEYYKEVLKQDNTHVEAIACIGSNHFYSDQPEIALRFYRRLLQMGIYNGQLFNNLGLCCFYAQQYDMTLTSFERALSLAENEEEAADVWYNLGHVAVGIGDTNLAHQCFRLALVNNNNHAEAYNNLAVLEMRKGHVEQARALLQTASSLAPHMYEPHFNFATISDKIGDLQRSYVAAQKSEAAFPDHVDTQHLIKQLRQHFAML

SEQ ID NO: 88196 - protein, 317 aa, Homo sapiens
  Payload ID: 17658
  Gene Name: tetratricopeptide repeat domain 8
  ENSP ID: ENSP00000351439
MILSYEVILHALDLAALSTEHSQYKDWWWKVQIGKCYYRLGMYREAEKQFKSALKQQEMVDTFLYLAKVYVSLDQPVTALNLFKQGLDKFPGEVTLLCGIARIYEEMNNMSSAAEYYKEVLKQDNTHVEAIACIGSNHFYSDQPEIALRFYRRLLQMGIYNGQLFNNLGLCCFYAQQYDMTLTSFERALSLAENEEEAADVWYNLGHVAVGIGDTNLAHQCFRLALVNNNNHAEAYNNLAVLEMRKGHVEQARALLQTASSLAPHMYEPHFNFATISDKIGDLQRSYVAAQKSEAAFPDHVDTQHLIKQLRQHFAML

SEQ ID NO: 88197 - protein, 515 aa, Homo sapiens; identical to SEQ ID NO: 88194
  Payload ID: 17658
  Gene Name: tetratricopeptide repeat domain 8
  Uniprot ID: Q8TAM2
  ENSP ID: ENSP00000370031

SEQ ID NO: 88198 - protein, 475 aa, Homo sapiens; identical to SEQ ID NO: 88192
  Payload ID: 17658
  Gene Name: tetratricopeptide repeat domain 8
  ENSP ID: ENSP00000445067

SEQ ID NO: 88199 - protein, 41 aa, Homo sapiens
  Payload ID: 17658
  Gene Name: tetratricopeptide repeat domain 8
  ENSP ID: ENSP00000450905
MSSEMEPLLLAWSYFRRRKFQLCADLCTQMLEKSPYDQSCS

SEQ ID NO: 88200 - protein, 186 aa, Homo sapiens
  Payload ID: 17658
  Gene Name: tetratricopeptide repeat domain 8
  ENSP ID: ENSP00000450951
MSSEMEPLLLAWSYFRRRKFQLCADLCTQMLEKSPYDQAAWILKARALTEMVYIDEIDVDQEGIAEMMLDENAIAQVPRPGTSLKLPGTNQTGGPSQAVRPITQAGRPITGFLRPSTQSGRPGTMEQAIRTPRTAYTARPITSSSGRFVRLGTASMLTSPDGPFINLSRLNLTKYSQKPKLAKVCT

SEQ ID NO: 88201 - protein, 192 aa, Homo sapiens
  Payload ID: 17658
  Gene Name: tetratricopeptide repeat domain 8
  ENSP ID: ENSP00000450993
MSSEMEPLLLAWSYFRRRKFQLCADLCTQMLEKSPYDQAAWILKARALTEMVYIDEIDVDQEGIAEMMLDENAIAQVPRPGTSLKLPGTNQTGGPSQAVRPITQAGRPITGFLRPSTQSGRPGTMEQAIRTPRTAYTARPITSSSGRFVRLGTASMLTSPDGPFINLSRLNLTKYSQKPKLAKALDLAALST

SEQ ID NO: 88202 - protein, 211 aa, Homo sapiens
  Payload ID: 17658
  Gene Name: tetratricopeptide repeat domain 8
  ENSP ID: ENSP00000451034
MSSEMEPLLLAWSYFRRRKFQLCADLCTQMLEKSPYDQKISWAWWHVPVIPATWEAEAGELLEPRKRRLQQAEITPLYSSLGNKSKTPSQKAAWILKARALTEMVYIDEIDVDQEGIAEMMLDENAIAQVPRPGTSLKLPGTNQTGGPSQAANHTSWKTHYRFPQAQHAEWKARHYGTGYQNTQNRLHSPPYHQLLRKICQAGNGFHAYKS

SEQ ID NO: 88203 - protein, 265 aa, Homo sapiens
  Payload ID: 17658
  Gene Name: tetratricopeptide repeat domain 8
  ENSP ID: ENSP00000451955
  MOD_RES (1)..(1): Any amino acid
XSIPRNLSWQRLCLSISFIMKMMLRLLGMYREAEKQFKSALKQQEMVDTFLYLAKVYVSLDQPVTALNLFKQGLDKFPGEVTLLCGIARIYEEMNNMSSAAEYYKEVLKQDNTHVEAIACIGSNHFYSDQPEIALRFYRRLLQMGIYNGQLFNNLGLCCFYAQQYDMTLTSFERALSLAENEEEAADVWYNLGHVAVGIGDTNLAHQCFRLALVNNNNHAEAYNNLAVLEMRKGHVEQARALLQTASSLAPHMYEPHFNFATISD

SEQ ID NO: 88204 - protein, 437 aa, Homo sapiens
  Payload ID: 17658
  Gene Name: tetratricopeptide repeat domain 8
  ENSP ID: ENSP00000452354
  MOD_RES (1)..(1): Any amino acid
XWSYFRRRKFQLCADLCTQMLEKSPYDQAAWILKARALTEMVYIDEIDVDQEGIAEMMLDENAIAQVPRPGTSLKLPGTNQTGGPSQAVRPITQAGRPITGFLRPSTQSGRPGTMEQAIRTPRTAYTARPITSSSGRFVRLGTALFEYIFHHENDVKTALDLAALSTEHSQYKDWWWKVQIGKCYYRLGMYREAEKQFKSALKQQEMVDTFLYLAKVYVSLDQPVTALNLFKQGLDKFPGEVTLLCGIARIYEEMNNMSSAAEYYKEVLKQDNTHVEAIACIGSNHFYSDQPEIALRFYRRLLQMGIYNGQLFNNLGLCCFYAQQYDMTLTSFERALSLAENEEEAADVWYNLGHVAVGIGDTNLAHQCFRLALVNNNNHAEAYNNLAVLEMRKGHVEQIGDLQRSYVAAQKSEAAFPDHVDTQHLIKQLRQHFAML

SEQ ID NO: 88205 - protein, 531 aa, Homo sapiens; identical to SEQ ID NO: 88193
  Payload ID: 17658
  Gene Name: tetratricopeptide repeat domain 8
  ENSP ID: ENSP00000482306

SEQ ID NO: 88206 - protein, 505 aa, Homo sapiens
  Payload ID: 17658
  Gene Name: tetratricopeptide repeat domain 8
  ENSP ID: ENSP00000482721
MSSEMEPLLLAWSYFRRRKFQLCADLCTQMLEKSPYDQAAWILKARALTEMVYIDEIDVDQEGIAEMMLDENAIAQVPRPGTSLKLPGTNQTGGPSQAVRPITQAGRPITGFLRPSTQSGRPGTMEQAIRTPRTAYTARPITSSSGRFVRLGTASMLTSPDGPFINLSRLNLTKYSQKPKLAKALFEYIFHHENDVKTALDLAALSTEHSQYKDWWWKVQIGKCYYRLGMYREAEKQFKSALKQQEMVDTFLYLAKVYVSLDQPVTALNLFKQGLDKFPGEVTLLCGIARIYEEMNNMSSAAEYYKEVLKQDNTHVEAIACIGSNHFYSDQPEIALRFYRRLLQMGIYNGQLFNNLGLCCFYAQQYDMTLTSFERALSLAENEEEAADVWYNLGHVAVGIGDTNLAHQCFRLALVNNNNHAEAYNNLAVLEMRKGHVEQARALLQTASSLAPHMYEPHFNFATISDKIGDLQRSYVAAQKSEAAFPDHVDTQHLIKQLRQHFAML

SEQ ID NO: 88207 - protein, 222 aa, Homo sapiens
  Payload ID: 17659
  Gene Name: tetratricopeptide repeat domain 9
  Uniprot ID: Q92623
  ENSP ID: ENSP00000256367
MERKGSAAGAKGNPSPPAAGEGQRPPPPLCVPGGGGGAPARGQVGAAAEPAELIRRAHEFKSQGAQCYKDKKFREAIGKYHRALLELKGLLPPPGERERDSRPASPAGALKPGRLSEEQSKTVEAIEIDCYNSLAACLLQAELVNYERVKEYCLKVLKKEGENFKALYRSGVAFYHLGDYDKALYYLKEARTQQPTDTNVIRYIQLTEMKLSRCSQREKEAM

SEQ ID NO: 88208 - protein, 239 aa, Homo sapiens
  Payload ID: 17660
  Gene Name: tetratricopeptide repeat domain 9B
  Uniprot ID: Q8N6N2
  ENSP ID: ENSP00000311760
MQRGALSPVLMLSAAPEPPPRPPPALSPPGSGPGSGSRHGSARPGPTPEPSGSLGAALDSSLRAAVAFKAEGQRCYREKKFREAIGKYHRALLQLKAAQGARPSGLPAPAPGPTSSPGPARLSEEQRRLVESTEVECYDSLTACLLQSELVNYERVREYCLKVLEKQQGNFKATYRAGIAFYHLGDYARALRYLQEARSREPTDTNVLRYIQLTQLKMNRCSLQREDSGAGSQTRDVIG

SEQ ID NO: 88209 - protein, 82 aa, Homo sapiens
  Payload ID: 17661
  Gene Name: tetratricopeptide repeat domain 9C
  ENSP ID: ENSP00000294161
MEKRLQEAQLYKEEGNQRYREGKYRDAVSRYHRALLQLRGLDPSLPSPLPNLGPQGPALTPEQENILHTTQTDCYNNLAVVK

SEQ ID NO: 88210 - protein, 171 aa, Homo sapiens
  Payload ID: 17661
  Gene Name: tetratricopeptide repeat domain 9C
  Uniprot ID: Q8N5M4
  ENSP ID: ENSP00000325266
MEKRLQEAQLYKEEGNQRYREGKYRDAVSRYHRALLQLRGLDPSLPSPLPNLGPQGPALTPEQENILHTTQTDCYNNLAACLLQMEPVNYERVREYSQKVLERQPDNAKALYRAGVAFFHLQDYDQARHYLLAAVNRQPKDANVRRYLQLTQSELSSYHRKEKQLYLGMFG

SEQ ID NO: 88211 - protein, 69 aa, Homo sapiens
  Payload ID: 17661
  Gene Name: tetratricopeptide repeat domain 9C
  ENSP ID: ENSP00000434137
RQPDNAKALYRAGVAFFHLQDYDQARHYLLAAVNRQPKDANVRRYLQLTQSELSSYHRKEKQLYLGMFG

SEQ ID NO: 88212 - protein, 171 aa, Homo sapiens; identical to SEQ ID NO: 88210
  Payload ID: 17661
  Gene Name: tetratricopeptide repeat domain 9C
  Uniprot ID: Q8N5M4
  ENSP ID: ENSP00000434340

SEQ ID NO: 88213 - protein, 140 aa, Homo sapiens
  Payload ID: 17661
  Gene Name: tetratricopeptide repeat domain 9C
  ENSP ID: ENSP00000435282
MEKRLQEAQLYKEEGNQRYREGKYRDAVSRYHRALLQLRGLDPSLPSPLPNLGPQGPALTPEQENILHTTQTDCYNNLAACLLQMEPVNYERVREYSQKVLERQPDNAKALYRAGVAFFHLQDYDQARHYLLAAVNRQPK

SEQ ID NO: 88214 - protein, 1861 aa, Homo sapiens
  Payload ID: 17662
  Gene Name: tetratricopeptide repeat, ankyrin repeat and coiled-coil containing 1
  Uniprot ID: Q9C0D5
  ENSP ID: ENSP00000263635
MLKAVLKKSREGGKGGKKEAGSDFGPETSPVLHLDHSADSPVSSLPTAEDTYRVSLAKGVSMSLPSSPLLPRQSHLVQSRVNKKSPGPVRKPKYVESPRVPGDAVIMPFREVAKPTEPDEHEAKADNEPSCSPAAQELLTRLGFLLGEGIPSATHITIEDKNETMCTALSQGISPCSTLTSSTASPSTDSPCSTLNSCVSKTAANKSPCETISSPSSTLESKDSGIIATITSSSENDDRSGSSLEWNKDGNLRLGVQKGVLHDRRADNCSPVAEEETTGSAESTLPKAESSAGDGPVPYSQGSSSLIMPRPNSVAATSSTKLEDLSYLDGQRNAPLRTSIRLPWHNTAGGRAQEVKARFAPYKPQDILLKPLLFEVPSITTDSVFVGRDWLFHQIEENLRNTELAENRGAVVVGNVGFGKTAIISKLVALSCHGSRMRQIASNSPGSSPKTSDPTQDLHFTPLLSPSSSTSASSTAKTPLGSISAENQRPREDAVKYLASKVVAYHYCQADNTYTCLVPEFVHSIAALLCRSHQLAAYRDLLIKEPQLQSMLSLRSCVQDPVAAFKRGVLEPLTNLRNEQKIPEEEYIILIDGLNEAEFHKPDYGDTLSSFITKIISKFPAWLKLIVTVRANFQEIISALPFVKLSLDDFPDNKDIHSDLHAYVQHRVHSSQDILSNISLNGKADATLIGKVSSHLVLRSLGSYLYLKLTLDLFQRGHLVIKSASYKVVPVSLSELYLLQCNMKFMTQSAFERALPILNVALASLHPMTDEQIFQAINAGHIQGEQGWEDFQQRMDALSCFLIKRRDKTRMFCHPSFREWLVWRADGENTAFLCEPRNGHALLAFMFSRQEGKLNRQQTMELGHHILKAHIFKGLSKKTGISSSHLQALWIGYSTEGLSAALASLRNLYTPNVKVSRLLILGGANVNYRTEVLNNAPILCVQSHLGHEEVVTLLLEFGACLDGTSENGMTALCYAAAAGHMKLVCLLTKKGVRVDHLDKKGQCALVHSALRGHGDILQYLLTCEWSPGPPQPGTLRKSHALQQALTAAASMGHSSVVQCLLGMEKEHEVEVNGTDTLWGETALTAAAGRGKLEVCELLLGHGAAVSRTNRRGVPPLFCAARQGHWQIVRLLLERGCDVNLSDKQGRTPLMVAACEGHLSTVEFLLSKGAALSSLDKEGLSALSWACLKGHRAVVQYLVEEGAAIDQTDKNGRTPLDLAAFYGDAETVLYLVEKGAVIEHVDHSGMRPLDRAIGCRNTSVVVALLRKGAKLGNAAWAMATSKPDILIILLQKLMEEGNVMYKKGKMKEAAQRYQYALRKFPREGFGEDMRPFNELRVSLYLNLSRCRRKTNDFGMAEEFASKALELKPKSYEAFYARARAKRNSRQFVAALADLQEAVKLCPTNQEVKRLLARVEEECKQLQRSQQQKQQGPLPAPLNDSENEEDTPTPGLSDHFHSEETEEEETSPQEESVSPTPRSQPSSSVPSSYIRNLQEGLQSKGRPVSPQSRAGIGKSLREPVAQPGLLLQPSKQAQIVKTSQHLGSGQSAVRNGSMKVQISSQNPPPSPMPGRIAATPAGSRTQHLEGTGTFTTRAGCGHFGDRLGPSQNVRLQCGENGPAHPLPSKTKTTERLLSHSSVAVDAAPPNQGGLATCSDVRHPASLTSSGSSGSPSSSIKMSSSTSSLTSSSSFSDGFKVQGPDTRIKDKVVTHVQSGTAEHRPRNTPFMGIMDKTARFQQQSNPPSRSWHCPAPEGLLTNTSSAAGLQSANTEKPSLMQVGGYNNQAKTCSVSTLSASVHNGAQVKELEESKCQIPVHSQENRITKTVSHLYQESISKQQPHISNEAHRSHLTAAKPKRSFIESNV

SEQ ID NO: 88215 - protein, 462 aa, Homo sapiens
  Payload ID: 17662
  Gene Name: tetratricopeptide repeat, ankyrin repeat and coiled-coil containing 1
  ENSP ID: ENSP00000396339
MPFREVAKPTEPDEHATITSSSENDDRSGSSLEWNKDGNLRLGVQKGVLHDRRADNCSPVAEEETTGSAESTLPKAESSAGDGPVPYSQGSSSLIMPRPNSVAATSSTKLEDLSYLDGQRNAPLRTSIRLPWHNTAGGRAQEVKARFAPYKPQDILLKPLLFEVPSITTDSVFVGRDWLFHQIEENLRNTELAENRGAVVVGNVGFGKTAIISKLVALSCHGSRMRQIASNSPGSSPKTSDPTQDLHFTPLLSPSSSTSASSTAKTPLGSISAENQRPREDAVKYLASKVVAYHYCQADNTYTCLVPEFVHSIAALLCRSHQLAAYRDLLIKEPQLQSMLSLRSCVQDPVAAFKRGVLEPLTNLRNEQKIPEEEYIILIDGLNEAEFHKPDYGDTLSSFITKIISKFPAWLKLIVTVRANFQEIISALPFVKLSLDDFPDNKDIHSDLHASIQQHKDVKFNQ

SEQ ID NO: 88216 - protein, 2000 aa, Homo sapiens
  Payload ID: 17663
  Gene Name: tetratricopeptide repeat, ankyrin repeat and coiled-coil containing 2
  Uniprot ID: Q9HCD6
  ENSP ID: ENSP00000374171
MFRNSLKMLLTGGKSSRKNRSSDGGSEEPPDRRQSSVDSRQSRSGQGGISTESDCAFEPDYAVPPLPVSEGDAEQELGPPPSVDEAANTLMTRLGFLLGEKVTEVQPGDQYSMEVQDENQTSAITQRISPCSTLTSSTASPPASSPCSTLPPISTNATAKDCSYGAVTSPTSTLESRDSGIIATLTSYSENVERTKYAGESSKELGSGGNIKPWQSQKSSMDSCLYRVDENMTASTYSLNKIPERNLETVLSQSVQSIPLYLMPRPNSVAATSSAHLEDLAYLDEQRHTPLRTSLRMPRQSMGGARTQQDLRVRFAPYRPPDISLKPLLFEVPSITTESVFVGRDWVFHEIDAQLQSSNASVNQGVVIVGNIGFGKTAIISRLVALSCHGTRMRQIASDSPHASPKHVDANRELPLTQPPSAHSSITSGSCPGTPEMRRRQEEAMRRLASQVVAYHYCQADNAYTCLVPEFVHNVAALLCRSPQLTAYREQLLREPHLQSMLSLRSCVQDPMASFRRGVLEPLENLHKERKIPDEDFIILIDGLNEAEFHKPDYGDTIVSFLSKMIGKFPSWLKLIVTVRTSLQEITKLLPFHRIFLDRLEENEAIDQDLQAYILHRIHSSSEIQNNISLNGKMDNTTFGKLSSHLKTLSQGSYLYLKLTFDLIEKGYLVLKSSSYKVVPVSLSEVYLLQCNMKFPTQSSFDRVMPLLNVAVASLHPLTDEHIFQAINAGSIEGTLEWEDFQQRMENLSMFLIKRRDMTRMFVHPSFREWLIWREEGEKTKFLCDPRSGHTLLAFWFSRQEGKLNRQQTIELGHHILKAHIFKGLSKKVGVSSSILQGLWISYSTEGLSMALASLRNLYTPNIKVSRLLILGGANINYRTEVLNNAPILCVQSHLGYTEMVALLLEFGANVDASSESGLTPLGYAAAAGYLSIVVLLCKKRAKVDHLDKNGQCALVHAALRGHLEVVKFLIQCDWTMAGQQQGVFKKSHAIQQALIAAASMGYTEIVSYLLDLPEKDEEEVERAQINSFDSLWGETALTAAAGRGKLEVCRLLLEQGAAVAQPNRRGAVPLFSTVRQGHWQIVDLLLTHGADVNMADKQGRTPLMMAASEGHLGTVDFLLAQGASIALMDKEGLTALSWACLKGHLSVVRSLVDNGAATDHADKNGRTPLDLAAFYGDAEVVQFLVDHGAMIEHVDYSGMRPLDRAVGCRNTSVVVTLLKKGAKIGCQTLPSRPRGPATWAMATSKPDIMIILLSKLMEEGDMFYKKGKVKEAAQRYQYALKKFPREGFGEDLKTFRELKVSLLLNLSRCRRKMNDFGMAEEFATKALELKPKSYEAYYARARAKRSSRQFAAALEDLNEAIKLCPNNREIQRLLLRVEEECRQMQQPQQPPPPPQPQQQLPEEAEPEPQHEDIYSVQDIFEEEYLEQDVENVSIGLQTEARPSQGLPVIQSPPSSPPHRDSAYISSSPLGSHQVFDFRSSSSVGSPTRQTYQSTSPALSPTHQNSHYRPSPPHTSPAHQGGSYRFSPPPVGGQGKEYPSPPPSPLRRGPQYRASPPAESMSVYRSQSGSPVRYQQETSVSQLPGRPKSPLSKMAQRPYQMPQLPVAVPQQGLRLQPAKAQIVRSNQPSPAVHSSTVIPTGAYGQVAHSMASKYQSSQGDIGVSQSRLVYQGSIGGIVGDGRPVQHVQASLSAGAICQHGGLTKEDLPQRPSSAYRGGVRYSQTPQIGRSQSASYYPVCHSKLDLERSSSQLGSPDVSHLIRRPISVNPNEIKPHPPTPRPLLHSQSVGLRFSPSSNSISSTSNLTPTFRPSSSIQQMEIPLKPAYERSCDELSPVSPTQGGYPSEPTRSRTTPFMGIIDKTARTQQYPHLHQQNRTWAVSSVDTVLSPTSPGNLPQPESFSPPSSISNIAFYNKTNNAQNGHLLEDDYYSPHGMLANGSRGDLLERVSQASSYPDVKVARTLPVAQAYQDNLYRQLSRDSRQGQTSPIKPKRPFVESNV

SEQ ID NO: 88217 - protein, 1990 aa, Homo sapiens
  Payload ID: 17663
  Gene Name: tetratricopeptide repeat, ankyrin repeat and coiled-coil containing 2
  Uniprot ID: Q9HCD6
  ENSP ID: ENSP00000387593
MFRNSLKMLLTGGKSSRKNRSSDGGSEEPPDRRQSSVDSRQSRSGQGGISTESDCAFEPDYAVPPLPVSEGDAEQELGPPPSVDEAANTLMTRLGFLLGEKVTEVQPGDQYSMEVQDENQTSAITQRISPCSTLTSSTASPPASSPCSTLPPISTNATAKDCSYGAVTSPTSTLESRDSGIIATLTSYSENVERTKYAGESSKELGSGGNIKPWQSQKSSMDSCLYRVDENMTASTYSLNKIPERNLETVLSQSVQSIPLYLMPRPNSVAATSSAHLEDLAYLDEQRHTPLRTSLRMPRQSMGGARTQQDLRVRFAPYRPPDISLKPLLFEVPSITTESVFVGRDWVFHEIDAQLQSSNASVNQGVVIVGNIGFGKTAIISRLVALSCHGTRMRQIASDSPHASPKHVDANRELPLTQPPSAHSSITSGSCPGTPEMRRRQEEAMRRLASQVVAYHYCQADNAYTCLVPEFVHNVAALLCRSPQLTAYREQLLREPHLQSMLSLRSCVQDPMASFRRGVLEPLENLHKERKIPDEDFIILIDGLNEAEFHKPDYGDTIVSFLSKMIGKFPSWLKLIVTVRTSLQEITKLLPFHRIFLDRLEENEAIDQDLQAYILHRIHSSSEIQNNISLNGKMDNTTFGKLSSHLKTLSQGSYLYLKLTFDLIEKGYLVLKSSSYKVVPVSLSEVYLLQCNMKFPTQSSFDRVMPLLNVAVASLHPLTDEHIFQAINAGSIEGTLEWEDFQQRMENLSMFLIKRRDMTRMFVHPSFREWLIWREEGEKTKFLCDPRSGHTLLAFWFSRQEGKLNRQQTIELGHHILKAHIFKGLSKKVGVSSSILQGLWISYSTEGLSMALASLRNLYTPNIKVSRLLILGGANINYRTEVLNNAPILCVQSHLGYTEMVALLLEFGANVDASSESGLTPLGYAAAAGYLSIVVLLCKKRAKVDHLDKNGQCALVHAALRGHLEVVKFLIQCDWTMAGQQQGVFKKSHAIQQALIAAASMGYTEIVSYLLDLPEKDEEEVERAQINSFDSLWGETALTAAAGRGKLEVCRLLLEQGAAVAQPNRRGAVPLFSTVRQGHWQIVDLLLTHGADVNMADKQGRTPLMMAASEGHLGTVDFLLAQGASIALMDKEGLTALSWACLKGHLSVVRSLVDNGAATDHADKNGRTPLDLAAFYGDAEVVQFLVDHGAMIEHVDYSGMRPLDRAVGCRNTSVVVTLLKKGAKIGPATWAMATSKPDIMIILLSKLMEEGDMFYKKGKVKEAAQRYQYALKKFPREGFGEDLKTFRELKVSLLLNLSRCRRKMNDFGMAEEFATKALELKPKSYEAYYARARAKRSSRQFAAALEDLNEAIKLCPNNREIQRLLLRVEEECRQMQQPQQPPPPPQPQQQLPEEAEPEPQHEDIYSVQDIFEEEYLEQDVENVSIGLQTEARPSQGLPVIQSPPSSPPHRDSAYISSSPLGSHQVFDFRSSSSVGSPTRQTYQSTSPALSPTHQNSHYRPSPPHTSPAHQGGSYRFSPPPVGGQGKEYPSPPPSPLRRGPQYRASPPAESMSVYRSQSGSPVRYQQETSVSQLPGRPKSPLSKMAQRPYQMPQLPVAVPQQGLRLQPAKAQIVRSNQPSPAVHSSTVIPTGAYGQVAHSMASKYQSSQGDIGVSQSRLVYQGSIGGIVGDGRPVQHVQASLSAGAICQHGGLTKEDLPQRPSSAYRGGVRYSQTPQIGRSQSASYYPVCHSKLDLERSSSQLGSPDVSHLIRRPISVNPNEIKPHPPTPRPLLHSQSVGLRFSPSSNSISSTSNLTPTFRPSSSIQQMEIPLKPAYERSCDELSPVSPTQGGYPSEPTRSRTTPFMGIIDKTARTQQYPHLHQQNRTWAVSSVDTVLSPTSPGNLPQPESFSPPSSISNIAFYNKTNNAQNGHLLEDDYYSPHGMLANGSRGDLLERVSQASSYPDVKVARTLPVAQAYQDNLYRQLSRDSRQGQTSPIKPKRPFVESNV

SEQ ID NO: 88218 - protein, 1254 aa, Homo sapiens
  Payload ID: 17663
  Gene Name: tetratricopeptide repeat, ankyrin repeat and coiled-coil containing 2
  ENSP ID: ENSP00000462109
  MOD_RES (1)..(1): Any amino acid
XAEQELGPPPSVDEAANTLMTRLGFLLGEKVTEVQPGDQYSMEVQDENQTSAITQRISPCSTLTSSTASPPASSPCSTLPPISTNATAKDCSYGAVTSPTSTLESRDSGIIATLTSYSENVERTKYAGESSKELGSGGNIKPWQSQKSSMDSCLYRVDENMTASTYSLNKIPERNLETVLSQSVQSIPLYLMPRPNSVAATSSAHLEDLAYLDEQRHTPLRTSLRMPRQSMGGARTQQDLRVRFAPYRPPDISLKPLLFEVPSITTESVFVGRDWVFHEIDAQLQSSNASVNQGVVIVGNIGFGKTAIISRLVALSCHGTRMRQIASDSPHASPKHVDANRELPLTQPPSAHSSITSGSCPGTPEMRRRQEEAMRRLASQVVAYHYCQADNAYTCLVPEFVHNVAALLCRSPQLTAYREQLLREPHLQSMLSLRSCVQDPMASFRRGVLEPLENLHKERKIPDEDFIILIDGLNEAEFHKPDYGDTIVSFLSKMIGKFPSWLKLIVTVRTSLQEITKLLPFHRIFLDRLEENEAIDQDLQAYILHRIHSSSEIQNNISLNGKMDNTTFGKLSSHLKTLSQGSYLYLKLTFDLIEKGYLVLKSSSYKVVPVSLSEVYLLQCNMKFPTQSSFDRVMPLLNVAVASLHPLTDEHIFQAINAGSIEGTLEWEDFQQRMENLSMFLIKRRDMTRMFVHPSFREWLIWREEGEKTKFLCDPRSGHTLLAFWFSRQEGKLNRQQTIELGHHILKAHIFKGLSKKVGVSSSILQGLWISYSTEGLSMALASLRNLYTPNIKVSRLLILGGANINYRTEVLNNAPILCVQSHLGYTEMVALLLEFGANVDASSESGLTPLGYAAAAGYLSIVVLLCKKRAKVDHLDKNGQCALVHAALRGHLEVVKFLIQCDWTMAGQQQGVFKKSHAIQQALIAAASMGYTEIVSYLLDLPEKDEEEVERAQINSFDSLWGETALTAAAGRGKLEVCRLLLEQGAAVAQPNRRGAVPLFSTVRQGHWQIVDLLLTHGADVNMADKQGRTPLMMAASEGHLGTVDFLLAQGASIALMDKEGLTALSWACLKGHLSVVRSLVDNGAATDHADKNGRTPLDLAAFYGDAEVVQFLVDHGAMIEHVDYSGMRPLDRAVGCRNTSVVVTLLKKGAKIGPATWAMATSKPDIMIILLSKLMEEGDMFYKKGKVKEAAQRYQYALKKFPREGFGEDLKTFRELKVSLLLNLSRCRRKMNTVRSSLRGPERGHQAVSQQP

SEQ ID NO: 88219 - protein, 152 aa, Homo sapiens
  Payload ID: 17663
  Gene Name: tetratricopeptide repeat, ankyrin repeat and coiled-coil containing 2
  ENSP ID: ENSP00000463062
GGSEEPPDRRQSSVDSRQSRSGQGGISTESDCAFEPDYAVPPLPVSEGMQHIRIMEGMSRSLPSSPLLTHQSISVRLQPVKKLTAPLRKAKFVESPRIPESELGSPTLTSAQKLDVDAYCPGDAEQELGPPPSVDEAANTLMTRLGFLLGEK

SEQ ID NO: 88220 - protein, 111 aa, Homo sapiens
  Payload ID: 17663
  Gene Name: tetratricopeptide repeat, ankyrin repeat and coiled-coil containing 2
  ENSP ID: ENSP00000463959
  MOD_RES (1)..(1): Any amino acid
XPPDRRQSSVDSRQSRSGQGGISTESDCAFEPDYAVPPLPVSEGMQHIRIMEGMSRSLPSSPLLTHQSISVRLQPVKKLTGDAEQELGPPPSVDEAANTLMTRLGFLLGEK

SEQ ID NO: 88221 - protein, 135 aa, Homo sapiens
  Payload ID: 17663
  Gene Name: tetratricopeptide repeat, ankyrin repeat and coiled-coil containing 2
  ENSP ID: ENSP00000464181
VDHLDKNGQCALVHAALRGHLEVVKFLIQCDWTMAGQQQGVFKKSHAIQQALIAAASMGYTEIVSYLLDLPEKDEEEVERAQINSFDSLWGETGTSHGRCPQECVVFVWTLESHPLIFSLAYIWQSSVSGFCNAD

SEQ ID NO: 88222 - protein, 1100 aa, Homo sapiens
  Payload ID: 17663
  Gene Name: tetratricopeptide repeat, ankyrin repeat and coiled-coil containing 2
  ENSP ID: ENSP00000478576
MVALLLEFGANVDASSESGLTPLGYAAAAGYLSIVVLLCKKRAKVDHLDKNGQCALVHAALRGHLEVVKFLIQCDWTMAGQQQGVFKKSHAIQQALIAAASMGYTEIVSYLLDLPEKDEEEVERAQINSFDSLWGETALTAAAGRGKLEVCRLLLEQGAAVAQPNRRGAVPLFSTVRQGHWQIVDLLLTHGADVNMADKQGRTPLMMAASEGHLGTVDFLLAQGASIALMDKEGLTALSWACLKGHLSVVRSLVDNGAATDHADKNGRTPLDLAAFYGDAEVVQFLVDHGAMIEHVDYSGMRPLDRAVGCRNTSVVVTLLKKSQDRLSDVPSRPRGPATWAMATSKPDIMIILLSKLMEEGDMFYKKGKVKEAAQRYQYALKKFPREGFGEDLKTFRELKVSLLLNLSRCRRKMNDFGMAEEFATKALELKPKSYEAYYARARAKRSSRQFAAALEDLNEAIKLCPNNREIQRLLLRVEEECRQMQQPQQPPPPPQPQQQLPEEAEPEPQHEDIYSVQDIFEEEYLEQDVENVSIGLQTEARPSQGLPVIQSPPSSPPHRDSAYISSSPLGSHQVFDFRSSSSVGSPTRQTYQSTSPALSPTHQNSHYRPSPPHTSPAHQGGSYRFSPPPVGGQGKEYPSPPPSPLRRGPQYRASPPAESMSVYRSQSGSPVRYQQETSVSQLPGRPKSPLSKMAQRPYQMPQLPVAVPQQGLRLQPAKAQIVRSNQPSPAVHSSTVIPTGAYGQVAHSMASKYQSSQGDIGVSQSRLVYQGSIGGIVGDGRPVQHVQASLSAGAICQHGGLTKEDLPQRPSSAYRGGVRYSQTPQIGRSQSASYYPVCHSKLDLERSSSQLGSPDVSHLIRRPISVNPNEIKPHPPTPRPLLHSQSVGLRFSPSSNSISSTSNLTPTFRPSSSIQQMEIPLKPAYERSCDELSPVSPTQGGYPSEPTRSRTTPFMGIIDKTARTQQYPHLHQQNRTWAVSSVDTVLSPTSPGNLPQPESFSPPSSISNIAFYNKTNNAQNGHLLEDDYYSPHGMLANGSRGDLLERVSQASSYPDVKVARTLPVAQAYQDNLYRQLSRDSRQGQTSPIKPKRPFVESNV

SEQ ID NO: 88223 - protein, 993 aa, Homo sapiens
  Payload ID: 17664
  Gene Name: TEX13 family member C
  ENSP ID: ENSP00000488022
MAMNFGDHASGFRHDDVIRFINNEVLRNGGSPAFYTAFRSRPWNEVEDRLRAIVADPRVPRAIKRACTWSALALSVQVAARQQEELLYQVWWLQGHVEECQATSWALTSQLQQLRLEHEEVATQLHLTQAALQQVLNERDGLCGRLLEVERSMQVYPMPQDFVPGPEAGQYGPVAGTLNAEQSEAVATEAQGMPHSEAQVAAPTAVYYMPEPQSGRVQGMQPLLLMQAPHPVPFHMPSPMGLPYSTPLPPPVVMESAAAIAPQMPPAGIYPPGLWATVGSQEETAPPWDQKCHGQDGYPENFQGVYHPGDNRSCNQKEGSECPQGMTSQGDSSSHSLKKDPVMQEGTAPPEFSRSHSLEKKPVMPKEMVPLGDSNSHSLKKDPVVPKEIVPIGDSNSHSLTKNPVVHKEMVSLGDSNSHSMKKDPVMPQKMVPLGDSNSHSLKKDPMMCQEMVPLGDSNSHSLKKDPVVAQGTAPLMYSRRHSQKKVPMMPKEMVPLGESHSHSLKKDLVVPKELVPLGDSKSHRMKKDPVMPQKMVPLGDSRSHSLKKDPVMPQNMIPLEDSNSHSLKKDPVMPQNMIPLEDSNSHSLKKDPMMHQEMVPLGDSNSHSLKKDPVVPQDTAPLMFSRRHSLKKVPVMPKEMVPLGDSHSLKKDPVMPQNMVPLEDSNSHSLKKDPVVPQGTAPLMFSRRHSLKKVPVMPKEMVPLGDSNSHSLKKDPVVPQGTAPLMFSRRHSLKKVPVMPKEMVPLGDSHSLKKDPVMPQNMVPLEDSNSHSLKKDPVVPQGTAPLTFSRRHSLKKVPVVPQGTASLGFSRIHSLKKELVMPEEMVPLGDSNSHSMKKDLVMPKEMVPLGDSNSHSLKKDPVVHQEVVSLGDSNSHSLKKHPVIPQGTASLRFSKSHSQKEDQERPQVTPLEDSKSHGVKNSPWKHQPQGQKVKEQKRKKASESQQQKPASCSSPVNWACPWCNAMNFPRNKVCSKCKRVRMPVENGSVDPA

SEQ ID NO: 88224 - protein, 714 aa, Homo sapiens
  Payload ID: 17665
  Gene Name: TEX13 family member D
  ENSP ID: ENSP00000488696
MAMNFGDHASGFRHNDVIRFINNEVLMDGSGPAFYVAFRSRPWNEVEDSLQAIVADSQVPRAIKRACTWSALALSVRVATRQREELLHHVRRLQRHAEERQATSWALTSQLQQLRLEHEVAATQLHLAQAALQQALNERDGLYGRLLQIERFPQAAPLAHEIMSGPQAEQNGAAACPLATEQQSDMVAMGTHANAQMPTPTDVLYVPGPLSPWAQGMQPPLPVPHPFPHPPPFPMKFPSLPPLPPAVVTGAEAAAVPLQMPPTEIHPPCPWPAVGFQEEMAPLWYQRSYIQEEDSKILQGSFPLGDSRSHSQGEGSERSQRMPLPGDSGCHNPLSESPQGTAPLGSSGCHSQEEGTEGPQGMDPLGNRERQNQKEGPKRARRMHTLVFRRSHKSEGPEGPQGTVPQGDSRSYSQEGCSDRAQEMATLVFIRRCKPEGPKRPQWTVPLGDSRSHIKEEGPEGPQRIVLQGDNRSYSQEGSPERAQGMATLVFSRSCKPEEGPERPQDTPLGDSRSHIKEEGPEGPQRIVLQGDNRSYSQEGSPERAQGMATLVFSRSCKPEEGPERPQDTPLGDSRSHIKEEGPEGPQRIVLQGDNRSYSQEGSRERAQGMATLVFSRSCKPEEGPERPQGTPLGDSRSHGVRESPKKWQPQRQKAKKPKVNKVSGSQQQEKPASFPVPVNWKCPWCKAINFSWRTACYKCKKACVPFESGGQTQ

SEQ ID NO: 88225 - protein, 115 aa, Homo sapiens
  Payload ID: 17666
  Gene Name: TGFB1-induced anti-apoptotic factor 1
  Uniprot ID: O95411
  ENSP ID: ENSP00000352424
MSSPSSPFREQSFLCAAGDAGEESRVQVLKNEVRRGSPVLLGWVEQAYADKCVCGPSAPPAPTPPSLSQRVMCNDLFKVNPFQLQQFRADPSTASLLLCPGGLDHKLNLRGKAWG

SEQ ID NO: 88226 - protein, 504 aa, Homo sapiens
  Payload ID: 17667
  Gene Name: TGF-beta activated kinase 1/MAP3K7 binding protein 1
  Uniprot ID: Q15750
  ENSP ID: ENSP00000216160
MAAQRRSLLQSEQQPSWTDDLPLCHLSGVGSASNRSYSADGKGTESHPPEDSWLKFRSENNCFLYGVFNGYDGNRVTNFVAQRLSAELLLGQLNAEHAEADVRRVLLQAFDVVERSFLESIDDALAEKASLQSQLPEGVPQHQLPPQYQKILERLKTLEREISGGAMAVVAVLLNNKLYVANVGTNRALLCKSTVDGLQVTQLNVDHTTENEDELFRLSQLGLDAGKIKQVGIICGQESTRRIGDYKVKYGYTDIDLLSAAKSKPIIAEPEIHGAQPLDGVTGFLVLMSEGLYKALEAAHGPGQANQEIAAMIDTEFAKQTSLDAVAQAVVDRVKRIHSDTFASGGERARFCPRHEDMTLLVRNFGYPLGEMSQPTPSPAPAAGGRVYPVSVPYSSAQSTSKTSVTLSLVMPSQGQMVNGAHSASTLDEATPTLTNQSPTLTLQSTNTHTQSSSSSSDGGLFRSRPAHSLPPGEDGRVEPYVDFAEFYRLWSVDHGEQSVVTAP

SEQ ID NO: 88227 - protein, 462 aa, Homo sapiens
  Payload ID: 17667
  Gene Name: TGF-beta activated kinase 1/MAP3K7 binding protein 1
  Uniprot ID: Q15750
  ENSP ID: ENSP00000333049
MAAQRRSLLQSEQQPSWTDDLPLCHLSGVGSASNRSYSADGKGTESHPPEDSWLKFRSENNCFLYGVFNGYDGNRVTNFVAQRLSAELLLGQLNAEHAEADVRRVLLQAFDVVERSFLESIDDALAEKASLQSQLPEGVPQHQLPPQYQKILERLKTLEREISGGAMAVVAVLLNNKLYVANVGTNRALLCKSTVDGLQVTQLNVDHTTENEDELFRLSQLGLDAGKIKQVGIICGQESTRRIGDYKVKYGYTDIDLLSAAKSKPIIAEPEIHGAQPLDGVTGFLVLMSEGLYKALEAAHGPGQANQEIAAMIDTEFAKQTSLDAVAQAVVDRVKRIHSDTFASGGERARFCPRHEDMTLLVRNFGYPLGEMSQPTPSPAPAAGGRVYPVSVPYSSAQSTSKTSVTLSLVMPSQGQMVNGAHSASTLDEATPTLTKDPSRPASDLTAIPQCQLNLLGSLTPG

SEQ ID NO: 88228 - protein, 693 aa, Homo sapiens
  Payload ID: 17668
  Gene Name: TGF-beta activated kinase 1/MAP3K7 binding protein 2
  Uniprot ID: Q9NYJ8
  ENSP ID: ENSP00000356426
MAQGSHQIDFQVLHDLRQKFPEVPEVVVSRCMLQNNNNLDACCAVLSQESTRYLYGEGDLNFSDDSGISGLRNHMTSLNLDLQSQNIYHHGREGSRMNGSRTLTHSISDGQLQGGQSNSELFQQEPQTAPAQVPQGFNVFGMSSSSGASNSAPHLGFHLGSKGTSSLSQQTPRFNPIMVTLAPNIQTGRNTPTSLHIHGVPPPVLNSPQGNSIYIRPYITTPGGTTRQTQQHSGWVSQFNPMNPQQVYQPSQPGPWTTCPASNPLSHTSSQQPNQQGHQTSHVYMPISSPTTSQPPTIHSSGSSQSSAHSQYNIQNISTGPRKNQIEIKLEPPQRNNSSKLRSSGPRTSSTSSSVNSQTLNRNQPTVYIAASPPNTDELMSRSQPKVYISANAATGDEQVMRNQPTLFISTNSGASAASRNMSGQVSMGPAFIHHHPPKSRAIGNNSATSPRVVVTQPNTKYTFKITVSPNKPPAVSPGVVSPTFELTNLLNHPDHYVETENIQHLTDPTLAHVDRISETRKLSMGSDDAAYTQALLVHQKARMERLQRELEIQKKKLDKLKSEVNEMENNLTRRRLKRSNSISQIPSLEEMQQLRSCNRQLQIDIDCLTKEIDLFQARGPHFNPSAIHNFYDNIGFVGPVPPKPKDQRSIIKTPKTQDTEDDEGAQWNCTACTFLNHPALIRCEQCEMPRHF

SEQ ID NO: 88229 - protein, 536 aa, Homo sapiens
  Payload ID: 17668
  Gene Name: TGF-beta activated kinase 1/MAP3K7 binding protein 2
  Uniprot ID: Q9NYJ8
  ENSP ID: ENSP00000432709
MAQGSHQIDFQVLHDLRQKFPEVPEVVVSRCMLQNNNNLDACCAVLSQESTRYLYGEGDLNFSDDSGISGLRNHMTSLNLDLQSQNIYHHGREGSRMNGSRTLTHSISDGQLQGGQSNSELFQQEPQTAPAQVPQGFNVFGMSSSSGASNSAPHLGFHLGSKGTSSLSQQTPRFNPIMVTLAPNIQTGRNTPTSLHIHGVPPPVLNSPQGNSIYIRPYITTPGGTTRQTQQHSGWVSQFNPMNPQQVYQPSQPGPWTTCPASNPLSHTSSQQPNQQGHQTSHVYMPISSPTTSQPPTIHSSGSSQSSAHSQYNIQNISTGPRKNQIEIKLEPPQRNNSSKLRSSGPRTSSTSSSVNSQTLNRNQPTVYIAASPPNTDELMSRSQPKVYISANAATGDEQVMRNQPTLFISTNSGASAASRNMSGQVSMGPAFIHHHPPKSRAIGNNSATSPRVVVTQPNTKYTFKITVSPNKPPAVSPGVVSPTFELTNLLNHPDHYVETENIQHLTDPTLAHVDRISETRKLSMGSDDAAYTQDI

SEQ ID NO: 88230 - protein, 693 aa, Homo sapiens; identical to SEQ ID NO: 88228
  Payload ID: 17668
  Gene Name: TGF-beta activated kinase 1/MAP3K7 binding protein 2
  Uniprot ID: Q9NYJ8
  ENSP ID: ENSP00000445752

SEQ ID NO: 88231 - protein, 33 aa, Homo sapiens
  Payload ID: 17668
  Gene Name: TGF-beta activated kinase 1/MAP3K7 binding protein 2
  ENSP ID: ENSP00000475580
MAQGSHQIDFQVLHDLRQKFPEVPEVARGNRPD

SEQ ID NO: 88232 - protein, 130 aa, Homo sapiens
  Payload ID: 17668
  Gene Name: TGF-beta activated kinase 1/MAP3K7 binding protein 2
  ENSP ID: ENSP00000476139
MTSLNLDLQSQNIYHHGREGSRMNGSRTLTHSISDGQLQGGQSNSELFQQEPQTAPAQVPQGFNVFGMSSSSGASNSAPHLGFHLGSKGTSSLSQQTPRFNPIMVTLAPNIQTGRNTPTSLHIHGVPPPV

SEQ ID NO: 88233 - protein, 47 aa, Homo sapiens
  Payload ID: 17669
  Gene Name: TGF-beta activated kinase 1/MAP3K7 binding protein 3
  ENSP ID: ENSP00000288422
MAQSSPQLDIQVLHDLRQRFPEIPEGVVSQCMLQNNNNLEACCRALS

SEQ ID NO: 88234 - protein, 712 aa, Homo sapiens
  Payload ID: 17669
  Gene Name: TGF-beta activated kinase 1/MAP3K7 binding protein 3
  Uniprot ID: Q8N5C8
  ENSP ID: ENSP00000368212
MAQSSPQLDIQVLHDLRQRFPEIPEGVVSQCMLQNNNNLEACCRALSQESSKYLYMEYHSPDDNRMNRNRLLHINLGIHSPSSYHPGDGAQLNGGRTLVHSSSDGHIDPQHAAGKQLICLVQEPHSAPAVVAATPNYNPFFMNEQNRSAATPPSQPPQQPSSMQTGMNPSAMQGPSPPPPPPSYMHIPRYSTNPITVTVSQNLPSGQTVPRALQILPQIPSNLYGSPGSIYIRQTSQSSSGRQTPQSTPWQSSPQGPVPHYSQRPLPVYPHQQNYQPSQYSPKQQQIPQSAYHSPPPSQCPSPFSSPQHQVQPSQLGHIFMPPSPSTTPPHPYQQGPPSYQKQGSHSVAYLPYTASSLSKGSMKKIEITVEPSQRPGTAINRSPSPISNQPSPRNQHSLYTATTPPSSSPSRGISSQPKPPFSVNPVYITYTQPTGPSCTPSPSPRVIPNPTTVFKITVGRATTENLLNLVDQEERSAAPEPIQPISVIPGSGGEKGSHKYQRSSSSGSDDYAYTQALLLHQRARMERLAKQLKLEKEELERLKSEVNGMEHDLMQRRLRRVSCTTAIPTPEEMTRLRSMNRQLQINVDCTLKEVDLLQSRGNFDPKAMNNFYDNIEPGPVVPPKPSKKDSSDPCTIERKARRISVTSKVQADIHDTQAAAADEHRTGSTQSPRTQPRDEDYEGAPWNCDSCTFLNHPALNRCEQCEMPRYT

SEQ ID NO: 88235 - protein, 684 aa, Homo sapiens
  Payload ID: 17669
  Gene Name: TGF-beta activated kinase 1/MAP3K7 binding protein 3
  Uniprot ID: Q8N5C8
  ENSP ID: ENSP00000368214
MAQSSPQLDIQVLHDLRQRFPEIPEGVVSQCMLQNNNNLEACCRALSQESSKYLYMEYHSPDDNRMNRNRLLHINLGIHSPSSYHPGDGAQLNGGRTLVHSSSDGHIDPQHAAGKQLICLVQEPHSAPAVVAATPNYNPFFMNEQNRSAATPPSQPPQQPSSMQTGMNPSAMQGPSPPPPPPSYMHIPRYSTNPITVTVSQNLPSGQTVPRALQILPQIPSNLYGSPGSIYIRQTSQSSSGRQTPQSTPWQSSPQGPVPHYSQRPLPVYPHQQNYQPSQYSPKQQQIPQSAYHSPPPSQCPSPFSSPQHQVQPSQLGHIFMPPSPSTTPPHPYQQGPPSYQKQGSHSVAYLPYTASSLSKGSMKKIEITVEPSQRPGTAINRSPSPISNQPSPRNQHSLYTATTPPSSSPSRGISSQPKPPFSVNPVYITYTQPTGPSCTPSPSPRVIPNPTTVFKITVGRATTENLLNLVDQEERSAAPEPIQPISVIPGSGGEKGSHKYQRSSSSGSDDYAYTQALLLHQRARMERLAKQLKLEKEELERLKSEVNGMEHDLMQRRLRRVSCTTAIPTPEEMTRLRSMNRQLQINVDCTLKEVDLLQSRDSSDPCTIERKARRISVTSKVQADIHDTQAAAADEHRTGSTQSPRTQPRDEDYEGAPWNCDSCTFLNHPALNRCEQCEMPRYT

SEQ ID NO: 88236 - protein, 712 aa, Homo sapiens; identical to SEQ ID NO: 88234
  Payload ID: 17669
  Gene Name: TGF-beta activated kinase 1/MAP3K7 binding protein 3
  Uniprot ID: Q8N5C8
  ENSP ID: ENSP00000368215

SEQ ID NO: 88237 - protein, 608 aa, Homo sapiens
  Payload ID: 17669
  Gene Name: TGF-beta activated kinase 1/MAP3K7 binding protein 3
  ENSP ID: ENSP00000433193
MAQSSPQLDIQVLHDLRQRFPEIPEGVVSQCMLQNNNNLEACCRALSQESSKYLYMEYHSPDDNRMNRNRLLHINLGIHSPSSYHPGDGAQLNGGRTLVHSSSDGHIDPQHAAGKQLICLVQEPHSAPAVVAATPNYNPFFMNEQNRSAATPPSQPPQQPSSMQTGMNPSAMQGPSPPPPPPSYMHIPRYSTNPITVTVSQNLPSGQTVPRALQILPQIPSNLYGSPGSIYIRQTSQSSSGRQTPQSTPWQSSPQGPVPHYSQRPLPVYPHQQNYQPSQYSPKQQQIPQSAYHSPPPSQCPSPFSSPQHQVQPSQLGHIFMPPSPSTTPPHPYQQGPPSYQKQGSHSVAYLPYTASSLSKGSMKKIEITVEPSQRPGTAINRSPSPISNQPSPRNQHSLYTATTPPSSSPSRGISSQPKPPFSVNPVYITYTQPTGPSCTPSPSPRVIPNPTTVFKITVGRATTENLLNLVDQEERSAAPEPIQPISVIPGSGGEKGSHKYQRSSSSGSDDYAYTQALLLHQRARMERLAKQLKLEKEELERLKSEVNGMEHDLMQRRLRRVSCTTAIPTPEEMTRLRSMNRQLQINVDCTLKEVDLLQSRGIDLIIW

SEQ ID NO: 88238 - protein, 401 aa, Homo sapiens
  Payload ID: 17670
  Gene Name: TGFB-induced factor homeobox 1
  Uniprot ID: Q15583
  ENSP ID: ENSP00000327959
MVLAQSRVSAGVGSPHCSGSGGGGSDSFPWPASHPGNPQCSFSTAFLASPRLSRGTLAYLPPAPWSSLATPSALLGSSCAPPPPPARCPQPRALSPELGTKAGPRRPHRWELPRSPSQGAQGPAPRRRLLETMKGIVAASGSETEDEDSMDIPLDLSSSAGSGKRRRRGNLPKESVQILRDWLYEHRYNAYPSEQEKALLSQQTHLSTLQVCNWFINARRRLLPDMLRKDGKDPNQFTISRRGAKISETSSVESVMGIKNFMPALEETPFHSCTAGPNPTLGRPLSPKPSSPGSVLARPSVICHTTVTALKDVPFSLCQSVGVGQNTDIQQIAAKNFTDTSLMYPEDTCKSGPSTNTQSGLFNTPPPTPPDLNQDFSGFQLLVDVALKRAAEMELQAKLTA

SEQ ID NO: 88239 - protein, 272 aa, Homo sapiens
  Payload ID: 17670
  Gene Name: TGFB-induced factor homeobox 1
  Uniprot ID: Q15583
  ENSP ID: ENSP00000339631
MKGKKGIVAASGSETEDEDSMDIPLDLSSSAGSGKRRRRGNLPKESVQILRDWLYEHRYNAYPSEQEKALLSQQTHLSTLQVCNWFINARRRLLPDMLRKDGKDPNQFTISRRGAKISETSSVESVMGIKNFMPALEETPFHSCTAGPNPTLGRPLSPKPSSPGSVLARPSVICHTTVTALKDVPFSLCQSVGVGQNTDIQQIAAKNFTDTSLMYPEDTCKSGPSTNTQSGLFNTPPPTPPDLNQDFSGFQLLVDVALKRAAEMELQAKLTA

SEQ ID NO: 88240 - protein, 252 aa, Homo sapiens
  Payload ID: 17670
  Gene Name: TGFB-induced factor homeobox 1
  Uniprot ID: Q15583
  ENSP ID: ENSP00000343969
MDIPLDLSSSAGSGKRRRRGNLPKESVQILRDWLYEHRYNAYPSEQEKALLSQQTHLSTLQVCNWFINARRRLLPDMLRKDGKDPNQFTISRRGAKISETSSVESVMGIKNFMPALEETPFHSCTAGPNPTLGRPLSPKPSSPGSVLARPSVICHTTVTALKDVPFSLCQSVGVGQNTDIQQIAAKNFTDTSLMYPEDTCKSGPSTNTQSGLFNTPPPTPPDLNQDFSGFQLLVDVALKRAAEMELQAKLTA

SEQ ID NO: 88241 - protein, 252 aa, Homo sapiens; identical to SEQ ID NO: 88240
  Payload ID: 17670
  Gene Name: TGFB-induced factor homeobox 1
  Uniprot ID: Q15583
  ENSP ID: ENSP00000383031

SEQ ID NO: 88242 - protein, 272 aa, Homo sapiens; identical to SEQ ID NO: 88239
  Payload ID: 17670
  Gene Name: TGFB-induced factor homeobox 1
  Uniprot ID: Q15583
  ENSP ID: ENSP00000384133

SEQ ID NO: 88243 - protein, 252 aa, Homo sapiens; identical to SEQ ID NO: 88240
  Payload ID: 17670
  Gene Name: TGFB-induced factor homeobox 1
  Uniprot ID: Q15583
  ENSP ID: ENSP00000384970

SEQ ID NO: 88244 - protein, 252 aa, Homo sapiens; identical to SEQ ID NO: 88240
  Payload ID: 17670
  Gene Name: TGFB-induced factor homeobox 1
  Uniprot ID: Q15583
  ENSP ID: ENSP00000385206

SEQ ID NO: 88245 - protein, 137 aa, Homo sapiens
  Payload ID: 17670
  Gene Name: TGFB-induced factor homeobox 1
  ENSP ID: ENSP00000446838
MDIPLDLSSSAGSGKRRRRGNLPKESVQILRDWLYEHRYNAYPSEQEKALLSQQTHLSTLQVCNWFINARRRLLPDMLRKDGKDPNQFTISRRGAKISETSSVESVMGIKNFMPALEETPFHSCTAGPNPTLGRPLS

SEQ ID NO: 88246 - protein, 132 aa, Homo sapiens
  Payload ID: 17670
  Gene Name: TGFB-induced factor homeobox 1
  ENSP ID: ENSP00000446944
MKGKKGIVAASGSETEDEDSMDIPLDLSSSAGSGKRRRRGNLPKESVQILRDWLYEHRYNAYPSEQEKALLSQQTHLSTLQVKKESVRFMDAFLVSKSFYGIPVCQVIKLLATQRQKEYLFIVNLIVLKANN

SEQ ID NO: 88247 - protein, 252 aa, Homo sapiens; identical to SEQ ID NO: 88240
  Payload ID: 17670
  Gene Name: TGFB-induced factor homeobox 1
  Uniprot ID: Q15583
  ENSP ID: ENSP00000447747

SEQ ID NO: 88248 - protein, 219 aa, Homo sapiens
  Payload ID: 17670
  Gene Name: TGFB-induced factor homeobox 1
  ENSP ID: ENSP00000448121
MDIPLDLSSSAGSGKRRRRGNLPKESVQILRDWLYEHRYNAYPSEQEKALLSQQTHLSTLQVCNWFINARRRLLPDMLRKDGKDPNQFTISRRGAKISETSSVESVMGIKNFMPALEETPFHSCTAGPNPTLGRPLSPKPSSPGSVLARPSVICHTTVTALKDVPFSLCQSVGVGQNTDIQQIAAKNFTDTSLMYPEDTCKSGPSTNTQSGLFNTPPPT

SEQ ID NO: 88249 - protein, 118 aa, Homo sapiens
  Payload ID: 17670
  Gene Name: TGFB-induced factor homeobox 1
  ENSP ID: ENSP00000448934
MKGKKGIVAASGSETEDEDSMDIPLDLSSSAGSGKRRRRGNLPKESVQILRDWLYEHRYNAYPSEQEKALLSQQTHLSTLQVCNWFINARRRLLPDMLRKDGKDPNQFTISRRGAKIS

SEQ ID NO: 88250 - protein, 167 aa, Homo sapiens
  Payload ID: 17670
  Gene Name: TGFB-induced factor homeobox 1
  ENSP ID: ENSP00000449287
MDIPLDLSSSAGSGKRRRRGNLPKESVQILRDWLYEHRYNAYPSEQEKALLSQQTHLSTLQVCNWFINARRRLLPDMLRKDGKDPNQFTISRRGAKISETSSVESVMGIKNFMPALEETPFHSCTAGPNPTLGRPLSPKPSSPGSVLARPSVICHTTVTALKDVPFS

SEQ ID NO: 88251 - protein, 252 aa, Homo sapiens; identical to SEQ ID NO: 88240
  Payload ID: 17670
  Gene Name: TGFB-induced factor homeobox 1
  Uniprot ID: Q15583
  ENSP ID: ENSP00000449501

SEQ ID NO: 88252 - protein, 131 aa, Homo sapiens
  Payload ID: 17670
  Gene Name: TGFB-induced factor homeobox 1
  ENSP ID: ENSP00000449531
MDIPLDLSSSAGSGKRRRRGNLPKESVQILRDWLYEHRYNAYPSEQEKALLSQQTHLSTLQVCNWFINARRRLLPDMLRKDGKDPNQFTISRRGAKISETSSVESVMGIKNFMPALEETPFHSCTAGPNPT

SEQ ID NO: 88253 - protein, 245 aa, Homo sapiens
  Payload ID: 17670
  Gene Name: TGFB-induced factor homeobox 1
  ENSP ID: ENSP00000449580
MDIPLDLSSSAGSGKRRRRGNLPKESVQILRDWLYEHRYNAYPSEQEKALLSQQTHLSTLQVCNWFINARRRLLPDMLRKDGKDPNQFTISRRGAKISETSSVESVMGIKNFMPALEETPFHSCTAGPNPTLGRPLSPKPSSPGSVLARPSVICHTTVTALKDVPFSLCQSVGVGQNTDIQQIAAKNFTDTSLMYPEDTCKSGPSTNTQSGLFNTPPPTPPDLNQDFSGFQLLVDVALKRAAEME

SEQ ID NO: 88254 - protein, 133 aa, Homo sapiens
  Payload ID: 17670
  Gene Name: TGFB-induced factor homeobox 1
  ENSP ID: ENSP00000449722
MDIPLDLSSSAGSGKRRRRGNLPKESVQILRDWLYEHRYNAYPSEQEKALLSQQTHLSTLQVCNWFINARRRLLPDMLRKDGKDPNQFTISRRGAKISETSSVESVMGIKNFMPALEETPFHSCTAGPNPTLG

SEQ ID NO: 88255 - protein, 91 aa, Homo sapiens
  Payload ID: 17670
  Gene Name: TGFB-induced factor homeobox 1
  ENSP ID: ENSP00000449973
MDIPLDLSSSAGSGKRRRRGNLPKESVQILRDWLYEHRYNAYPSEQEKALLSQQTHLSTLQVCNWFINARRRLLPDMLRKDGKDPNQFTIS

SEQ ID NO: 88256 - protein, 252 aa, Homo sapiens; identical to SEQ ID NO: 88240
  Payload ID: 17670
  Gene Name: TGFB-induced factor homeobox 1
  Uniprot ID: Q15583
  ENSP ID: ENSP00000450025

SEQ ID NO: 88257 - protein, 84 aa, Homo sapiens
  Payload ID: 17670
  Gene Name: TGFB-induced factor homeobox 1
  ENSP ID: ENSP00000462285
MKGKKGIVAASGSETEDEDSMDIPLDLSSSAGSGKRRRRGNLPKESVQILRDWLYEHRYNAYPSEQEKALLSQQTHLSTLQAPP

SEQ ID NO: 88258 - protein, 286 aa, Homo sapiens
  Payload ID: 17670
  Gene Name: TGFB-induced factor homeobox 1
  Uniprot ID: Q15583
  ENSP ID: ENSP00000483499
MTCSGKSCALARSSLTSSQGIVAASGSETEDEDSMDIPLDLSSSAGSGKRRRRGNLPKESVQILRDWLYEHRYNAYPSEQEKALLSQQTHLSTLQVCNWFINARRRLLPDMLRKDGKDPNQFTISRRGAKISETSSVESVMGIKNFMPALEETPFHSCTAGPNPTLGRPLSPKPSSPGSVLARPSVICHTTVTALKDVPFSLCQSVGVGQNTDIQQIAAKNFTDTSLMYPEDTCKSGPSTNTQSGLFNTPPPTPPDLNQDFSGFQLLVDVALKRAAEMELQAKLTA

SEQ ID NO: 88259 - protein, 237 aa, Homo sapiens
  Payload ID: 17671
  Gene Name: TGFB-induced factor homeobox 2
  Uniprot ID: Q9GZN2
  ENSP ID: ENSP00000362979
MSDSDLGEDEGLLSLAGKRKRRGNLPKESVKILRDWLYLHRYNAYPSEQEKLSLSGQTNLSVLQICNWFINARRRLLPDMLRKDGKDPNQFTISRRGGKASDVALPRGSSPSVLAVSVPAPTNVLSLSVCSMPLHSGQGEKPAAPFPRGELESPKPLVTPGSTLTLLTRAEAGSPTGGLFNTPPPTPPEQDKEDFSSFQLLVEVALQRAAEMELQKQQDPSLPLLHTPIPLVSENPQ

SEQ ID NO: 88260 - protein, 237 aa, Homo sapiens; identical to SEQ ID NO: 88259
  Payload ID: 17671
  Gene Name: TGFB-induced factor homeobox 2
  Uniprot ID: Q9GZN2
  ENSP ID: ENSP00000362981

SEQ ID NO: 88261 - protein, 174 aa, Homo sapiens
  Payload ID: 17671
  Gene Name: TGFB-induced factor homeobox 2
  ENSP ID: ENSP00000452878
MSDSDLGEDEGLLSLAGKRKRRGNLPKESVKILRDWLYLHRYNAYPSEQEKLSLSGQTNLSVLQICNWFINARRRLLPDMLRKDGKDPNQFTISRRGGKASDVALPRGSSPSVLAVSVPAPTNVLSLSVCSMPLHSGQGEKPAAPFPRGELESPKPLVTPGSTLTLLTRAEAGS

SEQ ID NO: 88262 - protein, 237 aa, Homo sapiens; identical to SEQ ID NO: 88259
  Payload ID: 17671
  Gene Name: TGFB-induced factor homeobox 2
  Uniprot ID: Q9GZN2
  ENSP ID: ENSP00000453773

SEQ ID NO: 88263 - protein, 35 aa, Homo sapiens
  Payload ID: 17671
  Gene Name: TGFB-induced factor homeobox 2
  ENSP ID: ENSP00000475479
KLSLSGQTNLSVLQRSSTGRCQLAPLHCDGGPLLC

SEQ ID NO: 88264 - protein, 92 aa, Homo sapiens
  Payload ID: 17671
  Gene Name: TGFB-induced factor homeobox 2
  ENSP ID: ENSP00000475729
  MOD_RES (1)..(1): Any amino acid
XLLSLAGKRKRRGNLPKESVKILRDWLYLHRYNAYPSEQEKLSLSGQTNLSVLQRVFYGSLPNIGIISSVQRSSTGRCQLAPLHCDGGPLLC

SEQ ID NO: 88265 - protein, 111 aa, Homo sapiens
  Payload ID: 17671
  Gene Name: TGFB-induced factor homeobox 2
  ENSP ID: ENSP00000476174
  MOD_RES (1)..(1): Any amino acid
XRKRRGNLPKESVKILRDWLYLHRYNAYPSEQEKLSLSGQTNLSVLQICNWFINARRRLLPDMLRKDGKDPNQFTISRRGEGFLWITAKHWDHLLCPEVFNRKMPAGTTAL

SEQ ID NO: 88266 - protein, 237 aa, Homo sapiens; identical to SEQ ID NO: 88259
  Payload ID: 17671
  Gene Name: TGFB-induced factor homeobox 2
  Uniprot ID: Q9GZN2
  ENSP ID: ENSP00000481787

SEQ ID NO: 88267 - protein, 241 aa, Homo sapiens
  Payload ID: 17672
  Gene Name: TGFB-induced factor homeobox 2-like, X-linked
  Uniprot ID: Q8IUE1
  ENSP ID: ENSP00000355119
MEAAADGPAETQSPVEKDSPAKTQSPAQDTSIMSRNNADTGRVLALPEHKKKRKGNLPAESVKILRDWMYKHRFKAYPSEEEKQMLSEKTNLSLLQISNWFINARRRILPDMLQQRRNDPIIGHKTGKDAHATHLQSTEASVPAKSGPSGPDNVQSLPLWPLPKGQMSREKQPDPESAPSQKLTGIAQPKKKVKVSVTSPSSPELVSPEEHADFSSFLLLVDAAVQRAAELELEKKQEPNP

SEQ ID NO: 88268 - protein, 241 aa, Homo sapiens; identical to SEQ ID NO: 88267
  Payload ID: 17672
  Gene Name: TGFB-induced factor homeobox 2-like, X-linked
  Uniprot ID: Q8IUE1
  ENSP ID: ENSP00000453704

SEQ ID NO: 88269 - protein, 185 aa, Homo sapiens [sequence omitted]

SEQ ID NO: 88270 - protein, 185 aa, Homo sapiens
  Payload ID: 17673
  Gene Name: TGFB-induced factor homeobox 2-like, Y-linked
  Uniprot ID: Q8IUE0
  ENSP ID: ENSP00000318502
MEAAADGPAETQSPVEKDSPAKTQSPAQDTSIMSRNNADTGRVLALPEHKKKRKGNLPAESVKILRDWMYKHRFKAYPSEEEKQMLSEKTNLSLLRISNWFINARRRILPDMLQQRRNDPIIGHKTGKDAHATHLQSTEASVPAKSGPVVQTMYKACPCGPCQRARCQERSNQIRSRPLARSSPE

SEQ ID NO: 88271 - protein, 185 aa, Homo sapiens; identical to SEQ ID NO: 88270
  Payload ID: 17673
  Gene Name: TGFB-induced factor homeobox 2-like, Y-linked
  Uniprot ID: Q8IUE0
  ENSP ID: ENSP00000453750

SEQ ID NO: 88272 - protein, 155 aa, Homo sapiens
  Payload ID: 17674
  Gene Name: TGIF2-C20orf24 readthrough
  ENSP ID: ENSP00000454021
MSDSDLGEDEGLLSLAGKRKRRGNLPKESVKILRDWLYLHRYNAYPSEQEKLSLSGQTNLSVLQDEFLDVIYWFRQIIAVVLGVIWGVLPLRGFLGIAGFCLINAGVLYLYFSNYLQIDEEEYGGTWELTKEGFMTSFALFMVIWIIFYTAIHYD

SEQ ID NO: 88273 - protein, 257 aa, Homo sapiens
  Payload ID: 17675
  Gene Name: THAP domain containing 10
  Uniprot ID: Q9P2Z0
  ENSP ID: ENSP00000249861
MPARCVAAHCGNTTKSGKSLFRFPKDRAVRLLWDRFVRGCRADWYGGNDRSVICSDHFAPACFDVSSVIQKNLRFSQRLRLVAGAVPTLHRVPAPAPKRGEEGDQAGRLDTRGELQAARHSEAAPGPVSCTRPRAGKQAAASQITCENELVQTQPHADNPSNTVTSVPTHCEEGPVHKSTQISLKRPRHRSVGIQAKVKAFGKRLCNATTQTEELWSRTSSLFDIYSSDSETDTDWDIKSEQSDLSYMAVQVKEETC

SEQ ID NO: 88274 - protein, 127 aa, Homo sapiens
  Payload ID: 17675
  Gene Name: THAP domain containing 10
  ENSP ID: ENSP00000453920
  MOD_RES (1)..(1): Any amino acid
XVGKETIPTRSGQITCENELVQTQPHADNPSNTVTSVPTHCEEGPVHKSTQISLKRPRHRSVGIQAKVKAFGKRLCNATTQTEELWSRTSSLFDIYSSDSETDTDWDIKSEQSDLSYMAVQVKEETC

SEQ ID NO: 88275 - protein, 314 aa, Homo sapiens
  Payload ID: 17676
  Gene Name: THAP domain containing 11
  Uniprot ID: Q96EK4
  ENSP ID: ENSP00000304689
MPGFTCCVPGCYNNSHRDKALHFYTFPKDAELRRLWLKNVSRAGVSGCFSTFQPTTGHRLCSVHFQGGRKTYTVRVPTIFPLRGVNERKVARRPAGAAAARRRQQQQQQQQQQQQQQQQQQQQQQQQQQQQQSSPSASTAQTAQLQPNLVSASAAVLLTLQATVDSSQAPGSVQPAPITPTGEDVKPIDLTVQVEFAAAEGAAAAAAASELQAATAGLEAAECPMGPQLVVVGEEGFPDTGSDHSYSLSSGTTEEELLRKLNEQRDILALMEVKMKEMKGSIRHLRLTEAKLREELREKDRLLAMAVIRKKHGM

SEQ ID NO: 88276 - protein, 192 aa, Homo sapiens
  Payload ID: 17677
  Gene Name: THAP domain containing 4
  ENSP ID: ENSP00000384352
MEPPKMNPVVEPLSWMLGTWLSDPPGAGTYPTLQPFQYLEEVHISHVGQPMLNFSFNSFHPDTRKPMHRECGFIRLKPDTNKVAFVSAQNTGVVEVEEGEVNGQELCIASHSIARISFAKEPHVEQVSPALLPARSCLLFAAVCGVSLFLFREITRKFRLNSEGKLEQTVSMATTTQPMTQHLHVTYKKVTP

SEQ ID NO: 88277 - protein, 577 aa, Homo sapiens
  Payload ID: 17677
  Gene Name: THAP domain containing 4
  Uniprot ID: Q8WY91
  ENSP ID: ENSP00000385006
MVICCAAVNCSNRQGKGEKRAVSFHRFPLKDSKRLIQWLKAVQRDNWTPTKYSFLCSEHFTKDSFSKRLEDQHRLLKPTAVPSIFHLTEKKRGAGGHGRTRRKDASKATGGVRGHSSAATSRGAAGWSPSSSGNPMAKPESRRLKQAALQGEATPRAAQEAASQEQAQQALERTPGDGLATMVAGSQGKAEASATDAGDESATSSIEGGVTDKSGISMDDFTPPGSGACKFIGSLHSYSFSSKHTRERPSVPREPIDRKRLKKDVEPSCSGSSLGPDKGLAQSPPSSSLTATPQKPSQSPSAPPADVTPKPATEAVQSEHSDASPMSINEVILSASGACKLIDSLHSYCFSSRQNKSQVCCLREQVEKKNGELKSLRQRVSRSDSQVRKLQEKLDELRRVSVPYPSSLLSPSREPPKMNPVVEPLSWMLGTWLSDPPGAGTYPTLQPFQYLEEVHISHVGQPMLNFSFNSFHPDTRKPMHRECGFIRLKPDTNKVAFVSAQNTGVVEVEEGEVNGQELCIASHSIARISFAKEPHVEQITRKFRLNSEGKLEQTVSMATTTQPMTQHLHVTYKKVTP

SEQ ID NO: 88278 - protein, 165 aa, Homo sapiens
  Payload ID: 17677
  Gene Name: THAP domain containing 4
  Uniprot ID: Q8WY91
  ENSP ID: ENSP00000385931
MEPPKMNPVVEPLSWMLGTWLSDPPGAGTYPTLQPFQYLEEVHISHVGQPMLNFSFNSFHPDTRKPMHRECGFIRLKPDTNKVAFVSAQNTGVVEVEEGEVNGQELCIASHSIARISFAKEPHVEQITRKFRLNSEGKLEQTVSMATTTQPMTQHLHVTYKKVTP

SEQ ID NO: 88279 - protein, 169 aa, Homo sapiens [sequence omitted]

SEQ ID NO: 88280 - protein, 353 aa, Homo sapiens
  Payload ID: 17678
  Gene Name: THAP domain containing 5
  Uniprot ID: Q7Z6K1
  ENSP ID: ENSP00000322440
MKRDSWVPSKYQFLCSDHFTPDSLDIRWGIRYLKQTAVPTIFSLPEDNQGKDPSKKKSQKKNLEDEKEVCPKAKSEESFVLNETKKNIVNTDVPHQHPELLHSSSLVKPPAPKTGSIQNNMLTLNLVKQHTGKPESTLETSVNQDTGRGGFHTCFENLNSTTITLTTSNSESIHQSLETQEVLEVTTSHLANPNFTSNSMEIKSAQENPFLFSTINQTVEELNTNKESVIAIFVPAENSKPSVNSFISAQKETTEMEDTDIEDSLYKDVDYGTEVLQIEHSYCRQDINKEHLWQKVSKLHSKITLLELKEQQTLGRLKSLEALIRQLKQENWLSEENVKIIENHFTTYEVTMI

SEQ ID NO: 88281 - protein, 395 aa, Homo sapiens
  Payload ID: 17678
  Gene Name: THAP domain containing 5
  Uniprot ID: Q7Z6K1
  ENSP ID: ENSP00000400500
MPRYCAAICCKNRRGRNNKDRKLSFYPFPLHDKERLEKWLKNMKRDSWVPSKYQFLCSDHFTPDSLDIRWGIRYLKQTAVPTIFSLPEDNQGKDPSKKKSQKKNLEDEKEVCPKAKSEESFVLNETKKNIVNTDVPHQHPELLHSSSLVKPPAPKTGSIQNNMLTLNLVKQHTGKPESTLETSVNQDTGRGGFHTCFENLNSTTITLTTSNSESIHQSLETQEVLEVTTSHLANPNFTSNSMEIKSAQENPFLFSTINQTVEELNTNKESVIAIFVPAENSKPSVNSFISAQKETTEMEDTDIEDSLYKDVDYGTEVLQIEHSYCRQDINKEHLWQKVSKLHSKITLLELKEQQTLGRLKSLEALIRQLKQENWLSEENVKIIENHFTTYEVTMI

SEQ ID NO: 88282 - protein, 55 aa, Homo sapiens
  Payload ID: 17678
  Gene Name: THAP domain containing 5
  ENSP ID: ENSP00000415841
MPRYCAAICCKNRRGRNNKDRKLSFYPFPLHDKERLEKWLKNMKRDSWVPRKRPF

SEQ ID NO: 88283 - protein, 222 aa, Homo sapiens
  Payload ID: 17679
  Gene Name: THAP domain containing 6
  Uniprot ID: Q8TBB0
  ENSP ID: ENSP00000309007
MVKCCSAIGCASRCLPNSKLKGLTFHVFPTDENIKRKWVLAMKRLDVNAAGIWEPKKGDVLCSRHFKKTDFDRSAPNIKLKPGVIPSIFDSPYHLQGKREKLHCRKNFTLKTVPATNYNHHLVGASSCIEEFQSQFIFEHSYSVMDSPKKLKHKLDHVIGELEDTKESLRNVLDREKRFQKSLRKTIRELKDECLISQETANRLDTFCWDCCQESIEQDYIS

SEQ ID NO: 88284 - protein, 180 aa, Homo sapiens
  Payload ID: 17679
  Gene Name: THAP domain containing 6
  Uniprot ID: Q8TBB0
  ENSP ID: ENSP00000370217
MVKCCSAIGCASRCLPNSKLKGLTFHVFPTDENIKRKWVLAMKRLDVNAAGIWEPKKGDVLCSRHFKKTDFDRSAPNIKLKPGVIPSIFDSPYHLQEHSYSVMDSPKKLKHKLDHVIGELEDTKESLRNVLDREKRFQKSLRKTIRELKDECLISQETANRLDTFCWDCCQESIEQDYIS

SEQ ID NO: 88285 - protein, 80 aa, Homo sapiens
  Payload ID: 17679
  Gene Name: THAP domain containing 6
  ENSP ID: ENSP00000422402
MVKCCSAIGCASRCLPNSKLKGLTFHVFPTDENIKRKWVLAMKRLDVNAAGIWEPKKGDVLCSRHFKKTDFDRSAPNIKL

SEQ ID NO: 88286 - protein, 222 aa, Homo sapiens; identical to SEQ ID NO: 88283
  Payload ID: 17679
  Gene Name: THAP domain containing 6
  Uniprot ID: Q8TBB0
  ENSP ID: ENSP00000423720

SEQ ID NO: 88287 - protein, 119 aa, Homo sapiens
  Payload ID: 17679
  Gene Name: THAP domain containing 6
  ENSP ID: ENSP00000424255
MKRLDVNAAGIWEPKKGDVLCSRHFKKTDFDRSAPNIKLKPGVIPSIFDSPYHLQGKREKLHCRKNFTLKTVPATNYNHHLVGASSCIEEFQSQFIFKHRKRKQEQEEEQKPRREKCIS

SEQ ID NO: 88288 - protein, 89 aa, Homo sapiens
  Payload ID: 17679
  Gene Name: THAP domain containing 6
  ENSP ID: ENSP00000424949
MKRLDVNAAGIWEPKKGDVLCSRHFKKTDFDRSAPNIKLKPGVIPSIFDSPYHLQISMFKRKCLFKAKNYFSVTIIANIYKVPIFIQST

SEQ ID NO: 88289 - protein, 32 aa, Homo sapiens
  Payload ID: 17679
  Gene Name: THAP domain containing 6
  ENSP ID: ENSP00000425646
MVKCCSAIGCASRCLPNSKLKGLTFHVFPTDE

SEQ ID NO: 88290 - protein, 77 aa, Homo sapiens
  Payload ID: 17679
  Gene Name: THAP domain containing 6
  ENSP ID: ENSP00000426581
MKRLDVNAAGIWEPKKGDVLCSRHFKKTDFDRSAPNIKLKPGVIPSIFDSPYHLQKHRKRKQEQEEEQKPRREKCIS

SEQ ID NO: 88291 - protein, 98 aa, Homo sapiens
  Payload ID: 17679
  Gene Name: THAP domain containing 6
  ENSP ID: ENSP00000426698
MKRLDVNAAGIWEPKKGDVLCSRHFKKTDFDRSAPNIKLKPGVIPSIFDSPYHLQISMFKRKCLFKAKNYFSVTIIANIYKGLTLSPRLMCSGTISSL

SEQ ID NO: 88292 - protein, 111 aa, Homo sapiens
  Payload ID: 17679
  Gene Name: THAP domain containing 6
  ENSP ID: ENSP00000426760
MKRLDVNAAGIWEPKKGDVLCSRHFKKTDFDRSAPNIKLKPGVIPSIFDSPYHLQGKREKLHCRKNFTLKTVPATNYNHHLVGASSCIEEFQSQFIFVSKLLAELMLILLR

SEQ ID NO: 88293 - protein, 160 aa, Homo sapiens
  Payload ID: 17679
  Gene Name: THAP domain containing 6
  Uniprot ID: Q8TBB0
  ENSP ID: ENSP00000427651
MVKCCSAIGCASRCLPNSKLKGLTFHVFPTDENIKRKWVLAMKRLDVNAAGIWEPKKGDVLCSRHFKKTDFDRSAPNIKLKPGVIPSIFDSPYHLQGKREKLHCRKNFTLKTVPATNYNHHLVGASSCIEEFQSQFIFKHRKRKQEQEEEQKPRREKCIS

SEQ ID NO: 88294 - protein, 309 aa, Homo sapiens
  Payload ID: 17680
  Gene Name: THAP domain containing 7
  Uniprot ID: Q9BT49
  ENSP ID: ENSP00000215742
MPRHCSAAGCCTRDTRETRNRGISFHRLPKKDNPRRGLWLANCQRLDPSGQGLWDPASEYIYFCSKHFEEDCFELVGISGYHRLKEGAVPTIFESFSKLRRTTKTKGHSYPPGPAEVSRLRRCRKRCSEGRGPTTPFSPPPPADVTCFPVEEASAPATLPASPAGRLEPGLSSPFSDLLGPLGAQADEAGCSAQPSPERQPSPLEPRPVSPSAYMLRLPPPAGAYIQNEHSYQVGSALLWKRRAEAALDALDKAQRQLQACKRREQRLRLRLTKLQQERAREKRAQADARQTLKEHVQDFAMQLSSSMA

SEQ ID NO: 88295 - protein, 309 aa, Homo sapiens; identical to SEQ ID NO: 88294
  Payload ID: 17680
  Gene Name: THAP domain containing 7
  Uniprot ID: Q9BT49
  ENSP ID: ENSP00000382084

SEQ ID NO: 88296 - protein, 274 aa, Homo sapiens
  Payload ID: 17681
  Gene Name: THAP domain containing 8
  Uniprot ID: Q8NA92
  ENSP ID: ENSP00000292894
MPKYCRAPNCSNTAGRLGADNRPVSFYKFPLKDGPRLQAWLQHMGCEHWVPSCHQHLCSEHFTPSCFQWRWGVRYLRPDAVPSIFSRGPPAKSQRRTRSTQKPVSPPPPLQKNTPLPQSPAIPVSGPVRLVVLGPTSGSPKTVATMLLTPLAPAPTPERSQPEVPAQQAQTGLGPVLGALQRRVRRLQRCQERHQAQLQALERLAQQLHGESLLARARRGLQRLTTAQTLGPEESQTFTIICGGPDIAMVLAQDPAPATVDAKPELLDTRIPSA

SEQ ID NO: 88297 - protein, 65 aa, Homo sapiens
  Payload ID: 17681
  Gene Name: THAP domain containing 8
  ENSP ID: ENSP00000429629
MPKYCRAPNCSNTAGRLGADNRPVSFYKVSGGPEAPRSQSRRRLPYRRIHPCPRALPSQSLAQCA

SEQ ID NO: 88298 - protein, 41 aa, Homo sapiens
  Payload ID: 17681
  Gene Name: THAP domain containing 8
  ENSP ID: ENSP00000475450
MPKYCRAPNCSNTAGRLGADNRPVPTEGWSPAAGLAAAHGL

SEQ ID NO: 88299 - protein, 903 aa, Homo sapiens
  Payload ID: 17682
  Gene Name: THAP domain containing 9
  Uniprot ID: Q9H5L6
  ENSP ID: ENSP00000305533
MTRSCSAVGCSTRDTVLSRERGLSFHQFPTDTIQRSKWIRAVNRVDPRSKKIWIPGPGAILCSKHFQESDFESYGIRRKLKKGAVPSVSLYKIPQGVHLKGKARQKILKQPLPDNSQEVATEDHNYSLKTPLTIGAEKLAEVQQMLQVSKKRLISVKNYRMIKKRKGLRLIDALVEEKLLSEETECLLRAQFSDFKWELYNWRETDEYSAEMKQFACTLYLCSSKVYDYVRKILKLPHSSILRTWLSKCQPSPGFNSNIFSFLQRRVENGDQLYQYCSLLIKSMPLKQQLQWDPSSHSLQGFMDFGLGKLDADETPLASETVLLMAVGIFGHWRTPLGYFFVNRASGYLQAQLLRLTIGKLSDIGITVLAVTSDATAHSVQMAKALGIHIDGDDMKCTFQHPSSSSQQIAYFFDSCHLLRLIRNAFQNFQSIQFINGIAHWQHLVELVALEEQELSNMERIPSTLANLKNHVLKVNSATQLFSESVASALEYLLSLDLPPFQNCIGTIHFLRLINNLFDIFNSRNCYGKGLKGPLLPETYSKINHVLIEAKTIFVTLSDTSNNQIIKGKQKLGFLGFLLNAESLKWLYQNYVFPKVMPFPYLLTYKFSHDHLELFLKMLRQVLVTSSSPTCMAFQKAYYNLETRYKFQDEVFLSKVSIFDISIARRKDLALWTVQRQYGVSVTKTVFHEEGICQDWSHCSLSEALLDLSDHRRNLICYAGYVANKLSALLTCEDCITALYASDLKASKIGSLLFVKKKNGLHFPSESLCRVINICERVVRTHSRMAIFELVSKQRELYLQQKILCELSGHINLFVDVNKHLFDGEVCAINHFVKLLKDIIICFLNIRAKNVAQNPLKHHSERTDMKTLSRKHWSSVQDYKCSSFANTSSKFRHLLSNDGYPFK

SEQ ID NO: 88300 - protein, 30 aa, Homo sapiens
  Payload ID: 17682
  Gene Name: THAP domain containing 9
  ENSP ID: ENSP00000423622
MTRSCSAVGCSTRDTVLSRERGLSFHHVYL

SEQ ID NO: 88301 - protein, 121 aa, Homo sapiens
  Payload ID: 17682
  Gene Name: THAP domain containing 9
  ENSP ID: ENSP00000424001
SLKTPLTIGAEKLAEVQQMLQVSKKRLISVKNYRMIKKRKGLRLIDALVEEKLLSEETECLLRAQFSDFKWELYNWRETDEYSAEMKQFACTLYLCSSKVYDYVRKILKLPHSSILRTSGQ

SEQ ID NO: 88302 - protein, 102 aa, Homo sapiens
  Payload ID: 17682
  Gene Name: THAP domain containing 9
  ENSP ID: ENSP00000425503
MTRSCSAVGCSTRDTVLSRERGLSFHQFPTDTIQRSKWIRAVNRVDPRSKKIWIPGPGAILCSKHFQESDFESYGIRRKLKKGAVPSVSLYKVFKYSSRCTS

SEQ ID NO: 88303 - protein, 102 aa, Homo sapiens
  Payload ID: 17682
  Gene Name: THAP domain containing 9
  ENSP ID: ENSP00000425966
MTRSCSAVGCSTRDTVLSRERGLSFHQFPTDTIQRSKWIRAVNRVDPRSKKIWIPGPGAILCSKHFQESDFESYGIRRKLKKGAVPSVSLYKMRTQGIVELM

SEQ ID NO: 88304 - protein, 109 aa, Homo sapiens
  Payload ID: 17682
  Gene Name: THAP domain containing 9
  ENSP ID: ENSP00000426750
MTRSCSAVGCSTRDTVLSRERGLSFHQFPTDTIQRSKWIRAVNRVDPRSKKIWIPGPGAILCSKHFQESDFESYGIRRKLKKGAVPSVSLYKVFKYEDTRDCRAYVTAN

SEQ ID NO: 88305 - protein, 213 aa, Homo sapiens
  Payload ID: 17683
  Gene Name: THAP domain containing, apoptosis associated protein 1
  Uniprot ID: Q9NVV9
  ENSP ID: ENSP00000254250
MVQSCSAYGCKNRYDKDKPVSFHKFPLTRPSLCKEWEAAVRRKNFKPTKYSSICSEHFTPDCFKRECNNKLLKENAVPTIFLCTEPHDKKEDLLEPQEQLPPPPLPPPVSQVDAAIGLLMPPLQTPVNLSVFCDHNYTVEDTMHQRKRIHQLEQQVEKLRKKLKTAQQRCRRQERQLEKLKEVVHFQKEKDDVSERGYVILPNDYFEIVEVPA

SEQ ID NO: 88306 - protein, 53 aa, Homo sapiens
  Payload ID: 17683
  Gene Name: THAP domain containing, apoptosis associated protein 1
  Uniprot ID: Q9NVV9
  ENSP ID: ENSP00000344966
MVQSCSAYGCKNRYDKDKPVSFHKKKIFWSHRNSFPHLLYRLLFPRLMLLLDY

SEQ ID NO: 88307 - protein, 118 aa, Homo sapiens
  Payload ID: 17683
  Gene Name: THAP domain containing, apoptosis associated protein 1
  ENSP ID: ENSP00000433912
MVQSCSAYGCKNRYDKDKPVSFHKFPLTRPSLCKEWEAAVRRKNFKPTKYSSICSEHFTPDCFKRECNNKLLKENAVPTIFLCTEPHDKTPVNLSVFCDHNYTVEDTMHQRKRIHQLE

SEQ ID NO: 88308 - protein, 228 aa, Homo sapiens
  Payload ID: 17684
  Gene Name: THAP domain containing, apoptosis associated protein 2
  Uniprot ID: Q9H0W7
  ENSP ID: ENSP00000310796
MPTNCAAAGCATTYNKHINISFHRFPLDPKRRKEWVRLVRRKNFVPGKHTFLCSKHFEASCFDLTGQTRRLKMDAVPTIFDFCTHIKSMKLKSRNLLKKNNSCSPAGPSNLKSNISSQQVLLEHSYAFRNPMEAKKRIIKLEKEIASLRRKMKTCLQKERRATRRWIKATCLVKNLEANSVLPKGTSEHMLPTALSSLPLEDFKILEQDQQDKTLLSLNLKQTKSTFI

SEQ ID NO: 88309 - protein, 101 aa, Homo sapiens
  Payload ID: 17684
  Gene Name: THAP domain containing, apoptosis associated protein 2
  ENSP ID: ENSP00000446986
MDAVPTIFDFCTHIKSMKLKSRNLLKKNNSCSPAGPSNLKSNISSQQVLLEHSYAFRNPMEAKKRIIKLEKEIASLRRKMKTCLQKERRATRRWIKATCLV

SEQ ID NO: 88310 - protein, 110 aa, Homo sapiens
  Payload ID: 17684
  Gene Name: THAP domain containing, apoptosis associated protein 2
  ENSP ID: ENSP00000448904
MDAVPTIFDFCTHIKSMKLKSRNLLKKNNSCSPAGPSNLKSNISSQQVLLEHSYAFRNPMEAKKRIIKLEKEIASLRRKMKTCLQKERRATRRWIKATCLVKNLEANSVL

SEQ ID NO: 88311 - protein, 52 aa, Homo sapiens
  Payload ID: 17684
  Gene Name: THAP domain containing, apoptosis associated protein 2
  ENSP ID: ENSP00000449826
MPTNCAAAGCATTYNKHINISFHRPGLDMNDAVREKEIFPISNHRKSLLCSR

SEQ ID NO: 88312 - protein, 239 aa, Homo sapiens
  Payload ID: 17685
  Gene Name: THAP domain containing, apoptosis associated protein 3
  Uniprot ID: Q8WTV1
  ENSP ID: ENSP00000054650
MPKSCAARQCCNRYSSRRKQLTFHRFPFSRPELLKEWVLNIGRGNFKPKQHTVICSEHFRPECFSAFGNRKNLKHNAVPTVFAFQDPTQQVRENTDPASERGNASSSQKEKVLPEAGAGEDSPGRNMDTALEELQLPPNAEGHVKQVSPRRPQATEAVGRPTGPAGLRRTPNKQPSDHSYALLDLDSLKKKLFLTLKENEKLRKRLQAQRLVMRRMSSRLRACKGHQGLQARLGPEQQS

SEQ ID NO: 88313 - protein, 238 aa, Homo sapiens
  Payload ID: 17685
  Gene Name: THAP domain containing, apoptosis associated protein 3
  Uniprot ID: Q8WTV1
  ENSP ID: ENSP00000311537
MPKSCAARQCCNRYSSRRKQLTFHRFPFSRPELLKEWVLNIGRGNFKPKQHTVICSEHFRPECFSAFGNRKNLKHNAVPTVFAFQDPTQVRENTDPASERGNASSSQKEKVLPEAGAGEDSPGRNMDTALEELQLPPNAEGHVKQVSPRRPQATEAVGRPTGPAGLRRTPNKQPSDHSYALLDLDSLKKKLFLTLKENEKLRKRLQAQRLVMRRMSSRLRACKGHQGLQARLGPEQQS

SEQ ID NO: 88314 - protein, 175 aa, Homo sapiens
  Payload ID: 17685
  Gene Name: THAP domain containing, apoptosis associated protein 3
  Uniprot ID: Q8WTV1
  ENSP ID: ENSP00000366854
MPKSCAARQCCNRYSSRRKQLTFHRFPFSRPELLKEWVLNIGRGNFKPKQHTVICSEHFRPECFSAFGNRKNLKHNAVPTVFAFQDPTQQVRENTDPASERGNASSSQKEKTSPCRSQVLPEAGAGEDSPGRNMDTALEELQLPPNAEGHVKQAMLFNVENGTPASREALWLSEE

SEQ ID NO: 88315 - protein, 124 aa, Homo sapiens
  Payload ID: 17685
  Gene Name: THAP domain containing, apoptosis associated protein 3
  ENSP ID: ENSP00000464954
KSCAARQCCNRYSSRRKQLTFHRFPFSRPELLKEWVLNIGRGNFKPKQHTVICSEHFRPECFSAFGNRKNLKHNAVPTVFAFQDPTQNLHEGRGCLPCFRPHTQDAAWHSPGARAGEGEHRPCQ

SEQ ID NO: 88316 - protein, 231 aa, Homo sapiens
  Payload ID: 17685
  Gene Name: THAP domain containing, apoptosis associated protein 3
  ENSP ID: ENSP00000473646
  MOD_RES (1)..(1): Any amino acid
XCAARQCCNRYSSRRKQLTFHRFPFSRPELLKEWVLNIGRGNFKPKQHTVICSEHFRPECFSAFGNRKNLKHNAVPTVFAFQDPTQQVRENTDPASERGNASSSQKEKVLPEAGAGEDSPGRNMDTALEELQLPPNAEGHVKQVRLSAKVVCGWTQDDLLQTKWKPVSTHHETCVAEAGCAAWVSELPSQILHHGVGTSGFWGSSPECLAALGLCCVRVWWPAHHGPPSCW

SEQ ID NO: 88317 - protein, 355 aa, Homo sapiens
  Payload ID: 17686
  Gene Name: theg spermatid protein
  Uniprot ID: Q9P2T0
  ENSP ID: ENSP00000264820
MGDSRRRSLGNQPSSEAAGRSEREQDGDPRGLQSSVYESRRVTDPERQDLDNAELGPEDPEEELPPEEVAGEEFPETLDPKEALSELERVLDKDLEEDIPEISRLSISQKLPSTTMTKARKRRRRRRLMELAEPKINWQVLKDRPSVYWTERFLEDTTLTITVPAVSRRVEELSRPKRFYLEYYNNNRTTPVWPIPRSSLEYRASSRLKELAAPKIRDNFWSMPMSEVSQVSRAAQMAVPSSRILQLSKPKAPATLLEEWDPVPKPKPHVSDHNRLLHLARPKAQSDKCVPDRDPRWEVLDVTKKVVASPRIISLAKPKVRKGLNEGYDRRPLASMSLPPPKASPEKCDQPRPGL

SEQ ID NO: 88318 - protein, 379 aa, Homo sapiens
  Payload ID: 17686
  Gene Name: theg spermatid protein
  Uniprot ID: Q9P2T0
  ENSP ID: ENSP00000340088
MGDSRRRSLGNQPSSEAAGRSEREQDGDPRGLQSSVYESRRVTDPERQDLDNAELGPEDPEEELPPEEVAGEEFPETLDPKEALSELERVLDKDLEEDIPEISRLSISQKLPSTTMTKARKRRRRRRLMELAEPKINWQVLKDRKGRCGKGYAWISPCKMSLHFCLCWPSVYWTERFLEDTTLTITVPAVSRRVEELSRPKRFYLEYYNNNRTTPVWPIPRSSLEYRASSRLKELAAPKIRDNFWSMPMSEVSQVSRAAQMAVPSSRILQLSKPKAPATLLEEWDPVPKPKPHVSDHNRLLHLARPKAQSDKCVPDRDPRWEVLDVTKKVVASPRIISLAKPKVRKGLNEGYDRRPLASMSLPPPKASPEKCDQPRPGL

SEQ ID NO: 88319 - protein, 137 aa, Homo sapiens
  Payload ID: 17686
  Gene Name: theg spermatid protein
  ENSP ID: ENSP00000475782
MTKARKRRRRRRLMELAEPKINWQVLKDRCPRYPGQPKWQSPARGSSSCQSRRPQPPSWKSGTPCQNPSHMCQTITASFTWPGPKLSRTSAFLTEILAGRCWMSPRRWWPAPGSSPWPSPKCARASTRDTTGVPSPL

SEQ ID NO: 88320 - protein, 465 aa, Homo sapiens
  Payload ID: 17687
  Gene Name: theg spermatid protein-like
  Uniprot ID: P0DJG4
  ENSP ID: ENSP00000456850
MENQEFLSSSAPSEVTDGQVSTEISTCSEVFQKPIVLRILDTHRELEESEDPEKHENPEEPEEVREQDQRDESEECDEPHESYEPHAPYAPHKPRDSYAPYELHGPHAAPKLLKAREPRQLRHTREPRKSREAKETELLPSAAVMISPSLITRAPPRPQLSFLGANPVSCDFVRKCFSSRKRTPNLSKPKKQWGTPDRKLFWGNQDPIRPVSQGALKAQLTKRLENLAQPKEVSCHYVPNRAQYYHSCGRESVIWEITPPALFRQPSKRIQRLSQPNGFKRQCLLNRPFSDNSARDSLRISDPSPRILQLSVAKGTDPNYHPSKKMQTKISLSTLSAIATPRIIELAHPRIKLEGLCYERQRSELPIRPVPPAAMIAKPSPRTIALAKSKSVHQDYLPDRDAHWPVSYATTHSKASPRIQELANPNKRAPVRIVYYDPDVFKTKPAALKAQCSQRIWELSQPLTR

SEQ ID NO: 88321 - protein, 243 aa, Homo sapiens [sequence omitted]

SEQ ID NO: 88322 - protein, 121 aa, Homo sapiens
  Payload ID: 17688
  Gene Name: thiamin pyrophosphokinase 1
  ENSP ID: ENSP00000367338
MEHAFTPLEPLLSTGNLKYCLVILNQPLDNYFRHLWNKALLRACADGGANRLYDITEGERESFLPEFINGDFDSIRPEVREYYATKGCELISTPDQDHTDFTKCLKMLQKKIEEKDLKKKQ

SEQ ID NO: 88323 - protein, 194 aa, Homo sapiens
  Payload ID: 17688
  Gene Name: thiamin pyrophosphokinase 1
  ENSP ID: ENSP00000367339
MEHAFTPLEPLLSTGNLKYCLVILNQPLDNYFRHLWNKALLRACADGGANRLYDITEGERESFLPEFINGDFDSIRPEVREYYATKGCELISTPDQDHTDFTKCLKMLQKKIEEKDLKGKHRLHVDTGMEGDWCGLIPVGQPCMQVTTTGLKWNLTNDVLAFGTLVSTSNTYDGSGVVTVETDHPLLWTMAIKS

SEQ ID NO: 88324 - protein, 189 aa, Homo sapiens
  Payload ID: 17688
  Gene Name: thiamin pyrophosphokinase 1
  ENSP ID: ENSP00000438813
MEVPTAYMISPKEREKASNLKLSSRPPATSHLIRTPKDTHYCGASKGLGNSFIGNESFLPEFINGDFDSIRPEVREYYATKGCELISTPDQDHTDFTKCLKMLQKKIEEKDLKGKHRLHVDTGMEGDWCGLIPVGQPCMQVTTTGLKWNLTNDVLAFGTLVSTSNTYDGSGVVTVETDHPLLWTMAIKS

SEQ ID NO: 88325 - protein, 166 aa, Homo sapiens
  Payload ID: 17688
  Gene Name: thiamin pyrophosphokinase 1
  ENSP ID: ENSP00000448655
MEHAFTPLEPLLSTGNLKYCLVILNQPLDNYFRHLWNKALLRACADGGANRLYDITEGERESFLPEFINGDFDSIRPEVREYYATKGCELISTPDQDHTDFTKCLKMLQKKIEEKDLKVDVIVTLGGLAGRFDQIMASVNTLFQATHITPFPIIIIQEESLIYLLQ

SEQ ID NO: 88326 - protein, 79 aa, Homo sapiens
  Payload ID: 17688
  Gene Name: thiamin pyrophosphokinase 1
  ENSP ID: ENSP00000449909
MEVPTAYMISPKEREKDSSDSILQDLTWTMCEKALNLQLETLLEAPSHQSSHQDTERHPLLWSFQGSWQLFYRKRELFA

SEQ ID NO: 88327 - protein, 42 aa, Homo sapiens
  Payload ID: 17688
  Gene Name: thiamin pyrophosphokinase 1
  ENSP ID: ENSP00000450028
MEVPTAYMISPKEREKAFCLNSSMETLILLGLKSENTMLLRC

SEQ ID NO: 88328 - protein, 230 aa, Homo sapiens
  Payload ID: 17689
  Gene Name: thiamine triphosphatase
  Uniprot ID: Q9BU02
  ENSP ID: ENSP00000288014
MAQGLIEVERKFLPGPGTEERLQELGGTLEYRVTFRDTYYDTPELSLMQADHWLRRREDSGWELKCPGAAGVLGPHTEYKELTAEPTIVAQLCKVLRADGLGAGDVAAVLGPLGLQEVASFVTKRSAWKLVLLGADEEEPQLRVDLDTADFGYAVGEVEALVHEEAEVPTALEKIHRLSSMLGVPAQETAPAKLIVYLQRFRPQDYQRLLEVNSSRERPQETEDPDHCLG

SEQ ID NO: 88329 - protein, 230 aa, Homo sapiens; identical to SEQ ID NO: 88328
  Payload ID: 17689
  Gene Name: thiamine triphosphatase
  Uniprot ID: Q9BU02
  ENSP ID: ENSP00000384580

SEQ ID NO: 88330 - protein, 105 aa, Homo sapiens
  Payload ID: 17689
  Gene Name: thiamine triphosphatase
  Uniprot ID: Q9BU02
  ENSP ID: ENSP00000450459
MAQGLIEVERKFLPGPGTEERLQELGGTLEYRVTFRDTYYDTPELSLMQADHWLRRREDSGWELKCPGAAGVLGPHTEYKELTAEPTIVAQLCKVCLHRRQHQPS

SEQ ID NO: 88331 - protein, 105 aa, Homo sapiens; identical to SEQ ID NO: 88330
  Payload ID: 17689
  Gene Name: thiamine triphosphatase
  Uniprot ID: Q9BU02
  ENSP ID: ENSP00000451835

SEQ ID NO: 88332 - protein, 60 aa, Homo sapiens
  Payload ID: 17689
  Gene Name: thiamine triphosphatase
  ENSP ID: ENSP00000452164
  MOD_RES (1)..(1): Any amino acid
XLTAEPTIVAQLCVPAQETAPAKLIVYLQRFRPQDYQRLLEVNSSRERPQETEDPDHCLG

SEQ ID NO: 88333 - protein, 122 aa, Homo sapiens
  Payload ID: 17689
  Gene Name: thiamine triphosphatase
  ENSP ID: ENSP00000452281
MAQGLIEVERKFLPGPGTEERLQELGGTLEYRVTFRDTYYDTPELSLMQADHWLRRREDSGWELKCPGAAGVLGPHTEYKELTAEPTIVAQLCKVLRADGLGAGDVAAVLGPLGLQEVASFV

SEQ ID NO: 88334 - protein, 140 aa, Homo sapiens
  Payload ID: 17689
  Gene Name: thiamine triphosphatase
  ENSP ID: ENSP00000452465
MAQGLIEVERKFLPGPGTEERLQELGGTLEYRVTFRDTYYDTPELSLMQADHWLRRREDSGWELKCPGAAGVLGPHTEYKELTAEPTIVAQLCVPAQETAPAKLIVYLQRFRPQDYQRLLEVNSSRERPQETEDPDHCLG

SEQ ID NO: 88335 - protein, 689 aa, Homo sapiens
  Payload ID: 17690
  Gene Name: thimet oligopeptidase 1
  Uniprot ID: P52888
  ENSP ID: ENSP00000304467
MKPPAACAGDMADAASPCSVVNDLRWDLSAQQIEERTRELIEQTKRVYDQVGTQEFEDVSYESTLKALADVEVTYTVQRNILDFPQHVSPSKDIRTASTEADKKLSEFDVEMSMREDVYQRIVWLQEKVQKDSLRPEAARYLERLIKLGRRNGLHLPRETQENIKRIKKKLSLLCIDFNKNLNEDTTFLPFTLQELGGLPEDFLNSLEKMEDGKLKVTLKYPHYFPLLKKCHVPETRRKVEEAFNCRCKEENCAILKELVTLRAQKSRLLGFHTHADYVLEMNMAKTSQTVATFLDELAQKLKPLGEQERAVILELKRAECERRGLPFDGRIRAWDMRYYMNQVEETRYCVDQNLLKEYFPVQVVTHGLLGIYQELLGLAFHHEEGASAWHEDVRLYTARDAASGEVVGKFYLDLYPREGKYGHAACFGLQPGCLRQDGSRQIAIAAMVANFTKPTADAPSLLQHDEVETYFHEFGHVMHQLCSQAEFAMFSGTHVERDFVEAPSQMLENWVWEQEPLLRMSRHYRTGSAVPRELLEKLIESRQANTGLFNLRQIVLAKVDQALHTQTDADPAEEYARLCQEILGVPATPGTNMPATFGHLAGGYDAQYYGYLWSEVYSMDMFHTRFKQEGVLNSKVGMDYRSCILRPGGSEDASAMLRRFLGRDPKQDAFLLSKGLQVGGCEPEPQVC

SEQ ID NO: 88336 - protein, 258 aa, Homo sapiens
  Payload ID: 17690
  Gene Name: thimet oligopeptidase 1
  Uniprot ID: P52888
  ENSP ID: ENSP00000378638
MFSGTHVERDFVEAPSQMLENWVWEQEPLLRMSRHYRTGSAVPRELLEKLIESRQANTGLFNLRQIVLAKVDQALHTQTDADPAEEYARLCQEILGVPATPGTNMPATFGHLAGGYDAQYYGYLWSEVYSMDMFHTRFKQEGVLNSKFPHYEVRPLRHVSLCLPLTWCDPGSGQPPESLTRNRWLPALRAGPALPGCNIALGSLQVGMDYRSCILRPGGSEDASAMLRRFLGRDPKQDAFLLSKGLQVGGCEPEPQVC

SEQ ID NO: 88337 - protein, 169 aa, Homo sapiens
  Payload ID: 17690
  Gene Name: thimet oligopeptidase 1
  ENSP ID: ENSP00000464786
MFSGTHVERDFVEAPSQMLENWVWEQEPLLRMSRHYRTGSAVPRELLEKLIESRQANTGLFNLRQIVLAKVDQALHTQTDADPAEEYARLCQEILGVPATPGTNMPATFGHLAGGYDAQYYGYLWSEVYSMDMFHTRFKQEGVLNSKVGMDYRSCILRPGGSEDASAML

SEQ ID NO: 88338 - protein, 176 aa, Homo sapiens
  Payload ID: 17690
  Gene Name: thimet oligopeptidase 1
  ENSP ID: ENSP00000465545
MADAASPCSVVNDLRWDLSAQQIEERTRELIEQTKRVYDQVGTQEFEDVSYESTLKALADVEVTYTVQRNILDFPQHVSPSKDIRTASTEADKKLSEFDVEMSMREDVYQRIVWLQEKVQKDSLRPEAARYLERLIKLGRRNGLHLPRETQENIKRIKKKLSLLCIDFNKNLNEDT

SEQ ID NO: 88339 - protein, 260 aa, Homo sapiens
  Payload ID: 17690
  Gene Name: thimet oligopeptidase 1
  ENSP ID: ENSP00000465855
  MOD_RES (1)..(1): Any amino acid
XEGKYGHAACFGLQPGCLRQDGSRQIAIAAMVANFTKPTADAPSLLQHDEVETYFHEFGHVMHQLCSQAEFAMFSGTHVERDFVEAPSQMLENWVWEQEPLLRMSRHYRTGSAVPRELLEKLIESRQANTGLFNLRQIVLAKVDQALHTQTDADPAEEYARLCQEILGVPATPGGYDAQYYGYLWSEVYSMDMFHTRFKQEGVLNSKVGMDYRSCILRPGGSEDASAMLRRFLGRDPKQDAFLLSKGLQVGGCEPEPQVC

SEQ ID NO: 88340 - protein, 216 aa, Homo sapiens
  Payload ID: 17690
  Gene Name: thimet oligopeptidase 1
  ENSP ID: ENSP00000465895
ADAPSLLQHDEVETYFHEFGHVMHQLCSQAEFAMFSGTHVERDFVEAPSQMLENWVWEQEPLLRMSRHYRTGSAVPRELLEKLIESRQANTGLFNLRQIVLAKVDQALHTQTDADPAEEYARLCQEILGVPATPGTNMPATFGHLAGGYDAQYYGYLWSEVYSMDMFHTRFKQEGVLNSKEAPHWPLRPRAVSAGSSVSSHTSPSGICVIGLRAMG

SEQ ID NO: 88341 - protein, 204 aa, Homo sapiens
  Payload ID: 17690
  Gene Name: thimet oligopeptidase 1
  ENSP ID: ENSP00000466653
  MOD_RES (1)..(1): Any amino acid
XGLAFHHEEGASAWHEDVRLYTARDAASGEVVGKFYLDLYPREGKYGHAACFGLQPGCLRQDGSRQIAIAAMVANFTKPTADAPSLLQHDEVETYFHEFGHVMHQLCSQAEFAMFSGTHVERDFVEAPSQMLENWVWEQEPLLRMSRHYRTGSAVPRELLEKLIESRQANTGLFNLRQIGLVFVALTRLLSGKRPLSGDGSSLK

SEQ ID NO: 88342 - protein, 568 aa, Homo sapiens
  Payload ID: 17690
  Gene Name: thimet oligopeptidase 1
  ENSP ID: ENSP00000467226
MFLFQEKVQKDSLRPEAARYLERLIKLGRRNGLHLPRETQENIKRIKKKLSLLCIDFNKNLNEDTTFLPFTLQELGGLPEDFLNSLEKMEDGKLKVTLKYPHYFPLLKKCHVPETRRKVEEAFNCRCKEENCAILKELVTLRAQKSRLLGFHTHADYVLEMNMAKTSQTVATFLDELAQKLKPLGEQERAVILELKRAECERRGLPFDGRIRAWDMRYYMNQVEETRYCVDQNLLKEYFPVQVVTHGLLGIYQELLGLAFHHEEGASAWHEDVRLYTARDAASGEVVGKFYLDLYPREGKYGHAACFGLQPGCLRQDGSRQIAIAAMVANFTKPTADAPSLLQHDEVETYFHEFGHVMHQLCSQAEFAMFSGTHVERDFVEAPSQMLENWVWEQEPLLRMSRHYRTGSAVPRELLEKLIESRQANTGLFNLRQIVLAKVDQALHTQTDADPAEEYARLCQEILGVPATPGTNMPATFGHLAGGYDAQYYGYLWSEVYSMDMFHTRFKQEGVLNSKVGMDYRSCILRPGGSEDASAMLRRFLGRDPKQDAFLLSKGLQVGGCEPEPQVC

SEQ ID NO: 88343 - protein, 240 aa, Homo sapiens
  Payload ID: 17691
  Gene Name: thioesterase superfamily member 4
  Uniprot ID: Q5T1C6
  ENSP ID: ENSP00000357804
MLRSCAARLRTLGALCLPPVGRRLPGSEPRPELRSFSSEEVILKDCSVPNPSWNKDLRLLFDQFMKKCEDGSWKRLPSYKRTPTEWIQDFKTHFLDPKLMKEEQMSQAQLFTRSFDDGLGFEYVMFYNDIEKRMVCLFQGGPYLEGPPGFIHGGAIATMIDATVGMCAMMAGGIVMTANLNINYKRPIPLCSVVMINSQLDKVEGRKFFVSCNVQSVDEKTLYSEATSLFIKLNPAKSLT

SEQ ID NO: 88344 - protein, 107 aa, Homo sapiens
  Payload ID: 17691
  Gene Name: thioesterase superfamily member 4
  ENSP ID: ENSP00000431288
MLRSCAARLRTLGALCLPPVGRRLPGSEPRPELRSFSSEEVILKDCSVPNPSWNKDLRLLFDQFMKKCEDGSWKRLPSYKRTPTEWIQDFKTHFLAWLMAGRCGSRL

SEQ ID NO: 88345 - protein, 110 aa, Homo sapiens
  Payload ID: 17691
  Gene Name: thioesterase superfamily member 4
  ENSP ID: ENSP00000433304
MLRSCAARLRTLGALCLPPVGRRLPGSEPRPELRSFSSEEVILKDCSVPNPSWNKDLRLLFDQFMKKCEDGSWKRLPSYKRTPTEWIQDFKTHFLGRNSHFPINISEHQI

SEQ ID NO: 88346 - protein, 247 aa, Homo sapiens
  Payload ID: 17692
  Gene Name: thioesterase superfamily member 5
  Uniprot ID: Q8N1Q8
  ENSP ID: ENSP00000357807
MIRRCFQVAARLGHHRGLLEAPRILPRLNPASAFGSSTDSMFSRFLPEKTDLKDYALPNASWCSDMLSLYQEFLEKTKSSGWIKLPSFKSNRDHIRGLKLPSGLAVSSDKGDCRIFTRCIQVEGQGFEYVIFFQPTQKKSVCLFQPGSYLEGPPGFAHGGSLAAMMDETFSKTAFLAGEGLFTLSLNIRFKNLIPVDSLVVMDVELDKIEDQKLYMSCIAHSRDQQTVYAKSSGVFLQLQLEEESPQ

SEQ ID NO: 88347 - protein, 119 aa, Homo sapiens
  Payload ID: 17692
  Gene Name: thioesterase superfamily member 5
  ENSP ID: ENSP00000406809
  MOD_RES (1)..(1): Any amino acid
XCIQVEGQGFEYVIFFQPTQKKSVCLFQPGSYLEGPPGFAHGGSLAAMMDETFSKTAFLAGEGLFTLSLNIRFKKCFPSAAVGRRVSPVTVTVPAGEPLPPLPASCLLPPLPASCLLPP

SEQ ID NO: 88348 - protein, 208 aa, Homo sapiens
  Payload ID: 17693
  Gene Name: thioesterase superfamily member 6
  Uniprot ID: Q8WUY1
  ENSP ID: ENSP00000338607
MLGLLVALLALGLAVFALLDVWYLVRLPCAVLRARLLQPRVRDLLAEQRFPGRVLPSDLDLLLHMNNARYLREADFARVAHLTRCGVLGALRELRAHTVLAASCARHRRSLRLLEPFEVRTRLLGWDDRAFYLEARFVSLRDGFVCALLRFRQHLLGTSPERVVQHLCQRRVEPPELPADLQHWISYNEASSQLLRMESGLSDVTKDQ

SEQ ID NO: 88349 - protein, 83 aa, Homo sapiens
  Payload ID: 17693
  Gene Name: thioesterase superfamily member 6
  ENSP ID: ENSP00000427970
  MOD_RES (1)..(1): Any amino acid
XDDRAFYLEARFVSLRDGFVCALLRFRQHLLGTSPERVVQHLCQRRVEPPELPADLQHWISYNEASSQLLRMESGLSDVTKDQ

SEQ ID NO: 88350 - protein, 245 aa, Homo sapiens
  Payload ID: 17694
  Gene Name: thiopurine S-methyltransferase
  Uniprot ID: P51580
  ENSP ID: ENSP00000312304
MDGTRTSLDIEEYSDTEVQKNQVLTLEEWQDKWVNGKTAFHQEQGHQLLKKHLDTFLKGKSGLRVFFPLCGKAVEMKWFADRGHSVVGVEISELGIQEFFTEQNLSYSEEPITEIPGTKVFKSSSGNISLYCCSIFDLPRTNIGKFDMIWDRGALVAINPGDRKCYADTMFSLLGKKFQYLLCVLSYDPTKHPGPPFYVPHAEIERLFGKICNIRCLEKVDAFEERHKSWGIDCLFEKLYLLTEK

SEQ ID NO: 88351 - protein, 85 aa, Homo sapiens
  Payload ID: 17695
  Gene Name: thioredoxin
  Uniprot ID: P10599
  ENSP ID: ENSP00000363639
MVKQIESKTAFQEALDAAGDKLVVVDFSATWCGPCKMIKPFFHDVASECEVKCMPTFQFFKKGQKVGEFSGANKEKLEATINELV

SEQ ID NO: 88352 - protein, 105 aa, Homo sapiens
  Payload ID: 17695
  Gene Name: thioredoxin
  Uniprot ID: P10599
  ENSP ID: ENSP00000363641
MVKQIESKTAFQEALDAAGDKLVVVDFSATWCGPCKMIKPFFHSLSEKYSNVIFLEVDVDDCQDVASECEVKCMPTFQFFKKGQKVGEFSGANKEKLEATINELV

SEQ ID NO: 88353 - protein, 166 aa, Homo sapiens
  Payload ID: 17696
  Gene Name: thioredoxin 2
  Uniprot ID: Q99757
  ENSP ID: ENSP00000216185
MAQRLLLRRFLASVISRKPSQGQWPPLTSRALQTPQCSPGGLTVTPNPARTIYTTRISLTTFNIQDGPDFQDRVVNSETPVVVDFHAQWCGPCKILGPRLEKMVAKQHGKVVMAKVDIDDHTDLAIEYEVSAVPTVLAMKNGDVVDKFVGIKDEDQLEAFLKKLIG

SEQ ID NO: 88354 - protein, 166 aa, Homo sapiens; identical to SEQ ID NO: 88353
  Payload ID: 17696
  Gene Name: thioredoxin 2
  Uniprot ID: Q99757
  ENSP ID: ENSP00000385393

SEQ ID NO: 88355 - protein, 146 aa, Homo sapiens
  Payload ID: 17696
  Gene Name: thioredoxin 2
  ENSP ID: ENSP00000409407
MAQRLLLRRFLASVISRKPSQGQWPPLTSRALQTPQCSPGGLTVTPNPARTIYTTRISLTTFNIQDGPDFQDRVVNSETPVVVDFHAQWCGPCKILGPRLEKMVAKQHGKVVMAKVDIDDHTDLAIEYEAGSLSPRLECSGTITAH

SEQ ID NO: 88356 - protein, 64 aa, Homo sapiens
  Payload ID: 17696
  Gene Name: thioredoxin 2
  ENSP ID: ENSP00000469160
MVAKQHGKVVMAKVDIDDHTDLAIEYEVSAVPTVLAMKNGDVVDKFVGIKDEDQLEAFLKKLIG

SEQ ID NO: 88357 - protein, 958 aa, Homo sapiens
  Payload ID: 17697
  Gene Name: thioredoxin domain containing 11
  Uniprot ID: Q6PKC3
  ENSP ID: ENSP00000283033
MSECGGRGGGSSSSEDAEDEGGGGGGPAGSDCLSSSPTLATASSAGRLRRGLRGAFLMARQRPELLCGAVALGCALLLALKFTCSRAKDVIIPAKPPVSFFSLRSPVLDLFQGQLDYAEYVRRDSEVVLLFFYAPWCGQSIAARAEIEQAASRLSDQVLFVAINCWWNQGKCRKQKHFFYFPVIYLYHRSFGPIEYKGPMSAVYIEKFVRRVMKPLLYIPSQSELLDFLSNYEPGVLGYFEFSGSPQPPGYLTFFTSALHSLKKDYLGTVRFGVITNKHLAKLVSLVHSGSVYLHRHFNTSLVFPREVLNYTAENICKWALENQETLFRWLRPHGGKSLLLNNELKKGPALFLFIPFNPLAESHPLIDEITEVALEYNNCHGDQVVERLLQHLRRVDAPVLESLALEVPAQLPDPPTITASPCCNTVVLPQWHSFSRTHNVCELCVNQTSGGMKPSSVSVPQCSFFEMAAALDSFYLKEQTFYHVASDSIECSNFLTSYSPFSYYTACCRTISRGVSGFIDSEQGVFEAPTVAFSSLEKKCEVDAPSSVPHIEENRYLFPEVDMTSTNFTGLSCRTNKTLNIYLLDSNLFWLYAERLGAPSSTQVKEFAAIVDVKEESHYILDPKQALMKLTLESFIQNFSVLYSPLKRHLIGSGSAQFPSQHLITEVTTDTFWEVVLQKQDVLLLYYAPWCGFCPSLNHIFIQLARNLPMDTFTVARIDVSQNDLPWEFMVDRLPTVLFFPCNRKDLSVKYPEDVPITLPNLLRFILHHSDPASSPQNVANSPTKECLQSEAVLQRGHISHLEREIQKLRAEISSLQRAQVQVESQLSSARRDEHRLRQQQRALEEQHSLLHAHSEQLQALYEQKTRELQELARKLQELADASENLLTENTWLKILVATMERKLEGRDGAESLAAQREVHPKQPEPSATPQLPGSSPPPANVSATLVSERNKENRTD

SEQ ID NO: 88358 - protein, 985 aa, Homo sapiens
  Payload ID: 17697
  Gene Name: thioredoxin domain containing 11
  Uniprot ID: Q6PKC3
  ENSP ID: ENSP00000349439
MSECGGRGGGSSSSEDAEDEGGGGGGPAGSDCLSSSPTLATASSAGRLRRGLRGAFLMARQRPELLCGAVALGCALLLALKFTCSRAKDVIIPAKPPVSFFSLRSPVLDLFQGQLDYAEYVRRDSEVVLLFFYAPWCGQSIAARAEIEQAASRLSDQVLFVAINCWWNQGKCRKQKHFFYFPVIYLYHRSFGPIEYKGPMSAVYIEKFVRRVMKPLLYIPSQSELLDFLSNYEPGVLGYFEFSGSPQPPGYLTFFTSALHSLKKALESTSSPRALVSFTGEWHLETKIYVLDYLGTVRFGVITNKHLAKLVSLVHSGSVYLHRHFNTSLVFPREVLNYTAENICKWALENQETLFRWLRPHGGKSLLLNNELKKGPALFLFIPFNPLAESHPLIDEITEVALEYNNCHGDQVVERLLQHLRRVDAPVLESLALEVPAQLPDPPTITASPCCNTVVLPQWHSFSRTHNVCELCVNQTSGGMKPSSVSVPQCSFFEMAAALDSFYLKEQTFYHVASDSIECSNFLTSYSPFSYYTACCRTISRGVSGFIDSEQGVFEAPTVAFSSLEKKCEVDAPSSVPHIEENRYLFPEVDMTSTNFTGLSCRTNKTLNIYLLDSNLFWLYAERLGAPSSTQVKEFAAIVDVKEESHYILDPKQALMKLTLESFIQNFSVLYSPLKRHLIGSGSAQFPSQHLITEVTTDTFWEVVLQKQDVLLLYYAPWCGFCPSLNHIFIQLARNLPMDTFTVARIDVSQNDLPWEFMVDRLPTVLFFPCNRKDLSVKYPEDVPITLPNLLRFILHHSDPASSPQNVANSPTKECLQSEAVLQRGHISHLEREIQKLRAEISSLQRAQVQVESQLSSARRDEHRLRQQQRALEEQHSLLHAHSEQLQALYEQKTRELQELARKLQELADASENLLTENTWLKILVATMERKLEGRDGAESLAAQREVHPKQPEPSATPQLPGSSPPPANVSATLVSERNKENRTD

SEQ ID NO: 88359 - protein, 205 aa, Homo sapiens
  Payload ID: 17697
  Gene Name: thioredoxin domain containing 11
  ENSP ID: ENSP00000458263
YVRRDSEVVLLFFYAPWCGQSIAARAEIEQAASRLSDQPGVLGYFEFSGSPQPPGYLTFFTSALHSLKKDYLGTVRFGVITNKHLAKLVSLVHSGSVYLHRHFNTSLVFPREVLNYTAENICKWALENQETLFRWLRPHGGKSLLLNNELKKGPALFLFIPFNPLAESHPLIDEITEVALEYNNCHGDQVVERLLQHLRRVDAPV

SEQ ID NO: 88360 - protein, 147 aa, Homo sapiens
  Payload ID: 17697
  Gene Name: thioredoxin domain containing 11
  ENSP ID: ENSP00000458687
RPELLCGAVALGCALLLALKFTCSRAKDVIIPAKPPVSFFSLRSPVLDLFQGQLDYAEYVRRDSEVVLLFFYAPWCGQSIAARAEIEQAASRLSDQVLFVAINCWWNQGKCRKQKHFFYFPVIYLYHRSLEYSGTLSSVAHPSLLVI

SEQ ID NO: 88361 - protein, 25 aa, Homo sapiens
  Payload ID: 17697
  Gene Name: thioredoxin domain containing 11
  ENSP ID: ENSP00000460058
  MOD_RES (1)..(1): Any amino acid
XYLYHRSLEYSGTLSSVAHPSLLVI

SEQ ID NO: 88362 - protein, 172 aa, Homo sapiens
  Payload ID: 17698
  Gene Name: thioredoxin domain containing 12 (endoplasmic reticulum)
  Uniprot ID: O95881
  ENSP ID: ENSP00000360688
METRPRLGATCLLGFSFLLLVISSDGHNGLGKGFGDHIHWRTLEDGKKEAAASGLPLMVIIHKSWCGACKALKPKFAESTEISELSHNFVMVNLEDEEEPKDEDFSPDGGYIPRILFLDPSGKVHPEIINENGNPSYKYFYVSAEQVVQGMKEAQERLTGDAFRKKHLEDEL

SEQ ID NO: 88363 - protein, 55 aa, Homo sapiens
  Payload ID: 17698
  Gene Name: thioredoxin domain containing 12 (endoplasmic reticulum)
  ENSP ID: ENSP00000476401
METRPRLGATCLLGFSFLLLVISSDGHNGLGKGFGDHIHWRTLEDGKKEAAARPY

SEQ ID NO: 88364 - protein, 56 aa, Homo sapiens
  Payload ID: 17698
  Gene Name: thioredoxin domain containing 12 (endoplasmic reticulum)
  ENSP ID: ENSP00000477120
METRPRLGATCLLGFSFLLLVISSDGHNGLGKGFGDHIHWRTLEDGKKEAAARIHV

SEQ ID NO: 88365 - protein, 360 aa, Homo sapiens
  Payload ID: 17699
  Gene Name: thioredoxin domain containing 15
  Uniprot ID: Q96J42
  ENSP ID: ENSP00000351157
MVPAAGRRPPRVMRLLGWWQVLLWVLGLPVRGVEVAEESGRLWSEEQPAHPLQVGAVYLGEEELLHDPMGQDRAAEEANAVLGLDTQGDHMVMLSVIPGEAEDKVSSEPSGVTCGAGGAEDSRCNVRESLFSLDGAGAHFPDREEEYYTEPEVAESDAAPTEDSNNTESLKSPKVNCEERNITGLENFTLKILNMSQDLMDFLNPNGSDCTLVLFYTPWCRFSASLAPHFNSLPRAFPALHFLALDASQHSSLSTRFGTVAVPNILLFQGAKPMARFNHTDRTLETLKIFIFNQTGIEAKKNVVVTQADQIGPLPSTLIKSVDWLLVFSLFFLISFIMYATIRTESIRWLIPGQEQEHVE

SEQ ID NO: 88366 - protein, 115 aa, Homo sapiens
  Payload ID: 17699
  Gene Name: thioredoxin domain containing 15
  ENSP ID: ENSP00000422832
  MOD_RES (1)..(1): Any amino acid
XLALDASQHSRFGTVAVPNILLFQGAKPMARFNHTDRTLETLKIFIFNQTGIEAKKNVVVTQADQIGPLPSTLIKSVDWLLVFSLFFLISFIMYATIRTESIRWLIPGQEQEHVE

SEQ ID NO: 88367 - protein, 344 aa, Homo sapiens
  Payload ID: 17699
  Gene Name: thioredoxin domain containing 15
  ENSP ID: ENSP00000423513
  MOD_RES (1)..(1): Any amino acid
XFPGVSWMEAGQQRVVEKVAEESGRLWSEEQPAHPLQVGAVYLGEEELLHDPMGQDRAAEEANAVLGLDTQGDHMVMLSVIPGEAEDKVSSEPSGVTCGAGGAEDSRCNVRESLFSLDGAGAHFPDREEEYYTEPEVAESDAAPTEDSNNTESLKSPKVNCEERNITGLENFTLKILNMSQDLMDFLNPNGSDCTLVLFYTPWCRFSASLAPHFNSLPRAFPALHFLALDASQHSSLSTRFGTVAVPNILLFQGAKPMARFNHTDRTLETLKIFIFNQTGIEAKKNVVVTQADQIGPLPSTLIKSVDWLLVFSLFFLISFIMYATIRTESIRWLIPGQEQEHVE

SEQ ID NO: 88368 - protein, 44 aa, Homo sapiens
  Payload ID: 17699
  Gene Name: thioredoxin domain containing 15
  ENSP ID: ENSP00000423609
MVPAAGRRPPRVMRLLGWWQVLLWVLGLPVRGVEGPYGFSEPKR

SEQ ID NO: 88369 - protein, 155 aa, Homo sapiens
  Payload ID: 17699
  Gene Name: thioredoxin domain containing 15
  ENSP ID: ENSP00000424220
MVPAAGRRPPRVMRLLGWWQVLLWVLGLPVRGVEEESGRLWSEEQPAHPLQVGAVYLGEEELLHDPMGQDRAAEEANAVLGLDTQGDHMVMLSVIPGEAEDKVSSEPSGVTCGAGGAEDSRCNVRESLFSLDGAGAHFPDREEEYYTEPEVAESD

SEQ ID NO: 88370 - protein, 179 aa, Homo sapiens
  Payload ID: 17699
  Gene Name: thioredoxin domain containing 15
  ENSP ID: ENSP00000424428
MKNRRETRETPGNPQLAVAEESGRLWSEEQPAHPLQVGAVYLGEEELLHDPMGQDRAAEEANAVLGLDTQGDHMVMLSVIPGEAEDKVSSEPSGVTCGAGGAEDSRCNVRESLFSLDGAGAHFPDREEEYYTEPEVAESDAAPTEDSNNTESLKSPKVNCEERNITGLENFTLKILNMS

SEQ ID NO: 88371 - protein, 44 aa, Homo sapiens
  Payload ID: 17699
  Gene Name: thioredoxin domain containing 15
  ENSP ID: ENSP00000424716
MVPAAGRRPPRVMRLLGWCCRGKWSLMVRGAACSPSPGGGCVPG

SEQ ID NO: 88372 - protein, 825 aa, Homo sapiens
  Payload ID: 17700
  Gene Name: thioredoxin domain containing 16
  Uniprot ID: Q9P2K2
  ENSP ID: ENSP00000281741
MFSGFNVFRVGISFVIMCIFYMPTVNSLPELSPQKYFSTLQPGKASLAYFCQADSPRTSVFLEELNEAVRPLQDYGISVAKVNCVKEEISRYCGKEKDLMKAYLFKGNILLREFPTDTLFDVNAIVAHVLFALLFSEVKYITNLEDLQNIENALKGKANIIFSYVRAIGIPEHRAVMEAAFVYGTTYQFVLTTEIALLESIGSEDVEYAHLYFFHCKLVLDLTQQCRRTLMEQPLTTLNIHLFIKTMKAPLLTEVAEDPQQVSTVHLQLGLPLVFIVSQQATYEADRRTAEWVAWRLLGKAGVLLLLRDSLEVNIPQDANVVFKRAEEGVPVEFLVLHDVDLIISHVENNMHIEEIQEDEDNDMEGPDIDVQDDEVAETVFRDRKRKLPLELTVELTEETFNATVMASDSIVLFYAGWQAVSMAFLQSYIDVAVKLKGTSTMLLTRINCADWSDVCTKQNVTEFPIIKMYKKGENPVSYAGMLGTEDLLKFIQLNRISYPVNITSIQEAEEYLSGELYKDLILYSSVSVLGLFSPTMKTAKEDFSEAGNYLKGYVITGIYSEEDVLLLSTKYAASLPALLLARHTEGKIESIPLASTHAQDIVQIITDALLEMFPEITVENLPSYFRLQKPLLILFSDGTVNPQYKKAILTLVKQKYLDSFTPCWLNLKNTPVGRGILRAYFDPLPPLPLLVLVNLHSGGQVFAFPSDQAIIEENLVLWLKKLEAGLENHITILPAQEWKPPLPAYDFLSMIDAATSQRGTRKVPKCMKETDVQENDKEQHEDKSAVRKEPIETLRIKHWNRSNWFKEAEKSFRRDKELGCSKVN

SEQ ID NO: 88373 - protein, 19 aa, Homo sapiens
  Payload ID: 17700
  Gene Name: thioredoxin domain containing 16
  ENSP ID: ENSP00000450839
MHIEEIQEDEDNDMEGPDI

SEQ ID NO: 88374 - protein, 107 aa, Homo sapiens
  Payload ID: 17700
  Gene Name: thioredoxin domain containing 16
  ENSP ID: ENSP00000451619
  MOD_RES (1)..(1): Any amino acid
XTMLLTRINCADWSDVCTKQNVTEFPIIKMYKKGENPVSYAGMLGTEDLLKFIQLNRISYPVNITSIQEAEEYLSGELYKDLILYSSVSVLGLFSPTMKTGRKKVND

SEQ ID NO: 88375 - protein, 123 aa, Homo sapiens
  Payload ID: 17701
  Gene Name: thioredoxin domain containing 17
  Uniprot ID: Q9BRA2
  ENSP ID: ENSP00000250101
MARYEEVSVSGFEEFHRAVEQHNGKTIFAYFTGSKDAGGKSWCPDCVQAEPVVREGLKHISEGCVFIYCQVGEKPYWKDPNNDFRKNLKVTAVPTLLKYGTPQKLVESECLQANLVEMLFSED

SEQ ID NO: 88376 - protein, 75 aa, Homo sapiens
  Payload ID: 17701
  Gene Name: thioredoxin domain containing 17
  ENSP ID: ENSP00000458157
MARYEEVSVSGFEEFHRAVEQHNGKTIFAYFTGSKDAGGKSWCPDCVQAEPVVREGLKHISEGCVFIYCQVGEKP

SEQ ID NO: 88377 - protein, 98 aa, Homo sapiens
  Payload ID: 17701
  Gene Name: thioredoxin domain containing 17
  ENSP ID: ENSP00000459868
MARYEEVSVSGFEEFHRAVEQHNAEPVVREGLKHISEGCVFIYCQVGEKPYWKDPNNDFRKNLKVTAVPTLLKYGTPQKLVESECLQANLVEMLFSED

SEQ ID NO: 88378 - protein, 80 aa, Homo sapiens
  Payload ID: 17701
  Gene Name: thioredoxin domain containing 17
  ENSP ID: ENSP00000460577
MARYEEVSVSGFEEFHRAVEQHNGKTIFAYFTGSKDAGGKSWCPDCVQAEPVVREGLKHISEGCVFIYCQVGEKPYLKNW

SEQ ID NO: 88379 - protein, 553 aa, Homo sapiens
  Payload ID: 17702
  Gene Name: thioredoxin domain containing 2 (spermatozoa)
  Uniprot ID: Q86VQ3
  ENSP ID: ENSP00000304908
MDVDKELGMESVKAGASGKPEMRLGTQEETSEGDANESSLLVLSSNVPLLALEFLEIAQAKEKAFLPMVSHTFHMRTEESDASQEGDDLPKSSANTSHPKQDDSPKSSEETIQPKEGDIPKAPEETIQSKKEDLPKSSEKAIQPKESNIPKSSAKPIQPKLGNIPKASVKPSQPKEGDIPKAPEETIQSKKEDLPKSSEEAIQPKEGDIPKSSAKPIQPKLGNIAKTSVKPSQPKESDIPKSPEETIQPKEGDIPKSSAKPIQPKLGNIPKASVKPSQPKEGDISKSPEEAIQPKEGDLPKSLEEAIQPKEGDIPKSPEEAIQPKEGDIPKSLEEAIQPKEGDIPKSPEETIQPKKGDIPKSPEEAIQPKEGDIPKSPKQAIQPKEGDIPKSLEEAIPPKEIDIPKSPEETIQPKEDDSPKSLEEATPSKEGDILKPEEETMEFPEGDKVKVILSKEDFEASLKEAGERLVAVDFSATWCGPCRTIRPFFHALSVKHEDVVFLEVDADNCEEVVRECAIMCVPTFQFYKKEEKVDELCGALKEKLEAVIAELK

SEQ ID NO: 88380 - protein, 486 aa, Homo sapiens
  Payload ID: 17702
  Gene Name: thioredoxin domain containing 2 (spermatozoa)
  Uniprot ID: Q86VQ3
  ENSP ID: ENSP00000350419
MVSHTFHMRTEESDASQEGDDLPKSSANTSHPKQDDSPKSSEETIQPKEGDIPKAPEETIQSKKEDLPKSSEKAIQPKESNIPKSSAKPIQPKLGNIPKASVKPSQPKEGDIPKAPEETIQSKKEDLPKSSEEAIQPKEGDIPKSSAKPIQPKLGNIAKTSVKPSQPKESDIPKSPEETIQPKEGDIPKSSAKPIQPKLGNIPKASVKPSQPKEGDISKSPEEAIQPKEGDLPKSLEEAIQPKEGDIPKSPEEAIQPKEGDIPKSLEEAIQPKEGDIPKSPEETIQPKKGDIPKSPEEAIQPKEGDIPKSPKQAIQPKEGDIPKSLEEAIPPKEIDIPKSPEETIQPKEDDSPKSLEEATPSKEGDILKPEEETMEFPEGDKVKVILSKEDFEASLKEAGERLVAVDFSATWCGPCRTIRPFFHALSVKHEDVVFLEVDADNCEEVVRECAIMCVPTFQFYKKEEKVDELCGALKEKLEAVIAELK

SEQ ID NO: 88381 - protein, 110 aa, Homo sapiens
  Payload ID: 17702
  Gene Name: thioredoxin domain containing 2 (spermatozoa)
  ENSP ID: ENSP00000437393
MVSHTFHMRTEESDASQEGDDLPKSSANTSHPKQDDSPKSSEETIQPKEGDIPKAPEETIQSKKEDLPKSSEKAIQPKESNIPKSSAKPIQPKLGNIPKASVKPSQPKEG

SEQ ID NO: 88382 - protein, 83 aa, Homo sapiens
  Payload ID: 17702
  Gene Name: thioredoxin domain containing 2 (spermatozoa)
  ENSP ID: ENSP00000464677
MVSHTFHMRTEESDASQEGDDLPKSSANTSHPKQDDSPKSSEETIQPKEGDIPKAPEETIQSKKEDLPKSSEKAIQPKESNIP

SEQ ID NO: 88383 - protein, 538 aa, Homo sapiens
  Payload ID: 17702
  Gene Name: thioredoxin domain containing 2 (spermatozoa)
  Uniprot ID: Q86VQ3
  ENSP ID: ENSP00000483261
MDVDKELGMESVKAGASGKPEMRLGTQEETSEGDANESSLLVLSSNVPLLALEFLEIAQAKEKAFLPMVSHTFHMRTEESDASQEGDDLPKSSANTSHPKQDDSPKSSEETIQPKEGDIPKAPEETIQSKKEDLPKSSEKAIQPKESNIPKSSAKPIQPKLGNIPKASVKPSQPKEGDIPKAPEETIQSKKEDLPKSSEEAIQPKEGDIPKSSAKPIQPKLGNIAKTSVKPSQPKESDIPKSPEETIQPKEGDIPKSSAKPIQPKLGNIPKASVKPSQPKEGDISKSPEEAIQPKEGDLPKSLEEAIQPKEGDIPKSLEEAIQPKEGDIPKSPEETIQPKKGDIPKSPEEAIQPKEGDIPKSPKQAIQPKEGDIPKSLEEAIPPKEIDIPKSPEETIQPKEDDSPKSLEEATPSKEGDILKPEEETMEFPEGDKVKVILSKEDFEASLKEAGERLVAVDFSATWCGPCRTIRPFFHALSVKHEDVVFLEVDADNCEEVVRECAIMCVPTFQFYKKEEKVDELCGALKEKLEAVIAELK

SEQ ID NO: 88384 - protein, 432 aa, Homo sapiens
  Payload ID: 17703
  Gene Name: thioredoxin domain containing 5 (endoplasmic reticulum)
  Uniprot ID: Q8NBS9
  ENSP ID: ENSP00000369081
MPARPGRLLPLLARPAALTALLLLLLGHGGGGRWGARAQEAAAAAADGPPAADGEDGQDPHSKHLYTADMFTHGIQSAAHFVMFFAPWCGHCQRLQPTWNDLGDKYNSMEDAKVYVAKVDCTAHSDVCSAQGVRGYPTLKLFKPGQEAVKYQGPRDFQTLENWMLQTLNEEPVTPEPEVEPPSAPELKQGLYELSASNFELHVAQGDHFIKFFAPWCGHCKALAPTWEQLALGLEHSETVKIGKVDCTQHYELCSGNQVRGYPTLLWFRDGKKVDQYKGKRDLESLREYVESQLQRTETGATETVTPSEAPVLAAEPEADKGTVLALTENNFDDTIAEGITFIKFYAPWCGHCKTLAPTWEELSKKEFPGLAGVKIAEVDCTAERNICSKYSVRGYPTLLLFRGGKKVSEHSGGRDLDSLHRFVLSQAKDEL

SEQ ID NO: 88385 - protein, 324 aa, Homo sapiens
  Payload ID: 17703
  Gene Name: thioredoxin domain containing 5 (endoplasmic reticulum)
  Uniprot ID: Q8NBS9
  ENSP ID: ENSP00000420784
MEDAKVYVAKVDCTAHSDVCSAQGVRGYPTLKLFKPGQEAVKYQGPRDFQTLENWMLQTLNEEPVTPEPEVEPPSAPELKQGLYELSASNFELHVAQGDHFIKFFAPWCGHCKALAPTWEQLALGLEHSETVKIGKVDCTQHYELCSGNQVRGYPTLLWFRDGKKVDQYKGKRDLESLREYVESQLQRTETGATETVTPSEAPVLAAEPEADKGTVLALTENNFDDTIAEGITFIKFYAPWCGHCKTLAPTWEELSKKEFPGLAGVKIAEVDCTAERNICSKYSVRGYPTLLLFRGGKKVSEHSGGRDLDSLHRFVLSQAKDEL

SEQ ID NO: 88386 - protein, 108 aa, Homo sapiens
  Payload ID: 17704
  Gene Name: thioredoxin domain containing 8 (spermatozoa)
  ENSP ID: ENSP00000363631
MVQIIKDTNEFKTFLTAAGHKLAVVQFSSKRCGPCKRMFPVFHELAETCHIKTIPTFQMFKKSQKGSISRPTPTSELHPHQKWTLDSSQANPSQTRANFRTLLKQLGK

SEQ ID NO: 88387 - protein, 115 aa, Homo sapiens
  Payload ID: 17704
  Gene Name: thioredoxin domain containing 8 (spermatozoa)
  Uniprot ID: Q6A555
  ENSP ID: ENSP00000363634
MVQIIKDTNEFKTFLTAAGHKLAVVQFSSKRCGPCKRMFPVFHAMSVKYQNVFFANVDVNNSPELAETCHIKTIPTFQMFKKSQKVTLFSRIKRIICCYRSGFMSNLCLADDGNE

SEQ ID NO: 88388 - protein, 127 aa, Homo sapiens
  Payload ID: 17704
  Gene Name: thioredoxin domain containing 8 (spermatozoa)
  Uniprot ID: Q6A555
  ENSP ID: ENSP00000363635
MVQIIKDTNEFKTFLTAAGHKLAVVQFSSKRCGPCKRMFPVFHAMSVKYQNVFFANVDVNNSPELAETCHIKTIPTFQMFKKSQKVTLFSRIKRIICCYRSGFMSNLIFEFCGADAKKLEAKTQELM

SEQ ID NO: 88389 - protein, 95 aa, Homo sapiens
  Payload ID: 17704
  Gene Name: thioredoxin domain containing 8 (spermatozoa)
  ENSP ID: ENSP00000408768
MVQIIKDTNEFKTFLTAAGHKLAVVQFSSKRCGPCKRMFPVFHELAETCHIKTIPTFQMFKKSQKVTLFSRIKRIICCYRSGFMSNLCLADDGNE

SEQ ID NO: 88390 - protein, 226 aa, Homo sapiens
  Payload ID: 17705
  Gene Name: thioredoxin domain containing 9
  Uniprot ID: O14530
  ENSP ID: ENSP00000264255
MEADASVDMFSKVLEHQLLQTTKLVEEHLDSEIQKLDQMDEDELERLKEKRLQALRKAQQQKQEWLSKGHGEYREIPSERDFFQEVKESENVVCHFYRDSTFRCKILDRHLAILSKKHLETKFLKLNVEKAPFLCERLHIKVIPTLALLKDGKTQDYVVGFTDLGNTDDFTTETLEWRLGSSDILNYSGNLMEPPFQNQKKFGTNFTKLEKKTIRGKKYDSDSDDD

SEQ ID NO: 88391 - protein, 135 aa, Homo sapiens
  Payload ID: 17705
  Gene Name: thioredoxin domain containing 9
  ENSP ID: ENSP00000386889
MEADASVDMFSKVLEHQLLQTTKLVEEHLDSEIQKLDQMDEDELERLKEKRLQALRKAQQQKQEWLSKGHGEYREIPSERDFFQEVKESENVVCHFYRDSTFRCKILDRHLAILSKKHLETKFLKLNVEKAPFLC

SEQ ID NO: 88392 - protein, 188 aa, Homo sapiens
  Payload ID: 17705
  Gene Name: thioredoxin domain containing 9
  Uniprot ID: O14530
  ENSP ID: ENSP00000387275
MEADASVDMFSKVLEHQLLQTTKLVEEHLDSEIQKLDQMDEDELERLKEKRLQALRKAQQQKQEWLSKGHGEYREIPSERDFFQEVKESENVVCHFYRDSTFRCKILDRHLAILSKKHLETKFLKLNVEKAPFLCERLHIKVIPTLALLKDGKTQDYVVGFTDLGNTDDFTTETLEWRLGSSDILNYR

SEQ ID NO: 88393 - protein, 64 aa, Homo sapiens
  Payload ID: 17705
  Gene Name: thioredoxin domain containing 9
  ENSP ID: ENSP00000391046
MEADASVDMFSKVLEHQLLQTTKLVEEHLDSEIQKLDQMDEDELERLKEKRLQALRKAQQQKQV

SEQ ID NO: 88394 - protein, 74 aa, Homo sapiens
  Payload ID: 17705
  Gene Name: thioredoxin domain containing 9
  ENSP ID: ENSP00000402827
MEADASVDMFSKVLEHQLLQTTKLVEEHLDSEIQKLDQMDEDELERLKEKRLQALRKAQQQKQVTSLPCFLKLL

SEQ ID NO: 88395 - protein, 122 aa, Homo sapiens
  Payload ID: 17705
  Gene Name: thioredoxin domain containing 9
  ENSP ID: ENSP00000406388
MEADASVDMFSKVLEHQLLQTTKLVEEHLDSEIQKLDQMDEDELERLKEKRLQALRKAQQQKQEWLSKGHGEYREIPSERDFFQEVKESENVVCHFYRDSTFSVAYLGVRSFSSVMLFSFSS

SEQ ID NO: 88396 - protein, 336 aa, Homo sapiens
  Payload ID: 17706
  Gene Name: thioredoxin interacting protein
  Uniprot ID: Q9H3M7
  ENSP ID: ENSP00000396322
MPPKHSLSHRCILSVTASLMATRFSFPSGENEMVIMRPGNKYEYKFGFELPQGPLGTSFKGKYGCVDYWVKAFLDRPSQPTQETKKNFEVVDLVDVNTPDLMAPVSAKKEKKVSCMFIPDGRVSVSARIDRKGFCEGDEISIHADFENTCSRIVVPKAAIVARHTYLANGQTKVLTQKLSSVRGNHIISGTCASWRGKSLRVQKIRPSILGCNILRVEYSLLIYVSVPGSKKVILDLPLVIGSRSGLSSRTSSMASRTSSEMSWVDLNIPDTPEAPPCYMDVIPEDHRLESPTTPLLDDMDGSQDSPIFMYAPEFKFMPPPTYTEVDPCILNNNVQ

SEQ ID NO: 88397 - protein, 391 aa, Homo sapiens
  Payload ID: 17706
  Gene Name: thioredoxin interacting protein
  Uniprot ID: Q9H3M7
  ENSP ID: ENSP00000462521
MVMFKKIKSFEVVFNDPEKVYGSGEKVAGRVIVEVCEVTRVKAVRILACGVAKVLWMQGSQQCKQTSEYLRYEDTLLLEDQPTGENEMVIMRPGNKYEYKFGFELPQGPLGTSFKGKYGCVDYWVKAFLDRPSQPTQETKKNFEVVDLVDVNTPDLMAPVSAKKEKKVSCMFIPDGRVSVSARIDRKGFCEGDEISIHADFENTCSRIVVPKAAIVARHTYLANGQTKVLTQKLSSVRGNHIISGTCASWRGKSLRVQKIRPSILGCNILRVEYSLLIYVSVPGSKKVILDLPLVIGSRSGLSSRTSSMASRTSSEMSWVDLNIPDTPEAPPCYMDVIPEDHRLESPTTPLLDDMDGSQDSPIFMYAPEFKFMPPPTYTEVDPCILNNNVQ

SEQ ID NO: 88398 - protein, 498 aa, Homo sapiens
  Payload ID: 17707
  Gene Name: thioredoxin reductase 1
  ENSP ID: ENSP00000347020
MNGPEDLPKSYDYDLIIIGGGSGGLAAAKEAAQYGKKVMVLDFVTPTPLGTRWGLGGTCVNVGCIPKKLMHQAALLGQALQDSRNYGWKVEETVKHDWDRMIEAVQNHIGSLNWGYRVALREKKVVYENAYGQFIGPHRIKATNNKGKEKIYSAERFLIATGERPRYLGIPGDKEYCISSDDLFSLPYCPGKTLVVGASYVALECAGFLAGIGLDVTVMVRSILLRGFDQDMANKIGEHMEEHGIKFIRQFVPIKVEQIEAGTPGRLRVVAQSTNSEEIIEGEYNTVMLAIGRDACTRKIGLETVGVKINEKTGKIPVTDEEQTNVPYIYAIGDILEDKVELTPVAIQAGRLLAQRLYAGSTVKCDYENVPTTVFTPLEYGACGLSEEKAVEKFGEENIEVYHSYFWPLEWTIPSRDNNKCYAKIICNTKDNERVVGFHVLGPNAGEVTQGFAAALKCGLTKKQLDSTIGIHPVCAEVFTTLSVTKRSGASILQAGCG

SEQ ID NO: 88399 - protein, 548 aa, Homo sapiens
  Payload ID: 17707
  Gene Name: thioredoxin reductase 1
  ENSP ID: ENSP00000373506
MEDGRALEGTLSELAAETDLPVVFVKQRKIGGHGPTLKAYQEGRLQKLLKMNGPEDLPKSYDYDLIIIGGGSGGLAAAKEAAQYGKKVMVLDFVTPTPLGTRWGLGGTCVNVGCIPKKLMHQAALLGQALQDSRNYGWKVEETVKHDWDRMIEAVQNHIGSLNWGYRVALREKKVVYENAYGQFIGPHRIKATNNKGKEKIYSAERFLIATGERPRYLGIPGDKEYCISSDDLFSLPYCPGKTLVVGASYVALECAGFLAGIGLDVTVMVRSILLRGFDQDMANKIGEHMEEHGIKFIRQFVPIKVEQIEAGTPGRLRVVAQSTNSEEIIEGEYNTVMLAIGRDACTRKIGLETVGVKINEKTGKIPVTDEEQTNVPYIYAIGDILEDKVELTPVAIQAGRLLAQRLYAGSTVKCDYENVPTTVFTPLEYGACGLSEEKAVEKFGEENIEVYHSYFWPLEWTIPSRDNNKCYAKIICNTKDNERVVGFHVLGPNAGEVTQGFAAALKCGLTKKQLDSTIGIHPVCAEVFTTLSVTKRSGASILQAGCG

SEQ ID NO: 88400 - protein, 460 aa, Homo sapiens
  Payload ID: 17707
  Gene Name: thioredoxin reductase 1
  ENSP ID: ENSP00000380844
MVLDFVTPTPLGTRWGLGGTCVNVGCIPKKLMHQAALLGQALQDSRNYGWKVEETVKHDWDRMIEAVQNHIGSLNWGYRVALREKKVVYENAYGQFIGPHRIKATNNKGKEKIYSAERFLIATGERPRYLGIPGDKEYCISSDDLFSLPYCPGKTLVVGASYVALECAGFLAGIGLDVTVMVRSILLRGFDQDMANKIGEHMEEHGIKFIRQFVPIKVEQIEAGTPGRLRVVAQSTNSEEIIEGEYNTVMLAIGRDACTRKIGLETVGVKINEKTGKIPVTDEEQTNVPYIYAIGDILEDKVELTPVAIQAGRLLAQRLYAGSTVKCDYENVPTTVFTPLEYGACGLSEEKAVEKFGEENIEVYHSYFWPLEWTIPSRDNNKCYAKIICNTKDNERVVGFHVLGPNAGEVTQGFAAALKCGLTKKQLDSTIGIHPVCAEVFTTLSVTKRSGASILQAGCG

SEQ ID NO: 88401 - protein, 648 aa, Homo sapiens
  Payload ID: 17707
  Gene Name: thioredoxin reductase 1
  ENSP ID: ENSP00000412045
MGCAEGKAVAAAAPTELQTKGKNGDGRRRSAKDHHPGKTLPENPAGFTSTATADSRALLQAYIDGHSVVIFSRSTCTRCTEVKKLFKSLCVPYFVLELDQTEDGRALEGTLSELAAETDLPVVFVKQRKIGGHGPTLKAYQEGRLQKLLKMNGPEDLPKSYDYDLIIIGGGSGGLAAAKEAAQYGKKVMVLDFVTPTPLGTRWGLGGTCVNVGCIPKKLMHQAALLGQALQDSRNYGWKVEETVKHDWDRMIEAVQNHIGSLNWGYRVALREKKVVYENAYGQFIGPHRIKATNNKGKEKIYSAERFLIATGERPRYLGIPGDKEYCISSDDLFSLPYCPGKTLVVGASYVALECAGFLAGIGLDVTVMVRSILLRGFDQDMANKIGEHMEEHGIKFIRQFVPIKVEQIEAGTPGRLRVVAQSTNSEEIIEGEYNTVMLAIGRDACTRKIGLETVGVKINEKTGKIPVTDEEQTNVPYIYAIGDILEDKVELTPVAIQAGRLLAQRLYAGSTVKCDYENVPTTVFTPLEYGACGLSEEKAVEKFGEENIEVYHSYFWPLEWTIPSRDNNKCYAKIICNTKDNERVVGFHVLGPNAGEVTQGFAAALKCGLTKKQLDSTIGIHPVCAEVFTTLSVTKRSGASILQAGCG

SEQ ID NO: 88402 - protein, 499 aa, Homo sapiens
  Payload ID: 17707
  Gene Name: thioredoxin reductase 1
  Uniprot ID: Q16881
  ENSP ID: ENSP00000421934
  MOD_RES (498)..(498): Selenocysteine
MNGPEDLPKSYDYDLIIIGGGSGGLAAAKEAAQYGKKVMVLDFVTPTPLGTRWGLGGTCVNVGCIPKKLMHQAALLGQALQDSRNYGWKVEETVKHDWDRMIEAVQNHIGSLNWGYRVALREKKVVYENAYGQFIGPHRIKATNNKGKEKIYSAERFLIATGERPRYLGIPGDKEYCISSDDLFSLPYCPGKTLVVGASYVALECAGFLAGIGLDVTVMVRSILLRGFDQDMANKIGEHMEEHGIKFIRQFVPIKVEQIEAGTPGRLRVVAQSTNSEEIIEGEYNTVMLAIGRDACTRKIGLETVGVKINEKTGKIPVTDEEQTNVPYIYAIGDILEDKVELTPVAIQAGRLLAQRLYAGSTVKCDYENVPTTVFTPLEYGACGLSEEKAVEKFGEENIEVYHSYFWPLEWTIPSRDNNKCYAKIICNTKDNERVVGFHVLGPNAGEVTQGFAAALKCGLTKKQLDSTIGIHPVCAEVFTTLSVTKRSGASILQAGCXG

SEQ ID NO: 88403 - protein, 70 aa, Homo sapiens
  Payload ID: 17707
  Gene Name: thioredoxin reductase 1
  ENSP ID: ENSP00000431294
MNGPEDLPKSYDYDLIIIGGGSGGLAAAKEAAQYGKKVMVLDFVTPTPLGTRWGLGGTCVNVGCIPKKLM

SEQ ID NO: 88404 - protein, 139 aa, Homo sapiens
  Payload ID: 17707
  Gene Name: thioredoxin reductase 1
  ENSP ID: ENSP00000431925
MLSRLVLNSWAQAIIRPRPPKVLGLQVTTFSEAYQEGRLQKLLKMNGPEDLPKSYDYDLIIIGGGSGGLAAAKEAAQYGKKVMVLDFVTPTPLGTRWGLGGTCVNVGCIPKKLMHQAALLGQALQDSRNYGWKVEETGM

SEQ ID NO: 88405 - protein, 44 aa, Homo sapiens
  Payload ID: 17707
  Gene Name: thioredoxin reductase 1
  ENSP ID: ENSP00000432273
MLAIGRDACTRKIGLETVGVKINEKTGKIPVTDEEQTNVPYIYA

SEQ ID NO: 88406 - protein, 568 aa, Homo sapiens
  Payload ID: 17707
  Gene Name: thioredoxin reductase 1
  ENSP ID: ENSP00000432812
  MOD_RES (567)..(567): Selenocysteine
MPAMLPTGSHSAVLPPSHCSTAPPSTSQEPSSSADPKLCLSPPTSDSRQERNVQFGLAYQEGRLQKLLKMNGPEDLPKSYDYDLIIIGGGSGGLAAAKEAAQYGKKVMVLDFVTPTPLGTRWGLGGTCVNVGCIPKKLMHQAALLGQALQDSRNYGWKVEETVKHDWDRMIEAVQNHIGSLNWGYRVALREKKVVYENAYGQFIGPHRIKATNNKGKEKIYSAERFLIATGERPRYLGIPGDKEYCISSDDLFSLPYCPGKTLVVGASYVALECAGFLAGIGLDVTVMVRSILLRGFDQDMANKIGEHMEEHGIKFIRQFVPIKVEQIEAGTPGRLRVVAQSTNSEEIIEGEYNTVMLAIGRDACTRKIGLETVGVKINEKTGKIPVTDEEQTNVPYIYAIGDILEDKVELTPVAIQAGRLLAQRLYAGSTVKCDYENVPTTVFTPLEYGACGLSEEKAVEKFGEENIEVYHSYFWPLEWTIPSRDNNKCYAKIICNTKDNERVVGFHVLGPNAGEVTQGFAAALKCGLTKKQLDSTIGIHPVCAEVFTTLSVTKRSGASILQAGCXG

SEQ ID NO: 88407 - protein, 499 aa, Homo sapiens; identical to SEQ ID NO: 88402
  Payload ID: 17707
  Gene Name: thioredoxin reductase 1
  Uniprot ID: Q16881
  ENSP ID: ENSP00000433425
  MOD_RES (498)..(498): Selenocysteine

SEQ ID NO: 88408 - protein, 72 aa, Homo sapiens
  Payload ID: 17707
  Gene Name: thioredoxin reductase 1
  ENSP ID: ENSP00000433507
MNGPEDLPKSYDYDLIIIGGGSGGLAAAKEAAQYGKKVMVLDFVTPTPLGTRWGLGGTCVNVGCIPKKLMHQ

SEQ ID NO: 88409 - protein, 175 aa, Homo sapiens
  Payload ID: 17707
  Gene Name: thioredoxin reductase 1
  ENSP ID: ENSP00000433599
MNGPEDLPKSYDYDLIIIGGGSGGLAAAKEAAQYGKKVMVLDFVTPTPLGTRWGLGGTCVNVGCIPKKLMHQAALLGQALQDSRNYGWKVEETVKHDWDRMIEAVQNHIGSLNWGYRVALREKKVVYENAYGQFIGPHRIKATNNKGKEKIYSAERFLIATGERPRYLGIPGDKE

SEQ ID NO: 88410 - protein, 96 aa, Homo sapiens
  Payload ID: 17707
  Gene Name: thioredoxin reductase 1
  ENSP ID: ENSP00000433732
MPAMLPTGSHSAVLPPSHCSTAPPSTSQEPSSSADPKLCLSPPTSDSRQERNVQFGLAYQEGRLQKLLKMNGPEDLPKSYDYDLIIIGGGSGGLAA

SEQ ID NO: 88411 - protein, 103 aa, Homo sapiens
  Payload ID: 17707
  Gene Name: thioredoxin reductase 1
  ENSP ID: ENSP00000433887
MNGPEDLPKSYDYDLIIIGGGSGGLAAAKEAAQYGKKVMVLDFVTPTPLGTRWGLGGTCVNVGCIPKKLMHQAALLGQALQDSRNYGWKVEETVKHDWDRMIE

SEQ ID NO: 88412 - protein, 482 aa, Homo sapiens
  Payload ID: 17707
  Gene Name: thioredoxin reductase 1
  ENSP ID: ENSP00000433935
MNGPEDLPKSYDYDLIIIGGGSGGLAAAKEAAQYGKKVMVLDFVTPTPLGTRWGLGGTCVNVGCIPKKLMHQAALLGQALQDSRNYGWKVEETVKHDWDRMIEAVQNHIGSLNWGYRVALREKKVVYENAYGQFIGPHRIKATNNKGKEKIYSAERFLIATGERPRYLGIPGDKEYCISSDDLFSLPYCPGKTLVVGASYVALECAGFLAGIGLDVTVMVRSILLRGFDQDMANKIGEHMEEHGIKFIRQFVPIKVEQIEAGTPGRLRVVAQSTNSEEIIEGEYNTVMLAIGRDACTRKIGLETVGVKINEKTGKIPVTDEEQTNVPYIYAIGDILEDKVELTPVAIQAGRLLAQRLYAGSTVKCDYENVPTTVFTPLEYGACGLSEEKAVEKFGEENIEVYHSYFWPLEWTIPSRDNNKCYAKIICNTKDNERVVGFHVLGPNAGEVTQGFAAALKCGLTKKQLDSTIGIHPVCAEFFSFI

SEQ ID NO: 88413 - protein, 649 aa, Homo sapiens
  Payload ID: 17707
  Gene Name: thioredoxin reductase 1
  Uniprot ID: Q16881
  ENSP ID: ENSP00000434516
  MOD_RES (648)..(648): Selenocysteine
MGCAEGKAVAAAAPTELQTKGKNGDGRRRSAKDHHPGKTLPENPAGFTSTATADSRALLQAYIDGHSVVIFSRSTCTRCTEVKKLFKSLCVPYFVLELDQTEDGRALEGTLSELAAETDLPVVFVKQRKIGGHGPTLKAYQEGRLQKLLKMNGPEDLPKSYDYDLIIIGGGSGGLAAAKEAAQYGKKVMVLDFVTPTPLGTRWGLGGTCVNVGCIPKKLMHQAALLGQALQDSRNYGWKVEETVKHDWDRMIEAVQNHIGSLNWGYRVALREKKVVYENAYGQFIGPHRIKATNNKGKEKIYSAERFLIATGERPRYLGIPGDKEYCISSDDLFSLPYCPGKTLVVGASYVALECAGFLAGIGLDVTVMVRSILLRGFDQDMANKIGEHMEEHGIKFIRQFVPIKVEQIEAGTPGRLRVVAQSTNSEEIIEGEYNTVMLAIGRDACTRKIGLETVGVKINEKTGKIPVTDEEQTNVPYIYAIGDILEDKVELTPVAIQAGRLLAQRLYAGSTVKCDYENVPTTVFTPLEYGACGLSEEKAVEKFGEENIEVYHSYFWPLEWTIPSRDNNKCYAKIICNTKDNERVVGFHVLGPNAGEVTQGFAAALKCGLTKKQLDSTIGIHPVCAEVFTTLSVTKRSGASILQAGCXG

SEQ ID NO: 88414 - protein, 461 aa, Homo sapiens
  Payload ID: 17707
  Gene Name: thioredoxin reductase 1
  Uniprot ID: Q16881
  ENSP ID: ENSP00000434919
  MOD_RES (460)..(460): Selenocysteine
MVLDFVTPTPLGTRWGLGGTCVNVGCIPKKLMHQAALLGQALQDSRNYGWKVEETVKHDWDRMIEAVQNHIGSLNWGYRVALREKKVVYENAYGQFIGPHRIKATNNKGKEKIYSAERFLIATGERPRYLGIPGDKEYCISSDDLFSLPYCPGKTLVVGASYVALECAGFLAGIGLDVTVMVRSILLRGFDQDMANKIGEHMEEHGIKFIRQFVPIKVEQIEAGTPGRLRVVAQSTNSEEIIEGEYNTVMLAIGRDACTRKIGLETVGVKINEKTGKIPVTDEEQTNVPYIYAIGDILEDKVELTPVAIQAGRLLAQRLYAGSTVKCDYENVPTTVFTPLEYGACGLSEEKAVEKFGEENIEVYHSYFWPLEWTIPSRDNNKCYAKIICNTKDNERVVGFHVLGPNAGEVTQGFAAALKCGLTKKQLDSTIGIHPVCAEVFTTLSVTKRSGASILQAGCXG

SEQ ID NO: 88415 - protein, 543 aa, Homo sapiens
  Payload ID: 17707
  Gene Name: thioredoxin reductase 1
  Uniprot ID: Q16881
  ENSP ID: ENSP00000435123
  MOD_RES (542)..(542): Selenocysteine
MLSRLVLNSWAQAIIRPRPPKVLGLQVTTFSEAYQEGRLQKLLKMNGPEDLPKSYDYDLIIIGGGSGGLAAAKEAAQYGKKVMVLDFVTPTPLGTRWGLGGTCVNVGCIPKKLMHQAALLGQALQDSRNYGWKVEETVKHDWDRMIEAVQNHIGSLNWGYRVALREKKVVYENAYGQFIGPHRIKATNNKGKEKIYSAERFLIATGERPRYLGIPGDKEYCISSDDLFSLPYCPGKTLVVGASYVALECAGFLAGIGLDVTVMVRSILLRGFDQDMANKIGEHMEEHGIKFIRQFVPIKVEQIEAGTPGRLRVVAQSTNSEEIIEGEYNTVMLAIGRDACTRKIGLETVGVKINEKTGKIPVTDEEQTNVPYIYAIGDILEDKVELTPVAIQAGRLLAQRLYAGSTVKCDYENVPTTVFTPLEYGACGLSEEKAVEKFGEENIEVYHSYFWPLEWTIPSRDNNKCYAKIICNTKDNERVVGFHVLGPNAGEVTQGFAAALKCGLTKKQLDSTIGIHPVCAEVFTTLSVTKRSGASILQAGCXG

SEQ ID NO: 88416 - protein, 551 aa, Homo sapiens
  Payload ID: 17707
  Gene Name: thioredoxin reductase 1
  Uniprot ID: Q16881
  ENSP ID: ENSP00000435929
  MOD_RES (550)..(550): Selenocysteine
MSCEDGRALEGTLSELAAETDLPVVFVKQRKIGGHGPTLKAYQEGRLQKLLKMNGPEDLPKSYDYDLIIIGGGSGGLAAAKEAAQYGKKVMVLDFVTPTPLGTRWGLGGTCVNVGCIPKKLMHQAALLGQALQDSRNYGWKVEETVKHDWDRMIEAVQNHIGSLNWGYRVALREKKVVYENAYGQFIGPHRIKATNNKGKEKIYSAERFLIATGERPRYLGIPGDKEYCISSDDLFSLPYCPGKTLVVGASYVALECAGFLAGIGLDVTVMVRSILLRGFDQDMANKIGEHMEEHGIKFIRQFVPIKVEQIEAGTPGRLRVVAQSTNSEEIIEGEYNTVMLAIGRDACTRKIGLETVGVKINEKTGKIPVTDEEQTNVPYIYAIGDILEDKVELTPVAIQAGRLLAQRLYAGSTVKCDYENVPTTVFTPLEYGACGLSEEKAVEKFGEENIEVYHSYFWPLEWTIPSRDNNKCYAKIICNTKDNERVVGFHVLGPNAGEVTQGFAAALKCGLTKKQLDSTIGIHPVCAEVFTTLSVTKRSGASILQAGCXG

SEQ ID NO: 88417 - protein, 53 aa, Homo sapiens
  Payload ID: 17707
  Gene Name: thioredoxin reductase 1
  ENSP ID: ENSP00000436229
MNGPEDLPKSYDYDLIIIGGGSGGLAAAKEAAQYGKKVMVLDFVTPTPLGTRW

SEQ ID NO: 88418 - protein, 338 aa, Homo sapiens
  Payload ID: 17708
  Gene Name: thioredoxin reductase 2
  ENSP ID: ENSP00000334451
MAAMAVALRGLGGRFRWRTQAVAGGVRGAARGAAAGQRDYDLLVVGGGSGGLACAKEAAQLGRKVAVVDYVEPSPQGTRWGLGGTCVNVGCIPKKLMHQAALLGGLIQDAPNYGWEVAQPVPHDWRKMAEAVQNHVKSLNWGHRVQLQDRKVKYFNIKASFVDEHTVCGVAKGGKEILLSADHIIIATGGRPRYPTHIEGALEYGITSDDIFWLKESPGKTLVVGASYVALECAGFLTGIGLDTTIMMRSIPLRGFDQQMSSMVIEHMASHGTRFLRGCAPSRVRRLPDGQLQVTWEDSTTGKEDTGTFDTVLWAIAPCISACLPTTVGHAGKNQRRD

SEQ ID NO: 88419 - protein, 494 aa, Homo sapiens
  Payload ID: 17708
  Gene Name: thioredoxin reductase 2
  ENSP ID: ENSP00000383362
  MOD_RES (493)..(493): Selenocysteine
MEDQAGQRDYDLLVVGGGSGGLACAKEAAQLGRKVAVVDYVEPSPQGTRWGLGGTCVNVGCIPKKLMHQAALLGGLIQDAPNYGWEVAQPVPHDWRKMAEAVQNHVKSLNWGHRVQLQDRKVKYFNIKASFVDEHTVCGVAKGGKEILLSADHIIIATGGRPRYPTHIEGALEYGITSDDIFWLKESPGKTLVVGASYVALECAGFLTGIGLDTTIMMRSIPLRGFDQQMSSMVIEHMASHGTRFLRGCAPSRVRRLPDGQLQVTWEDSTTGKEDTGTFDTVLWAIGRVPDTRSLNLEKAGVDTSPDTQKILVDSREATSVPHIYAIGDVVEGRPELTPIAIMAGRLLVQRLFGGSSDLMDYDNVPTTVFTPLEYGCVGLSEEEAVARHGQEHVEVYHAHYKPLEFTVAGRDASQCYVKMVCLREPPQLVLGLHFLGPNAGEVTQGFALGIKCGASYAQVMRTVGIHPTCSEEVVKLRISKRSGLDPTVTGCXG

SEQ ID NO: 88420 - protein, 523 aa, Homo sapiens
  Payload ID: 17708
  Gene Name: thioredoxin reductase 2
  ENSP ID: ENSP00000383363
  MOD_RES (522)..(522): Selenocysteine
MAAMAVALRGLGGRFRWRTQAVAGGVRGAARGAAGQRDYDLLVVGGGSGGLACAKEAAQLGRKVAVVDYVEPSPQGTRWGLGGTCVNVGCIPKKLMHQAALLGGLIQDAPNYGWEVAQPVPHDWRKMAEAVQNHVKSLNWGHRVQLQDRKVKYFNIKASFVDEHTVCGVAKGGKEILLSADHIIIATGGRPRYPTHIEGALEYGITSDDIFWLKESPGKTLVVGASYVALECAGFLTGIGLDTTIMMRSIPLRGFDQQMSSMVIEHMASHGTRFLRGCAPSRVRRLPDGQLQVTWEDSTTGKEDTGTFDTVLWAIGRVPDTRSLNLEKAGVDTSPDTQKILVDSREATSVPHIYAIGDVVEGRPELTPIAIMAGRLLVQRLFGGSSDLMDYDNVPTTVFTPLEYGCVGLSEEEAVARHGQEHVEVYHAHYKPLEFTVAGRDASQCYVKMVCLREPPQLVLGLHFLGPNAGEVTQGFALGIKCGASYAQVMRTVGIHPTCSEEVVKLRISKRSGLDPTVTGCXG

SEQ ID NO: 88421 - protein, 524 aa, Homo sapiens
  Payload ID: 17708
  Gene Name: thioredoxin reductase 2
  Uniprot ID: Q9NNW7
  ENSP ID: ENSP00000383365
  MOD_RES (523)..(523): Selenocysteine
MAAMAVALRGLGGRFRWRTQAVAGGVRGAARGAAAGQRDYDLLVVGGGSGGLACAKEAAQLGRKVAVVDYVEPSPQGTRWGLGGTCVNVGCIPKKLMHQAALLGGLIQDAPNYGWEVAQPVPHDWRKMAEAVQNHVKSLNWGHRVQLQDRKVKYFNIKASFVDEHTVCGVAKGGKEILLSADHIIIATGGRPRYPTHIEGALEYGITSDDIFWLKESPGKTLVVGASYVALECAGFLTGIGLDTTIMMRSIPLRGFDQQMSSMVIEHMASHGTRFLRGCAPSRVRRLPDGQLQVTWEDSTTGKEDTGTFDTVLWAIGRVPDTRSLNLEKAGVDTSPDTQKILVDSREATSVPHIYAIGDVVEGRPELTPIAIMAGRLLVQRLFGGSSDLMDYDNVPTTVFTPLEYGCVGLSEEEAVARHGQEHVEVYHAHYKPLEFTVAGRDASQCYVKMVCLREPPQLVLGLHFLGPNAGEVTQGFALGIKCGASYAQVMRTVGIHPTCSEEVVKLRISKRSGLDPTVTGCXG

SEQ ID NO: 88422 - protein, 501 aa, Homo sapiens
  Payload ID: 17708
  Gene Name: thioredoxin reductase 2
  ENSP ID: ENSP00000383369
  MOD_RES (500)..(500): Selenocysteine
MAAMAVALRGLGGRFRWRTQAVAGGVRGAARGAAAAQLGRKVAVVDYVEPSPQGTRWGLGGTCVNVGCIPKKLMHQAALLGGLIQDAPNYGWEVAQPVPHDWRKMAEAVQNHVKSLNWGHRVQLQDRKVKYFNIKASFVDEHTVCGVAKGGKEILLSADHIIIATGGRPRYPTHIEGALEYGITSDDIFWLKESPGKTLVVGASYVALECAGFLTGIGLDTTIMMRSIPLRGFDQQMSSMVIEHMASHGTRFLRGCAPSRVRRLPDGQLQVTWEDSTTGKEDTGTFDTVLWAIGRVPDTRSLNLEKAGVDTSPDTQKILVDSREATSVPHIYAIGDVVEGRPELTPIAIMAGRLLVQRLFGGSSDLMDYDNVPTTVFTPLEYGCVGLSEEEAVARHGQEHVEVYHAHYKPLEFTVAGRDASQCYVKMVCLREPPQLVLGLHFLGPNAGEVTQGFALGIKCGASYAQVMRTVGIHPTCSEEVVKLRISKRSGLDPTVTGCXG

SEQ ID NO: 88423 - protein, 428 aa, Homo sapiens
  Payload ID: 17708
  Gene Name: thioredoxin reductase 2
  ENSP ID: ENSP00000485128
  MOD_RES (427)..(427): Selenocysteine
MHQAALLGGLIQDAPNYGWEVAQPVPHDWRKMAEAVQNHVKSLNWGHRVQLQDRKVKYFNIKASFVDEHTVCGVAKGGKEILLSADHIIIATGGRPRYPTHIEGALEYGITSDDIFWLKESPGKTLVVGASYVALECAGFLTGIGLDTTIMMRSIPLRGFDQQMSSMVIEHMASHGTRFLRGCAPSRVRRLPDGQLQVTWEDSTTGKEDTGTFDTVLWAIGRVPDTRSLNLEKAGVDTSPDTQKILVDSREATSVPHIYAIGDVVEGRPELTPIAIMAGRLLVQRLFGGSSDLMDYDNVPTTVFTPLEYGCVGLSEEEAVARHGQEHVEVYHAHYKPLEFTVAGRDASQCYVKMVCLREPPQLVLGLHFLGPNAGEVTQGFALGIKCGASYAQVMRTVGIHPTCSEEVVKLRISKRSGLDPTVTGCXG

SEQ ID NO: 88424 - protein, 171 aa, Homo sapiens
  Payload ID: 17708
  Gene Name: thioredoxin reductase 2
  ENSP ID: ENSP00000485290
  MOD_RES (1)..(1): Any amino acid
XGVAKGGKEILLSADHIIIATGGRPRYPTHIEGALEYGITSDDIFWLKESPGKTLVVGASYVALECAGFLTGIGLDTTIMMRSIPLRGFDQQMSSMVIEHMASHGTRFLRGCAPSRVRRLPDGQLQVTWEDSTTGKEDTGTFDTVLWAIGLPHPAGCQAGWPLPSAPREQP

SEQ ID NO: 88425 - protein, 212 aa, Homo sapiens
  Payload ID: 17708
  Gene Name: thioredoxin reductase 2
  ENSP ID: ENSP00000485466
  MOD_RES (173)..(173): Selenocysteine
MPLRRTSSRGNAGRPELTPIAIMAGRLLVQRLFGGSSDLMDYDNVPTTVFTPLEYGCVGLSEEEAVARHGQEHVEVYHAHYKPLEFTVAGRDASQCYVKMVCLREPPQLVLGLHFLGPNAGEVTQGFALGIKCGASYAQVMRTVGIHPTCSEEVVKLRISKRSGLDPTVTGCXGMAAGQVWGASTLSWSACEMVSVERKCWTGGPCAPQGWL

SEQ ID NO: 88426 - protein, 180 aa, Homo sapiens
  Payload ID: 17708
  Gene Name: thioredoxin reductase 2
  ENSP ID: ENSP00000485499
  MOD_RES (179)..(179): Selenocysteine
MKTVAGALLSLVMGQPSEGRPELTPIAIMAGRLLVQRLFGGSSDLMDYDNVPTTVFTPLEYGCVGLSEEEAVARHGQEHVEVYHAHYKPLEFTVAGRDASQCYVKMVCLREPPQLVLGLHFLGPNAGEVTQGFALGIKCGASYAQVMRTVGIHPTCSEEVVKLRISKRSGLDPTVTGCXG

SEQ ID NO: 88427 - protein, 306 aa, Homo sapiens
  Payload ID: 17708
  Gene Name: thioredoxin reductase 2
  ENSP ID: ENSP00000485543
MEAGQRDYDLLVVGGGSGGLACAKEAAQLGRKVAVVDYVEPSPQGTRWGLGGTCVNVGCIPKKLMHQAALLGGLIQDAPNYGWEVAQPVPHDWRKMAEAVQNHVKSLNWGHRVQLQDRKVKYFNIKASFVDEHTVCGVAKGGKEILLSADHIIIATGGRPRYPTHIEGALEYGITSDDIFWLKESPGKTLVVGASYVALECAGFLTGIGLDTTIMMRSIPLRGFDQQMSSMVIEHMASHGTRFLRGCAPSRVRRLPDGQLQVTWEDSTTGKEDTGTFDTVLWAIAPCISACLPTTVGHAGKNQRRD

SEQ ID NO: 88428 - protein, 165 aa, Homo sapiens
  Payload ID: 17708
  Gene Name: thioredoxin reductase 2
  ENSP ID: ENSP00000485603
  MOD_RES (164)..(164): Selenocysteine
MKTGRPELTPIAIMAGRLLVQRLFGGSSDLMDYDNVPTTVFTPLEYGCVGLSEEEAVARHGQEHVEVYHAHYKPLEFTVAGRDASQCYVKMVCLREPPQLVLGLHFLGPNAGEVTQGFALGIKCGASYAQVMRTVGIHPTCSEEVVKLRISKRSGLDPTVTGCXG

SEQ ID NO: 88429 - protein, 463 aa, Homo sapiens
  Payload ID: 17708
  Gene Name: thioredoxin reductase 2
  ENSP ID: ENSP00000485665
MAAMAVALRGLGGRFRWRTQAVAGGVRGAARGAAAGQRDYDLLVVGGGSGGLACAKEGTRWGLGGTCVNVGCIPKKLMHQAALLGGLIQDAPNYGWEVAQPVPHDWRKMAEAVQNHVKSLNWGHRVQLQDRKVKYFNIKASFVDEHTVCGVAKGGKEILLSADHIIIATGGRPRYPTHIEGALEYGITSDDIFWLKESPGKTLVVGASYVALECAGFLTGIGLDTTIMMRSIPLRGFDQQMSSMVIEHMASHGTRFLRGCAPSRVRRLPDGQLQVTWEDSTTGKEDTGTFDTVLWAIGRVPDTRSLNLEKAGVDTSPDTQKILVDSREATSVPHIYAIGDVVEGRPELTPIAIMAGRLLVQRLFGGSSDLMDYDNVPTTVFTPLEYGCVGLSEEEAVARHGQEHVEVYHAHYKPLEFTVAGRDASQCYVKMVCLREPPQLVLGLHFLGPNAGEVTQGFALGIK

SEQ ID NO: 88430 - protein, 362 aa, Homo sapiens
  Payload ID: 17708
  Gene Name: thioredoxin reductase 2
  ENSP ID: ENSP00000489208
  MOD_RES (266)..(266): Selenocysteine
QQMSSMVIEHMASHGTRFLRGCAPSRVRRLPDGQLQVTWEDSTTGKEDTGTFDTVLWAIGRVPDTRSLNLEKAGVDTSPDTQKILVDSREATSVPHIYAIGDVVEGRPELTPIAIMAGRLLVQRLFGGSSDLMDYDNVPTTVFTPLEYGCVGLSEEEAVARHGQEHVEVYHAHYKPLEFTVAGRDASQCYVKMVCLREPPQLVLGLHFLGPNAGEVTQGFALGIKCGASYAQVMRTVGIHPTCSEEVVKLRISKRSGLDPTVTGCXGMAAGQVWGASTLSWSACEMVSVERKCWTGGPCAPQGWLRGLSTSPLHLSASAAGHPPPGSWCQMMTTWVETYPVGTHVRAPWHFCNANKEGTFSE

SEQ ID NO: 88431 - protein, 133 aa, Homo sapiens
  Payload ID: 17709
  Gene Name: thioredoxin reductase 3
  ENSP ID: ENSP00000373066
MRDLSERRLGQPELKAEQQMPLEPVRARLSVGLACCCSHTTAEASSLEHGDKVFGQGFPSPLEEIKRLLKISRALQARSVPSTQEKAKCLSGEPGQPEGKGQETYPGPGKVEGKAEPAMRKDDVCPGMKCISG

SEQ ID NO: 88432 - protein, 41 aa, Homo sapiens
  Payload ID: 17709
  Gene Name: thioredoxin reductase 3
  ENSP ID: ENSP00000427753
  MOD_RES (40)..(40): Selenocysteine
GLTKQLLDDTIGIHPTCGEVFTTLEITKSSGLDITQKGCXG

SEQ ID NO: 88433 - protein, 607 aa, Homo sapiens
  Payload ID: 17709
  Gene Name: thioredoxin reductase 3
  ENSP ID: ENSP00000429584
  MOD_RES (606)..(606): Selenocysteine
LERSPPQSPGPGKAGDAPNRRSGHVRGARVLSPPGRRARLSSPGPSRSSEAREELRRHLVGLIERSRVVIFSKSYCPHSTRVKELFSSLGVECNVLELDQVDDGARVQEVLSEITNQKTVPNIFVNKVHVGGCDQTFQAYQSGLLQKLLQEDLAYDYDLIIIGGGSGGLSCAKEAAILGKKVMVLDFVVPSPQGTSWGLGGTCVNVGCIPKKLMHQAALLGQALCDSRKFGWEYNQQVRHNWETMTKAIQNHISSLNWGYRLSLREKAVAYVNSYGEFVEHHKIKATNKKGQETYYTAAQFVIATGERPRYLGIQGDKEYCITSDDLFSLPYCPGKTLVVGASYVALECAGFLAGFGLDVTVMVRSILLRGFDQEMAEKVGSYMEQHGVKFLRKFIPVMVQQLEKGSPGKLKVLAKSTEGTETIEGVYNTVLLAIGRDSCTRKIGLEKIGVKINEKSGKIPVNDVEQTNVPYVYAVGDILEDKPELTPVAIQSGKLLAQRLFGASLEKIYHTLFWPLEWTVAGRENNTCYAKIICNKFDHDRVIGFHILGPNAGEVTQGFAAAMKCGLTKQLLDDTIGIHPTCGEVFTTLEITKSSGLDITQKGCXG

SEQ ID NO: 88434 - protein, 643 aa, Homo sapiens
  Payload ID: 17709
  Gene Name: thioredoxin reductase 3
  ENSP ID: ENSP00000430031
  MOD_RES (642)..(642): Selenocysteine
LERSPPQSPGPGKAGDAPNRRSGHVRGARVLSPPGRRARLSSPGPSRSSEAREELRRHLVGLIERSRVVIFSKSYCPHSTRVKELFSSLGVECNVLELDQVDDGARVQEVLSEITNQKTVPNIFVNKVHVGGCDQTFQAYQSGLLQKLLQEDLAYDYDLIIIGGGSGGLSCAKEAAILGKKVMVLDFVVPSPQGTSWGLGGTCVNVGCIPKKLMHQAALLGQALCDSRKFGWEYNQQVRHNWETMTKAIQNHISSLNWGYRLSLREKAVAYVNSYGEFVEHHKIKATNKKGQETYYTAAQFVIATGERPRYLGIQGDKEYCITSDDLFSLPYCPGKTLVVGASYVALECAGFLAGFGLDVTVMVRSILLRGFDQEMAEKVGSYMEQHGVKFLRKFIPVMVQQLEKGSPGKLKVLAKSTEGTETIEGVYNTVLLAIGRDSCTRKIGLEKIGVKINEKSGKIPVNDVEQTNVPYVYAVGDILEDKPELTPVAIQSGKLLAQRLFGASLEKCDYINVPTTVFTPLEYGCCGLSEEKAIEVYKKENLEIYHTLFWPLEWTVAGRENNTCYAKIICNKFDHDRVIGFHILGPNAGEVTQGFAAAMKCGLTKQLLDDTIGIHPTCGEVFTTLEITKSSGLDITQKGCXG

SEQ ID NO: 88435 - protein, 83 aa, Homo sapiens
  Payload ID: 17709
  Gene Name: thioredoxin reductase 3
  ENSP ID: ENSP00000430605
  MOD_RES (82)..(82): Selenocysteine
MHRYRGKRLHILLPILDRVIGFHILGPNAGEVTQGFAAAMKCGLTKQLLDDTIGIHPTCGEVFTTLEITKSSGLDITQKGCXG

SEQ ID NO: 88436 - protein, 133 aa, Homo sapiens; identical to SEQ ID NO: 88431
  Payload ID: 17710
  Gene Name: thioredoxin reductase 3 neighbor
  Uniprot ID: Q6F5E7
  ENSP ID: ENSP00000384071

SEQ ID NO: 88437 - protein, 289 aa, Homo sapiens
  Payload ID: 17711
  Gene Name: thioredoxin-like 1
  Uniprot ID: O43396
  ENSP ID: ENSP00000217515
MVGVKPVGSDPDFQPELSGAGSRLAVVKFTMRGCGPCLRIAPAFSSMSNKYPQAVFLEVDVHQCQGTAATNNISATPTFLFFRNKVRIDQYQGADAVGLEEKIKQHLENDPGSNEDTDIPKGYMDLMPFINKAGCECLNESDEHGFDNCLRKDTTFLESDCDEQLLITVAFNQPVKLYSMKFQGPDNGQGPKYVKIFINLPRSMDFEEAERSEPTQALELTEDDIKEDGIVPLRYVKFQNVNSVTIFVQSNQGEEETTRISYFTFIGTPVQATNMNDFKRVVGKKGESH

SEQ ID NO: 88438 - protein, 289 aa, Homo sapiens; identical to SEQ ID NO: 88437
  Payload ID: 17711
  Gene Name: thioredoxin-like 1
  Uniprot ID: O43396
  ENSP ID: ENSP00000464918

SEQ ID NO: 88439 - protein, 27 aa, Homo sapiens
  Payload ID: 17711
  Gene Name: thioredoxin-like 1
  ENSP ID: ENSP00000465606
MVGVKPVGSDPDFQPELSGAGSRLAVV

SEQ ID NO: 88440 - protein, 103 aa, Homo sapiens
  Payload ID: 17711
  Gene Name: thioredoxin-like 1
  ENSP ID: ENSP00000466473
  MOD_RES (1)..(1): Any amino acid
XDIKEDGIVPLRYVKFQNVNSVTIFVQSNQGEEETTRISYFTFIGTPVQATNMNDFKRHLSALTLPMFSPLLVQDFYSFYHLDQPCYLENTHWQVESYQPVKQ

SEQ ID NO: 88441 - protein, 138 aa, Homo sapiens
  Payload ID: 17711
  Gene Name: thioredoxin-like 1
  ENSP ID: ENSP00000466558
MLRKFTLLTPSHCFPLRCKRCGPCLRIAPAFSSMSNKYPQAVFLEVDVHQCQGTAATNNISATPTFLFFRNKVRIDQYQGADAVGLEEKIKQHLENDPGSNEDTDIPKGYMDLMPFINKAGCECLNESDEHGFDNCLR

SEQ ID NO: 88442 - protein, 69 aa, Homo sapiens
  Payload ID: 17711
  Gene Name: thioredoxin-like 1
  ENSP ID: ENSP00000467317
MVGVKPVGSDPDFQPELSGAGSRLAVVKFTMRGCGPCLRIAPAFSSMSNKYPQAVFLEVDVHQCQYLFL

SEQ ID NO: 88443 - protein, 281 aa, Homo sapiens
  Payload ID: 17711
  Gene Name: thioredoxin-like 1
  ENSP ID: ENSP00000468165
  MOD_RES (1)..(1): Any amino acid
XPVGSDPDFQPELSGAGSRLAVVKFTMRGCGPCLRIAPAFSSMSNKYPQAVFLEVDVHQCQGTAATNNISATPTFLFFRNKVRIDQYQGADAVGLEEKIKQHLENDPGSNEDTDIPKGYMDLMPFINKAGCECLNESDEHGFDNCLRKDTTFLESDCDEQLLITVAFNQPVKLYSMKFQGPDNGQGPKYVKIFINLPRSMDFEEAERSEPTQALELTEDDIKEDGIVPLRYVKFQNVNSVTIFVQSNQGEEETTRISYFTFIGTPVQATNMNDFKRVSLLK

SEQ ID NO: 88444 - protein, 142 aa, Homo sapiens
  Payload ID: 17712
  Gene Name: thioredoxin-like 4A
  Uniprot ID: P83876
  ENSP ID: ENSP00000269601
MSYMLPHLHNGWQVDQAILSEEDRVVVIRFGHDWDPTCMKMDEVLYSIAEKVKNFAVIYLVDITEVPDFNKMYELYDPCTVMFFFRNKHIMIDLGTGNNNKINWAMEDKQEMVDIIETVYRGARKGRGLVVSPKDYSTKYRY

SEQ ID NO: 88445 - protein, 91 aa, Homo sapiens
  Payload ID: 17712
  Gene Name: thioredoxin-like 4A
  ENSP ID: ENSP00000347678
MSYMLPHLHNGWQVDQAILSEEDRVVVIRFGHDWDPTCMKMDEVLYSIAEKVKNFAVIYLVDITEVPDFNKMYELYDPCTVMFFFSYHRGW

SEQ ID NO: 88446 - protein, 57 aa, Homo sapiens
  Payload ID: 17712
  Gene Name: thioredoxin-like 4A
  ENSP ID: ENSP00000465321
MSYMLPHLHNGWQVDQAILSEEDRVVVIRFGHDWDPTCMKMDEVLYSIAEKEQAHHD

SEQ ID NO: 88447 - protein, 71 aa, Homo sapiens
  Payload ID: 17712
  Gene Name: thioredoxin-like 4A
  ENSP ID: ENSP00000465493
MYELYDPCTVMFFFRNKHIMIDLGTGNNNKINWAMEDKQEMVDIIETVYRGARKGRGLVVSPKDYSTKYRY

SEQ ID NO: 88448 - protein, 71 aa, Homo sapiens; identical to SEQ ID NO: 88447
  Payload ID: 17712
  Gene Name: thioredoxin-like 4A
  ENSP ID: ENSP00000465572

SEQ ID NO: 88449 - protein, 54 aa, Homo sapiens
  Payload ID: 17712
  Gene Name: thioredoxin-like 4A
  ENSP ID: ENSP00000466266
MSYMLPHLHNGWQVDQAILSEEDRVVVIRFGHDWDPTCMKMDEVLYSIAEKVVA

SEQ ID NO: 88450 - protein, 86 aa, Homo sapiens
  Payload ID: 17712
  Gene Name: thioredoxin-like 4A
  ENSP ID: ENSP00000466694
MSYMLPHLHNGWQVDQAILSEEDRVVVIRFGHDWDPTCMKMDEVLYSIAEKFCRLYRKCGTGICFWGGLRTFQSWQKAKGNRHVAR

SEQ ID NO: 88451 - protein, 54 aa, Homo sapiens; identical to SEQ ID NO: 88449
  Payload ID: 17712
  Gene Name: thioredoxin-like 4A
  ENSP ID: ENSP00000467304

SEQ ID NO: 88452 - protein, 103 aa, Homo sapiens
  Payload ID: 17712
  Gene Name: thioredoxin-like 4A
  ENSP ID: ENSP00000468493
MSYMLPHLHNGWQVDQAILSEEDRVVVIRFGHDWDPTCMKMDEVLYSIAEKVKNFAVIYLVDITEVPDFNKMYELYDPCTVMFFFRYVILKLLLKLNIVSLEA

SEQ ID NO: 88453 - protein, 71 aa, Homo sapiens; identical to SEQ ID NO: 88447
  Payload ID: 17712
  Gene Name: thioredoxin-like 4A
  ENSP ID: ENSP00000468761

SEQ ID NO: 88454 - protein, 149 aa, Homo sapiens
  Payload ID: 17713
  Gene Name: thioredoxin-like 4B
  Uniprot ID: Q9NX01
  ENSP ID: ENSP00000268483
MSFLLPKLTSKKEVDQAIKSTAEKVLVLRFGRDEDPVCLQLDDILSKTSSDLSKMAAIYLVDVDQTAVYTQYFDISYIPSTVFFFNGQHMKVDYGSPDHTKFVGSFKTKQDFIDLIEVIYRGAMRGKLIVQSPIDPKNIPKYDLLYQDI

SEQ ID NO: 88455 - protein, 149 aa, Homo sapiens; identical to SEQ ID NO: 88454
  Payload ID: 17713
  Gene Name: thioredoxin-like 4B
  Uniprot ID: Q9NX01
  ENSP ID: ENSP00000392310

SEQ ID NO: 88456 - protein, 149 aa, Homo sapiens; identical to SEQ ID NO: 88454
  Payload ID: 17713
  Gene Name: thioredoxin-like 4B
  Uniprot ID: Q9NX01
  ENSP ID: ENSP00000408130

SEQ ID NO: 88457 - protein, 117 aa, Homo sapiens
  Payload ID: 17713
  Gene Name: thioredoxin-like 4B
  ENSP ID: ENSP00000454635
MSFLLPKLTSKKEVDQAIKSTAEKVLVLRFGRDEDPVCLQLDDILSKTSSDLSKMAAIYLVDVDQTAVYTQYFDISYIPSTVFFFNGQHMKVDYGGEDPALRSIKAVRRTSPAGTLG

SEQ ID NO: 88458 - protein, 57 aa, Homo sapiens
  Payload ID: 17713
  Gene Name: thioredoxin-like 4B
  ENSP ID: ENSP00000455550
MSFLLPKLTSKKEVDQAIKSTAEKVLVLRFGRDEDPVCLQLDDICAASSMCLMQRET

SEQ ID NO: 88459 - protein, 94 aa, Homo sapiens
  Payload ID: 17713
  Gene Name: thioredoxin-like 4B
  ENSP ID: ENSP00000457699
MSFLLPKLTSKKEVDQAIKSTAEKVLVLRFGRDEDPVCLQLDDILSKTSSDLSKMAAIYLVDVDQTAVYTQYFDISYIPSTVFFFNGQHMKVDY

SEQ ID NO: 88460 - protein, 280 aa, Homo sapiens
  Payload ID: 17714
  Gene Name: thioredoxin-related transmembrane protein 1
  Uniprot ID: Q9H3N1
  ENSP ID: ENSP00000393316
MAPSGSLAVPLAVLVLLLWGAPWTHGRRSNVRVITDENWRELLEGDWMIEFYAPWCPACQNLQPEWESFAEWGEDLEVNIAKVDVTEQPGLSGRFIITALPTIYHCKDGEFRRYQGPRTKKDFINFISDKEWKSIEPVSSWFGPGSVLMSSMSALFQLSMWIRTCHNYFIEDLGLPVWGSYTVFALATLFSGLLLGLCMIFVADCLCPSKRRRPQPYPYPSKKLLSESAQPLKKVEEEQEADEEDVSEEEAESKEGTNKDFPQNAIRQRSLGPSLATDKS

SEQ ID NO: 88461 - protein, 105 aa, Homo sapiens
  Payload ID: 17714
  Gene Name: thioredoxin-related transmembrane protein 1
  ENSP ID: ENSP00000451585
MAPSGSLAVPLAVLVLLLWGAPWTHGRRSNVRVITDENWRELLEGDWMIEFYAPWCPACQNLQPEWESFAEWGEDLEVNIAKVDVTEQPGLSGRFIITALPTIYQ

SEQ ID NO: 88462 - protein, 296 aa, Homo sapiens
  Payload ID: 17715
  Gene Name: thioredoxin-related transmembrane protein 2
  Uniprot ID: Q9Y320
  ENSP ID: ENSP00000278422
MAVLAPLIALVYSVPRLSRWLAQPYYLLSALLSAAFLLVRKLPPLCHGLPTQREDGNPCDFDWREVEILMFLSAIVMMKNRRSITVEQHIGNIFMFSKVANTILFFRLDIRMGLLYITLCIVFLMTCKPPLYMGPEYIKYFNDKTIDEELERDKRVTWIVEFFANWSNDCQSFAPIYADLSLKYNCTGLNFGKVDVGRYTDVSTRYKVSTSPLTKQLPTLILFQGGKEAMRRPQIDKKGRAVSWTFSEENVIREFNLNELYQRAKKLSKAGDNIPEEQPVASTPTTVSDGENKKDK

SEQ ID NO: 88463 - protein, 258 aa, Homo sapiens
  Payload ID: 17715
  Gene Name: thioredoxin-related transmembrane protein 2
  Uniprot ID: Q9Y320
  ENSP ID: ENSP00000367562
MAVLAPLIALVYSVPRLSRWLAQPYYLLSALLSAAFLLVRKLPPLCHGLPTQREDGNPCDFDWREVEILMFLSAIVMMKNRRSMFLMTCKPPLYMGPEYIKYFNDKTIDEELERDKRVTWIVEFFANWSNDCQSFAPIYADLSLKYNCTGLNFGKVDVGRYTDVSTRYKVSTSPLTKQLPTLILFQGGKEAMRRPQIDKKGRAVSWTFSEENVIREFNLNELYQRAKKLSKAGDNIPEEQPVASTPTTVSDGENKKDK

SEQ ID NO: 88464 - protein, 103 aa, Homo sapiens
  Payload ID: 17715
  Gene Name: thioredoxin-related transmembrane protein 2
  ENSP ID: ENSP00000431333
MAVLAPLIALVYSVPRLSRWLAQPYYLLSALLSAAFLLVRKLPPLCHGLPTQREDGNPCDFDWREVEILMFLSAIVMMKNRRSRGTRTGQEGHLDCGVLCQLV

SEQ ID NO: 88465 - protein, 115 aa, Homo sapiens
  Payload ID: 17715
  Gene Name: thioredoxin-related transmembrane protein 2
  ENSP ID: ENSP00000431695
MAVLAPLIALVYSVPRLSRWLAQPYYLLSALLSAAFLLVRKLPPLCHGLPTQREDGNPCDFDWREVEILMFLSAIVMMKNRRSMPHEEGQRMGYRSAQPSLTCDISVFQSLWSNI

SEQ ID NO: 88466 - protein, 84 aa, Homo sapiens
  Payload ID: 17715
  Gene Name: thioredoxin-related transmembrane protein 2
  ENSP ID: ENSP00000434002
MAVLAPLIALVYSVPRLSRWLAQPYYLLSALLSAAFLLVRKLPPLCHGLPTQREDGNPCDFDWREVEILMFLSAIVMMKNRRSS

SEQ ID NO: 88467 - protein, 86 aa, Homo sapiens
  Payload ID: 17715
  Gene Name: thioredoxin-related transmembrane protein 2
  ENSP ID: ENSP00000436013
MAVLAPLIALVYSVPRLSRWLAQPYYLLSALLSAAFLLVRKLPPLCHGLPTQREDGNPCDFDWREVEILMFLSAIVMMKNRRSSTK

SEQ ID NO: 88468 - protein, 115 aa, Homo sapiens; identical to SEQ ID NO: 88465
  Payload ID: 17715
  Gene Name: thioredoxin-related transmembrane protein 2
  ENSP ID: ENSP00000437023

SEQ ID NO: 88469 - protein, 103 aa, Homo sapiens; identical to SEQ ID NO: 88464
  Payload ID: 17715
  Gene Name: thioredoxin-related transmembrane protein 2
  ENSP ID: ENSP00000437257

SEQ ID NO: 88470 - protein, 454 aa, Homo sapiens
  Payload ID: 17716
  Gene Name: thioredoxin-related transmembrane protein 3
  Uniprot ID: Q96JJ7
  ENSP ID: ENSP00000299608
MAAWKSWTALRLCATVVVLDMVVCKGFVEDLDESFKENRNDDIWLVDFYAPWCGHCKKLEPIWNEVGLEMKSIGSPVKVGKMDATSYSSIASEFGVRGYPTIKLLKGDLAYNYRGPRTKDDIIEFAHRVSGALIRPLPSQQMFEHMQKRHRVFFVYVGGESPLKEKYIDAASELIVYTYFFSASEEVVPEYVTLKEMPAVLVFKDETYFVYDEYEDGDLSSWINRERFQNYLAMDGFLLYELGDTGKLVALAVIDEKNTSVEHTRLKSIIQEVARDYRDLFHRDFQFGHMDGNDYINTLLMDELTVPTVVVLNTSNQQYFLLDRQIKNVEDMVQFINNILDGTVEAQGGDSILQRLKRIVFDAKSTIVSIFKSSPLMGCFLFGLPLGVISIMCYGIYTADTDGGYIEERYEVSKSENENQEQIEESKEQQEPSSGGSVVPTVQEPKDVLEKKKD

SEQ ID NO: 88471 - protein, 197 aa, Homo sapiens
  Payload ID: 17716
  Gene Name: thioredoxin-related transmembrane protein 3
  ENSP ID: ENSP00000402605
MAAWKSWTALRLCATVVVLDMVVCKGFVEDLDESFKENRNDDIWLVDFYAPWCGHCKKLEPIWNEVGLEMKSIGSPVKVGKMDATSYSSIASEFGVRGYPTIKLALIRPLPSQQMFEHMQKRHRVFFVYVGGESPLKEKYIDAASELIVYTYFFSASEEVVPEYVTLKEMPAVLVFKDETYFVYDGKFQIFNSCKTF

SEQ ID NO: 88472 - protein, 128 aa, Homo sapiens
  Payload ID: 17716
  Gene Name: thioredoxin-related transmembrane protein 3
  ENSP ID: ENSP00000455234
MAAWKSWTALRLCATVVVLDMVVCKGFVEDLDESFKENRNDDIWLVDFYAPWCGHCKKLEPIWNEVGLEMKSIGSPVKVGKMDATSYSSIASEFGVRGYPTIKLRFPGGLKIGVWPFFIGEIKRGLGI

SEQ ID NO: 88473 - protein, 63 aa, Homo sapiens
  Payload ID: 17716
  Gene Name: thioredoxin-related transmembrane protein 3
  ENSP ID: ENSP00000456453
MAAWKSWTALRLCATVVVLDMVVCKGFVEDLDESFKENRNDDIWLVDALLQSLEFEVIQQLSY

SEQ ID NO: 88474 - protein, 89 aa, Homo sapiens
  Payload ID: 17716
  Gene Name: thioredoxin-related transmembrane protein 3
  ENSP ID: ENSP00000456587
MAAWKSWTALRLCATVVVLDMVVCKGFVEDLDESFKENRNDDIWLVDFYAPWCGHCKKLEPIWNEVGLEMKSIGSPVKVGKMDATSYSN

SEQ ID NO: 88475 - protein, 69 aa, Homo sapiens
  Payload ID: 17716
  Gene Name: thioredoxin-related transmembrane protein 3
  ENSP ID: ENSP00000457074
MVVCKGFVEDLDESFKENRNDDIWLVDFYAPWCGHCKKLEPIWNEVGLEMKSIGSPVKVGKMDATSYSN

SEQ ID NO: 88476 - protein, 195 aa, Homo sapiens
  Payload ID: 17716
  Gene Name: thioredoxin-related transmembrane protein 3
  Uniprot ID: Q96JJ7
  ENSP ID: ENSP00000457262
MAAWKSWTALRLCATVVVLDMVVCKGFVEDLDESFKENRNDDIWLVDFYAPWCGHCKKLEPIWNEVGLEMKSIGSPVKVGKMDATSYSSIASEFGVRGYPTIKLLKGDLAYNYRGPRTKDDIIEFAHRVSGALIRPLPSQQMFEHMQKRHRVFFVYVGGESPLKEKYIDAASELIVYTYFFSASEEVVPEVIFKI

SEQ ID NO: 88477 - protein, 89 aa, Homo sapiens; identical to SEQ ID NO: 88474
  Payload ID: 17716
  Gene Name: thioredoxin-related transmembrane protein 3
  ENSP ID: ENSP00000458132

SEQ ID NO: 88478 - protein, 349 aa, Homo sapiens
  Payload ID: 17717
  Gene Name: thioredoxin-related transmembrane protein 4
  Uniprot ID: Q9H1E5
  ENSP ID: ENSP00000246024
MAGGRCGPQLTALLAAWIAAVAATAGPEEAALPPEQSRVQPMTASNWTLVMEGEWMLKFYAPWCPSCQQTDSEWEAFAKNGEILQISVGKVDVIQEPGLSGRFFVTTLPAFFHAKDGIFRRYRGPGIFEDLQNYILEKKWQSVEPLTGWKSPASLTMSGMAGLFSISGKIWHLHNYFTVTLGIPAWCSYVFFVIATLVFGLFMGLVLVVISECFYVPLPRHLSERSEQNRRSEEAHRAEQLQDAEEEKDDSNEEENKDSLVDDEEEKEDLGDEDEAEEEEEEDNLAAGVDEERSEANDQGPPGEDGVTREEVEPEEAEEGISEQPCPADTEVVEDSLRQRKSQHADKGL

SEQ ID NO: 88479 - protein, 79 aa, Homo sapiens
  Payload ID: 17717
  Gene Name: thioredoxin-related transmembrane protein 4
  ENSP ID: ENSP00000433878
MAGGRCGPQLTALLAAWIAAVAATAGPEEAALPPEQSRVQPMTASNWTLVMEGEWMLKLYRYVLEEKGHSVTSTCSMNT

SEQ ID NO: 88480 - protein, 198 aa, Homo sapiens
  Payload ID: 17717
  Gene Name: thioredoxin-related transmembrane protein 4
  ENSP ID: ENSP00000435735
MAGGRCGPQLTALLAAWIAAVAATAGPEEAALPPEQSRVQPMTASNWTLVMEGEWMLKFYAPWCPSCQQTDSEWEAFAKNGEILQISVGKVDVIQEPGIFEDLQNYILEKKWQSVEPLTGWKSPASLTMSGMAGLFSISGKIWHLHNYFTVTLGIPAWCSYVFFVIATLVFGLFMGLVLVVISECFYVPLPRHLSERS

SEQ ID NO: 88481 - protein, 297 aa, Homo sapiens
  Payload ID: 17718
  Gene Name: thiosulfate sulfurtransferase (rhodanese)
  Uniprot ID: Q16762
  ENSP ID: ENSP00000249042
MVHQVLYRALVSTKWLAESIRTGKLGPGLRVLDASWYSPGTREARKEYLERHVPGASFFDIEECRDTASPYEMMLPSEAGFAEYVGRLGISNHTHVVVYDGEHLGSFYAPRVWWMFRVFGHRTVSVLNGGFRNWLKEGHPVTSEPSRPEPAVFKATLDRSLLKTYEQVLENLESKRFQLVDSRSQGRFLGTEPEPDAVGLDSGHIRGAVNMPFMDFLTEDGFEKGPEELRALFQTKKVDLSQPLIATCRKGVTACHVALAAYLCGKPDVAVYDGSWSEWFRRAPPESRVSQGKSEKA

SEQ ID NO: 88482 - protein, 297 aa, Homo sapiens; identical to SEQ ID NO: 88481
  Payload ID: 17718
  Gene Name: thiosulfate sulfurtransferase (rhodanese)
  Uniprot ID: Q16762
  ENSP ID: ENSP00000385828

SEQ ID NO: 88483 - protein, 124 aa, Homo sapiens
  Payload ID: 17718
  Gene Name: thiosulfate sulfurtransferase (rhodanese)
  ENSP ID: ENSP00000400764
MVHQVLYRALVSTKWLAESIRTGKLGPGLRVLDASWYSPGTREARKEYLERHVPGASFFDIEECRDTASPYEMMLPSEAGFAEYVGRLGISNHTHVVVYDGEHLGSFYAPRVWWMFRVFGHRTV

SEQ ID NO: 88484 - protein, 297 aa, Homo sapiens; identical to SEQ ID NO: 88481
  Payload ID: 17718
  Gene Name: thiosulfate sulfurtransferase (rhodanese)
  Uniprot ID: Q16762
  ENSP ID: ENSP00000478739

SEQ ID NO: 88485 - protein, 109 aa, Homo sapiens
  Payload ID: 17719
  Gene Name: thiosulfate sulfurtransferase (rhodanese)-like domain containing 1
  Uniprot ID: Q8NFU3
  ENSP ID: ENSP00000325518
MAGAPTVSLPELRSLLASGRARLFDVRSREEAAAGTIPGALNIPVSELESALQMEPAAFQALYSAEKPKLEDEHLVFFCQMGKRGLQATQLARSLGYTGYGEVWLLAGR

SEQ ID NO: 88486 - protein, 122 aa, Homo sapiens
  Payload ID: 17719
  Gene Name: thiosulfate sulfurtransferase (rhodanese)-like domain containing 1
  Uniprot ID: Q8NFU3
  ENSP ID: ENSP00000357002
MAGGCRAPSSAPTVSLPELRSLLASGRARLFDVRSREEAAAGTIPGALNIPVSELESALQMEPAAFQALYSAEKPKLEDEHLVFFCQMGKRGLQATQLARSLGYTGARNYAGAYREWLEKES

SEQ ID NO: 88487 - protein, 74 aa, Homo sapiens
  Payload ID: 17719
  Gene Name: thiosulfate sulfurtransferase (rhodanese)-like domain containing 1
  Uniprot ID: Q8NFU3
  ENSP ID: ENSP00000357003
MAGVSELESALQMEPAAFQALYSAEKPKLEDEHLVFFCQMGKRGLQATQLARSLGYTGARNYAGAYREWLEKES

SEQ ID NO: 88488 - protein, 115 aa, Homo sapiens
  Payload ID: 17719
  Gene Name: thiosulfate sulfurtransferase (rhodanese)-like domain containing 1
  Uniprot ID: Q8NFU3
  ENSP ID: ENSP00000388293
MAGAPTVSLPELRSLLASGRARLFDVRSREEAAAGTIPGALNIPVSELESALQMEPAAFQALYSAEKPKLEDEHLVFFCQMGKRGLQATQLARSLGYTGARNYAGAYREWLEKES

SEQ ID NO: 88489 - protein, 62 aa, Homo sapiens
  Payload ID: 17719
  Gene Name: thiosulfate sulfurtransferase (rhodanese)-like domain containing 1
  ENSP ID: ENSP00000473633
MEPAAFQALYSAEKPKLEDEHLVFFCQMGKRGLQATQLARSLGYTGARNYAGAYREWLEKES

SEQ ID NO: 88490 - protein, 516 aa, Homo sapiens
  Payload ID: 17720
  Gene Name: thiosulfate sulfurtransferase (rhodanese)-like domain containing 2
  Uniprot ID: Q5T7W7
  ENSP ID: ENSP00000342499
MPSSTSPDQGDDLENCILRFSDLDLKDMSLINPSSSLKAELDGSTKKKYSFAKKKAFALFVKTKEVPTKRSFECKEKLWKCCRQLFTDQTSIHRHVATQHADEIYHQTASILKQLAVTLSTSKSLSSADEKNPLKECLPHSHDVSAWLPDISCFNPDELISGQGSEEGEVLLYYCYHDLEDPQWICAWQTALCQHLHLTGKIRIAAEGINGTVGGSKLATRLYVEVMLSFPLFKDDLCKDDFKTSKGGAHCFPELRVGVFEEIVPMGISPKKISYKKPGIHLSPGEFHKEVEKFLSQANQEQSDTILLDCRNFYESKIGRFQGCLAPDIRKFSYFPSYVDKNLELFREKRVLMYCTGGIRCERGSAYLKAKGVCKEVFQLKGGIHKYLEEFPDGFYKGKLFVFDERYALSYNSDVVSECSYCGARWDQYKLCSTPQCRQLVLTCPACQGQGFTACCVTCQDKGSRKVSGPMQDSFKEECECTARRPRIPRELLQHVRQPVSPEPGPDADEDGPVLM

SEQ ID NO: 88491 - protein, 7 aa, Homo sapiens
  Payload ID: 17720
  Gene Name: thiosulfate sulfurtransferase (rhodanese)-like domain containing 2
  ENSP ID: ENSP00000364308
  MOD_RES (1)..(1): Any amino acid
XKKVEFL

SEQ ID NO: 88492 - protein, 59 aa, Homo sapiens
  Payload ID: 17720
  Gene Name: thiosulfate sulfurtransferase (rhodanese)-like domain containing 2
  ENSP ID: ENSP00000364315
MPSSTSPDQGDDLENCILRFSDLDLKDMSLINPSSSLKAELDGSTKKKYSFAKKKVEFL

SEQ ID NO: 88493 - protein, 657 aa, Homo sapiens
  Payload ID: 17721
  Gene Name: THO complex 1
  Uniprot ID: Q96FV9
  ENSP ID: ENSP00000261600
MSPTPPLFSLPEARTRFTKSTREALNNKNIKPLLSTFSQVPGSENEKKCTLDQAFRGILEEEIINHSSCENVLAIISLAIGGVTEGICTASTPFVLLGDVLDCLPLDQCDTIFTFVEKNVATWKSNTFYSAGKNYLLRMCNDLLRRLSKSQNTVFCGRIQLFLARLFPLSEKSGLNLQSQFNLENVTVFNTNEQESTLGQKHTEDREEGMDVEEGEMGDEEAPTTCSIPIDYNLYRKFWSLQDYFRNPVQCYEKISWKTFLKYSEEVLAVFKSYKLDDTQASRKKMEELKTGGEHVYFAKFLTSEKLMDLQLSDSNFRRHILLQYLILFQYLKGQVKFKSSNYVLTDEQSLWIEDTTKSVYQLLSENPPDGERFSKMVEHILNTEENWNSWKNEGCPSFVKERTSDTKPTRIIRKRTAPEDFLGKGPTKKILMGNEELTRLWNLCPDNMEACKSETREHMPTLEEFFEEAIEQADPENMVENEYKAVNNSNYGWRALRLLARRSPHFFQPTNQQFKSLPEYLENMVIKLAKELPPPSEEIKTGEDEDEEDNDALLKENESPDVRRDKPVTGEQIEVFANKLGEQWKILAPYLEMKDSEIRQIECDSEDMKMRAKQLLVAWQDQEGVHATPENLINALNKSGLSDLAESLTNDNETNS

SEQ ID NO: 88494 - protein, 86 aa, Homo sapiens
  Payload ID: 17721
  Gene Name: THO complex 1
  ENSP ID: ENSP00000461943
MSPTPPLFSLPEARTRFTKSTREALNNKNIKPLLSTFSQVPGSENEKKCTLDQAFRGILEEEIINHSSCENVLAIISLAIGGVTEA

SEQ ID NO: 88495 - protein, 251 aa, Homo sapiens
  Payload ID: 17721
  Gene Name: THO complex 1
  ENSP ID: ENSP00000462757
MSPTPPLFSLPEARTRFTKSTREALNNKNIKPLLSTFSQVPGSENEKKCTLDQAFRGILEEEIINHSSCENVLAIISLAIGGVTEGICTASTPFVLLGDVLDCLPLDQCDTIFTFVEKNVATWKSNTFYSAGKNYLLRMCNDLLRRLSKSQNTVFCGRIQLFLARLFPLSEKSGLNLQSQFNLENVTVFNTNEQESTLGQKHTEDREEGMDVEEGEMGDEEAPTTWITSGTLCNAMRRFHGKLFSSILKKF

SEQ ID NO: 88496 - protein, 121 aa, Homo sapiens
  Payload ID: 17721
  Gene Name: THO complex 1
  ENSP ID: ENSP00000463965
MSPTPPLFSLPEARTRFTKSTREALNNKNIKPLLSTFSQVPGSENEKKCTLDQAFRGILEEEIVFVPHLHLLYCWEMFWIVFLWISVTQYSLLWKKMLLLGNQIHSILLGKITYYVCAMIS

SEQ ID NO: 88497 - protein, 272 aa, Homo sapiens
  Payload ID: 17721
  Gene Name: THO complex 1
  ENSP ID: ENSP00000473276
  MOD_RES (1)..(1): Any amino acid
XFKSYKLDDTQASRKKMEELKTGGEHVYFAKFLTSEKLMDLQLSDSNFRRHILLQYLILFQYLKGQVKFKSSNYVLTDEQSLWIEDTTKSVYQLLSENPPDGERFSKMVEHILNTEENWNSWKNEGCPSFVKESVCFVHDRTSDTKPTRIIRKRTAPEDFLGKGPTKKILMGNEELTRLWNLCPDNMEACKSETREHMPTLEEFFEEAIEQADPENMVENEYKAVNNSNYGWRALRLLARRSPHFFQPTNQQFKSLPEYLENMVIKLAKELP

SEQ ID NO: 88498 - protein, 95 aa, Homo sapiens
  Payload ID: 17721
  Gene Name: THO complex 1
  ENSP ID: ENSP00000473499
  MOD_RES (1)..(1): Any amino acid
XEGEMGDEEAPTTCSIPIDYNLYRKFWSLQDYFRNPVQCYEKISWKTFLKYSEEVLAVFKSYKLDDTQASRKKMEELKTGGEHVYFAKFLTSEKV

SEQ ID NO: 88499 - protein, 657 aa, Homo sapiens
  Payload ID: 17721
  Gene Name: THO complex 1
  ENSP ID: ENSP00000480460
MSPTPPLFSLPEARTRFTKSTREALNNKNIKPLLSTFSQVPGSENEKKCTLDQAFRGILEEEIINHSSCENVLAIISLAIGGVTEGICTASTPFVLLGDVLDCLPLDQCDTIFTFVEKNVATWKSNTFYSAGKNYLLRMCNDLLRRLSKSQNTVFCGRIQLFLARLFPLSEKSGLNLQSQFNLENVTVFNTNEQESTLGQKHTEDREEGMDVEEGEMGDEEAPTTCSIPIDYNLYRKFWSLQDYFRNPVQCYEKISWKTFLKYSEEVLAVFKSYKLDDTQASRKKMEELKTGGEHVYFAKFLTSEKLMDLQLSDSNFRRHILLQYLILFQYLKGQVKFKSSNYVLTDEQSLWIEDTTKSVYQLLSENPPDGERFSKMVEHILNTEENWNSWKNEGCPSFVKDRTSDTKPTRIIRKRTAPEDFLGKGPTKKILMGNEELTRLWNLCPDNMEACKSETREHMPTLEEFFEEAIEQADPENMVENEYKAVNNSNYGWRALRLLARRSPHFFQPTNQQFKSLPEYLENMVIKLAKELPPPSEEIKTGEDEDEEDNDALLKENESPDVRRDKPVTGEQIEVFANKLGEQWKILAPYLEMKDSEIRQIECDSEDMKMRAKQLLVAWQDQEGVHATPENLINALNKSGLSDLAESLTNDNETNS

SEQ ID NO: 88500 - protein, 360 aa, Homo sapiens
  Payload ID: 17721
  Gene Name: THO complex 1
  ENSP ID: ENSP00000481599
FKSTREALNNKNIKPLLSTFSQVPGSENEKKCTLDQAFRGILEEEIINHSSCENVLAIISLAIGGVTEGICTASTPFVLLGDVLDCLPLDQCDTIFTFVEKNVATWKSNTFYSAGKNYLLRMCNDLLRRLSKSQNTVFCGRIQLFLARLFPLSEKSGLNLQSQFNLENVTVFNTNEQESTLGQKHTEDREEGMDVEEGEMGDEEAPTTCSIPIDYNLYRKFWSLQDYFRNPVQCYEKISWKTFLKYSEEVLAVFKSYKLDDTQASRKKMEELKTGGEHVYFAKFLTSEKLMDLQLSDSNFRRHILLQYLILFQYLKGQVKFKSSNYVLTDEQSLWIEDTTKSVYQVSSTRNKPMIEKMEI

SEQ ID NO: 88501 - protein, 121 aa, Homo sapiens; identical to SEQ ID NO: 88496
  Payload ID: 17721
  Gene Name: THO complex 1
  ENSP ID: ENSP00000486359

SEQ ID NO: 88502 - protein, 1593 aa, Homo sapiens
  Payload ID: 17722
  Gene Name: THO complex 2
  Uniprot ID: Q8NI27
  ENSP ID: ENSP00000245838
MAAAAVVVPAEWIKNWEKSGRGEFLHLCRILSENKSHDSSTYRDFQQALYELSYHVIKGNLKHEQASNVLSDISEFREDMPSILADVFCILDIETNCLEEKSKRDYFTQLVLACLYLVSDTVLKERLDPETLESLGLIKQSQQFNQKSVKIKTKLFYKQQKFNLLREENEGYAKLIAELGQDLSGSITSDLILENIKSLIGCFNLDPNRVLDVILEVFECRPEHDDFFISLLESYMSMCEPQTLCHILGFKFKFYQEPNGETPSSLYRVAAVLLQFNLIDLDDLYVHLLPADNCIMDEHKREIAEAKQIVRKLTMVVLSSEKMDEREKEKEKEEEKVEKPPDNQKLGLLEALLKIGDWQHAQNIMDQMPPYYAASHKLIALAICKLIHITIEPLYRRVGVPKGAKGSPVNALQNKRAPKQAESFEDLRRDVFNMFCYLGPHLSHDPILFAKVVRIGKSFMKEFQSDGSKQEDKEKTEVILSCLLSITDQVLLPSLSLMDCNACMSEELWGMFKTFPYQHRYRLYGQWKNETYNSHPLLVKVKAQTIDRAKYIMKRLTKENVKPSGRQIGKLSHSNPTILFDYILSQIQKYDNLITPVVDSLKYLTSLNYDVLAYCIIEALANPEKERMKHDDTTISSWLQSLASFCGAVFRKYPIDLAGLLQYVANQLKAGKSFDLLILKEVVQKMAGIEITEEMTMEQLEAMTGGEQLKAEGGYFGQIRNTKKSSQRLKDALLDHDLALPLCLLMAQQRNGVIFQEGGEKHLKLVGKLYDQCHDTLVQFGGFLASNLSTEDYIKRVPSIDVLCNEFHTPHDAAFFLSRPMYAHHISSKYDELKKSEKGSKQQHKVHKYITSCEMVMAPVHEAVVSLHVSKVWDDISPQFYATFWSLTMYDLAVPHTSYEREVNKLKVQMKAIDDNQEMPPNKKKKEKERCTALQDKLLEEEKKQMEHVQRVLQRLKLEKDNWLLAKSTKNETITKFLQLCIFPRCIFSAIDAVYCARFVELVHQQKTPNFSTLLCYDRVFSDIIYTVASCTENEASRYGRFLCCMLETVTRWHSDRATYEKECGNYPGFLTILRATGFDGGNKADQLDYENFRHVVHKWHYKLTKASVHCLETGEYTHIRNILIVLTKILPWYPKVLNLGQALERRVHKICQEEKEKRPDLYALAMGYSGQLKSRKSYMIPENEFHHKDPPPRNAVASVQNGPGGGPSSSSIGSASKSDESSTEETDKSRERSQCGVKAVNKASSTTPKGNSSNGNSGSNSNKAVKENDKEKGKEKEKEKKEKTPATTPEARVLGKDGKEKPKEERPNKDEKARETKERTPKSDKEKEKFKKEEKAKDEKFKTTVPNAESKSTQEREREKEPSRERDIAKEMKSKENVKGGEKTPVSGSLKSPVPRSDIPEPEREQKRRKIDTHPSPSHSSTVKDSLIELKESSAKLYINHTPPPLSKSKEREMDKKDLDKSRERSREREKKDEKDRKERKRDHSNNDREVPPDLTKRRKEENGTMGVSKHKSESPCESPYPNEKDKEKNKSKSSGKEKGSDSFKSEKMDKISSGGKKESRHDKEKIEKKEKRDSSGGKEEKKHHKSSDKHR

SEQ ID NO: 88503 - protein, 1593 aa, Homo sapiens; identical to SEQ ID NO: 88502
  Payload ID: 17722
  Gene Name: THO complex 2
  Uniprot ID: Q8NI27
  ENSP ID: ENSP00000347959

SEQ ID NO: 88504 - protein, 189 aa, Homo sapiens
  Payload ID: 17722
  Gene Name: THO complex 2
  ENSP ID: ENSP00000397317
  MOD_RES (1)..(1): Any amino acid
XEQKRRKIDTHPSPSHSSTVKDSLIELKESSAKLYINHTPPPLSKSKEREMDKKDLDKSRERSREREKKDEKDRKERKRDHSNNDREVPPDLTKRRKEENGTMGVSKHKSESPCESPYPNEKDKEKNKSKSSGKEKGSDSFKSEKMDKISSGGKKESRHDKEKIEKKEKRDSSGGKEEKKHHKSSDKHR

SEQ ID NO: 88505 - protein, 84 aa, Homo sapiens
  Payload ID: 17722
  Gene Name: THO complex 2
  ENSP ID: ENSP00000402168
GVSKHKSESPCESPYPNEKDKEKNKSKSSGKEKGSDSFKSEKMDKISSGGKKESRHDKEKIEKKEKRDSSGGKEEKKQSSDKHR

SEQ ID NO: 88506 - protein, 388 aa, Homo sapiens
  Payload ID: 17722
  Gene Name: THO complex 2
  ENSP ID: ENSP00000415211
  MOD_RES (1)..(1): Any amino acid
XSQCGVKAVNKASSTTPKGNSSNGNSGSNSNKAVKENDKEKGKEKEKEKKEKTPATTPEARVLGKDGKEKPKEERPNKDEKARETKERTPKSDKEKEKFKKEEKAKDEKFKTTVPNAESKSTQEREREKEPSRERDIAKEMKSKENVKGGEKTPVSGSLKSPVPRSDIPEPEREQKRRKIDTHPSPSHSSTVKVTAILPKVPLGSENYASSPVISIHFLQDSLIELKESSAKLYINHTPPPLSKSKEREMDKKDLDKSRERSREREKKDEKDRKERKRDHSNNDREVPPDLTKRRKEENGTMGVSKHKSESPCESPYPNEKDKEKNKSKSSGKEKGSDSFKSEKMDKISSGGKKESRHDKEKIEKKEKRDSSGGKEEKKHHKSSDKHR

SEQ ID NO: 88507 - protein, 180 aa, Homo sapiens
  Payload ID: 17722
  Gene Name: THO complex 2
  ENSP ID: ENSP00000415244
IDTHPSPSHSSTVKDSLIELKESSAKLYINHTPPPLSKSKEREMDKKDLDKSRERSREREKKDEKDRKERKRDHSNNDREVPPDLTKRRKEENGTMGVSKHKSESPCESPYPNEKDKEKNKSKSSGKEKGSDSFKSEKMDKISSGGKKESRHDKEKIEKKEKRDSSGGKEEKKQSSDKHR

SEQ ID NO: 88508 - protein, 120 aa, Homo sapiens
  Payload ID: 17722
  Gene Name: THO complex 2
  ENSP ID: ENSP00000415374
MAAAAVVVPAEWIKNWEKSGRGEFLHLCRILSENKSHDSSTYRDFQQALYELSYHVIKGNLKHEQASNVLSDISEFREDMPSILADVFCILDIETNCLEEKSKRDYFTQLVLACLFQTQF

SEQ ID NO: 88509 - protein, 165 aa, Homo sapiens
  Payload ID: 17722
  Gene Name: THO complex 2
  ENSP ID: ENSP00000415947
  MOD_RES (1)..(1): Any amino acid
XVKENDKEKGKEKEKEKKEKTPATTPEARVLGKDGKEKPKEERPNKDEKARETKERTPKSDKEKEKFKKEEKAKDEKFKTTVPNAESKSTQEREREKEPSRERDIAKEMKSKENVKGGEKTPVSGSLKSPVPRSDIPEPEREQKRRKIDTHPSPSHSSTVKVSIA

SEQ ID NO: 88510 - protein, 379 aa, Homo sapiens
  Payload ID: 17722
  Gene Name: THO complex 2
  ENSP ID: ENSP00000416639
  MOD_RES (1)..(1): Any amino acid
XERCTALQDKLLEEEKKQMEHVQRVLQRLKLEKDNWLLAKSTKNETITKFLQLCIFPRCIFSAIDAVYCARFVELVHQQKTPNFSTLLCYDRVFSDIIYTVASCTENEASRYGRFLCCMLETVTRWHSDRATYEKECGNYPGFLTILRATGFDGGNKADQLDYENFRHVVHKWHYKLTKASVHCLETGEYTHIRNILIVLTKILPWYPKVLNLGQALERRVHKICQEEKEKRPDLYALAMGVEVYLLPSGDYGRLCDHVSTGCYSGQLKSRKSYMIPENEFHHKDPPPRNAVASVQNGPGGGPSSSSIGSASKSDESSTEETDKSRERSQCGVKAVNKASSTTPKGNSSNGNSGSNSNKAVKENDKEKGKEKEKEKKEK

SEQ ID NO: 88511 - protein, 1478 aa, Homo sapiens
  Payload ID: 17722
  Gene Name: THO complex 2
  ENSP ID: ENSP00000419795
MFVSDTVLKERLDPETLESLGLIKQSQQFNQKSVKIKTKLFYKQQKFNLLREENEGYAKLIAELGQDLSGSITSDLILENIKSLIGCFNLDPNRVLDVILEVFECRPEHDDFFISLLESYMSMCEPQTLCHILGFKFKFYQEPNGETPSSLYRVAAVLLQFNLIDLDDLYVHLLPADNCIMDEHKREIAEAKQIVRKLTMVVLSSEKMDEREKEKEKEEEKVEKPPDNQKLGLLEALLKIGDWQHAQNIMDQMPPYYAASHKLIALAICKLIHITIEPLYRRVGVPKGAKGSPVNALQNKRAPKQAESFEDLRRDVFNMFCYLGPHLSHDPILFAKVVRIGKSFMKEFQSDGSKQEDKEKTEVILSCLLSITDQVLLPSLSLMDCNACMSEELWGMFKTFPYQHRYRLYGQWKNETYNSHPLLVKVKAQTIDRAKYIMKRLTKENVKPSGRQIGKLSHSNPTILFDYILSQIQKYDNLITPVVDSLKYLTSLNYDVLAYCIIEALANPEKERMKHDDTTISSWLQSLASFCGAVFRKYPIDLAGLLQYVANQLKAGKSFDLLILKEVVQKMAGIEITEEMTMEQLEAMTGGEQLKAEGGYFGQIRNTKKSSQRLKDALLDHDLALPLCLLMAQQRNGVIFQEGGEKHLKLVGKLYDQCHDTLVQFGGFLASNLSTEDYIKRVPSIDVLCNEFHTPHDAAFFLSRPMYAHHISSKYDELKKSEKGSKQQHKVHKYITSCEMVMAPVHEAVVSLHVSKVWDDISPQFYATFWSLTMYDLAVPHTSYEREVNKLKVQMKAIDDNQEMPPNKKKKEKERCTALQDKLLEEEKKQMEHVQRVLQRLKLEKDNWLLAKSTKNETITKFLQLCIFPRCIFSAIDAVYCARFVELVHQQKTPNFSTLLCYDRVFSDIIYTVASCTENEASRYGRFLCCMLETVTRWHSDRATYEKECGNYPGFLTILRATGFDGGNKADQLDYENFRHVVHKWHYKLTKASVHCLETGEYTHIRNILIVLTKILPWYPKVLNLGQALERRVHKICQEEKEKRPDLYALAMGYSGQLKSRKSYMIPENEFHHKDPPPRNAVASVQNGPGGGPSSSSIGSASKSDESSTEETDKSRERSQCGVKAVNKASSTTPKGNSSNGNSGSNSNKAVKENDKEKGKEKEKEKKEKTPATTPEARVLGKDGKEKPKEERPNKDEKARETKERTPKSDKEKEKFKKEEKAKDEKFKTTVPNAESKSTQEREREKEPSRERDIAKEMKSKENVKGGEKTPVSGSLKSPVPRSDIPEPEREQKRRKIDTHPSPSHSSTVKDSLIELKESSAKLYINHTPPPLSKSKEREMDKKDLDKSRERSREREKKDEKDRKERKRDHSNNDREVPPDLTKRRKEENGTMGVSKHKSESPCESPYPNEKDKEKNKSKSSGKEKGSDSFKSEKMDKISSGGKKESRHDKEKIEKKEKRDSSGGKEEKKHHKSSDKHR

SEQ ID NO: 88512 - protein, 414 aa, Homo sapiens
  Payload ID: 17722
  Gene Name: THO complex 2
  Uniprot ID: Q8NI27
  ENSP ID: ENSP00000480478
MIPENEFHHKDPPPRNAVASVQNGPGGGPSSSSIGSASKSDESSTEETDKSRERSQCGVKAVNKASSTTPKGNSSNGNSGSNSNKAVKENDKEKGKEKEKEKKEKTPATTPEARVLGKDGKEKPKEERPNKDEKARETKERTPKSDKEKEKFKKEEKAKDEKFKTTVPNAESKSTQEREREKEPSRERDIAKEMKSKENVKGGEKTPVSGSLKSPVPRSDIPEPEREQKRRKIDTHPSPSHSSTVKDSLIELKESSAKLYINHTPPPLSKSKEREMDKKDLDKSRERSREREKKDEKDRKERKRDHSNNDREVPPDLTKRRKEENGTMGVSKHKSESPCESPYPNEKDKEKNKSKSSGKEKGSDSFKSEKMDKISSGGKKESRHDKEKIEKKEKRDSSGGKEEKKHHKSSDKHR

SEQ ID NO: 88513 - protein, 351 aa, Homo sapiens
  Payload ID: 17723
  Gene Name: THO complex 3
  Uniprot ID: Q96J01
  ENSP ID: ENSP00000265097
MAVPAAAMGPSALGQSGPGSMAPWCSVSSGPSRYVLGMQELFRGHSKTREFLAHSAKVHSVAWSCDGRRLASGSFDKTASVFLLEKDRLVKENNYRGHGDSVDQLCWHPSNPDLFVTASGDKTIRIWDVRTTKCIATVNTKGENINICWSPDGQTIAVGNKDDVVTFIDAKTHRSKAEEQFKFEVNEISWNNDNNMFFLTNGNGCINILSYPELKPVQSINAHPSNCICIKFDPMGKYFATGSADALVSLWDVDELVCVRCFSRLDWPVRTLSFSHDGKMLASASEDHFIDIAEVETGDKLWEVQCESPTFTVAWHPKRPLLAFACDDKDGKYDSSREAGTVKLFGLPNDS

SEQ ID NO: 88514 - protein, 75 aa, Homo sapiens
  Payload ID: 17723
  Gene Name: THO complex 3
  ENSP ID: ENSP00000394166
  MOD_RES (1)..(1): Any amino acid
XVSLWDVDELVCVRCFSRLDWPVRTLSFSHDGKMLASASEDHFIDIAEVETDRVSFCHPAWCAVVQAILLPQPPK

SEQ ID NO: 88515 - protein, 105 aa, Homo sapiens
  Payload ID: 17723
  Gene Name: THO complex 3
  ENSP ID: ENSP00000421082
MAVPAAAMGPSALGQSGPGSMAPWCSVSSGPSRYVLGMQELFRGHSKTREFLAHSAKVHSVAWSCDGRRLASGSFDKTASVFLLEKDRLGRTLISAGVLMGRPLL

SEQ ID NO: 88516 - protein, 327 aa, Homo sapiens
  Payload ID: 17723
  Gene Name: THO complex 3
  Uniprot ID: Q96J01
  ENSP ID: ENSP00000422243
MAVPAAAMGPSALGQSGPGSMAPWCSVSSGPSRYVLGMQELFRGHSKTREFLAHSAKVHSVAWSCDGRRLASGSFDKTASVFLLEKDRLVKENNYRGHGDSVDQLCWHPSNPDLFVTASGDKTIRIWDVRTTKCIATVNTKGENINICWSPDGQTIAVGNKDDVVTFIDAKTHRSKAEEQFKFEVNEISWNNDNNMFFLTNGNGCINILSYPELKPVQSINAHPSNCICIKFDPMGKYFATGSADALVSLWDVDELVCVRCFSRLDWPVRTLSFSHDGKMLASASEDHFIDIAEVETGNFMRIYRLSPLAVRTSLVISSLHVTTSPA

SEQ ID NO: 88517 - protein, 56 aa, Homo sapiens
  Payload ID: 17723
  Gene Name: THO complex 3
  ENSP ID: ENSP00000424967
  MOD_RES (1)..(1): Any amino acid
XQSINAHPSNCICIKFDPMGKYFATGSADALVSLWDVDELVCVRCFSRGQTMGGTV

SEQ ID NO: 88518 - protein, 166 aa, Homo sapiens
  Payload ID: 17723
  Gene Name: THO complex 3
  ENSP ID: ENSP00000425039
MAWLCGSLPVVVAVTAMETAARQECYPELKPVQSINAHPSNCICIKFDPMGKYFATGSADALVSLWDVDELVCVRCFSRLDWPVRTLSFSHDGKMLASASEDHFIDIAEVETGDKLWEVQCESPTFTVAWHPKRPLLAFACDDKDGKYDSSREAGTVKLFGLPNDS

SEQ ID NO: 88519 - protein, 57 aa, Homo sapiens
  Payload ID: 17723
  Gene Name: THO complex 3
  ENSP ID: ENSP00000425781
HDGKMLASASEDHFIDIAEVETVQQTHSASQKAAGPLAKRPVCSIVIIPPSLLPFES

SEQ ID NO: 88520 - protein, 55 aa, Homo sapiens
  Payload ID: 17723
  Gene Name: THO complex 3
  ENSP ID: ENSP00000427029
VVVAVTAMETAARQEWSKKTIIGDMGIVWTSFVGIQVILTYLLRRPEIKPFASGM

SEQ ID NO: 88521 - protein, 13 aa, Homo sapiens
  Payload ID: 17723
  Gene Name: THO complex 3
  ENSP ID: ENSP00000427267
VAVTAMETAARQE

SEQ ID NO: 88522 - protein, 105 aa, Homo sapiens; identical to SEQ ID NO: 88515
  Payload ID: 17723
  Gene Name: THO complex 3
  ENSP ID: ENSP00000487428

SEQ ID NO: 88523 - protein, 683 aa, Homo sapiens
  Payload ID: 17724
  Gene Name: THO complex 5
  Uniprot ID: Q13769
  ENSP ID: ENSP00000380969
MSSESSKKRKPKVIRSDGAPAEGKRNRSDTEQEGKYYSEEAEVDLRDPGRDYELYKYTCQELQRLMAEIQDLKSRGGKDVAIEIEERRIQSCVHFMTLKKLNRLAHIRLKKGRDQTHEAKQKVDAYHLQLQNLLYEVMHLQKEITKCLEFKSKHEEIDLVSLEEFYKEAPPDISKAEVTMGDPHQQTLARLDWELEQRKRLAEKYRECLSNKEKILKEIEVKKEYLSSLQPRLNSIMQASLPVQEYLFMPFDQAHKQYETARHLPPPLYVLFVQATAYGQACDKTLSVAIEGSVDEAKALFKPPEDSQDDESDSDAEEEQTTKRRRPTLGVQLDDKRKEMLKRHPLSVMLDLKCKDDSVLHLTFYYLMNLNIMTVKAKVTTAMELITPISAGDLLSPDSVLSCLYPGDHGKKTPNPANQYQFDKVGILTLSDYVLELGHPYLWVQKLGGLHFPKEQPQQTVIADHSLSASHMETTMKLLKTRVQSRLALHKQFASLEHGIVPVTSDCQYLFPAKVVSRLVKWVTVAHEDYMELHFTKDIVDAGLAGDTNLYYMALIERGTAKLQAAVVLNPGYSSIPPVFQLCLNWKGEKTNSNDDNIRAMEGEVNVCYKELCGPWPSHQLLTNQLQRLCVLLDVYLETESHDDSVEGPKEFPQEKMCLRLFRGPSRMKPFKYNHPQGFFSHR

SEQ ID NO: 88524 - protein, 683 aa, Homo sapiens; identical to SEQ ID NO: 88523
  Payload ID: 17724
  Gene Name: THO complex 5
  Uniprot ID: Q13769
  ENSP ID: ENSP00000380970

SEQ ID NO: 88525 - protein, 683 aa, Homo sapiens; identical to SEQ ID NO: 88523
  Payload ID: 17724
  Gene Name: THO complex 5
  Uniprot ID: Q13769
  ENSP ID: ENSP00000380971

SEQ ID NO: 88526 - protein, 93 aa, Homo sapiens
  Payload ID: 17724
  Gene Name: THO complex 5
  ENSP ID: ENSP00000388039
MSSESSKKRKPKVIRSDGAPAEGKRNRSDTEQEGKYYSEEAEVDLRDPGRDYELYKYTCQELQRLMAEIQDLKSRGGKDVAIEIEERRIQSCV

SEQ ID NO: 88527 - protein, 262 aa, Homo sapiens
  Payload ID: 17724
  Gene Name: THO complex 5
  ENSP ID: ENSP00000393247
  MOD_RES (1)..(1): Any amino acid
XKEITKCLEFKSKHEEIDLVSLEEFYKEAPPDISKAEVTMGDPHQQTLARLDWELEQRKRLAEKYRECLSNKEKILKEIEVKKEYLSSLQPRLNSIMQASLPVQEYLFMPFDQAHKQYETARHLPPPLYVLFVQATAYGQACAHMKSSQPPRQDKTLSVAIEGSVDEAKALFKPPEDSQDDESDSDAEEEQTTKRRRPTLGVQLDDKRKEMLKRHPLSVMLDLKCKDDSVLHLTFYYLMNLNIMTVKAKVTTAMELITPISA

SEQ ID NO: 88528 - protein, 43 aa, Homo sapiens
  Payload ID: 17724
  Gene Name: THO complex 5
  ENSP ID: ENSP00000393420
MSSESSKKRKPKVIRSDGAPAEGKRNRSDTEQEGKYYSEEADG

SEQ ID NO: 88529 - protein, 223 aa, Homo sapiens
  Payload ID: 17724
  Gene Name: THO complex 5
  ENSP ID: ENSP00000413505
MSSESSKKRKPKVIRSDGAPAEGKRNRSDTEQEGKYYSEEAEVDLRDPGRDYELYKYTCQELQRLMAEIQDLKSRGGKDVAIEIEERRIQSCVHFMTLKKLNRLAHIRLKKGRDQTHEAKQKVDAYHLQLQNLLYEVMHLQKEITKCLEFKSKHEEIDLVSLEEFYKEAPPDISKAEVTMGDPHQQTLARLDWELEQRKRLAEKYRECLSNKEKILKEIEVKK

SEQ ID NO: 88530 - protein, 176 aa, Homo sapiens
  Payload ID: 17724
  Gene Name: THO complex 5
  ENSP ID: ENSP00000415425
MILRPPQLCGTEGKYYSEEAEVDLRDPGRDYELYKYTCQELQRLMAEIQDLKSRGGKDVAIEIEERRIQSCVHFMTLKKLNRLAHIRLKKGRDQTHEAKQKVDAYHLQLQNLLYEVMHLQKEITKCLEFKSKHEEIDLVSLEEFYKEAPPDISKAEVTMGDPHQQTLARLDWELEQ

SEQ ID NO: 88531 - protein, 343 aa, Homo sapiens
  Payload ID: 17724
  Gene Name: THO complex 5
  ENSP ID: ENSP00000416500
MSSESSKKRKPKVIRSDGAPAEGKRNRSDTEQEGKYYSEEAEVDLRDPGRDYELYKYTCQELQRLMAEIQDLKSRGGKDVAIEIEERRIQSCVHFMTLKKLNRLAHIRLKKGRDQTHEAKQKVDAYHLQLQNLLYEVMHLQKEITKCLEFKSKHEEIDLVSLEEFYKEAPPDISKAEVTMGDPHQQTLARLDWELEQRKRLAEKYRECLSNKEKILKEIEVKKEYLSSLQPRLNSIMQASLPVQEYLFMPFDQAHKQYETARHLPPPLYVLFVQATAYGQACAHMKSSQPPRQDKTLSVAIEGSVDEAKALFKPPEDSQDDESDSDAEEEQTTVPSSLEAEEV

SEQ ID NO: 88532 - protein, 161 aa, Homo sapiens
  Payload ID: 17724
  Gene Name: THO complex 5
  ENSP ID: ENSP00000416804
MSSESSKKRKPKVIRSDGAPAEGKRNRSDTEQEGKYYSEEAEVDLRDPGRDYELYKYTCQELQRLMAEIQDLKSRGGKDVAIEIEERRIQSCVHFMTLKKLNRLAHIRLKKGRDQTHEAKQKVDAYHLQLQNLLYEVMHLQKEITKCLEFKSKHEEIDLVS

SEQ ID NO: 88533 - protein, 683 aa, Homo sapiens; identical to SEQ ID NO: 88523
  Payload ID: 17724
  Gene Name: THO complex 5
  Uniprot ID: Q13769
  ENSP ID: ENSP00000420306

SEQ ID NO: 88534 - protein, 127 aa, Homo sapiens
  Payload ID: 17724
  Gene Name: THO complex 5
  ENSP ID: ENSP00000444493
MSSESSKKRKPKVIRSDGAPAEGKRNRSDTEQEGKYYSEEAEVDLRDPGRDYELYKYTCQELQRLMAEIQDLKSRGGKDVAIEIEERRIQSCVHFMTLKKLNRLAHIRLKKGRDQTHEVVVKRLSRK

SEQ ID NO: 88535 - protein, 296 aa, Homo sapiens
  Payload ID: 17725
  Gene Name: THO complex 6
  Uniprot ID: Q86W42
  ENSP ID: ENSP00000253952
MERAVPLAVPLGQTEVFQALQRLHMTIFSQSVSPCGKFLAAGNNYGQIAIFSLSSALSSEAKEESKKPVVTFQAHDGPVYSMVSTDRHLLSAGDGEVKAWLWAEMLKKGCKELWRRQPPYRTSLEVPEINALLLVPKENSLILAGGDCQLHTMDLETGTFTRVLRGHTDYIHCLALRERSPEVLSGGEDGAVRLWDLRTAKEVQTIEVYKHEECSRPHNGRWIGCLATDSDWMVCGGGPALTLWHLRSSTPTTIFPIRAPQKHVTFYQDLVLTAAGNSCRVDVFTNLGYRAFSLSF

SEQ ID NO: 88536 - protein, 341 aa, Homo sapiens
  Payload ID: 17725
  Gene Name: THO complex 6
  Uniprot ID: Q86W42
  ENSP ID: ENSP00000326531
MERAVPLAVPLGQTEVFQALQRLHMTIFSQSVSPCGKFLAAGNNYGQIAIFSLSSALSSEAKEESKKPVVTFQAHDGPVYSMVSTDRHLLSAGDGEVKAWLWAEMLKKGCKELWRRQPPYRTSLEVPEINALLLVPKENSLILAGGDCQLHTMDLETGTFTRVLRGHTDYIHCLALRERSPEVLSGGEDGAVRLWDLRTAKEVQTIEVYKHEECSRPHNGRWIGCLATDSDWMVCGGGPALTLWHLRSSTPTTIFPIRAPQKHVTFYQDLILSAGQGRCVNQWQLSGELKAQVPGSSPGLLSLSLNQQPAAPECKVLTAAGNSCRVDVFTNLGYRAFSLSF

SEQ ID NO: 88537 - protein, 317 aa, Homo sapiens
  Payload ID: 17725
  Gene Name: THO complex 6
  Uniprot ID: Q86W42
  ENSP ID: ENSP00000458295
MTIFSQSVSPCGKFLAAGNNYGQIAIFSLSSALSSEAKEESKKPVVTFQAHDGPVYSMVSTDRHLLSAGDGEVKAWLWAEMLKKGCKELWRRQPPYRTSLEVPEINALLLVPKENSLILAGGDCQLHTMDLETGTFTRVLRGHTDYIHCLALRERSPEVLSGGEDGAVRLWDLRTAKEVQTIEVYKHEECSRPHNGRWIGCLATDSDWMVCGGGPALTLWHLRSSTPTTIFPIRAPQKHVTFYQDLILSAGQGRCVNQWQLSGELKAQVPGSSPGLLSLSLNQQPAAPECKVLTAAGNSCRVDVFTNLGYRAFSLSF

SEQ ID NO: 88538 - protein, 317 aa, Homo sapiens; identical to SEQ ID NO: 88537
  Payload ID: 17725
  Gene Name: THO complex 6
  Uniprot ID: Q86W42
  ENSP ID: ENSP00000460015

SEQ ID NO: 88539 - protein, 204 aa, Homo sapiens
  Payload ID: 17726
  Gene Name: THO complex 7
  Uniprot ID: Q6I9Y2
  ENSP ID: ENSP00000295899
MGAVTDDEVIRKRLLIDGDGAGDDRRINLLVKSFIKWCNSGSQEEGYSQYQRMLSTLSQCEFSMGKTLLVYDMNLREMENYEKIYKEIECSIAGAHEKIAECKKQILQAKRIRKNRQEYDALAKVIQHHPDRHETLKELEALGKELEHLSHIKESVEDKLELRRKQFHVLLSTIHELQQTLENDEKLSEVEEAQEASMETDPKP

SEQ ID NO: 88540 - protein, 152 aa, Homo sapiens
  Payload ID: 17726
  Gene Name: THO complex 7
  ENSP ID: ENSP00000418518
MLSTLSQCEFSMGKTLLVYDMNLREMENYEKIYKEIECSIAGAHEKIAECKKQILQAKRIRKNRQEYDALAKVIQHHPDRHETLKELEALGKELEHLSHIKESVEDKLELRRKQFHVLLSTIHELQQTLENDEKLSEVEEAQEASMETDPKP

SEQ ID NO: 88541 - protein, 60 aa, Homo sapiens
  Payload ID: 17726
  Gene Name: THO complex 7
  ENSP ID: ENSP00000419443
MLSTLSQCEFSMGKTLLVYDMNLREMENYEKIYKEIECSIAGAHEKIAECKKQILQAKRI

SEQ ID NO: 88542 - protein, 30 aa, Homo sapiens
  Payload ID: 17726
  Gene Name: THO complex 7
  ENSP ID: ENSP00000419682
  MOD_RES (1)..(1): Any amino acid
XEVIRKRLLIDGDGAGDDRRINLLVKSFIK

SEQ ID NO: 88543 - protein, 175 aa, Homo sapiens
  Payload ID: 17727
  Gene Name: three prime repair exonuclease 1
  ENSP ID: ENSP00000411331
MLGLTSALDGAFCVDSITALKALERASSPSEHGPRKSYSLGSIYTRLYGQSPPDSHTAEGDVLALLSICQWRPQALLRWVDAHARPFGTIRPMYGVTASARTKPRPSAVTTTAHLATTRNTSPSLGESRGTKDLPPVKDPGALSREGLLAPLGLLAILTLAVATLYGLSLATPGE

SEQ ID NO: 88544 - protein, 175 aa, Homo sapiens; identical to SEQ ID NO: 88543
  Payload ID: 17727
  Gene Name: three prime repair exonuclease 1
  ENSP ID: ENSP00000412404

SEQ ID NO: 88545 - protein, 304 aa, Homo sapiens
  Payload ID: 17727
  Gene Name: three prime repair exonuclease 1
  Uniprot ID: Q9NSU2
  ENSP ID: ENSP00000415972
MQTLIFFDMEATGLPFSQPKVTELCLLAVHRCALESPPTSQGPPPTVPPPPRVVDKLSLCVAPGKACSPAASEITGLSTAVLAAHGRQCFDDNLANLLLAFLRRQPQPWCLVAHNGDRYDFPLLQAELAMLGLTSALDGAFCVDSITALKALERASSPSEHGPRKSYSLGSIYTRLYGQSPPDSHTAEGDVLALLSICQWRPQALLRWVDAHARPFGTIRPMYGVTASARTKPRPSAVTTTAHLATTRNTSPSLGESRGTKDLPPVKDPGALSREGLLAPLGLLAILTLAVATLYGLSLATPGE

SEQ ID NO: 88546 - protein, 314 aa, Homo sapiens; identical to SEQ ID NO: 7857
  Payload ID: 17727
  Gene Name: three prime repair exonuclease 1
  Uniprot ID: Q9NSU2
  ENSP ID: ENSP00000486444

SEQ ID NO: 88547 - protein, 369 aa, Homo sapiens
  Payload ID: 17727
  Gene Name: three prime repair exonuclease 1
  Uniprot ID: Q9NSU2
  ENSP ID: ENSP00000486676
MGPGARRQGRIVQGRPEMCFCPPPTPLPPLRILTLGTHTPTPCSSPGSAAGTYPTMGSQALPPGPMQTLIFFDMEATGLPFSQPKVTELCLLAVHRCALESPPTSQGPPPTVPPPPRVVDKLSLCVAPGKACSPAASEITGLSTAVLAAHGRQCFDDNLANLLLAFLRRQPQPWCLVAHNGDRYDFPLLQAELAMLGLTSALDGAFCVDSITALKALERASSPSEHGPRKSYSLGSIYTRLYGQSPPDSHTAEGDVLALLSICQWRPQALLRWVDAHARPFGTIRPMYGVTASARTKPRPSAVTTTAHLATTRNTSPSLGESRGTKDLPPVKDPGALSREGLLAPLGLLAILTLAVATLYGLSLATPGE

SEQ ID NO: 88548 - protein, 236 aa, Homo sapiens
  Payload ID: 17728
  Gene Name: three prime repair exonuclease 2
  Uniprot ID: Q9BQ50
  ENSP ID: ENSP00000333441
MSEAPRAETFVFLDLEATGLPSVEPEIAELSLFAVHRSSLENPEHDESGALVLPRVLDKLTLCMCPERPFTAKASEITGLSSEGLARCRKAGFDGAVVRTLQAFLSRQAGPICLVAHNGFDYDFPLLCAELRRLGARLPRDTVCLDTLPALRGLDRAHSHGTRARGRQGYSLGSLFHRYFRAEPSAAHSAEGDVHTLLLIFLHRAAELLAWADEQARGWAHIEPMYLPPDDPSLEA

SEQ ID NO: 88549 - protein, 279 aa, Homo sapiens
  Payload ID: 17728
  Gene Name: three prime repair exonuclease 2
  Uniprot ID: Q9BQ50
  ENSP ID: ENSP00000334993
MGRAGSPLPRSSWPRMDDCGSRSRCSPTLCSSLRTCYPRGNITMSEAPRAETFVFLDLEATGLPSVEPEIAELSLFAVHRSSLENPEHDESGALVLPRVLDKLTLCMCPERPFTAKASEITGLSSEGLARCRKAGFDGAVVRTLQAFLSRQAGPICLVAHNGFDYDFPLLCAELRRLGARLPRDTVCLDTLPALRGLDRAHSHGTRARGRQGYSLGSLFHRYFRAEPSAAHSAEGDVHTLLLIFLHRAAELLAWADEQARGWAHIEPMYLPPDDPSLEA

SEQ ID NO: 88550 - protein, 236 aa, Homo sapiens; identical to SEQ ID NO: 88548
  Payload ID: 17728
  Gene Name: three prime repair exonuclease 2
  Uniprot ID: Q9BQ50
  ENSP ID: ENSP00000345218

SEQ ID NO: 88551 - protein, 279 aa, Homo sapiens; identical to SEQ ID NO: 88549
  Payload ID: 17728
  Gene Name: three prime repair exonuclease 2
  Uniprot ID: Q9BQ50
  ENSP ID: ENSP00000359231

SEQ ID NO: 88552 - protein, 236 aa, Homo sapiens; identical to SEQ ID NO: 88548
  Payload ID: 17728
  Gene Name: three prime repair exonuclease 2
  Uniprot ID: Q9BQ50
  ENSP ID: ENSP00000359251

SEQ ID NO: 88553 - protein, 279 aa, Homo sapiens; identical to SEQ ID NO: 88549
  Payload ID: 17728
  Gene Name: three prime repair exonuclease 2
  Uniprot ID: Q9BQ50
  ENSP ID: ENSP00000359252

SEQ ID NO: 88554 - protein, 236 aa, Homo sapiens; identical to SEQ ID NO: 88548
  Payload ID: 17728
  Gene Name: three prime repair exonuclease 2
  Uniprot ID: Q9BQ50
  ENSP ID: ENSP00000377442

SEQ ID NO: 88555 - protein, 743 aa, Homo sapiens
  Payload ID: 17729
  Gene Name: threonine synthase-like 1
  Uniprot ID: Q8IYQ7
  ENSP ID: ENSP00000365534
MLHFNRCHHLKKITQKCFSSIHVKTDKHAQRFLSRTFALAELRKSWYSTHSLVGDKNIILMGPPGAGKTTVGRIIGQKLGCCVIDVDDDILEKTWNMSVSEKLQDVGNEQFLEEEGKAVLNFSASGSVISLTGSNPMHDASMWHLKKNGIIVYLDVPLLDLICRLKLMKTDRIVGQNSGTSMKDLLKFRRQYYKKWYDARVFCESGASPEEVADKVLNAIKRYQDVDSETFISTRHVWPEDCEQKVSAKFFSEAVIEGLASDGGLFVPAKEFPKLSCGEWKSLVGATYVERAQILLERCIHPADIPAARLGEMIETAYGENFACSKIAPVRHLSGNQFILELFHGPTGSFKDLSLQLMPHIFAHCIPPSCNYMILVATSGDTGSAVLNGFSRLNKNDKQRIAVVAFFPENGVSDFQKAQIIGSQRENGWAVGVESDFDFCQTAIKRIFNDSDFTGFLTVEYGTILSSANSINWGRLLPQVVYHASAYLDLVSQGFISFGSPVDVCIPTGNFGNILAAVYAKMMGIPIRKFICASNQNHVLTDFIKTGHYDLRERKLAQTFSPSIDILKSSNLERHLHLMANKDGQLMTELFNRLESQHHFQIEKALVEKLQQDFVADWCSEGECLAAINSTYNTSGYILDPHTAVAKVVADRVQDKTCPVIISSTAHYSKFAPAIMQALKIKEINETSSSQLYLLGSYNALPPLHEALLERTKQQEKMEYQVCAADMNVLKSHVEQLVQNQFI

SEQ ID NO: 88556 - protein, 743 aa, Homo sapiens; identical to SEQ ID NO: 88555
  Payload ID: 17729
  Gene Name: threonine synthase-like 1
  Uniprot ID: Q8IYQ7
  ENSP ID: ENSP00000434887

SEQ ID NO: 88557 - protein, 484 aa, Homo sapiens
  Payload ID: 17730
  Gene Name: threonine synthase-like 2
  Uniprot ID: Q86YJ6
  ENSP ID: ENSP00000327323
MWYVSTRGVAPRVNFEGALFSGYAPDGGLFMPEELPQLDRGTLCQWSTLSYPGLVKELCALFIGSELLPKDELNDLIDRAFSRFRHREVVHLSRLRNGLNVLELWHGVTYAFKDLSLSCTTQFLQYFLEKREKHVTVVVGTSGDTGSAAIESVQGAKNMDIIVLLPKGHCTKIQELQMTTVLKQNVHVFGVEGNSDELDEPIKTVFADVAFVKKHNLMSLNSINWSRVLVQMAHHFFAYFQCTPSLDTHPLPLVEVVVPTGAAGNLAAGYIAQKIGLPIRLVVAVNRNDIIHRTVQQGDFSLSEAVKSTLASAMDIQVPYNMERVFWLLSGSDSQVTRALMEQFERTQSVNLPKELHSKLSEAVTSVSVSDEAITQTMGRCWDENQYLLCPHSAVAVNYHYQQIDRQQPSTPRCCLAPASAAKFPEAVLAAGLTPETPAEIVALEHKETRCTLMRRGDNWMLMLRDTIEDLSRQWRSHALNTSQ

SEQ ID NO: 88558 - protein, 405 aa, Homo sapiens
  Payload ID: 17730
  Gene Name: threonine synthase-like 2
  Uniprot ID: Q86YJ6
  ENSP ID: ENSP00000339563
MWYVSTRGVAPRVNFEGALFSGYAPDGGLFMPEELPQLDRGTLCQWSTLSYPGLVKELCALFIGSELLPKDELNDLIDRAFSRFRHREVVHLSRLRNGLNVLELWHGVTYAFKDLSLSCTTQFLQYFLEKREKHVTVVVGTSGDTGSAAIESVQGAKNMDIIVLLPKGHCTKIQELQMTTVLKQNVHVFGVEGNSDELDEPIKTVFADVAFVKKHNLMSLNSINWSRVLVQMAHHFFAYFQCTPSLDTHPLPLVEVVVPTGAAGNLAAGYIAQKIGLPIRLVVAVNRNDIIHRTVQQGDFSLSEAVKSTLASAMDIQVPYNMERVFWLLSGSDSQVTRALMEQFERTQSVNLPKELHSKWERQDYEKMAVMECDGCCVELCLGNCGPRRGSVTDIPGTAMVRGGG

SEQ ID NO: 88559 - protein, 226 aa, Homo sapiens
  Payload ID: 17730
  Gene Name: threonine synthase-like 2
  ENSP ID: ENSP00000366464
MDIIVLLPKGHCTKIQELQMTTVLKQNVHVFGVEGNSDELDEPIKTVFADVAFVKKHNLMSLNSINWSRVLVQMAHHFFAYFQCTPSLDTHPLPLVEVVVPTGAAGNLAAGYIAQKIGLPIRLVVAVNRNDIIHRTVQQGDFSLSEAVKSTLASAMDIQVPYNMERVFWLLSGSDSQVTRALMEQFERTQSVNLPKELHSKHSPVLPRPCLCSQVPGSCPGCWPDP

SEQ ID NO: 88560 - protein, 126 aa, Homo sapiens
  Payload ID: 17730
  Gene Name: threonine synthase-like 2
  ENSP ID: ENSP00000391300
MWYVSTRGVAPRVNFEGALFSGYAPDGGLFMPEELPQLDRGTLCQWSTLSYPGLVKELCALFIGSELLPKDELNDLIDRAFSRFRHREVVHLSRLRNGLNVLELWHGVTYAFKDLSLSCTTQFLQY

SEQ ID NO: 88561 - protein, 258 aa, Homo sapiens
  Payload ID: 17730
  Gene Name: threonine synthase-like 2
  ENSP ID: ENSP00000407553
MELPQLDRGTLCQWSTLSYPGLVKELCALFIGSELLPKDELNDLIDRAFSRFRHREVVHLSRLRNGLNVLELWHGVTYAFKDLSLSCTTQFLQYFLEKREKHVTVVVGTSGDTGSAAIESVQGAKNMDIIVLLPKGHCTKIQELQMTTVLKQNVHVFGVEGNSDELDEPIKTVFADVAFVKKHNLMSLNSINWSRVLVQMAHHFFAYFQCTPSLDTHPLPLVEVVVPTGAAGNLAALPGAASPLPLQPSSRKLSWLLA

SEQ ID NO: 88562 - protein, 723 aa, Homo sapiens
  Payload ID: 17731
  Gene Name: threonyl-tRNA synthetase
  Uniprot ID: P26639
  ENSP ID: ENSP00000265112
MFEEKASSPSGKMGGEEKPIGAGEEKQKEGGKKKNKEGSGDGGRAELNPWPEYIYTRLEMYNILKAEHDSILAEKAEKDSKPIKVTLPDGKQVDAESWKTTPYQIACGISQGLADNTVIAKVNNVVWDLDRPLEEDCTLELLKFEDEEAQAVYWHSSAHIMGEAMERVYGGCLCYGPPIENGFYYDMYLEEGGVSSNDFSSLEALCKKIIKEKQAFERLEVKKETLLAMFKYNKFKCRILNEKVNTPTTTVYRCGPLIDLCRGPHVRHTGKIKALKIHKNSSTYWEGKADMETLQRIYGISFPDPKMLKEWEKFQEEAKNRDHRKIGRDQELYFFHELSPGSCFFLPKGAYIYNALIEFIRSEYRKRGFQEVVTPNIFNSRLWMTSGHWQHYSENMFSFEVEKELFALKPMNCPGHCLMFDHRPRSWRELPLRLADFGVLHRNELSGALTGLTRVRRFQQDDAHIFCAMEQIEDEIKGCLDFLRTVYSVFGFSFKLNLSTRPEKFLGDIEVWDQAEKQLENSLNEFGEKWELNSGDGAFYGPKIDIQIKDAIGRYHQCATIQLDFQLPIRFNLTYVSHDGDDKKRPVIVHRAILGSVERMIAILTENYGGKWPFWLSPRQVMVVPVGPTCDEYAQKVRQQFHDAKFMADIDLDPGCTLNKKIRNAQLAQYNFILVVGEKEKISGTVNIRTRDNKVHGERTISETIERLQQLKEFRSKQAEEEF

SEQ ID NO: 88563 - protein, 756 aa, Homo sapiens
  Payload ID: 17731
  Gene Name: threonyl-tRNA synthetase
  Uniprot ID: P26639
  ENSP ID: ENSP00000387710
MFEEKASSPSGKMGGEEKPIGAGEEKQKEGGKKKNKEGSGDGGRAELNPWPEYIYTRLEMYNILKAEHDSILAEKAEKDSKPIKVTLPDGKQVDAESWKTTPYQIACGISHTASCKNLSSLASLLASVAIPSSGMPWPPLFFLQGLADNTVIAKVNNVVWDLDRPLEEDCTLELLKFEDEEAQAVYWHSSAHIMGEAMERVYGGCLCYGPPIENGFYYDMYLEEGGVSSNDFSSLEALCKKIIKEKQAFERLEVKKETLLAMFKYNKFKCRILNEKVNTPTTTVYRCGPLIDLCRGPHVRHTGKIKALKIHKNSSTYWEGKADMETLQRIYGISFPDPKMLKEWEKFQEEAKNRDHRKIGRDQELYFFHELSPGSCFFLPKGAYIYNALIEFIRSEYRKRGFQEVVTPNIFNSRLWMTSGHWQHYSENMFSFEVEKELFALKPMNCPGHCLMFDHRPRSWRELPLRLADFGVLHRNELSGALTGLTRVRRFQQDDAHIFCAMEQIEDEIKGCLDFLRTVYSVFGFSFKLNLSTRPEKFLGDIEVWDQAEKQLENSLNEFGEKWELNSGDGAFYGPKIDIQIKDAIGRYHQCATIQLDFQLPIRFNLTYVSHDGDDKKRPVIVHRAILGSVERMIAILTENYGGKWPFWLSPRQVMVVPVGPTCDEYAQKVRQQFHDAKFMADIDLDPGCTLNKKIRNAQLAQYNFILVVGEKEKISGTVNIRTRDNKVHGERTISETIERLQQLKEFRSKQAEEEF

SEQ ID NO: 88564 - protein, 131 aa, Homo sapiens
  Payload ID: 17731
  Gene Name: threonyl-tRNA synthetase
  ENSP ID: ENSP00000420893
MFEEKASSPSGKMGGEEKPIGAGEEKQKEGGKKKNKEGSGDGGRAELNPWPEYIYTRLEMYNILKAEHDSILAEKAEKDSKPIKVTLPDGKQVDAESWKTTPYQIACGISHGKSLWWMFMLRSANRKWILL

SEQ ID NO: 88565 - protein, 129 aa, Homo sapiens
  Payload ID: 17731
  Gene Name: threonyl-tRNA synthetase
  ENSP ID: ENSP00000422130
MFEEKASSPSGKMGGEEKPIGAGEEKQKEGGKKKNKEGSGDGGRAELNPWPEYIYTRLEMYNILKAEHDSILAEKAEKDSKPIKVTLPDGKQVDAESWKTTPYQIACGISQGLADNTVIAKVNNVVWDL

SEQ ID NO: 88566 - protein, 118 aa, Homo sapiens
  Payload ID: 17731
  Gene Name: threonyl-tRNA synthetase
  ENSP ID: ENSP00000422291
MFEEKASSPSGKMGGEEKPIGAGEEKQKEGGKKKNKEGSGDGGRAELNPWPEYIYTRLEMYNILKAEHDSILAEKAEKDSKPIKVTLPDGKQVDAESWKTTPYQIACGIRPGRQHRYC

SEQ ID NO: 88567 - protein, 50 aa, Homo sapiens
  Payload ID: 17731
  Gene Name: threonyl-tRNA synthetase
  ENSP ID: ENSP00000422598
MYNILKAEHDSILAEKAEKDSKPIKVTLPDGKQVDAESWKTTPYQIACGI

SEQ ID NO: 88568 - protein, 723 aa, Homo sapiens; identical to SEQ ID NO: 88562
  Payload ID: 17731
  Gene Name: threonyl-tRNA synthetase
  Uniprot ID: P26639
  ENSP ID: ENSP00000424387

SEQ ID NO: 88569 - protein, 66 aa, Homo sapiens
  Payload ID: 17731
  Gene Name: threonyl-tRNA synthetase
  ENSP ID: ENSP00000425524
MFEEKASSPSGKMGGEEKPIGAGEEKQKEGGKKKNKEGSGDGGRAEGNLQVLFISAITETDTEGIC

SEQ ID NO: 88570 - protein, 55 aa, Homo sapiens
  Payload ID: 17731
  Gene Name: threonyl-tRNA synthetase
  ENSP ID: ENSP00000427304
MFEEKASSPSGKMGGEEKPIGAGEEKQKEGGKKKNKEGSGDGGRAERLTQRVSAE

SEQ ID NO: 88571 - protein, 56 aa, Homo sapiens
  Payload ID: 17731
  Gene Name: threonyl-tRNA synthetase
  ENSP ID: ENSP00000427627
MFEEKASSPSGKMGGEEKPIGAGEEKQKEGGKKKNKEGSGDGGRAESRPGRQHRYC

SEQ ID NO: 88572 - protein, 56 aa, Homo sapiens; identical to SEQ ID NO: 88571
  Payload ID: 17731
  Gene Name: threonyl-tRNA synthetase
  ENSP ID: ENSP00000486068

SEQ ID NO: 88573 - protein, 66 aa, Homo sapiens; identical to SEQ ID NO: 88569
  Payload ID: 17731
  Gene Name: threonyl-tRNA synthetase
  ENSP ID: ENSP00000486893

SEQ ID NO: 88574 - protein, 135 aa, Homo sapiens
  Payload ID: 17732
  Gene Name: threonyl-tRNA synthetase 2, mitochondrial (putative)
  ENSP ID: ENSP00000358047
MALYQRWRCLRLQGLQACRLHTAVVSTPPRWLAERLGLFEELWAAQVKRLASMAQKEPRTIKISLPGGQKIDAVAWNTTPYQLARQISSTLADTAVVQVQNMAFTMISSWERRGVAHWLTFARAPTFGILDRLED

SEQ ID NO: 88575 - protein, 588 aa, Homo sapiens
  Payload ID: 17732
  Gene Name: threonyl-tRNA synthetase 2, mitochondrial (putative)
  Uniprot ID: Q9BW92
  ENSP ID: ENSP00000358050
MALYQRWRCLRLQGLQACRLHTAVVSTPPRWLAERLGLFEELWAAQVKRLASMAQKEPRTIKISLPGGQKIDAVAWNTTPYQLARQISSTLADTAVAAQVNGEPYDLERPLETDSDLRFLTFDSPEGKAVFWHSSTHVLGAAAEQFLGAVLCRGPSTEYGFYHDFFLGKERTIRGSELPVLERICQELTAAARPFRRLEASRDQLRQLFKAEYAHRGFSEVKTPTLFSTKLWEQSGHWEHYQEDMFAVQPPGSDRPPSSQSDDSTRHITDTLALKPMNCPAHCLMFAHRPRSWRELPLRLADFGALHRAEASGGLGGLTRLRCFQQDDAHIFCTTDQLEAEIQSCLDFLRSVYAVLGFSFRLALSTRPSGFLGDPCLWDQAEQVLKQALKEFGEPWDLNSGDGAFYGPKIDVHLHDALGRPHQCGTIQLDFQLPLRFDLQYKGQAGALERPVLIHRAVLGSVERLLGVLAESCGGKWPLWLSPFQVVVIPVGSEQEEYAKEAQQSLRAAGLVSDLDADSGLTLSRRIRRAQLAHYNFQFVVGQKEQSKRTVNIRTRDNRRLGEWDLPEAVQRLVELQNTRVPNAEEIF

SEQ ID NO: 88576 - protein, 718 aa, Homo sapiens
  Payload ID: 17732
  Gene Name: threonyl-tRNA synthetase 2, mitochondrial (putative)
  Uniprot ID: Q9BW92
  ENSP ID: ENSP00000358060
MALYQRWRCLRLQGLQACRLHTAVVSTPPRWLAERLGLFEELWAAQVKRLASMAQKEPRTIKISLPGGQKIDAVAWNTTPYQLARQISSTLADTAVAAQVNGEPYDLERPLETDSDLRFLTFDSPEGKAVFWHSSTHVLGAAAEQFLGAVLCRGPSTEYGFYHDFFLGKERTIRGSELPVLERICQELTAAARPFRRLEASRDQLRQLFKDNPFKLHLIEEKVTGPTATVYGCGTLVDLCQGPHLRHTGQIGGLKLLSNSSSLWRSSGAPETLQRVSGISFPTTELLRVWEAWREEAELRDHRRIGKEQELFFFHELSPGSCFFLPRGTRVYNALVAFIRAEYAHRGFSEVKTPTLFSTKLWEQSGHWEHYQEDMFAVQPPGSDRPPSSQSDDSTRHITDTLALKPMNCPAHCLMFAHRPRSWRELPLRLADFGALHRAEASGGLGGLTRLRCFQQDDAHIFCTTDQLEAEIQSCLDFLRSVYAVLGFSFRLALSTRPSGFLGDPCLWDQAEQVLKQALKEFGEPWDLNSGDGAFYGPKIDVHLHDALGRPHQCGTIQLDFQLPLRFDLQYKGQAGALERPVLIHRAVLGSVERLLGVLAESCGGKWPLWLSPFQVVVIPVGSEQEEYAKEAQQSLRAAGLVSDLDADSGLTLSRRIRRAQLAHYNFQFVVGQKEQSKRTVNIRTRDNRRLGEWDLPEAVQRLVELQNTRVPNAEEIF

SEQ ID NO: 88577 - protein, 443 aa, Homo sapiens [sequence omitted]

SEQ ID NO: 88578 - protein, 143 aa, Homo sapiens
  Payload ID: 17732
  Gene Name: threonyl-tRNA synthetase 2, mitochondrial (putative)
  ENSP ID: ENSP00000475551
TPPRWLAERLGLFEELWAAQVKRLASMAQKEPRTIKISLPGGQKIDAVAWNTTPYQLARQISSTLADTAVAAQVNGEPYDLERPLETDSDLRFLTFDSPEGKADNPGLRAACFGADLPGTYSCCSTLPEARGFTGSASPVVQG

SEQ ID NO: 88579 - protein, 636 aa, Homo sapiens
  Payload ID: 17732
  Gene Name: threonyl-tRNA synthetase 2, mitochondrial (putative)
  ENSP ID: ENSP00000475847
MALYQRWRCLRLQGLQACRLHTAVVSTPPRWLAERLGLFEELWAAQVKRLASMAQKEPRTIKISLPGGQKIDAVAWNTTPYQLARQISSTLADTAVAAQVNGEPYDLERPLETDSDLRFLTFDSPEGKAVFWHSSTHVLGAAAEQFLGAVLCRGPSTEYGFYHDFFLGKERTIRGSELPVLERICQELTAAARPFRRLEASRDQLRQLFKDNPFKLHLIEEKVTGPTATVYGCGTLVDLCQGPHLRHTGQIGGLKLLSAEYAHRGFSEVKTPTLFSTKLWEQSGHWEHYQEDMFAVQPPGSDRPPSSQSDDSTRHITDTLALKPMNCPAHCLMFAHRPRSWRELPLRLADFGALHRAEASGGLGGLTRLRCFQQDDAHIFCTTDQLEAEIQSCLDFLRSVYAVLGFSFRLALSTRPSGFLGDPCLWDQAEQVLKQALKEFGEPWDLNSGDGAFYGPKIDVHLHDALGRPHQCGTIQLDFQLPLRFDLQYKGQAGALERPVLIHRAVLGSVERLLGVLAESCGGKWPLWLSPFQVVVIPVGSEQEEYAKEAQQSLRAAGLVSDLDADSGLTLSRRIRRAQLAHYNFQFVVGQKEQSKRTVNIRTRDNRRLGEWDLPEAVQRLVELQNTRVPNAEEIF

SEQ ID NO: 88580 - protein, 802 aa, Homo sapiens
  Payload ID: 17733
  Gene Name: threonyl-tRNA synthetase-like 2
  Uniprot ID: A2RTX5
  ENSP ID: ENSP00000338093
MAAEALAAEAVASRLERQEEDIRWLWSEVERLRDEQLNAPYSCQAEGPCLTREVAQLRAENCDLRHRLCSLRLCLAEERSRQATLESAELEAAQEAGAQPPPSQSQDKDMKKKKMKESEADSEVKHQPIFIKERLKLFEILKKDHQLLLAIYGKKGDTSNIITVRVADGQTVQGEVWKTTPYQVAAEISQELAESTVIAKVNGELWDLDRPLEGDSSLELLTFDNEEAQAVYWHSSAHILGEAMELYYGGHLCYGPPIENGFYYDMFIEDRAVSSTELSALENICKAIIKEKQPFERLEVSKEILLEMFKYNKFKCRILNEKVNTATTTVYRCGPLIDLCKGPHVRHTGKIKTIKIFKNSSTYWEGNPEMETLQRIYGISFPDNKMMRDWEKFQEEAKNRDHRKIGKEQELFFFHDLSPGSCFFLPRGAFIYNTLTDFIREEYHKRDFTEVLSPNMYNSKLWEASGHWQHYSENMFTFEIEKDTFALKPMNCPGHCLMFAHRPRSWREMPIRFADFGVLHRNELSGTLSGLTRVRRFQQDDAHIFCTVEQIEEEIKGCLQFLQSVYSTFGFSFQLNLSTRPENFLGEIEMWNEAEKQLQNSLMDFGEPWKMNPGDGAFYGPKIDIKIKDAIGRYHQCATIQLDFQLPIRFNLTYVSKDGDDKKRPVIIHRAILGSVERMIAILSENYGGKWPFWLSPRQVMVIPVGPTCEKYALQVSSEFFEEGFMADVDLDHSCTLNKKIRNAQLAQYNFILVVGEKEKIDNAVNVRTRDNKIHGEILVTSAIDKLKNLRKTRTLNAEEAF

SEQ ID NO: 88581 - protein, 766 aa, Homo sapiens
  Payload ID: 17733
  Gene Name: threonyl-tRNA synthetase-like 2
  ENSP ID: ENSP00000439899
MAAEALAAEAVASRLERQEEDIRWLWSEVERLRDEQLNAPYSCQAEGPCLTREVAQLRAENCDLRHRLCSLRLCLAEERSRQATLESAELEAAQEAGAQPPPSQSQDKDMKKKKMKESEADSEVKHQPIFIKERLKLFEILKKDHQLLLAIYGKKGDTSNIITVRVADGQTVQGEVWKTTPYQVAAEISQELAESTVIAKVNGELWDLDRPLEGDSSLELLTFDNEEAQAVYWHSSAHILGEAMELYYGGHLCYGPPIENGFYYDMFIEDRAVSSTELSALENICKAIIKEKQPFERLEVSKEILLEMFKYNKFKCRILNEKVNTATTTVYRCGPLIDLCKGPHVRHTGKIKTIKIFKNSSTYWEGNPEMETLQRIYGISFPDNKMMRDWEKFQEEAKNRDHRKIGKEQELFFFHDLSPGSCFFLPRGAFIYNTLTDFIREEYHKRDFTEVLSPNMYNSKLWEASGHWQHYSENMFTFEIEKDTFALKPMNCPGHCLMFAHRPRSWREMPIRFADFGVLHRNELSGTLSGLTRVRRFQQDDAHIFCTVEQIEEEIKGCLQFLQSVYSTFGFSFQLNLSTRPENFLGEIEMWNEAEKQLQNSLMDFGEPWKMNPGDGAFYGPKIDIKIKDAIGRYHQCATIQLDFQLPIRFNLTYVSKDGDDKKRPVIIHRAILGSVERMIAILSENYGGKWPFWLSPRQVMVIPVGPTCEKYALQVSSEFFEEGFMADVDLDHSCTLNKKIRNAQLAQYNFILDRFLPSVWQEAWL

SEQ ID NO: 88582 - protein, 148 aa, Homo sapiens
  Payload ID: 17733
  Gene Name: threonyl-tRNA synthetase-like 2
  ENSP ID: ENSP00000452740
EVSKEILLEMFKYNKFKCRILNEKVNTATTTVYRCGPLIDLCKGPHVRHTGKIKTIKIFKNSSTYWEGNPEMETLQRIYGISFPDNKMMRDWEKFQEEAKNRDHRKIGKEQELFFFHDLSPGSCFFLPRGAFIYNTLTDFIRMQDRCG

SEQ ID NO: 88583 - protein, 766 aa, Homo sapiens; identical to SEQ ID NO: 88581
  Payload ID: 17733
  Gene Name: threonyl-tRNA synthetase-like 2
  ENSP ID: ENSP00000478827

SEQ ID NO: 88584 - protein, 575 aa, Homo sapiens
  Payload ID: 17734
  Gene Name: thrombomodulin
  Uniprot ID: P07204
  ENSP ID: ENSP00000366307
MLGVLVLGALALAGLGFPAPAEPQPGGSQCVEHDCFALYPGPATFLNASQICDGLRGHLMTVRSSVAADVISLLLNGDGGVGRRRLWIGLQLPPGCGDPKRLGPLRGFQWVTGDNNTSYSRWARLDLNGAPLCGPLCVAVSAAEATVPSEPIWEEQQCEVKADGFLCEFHFPATCRPLAVEPGAAAAAVSITYGTPFAARGADFQALPVGSSAAVAPLGLQLMCTAPPGAVQGHWAREAPGAWDCSVENGGCEHACNAIPGAPRCQCPAGAALQADGRSCTASATQSCNDLCEHFCVPNPDQPGSYSCMCETGYRLAADQHRCEDVDDCILEPSPCPQRCVNTQGGFECHCYPNYDLVDGECVEPVDPCFRANCEYQCQPLNQTSYLCVCAEGFAPIPHEPHRCQMFCNQTACPADCDPNTQASCECPEGYILDDGFICTDIDECENGGFCSGVCHNLPGTFECICGPDSALARHIGTDCDSGKVDGGDSGSGEPPPSPTPGSTLTPPAVGLVHSGLLIGISIASLCLVVALLALLCHLRKKQGAARAKMEYKCAAPSKEVVLQHVRTERTPQRL

SEQ ID NO: 88585 - protein, 353 aa, Homo sapiens
  Payload ID: 17735
  Gene Name: thrombopoietin
  Uniprot ID: P40225
  ENSP ID: ENSP00000204615
MELTELLLVVMLLLTARLTLSSPAPPACDLRVLSKLLRDSHVLHSRLSQCPEVHPLPTPVLLPAVDFSLGEWKTQMEETKAQDILGAVTLLLEGVMAARGQLGPTCLSSLLGQLSGQVRLLLGALQSLLGTQLPPQGRTTAHKDPNAIFLSFQHLLRGKVRFLMLVGGSTLCVRRAPPTTAVPSRTSLVLTLNELPNRTSGLLETNFTASARTTGSGLLKWQQGFRAKIPGLLNQTSRSLDQIPGYLNRIHELLNGTRGLFPGPSRRTLGAPDISSGTSDTGSLPPNLQPGYSPSPTHPPTGQYTLFPLPPTLPTPVVQLHPLLPDPSAPTPTPTSPLLNTSYTHSQNLSQEG

SEQ ID NO: 88586 - protein, 349 aa, Homo sapiens
  Payload ID: 17735
  Gene Name: thrombopoietin
  Uniprot ID: P40225
  ENSP ID: ENSP00000410763
MELTELLLVVMLLLTARLTLSSPAPPACDLRVLSKLLRDSHVLHSRLSQCPEVHPLPTPVLLPAVDFSLGEWKTQMEETKAQDILGAVTLLLEGVMAARGQLGPTCLSSLLGQLSGQVRLLLGALQSLLGTQGRTTAHKDPNAIFLSFQHLLRGKVRFLMLVGGSTLCVRRAPPTTAVPSRTSLVLTLNELPNRTSGLLETNFTASARTTGSGLLKWQQGFRAKIPGLLNQTSRSLDQIPGYLNRIHELLNGTRGLFPGPSRRTLGAPDISSGTSDTGSLPPNLQPGYSPSPTHPPTGQYTLFPLPPTLPTPVVQLHPLLPDPSAPTPTPTSPLLNTSYTHSQNLSQEG

SEQ ID NO: 88587 - protein, 286 aa, Homo sapiens
  Payload ID: 17735
  Gene Name: thrombopoietin
  ENSP ID: ENSP00000411704
MELTELLLVVMLLLTARLTLSSPAPPACDLRVLSKLLRDSHVLHSRLSQCPEVHPLPTPVLLPAVDFSLGEWKTQMEETKAQDILGAVTLLLEGVMAARGQLGPTCLSSLLGQLSGQVRLLLGALQSLLGTQLPPQGRTTAHKDPNAIFLSFQHLLRGKDFWIVGDKLHCLSQNYWLWASEVAAGIQSQDSWSAEPNLQVPGPNPRIPEQDTRTLEWNSWTLSWTLTQDPRSPGHFLRNIRHRLPATQPPAWIFSFPNPSSYWTVYALPSSTHLAHPCGPAPPPAS

SEQ ID NO: 88588 - protein, 1170 aa, Homo sapiens
  Payload ID: 17736
  Gene Name: thrombospondin 1
  Uniprot ID: P07996
  ENSP ID: ENSP00000260356
MGLAWGLGVLFLMHVCGTNRIPESGGDNSVFDIFELTGAARKGSGRRLVKGPDPSSPAFRIEDANLIPPVPDDKFQDLVDAVRAEKGFLLLASLRQMKKTRGTLLALERKDHSGQVFSVVSNGKAGTLDLSLTVQGKQHVVSVEEALLATGQWKSITLFVQEDRAQLYIDCEKMENAELDVPIQSVFTRDLASIARLRIAKGGVNDNFQGVLQNVRFVFGTTPEDILRNKGCSSSTSVLLTLDNNVVNGSSPAIRTNYIGHKTKDLQAICGISCDELSSMVLELRGLRTIVTTLQDSIRKVTEENKELANELRRPPLCYHNGVQYRNNEEWTVDSCTECHCQNSVTICKKVSCPIMPCSNATVPDGECCPRCWPSDSADDGWSPWSEWTSCSTSCGNGIQQRGRSCDSLNNRCEGSSVQTRTCHIQECDKRFKQDGGWSHWSPWSSCSVTCGDGVITRIRLCNSPSPQMNGKPCEGEARETKACKKDACPINGGWGPWSPWDICSVTCGGGVQKRSRLCNNPTPQFGGKDCVGDVTENQICNKQDCPIDGCLSNPCFAGVKCTSYPDGSWKCGACPPGYSGNGIQCTDVDECKEVPDACFNHNGEHRCENTDPGYNCLPCPPRFTGSQPFGQGVEHATANKQVCKPRNPCTDGTHDCNKNAKCNYLGHYSDPMYRCECKPGYAGNGIICGEDTDLDGWPNENLVCVANATYHCKKDNCPNLPNSGQEDYDKDGIGDACDDDDDNDKIPDDRDNCPFHYNPAQYDYDRDDVGDRCDNCPYNHNPDQADTDNNGEGDACAADIDGDGILNERDNCQYVYNVDQRDTDMDGVGDQCDNCPLEHNPDQLDSDSDRIGDTCDNNQDIDEDGHQNNLDNCPYVPNANQADHDKDGKGDACDHDDDNDGIPDDKDNCRLVPNPDQKDSDGDGRGDACKDDFDHDSVPDIDDICPENVDISETDFRRFQMIPLDPKGTSQNDPNWVVRHQGKELVQTVNCDPGLAVGYDEFNAVDFSGTFFINTERDDDYAGFVFGYQSSSRFYVVMWKQVTQSYWDTNPTRAQGYSGLSVKVVNSTTGPGEHLRNALWHTGNTPGQVRTLWHDPRHIGWKDFTAYRWRLSHRPKTGFIRVVMYEGKKIMADSGPIYDKTYAGGRLGLFVFSQEMVFFSDLKYECRDP

SEQ ID NO: 88589 - protein, 94 aa, Homo sapiens
  Payload ID: 17736
  Gene Name: thrombospondin 1
  ENSP ID: ENSP00000380720
MGLAWGLGVLFLMHVCGTNRIPESGGDNSVFDIFELTGAARKGSGRRLVKGPDPSSPAFRIEDANLIPPVPDDKFQDLVDAVRAEKGFLLLASL

SEQ ID NO: 88590 - protein, 1172 aa, Homo sapiens
  Payload ID: 17737
  Gene Name: thrombospondin 2
  Uniprot ID: P35442
  ENSP ID: ENSP00000355751
MVWRLVLLALWVWPSTQAGHQDKDTTFDLFSISNINRKTIGAKQFRGPDPGVPAYRFVRFDYIPPVNADDLSKITKIMRQKEGFFLTAQLKQDGKSRGTLLALEGPGLSQRQFEIVSNGPADTLDLTYWIDGTRHVVSLEDVGLADSQWKNVTVQVAGETYSLHVGCDLIDSFALDEPFYEHLQAEKSRMYVAKGSARESHFRGLLQNVHLVFENSVEDILSKKGCQQGQGAEINAISENTETLRLGPHVTTEYVGPSSERRPEVCERSCEELGNMVQELSGLHVLVNQLSENLKRVSNDNQFLWELIGGPPKTRNMSACWQDGRFFAENETWVVDSCTTCTCKKFKTICHQITCPPATCASPSFVEGECCPSCLHSVDGEEGWSPWAEWTQCSVTCGSGTQQRGRSCDVTSNTCLGPSIQTRACSLSKCDTRIRQDGGWSHWSPWSSCSVTCGVGNITRIRLCNSPVPQMGGKNCKGSGRETKACQGAPCPIDGRWSPWSPWSACTVTCAGGIRERTRVCNSPEPQYGGKACVGDVQERQMCNKRSCPVDGCLSNPCFPGAQCSSFPDGSWSCGSCPVGFLGNGTHCEDLDECALVPDICFSTSKVPRCVNTQPGFHCLPCPPRYRGNQPVGVGLEAAKTEKQVCEPENPCKDKTHNCHKHAECIYLGHFSDPMYKCECQTGYAGDGLICGEDSDLDGWPNLNLVCATNATYHCIKDNCPHLPNSGQEDFDKDGIGDACDDDDDNDGVTDEKDNCQLLFNPRQADYDKDEVGDRCDNCPYVHNPAQIDTDNNGEGDACSVDIDGDDVFNERDNCPYVYNTDQRDTDGDGVGDHCDNCPLVHNPDQTDVDNDLVGDQCDNNEDIDDDGHQNNQDNCPYISNANQADHDRDGQGDACDPDDDNDGVPDDRDNCRLVFNPDQEDLDGDGRGDICKDDFDNDNIPDIDDVCPENNAISETDFRNFQMVPLDPKGTTQIDPNWVIRHQGKELVQTANSDPGIAVGFDEFGSVDFSGTFYVNTDRDDDYAGFVFGYQSSSRFYVVMWKQVTQTYWEDQPTRAYGYSGVSLKVVNSTTGTGEHLRNALWHTGNTPGQVRTLWHDPRNIGWKDYTAYRWHLTHRPKTGYIRVLVHEGKQVMADSGPIYDQTYAGGRLGLFVFSQEMVYFSDLKYECRDI

SEQ ID NO: 88591 - protein, 83 aa, Homo sapiens
  Payload ID: 17737
  Gene Name: thrombospondin 2
  ENSP ID: ENSP00000398928
MVWRLVLLALWVWPSTQAGHQDKDTTFDLFSISNINRKTIGAKQFRGPDPGVPAYRFVRFDYIPPVNADDLSKITKIMRQKEG

SEQ ID NO: 88592 - protein, 1172 aa, Homo sapiens; identical to SEQ ID NO: 88590
  Payload ID: 17737
  Gene Name: thrombospondin 2
  Uniprot ID: P35442
  ENSP ID: ENSP00000482784

SEQ ID NO: 88593 - protein, 956 aa, Homo sapiens
  Payload ID: 17738
  Gene Name: thrombospondin 3
  Uniprot ID: P49746
  ENSP ID: ENSP00000357362
METQELRGALALLLLCFFTSASQDLQVIDLLTVGESRQMVAVAEKIRTALLTAGDIYLLSTFRLPPKQGGVLFGLYSRQDNTRWLEASVVGKINKVLVRYQREDGKVHAVNLQQAGLADGRTHTVLLRLRGPSRPSPALHLYVDCKLGDQHAGLPALAPIPPAEVDGLEIRTGQKAYLRMQGFVESMKIILGGSMARVGALSECPFQGDESIHSAVTNALHSILGEQTKALVTQLTLFNQILVELRDDIRDQVKEMSLIRNTIMECQVCGFHEQRSHCSPNPCFRGVDCMEVYEYPGYRCGPCPPGLQGNGTHCSDINECAHADPCFPGSSCINTMPGFHCEACPRGYKGTQVSGVGIDYARASKQVCNDIDECNDGNNGGCDPNSICTNTVGSFKCGPCRLGFLGNQSQGCLPARTCHSPAHSPCHIHAHCLFERNGAVSCQCNVGWAGNGNVCGTDTDIDGYPDQALPCMDNNKHCKQDNCLLTPNSGQEDADNDGVGDQCDDDADGDGIKNVEDNCRLFPNKDQQNSDTDSFGDACDNCPNVPNNDQKDTDGNGEGDACDNDVDGDGIPNGLDNCPKVPNPLQTDRDEDGVGDACDSCPEMSNPTQTDADSDLVGDVCDTNEDSDGDGHQDTKDNCPQLPNSSQLDSDNDGLGDECDGDDDNDGIPDYVPPGPDNCRLVPNPNQKDSDGNGVGDVCEDDFDNDAVVDPLDVCPESAEVTLTDFRAYQTVVLDPEGDAQIDPNWVVLNQGMEIVQTMNSDPGLAVGYTAFNGVDFEGTFHVNTVTDDDYAGFLFSYQDSGRFYVVMWKQTEQTYWQATPFRAVAQPGLQLKAVTSVSGPGEHLRNALWHTGHTPDQVRLLWTDPRNVGWRDKTSYRWQLLHRPQVGYIRVKLYEGPQLVADSGVIIDTSMRGGRLGVFCFSQENIIWSNLQYRCNDTVPEDFEPFRRQLLQGRV

SEQ ID NO: 88594 - protein, 836 aa, Homo sapiens
  Payload ID: 17738
  Gene Name: thrombospondin 3
  Uniprot ID: P49746
  ENSP ID: ENSP00000392207
METQELRGALALLLLCFFTSASQDLQVIDLLTVGESRQMVAVAEKIRTALLTAGDIYLLSTFRLPPKQGGVLFGLYSRQDNTRWLEASVVGKINKVTNALHSILGEQTKALVTQLTLFNQILVELRDDIRDQVKEMSLIRNTIMECQVCGFHEQRSHCSPNPCFRGVDCMEVYEYPGYRCGPCPPGLQGNGTHCSDINECAHADPCFPGSSCINTMPGFHCEACPRGYKGTQVSGVGIDYARASKQVCNDIDECNDGNNGGCDPNSICTNTVGSFKCGPCRLGFLGNQSQGCLPARTCHSPAHSPCHIHAHCLFERNGAVSCQCNVGWAGNGNVCGTDTDIDGYPDQALPCMDNNKHCKQDNCLLTPNSGQEDADNDGVGDQCDDDADGDGIKNVEDNCRLFPNKDQQNSDTDSFGDACDNCPNVPNNDQKDTDGNGEGDACDNDVDGDGIPNGLDNCPKVPNPLQTDRDEDGVGDACDSCPEMSNPTQTDADSDLVGDVCDTNEDSDGDGHQDTKDNCPQLPNSSQLDSDNDGLGDECDGDDDNDGIPDYVPPGPDNCRLVPNPNQKDSDGNGVGDVCEDDFDNDAVVDPLDVCPESAEVTLTDFRAYQTVVLDPEGDAQIDPNWVVLNQGMEIVQTMNSDPGLAVGYTAFNGVDFEGTFHVNTVTDDDYAGFLFSYQDSGRFYVVMWKQTEQTYWQATPFRAVAQPGLQLKAVTSVSGPGEHLRNALWHTGHTPDQVRLLWTDPRNVGWRDKTSYRWQLLHRPQVGYIRVKLYEGPQLVADSGVIIDTSMRGGRLGVFCFSQENIIWSNLQYRCNDTVPEDFEPFRRQLLQGRV

SEQ ID NO: 88595 - protein, 400 aa, Homo sapiens
  Payload ID: 17738
  Gene Name: thrombospondin 3
  ENSP ID: ENSP00000404040
METQELRGALALLLLCFFTSASQDLQVIDLLTVGESRQMVAVAEKIRTALLTAGDIYLLSTFRLPPKQGGVLFGLYSRQDNTRWLEASVVGKINKVTNALHSILGEGNVPDPKHHYGVSGFHEQRSHCSPNPCFRGVDCMEVYEYPGYRCGPCPPGLQGNGTHCSDINECAHADPCFPGSSCINTMPGFHCEACPRGYKGTQVSGVGIDYARASKQVCNDIDECNDGNNGGCDPNSICTNTVGSFKCGPCRLGFLGNQSQGCLPARTCHSPAHSPCHIHAHCLFERNGAVSCQCNVGWAGNGNVCGTDTDIDGYPDQALPCMDNNKHCKQDNCLLTPNSGQEDADNDGVGDQCDDDADGDGIKNVEASPMDWTIALKSPTHYRQTGMRTGWEMLATAALK

SEQ ID NO: 88596 - protein, 485 aa, Homo sapiens
  Payload ID: 17738
  Gene Name: thrombospondin 3
  ENSP ID: ENSP00000437353
MDNNKHCKQDNCLLTPNSGQEDADNDGVGDQCDDDADGDGIKNVEDNCRLFPNKDQQNSDTDSFGDACDNCPNVPNNDQKDTDGNGEGDACDNDVDGDGIPNGLDNCPKVPNPLQTDRDEDGVGDACDSCPEMSNPTQTDADSDLVGDVCDTNEDSDGDGHQDTKDNCPQLPNSSQLDSDNDGLGDECDGDDDNDGIPDYVPPGPDNCRLVPNPNQKDSDGNGVGDVCEDDFDNDAVVDPLDVCPESAEVTLTDFRAYQTVVLDPEGDAQIDPNWVVLNQGMEIVQTMNSDPGLAVGYTAFNGVDFEGTFHVNTVTDDDYAGFLFSYQDSGRFYVVMWKQTEQTYWQATPFRAVAQPGLQLKAVTSVSGPGEHLRNALWHTGHTPDQVRLLWTDPRNVGWRDKTSYRWQLLHRPQVGYIRVKLYEGPQLVADSGVIIDTSMRGGRLGVFCFSQENIIWSNLQYRCNDTVPEDFEPFRRQLLQGRV

SEQ ID NO: 88597 - protein, 947 aa, Homo sapiens
  Payload ID: 17738
  Gene Name: thrombospondin 3
  ENSP ID: ENSP00000444792
METQELRGALALLLLCFFTSASQDLQVIDLLTVGESRQMVAVAEKIRTALLTAGDIYLLSTFRLPPKQGGVLFGLYSRQDNTRWLEASVVGKINKVLVRYQREDGKVHAVNLQQAGLADGRTHTVLLRLRGPSRPSPALHLYVDCKLGDQHAGLPALAPIPPAEVDGLEIRTGQKAYLRMQGFVESMKIILGGSMARVGALSECPFQGDESIHSAGEQTKALVTQLTLFNQILVELRDDIRDQVKEMSLIRNTIMECQVCGFHEQRSHCSPNPCFRGVDCMEVYEYPGYRCGPCPPGLQGNGTHCSDINECAHADPCFPGSSCINTMPGFHCEACPRGYKGTQVSGVGIDYARASKQVCNDIDECNDGNNGGCDPNSICTNTVGSFKCGPCRLGFLGNQSQGCLPARTCHSPAHSPCHIHAHCLFERNGAVSCQCNVGWAGNGNVCGTDTDIDGYPDQALPCMDNNKHCKQDNCLLTPNSGQEDADNDGVGDQCDDDADGDGIKNVEDNCRLFPNKDQQNSDTDSFGDACDNCPNVPNNDQKDTDGNGEGDACDNDVDGDGIPNGLDNCPKVPNPLQTDRDEDGVGDACDSCPEMSNPTQTDADSDLVGDVCDTNEDSDGDGHQDTKDNCPQLPNSSQLDSDNDGLGDECDGDDDNDGIPDYVPPGPDNCRLVPNPNQKDSDGNGVGDVCEDDFDNDAVVDPLDVCPESAEVTLTDFRAYQTVVLDPEGDAQIDPNWVVLNQGMEIVQTMNSDPGLAVGYTAFNGVDFEGTFHVNTVTDDDYAGFLFSYQDSGRFYVVMWKQTEQTYWQATPFRAVAQPGLQLKAVTSVSGPGEHLRNALWHTGHTPDQVRLLWTDPRNVGWRDKTSYRWQLLHRPQVGYIRVKLYEGPQLVADSGVIIDTSMRGGRLGVFCFSQENIIWSNLQYRCNDTVPEDFEPFRRQLLQGRV

SEQ ID NO: 88598 - protein, 961 aa, Homo sapiens
  Payload ID: 17739
  Gene Name: thrombospondin 4
  Uniprot ID: P35443
  ENSP ID: ENSP00000339730
MLAPRGAAVLLLHLVLQRWLAAGAQATPQVFDLLPSSSQRLNPGALLPVLTDPALNDLYVISTFKLQTKSSATIFGLYSSTDNSKYFEFTVMGRLNKAILRYLKNDGKVHLVVFNNLQLADGRRHRILLRLSNLQRGAGSLELYLDCIQVDSVHNLPRAFAGPSQKPETIELRTFQRKPQDFLEELKLVVRGSLFQVASLQDCFLQQSEPLAATGTGDFNRQFLGQMTQLNQLLGEVKDLLRQQVKETSFLRNTIAECQACGPLKFQSPTPSTVVPPAPPAPPTRPPRRCDSNPCFRGVQCTDSRDGFQCGPCPEGYTGNGITCIDVDECKYHPCYPGVHCINLSPGFRCDACPVGFTGPMVQGVGISFAKSNKQVCTDIDECRNGACVPNSICVNTLGSYRCGPCKPGYTGDQIRGCKAERNCRNPELNPCSVNAQCIEERQGDVTCVCGVGWAGDGYICGKDVDIDSYPDEELPCSARNCKKDNCKYVPNSGQEDADRDGIGDACDEDADGDGILNEQDNCVLIHNVDQRNSDKDIFGDACDNCLSVLNNDQKDTDGDGRGDACDDDMDGDGIKNILDNCPKFPNRDQRDKDGDGVGDACDSCPDVSNPNQSDVDNDLVGDSCDTNQDSDGDGHQDSTDNCPTVINSAQLDTDKDGIGDECDDDDDNDGIPDLVPPGPDNCRLVPNPAQEDSNSDGVGDICESDFDQDQVIDRIDVCPENAEVTLTDFRAYQTVVLDPEGDAQIDPNWVVLNQGMEIVQTMNSDPGLAVGYTAFNGVDFEGTFHVNTQTDDDYAGFIFGYQDSSSFYVVMWKQTEQTYWQATPFRAVAEPGIQLKAVKSKTGPGEHLRNSLWHTGDTSDQVRLLWKDSRNVGWKDKVSYRWFLQHRPQVGYIRVRFYEGSELVADSGVTIDTTMRGGRLGVFCFSQENIIWSNLKYRCNDTIPEDFQEFQTQNFDRFDN

SEQ ID NO: 88599 - protein, 870 aa, Homo sapiens
  Payload ID: 17739
  Gene Name: thrombospondin 4
  ENSP ID: ENSP00000422298
MGRLNKAILRYLKNDGKVHLVVFNNLQLADGRRHRILLRLSNLQRGAGSLELYLDCIQVDSVHNLPRAFAGPSQKPETIELRTFQRKPQDFLEELKLVVRGSLFQVASLQDCFLQQSEPLAATGTGDFNRQFLGQMTQLNQLLGEVKDLLRQQVKETSFLRNTIAECQACGPLKFQSPTPSTVVPPAPPAPPTRPPRRCDSNPCFRGVQCTDSRDGFQCGPCPEGYTGNGITCIDVDECKYHPCYPGVHCINLSPGFRCDACPVGFTGPMVQGVGISFAKSNKQVCTDIDECRNGACVPNSICVNTLGSYRCGPCKPGYTGDQIRGCKAERNCRNPELNPCSVNAQCIEERQGDVTCVCGVGWAGDGYICGKDVDIDSYPDEELPCSARNCKKDNCKYVPNSGQEDADRDGIGDACDEDADGDGILNEQDNCVLIHNVDQRNSDKDIFGDACDNCLSVLNNDQKDTDGDGRGDACDDDMDGDGIKNILDNCPKFPNRDQRDKDGDGVGDACDSCPDVSNPNQSDVDNDLVGDSCDTNQDSDGDGHQDSTDNCPTVINSAQLDTDKDGIGDECDDDDDNDGIPDLVPPGPDNCRLVPNPAQEDSNSDGVGDICESDFDQDQVIDRIDVCPENAEVTLTDFRAYQTVVLDPEGDAQIDPNWVVLNQGMEIVQTMNSDPGLAVGYTAFNGVDFEGTFHVNTQTDDDYAGFIFGYQDSSSFYVVMWKQTEQTYWQATPFRAVAEPGIQLKAVKSKTGPGEHLRNSLWHTGDTSDQVRLLWKDSRNVGWKDKVSYRWFLQHRPQVGYIRVRFYEGSELVADSGVTIDTTMRGGRLGVFCFSQENIIWSNLKYRCNDTIPEDFQEFQTQNFDRFDN

SEQ ID NO: 88600 - protein, 852 aa, Homo sapiens
  Payload ID: 17740
  Gene Name: thrombospondin, type I, domain containing 1
  Uniprot ID: Q9NS62
  ENSP ID: ENSP00000258613
MKPMLKDFSNLLLVVLCDYVLGEAEYLLLREPGHVALSNDTVYVDFQYFDGANGTLRNVSVLLLEANTNQTVTTKYLLTNQSQGTLKFECFYFKEAGDYWFTMTPEATDNSTPFPWWEKSAFLKVEWPVFHVDLNRSAKAAEGTFQVGLFTSQPLCPFPVDKPNIVVDVIFTNSLPEARRNSRQPLEIRTSKRTELAQGQWVEFGCAPLGPEAYVTVVLKLLGRDSVITSTGPIDLAQKFGYKLVMVPELTCESGVEVTVLPPPCTFVQGVVTVFKEAPRYPGKRTIHLAENSLPLGERRTIFNCTLFDMGKNKYCFDFGISSRSHFSAKEECMLIQRNTETWGLWQPWSQCSATCGDGVRERRRVCLTSFPSSPVCPGMSLEASLCSLEECAAFQPSSPSPLQPQGPVKSNNIVTVTGISLCLFIIIATVLITLWRRFGRPAKCSTPARHNSIHSPSFRKNSDEENICELSEQRGSFSDGGDGPTGSPGDTGIPLTYRRSGPVPPEDDASGSESFQSNAQKIIPPLFSYRLAQQQLKEMKKKGLTETTKVYHVSQSPLTDTAIDAAPSAPLDLESPEEAAANKFRIKSPFPEQPAVSAGERPPSRLDLNVTQASCAISPSQTLIRKSQARHVGSRGGPSERSHARNAHFRRTASFHEARQARPFRERSMSTLTPRQAPAYSSRTRTCEQAEDRFRPQSRGAHLFPEKLEHFQEASGTRGPLNPLPKSYTLGQPLRKPDLGDHQAGLVAGIERTEPHRARRGPSPSHKSVSRKQSSPISPKDNYQRVSSLSPSQCRKDKCQSFPTHPEFAFYDNTSFGLTEAEQRMLDLPGYFGSNEEDETTSTLSVEKLVI

SEQ ID NO: 88601 - protein, 799 aa, Homo sapiens
  Payload ID: 17740
  Gene Name: thrombospondin, type I, domain containing 1
  Uniprot ID: Q9NS62
  ENSP ID: ENSP00000340650
MKPMLKDFSNLLLVVLCDYVLGEAEYLLLREPGHVALSNDTVYVDFQYFDGANGTLRNVSVLLLEANTNQTVTTKYLLTNQSQGTLKFECFYFKEAGDYWFTMTPEATDNSTPFPWWEKSAFLKVEWPVFHVDLNRSAKAAEGTFQVGLFTSQPLCPFPVDKPNIVVDVIFTNSLPEARRNSRQPLEIRTSKRTELAQGQWVEFGCAPLGPEAYVTVVLKLLGRDSVITSTGPIDLAQKFGYKLVMVPELTCESGVEVTVLPPPCTFVQGVVTVFKEAPRYPGKRTIHLAENSLPLGERRTIFNCTLFDMGKNKYCFDFGISSRSHFSAKEECMLIQRNTAFQPSSPSPLQPQGPVKSNNIVTVTGISLCLFIIIATVLITLWRRFGRPAKCSTPARHNSIHSPSFRKNSDEENICELSEQRGSFSDGGDGPTGSPGDTGIPLTYRRSGPVPPEDDASGSESFQSNAQKIIPPLFSYRLAQQQLKEMKKKGLTETTKVYHVSQSPLTDTAIDAAPSAPLDLESPEEAAANKFRIKSPFPEQPAVSAGERPPSRLDLNVTQASCAISPSQTLIRKSQARHVGSRGGPSERSHARNAHFRRTASFHEARQARPFRERSMSTLTPRQAPAYSSRTRTCEQAEDRFRPQSRGAHLFPEKLEHFQEASGTRGPLNPLPKSYTLGQPLRKPDLGDHQAGLVAGIERTEPHRARRGPSPSHKSVSRKQSSPISPKDNYQRVSSLSPSQCRKDKCQSFPTHPEFAFYDNTSFGLTEAEQRMLDLPGYFGSNEEDETTSTLSVEKLVI

SEQ ID NO: 88602 - protein, 219 aa, Homo sapiens
  Payload ID: 17741
  Gene Name: thrombospondin, type I, domain containing 4
  Uniprot ID: Q6ZMP0
  ENSP ID: ENSP00000261862
MFVSYLILTLLHVQTAVLARPGGESIGCDDYLGSDKVVDKCGVCGGDNTGCQVVSGVFKHALTSLGYHRVVEIPEGATKINITEMYKSNKKKSHLKPATRGSQFSSVKVCSVPAACKLLGTPGRARQPVPAPRELEHDKNSPHCAYLSLYLTSLAQSSWRVFSLFSYVLIYLFSKYLAFNTLFALKRMALQRDRKEKTRAWCIFIKLCGREIQILPGPV

SEQ ID NO: 88603 - protein, 1018 aa, Homo sapiens
  Payload ID: 17741
  Gene Name: thrombospondin, type I, domain containing 4
  Uniprot ID: Q6ZMP0
  ENSP ID: ENSP00000347484
MVSHFMGSLSVLCFLLLLGFQFVCPQPSTQHRKVPQRMAAEGAPEDDGGGGAPGVWGAWGPWSACSRSCSGGVMEQTRPCLPRSYRLRGGQRPGAPARAFADHVVSAVRTSVPLHRSRDETPALAGTDASRQGPTVLRGSRHPQPQGLEVTGDRRSRTRGTIGPGKYGYGKAPYILPLQTDTAHTPQRLRRQKLSSRHSRSQGASSARHGYSSPAHQVPQHGPLYQSDSGPRSGLQAAEAPIYQLPLTHDQGYPAASSLFHSPETSNNHGVGTHGATQSFSQPARSTAISCIGAYRQYKLCNTNVCPESSRSIREVQCASYNNKPFMGRFYEWEPFAEVKGNRKCELNCQAMGYRFYVRQAEKVIDGTPCDQNGTAICVSGQCKSIGCDDYLGSDKVVDKCGVCGGDNTGCQVVSGVFKHALTSLGYHRVVEIPEGATKINITEMYKSNNYLALRSRSGRSIINGNWAIDRPGKYEGGGTMFTYKRPNEISSTAGESFLAEGPTNEILDVYMIHQQPNPGVHYEYVIMGTNAISPQVPPHRRPGEPFNGQMVTEGRSQEEGEQKGRNEEKEDLRGEAPEMFTSESAQTFPVRHPDRFSPHRPDNLVPPAPQPPRRSRDHNWKQLGTTECSTTCGKGSQYPIFRCVHRSTHEEAPESYCDSSMKPTPEEEPCNIFPCPAFWDIGEWSECSKTCGLGMQHRQVLCRQVYANRSLTVQPYRCQHLEKPETTSTCQLKICSEWQIRTDWTSCSVPCGVGQRTRDVKCVSNIGDVVDDEECNMKLRPNDIENCDMGPCAKSWFLTEWSERCSAECGAGVRTRSVVCMTNHVSSLPLEGCGNNRPAEATPCDNGPCTGKVEWFAGSWSQCSIECGSGTQQREVICVRKNADTFEVLDPSECSFLEKPPSQQSCHLKPCGAKWFSTEWSMCSKSCQGGFRVREVRCLSDDMTLSNLCDPQLKPEERESCNPQDCVPEVDENCKDKYYNCNVVVQARLCVYNYYKTACCASCTRVANRQTGFLGSR

SEQ ID NO: 88604 - protein, 658 aa, Homo sapiens
  Payload ID: 17741
  Gene Name: thrombospondin, type I, domain containing 4
  Uniprot ID: Q6ZMP0
  ENSP ID: ENSP00000350413
MFVSYLILTLLHVQTAVLARPGGESIGCDDYLGSDKVVDKCGVCGGDNTGCQVVSGVFKHALTSLGYHRVVEIPEGATKINITEMYKSNNYLALRSRSGRSIINGNWAIDRPGKYEGGGTMFTYKRPNEISSTAGESFLAEGPTNEILDVYMIHQQPNPGVHYEYVIMGTNAISPQVPPHRRPGEPFNGQMVTEGRSQEEGEQKGRNEEKEDLRGEAPEMFTSESAQTFPVRHPDRFSPHRPDNLVPPAPQPPRRSRDHNWKQLGTTECSTTCGKGSQYPIFRCVHRSTHEEAPESYCDSSMKPTPEEEPCNIFPCPAFWDIGEWSECSKTCGLGMQHRQVLCRQVYANRSLTVQPYRCQHLEKPETTSTCQLKICSEWQIRTDWTSCSVPCGVGQRTRDVKCVSNIGDVVDDEECNMKLRPNDIENCDMGPCAKSWFLTEWSERCSAECGAGVRTRSVVCMTNHVSSLPLEGCGNNRPAEATPCDNGPCTGKVEWFAGSWSQCSIECGSGTQQREVICVRKNADTFEVLDPSECSFLEKPPSQQSCHLKPCGAKWFSTEWSMCSKSCQGGFRVREVRCLSDDMTLSNLCDPQLKPEERESCNPQDCVPEVDENCKDKYYNCNVVVQARLCVYNYYKTACCASCTRVANRQTGFLGSR

SEQ ID NO: 88605 - protein, 101 aa, Homo sapiens
  Payload ID: 17741
  Gene Name: thrombospondin, type I, domain containing 4
  ENSP ID: ENSP00000484438
MVSHFMGSLSVLCFLLLLGFQFVCPQPSTQHRKVPQRMAAEGAPEDDGGGGAPGVWGAWGPWSACSRSCSGGVMEQTRPCLPRSYRLRGGQRPGAPARAFA

SEQ ID NO: 88606 - protein, 1657 aa, Homo sapiens
  Payload ID: 17742
  Gene Name: thrombospondin, type I, domain containing 7A
  Uniprot ID: Q9UPZ6
  ENSP ID: ENSP00000406482
MGLQARRWASGSRGAAGPRRGVLQLLPLPLPLPLLLLLLLRPGAGRAAAQGEAEAPTLYLWKTGPWGRCMGDECGPGGIQTRAVWCAHVEGWTTLHTNCKQAERPNNQQNCFKVCDWHKELYDWRLGPWNQCQPVISKSLEKPLECIKGEEGIQVREIACIQKDKDIPAEDIICEYFEPKPLLEQACLIPCQQDCIVSEFSAWSECSKTCGSGLQHRTRHVVAPPQFGGSGCPNLTEFQVCQSSPCEAEELRYSLHVGPWSTCSMPHSRQVRQARRRGKNKEREKDRSKGVKDPEARELIKKKRNRNRQNRQENKYWDIQIGYQTREVMCINKTGKAADLSFCQQEKLPMTFQSCVITKECQVSEWSEWSPCSKTCHDMVSPAGTRVRTRTIRQFPIGSEKECPEFEEKEPCLSQGDGVVPCATYGWRTTEWTECRVDPLLSQQDKRRGNQTALCGGGIQTREVYCVQANENLLSQLSTHKNKEASKPMDLKLCTGPIPNTTQLCHIPCPTECEVSPWSAWGPCTYENCNDQQGKKGFKLRKRRITNEPTGGSGVTGNCPHLLEAIPCEEPACYDWKAVRLGNCEPDNGKECGPGTQVQEVVCINSDGEEVDRQLCRDAIFPIPVACDAPCPKDCVLSTWSTWSSCSHTCSGKTTEGKQIRARSILAYAGEEGGIRCPNSSALQEVRSCNEHPCTVYHWQTGPWGQCIEDTSVSSFNTTTTWNGEASCSVGMQTRKVICVRVNVGQVGPKKCPESLRPETVRPCLLPCKKDCIVTPYSDWTSCPSSCKEGDSSIRKQSRHRVIIQLPANGGRDCTDPLYEEKACEAPQACQSYRWKTHKWRRCQLVPWSVQQDSPGAQEGCGPGRQARAITCRKQDGGQAGIHECLQYAGPVPALTQACQIPCQDDCQLTSWSKFSSCNGDCGAVRTRKRTLVGKSKKKEKCKNSHLYPLIETQYCPCDKYNAQPVGNWSDCILPEGKVEVLLGMKVQGDIKECGQGYRYQAMACYDQNGRLVETSRCNSHGYIEEACIIPCPSDCKLSEWSNWSRCSKSCGSGVKVRSKWLREKPYNGGRPCPKLDHVNQAQVYEVVPCHSDCNQYLWVTEPWSICKVTFVNMRENCGEGVQTRKVRCMQNTADGPSEHVEDYLCDPEEMPLGSRVCKLPCPEDCVISEWGPWTQCVLPCNQSSFRQRSADPIRQPADEGRSCPNAVEKEPCNLNKNCYHYDYNVTDWSTCQLSEKAVCGNGIKTRMLDCVRSDGKSVDLKYCEALGLEKNWQMNTSCMVECPVNCQLSDWSPWSECSQTCGLTGKMIRRRTVTQPFQGDGRPCPSLMDQSKPCPVKPCYRWQYGQWSPCQVQEAQCGEGTRTRNISCVVSDGSADDFSKVVDEEFCADIELIIDGNKNMVLEESCSQPCPGDCYLKDWSSWSLCQLTCVNGEDLGFGGIQVRSRPVIIQELENQHLCPEQMLETKSCYDGQCYEYKWMASAWKGSSRTVWCQRSDGINVTGGCLVMSQPDADRSCNPPCSQPHSYCSETKTCHCEEGYTEVMSSNSTLEQCTLIPVVVLPTMEDKRGDVKTSRAVHPTQPSSNPAGRGRTWFLQPFGPDGRLKTWVYGVAAGAFVLLIFIVSMIYLACKKPKKPQRRQNNRLKPLTLAYDGDADM

SEQ ID NO: 88607 - protein, 1657 aa, Homo sapiens
  Payload ID: 17742
  Gene Name: thrombospondin, type I, domain containing 7A
  ENSP ID: ENSP00000481440
MGLQARRWASGSRGAAGPRRGVLQLLPLPLPLPLLLLLLLRPGAGRAAAQGEAEAPTLYLWKTGPWGRCMGDECGPGGIQTRAVWCAHVEGWTTLHTNCKQAERPNNQQNCFKVCDWHKELYDWRLGPWNQCQPVISKSLEKPLECIKGEEGIQVREIACIQKDKDIPAEDIICEYFEPKPLLEQACLIPCQQDCIVSEFSAWSECSKTCGSGLQHRTRHVVAPPQFGGSGCPNLTEFQVCQSSPCEAEELRYSLHVGPWSTCSMPHSRQVRQARRRGKNKEREKDRSKGVKDPEARELIKKKRNRNRQNRQENKYWDIQIGYQTREVMCINKTGKAADLSFCQQEKLPMTFQSCVITKECQVSEWSEWSPCSKTCHDMVSPAGTRVRTRTIRQFPIGSEKECPEFEEKEPCLSQGDGVVPCATYGWRTTEWTECRVDPLLSQQDKRRGNQTALCGGGIQTREVYCVQANENLLSQLSTHKNKEASKPMDLKLCTGPIPNTTQLCHIPCPTECEVSPWSAWGPCTYENCNDQQGKKGFKLRKRRITNEPTGGSGVTGNCPHLLEAIPCEEPACYDWKAVRLGNCEPDNGKECGPGTQVQEVVCINSDGEEVDRQLCRDAIFPIPVACDAPCPKDCVLSTWSTWSSCSHTCSGKTTEGKQIRARSILAYAGEEGGIRCPNSSALQEVRSCNEHPCTVYHWQTGPWGQCIEDTSVSSFNTTTTWNGEASCSVGMQTRKVICVRVNVGQVGPKKCPESLRPETVRPCLLPCKKDCIVTPYSDWTSCPSSCKEGDSSIRKQSRHRVIIQLPANGGRDCTDPLYEEKACEAPQACQSYRWKTHKWRRCQLVPWSVQQDSPGAQEGCGPGRQARAITCRKQDGGQAGIHECLQYAGPVPALTQACQIPCQDDCQLTSWSKFSSCNGDCGAVRTRKRTLVGKSKKKEKCKNSHLYPLIETQYCPCDKYNAQPVGNWSDCILPEGKVEVLLGMKVQGDIKECGQGYRYQAMACYDQNGRLVETSRCNSHGYIEEACIIPCPSDCKLSEWSNWSRCSKSCGSGVKVRSKWLREKPYNGGRPCPKLDHVNQFQVYEVVPCHSDCNQYLWVTEPWSICKVTFVNMRENCGEGVQTRKVRCMQNTADGPSEHVEDYLCDPEEMPLGSRVCKLPCPEDCVISEWGPWTQCVLPCNQSSFRQRSADPIRQPADEGRSCPNAVEKEPCNLNKNCYHYDYNVTDWSTCQLSEKAVCGNGIKTRMLDCVRSDGKSVDLKYCEALGLEKNWQMNTSCMVECPVNCQLSDWSPWSECSQTCGLTGKMIRRRTVTQPFQGDGRPCPSLMDQSKPCPVKPCYRWQYGQWSPCQVQEAQCGEGTRTRNISCVVSDGSADDFSKVVDEEFCADIELIIDGNKNMVLEESCSQPCPGDCYLKDWSSWSLCQLTCVNGEDLGFGGIQVRSRPVIIQELENQHLCPEQMLETKSCYDGQCYEYKWMASAWKGSSRTVWCQRSDGINVTGGCLVMSQPDADRSCNPPCSQPHSYCSETKTCHCEEGYTEVMSSNSTLEQCTLIPVVVLPTMEDKRGDVKTSRAVHPTQPSSNPAGRGRTWFLQPFGPDGRLKTWVYGVAAGAFVLLIFIVSMIYLACKKPKKPQRRQNNRLKPLTLAYDGDADM

SEQ ID NO: 88608 - protein, 1608 aa, Homo sapiens
  Payload ID: 17743
  Gene Name: thrombospondin, type I, domain containing 7B
  Uniprot ID: Q9C0I4
  ENSP ID: ENSP00000272643
MFPKSNLTVTCWVWRSMRKLFLLLSLLLSHAAHLEGKKDNQFIWKPGPWGRCTGDCGPGGVQSRAVWCFHVDGWTSHLSNCGESNRPPKERSCFRVCDWHSDLFQWEVSDWHHCVLVPYARGEVKPRTAECVTAQHGLQHRMVRCIQKLNRTVVANEICEHFALQPPTEQACLIPCPRDCVVSEFLPWSNCSKGCGKKLQHRTRAVIAPPLFGGLQCPNLTESRACDAPISCPLGEEEYTFSLKVGPWSKCRLPHLKEINPSGRTVLDFNSDSNERVTFKHQSYKAHHHSKSWAIEIGYQTRQVSCTRSDGQNAMLSLCLQDSFPLTVQSCIMPKDCETSQWSSWSPCSKTCRSGSLLPGFRSRSRNVKHMAIGGGKECPELLEKEACIVEGELLQQCPRYSWRTSEWKECQVSLLLEQQDPHWHVTGPVCGGGIQTREVYCAQSVPAAAALRAKEVSRPVEKALCVGPAPLPSQLCNIPCSTDCIVSSWSAWGLCIHENCHDPQGKKGFRTRQRHVLMESTGPAGHCPHLVESVPCEDPMCYRWLASEGICFPDHGKCGLGHRILKAVCQNDRGEDVSGSLCPVPPPPERKSCEIPCRMDCVLSEWTEWSSCSQSCSNKNSDGKQTRSRTILALAGEGGKPCPPSQALQEHRLCNDHSCMQLHWETSPWGPCSEDTLVTALNATIGWNGEATCGVGIQTRRVFCVKSHVGQVMTKRCPDSTRPETVRPCFLPCKKDCIVTAFSEWTPCPRMCQAGNATVKQSRYRIIIQEAANGGQECPDTLYEERECEDVSLCPVYRWKPQKWSPCILVPESVWQGITGSSEACGKGLQTRAVSCISDDNRSAEMMECLKQTNGMPLLVQECTVPCREDCTFTAWSKFTPCSTNCEATKSRRRQLTGKSRKKEKCQDSDLYPLVETELCPCDEFISQPYGNWSDCILPEGRREPHRGLRVQADSKECGEGLRFRAVACSDKNGRPVDPSFCSSSGYIQEKCVIPCPFDCKLSDWSSWGSCSSSCGIGVRIRSKWLKEKPYNGGRPCPKLDLKNQGQVHEAVPCYSECNQYSWVVEHWSSCKINNELRSLRCGGGTQSRKIRCVNTADGEGGAVDSNLCNQDEIPPETQSCSLMCPNECVMSEWGLWSKCPQSCDPHTMQRRTRHLLRPSLNSRTCAEDSQVQPCLLNENCFQFQYNLTEWSTCQLSENAPCGQGVRTRLLSCVCSDGKPVSMDQCEQHNLEKPQRMSIPCLVECVVNCQLSGWTAWTECSQTCGHGGRMSRTRFIIMPTQGEGRPCPTELTQEKTCPVTPCYSWVLGNWSACKLEGGDCGEGVQIRSLSCMVHSGSISHAAGRVEDALCGEMPFQDSILKQLCSVPCPGDCHLTEWSEWSTCELTCIDGRSFETVGRQSRSRTFIIQSFENQDSCPQQVLETRPCTGGKCYHYTWKASLWNNNERTVWCQRSDGVNVTGGCSPQARPAAIRQCIPACRKPFSYCTQGGVCGCEKGYTEIMKSNGFLDYCMKVPGSEDKKADVKNLSGKNRPVNSKIHDIFKGWSLQPLDPDGRVKIWVYGVSGGAFLIMIFLIFTSYLVCKKPKPHQSTPPQQKPLTLAYDGDLDM

SEQ ID NO: 88609 - protein, 1606 aa, Homo sapiens
  Payload ID: 17743
  Gene Name: thrombospondin, type I, domain containing 7B
  ENSP ID: ENSP00000387145
MFPKSNLTVTCWVWRSMRKLFLLLSLLLSHAAHLEGKKDNQFIWKPGPWGRCTGDCGPGGVQSRAVWCFHVDGWTSHLSNCGESNRPPKERSCFRVCDWHSDLFQWEVSDWHHCVLVPYARGEVKPRTAECVTAQHGLQHRMVRCIQKLNRTVVANEICEHFALQPPTEQACLIPCPRDCVVSEFLPWSNCSKGCGKKLQHRTRAVIAPPLFGGLQCPNLTESRACDAPISCPLGEEEYTFSLKVGPWSKCRLPHLKEINPSGRTVLDFNSDSNERVTFKHQSYKAHHHSKSWAIEIGYQTRQVSCTRSDGQNAMLSLCLQDSFPLTVQSCIMPKDCETSQWSSWSPCSKTCRSGSLLPGFRSRSRNVKHMAIGGGKECPELLEKEACIVEGELLQQCPRYSWRTSEWKECQVSLLLEQQDPHWHVTGPVCGGGIQTREVYCAQSVPAAAALRAKEVSRPVEKALCVGPAPLPSQLCNIPCSTDCIVSSWSAWGLCIHENCHDPQGKKGFRTRQRHVLMESTGPAGHCPHLVESVPCEDPMCYRWLASEGICFPDHGKCGLGHRILKAVCQNDRGEDVSGSLCPVPPPPERKSCEIPCRMDCVLSEWTEWSSCSQSCSNKNSDGKQTRSRTILALAGEGGKPCPPSQALQEHRLCNDHSCMQLHWETSPWGPCSEDTLVTALNATIGWNGEATCGVGIQTRRVFCVKSHVGQVMTKRCPDSTRPETVRPCFLPCKKDCIVTAFSEWTPCPRMCQAGNATVKQSRYRIIIQEAANGGQECPDTLYEERECEDVSLCPVYRWKPQKWSPCILVPESVWQGITGSSEACGKGLQTRAVSCISDDNRSAEMMECLKQTNGMPLLVQECTVPCREDCTFTAWSKFTPCSTNCEATKSRRRQLTGKSRKKEKCQDSDLYPLVETELCPCDEFISQPYGNWSDCILPEGRREPHRGLRVQADSKECGEGLRFRAVACSDKNGRPVDPSFCSSSGYIQEKCVIPCPFDCKLSDWSSWGSCSSSCGIGVRIRSKWLKEKPYNGGRPCPKLDLKNQVHEAVPCYSECNQYSWVVEHWSSCKINNELRSLRCGGGTQSRKIRCVNTADGEGGAVDSNLCNQDEIPPETQSCSLMCPNECVMSEWGLWSKCPQSCDPHTMQRRTRHLLRPSLNSRTCAEDSQVQPCLLNENCFQFQYNLTEWSTCQLSENAPCGQGVRTRLLSCVCSDGKPVSMDQCEQHNLEKPQRMSIPCLVECVVNCQLSGWTAWTECSQTCGHGGRMSRTRFIIMPTQGEGRPCPTELTQEKTCPVTPCYSWVLGNWSACKLEGGDCGEGVQIRSLSCMVHSGSISHAAGRVEDALCGEMPFQDSILKQLCSVPCPGDCHLTEWSEWSTCELTCIDGRSFETVGRQSRSRTFIIQSFENQDSCPQQVLETRPCTGGKCYHYTWKASLWNNNERTVWCQRSDGVNVTGGCSPQARPAAIRQCIPACRKPFSYCTQGGVCGCEKGYTEIMKSNGFLDYCMKVPGSEDKKADVKNLSGKNRPVNSKIHDIFKGWSLQPLDPDGRVKIWVYGVSGGAFLIMIFLIFTSYLVCKKPKPHQSTPPQQKPLTLAYDGDLDM

SEQ ID NO: 88610 - protein, 1577 aa, Homo sapiens
  Payload ID: 17743
  Gene Name: thrombospondin, type I, domain containing 7B
  ENSP ID: ENSP00000413841
MHNTADEVVLYHKLAGPWGRCTGDCGPGGVQSRAVWCFHVDGWTSHLSNCGESNRPPKERSCFRVCDWHSDLFQWEVSDWHHCVLVPYARGEVKPRTAECVTAQHGLQHRMVRCIQKLNRTVVANEICEHFALQPPTEQACLIPCPRDCVVSEFLPWSNCSKGCGKKLQHRTRAVIAPPLFGGLQCPNLTESRACDAPISCPLGEEEYTFSLKVGPWSKCRLPHLKEINPSGRTVLDFNSDSNERVTFKHQSYKAHHHSKSWAIEIGYQTRQVSCTRSDGQNAMLSLCLQDSFPLTVQSCIMPKDCETSQWSSWSPCSKTCRSGSLLPGFRSRSRNVKHMAIGGGKECPELLEKEACIVEGELLQQCPRYSWRTSEWKECQVSLLLEQQDPHWHVTGPVCGGGIQTREVYCAQSVPAAAALRAKEVSRPVEKALCVGPAPLPSQLCNIPCSTDCIVSSWSAWGLCIHENCHDPQGKKGFRTRQRHVLMESTGPAGHCPHLVESVPCEDPMCYRWLASEGICFPDHGKCGLGHRILKAVCQNDRGEDVSGSLCPVPPPPERKSCEIPCRMDCVLSEWTEWSSCSQSCSNKNSDGKQTRSRTILALAGEGGKPCPPSQALQEHRLCNDHSCMQLHWETSPWGPCSEDTLVTALNATIGWNGEATCGVGIQTRRVFCVKSHVGQVMTKRCPDSTRPETVRPCFLPCKKDCIVTAFSEWTPCPRMCQAGNATVKQSRYRIIIQEAANGGQECPDTLYEERECEDVSLCPVYRWKPQKWSPCILVPESVWQGITGSSEACGKGLQTRAVSCISDDNRSAEMMECLKQTNGMPLLVQECTVPCREDCTFTAWSKFTPCSTNCEATKSRRRQLTGKSRKKEKCQDSDLYPLVETELCPCDEFISQPYGNWSDCILPEGRREPHRGLRVQADSKECGEGLRFRAVACSDKNGRPVDPSFCSSSGYIQEKCVIPCPFDCKLSDWSSWGSCSSSCGIGVRIRSKWLKEKPYNGGRPCPKLDLKNQAQVHEAVPCYSECNQYSWVVEHWSSCKINNELRSLRCGGGTQSRKIRCVNTADGEGGAVDSNLCNQDEIPPETQSCSLMCPNECVMSEWGLWSKCPQSCDPHTMQRRTRHLLRPSLNSRTCAEDSQVQPCLLNENCFQFQYNLTEWSTCQLSENAPCGQGVRTRLLSCVCSDGKPVSMDQCEQHNLEKPQRMSIPCLVECVVNCQLSGWTAWTECSQTCGHGGRMSRTRFIIMPTQGEGRPCPTELTQEKTCPVTPCYSWVLGNWSACKLEGGDCGEGVQIRSLSCMVHSGSISHAAGRVEDALCGEMPFQDSILKQLCSVPCPGDCHLTEWSEWSTCELTCIDGRSFETVGRQSRSRTFIIQSFENQDSCPQQVLETRPCTGGKCYHYTWKASLWNNNERTVWCQRSDGVNVTGGCSPQARPAAIRQCIPACRKPFSYCTQGGVCGCEKGYTEIMKSNGFLDYCMKVPGSEDKKADVKNLSGKNRPVNSKIHDIFKGWSLQPLDPDGRVKIWVYGVSGGAFLIMIFLIFTSYLVCKKPKPHQSTPPQQKPLTLAYDGDLDM

SEQ ID NO: 88611 - protein, 50 aa, Homo sapiens
  Payload ID: 17743
  Gene Name: thrombospondin, type I, domain containing 7B
  ENSP ID: ENSP00000473349
MFPKSNLTVTCWVWRSMRKLFLLLSLLLSHAAHLEGKKDNQFIWKPGLAK

SEQ ID NO: 88612 - protein, 669 aa, Homo sapiens
  Payload ID: 17744
  Gene Name: thrombospondin-type laminin G domain and EAR repeats
  Uniprot ID: Q8WU66
  ENSP ID: ENSP00000321987
MSALLSLCFVLPLAAPGHGTQGWEPCTDLRPLDILAEVVPSDGATSGIRIVQVHGARGLQLSVAAPRTMSFPASRIFSQCDLFPEEFSIVVTLRVPNLPPKRNEYLLTVVAEESDLLLLGLRLSPAQLHFLFLREDTAGAWQTRVSFRSPALVDGRWHTLVLAVSAGVFSLTTDCGLPVDIMADVPFPATLSVKGARFFVGSRRRAKGLFMGLVRQLVLLPGSDATPRLCPSRNAPLAVLSIPRVLQALTGKPEDNEVLKYPYETNIRVTLGPQPPCTEVEDAQFWFDASRKGLYLCVGNEWVSVLAAKERLDYVEEHQNLSTNSETLGIEVFRIPQVGLFVATANRKATSAVYKWTEEKFVSYQNIPTHQAQAWRHFTIGKKIFLAVANFEPDEKGQEFSVIYKWSHRKLKFTPYQSIATHSARDWEAFEVDGEHFLAVANHREGDNHNIDSVIYKWNPATRLFEANQTIATSGAYDWEFFSVGPYSFLVVANTFNGTSTKVHSHLYIRLLGSFQLFQSFPTFGAADWEVFQIGERIFLAVANSHSYDVEMQVQNDSYVINSVIYELNVTAQAFVKFQDILTCSALDWEFFSVGEDYFLVVANSFDGRTFSVNSIIYRWQGYEGFVAVHSLPTVGCRDWEAFSTTAGAYLIYSSAKEPLSRVLRLRTR

SEQ ID NO: 88613 - protein, 530 aa, Homo sapiens
  Payload ID: 17744
  Gene Name: thrombospondin-type laminin G domain and EAR repeats
  ENSP ID: ENSP00000381012
MSFPASRIFSQCDLFPEEFSIVVTLRVPNLPPKRNEYLLTVVAEESDLLLLGLRLSPAQLHFLFLREDTAGAWQTRVSFRSPALVDGRWHTLVLAVSAGVFSLTTDCGLPVDIMADVPFPATLSVKGARFFVGSRRRAKGLFMGLVRQLVLLPGSDATPRLCPSRNAPLAVLSIPRVLQALTGKPEDNEVLKYPYETNIRVTLGPQPPCTEVEDAQFWFDASRKGLYLCVGNEWVSVLAAKERLDYVEEHQNLSTNSETLGIEVFRIPQVGLFVATANRKATSAVYKWTEEKFVSYQNIPTHQAQAWRHFTIGKKIFLAVANFEPDEKGQEFSVIYKWSHRKLKFTPYQSIATHSARDWEAFEVDGEHFLAVANHREGDNHNIDSVIYKWNPATRLFEANQTIATSGAYDWEFFSVGPYSFLVVANTFNGTSTKVHSHLYIRLLGSFQLFQSFPTFGAADWEVFQIGERIFLAVANSHSYDVEMQVQNDSYVINSVIYELNVTAQAFVKFQDILTCSGGRRGLHARRAEG

SEQ ID NO: 88614 - protein, 522 aa, Homo sapiens
  Payload ID: 17744
  Gene Name: thrombospondin-type laminin G domain and EAR repeats
  ENSP ID: ENSP00000478010
MSALLSLCFVLPLAAPGHGTQGWEPCTDLRPLDILAEVVPSDGATSGIRIVQVHGARGLQLSVAAPRTMSFPASRIFSQCDLFPEEFSIVVTLRVPNLPPKRNEYLLTVVAEESDLLLLGLRLSPAQPPCTEVEDAQFWFDASRKGLYLCVGNEWVSVLAAKERLDYVEEHQNLSTNSETLGIEVFRIPQVGLFVATANRKATSAVYKWTEEKFVSYQNIPTHQAQAWRHFTIGKKIFLAVANFEPDEKGQEFSVIYKWSHRKLKFTPYQSIATHSARDWEAFEVDGEHFLAVANHREGDNHNIDSVIYKWNPATRLFEANQTIATSGAYDWEFFSVGPYSFLVVANTFNGTSTKVHSHLYIRLLGSFQLFQSFPTFGAADWEVFQIGERIFLAVANSHSYDVEMQVQNDSYVINSVIYELNVTAQAFVKFQDILTCSALDWEFFSVGEDYFLVVANSFDGRTFSVNSIIYRWQGYEGFVAVHSLPTVGCRDWEAFSTTAGAYLIYSSAKEPLSRVLRLRTR

SEQ ID NO: 88615 - protein, 601 aa, Homo sapiens
  Payload ID: 17744
  Gene Name: thrombospondin-type laminin G domain and EAR repeats
  ENSP ID: ENSP00000482422
MSFPASRIFSQCDLFPEEFSIVVTLRVPNLPPKRNEYLLTVVAEESDLLLLGLRLSPAQLHFLFLREDTAGAWQTRVSFRSPALVDGRWHTLVLAVSAGVFSLTTDCGLPVDIMADVPFPATLSVKGARFFVGSRRRAKGLFMGLVRQLVLLPGSDATPRLCPSRNAPLAVLSIPRVLQALTGKPEDNEVLKYPYETNIRVTLGPQPPCTEVEDAQFWFDASRKGLYLCVGNEWVSVLAAKERLDYVEEHQNLSTNSETLGIEVFRIPQVGLFVATANRKATSAVYKWTEEKFVSYQNIPTHQAQAWRHFTIGKKIFLAVANFEPDEKGQEFSVIYKWSHRKLKFTPYQSIATHSARDWEAFEVDGEHFLAVANHREGDNHNIDSVIYKWNPATRLFEANQTIATSGAYDWEFFSVGPYSFLVVANTFNGTSTKVHSHLYIRLLGSFQLFQSFPTFGAADWEVFQIGERIFLAVANSHSYDVEMQVQNDSYVINSVIYELNVTAQAFVKFQDILTCSALDWEFFSVGEDYFLVVANSFDGRTFSVNSIIYRWQGYEGFVAVHSLPTVGCRDWEAFSTTAGAYLIYSSAKEPLSRVLRLRTR

SEQ ID NO: 88616 - protein, 534 aa, Homo sapiens
  Payload ID: 17745
  Gene Name: thromboxane A synthase 1 (platelet)
  ENSP ID: ENSP00000263552
MMEALGFLKLEVNGPMVTVALSVALLALLKWYSTSAFSRLEKLGLRHPKPSPFIGNLTFFRQGFWESQMELRKLYGPLCGYYLGRRMFIVISEPDMIKQVLVENFSNFTNRMASGLEFKSVADSVLFLRDKRWEEVRGALMSAFSPEKLNEMVPLISQACDLLLAHLKRYAESGDAFDIQRCYCNYTTDVVASVAFGTPVDSWQAPEDPFVKHCKRFFEFCIPRPILVLLLSFPSIMVPLARILPNKNRDELNGFFNKLIRNVIALRDQQAAEERRRDFLQMVLDARHSASPMGVQDFDIVRDVFSSTGCKPNPSRQHQPSPMARPLTVDEIVGQAFIFLIAGYEIITNTLSFATYLLATNPDCQEKLLREVDVFKEKHMAPEFCSLEEGLPYLDMVIAETLRMYPPAFRFTREAAQDCEVLGQRIPAGAVLEMAVGALHHDPEHWPSPETFNPERFTAEARQQHRPFTYLPFGAGPRSCLGVRLGLLEVKLTLLHVLHKFRFQACPETQVPLQLESKSALGPKNGVYIKIVSR

SEQ ID NO: 88617 - protein, 533 aa, Homo sapiens
  Payload ID: 17745
  Gene Name: thromboxane A synthase 1 (platelet)
  Uniprot ID: P24557
  ENSP ID: ENSP00000338087
MEALGFLKLEVNGPMVTVALSVALLALLKWYSTSAFSRLEKLGLRHPKPSPFIGNLTFFRQGFWESQMELRKLYGPLCGYYLGRRMFIVISEPDMIKQVLVENFSNFTNRMASGLEFKSVADSVLFLRDKRWEEVRGALMSAFSPEKLNEMVPLISQACDLLLAHLKRYAESGDAFDIQRCYCNYTTDVVASVAFGTPVDSWQAPEDPFVKHCKRFFEFCIPRPILVLLLSFPSIMVPLARILPNKNRDELNGFFNKLIRNVIALRDQQAAEERRRDFLQMVLDARHSASPMGVQDFDIVRDVFSSTGCKPNPSRQHQPSPMARPLTVDEIVGQAFIFLIAGYEIITNTLSFATYLLATNPDCQEKLLREVDVFKEKHMAPEFCSLEEGLPYLDMVIAETLRMYPPAFRFTREAAQDCEVLGQRIPAGAVLEMAVGALHHDPEHWPSPETFNPERFTAEARQQHRPFTYLPFGAGPRSCLGVRLGLLEVKLTLLHVLHKFRFQACPETQVPLQLESKSALGPKNGVYIKIVSR

SEQ ID NO: 88618 - protein, 150 aa, Homo sapiens
  Payload ID: 17745
  Gene Name: thromboxane A synthase 1 (platelet)
  ENSP ID: ENSP00000388612
MEALGFLKLEVNGPMVTVALSVALLALLKWYSTSAFSRLEKLGLRHPKPSPFIGNLTFFRQGFWESQMELRKLYGPLCGYYLGRRMFIVISEPDMIKQVLVENFSNFTNRMASGLEFKSVADSVLFLRDKRWEEVRGALMSAFSPEKLNE

SEQ ID NO: 88619 - protein, 466 aa, Homo sapiens
  Payload ID: 17745
  Gene Name: thromboxane A synthase 1 (platelet)
  Uniprot ID: P24557
  ENSP ID: ENSP00000388736
MELRKLYGPLCGYYLGRRMFIVISEPDMIKQVLVENFSNFTNRMASGLEFKSVADSVLFLRDKRWEEVRGALMSAFSPEKLNEMVPLISQACDLLLAHLKRYAESGDAFDIQRCYCNYTTDVVASVAFGTPVDSWQAPEDPFVKHCKRFFEFCIPRPILVLLLSFPSIMVPLARILPNKNRDELNGFFNKLIRNVIALRDQQAAEERRRDFLQMVLDARHSASPMGVQDFDIVRDVFSSTGCKPNPSRQHQPSPMARPLTVDEIVGQAFIFLIAGYEIITNTLSFATYLLATNPDCQEKLLREVDVFKEKHMAPEFCSLEEGLPYLDMVIAETLRMYPPAFRFTREAAQDCEVLGQRIPAGAVLEMAVGALHHDPEHWPSPETFNPERFTAEARQQHRPFTYLPFGAGPRSCLGVRLGLLEVKLTLLHVLHKFRFQACPETQVPLQLESKSALGPKNGVYIKIVSR

SEQ ID NO: 88620 - protein, 580 aa, Homo sapiens
  Payload ID: 17745
  Gene Name: thromboxane A synthase 1 (platelet)
  ENSP ID: ENSP00000389414
MMEALGFLKLEVNGPMVTVALSVALLALLKWYSTSAFSRLEKLGLRHPKPSPFIGNLTFFRQGFWESQMELRKLYGPLCGYYLGRRMFIVISEPDMIKQVLVENFSNFTNRMASGLEFKSVADSVLFLRDKRWEEVRGALMSAFSPEKLNELGLLIMQERIKGHMGGQQAPQRIPPTRLSKPSGIYVNLHYATLPFCMVPLISQACDLLLAHLKRYAESGDAFDIQRCYCNYTTDVVASVAFGTPVDSWQAPEDPFVKHCKRFFEFCIPRPILVLLLSFPSIMVPLARILPNKNRDELNGFFNKLIRNVIALRDQQAAEERRRDFLQMVLDARHSASPMGVQDFDIVRDVFSSTGCKPNPSRQHQPSPMARPLTVDEIVGQAFIFLIAGYEIITNTLSFATYLLATNPDCQEKLLREVDVFKEKHMAPEFCSLEEGLPYLDMVIAETLRMYPPAFRFTREAAQDCEVLGQRIPAGAVLEMAVGALHHDPEHWPSPETFNPERFTAEARQQHRPFTYLPFGAGPRSCLGVRLGLLEVKLTLLHVLHKFRFQACPETQVPLQLESKSALGPKNGVYIKIVSR

SEQ ID NO: 88621 - protein, 151 aa, Homo sapiens
  Payload ID: 17745
  Gene Name: thromboxane A synthase 1 (platelet)
  ENSP ID: ENSP00000391567
MEALGFLKLEVNGPMVTVALSVALLALLKWYSTSAFSRLEKLGLRHPKPSPFIGNLTFFRQGFWESQMELRKLYGPLCGYYLGRRMFIVISEPDMIKQVLVENFSNFTNRMPQSIMPNSRHHVASRGMWPGGRRLACYLHPFRMAEGIAEV

SEQ ID NO: 88622 - protein, 460 aa, Homo sapiens
  Payload ID: 17745
  Gene Name: thromboxane A synthase 1 (platelet)
  ENSP ID: ENSP00000392702
MMEALGFLKLEVNGPMVTVALSVALLALLKWYSTSAFSRLEKLGLRHPKPSPFIGNLTFFRQGFWESQMELRKLYGPLCGYYLGRRMFIVISEPDMIKQVLVENFSNFTNRMASGLEFKSVADSVLFLRDKRWEEVRGALMSAFSPEKLNEMVPLISQACDLLLAHLKRYAESGDAFDIQRCYCNYTTDVVASVAFGTPVDSWQAPEDPFVKHCKRFFEFCIPRPILVLLLSFPSIMVPLARILPNKNRDELNGFFNKLIRNVIALRDQQAAEERRRDFLQMVLDARHSASPMGVQDFDIVRDVFSSTGCKPNPSRQHQPSPMARPLTVDEIVGQAFIFLIAGYEIITNTLSFATYLLATNPDCQEKLLREVDVFKEKHMAPEFCSLEEGLPYLDMVIAETLRMYPPAFRFTREAAQDCEVLGQRIPAGAVLEMAVGALHHDPEHWPSPETFNPERYRCS

SEQ ID NO: 88623 - protein, 533 aa, Homo sapiens; identical to SEQ ID NO: 88617
  Payload ID: 17745
  Gene Name: thromboxane A synthase 1 (platelet)
  Uniprot ID: P24557
  ENSP ID: ENSP00000402536

SEQ ID NO: 88624 - protein, 579 aa, Homo sapiens
  Payload ID: 17745
  Gene Name: thromboxane A synthase 1 (platelet)
  Uniprot ID: P24557
  ENSP ID: ENSP00000411274
MEALGFLKLEVNGPMVTVALSVALLALLKWYSTSAFSRLEKLGLRHPKPSPFIGNLTFFRQGFWESQMELRKLYGPLCGYYLGRRMFIVISEPDMIKQVLVENFSNFTNRMASGLEFKSVADSVLFLRDKRWEEVRGALMSAFSPEKLNELGLLIMQERIKGHMGGQQAPQRIPPTRLSKPSGIYVNLHYATLPFCMVPLISQACDLLLAHLKRYAESGDAFDIQRCYCNYTTDVVASVAFGTPVDSWQAPEDPFVKHCKRFFEFCIPRPILVLLLSFPSIMVPLARILPNKNRDELNGFFNKLIRNVIALRDQQAAEERRRDFLQMVLDARHSASPMGVQDFDIVRDVFSSTGCKPNPSRQHQPSPMARPLTVDEIVGQAFIFLIAGYEIITNTLSFATYLLATNPDCQEKLLREVDVFKEKHMAPEFCSLEEGLPYLDMVIAETLRMYPPAFRFTREAAQDCEVLGQRIPAGAVLEMAVGALHHDPEHWPSPETFNPERFTAEARQQHRPFTYLPFGAGPRSCLGVRLGLLEVKLTLLHVLHKFRFQACPETQVPLQLESKSALGPKNGVYIKIVSR

SEQ ID NO: 88625 - protein, 459 aa, Homo sapiens
  Payload ID: 17745
  Gene Name: thromboxane A synthase 1 (platelet)
  Uniprot ID: P24557
  ENSP ID: ENSP00000411326
MEALGFLKLEVNGPMVTVALSVALLALLKWYSTSAFSRLEKLGLRHPKPSPFIGNLTFFRQGFWESQMELRKLYGPLCGYYLGRRMFIVISEPDMIKQVLVENFSNFTNRMASGLEFKSVADSVLFLRDKRWEEVRGALMSAFSPEKLNEMVPLISQACDLLLAHLKRYAESGDAFDIQRCYCNYTTDVVASVAFGTPVDSWQAPEDPFVKHCKRFFEFCIPRPILVLLLSFPSIMVPLARILPNKNRDELNGFFNKLIRNVIALRDQQAAEERRRDFLQMVLDARHSASPMGVQDFDIVRDVFSSTGCKPNPSRQHQPSPMARPLTVDEIVGQAFIFLIAGYEIITNTLSFATYLLATNPDCQEKLLREVDVFKEKHMAPEFCSLEEGLPYLDMVIAETLRMYPPAFRFTREAAQDCEVLGQRIPAGAVLEMAVGALHHDPEHWPSPETFNPERYRCS

SEQ ID NO: 88626 - protein, 80 aa, Homo sapiens
  Payload ID: 17745
  Gene Name: thromboxane A synthase 1 (platelet)
  ENSP ID: ENSP00000412710
MEALGFLKLEVNGPMVTVALSVALLALLKWYSTSAFSRLEKLGLRHPKPSPFIGNLTFFRQGFWESQMELRKLYGPLCGL

SEQ ID NO: 88627 - protein, 79 aa, Homo sapiens
  Payload ID: 17745
  Gene Name: thromboxane A synthase 1 (platelet)
  ENSP ID: ENSP00000415892
MEALGFLKLEVNGPMVTVALSVALLALLKWYSTSAFSRLEKLGLRHPKPSPFIGNLTFFRQGFWESQMELRKLYGPLCG

SEQ ID NO: 88628 - protein, 343 aa, Homo sapiens
  Payload ID: 17746
  Gene Name: thromboxane A2 receptor
  Uniprot ID: P21731
  ENSP ID: ENSP00000364336
MWPNGSSLGPCFRPTNITLEERRLIASPWFAASFCVVGLASNLLALSVLAGARQGGSHTRSSFLTFLCGLVLTDFLGLLVTGTIVVSQHAALFEWHAVDPGCRLCRFMGVVMIFFGLSPLLLGAAMASERYLGITRPFSRPAVASQRRAWATVGLVWAAALALGLLPLLGVGRYTVQYPGSWCFLTLGAESGDVAFGLLFSMLGGLSVGLSFLLNTVSVATLCHVYHGQEAAQQRPRDSEVEMMAQLLGIMVVASVCWLPLLVFIAQTVLRNPPAMSPAGQLSRTTEKELLIYLRVATWNQILDPWVYILFRRAVLRRLQPRLSTRPRSLSLQPQLTQRSGLQ

SEQ ID NO: 88629 - protein, 407 aa, Homo sapiens
  Payload ID: 17746
  Gene Name: thromboxane A2 receptor
  Uniprot ID: P21731
  ENSP ID: ENSP00000393333
MWPNGSSLGPCFRPTNITLEERRLIASPWFAASFCVVGLASNLLALSVLAGARQGGSHTRSSFLTFLCGLVLTDFLGLLVTGTIVVSQHAALFEWHAVDPGCRLCRFMGVVMIFFGLSPLLLGAAMASERYLGITRPFSRPAVASQRRAWATVGLVWAAALALGLLPLLGVGRYTVQYPGSWCFLTLGAESGDVAFGLLFSMLGGLSVGLSFLLNTVSVATLCHVYHGQEAAQQRPRDSEVEMMAQLLGIMVVASVCWLPLLVFIAQTVLRNPPAMSPAGQLSRTTEKELLIYLRVATWNQILDPWVYILFRRAVLRRLQPRLSTRPRRSLTLWPSLEYSGTISAHCNLRLPGSSDSRASASRAAGITGVSHCARPCMLFDPEFDLLAGVQLLPFEPPTGKALSRKD

SEQ ID NO: 88630 - protein, 259 aa, Homo sapiens
  Payload ID: 17746
  Gene Name: thromboxane A2 receptor
  ENSP ID: ENSP00000468145
MWPNGSSLGPCFRPTNITLEERRLIASPWFAASFCVVGLASNLLALSVLAGARQGGSHTRSSFLTFLCGLVLTDFLGLLVTGTIVVSQHAALFEWHAVDPGCRLCRFMGVVMIFFGLSPLLLGAAMASERYLGLHRPDSAAKPACHEPRRAAVPHHGEGAAHLLARGHLEPDPGPLGVYPVPPRRAPASPASPQHPAQVAVPPAPAHAALRAAVGSGQSAPPAPFRGALGPSDSPSACSEDSGAGGAGWTVGISSRVLG

SEQ ID NO: 88631 - protein, 353 aa, Homo sapiens
  Payload ID: 17747
  Gene Name: THUMP domain containing 1
  Uniprot ID: Q9NXG2
  ENSP ID: ENSP00000370741
MAAPAQQTTQPGGGKRKGKAQYVLAKRARRCDAGGPRQLEPGLQGILITCNMNERKCVEEAYSLLNEYGDDMYGPEKFTDKDQQPSGSEGEDDDAEAALKKEVGDIKASTEMRLRRFQSVESGANNVVFIRTLGIEPEKLVHHILQDMYKTKKKKTRVILRMLPISGTCKAFLEDMKKYAETFLEPWFKAPNKGTFQIVYKSRNNSHVNREEVIRELAGIVCTLNSENKVDLTNPQYTVVVEIIKAVCCLSVVKDYMLFRKYNLQEVVKSPKDPSQLNSKQGNGKEAKLESADKSDQNNTAEGKNNQQVPENTEELGQTKPTSNPQVVNEGGAKPELASQATEGSKSNENDFS

SEQ ID NO: 88632 - protein, 353 aa, Homo sapiens; identical to SEQ ID NO: 88631
  Payload ID: 17747
  Gene Name: THUMP domain containing 1
  Uniprot ID: Q9NXG2
  ENSP ID: ENSP00000379392

SEQ ID NO: 88633 - protein, 145 aa, Homo sapiens
  Payload ID: 17747
  Gene Name: THUMP domain containing 1
  ENSP ID: ENSP00000455033
MAAPAQQTTQPGGGKRKGKAQYVLAKRARRCDAGGPRQLEPGLQGILITCNMNERKCVEEAYSLLNEYGDDMYGPEKFTDKDQQPSGSEGEDDDAEAALKKEVGDIKASTEMRLRRFQSVESGANNVVFIRTLGIGKQQHGVTVG

SEQ ID NO: 88634 - protein, 303 aa, Homo sapiens
  Payload ID: 17748
  Gene Name: THUMP domain containing 2
  Uniprot ID: Q9BTF0
  ENSP ID: ENSP00000368001
MSEARGEPGSGPEAGARFFCTAGRGLEPFVMREVRARLAATQVEYISGKVFFTTCSDLNMLKKLKSAERLFLLIKKQFPLIISSVSKGKIFNEMQRLINEDPGSWLNAISIWKNLLELDAKKEKLSQRDDNQLKRKVGENEIIAKKLKIEQMQKIEENRDCQLEKQIKEETLEQRDFTTKSEKFQEEEFQNDIEKAIDTHNQNDLTFRVSCRCSGTIGKAFTAQEVGKVIGIAIMKHFGWKADLRNPQLEIFIHLNDIYSVVGIPVFRVSLASRAYIKTAGLRSTIAWAMASLADIKVPYGSD

SEQ ID NO: 88635 - protein, 503 aa, Homo sapiens
  Payload ID: 17748
  Gene Name: THUMP domain containing 2
  Uniprot ID: Q9BTF0
  ENSP ID: ENSP00000423933
MSEARGEPGSGPEAGARFFCTAGRGLEPFVMREVRARLAATQVEYISGKVFFTTCSDLNMLKKLKSAERLFLLIKKQFPLIISSVSKGKIFNEMQRLINEDPGSWLNAISIWKNLLELDAKKEKLSQRDDNQLKRKVGENEIIAKKLKIEQMQKIEENRDCQLEKQIKEETLEQRDFTTKSEKFQEEEFQNDIEKAIDTHNQNDLTFRVSCRCSGTIGKAFTAQEVGKVIGIAIMKHFGWKADLRNPQLEIFIHLNDIYSVVGIPVFRVSLASRAYIKTAGLRSTIAWAMASLADIKAGAFVLDPMCGLGTILLEAAKEWPDVYYVGADVSDSQLLGTWDNLKAAGLEDKIELLKISVIELPLPSESVDIIISDIPFGKKFKLGKDIKSILQEMERVLHVGGTIVLLLSEDHHRRLTDCKESNIPFNSKDSHTDEPGIKKCLNPEEKTGAFKTASTSFEASNHKFLDRMSPFGSLVPVECYKVSLGKTDAFICKYKKSHSSGL

SEQ ID NO: 88636 - protein, 291 aa, Homo sapiens
  Payload ID: 17748
  Gene Name: THUMP domain containing 2
  ENSP ID: ENSP00000426202
VMREVRARLAATQVEYISGKVFFTTCSDLNMLKKLKSAERLFLLIKKQFPLIISSVSKGKIFNEMQRLINEDPGSWLNAISIWKNLLELDAKKEKLSQRDDNQLKRKVGENEIIAKKLKIEQMQKIEENRDCQLEKQIKEETLEQRDFTTKSEKFQEEEFQNDIEKAIDTHNQNDLTFRVSCRCSGTIGKAFTAQVLYMGLSPGPRLQMHMRSQQCREERTPQTVAITRPHQLALTKFSDVKGHWSEYFINLKISQTLKGGRKSNWNCYYETLWMESRLEESTIRDLYTSK

SEQ ID NO: 88637 - protein, 88 aa, Homo sapiens
  Payload ID: 17748
  Gene Name: THUMP domain containing 2
  ENSP ID: ENSP00000434844
EPGSGPEAGARFFCTAGRGLEPFVMREVRARLAATQVEYISGKVFFTTCSDLNMLKKLKSAERLFLLIKKQFPLIISSEKYLMKCKDL

SEQ ID NO: 88638 - protein, 507 aa, Homo sapiens
  Payload ID: 17749
  Gene Name: THUMP domain containing 3
  Uniprot ID: Q9BV44
  ENSP ID: ENSP00000339532
MCDIEEATNQLLDVNLHENQKSVQVTESDLGSESELLVTIGATVPTGFEQTAADEVREKLGSSCKISRDRGKIYFVISVESLAQVHCLRSVDNLFVVVQEFQDYQFKQTKEEVLKDFEDLAGKLPWSNPLKVWKINASFKKKKAKRKKINQNSSKEKINNGQEVKIDQRNVKKEFTSHALDSHILDYYENPAIKEDVSTLIGDDLASCKDETDESSKEETEPQVLKFRVTCNRAGEKHCFTSNEAARDFGGAVQDYFKWKADMTNFDVEVLLNIHDNEVIVGIALTEESLHRRNITHFGPTTLRSTLAYGMLRLCDPLPYDIIVDPMCGTGAIPIEGATEWSDCFHIAGDNNPLAVNRAANNIASLLTKSQIKEGKPSWGLPIDAVQWDICNLPLRTGSVDIIVTDLPFGKRMGSKKRNWNLYPACLREMSRVCTPTTGRAVLLTQDTKCFTKALSGMRHVWRKVDTVWVNVGGLRAAVYVLIRTPQAFVHPSEQDGERGTLWQCKE

SEQ ID NO: 88639 - protein, 507 aa, Homo sapiens; identical to SEQ ID NO: 88638
  Payload ID: 17749
  Gene Name: THUMP domain containing 3
  Uniprot ID: Q9BV44
  ENSP ID: ENSP00000395893

SEQ ID NO: 88640 - protein, 232 aa, Homo sapiens
  Payload ID: 17749
  Gene Name: THUMP domain containing 3
  ENSP ID: ENSP00000396359
  MOD_RES (1)..(1): Any amino acid
XKRKKINQNSSKEKINNGQEVKIDQRNVKKEFTSHALDSHILDYYENPAIKEDVSTLIGDDLASCKDETDESSKEETEPQVLKFRVTCNRAGEKHCFTSNEAARDFGGAVQDYFKWKADMTNFDVEVLLNIHDNEVIVGIALTEESLHRRNITHFGPTTLRSTLAYGMLRLCDPLPYDIIVDPMCGTGAIPIEGATEWSDCFHIAGDNNPLAVNRAANNIASLLTKSQIKEG

SEQ ID NO: 88641 - protein, 40 aa, Homo sapiens
  Payload ID: 17749
  Gene Name: THUMP domain containing 3
  ENSP ID: ENSP00000402968
MCDIEEATNQLLDVNLHENQKSVQVTESDLGSESELLVTI

SEQ ID NO: 88642 - protein, 123 aa, Homo sapiens
  Payload ID: 17749
  Gene Name: THUMP domain containing 3
  ENSP ID: ENSP00000411126
MCDIEEATNQLLDVNLHENQKSVQVTESDLGSESELLVTIGATVPTGFEQTAADEVREKLGSSCKISRDRGKIYFVISVESLAQVHCLRSVDNLFVVVQEFQDYQFKQTKEEVLKDFEDLAGK

SEQ ID NO: 88643 - protein, 269 aa, Homo sapiens
  Payload ID: 17749
  Gene Name: THUMP domain containing 3
  ENSP ID: ENSP00000412199
  MOD_RES (1)..(1): Any amino acid
XRNVKKEFTSHALDSHILDYYENPAIKEDVSTLIGDDLASCKDETDESSKEETEPQVLKFRVTCNRAGEKHCFTSNEAARDFGGAVQDYFKWKADMTNFDVEVLLNIHDNEVIVGIALTEESLHRRNITHFGPTTLRSTLAYGMLSKPSWGLPIDAVQWDICNLPLRTGSVDIIVTDLPFGKRMGSKKRNWNLYPACLREMSRVCTPTTGRAVLLTQDTKCFTKALSGMRHVWRKVDTVWVNVGGLRAAVYVLIRTPQAFVHPSEQDGE

SEQ ID NO: 88644 - protein, 507 aa, Homo sapiens; identical to SEQ ID NO: 88638
  Payload ID: 17749
  Gene Name: THUMP domain containing 3
  Uniprot ID: Q9BV44
  ENSP ID: ENSP00000424064

SEQ ID NO: 88645 - protein, 161 aa, Homo sapiens
  Payload ID: 17750
  Gene Name: Thy-1 cell surface antigen
  Uniprot ID: P04216
  ENSP ID: ENSP00000284240
MNLAISIALLLTVLQVSRGQKVTSLTACLVDQSLRLDCRHENTSSSPIQYEFSLTRETKKHVLFGTVGVPEHTYRSRTNFTSKYNMKVLYLSAFTSKDEGTYTCALHHSGHSPPISSQNVTVLRDKLVKCEGISLLAQNTSWLLLLLLSLSLLQATDFMSL

SEQ ID NO: 88646 - protein, 161 aa, Homo sapiens; identical to SEQ ID NO: 88645
  Payload ID: 17750
  Gene Name: Thy-1 cell surface antigen
  Uniprot ID: P04216
  ENSP ID: ENSP00000431301

SEQ ID NO: 88647 - protein, 37 aa, Homo sapiens
  Payload ID: 17750
  Gene Name: Thy-1 cell surface antigen
  ENSP ID: ENSP00000432051
MNLAISIALLLTGLPRAEGDQPNGLPSGPEPSSGLPP

SEQ ID NO: 88648 - protein, 165 aa, Homo sapiens
  Payload ID: 17750
  Gene Name: Thy-1 cell surface antigen
  ENSP ID: ENSP00000432808
MNLAISIALLLTVLQVSRGQKVTSLTACLVDQSLRLDCRHENTSSSPIQYEFSLTRETKKHVLFGTVGVPEHTYRSRTNFTSKYNMKVLYLSAFTSKDEGTYTCALHHSGHSPPISSQNVTVLRGHGFHVPVTGGAHGGDRKPQVPVQRSYFSESADPLPPIPQT

SEQ ID NO: 88649 - protein, 152 aa, Homo sapiens
  Payload ID: 17750
  Gene Name: Thy-1 cell surface antigen
  ENSP ID: ENSP00000435753
MNLAISIALLLTVLQVSRGQKVTSLTACLVDQSLRLDCRHENTSSSPIQYEFSLTRETKKHVLFGTVGVPEHTYRSRTNFTSKYNMKVLYLSAFTSKDEGTYTCALHHSGHSPPISSQNVTVLRDKLVKCEGISLLAQNTSWLLLLLLSLSL

SEQ ID NO: 88650 - protein, 144 aa, Homo sapiens
  Payload ID: 17750
  Gene Name: Thy-1 cell surface antigen
  ENSP ID: ENSP00000464248
MNLAISIALLLTVDQSLRLDCRHENTSSSPIQYEFSLTRETKKHVLFGTVGVPEHTYRSRTNFTSKYNMKVLYLSAFTSKDEGTYTCALHHSGHSPPISSQNVTVLRDKLVKCEGISLLAQNTSWLLLLLLSLSLLQATDFMSL

SEQ ID NO: 88651 - protein, 159 aa, Homo sapiens
  Payload ID: 17751
  Gene Name: thymic stromal lymphopoietin
  Uniprot ID: Q969D9
  ENSP ID: ENSP00000339804
MFPFALLYVLSVSFRKIFILQLVGLVLTYDFTNCDFEKIKAAYLSTISKDLITYMSGTKSTEFNNTVSCSNRPHCLTEIQSLTFNPTAGCASLAKEMFAMKTKAALAIWCPGYSETQINATQAMKKRRKRKVTTNKCLEQVSQLQGLWRRFNRPLLKQQ

SEQ ID NO: 88652 - protein, 159 aa, Homo sapiens
  Payload ID: 17751
  Gene Name: thymic stromal lymphopoietin
  ENSP ID: ENSP00000399099
MKCLGQSKKEEVSFRKIFILQLVGLVLTYDFTNCDFEKIKAAYLSTISKDLITYMSGTKSTEFNNTVSCSNRPHCLTEIQSLTFNPTAGCASLAKEMFAMKTKAALAIWCPGYSETQINATQAMKKRRKRKVTTNKCLEQVSQLQGLWRRFNRPLLKQQ

SEQ ID NO: 88653 - protein, 63 aa, Homo sapiens
  Payload ID: 17751
  Gene Name: thymic stromal lymphopoietin
  Uniprot ID: Q969D9
  ENSP ID: ENSP00000427827
MFAMKTKAALAIWCPGYSETQINATQAMKKRRKRKVTTNKCLEQVSQLQGLWRRFNRPLLKQQ

SEQ ID NO: 88654 - protein, 234 aa, Homo sapiens
  Payload ID: 17752
  Gene Name: thymidine kinase 1, soluble
  Uniprot ID: P04183
  ENSP ID: ENSP00000301634
MSCINLPTVLPGSPSKTRGQIQVILGPMFSGKSTELMRRVRRFQIAQYKCLVIKYAKDTRYSSSFCTHDRNTMEALPACLLRDVAQEALGVAVIGIDEGQFFPDIVEFCEAMANAGKTVIVAALDGTFQRKPFGAILNLVPLAESVVKLTAVCMECFREAAYTKRLGTEKEVEVIGGADKYHSVCRLCYFKKASGQPAGPDNKENCPVPGKPGEAVAARKLFAPQQILQCSPAN

SEQ ID NO: 88655 - protein, 87 aa, Homo sapiens
  Payload ID: 17752
  Gene Name: thymidine kinase 1, soluble
  ENSP ID: ENSP00000467121
MSCINLPTVLPGSPSKTRGQIQVILGPMFSGKSTELMRRVRRFQIAQYKCLVIKYAKDTRYSSSFCTHDRSLTSWSSARPWPTPGRP

SEQ ID NO: 88656 - protein, 187 aa, Homo sapiens
  Payload ID: 17752
  Gene Name: thymidine kinase 1, soluble
  ENSP ID: ENSP00000468278
MSCINLPTVLPGSPSKTRGQIQVILGPMFSGKSTELMRRVRRFQIAQYKCLVIKYAKDTRYSSSFCTHDRTRSRIIARNTMEALPACLLRDVAQEALGVAVIGIDEGQFFPDIVEFCEAMANAGKTVIVAALDGTFQRKPFGAILNLVPLAESVVKLTAVCMECFREAAYTKRLGTEKEVEVIGGAD

SEQ ID NO: 88657 - protein, 267 aa, Homo sapiens
  Payload ID: 17752
  Gene Name: thymidine kinase 1, soluble
  ENSP ID: ENSP00000468425
MSCINLPTVLPGSPSKTRGQIQVILGPMFSGKSTELMRRVRRFQIAQYKCLVIKYAKDTRYSSSFCTHDRNTMEALPACLLRDVAQEALGVAVIGIDEGQFFPDIVEFCEAMANAGKTVIVAALDGTFQRKPFGAILNLVPLAESVVKLTAVCMECFREAAYTKRLGTEKEVAPPAFPAGRRGGGMALPPSCPGPSPIPCPCGQVEVIGGADKYHSVCRLCYFKKASGQPAGPDNKENCPVPGKPGEAVAARKLFAPQQILQCSPAN

SEQ ID NO: 88658 - protein, 180 aa, Homo sapiens
  Payload ID: 17752
  Gene Name: thymidine kinase 1, soluble
  ENSP ID: ENSP00000468556
MSCINLPTVLPGSPSKTRGQIQVILGPMFSGKSTELMRRVRRFQIAQYKCLVIKYAKDTRYSSSFCTHDRNTMEALPACLLRDVAQEALGVAVIGIDEGQFFPDIVEFCEAMANAGKTVIVAALDGTFQRKPFGAILNLVPLAESVVKLTAVCMECFREAAYTKRLGTEKEQILQCSPAN

SEQ ID NO: 88659 - protein, 265 aa, Homo sapiens
  Payload ID: 17753
  Gene Name: thymidine kinase 2, mitochondrial
  Uniprot ID: O00142
  ENSP ID: ENSP00000299697
MLLWPLRGWAARALRCFGPGSRGSPASGPGPRRVQRRAWPPDKEQEKEKKSVICVEGNIASGKTTCLEFFSNATDVEVLTEPVSKWRNVRGHNPLGLMYHDASRWGLTLQTYVQLTMLDRHTRPQVSSVRLMERSIHSARYIFVENLYRSGKMPEVDYVVLSEWFDWILRNMDVSVDLIVYLRTNPETCYQRLKKRCREEEKVIPLEYLEAIHHLHEEWLIKGSLFPMAAPVLVIEADHHMERMLELFEQNRDRILTPENRKHCP

SEQ ID NO: 88660 - protein, 289 aa, Homo sapiens
  Payload ID: 17753
  Gene Name: thymidine kinase 2, mitochondrial
  ENSP ID: ENSP00000407469
MRPGLFKGQAPGSRRRPTAGLAVVRADSHKKEPRASGSARPAMLLWPLRGWAARALRCFGPGSRGSPASGPGPRRVQRRAWPPDKEQEKEKKSVICVEGNIASGKTTCLEFFSNATDVEGLMYHDASRWGLTLQTYVQLTMLDRHTRPQVSSVRLMERSIHSARYIFVENLYRSGKMPEVDYVVLSEWFDWILRNMDVSVDLIVYLRTNPETCYQRLKKRCREEEKVIPLEYLEAIHHLHEEWLIKGSLFPMAAPVLVIEADHHMERMLELFEQNRDRILTPENRKHCP

SEQ ID NO: 88661 - protein, 307 aa, Homo sapiens
  Payload ID: 17753
  Gene Name: thymidine kinase 2, mitochondrial
  ENSP ID: ENSP00000414334
MRPGLFKGQAPGSRRRPTAGLAVVRADSHKKEPRASGSARPAMLLWPLRGWAARALRCFGPGSRGSPASGPGPRRVQRRAWPPDKEQEKEKKSVICVEGNIASGKTTCLEFFSNATDVEVLTEPVSKWRNVRGHNPLGLMYHDASRWGLTLQTYVQLTMLDRHTRPQVSSVRLMERSIHSARYIFVENLYRSGKMPEVDYVVLSEWFDWILRNMDVSVDLIVYLRTNPETCYQRLKKRCREEEKVIPLEYLEAIHHLHEEWLIKGSLFPMAAPVLVIEADHHMERMLELFEQNRDRILTPENRKHCP

SEQ ID NO: 88662 - protein, 168 aa, Homo sapiens
  Payload ID: 17753
  Gene Name: thymidine kinase 2, mitochondrial
  Uniprot ID: O00142
  ENSP ID: ENSP00000433770
MYHDASRWGLTLQTYVQLTMLDRHTRPQVSSVRLMERSIHSARYIFVENLYRSGKMPEVDYVVLSEWFDWILRNMDVSVDLIVYLRTNPETCYQRLKKRCREEEKVIPLEYLEAIHHLHEEWLIKGSLFPMAAPVLVIEADHHMERMLELFEQNRDRILTPENRKHCP

SEQ ID NO: 88663 - protein, 168 aa, Homo sapiens; identical to SEQ ID NO: 88662
  Payload ID: 17753
  Gene Name: thymidine kinase 2, mitochondrial
  Uniprot ID: O00142
  ENSP ID: ENSP00000434594

SEQ ID NO: 88664 - protein, 234 aa, Homo sapiens
  Payload ID: 17753
  Gene Name: thymidine kinase 2, mitochondrial
  Uniprot ID: O00142
  ENSP ID: ENSP00000435312
MGAFCQRPSSDKEQEKEKKSVICVEGNIASGKTTCLEFFSNATDVEVLTEPVSKWRNVRGHNPLGLMYHDASRWGLTLQTYVQLTMLDRHTRPQVSSVRLMERSIHSARYIFVENLYRSGKMPEVDYVVLSEWFDWILRNMDVSVDLIVYLRTNPETCYQRLKKRCREEEKVIPLEYLEAIHHLHEEWLIKGSLFPMAAPVLVIEADHHMERMLELFEQNRDRILTPENRKHCP

SEQ ID NO: 88665 - protein, 240 aa, Homo sapiens
  Payload ID: 17753
  Gene Name: thymidine kinase 2, mitochondrial
  Uniprot ID: O00142
  ENSP ID: ENSP00000438143
MLLWPLRGWAARALRCFGPGSRGSPASGPGPRRVQRRAWPPDKEQEKEKKSVVLTEPVSKWRNVRGHNPLGLMYHDASRWGLTLQTYVQLTMLDRHTRPQVSSVRLMERSIHSARYIFVENLYRSGKMPEVDYVVLSEWFDWILRNMDVSVDLIVYLRTNPETCYQRLKKRCREEEKVIPLEYLEAIHHLHEEWLIKGSLFPMAAPVLVIEADHHMERMLELFEQNRDRILTPENRKHCP

SEQ ID NO: 88666 - protein, 265 aa, Homo sapiens; identical to SEQ ID NO: 88659
  Payload ID: 17753
  Gene Name: thymidine kinase 2, mitochondrial
  Uniprot ID: O00142
  ENSP ID: ENSP00000440898

SEQ ID NO: 88667 - protein, 282 aa, Homo sapiens
  Payload ID: 17753
  Gene Name: thymidine kinase 2, mitochondrial
  ENSP ID: ENSP00000455187
MLLWPLRGWAARALRCFGPGSRGSPASGPGPRRVQRRAWPPDKEQEKEKKSVICVEGNIASGKTTCLEFFSNATDVEVLTEPVSKWRNVRGHNPLGLMYHDASRWGLTLQTYVQLTMLDRHTRPQVSSVRLMERSIHSARYIFVENLYRSGKMPEVDYVVLSEWFDWILRNMDVSVDLIVYLRTNPETCYQRLKKRCREEEKVIPLVGSALSTPDRLLVFPWQEYLEAIHHLHEEWLIKGSLFPMAAPVLVIEADHHMERMLELFEQNRDRILTPENRKHCP

SEQ ID NO: 88668 - protein, 120 aa, Homo sapiens
  Payload ID: 17753
  Gene Name: thymidine kinase 2, mitochondrial
  ENSP ID: ENSP00000457959
MRPGLFKGQAPGSRRRPTAGLAVVRADSHKKEPRASGSARPAMLLWPLRGWAARALRCFGPGSRGSPASGPGPRRVQRRAWPPDKEQEKEKKSVRRRLAVLPRLASNSWAQVILWHQPPE

SEQ ID NO: 88669 - protein, 130 aa, Homo sapiens
  Payload ID: 17753
  Gene Name: thymidine kinase 2, mitochondrial
  ENSP ID: ENSP00000462341
MYHDASRWGLTLQTYVQLTMLDRHTRPQVSSVRLMERSIHSARYIFVENLYRSGKMPEVDYVVLSEWFDWILRNMDVSVDLIVYLRTNPETCYQRLKKRCREEEKVIPLEYLEAIHHLHEEWLIKGSLFP

SEQ ID NO: 88670 - protein, 22 aa, Homo sapiens
  Payload ID: 17753
  Gene Name: thymidine kinase 2, mitochondrial
  ENSP ID: ENSP00000462721
  MOD_RES (1)..(1): Any amino acid
XEEWLIKGSLFPMAAPVLEPFT

SEQ ID NO: 88671 - protein, 88 aa, Homo sapiens
  Payload ID: 17753
  Gene Name: thymidine kinase 2, mitochondrial
  ENSP ID: ENSP00000463326
MYHDASRWGLTLQTYVQLTMLDRHTRPQVSSVRLMERSIHSARYIFVENLYRSGKMPEVDYVVLSEWFDWILRNMDVSVDLIVYLRTN

SEQ ID NO: 88672 - protein, 168 aa, Homo sapiens; identical to SEQ ID NO: 88662
  Payload ID: 17753
  Gene Name: thymidine kinase 2, mitochondrial
  Uniprot ID: O00142
  ENSP ID: ENSP00000463560

SEQ ID NO: 88673 - protein, 142 aa, Homo sapiens
  Payload ID: 17753
  Gene Name: thymidine kinase 2, mitochondrial
  ENSP ID: ENSP00000464313
  MOD_RES (1)..(1): Any amino acid
XQRPSSDKEQEKEKKSVICVEGNIASGKTTCLEFFSNATDVEVLTEPVSKWRNVRGHNPLGLMYHDASRWGLTLQTYVQLTMLDRHTRPQVSSVRLMERSIHSARYIFVENLYRRNTWKQFTISMRSGSSKAAFSPWQPLFW

SEQ ID NO: 88674 - protein, 247 aa, Homo sapiens
  Payload ID: 17753
  Gene Name: thymidine kinase 2, mitochondrial
  Uniprot ID: O00142
  ENSP ID: ENSP00000483833
MLLWPLRGWAARALRCFGPGSRGSPASGPGPRRVQRRAWPPDKEQEKEKKSVICVEGNIASGKTTCLEFFSNATDVEGLMYHDASRWGLTLQTYVQLTMLDRHTRPQVSSVRLMERSIHSARYIFVENLYRSGKMPEVDYVVLSEWFDWILRNMDVSVDLIVYLRTNPETCYQRLKKRCREEEKVIPLEYLEAIHHLHEEWLIKGSLFPMAAPVLVIEADHHMERMLELFEQNRDRILTPENRKHCP

SEQ ID NO: 88675 - protein, 482 aa, Homo sapiens
  Payload ID: 17754
  Gene Name: thymidine phosphorylase
  Uniprot ID: P19971
  ENSP ID: ENSP00000252029
MAALMTPGTGAPPAPGDFSGEGSQGLPDPSPEPKQLPELIRMKRDGGRLSEADIRGFVAAVVNGSAQGAQIGAMLMAIRLRGMDLEETSVLTQALAQSGQQLEWPEAWRQQLVDKHSTGGVGDKVSLVLAPALAACGCKVPMISGRGLGHTGGTLDKLESIPGFNVIQSPEQMQVLLDQAGCCIVGQSEQLVPADGILYAARDVTATVDSLPLITASILSKKLVEGLSALVVDVKFGGAAVFPNQEQARELAKTLVGVGASLGLRVAAALTAMDKPLGRCVGHALEVEEALLCMDGAGPPDLRDLVTTLGGALLWLSGHAGTQAQGAARVAAALDDGSALGRFERMLAAQGVDPGLARALCSGSPAERRQLLPRAREQEELLAPADGTVELVRALPLALVLHELGAGRSRAGEPLRLGVGAELLVDVGQRLRRGTPWLRVHRDGPALSGPQSRALQEALVLSDRAPFAAPSPFAELVLPPQQ

SEQ ID NO: 88676 - protein, 482 aa, Homo sapiens; identical to SEQ ID NO: 88675
  Payload ID: 17754
  Gene Name: thymidine phosphorylase
  Uniprot ID: P19971
  ENSP ID: ENSP00000379036

SEQ ID NO: 88677 - protein, 482 aa, Homo sapiens; identical to SEQ ID NO: 88675
  Payload ID: 17754
  Gene Name: thymidine phosphorylase
  Uniprot ID: P19971
  ENSP ID: ENSP00000379037

SEQ ID NO: 88678 - protein, 487 aa, Homo sapiens
  Payload ID: 17754
  Gene Name: thymidine phosphorylase
  Uniprot ID: P19971
  ENSP ID: ENSP00000379038
MAALMTPGTGAPPAPGDFSGEGSQGLPDPSPEPKQLPELIRMKRDGGRLSEADIRGFVAAVVNGSAQGAQIGAMLMAIRLRGMDLEETSVLTQALAQSGQQLEWPEAWRQQLVDKHSTGGVGDKVSLVLAPALAACGCKVPMISGRGLGHTGGTLDKLESIPGFNVIQSPEQMQVLLDQAGCCIVGQSEQLVPADGILYAARDVTATVDSLPLITASILSKKLVEGLSALVVDVKFGGAAVFPNQEQARELAKTLVGVGASLGLRVAAALTAMDKPLGRCVGHALEVEEALLCMDGAGPPDLRDLVTTLGGALLWLSGHAGTQAQGAARVAAALDDGSALGRFERMLAAQGVDPGLARALCSGSPAERRQLLPRAREQEELLAPADAPLPAGTVELVRALPLALVLHELGAGRSRAGEPLRLGVGAELLVDVGQRLRRGTPWLRVHRDGPALSGPQSRALQEALVLSDRAPFAAPSPFAELVLPPQQ

SEQ ID NO: 88679 - protein, 445 aa, Homo sapiens
  Payload ID: 17754
  Gene Name: thymidine phosphorylase
  ENSP ID: ENSP00000395875
MAALMTPGTGAPPAPGDFSGEGSQGLPDPSPEPKQLPELIRMKRDGGRLSEADIRGFVAAVVNGSAQGAQIGAMLMAIRLRGMDLEETSVLTQALAQSGQQLEWPEAWRQQLVDKHSTGGVGDKVSLVLAPALAACGCKMQVLLDQAGCCIVGQSEQLVPADGILYAARDVTATVDSLPLITASILSKKLVEGLSALVVDVKFGGAAVFPNQEQARELAKTLVGVGASLGLRVAAALTAMDKPLGRCVGHALEVEEALLCMDGAGPPDLRDLVTTLGGALLWLSGHAGTQAQGAARVAAALDDGSALGRFERMLAAQGVDPGLARALCSGSPAERRQLLPRAREQEELLAPADGTVELVRALPLALVLHELGAGRSRAGEPLRLGVGAELLVDVGQRLRRGTPWLRVHRDGPALSGPQSRALQEALVLSDRAPFAAPSPFAELVL

SEQ ID NO: 88680 - protein, 279 aa, Homo sapiens
  Payload ID: 17755
  Gene Name: thymidylate synthetase
  Uniprot ID: P04818
  ENSP ID: ENSP00000314727
MPVAGSELPRRPLPPAAQERDAEPRPPHGELQYLGQIQHILRCGVRKDDRTGTGTLSVFGMQARYSLRDEFPLLTTKRVFWKGVLEELLWFIKGSTNAKELSSKGVKIWDANGSRDFLDSLGFSTREEGDLGPVYGFQWRHFGAEYRDMESDLPLMALPPCHALCQFYVVNSELSCQLYQRSGDMGLGVPFNIASYALLTYMIAHITGLKPGDFIHTLGDAHIYLNHIEPLKIQLQREPRPFPKLRILRKVEKIDDFKAEDFQIEGYNPHPTIKMEMAV

SEQ ID NO: 88681 - protein, 230 aa, Homo sapiens
  Payload ID: 17755
  Gene Name: thymidylate synthetase
  Uniprot ID: P04818
  ENSP ID: ENSP00000314902
MPVAGSELPRRPLPPAAQERDAEPRPPHGELQYLGQIQHILRCGVRKDDRTGTGTLSVFGMQARYSLRDYSGQGVDQLQRVIDTIKTNPDDRRIIMCAWNPRDLPLMALPPCHALCQFYVVNSELSCQLYQRSGDMGLGVPFNIASYALLTYMIAHITGLKPGDFIHTLGDAHIYLNHIEPLKIQLQREPRPFPKLRILRKVEKIDDFKAEDFQIEGYNPHPTIKMEMAV

SEQ ID NO: 88682 - protein, 313 aa, Homo sapiens
  Payload ID: 17755
  Gene Name: thymidylate synthetase
  Uniprot ID: P04818
  ENSP ID: ENSP00000315644
MPVAGSELPRRPLPPAAQERDAEPRPPHGELQYLGQIQHILRCGVRKDDRTGTGTLSVFGMQARYSLRDEFPLLTTKRVFWKGVLEELLWFIKGSTNAKELSSKGVKIWDANGSRDFLDSLGFSTREEGDLGPVYGFQWRHFGAEYRDMESDYSGQGVDQLQRVIDTIKTNPDDRRIIMCAWNPRDLPLMALPPCHALCQFYVVNSELSCQLYQRSGDMGLGVPFNIASYALLTYMIAHITGLKPGDFIHTLGDAHIYLNHIEPLKIQLQREPRPFPKLRILRKVEKIDDFKAEDFQIEGYNPHPTIKMEMAV

SEQ ID NO: 88683 - protein, 406 aa, Homo sapiens
  Payload ID: 17756
  Gene Name: thymine DNA glycosylase
  ENSP ID: ENSP00000266775
MGECYSLQQAQAFYTFPFQQLMAEAPNMAVVNEQQMPEEVPAPAPAQEPVQEAPKGRKRKPRTTEPKQPVEPKKPVESKKSGKSAKSKEKQEKITDTFKVKRKVDRFNGVSEAELLTKTLPDILTFNLDIVIIGINPGLMAAYKGHHYPGPGNHFWKCLFMSGLSEVQLNHMDDHTLPGKYGIGFTNMVERTTPGSKDLSSKEFREGGRILVQKLQKYQPRIAVFNGKCIYEIFSKEVFGVKVKNLEFGLQPHKIPDTETLCYVMPSSSARCAQFPRAQDKVHYYIKLKDLRDQLKGIERNMDVQEVQYTFDLQLAQEDAKKMAVKEEKYDPGYEAAYGGAYGENPCSSEPCGFSSNGLIESVELRGESAFSGIPNGQWMTQSFTDQIPSFSNHCGTQEQEEESHA

SEQ ID NO: 88684 - protein, 410 aa, Homo sapiens
  Payload ID: 17756
  Gene Name: thymine DNA glycosylase
  Uniprot ID: Q13569
  ENSP ID: ENSP00000376611
MEAENAGSYSLQQAQAFYTFPFQQLMAEAPNMAVVNEQQMPEEVPAPAPAQEPVQEAPKGRKRKPRTTEPKQPVEPKKPVESKKSGKSAKSKEKQEKITDTFKVKRKVDRFNGVSEAELLTKTLPDILTFNLDIVIIGINPGLMAAYKGHHYPGPGNHFWKCLFMSGLSEVQLNHMDDHTLPGKYGIGFTNMVERTTPGSKDLSSKEFREGGRILVQKLQKYQPRIAVFNGKCIYEIFSKEVFGVKVKNLEFGLQPHKIPDTETLCYVMPSSSARCAQFPRAQDKVHYYIKLKDLRDQLKGIERNMDVQEVQYTFDLQLAQEDAKKMAVKEEKYDPGYEAAYGGAYGENPCSSEPCGFSSNGLIESVELRGESAFSGIPNGQWMTQSFTDQIPSFSNHCGTQEQEEESHA

SEQ ID NO: 88685 - protein, 138 aa, Homo sapiens
  Payload ID: 17756
  Gene Name: thymine DNA glycosylase
  ENSP ID: ENSP00000390167
MAEAPNMAVVNEQQMPEEVPAPAPAQEPVQEAPKGRKRKPRTTEPKQPVEPKKPVESKKSGKSAKSKEKQEKITDTFKVKRKVDRFNGVSEAELLTKTLPDILTFNLDIVIIGINPGLMAAYKGHHYPGPGNHFWKCL

SEQ ID NO: 88686 - protein, 257 aa, Homo sapiens
  Payload ID: 17756
  Gene Name: thymine DNA glycosylase
  ENSP ID: ENSP00000439825
MEAENAGSYSLQQAQAFYTFPFQQLMAEAPNMAVVNEQQMPEEVPAPAPAQEPVQEAPKGRKRKPRTTEPKQPVEPKKPVESKKSGKSAKSKEKQEKITDTFKVKRKVDRFNGVSEAELLTKTLPDILTFNLDIVIIGINPGLMAAYKGHHYPGPGNHFWLSEVQLNHMDDHTLPGKYGIGFTNMVERTTPGSKDLSSKEFREGGRILVQKLQKYQPRIAVFNGKCIYEIFSKEVFGVKVKNLEFGLQPHKIPDTET

SEQ ID NO: 88687 - protein, 111 aa, Homo sapiens
  Payload ID: 17756
  Gene Name: thymine DNA glycosylase
  ENSP ID: ENSP00000445716
  MOD_RES (1)..(1): Any amino acid
XITDTFKVKRKVDRFNGVSEAELLTKTLPDILTFNLDIVIIGINPGLMAAYKGHHYPGPGNHFWKCLFMSGLSEVQLNHMDDHTLPGKYGIGFTNMVERTTPGSKDLSRYL

SEQ ID NO: 88688 - protein, 267 aa, Homo sapiens
  Payload ID: 17756
  Gene Name: thymine DNA glycosylase
  ENSP ID: ENSP00000445899
MAAYKGHHYPGPGNHFWKCLFMSGLSEVQLNHMDDHTLPGKYGIGFTNMVERTTPGSKDLSSKEFREGGRILVQKLQKYQPRIAVFNGKCIYEIFSKEVFGVKVKNLEFGLQPHKIPDTETLCYVMPSSSARCAQFPRAQDKVHYYIKLKDLRDQLKGIERNMDVQEVQYTFDLQLAQEDAKKMAVKEEKYDPGYEAAYGGAYGENPCSSEPCGFSSNGLIESVELRGESAFSGIPNGQWMTQSFTDQIPSFSNHCGTQEQEEESHA

SEQ ID NO: 88689 - protein, 521 aa, Homo sapiens
  Payload ID: 17757
  Gene Name: thymocyte expressed, positive selection associated 1
  Uniprot ID: A2RU30
  ENSP ID: ENSP00000312679
MEASVLSPTSWEKRRAWLRQSRNWQTQVLEEEAAAALQDVPDPEPSSLDDVFQEGNPINKIEDWLQDCGYSEEGFSEEAGQFIYNGFCSHGTSFEDDLTLGAEATLLAANGKLFSRSFLETARPCQLLDLGCSLASSSMTGGTNKTSSSISEILDKVQEDAEDVLFSLGFGQEDHKDTSRIPARFFTTPSQAKGIDFQLFLKSQVRRIEMEDPCLMLASRFKQVQTLAVTADAFFCLYSYVSKTPVQKFTPSHMFWNCNHPTDVPSIRILSREPEPQSPRDRLRKAISKMCLYTCPRDRPPPPHNTPKRNSLDQVVLEVMDKVKEEKQFLQQDSDLGQFSQEDPVPPAEGKKLPTSPYPCVFCCEEETQQRMSTVLAPSQTLDSNPKVPCCTHSLPIEDPQWSTDPAQIRRELCSLPATNTETHPAKDETFWKRKSRARKSLFQKNLMGRKVKSLDLSITQQKWKQSVDRPELRRSLSQQPQDTFDLEEVQSNSEEEQSQSRWPSRPRHPHHHQTFAGKDS

SEQ ID NO: 88690 - protein, 521 aa, Homo sapiens; identical to SEQ ID NO: 88689
  Payload ID: 17757
  Gene Name: thymocyte expressed, positive selection associated 1
  Uniprot ID: A2RU30
  ENSP ID: ENSP00000400892

SEQ ID NO: 88691 - protein, 383 aa, Homo sapiens
  Payload ID: 17757
  Gene Name: thymocyte expressed, positive selection associated 1
  Uniprot ID: A2RU30
  ENSP ID: ENSP00000432030
MTGGTNKTSSSISEILDKVQEDAEDVLFSLGFGQEDHKDTSRIPARFFTTPSQAKGIDFQLFLKSQVRRIEMEDPCLMLASRFKQVQTLAVTADAFFCLYSYVSKTPVQKFTPSHMFWNCNHPTDVPSIRILSREPEPQSPRDRLRKAISKMCLYTCPRDRPPPPHNTPKRNSLDQVVLEVMDKVKEEKQFLQQDSDLGQFSQEDPVPPAEGKKLPTSPYPCVFCCEEETQQRMSTVLAPSQTLDSNPKVPCCTHSLPIEDPQWSTDPAQIRRELCSLPATNTETHPAKDETFWKRKSRARKSLFQKNLMGRKVKSLDLSITQQKWKQSVDRPELRRSLSQQPQDTFDLEEVQSNSEEEQSQSRWPSRPRHPHHHQTFAGKDS

SEQ ID NO: 88692 - protein, 383 aa, Homo sapiens; identical to SEQ ID NO: 88691
  Payload ID: 17757
  Gene Name: thymocyte expressed, positive selection associated 1
  Uniprot ID: A2RU30
  ENSP ID: ENSP00000433098

SEQ ID NO: 88693 - protein, 80 aa, Homo sapiens
  Payload ID: 17757
  Gene Name: thymocyte expressed, positive selection associated 1
  ENSP ID: ENSP00000433187
MTGGTNKTSSSISEILDKVQEDAEDVLFSLGFGQEDHKDTSRIPARFFTTPSQAKGIDFQLFLKSQVRRIEMEDPCLMLA

SEQ ID NO: 88694 - protein, 47 aa, Homo sapiens
  Payload ID: 17757
  Gene Name: thymocyte expressed, positive selection associated 1
  ENSP ID: ENSP00000433895
MEASVLSPTSWEKRRAWLRQSRNWQTQVLEEEAAAALQDVPDPEPSS

SEQ ID NO: 88695 - protein, 80 aa, Homo sapiens
  Payload ID: 17757
  Gene Name: thymocyte expressed, positive selection associated 1
  ENSP ID: ENSP00000434039
  MOD_RES (1)..(1): Any amino acid
XASVLSPTSWEKRRAWLRQSRNWQTQVLEEEAAAALQDVPDPEPSSLDDVFQEGNPINKIEDWLQDCGKLNTTDSHWKRI

SEQ ID NO: 88696 - protein, 67 aa, Homo sapiens
  Payload ID: 17757
  Gene Name: thymocyte expressed, positive selection associated 1
  ENSP ID: ENSP00000434811
MTGGTNKTSSSISEILDKVQEDAEDVLFSLGFGQEDHKDTSRIPARFFTTPSQAKGIDFQLFLKSQV

SEQ ID NO: 88697 - protein, 383 aa, Homo sapiens; identical to SEQ ID NO: 88691
  Payload ID: 17757
  Gene Name: thymocyte expressed, positive selection associated 1
  Uniprot ID: A2RU30
  ENSP ID: ENSP00000435622

SEQ ID NO: 88698 - protein, 60 aa, Homo sapiens
  Payload ID: 17757
  Gene Name: thymocyte expressed, positive selection associated 1
  ENSP ID: ENSP00000435734
MTGGTNKTSSSISEILDKVQEDAEDVLFSLGFGQEDHKDTSRIPARFFTTPSQAKGIDFQ

SEQ ID NO: 88699 - protein, 100 aa, Homo sapiens
  Payload ID: 17757
  Gene Name: thymocyte expressed, positive selection associated 1
  ENSP ID: ENSP00000436286
MTGGTNKTSSSISEILDKVQEDAEDVLFSLGFGQEDHKDTSRIPARFFTTPSQAKGIDFQLFLKSQVRRIEMEDPCLMLASFLHHHNSMWSDRIGFKEET

SEQ ID NO: 88700 - protein, 82 aa, Homo sapiens
  Payload ID: 17757
  Gene Name: thymocyte expressed, positive selection associated 1
  ENSP ID: ENSP00000436635
MEASVLSPTSWEKRRAWLRQSRNWQTQVLEEEAAAALQDVPDPEPSSLDDVFQEGNPINKIEDWLQDCGYSEEGFSEEAGQF

SEQ ID NO: 88701 - protein, 149 aa, Homo sapiens
  Payload ID: 17757
  Gene Name: thymocyte expressed, positive selection associated 1
  ENSP ID: ENSP00000436753
QWSTDPAQIRRELCSLPATNTETHPAKDETFWKRKSRARKSLFQKNLMGRKVKSLDLSITQQKWKQSVDRPELRRSLSQQPQDTFDLEEAFSTTTTACGLTELASKKKLKATSCRKLHCPQHPAPTPWSSKPPNSAGERQHGTWGGRPD

SEQ ID NO: 88702 - protein, 394 aa, Homo sapiens
  Payload ID: 17757
  Gene Name: thymocyte expressed, positive selection associated 1
  ENSP ID: ENSP00000478986
MTGGTNKTSSSISEILDKVQEDAEDVLFSLGFGQEDHKDTSRIPARFFTTPSQAKGIDFQLFLKSQVRRIEMEDPCLMLASRFKQVQTLAVTADAFFCLYSYVSKTPVQKFTPSHMFWNCNHPTDVPSIRILSREPEPQSPRDRLRKAISKMCLYTCPRDRPPPPHNTPKRNSLDQVVLEVMDKVKEEKQFLQQDSDLGQFSQEDPVPPAEGKKLPTSPYPCVFCCEEETQQRMSTVLAPSQTLDSNPKVPCCTHSLPIEDPQWSTDPAQIRRELCSLPATNTETHPAKDETFWKRKSRARKSLFQKNLMGRKVKSLDLSITQQKWKQSVDRPELRRSLSQQPQDTFDLEEVQSNSEEEQSQSRWPSRPRHPHHHQTFAGKLVKLSPPPQQHVV

SEQ ID NO: 88703 - protein, 166 aa, Homo sapiens
  Payload ID: 17758
  Gene Name: thymocyte nuclear protein 1
  Uniprot ID: Q9P016
  ENSP ID: ENSP00000341452
MSRPRKRLAGTSGSDKGLSGKRTKTENSGEALAKVEDSNPQKTSATKNCLKNLSSHWLMKSEPESRLEKGVDVKFSIEDLKAQPKQTTCWDGVRNYQARNFLRAMKLGEEAFFYHSNCKEPGIAGLMKIVKEAYPDHTQFEKNNPHYDPSSKEDNPKWSMKSLILF

SEQ ID NO: 88704 - protein, 225 aa, Homo sapiens
  Payload ID: 17758
  Gene Name: thymocyte nuclear protein 1
  Uniprot ID: Q9P016
  ENSP ID: ENSP00000341657
MSRPRKRLAGTSGSDKGLSGKRTKTENSGEALAKVEDSNPQKTSATKNCLKNLSSHWLMKSEPESRLEKGVDVKFSIEDLKAQPKQTTCWDGVRNYQARNFLRAMKLGEEAFFYHSNCKEPGIAGLMKIVKEAYPDHTQFEKNNPHYDPSSKEDNPKWSMVDVQFVRMMKRFIPLAELKSYHQAHKATGGPLKNMVLFTRQRLSIQPLTQEEFDFVLSLEEKEPS

SEQ ID NO: 88705 - protein, 225 aa, Homo sapiens; identical to SEQ ID NO: 88704
  Payload ID: 17758
  Gene Name: thymocyte nuclear protein 1
  Uniprot ID: Q9P016
  ENSP ID: ENSP00000376373

SEQ ID NO: 88706 - protein, 225 aa, Homo sapiens; identical to SEQ ID NO: 88704
  Payload ID: 17758
  Gene Name: thymocyte nuclear protein 1
  Uniprot ID: Q9P016
  ENSP ID: ENSP00000376374

SEQ ID NO: 88707 - protein, 641 aa, Homo sapiens
  Payload ID: 17759
  Gene Name: thymocyte selection associated
  Uniprot ID: Q8N1K5
  ENSP ID: ENSP00000357231
MALSLEEFVHSLDLRTLPRVLEIQAGIYLEGSIYEMFGNECCFSTGEVIKITGLKVKKIIAEICEQIEGCESLQPFELPMNFPGLFKIVADKTPYLTMEEITRTIHIGPSRLGHPCFYHQKDIKLENLIIKQGEQIMLNSVEEIDGEIMVSCAVARNHQTHSFNLPLSQEGEFYECEDERIYTLKEIVEWKIPKNRTRTVNLTDFSNKWDSTNPFPKDFYGTLILKPVYEIQGVMKFRKDIIRILPSLDVEVKDITDSYDANWFLQLLSTEDLFEMTSKEFPIVTEVIEAPEGNHLPQSILQPGKTIVIHKKYQASRILASEIRSNFPKRHFLIPTSYKGKFKRRPREFPTAYDLEIAKSEKEPLHVVATKAFHSPHDKLSSVSVGDQFLVHQSETTEVLCEGIKKVVNVLACEKILKKSYEAALLPLYMEGGFVEVIHDKKQYPISELCKQFRLPFNVKVSVRDLSIEEDVLAATPGLQLEEDITDSYLLISDFANPTECWEIPVGRLNMTVQLVSNFSRDAEPFLVRTLVEEITEEQYYMMRRYESSASHPPPRPPKHPSVEETKLTLLTLAEERTVDLPKSPKRHHVDITKKLHPNQAGLDSKVLIGSQNDLVDEEKERSNRGATAIAETFKNEKHQK

SEQ ID NO: 88708 - protein, 641 aa, Homo sapiens; identical to SEQ ID NO: 88707
  Payload ID: 17759
  Gene Name: thymocyte selection associated
  Uniprot ID: Q8N1K5
  ENSP ID: ENSP00000357233

SEQ ID NO: 88709 - protein, 210 aa, Homo sapiens
  Payload ID: 17759
  Gene Name: thymocyte selection associated
  ENSP ID: ENSP00000387740
  MOD_RES (1)..(1): Any amino acid
XLQTTQGIAMALSLEEFVHSLDLRTLPRVLEIQAGIYLEGSIYEMFGNECCFSTGEVIKITGLKVKKIIAEICEQIEGCESLQPFELPMNFPVRKDIIRILPSLDVEVKDITDSYDANWFLQLLSTEDLFEMTSKEFPIVTEVIEAPEGNHLPQSILQPGKTIVIHKKYQASRILASEIRSNFPKRHFLIPTSYKGKFKRRPREFPTAYD

SEQ ID NO: 88710 - protein, 606 aa, Homo sapiens
  Payload ID: 17759
  Gene Name: thymocyte selection associated
  Uniprot ID: Q8N1K5
  ENSP ID: ENSP00000439863
MFGNECCFSTGEVIKITGLKVKKIIAEICEQIEGCESLQPFELPMNFPGLFKIVADKTPYLTMEEITRTIHIGPSRLGHPCFYHQKDIKLENLIIKQGEQIMLNSVEEIDGEIMVSCAVARNHQTHSFNLPLSQEGEFYECEDERIYTLKEIVEWKIPKNRTRTVNLTDFSNKWDSTNPFPKDFYGTLILKPVYEIQGVMKFRKDIIRILPSLDVEVKDITDSYDANWFLQLLSTEDLFEMTSKEFPIVTEVIEAPEGNHLPQSILQPGKTIVIHKKYQASRILASEIRSNFPKRHFLIPTSYKGKFKRRPREFPTAYDLEIAKSEKEPLHVVATKAFHSPHDKLSSVSVGDQFLVHQSETTEVLCEGIKKVVNVLACEKILKKSYEAALLPLYMEGGFVEVIHDKKQYPISELCKQFRLPFNVKVSVRDLSIEEDVLAATPGLQLEEDITDSYLLISDFANPTECWEIPVGRLNMTVQLVSNFSRDAEPFLVRTLVEEITEEQYYMMRRYESSASHPPPRPPKHPSVEETKLTLLTLAEERTVDLPKSPKRHHVDITKKLHPNQAGLDSKVLIGSQNDLVDEEKERSNRGATAIAETFKNEKHQK

SEQ ID NO: 88711 - protein, 641 aa, Homo sapiens; identical to SEQ ID NO: 88707
  Payload ID: 17759
  Gene Name: thymocyte selection associated
  Uniprot ID: Q8N1K5
  ENSP ID: ENSP00000480630

SEQ ID NO: 88712 - protein, 641 aa, Homo sapiens; identical to SEQ ID NO: 88707
  Payload ID: 17759
  Gene Name: thymocyte selection associated
  Uniprot ID: Q8N1K5
  ENSP ID: ENSP00000480967

SEQ ID NO: 88713 - protein, 606 aa, Homo sapiens; identical to SEQ ID NO: 88710
  Payload ID: 17759
  Gene Name: thymocyte selection associated
  Uniprot ID: Q8N1K5
  ENSP ID: ENSP00000484170

SEQ ID NO: 88714 - protein, 210 aa, Homo sapiens; identical to SEQ ID NO: 88709
  Payload ID: 17759
  Gene Name: thymocyte selection associated
  ENSP ID: ENSP00000486042
  MOD_RES (1)..(1): Any amino acid

SEQ ID NO: 88715 - protein, 562 aa, Homo sapiens
  Payload ID: 17759
  Gene Name: thymocyte selection associated
  ENSP ID: ENSP00000486494
MNFPGLFKIVADKTPYLTMEEITRTIHIGPSRLGHPCFYHQKDIKLENLIIKQGEQIMLNSVEEIDGEIMVSCAVARNHQTHSFNLPLSQEGEFYECEDERIYTLKEIVEWKIPKNRTRTVNLTDFSNKWDSTNPFPKDFYGTLILKPVYEIQGVMKFRKDIIRILPSLDVEVKDITDSYDANWFLQLLSTEDLFEMTSKEFPIVTEVIEAPEGNHLPQSILQPGKTIVIHKKYQASRILASEIRSNFPKRHFLIPTSYKGKFKRRPREFPTAYDLEIAKSEKEPLHVVATKAFHSPHDKLSSVSVGDQFLVHQSETTEVLCEGIKKVVNVLACEKILKKSYEAALLPLYMEGGFVEVIHDKKQYPISELCKQFRLPFNVKVSVRDLSIEEDVLAATPGLQLEEDITDSYLLISDFANPTECWEIPVGRLNMTVQLVSNFSRDAEPFLVRTLVEEITEEQYYMMRRYESSASHPPPRPPKHPSVEETKLTLLTLAEERTVDLPKSPKRHHVDITKKLHPNQAGLDSKVLIGSQNDLVDEEKERSNRGATAIAETFKNEKHQK

SEQ ID NO: 88716 - protein, 680 aa, Homo sapiens
  Payload ID: 17759
  Gene Name: thymocyte selection associated
  Uniprot ID: Q8N1K5
  ENSP ID: ENSP00000487358
MALSLEEFVHSLDLRTLPRVLEIQAGIYLEGSIYEMFGNECCFSTGEVIKITGLKVKKIIAEICEQIEGCESLQPFELPMNFPGLFKIVADKTPYLTMEEITRTIHIGPSRLGHPCFYHQKDIKLENLIIKQGEQIMLNSVEEIDGEIMVSCAVARNHQTHSFNLPLSQEGEFYECEDERIYTLKEIVEWKIPKNRTRTVNLTDFSNKWDSTNPFPKDFYGTLILKPVYEIQGVMKFRKDIIRILPSLDVEVKDITDSYDANWFLQLLSTEDLFEMTSKEFPIVTEVIEAPEGNHLPQSILQPGKTIVIHKKYQASRILASEIRSNFPKRHFLIPTSYKGKFKRRPREFPTAYDLEIAKSEKEPLHVVATKAFHSPHDKLSSVSVGDQFLVHQSETTEVLCEGIKKVVNVLACEKILKKSYEAALLPLYMEGGFVEVIHDKKQYPISELCKQFRLPFNVKVSVRDLSIEEDVLAATPGLQLEEDITDSYLLISDFANPTECWEIPVGRLNMTVQLVSNFSRDAEPFLVRTLVEEITEEQYYMMRRYESSASHPPPRPPKHPSVEETKLTLLTLAEERTVDLPKSPKAGVQWRDLGSLQPLPPGFKQFSASASHVAGITGTPHHVQRHHVDITKKLHPNQAGLDSKVLIGSQNDLVDEEKERSNRGATAIAETFKNEKHQK

SEQ ID NO: 88717 - protein, 514 aa, Homo sapiens
  Payload ID: 17760
  Gene Name: thymocyte selection associated family member 2
  Uniprot ID: Q5TEJ8
  ENSP ID: ENSP00000329862
MEPVPLQDFVRALDPASLPRVLRVCSGVYFEGSIYEISGNECCLSTGDLIKVTQVRLQKVVCENPKTSQTMELAPNFQGYFTPLNTPQSYETLEELVSATTQSSKQLPTCFMSTHRIVTEGRVVTEDQLLMLEAVVMHLGIRSARCVLGMEGQQVILHLPLSQKGPFWTWEPSAPRTLLQVLQDPALKDLVLTCPTLPWHSLILRPQYEIQAIMHMRRTIVKIPSTLEVDVEDVTASSRHVHFIKPLLLSEVLAWEGPFPLSMEILERLSDQAGEDEEEECKEEAESPERVLLPFHFPGSFVEEMSDSRRYSLADLTAQFSLPCEVKVVAKDTSHPTDPLTSFLGLRLEEKITEPFLVVSLDSEPGMCFEIPPRWLDLTVVKAKGQPDLPEGSLPIATVEELTDTFYYRLRKLPACEIQAPPPRPPKNQGLSKQRRHSSEGGVKSSQVLGLQQHARLPKPKAKTLPEFIKDGSSTYSKIPAHRKGHRPAKPQRQDLDDDEHDYEEILEQFQKTI

SEQ ID NO: 88718 - protein, 643 aa, Homo sapiens
  Payload ID: 17760
  Gene Name: thymocyte selection associated family member 2
  Uniprot ID: Q5TEJ8
  ENSP ID: ENSP00000363031
MEPVPLQDFVRALDPASLPRVLRVCSGVYFEGSIYEISGNECCLSTGDLIKVTQVRLQKVVCENPKTSQTMELAPNFQGYFTPLNTPQSYETLEELVSATTQSSKQLPTCFMSTHRIVTEGRVVTEDQLLMLEAVVMHLGIRSARCVLGMEGQQVILHLPLSQKGPFWTWEPSAPRTLLQVLQDPALKDLVLTCPTLPWHSLILRPQYEIQAIMHMRRTIVKIPSTLEVDVEDVTASSRHVHFIKPLLLSEVLAWEGPFPLSMEILEVPEGRPIFLSPWVGSLQKGQRLCVYGLASPPWRVLASSKGRKVPRHFLVSGGYQGKLRRRPREFPTAYDLLGAFQPGRPLRVVATKDCEGEREENPEFTSLAVGDRLEVLGPGQAHGAQGSDVDVLVCQRLSDQAGEDEEEECKEEAESPERVLLPFHFPGSFVEEMSDSRRYSLADLTAQFSLPCEVKVVAKDTSHPTDPLTSFLGLRLEEKITEPFLVVSLDSEPGMCFEIPPRWLDLTVVKAKGQPDLPEGSLPIATVEELTDTFYYRLRKLPACEIQAPPPRPPKNQGLSKQRRHSSEGGVKSSQVLGLQQHARLPKPKAKTLPEFIKDGSSTYSKIPAHRKGHRPAKPQRQDLDDDEHDYEEILEQFQKTI

SEQ ID NO: 88719 - protein, 260 aa, Homo sapiens
  Payload ID: 17760
  Gene Name: thymocyte selection associated family member 2
  Uniprot ID: Q5TEJ8
  ENSP ID: ENSP00000363035
MEPVPLQDFVRALDPASLPRVLRVCSGVYFEGSIYEISGNECCLSTGDLIKVTQVRLQKVVCENPKTSQTMELAPNFQGYFTPLNTPQSYETLEELVSATTQSSKQLPTCFMSTHRIVTEGRVVTEDQLLMLEAVVMHLGIRSARCVLGMEGQQVILHLPLSQKGPFWTWEPSAPRTLLQVLQDPALKDLVLTCPTLPWHSLILRPQYEIQAIMHIFSSLRIAATRSAAQTQGEDLARVHQGWLQYVQQDSCPQEGPQAR

SEQ ID NO: 88720 - protein, 123 aa, Homo sapiens
  Payload ID: 17760
  Gene Name: thymocyte selection associated family member 2
  Uniprot ID: Q5TEJ8
  ENSP ID: ENSP00000363037
MEPVPLQDFVRALDPASLPRVLRVCSGVYFEGSIYEISGNECCLSTGDLIKVTQVRLQKVVCENPKTSQTMELAPNFQVFSSLRIAATRSAAQTQGEDLARVHQGWLQYVQQDSCPQEGPQAR

SEQ ID NO: 88721 - protein, 133 aa, Homo sapiens
  Payload ID: 17760
  Gene Name: thymocyte selection associated family member 2
  ENSP ID: ENSP00000392414
MEPVPLQDFVRALDPASLPRVLRVCSGVYFEGYFTPLNTPQSYETLEELVSATTQSSKQLPTCFMSTHRIVTEGRVVTEDQLLMLEAVVMHLGIRSARCVLGMEGQQVILHLPLSQKGPFWTWEPSAPRTLLQ

SEQ ID NO: 88722 - protein, 391 aa, Homo sapiens
  Payload ID: 17760
  Gene Name: thymocyte selection associated family member 2
  ENSP ID: ENSP00000398049
  MOD_RES (1)..(1): Any amino acid
XTCFMSTHRIVTEGRVVTEDQLLMLEAVVMHLGIRSARCVLGMEGQQVILHLPLSQKGPFWTWEPSAPRTLLQVLQDPALKDLVLTCPTLPWHSLILRPQYEIQAIMHMRRTIVKIPSTLEVDVEDVTASSRHVHFIKPLLLSERLSDQAGEDEEEECKEEAESPERVLLPFHFPGSFVEEMSDSRRYSLADLTAQFSLPCEVKVVAKDTSHPTDPLTSFLGLRLEEKITEPFLVVSLDSEPGMCFEIPPRWLDLTVVKAKGQPDLPEGSLPIATVEELTDTFYYRLRKLPACEIQAPPPRPPKNQGLSKQRRHSSEGGVKSSQVLGLQQHARLPKPKAKTLPEFIKDGSSTYSKIPAHRKGHRPAKPQRQDLDDDEHDYEEILEQFQKTI

SEQ ID NO: 88723 - protein, 246 aa, Homo sapiens
  Payload ID: 17760
  Gene Name: thymocyte selection associated family member 2
  ENSP ID: ENSP00000413725
MEPVPLQDFVRALDPASLPRVLRVCSGVYFEGSIYEISGNECCLSTGDLIKVTQVRLQKVVCENPKTSQTMELAPNFQVRRTIVKIPSTLEVDVEDVTASSRHVHFIKPLLLSEVLAWEGPFPLSMEILEVPEGRPIFLSPWVGSLQKGQRLCVYGLASPPWRVLASSKGRKVPRHFLVSGGYQGKLRRRPREFPTAYDLLGAFQPGRPLRVVATKDCEGEREENPEFTSLAVGDRLEVLGPGQAH

SEQ ID NO: 88724 - protein, 526 aa, Homo sapiens
  Payload ID: 17761
  Gene Name: thymocyte selection-associated high mobility group box
  Uniprot ID: O94900
  ENSP ID: ENSP00000354842
MDVRFYPPPAQPAAAPDAPCLGPSPCLDPYYCNKFDGENMYMSMTEPSQDYVPASQSYPGPSLESEDFNIPPITPPSLPDHSLVHLNEVESGYHSLCHPMNHNGLLPFHPQNMDLPEITVSNMLGQDGTLLSNSISVMPDIRNPEGTQYSSHPQMAAMRPRGQPADIRQQPGMMPHGQLTTINQSQLSAQLGLNMGGSNVPHNSPSPPGSKSATPSPSSSVHEDEGDDTSKINGGEKRPASDMGKKPKTPKKKKKKDPNEPQKPVSAYALFFRDTQAAIKGQNPNATFGEVSKIVASMWDGLGEEQKQVYKKKTEAAKKEYLKQLAAYRASLVSKSYSEPVDVKTSQPPQLINSKPSVFHGPSQAHSALYLSSHYHQQPGMNPHLTAMHPSLPRNIAPKPNNQMPVTVSIANMAVSPPPPLQISPPLHQHLNMQQHQPLTMQQPLGNQLPMQVQSALHSPTMQQGFTLQPDYQTIINPTSTAAQVVTQAMEYVRSGCRNPPPQPVDWNNDYCSSGGMQRDKALYLT

SEQ ID NO: 88725 - protein, 248 aa, Homo sapiens
  Payload ID: 17762
  Gene Name: thymopoietin
  Uniprot ID: P42167
  ENSP ID: ENSP00000261210
MPEFLEDPSVLTKDKLKSELVANNVTLPAGEQRKDVYVQLYLQHLTARNRPPLPAGTNSKGPPDFSSDEEREPTPVLGSGAAAAGRSRAAVGRKATKKTDKPRQEDKDDLDVTELTNEDLLDQLVKYGVNPGPIVGTTRKLYEKKLLKLREQGTESRSSTPLPTISSSAENTRQNGSNDSDRYSDNEEDSKIELKLEKREPLKGRAKTPVTLKQRRVEHNQVSLVLLPPCTGINNLLTTLIHVLAFNG

SEQ ID NO: 88726 - protein, 694 aa, Homo sapiens
  Payload ID: 17762
  Gene Name: thymopoietin
  Uniprot ID: P42166
  ENSP ID: ENSP00000266732
MPEFLEDPSVLTKDKLKSELVANNVTLPAGEQRKDVYVQLYLQHLTARNRPPLPAGTNSKGPPDFSSDEEREPTPVLGSGAAAAGRSRAAVGRKATKKTDKPRQEDKDDLDVTELTNEDLLDQLVKYGVNPGPIVGTTRKLYEKKLLKLREQGTESRSSTPLPTISSSAENTRQNGSNDSDRYSDNEEGKKKEHKKVKSTRDIVPFSELGTTPSGGGFFQGISFPEISTRPPLGSTELQAAKKVHTSKGDLPREPLVATNLPGRGQLQKLASERNLFISCKSSHDRCLEKSSSSSSQPEHSAMLVSTAASPSLIKETTTGYYKDIVENICGREKSGIQPLCPERSHISDQSPLSSKRKALEESESSQLISPPLAQAIRDYVNSLLVQGGVGSLPGTSNSMPPLDVENIQKRIDQSKFQETEFLSPPRKVPRLSEKSVEERDSGSFVAFQNIPGSELMSSFAKTVVSHSLTTLGLEVAKQSQHDKIDASELSFPFHESILKVIEEEWQQVDRQLPSLACKYPVSSREATQILSVPKVDDEILGFISEATPLGGIQAASTESCNQQLDLALCRAYEAAASALQIATHTAFVAKAMQADISQAAQILSSDPSRTHQALGILSKTYDAASYICEAAFDEVKMAAHTMGNATVGRRYLWLKDCKINLASKNKLASTPFKGGTLFGGEVCKVIKKRGNKH

SEQ ID NO: 88727 - protein, 414 aa, Homo sapiens
  Payload ID: 17762
  Gene Name: thymopoietin
  ENSP ID: ENSP00000340251
MPEFLEDPSVLTKDKLKSELVANNVTLPAGEQRKDVYVQLYLQHLTARNRPPLPAGTNSKGPPDFSSDEEREPTPVLGSGAAAAGRSRAAVGRKATKKTDKPRQEDKDDLDVTELTNEDLLDQLVKYGVNPGPIVGTTRKLYEKKLLKLREQGTESRSSTPLPTISSSAENTRQNGSNDSDRYSDNEEDSKIELKLEKREPLKGRAKTPVTLKQRRVEHNQVETSEHFRIDGPVISESTPIAETIMASSNESLVVNRVTGNFKHASPILPITEFSDIPRRAPKKPLTRAEVGEKTEERRVERDILKEMFPYEASTPTGISASCRRPIKGAAGRPLELSDFRMEESFSSKYVPKYVPLADVKSEKTKKGRSIPVWIKILLFVVVAVFLFLVYQAMETNQVNPFSNFLHVDPRKSN

SEQ ID NO: 88728 - protein, 345 aa, Homo sapiens
  Payload ID: 17762
  Gene Name: thymopoietin
  Uniprot ID: P42167
  ENSP ID: ENSP00000376773
MPEFLEDPSVLTKDKLKSELVANNVTLPAGEQRKDVYVQLYLQHLTARNRPPLPAGTNSKGPPDFSSDEEREPTPVLGSGAAAAGRSRAAVGRKATKKTDKPRQEDKDDLDVTELTNEDLLDQLVKYGVNPGPIVGTTRKLYEKKLLKLREQGTESRSSTPLPTISSSAENTRQNGSNDSDRYSDNEEDSKIELKLEKREPLKGRAKTPVTLKQRRVEHNQVGEKTEERRVERDILKEMFPYEASTPTGISASCRRPIKGAAGRPLELSDFRMEESFSSKYVPKYVPLADVKSEKTKKGRSIPVWIKILLFVVVAVFLFLVYQAMETNQVNPFSNFLHVDPRKSN

SEQ ID NO: 88729 - protein, 454 aa, Homo sapiens
  Payload ID: 17762
  Gene Name: thymopoietin
  Uniprot ID: P42167
  ENSP ID: ENSP00000450627
MPEFLEDPSVLTKDKLKSELVANNVTLPAGEQRKDVYVQLYLQHLTARNRPPLPAGTNSKGPPDFSSDEEREPTPVLGSGAAAAGRSRAAVGRKATKKTDKPRQEDKDDLDVTELTNEDLLDQLVKYGVNPGPIVGTTRKLYEKKLLKLREQGTESRSSTPLPTISSSAENTRQNGSNDSDRYSDNEEDSKIELKLEKREPLKGRAKTPVTLKQRRVEHNQSYSQAGITETEWTSGSSKGGPLQALTRESTRGSRRTPRKRVETSEHFRIDGPVISESTPIAETIMASSNESLVVNRVTGNFKHASPILPITEFSDIPRRAPKKPLTRAEVGEKTEERRVERDILKEMFPYEASTPTGISASCRRPIKGAAGRPLELSDFRMEESFSSKYVPKYVPLADVKSEKTKKGRSIPVWIKILLFVVVAVFLFLVYQAMETNQVNPFSNFLHVDPRKSN

SEQ ID NO: 88730 - protein, 237 aa, Homo sapiens
  Payload ID: 17762
  Gene Name: thymopoietin
  ENSP ID: ENSP00000451552
KATKKTDKPRQEDKDDLDVTELTNEDLLDQLVKYGVNPGPIVGTTRKLYEKKLLKLREQGTESRSSTPLPTISSSAENTRQNGSNDSDRYSDNEEDSKIELKLEKREPLKGRAKTPVTLKQRRVEHNQVVNRVTGNFKHASPILPITEFSDIPRRAPKKPLTRAEVGEKTEERRVERDILKEMFPYEASTPTGISASCRRPIKGAAGRPLELSDFRMEESFSSKYVPKYVPLADVKS

SEQ ID NO: 88731 - protein, 44 aa, Homo sapiens
  Payload ID: 17763
  Gene Name: thymosin beta 10
  Uniprot ID: P63313
  ENSP ID: ENSP00000233143
MADKPDMGEIASFDKAKLKKTETQEKNTLPTKETIEQEKRSEIS

SEQ ID NO: 88732 - protein, 45 aa, Homo sapiens; identical to SEQ ID NO: 75919
  Payload ID: 17764
  Gene Name: thymosin beta 15a
  Uniprot ID: P0CG34
  ENSP ID: ENSP00000289373

SEQ ID NO: 88733 - protein, 45 aa, Homo sapiens; identical to SEQ ID NO: 75919
  Payload ID: 17765
  Gene Name: thymosin beta 15B
  Uniprot ID: P0CG35
  ENSP ID: ENSP00000455371

SEQ ID NO: 88734 - protein, 45 aa, Homo sapiens; identical to SEQ ID NO: 75919
  Payload ID: 17765
  Gene Name: thymosin beta 15B
  Uniprot ID: P0CG35
  ENSP ID: ENSP00000455771

SEQ ID NO: 88735 - protein, 45 aa, Homo sapiens; identical to SEQ ID NO: 75919
  Payload ID: 17765
  Gene Name: thymosin beta 15B
  Uniprot ID: P0CG35
  ENSP ID: ENSP00000456121

SEQ ID NO: 88736 - protein, 45 aa, Homo sapiens; identical to SEQ ID NO: 75919
  Payload ID: 17765
  Gene Name: thymosin beta 15B
  Uniprot ID: P0CG35
  ENSP ID: ENSP00000457057

SEQ ID NO: 88737 - protein, 45 aa, Homo sapiens
  Payload ID: 17765
  Gene Name: thymosin beta 15B
  ENSP ID: ENSP00000457524
MSDKPDLSEVEKFDRSKLKKTNTEEKNTLPSKEIFFSLVGVNIQD

SEQ ID NO: 88738 - protein, 44 aa, Homo sapiens
  Payload ID: 17766
  Gene Name: thymosin beta 4, X-linked
  Uniprot ID: P62328
  ENSP ID: ENSP00000370007
MSDKPDMAEIEKFDKSKLKKTETQEKNPLPSKETIEQEKQAGES

SEQ ID NO: 88739 - protein, 44 aa, Homo sapiens; identical to SEQ ID NO: 88738
  Payload ID: 17766
  Gene Name: thymosin beta 4, X-linked
  Uniprot ID: P62328
  ENSP ID: ENSP00000370009

SEQ ID NO: 88740 - protein, 44 aa, Homo sapiens; identical to SEQ ID NO: 88738
  Payload ID: 17766
  Gene Name: thymosin beta 4, X-linked
  Uniprot ID: P62328
  ENSP ID: ENSP00000370010

SEQ ID NO: 88741 - protein, 44 aa, Homo sapiens; identical to SEQ ID NO: 88738
  Payload ID: 17766
  Gene Name: thymosin beta 4, X-linked
  Uniprot ID: P62328
  ENSP ID: ENSP00000414376

SEQ ID NO: 88742 - protein, 44 aa, Homo sapiens
  Payload ID: 17767
  Gene Name: thymosin beta 4, Y-linked
  Uniprot ID: O14604
  ENSP ID: ENSP00000284856
MSDKPGMAEIEKFDKSKLKKTETQEKNPLSSKETIEQERQAGES

SEQ ID NO: 88743 - protein, 351 aa, Homo sapiens
  Payload ID: 17768
  Gene Name: thymus, brain and testes associated
  Uniprot ID: Q96M53
  ENSP ID: ENSP00000299290
MATDVQLADYPLMSPKAELKLEKKSGRKPRSPRDSGPQKELVIPGIVDFERIRRALRTPKPQTPGTYCFGRLSHHSFFSRHHPHPQHVTHIQDLTGKPVCVVRDFPAPLPESTVFSGCQMGIPTISVPIGDPQSNRNPQLSSEAWKKELKELASRVAFLTKEDELKKKEKEQKEEPLREQGAKYSAETGRLIPASTRAVGRRRSHQGQQSQSSSRHEGVQAFLLQDQELLVLELLCRILETDLLSAIQFWLLYAPPKEKDLALGLLQTAVAQLLPQPLVSIPTEKLLSQLPEVHEPPQEKQEPPCSQSPKKTKISPFTKSEKPEYIGEAQVLQMHSSQNTEKKTSKPRAES

SEQ ID NO: 88744 - protein, 352 aa, Homo sapiens
  Payload ID: 17768
  Gene Name: thymus, brain and testes associated
  ENSP ID: ENSP00000400224
MATDVQLADYPLMSPKAELKLEKKSGRKPRSPRDSGPQKELVIPGIVDFERIRRALRTPKPQTPGTYCFGRLSHHSFFSRHHPHPQHVTHIQDLTGKPVCVVRDFPAPLPESTVFSGCQMGIPTISVPIGDPQSNRNPQLSSEAWKKELKELASRVAFLTKEDELKKKEQKEQKEEPLREQGAKYSAETGRLIPASTRAVGRRRSHQGQQSQSSSRHEGVQAFLLQDQELLVLELLCRILETDLLSAIQFWLLYAPPKEKDLALGLLQTAVAQLLPQPLVSIPTEKLLSQLPEVHEPPQEKQEPPCSQSPKKTKISPFTKSEKPEYIGEAQVLQMHSSQNTEKKTSKPRAES

SEQ ID NO: 88745 - protein, 2768 aa, Homo sapiens
  Payload ID: 17769
  Gene Name: thyroglobulin
  Uniprot ID: P01266
  ENSP ID: ENSP00000220616
MALVLEIFTLLASICWVSANIFEYQVDAQPLRPCELQRETAFLKQADYVPQCAEDGSFQTVQCQNDGRSCWCVGANGSEVLGSRQPGRPVACLSFCQLQKQQILLSGYINSTDTSYLPQCQDSGDYAPVQCDVQQVQCWCVDAEGMEVYGTRQLGRPKRCPRSCEIRNRRLLHGVGDKSPPQCSAEGEFMPVQCKFVNTTDMMIFDLVHSYNRFPDAFVTFSSFQRRFPEVSGYCHCADSQGRELAETGLELLLDEIYDTIFAGLDLPSTFTETTLYRILQRRFLAVQSVISGRFRCPTKCEVERFTATSFGHPYVPSCRRNGDYQAVQCQTEGPCWCVDAQGKEMHGTRQQGEPPSCAEGQSCASERQQALSRLYFGTSGYFSQHDLFSSPEKRWASPRVARFATSCPPTIKELFVDSGLLRPMVEGQSQQFSVSENLLKEAIRAIFPSRGLARLALQFTTNPKRLQQNLFGGKFLVNVGQFNLSGALGTRGTFNFSQFFQQLGLASFLNGGRQEDLAKPLSVGLDSNSSTGTPEAAKKDGTMNKPTVGSFGFEINLQENQNALKFLASLLELPEFLLFLQHAISVPEDVARDLGDVMETVLSSQTCEQTPERLFVPSCTTEGSYEDVQCFSGECWCVNSWGKELPGSRVRGGQPRCPTDCEKQRARMQSLMGSQPAGSTLFVPACTSEGHFLPVQCFNSECYCVDAEGQAIPGTRSAIGKPKKCPTPCQLQSEQAFLRTVQALLSNSSMLPTLSDTYIPQCSTDGQWRQVQCNGPPEQVFELYQRWEAQNKGQDLTPAKLLVKIMSYREAASGNFSLFIQSLYEAGQQDVFPVLSQYPSLQDVPLAALEGKRPQPRENILLEPYLFWQILNGQLSQYPGSYSDFSTPLAHFDLRNCWCVDEAGQELEGMRSEPSKLPTCPGSCEEAKLRVLQFIRETEEIVSASNSSRFPLGESFLVAKGIRLRNEDLGLPPLFPPREAFAEQFLRGSDYAIRLAAQSTLSFYQRRRFSPDDSAGASALLRSGPYMPQCDAFGSWEPVQCHAGTGHCWCVDEKGGFIPGSLTARSLQIPQCPTTCEKSRTSGLLSSWKQARSQENPSPKDLFVPACLETGEYARLQASGAGTWCVDPASGEELRPGSSSSAQCPSLCNVLKSGVLSRRVSPGYVPACRAEDGGFSPVQCDQAQGSCWCVMDSGEEVPGTRVTGGQPACESPRCPLPFNASEVVGGTILCETISGPTGSAMQQCQLLCRQGSWSVFPPGPLICSLESGRWESQLPQPRACQRPQLWQTIQTQGHFQLQLPPGKMCSADYADLLQTFQVFILDELTARGFCQIQVKTFGTLVSIPVCNNSSVQVGCLTRERLGVNVTWKSRLEDIPVASLPDLHDIERALVGKDLLGRFTDLIQSGSFQLHLDSKTFPAETIRFLQGDHFGTSPRTWFGCSEGFYQVLTSEASQDGLGCVKCPEGSYSQDEECIPCPVGFYQEQAGSLACVPCPVGRTTISAGAFSQTHCVTDCQRNEAGLQCDQNGQYRASQKDRGSGKAFCVDGEGRRLPWWETEAPLEDSQCLMMQKFEKVPESKVIFDANAPVAVRSKVPDSEFPVMQCLTDCTEDEACSFFTVSTTEPEISCDFYAWTSDNVACMTSDQKRDALGNSKATSFGSLRCQVKVRSHGQDSPAVYLKKGQGSTTTLQKRFEPTGFQNMLSGLYNPIVFSASGANLTDAHLFCLLACDRDLCCDGFVLTQVQGGAIICGLLSSPSVLLCNVKDWMDPSEAWANATCPGVTYDQESHQVILRLGDQEFIKSLTPLEGTQDTFTNFQQVYLWKDSDMGSRPESMGCRKDTVPRPASPTEAGLTTELFSPVDLNQVIVNGNQSLSSQKHWLFKHLFSAQQANLWCLSRCVQEHSFCQLAEITESASLYFTCTLYPEAQVCDDIMESNAQGCRLILPQMPKALFRKKVILEDKVKNFYTRLPFQKLMGISIRNKVPMSEKSISNGFFECERRCDADPCCTGFGFLNVSQLKGGEVTCLTLNSLGIQMCSEENGGAWRILDCGSPDIEVHTYPFGWYQKPIAQNNAPSFCPLVVLPSLTEKVSLDSWQSLALSSVVVDPSIRHFDVAHVSTAATSNFSAVRDLCLSECSQHEACLITTLQTQPGAVRCMFYADTQSCTHSLQGQNCRLLLREEATHIYRKPGISLLSYEASVPSVPISTHGRLLGRSQAIQVGTSWKQVDQFLGVPYAAPPLAERRFQAPEPLNWTGSWDASKPRASCWQPGTRTSTSPGVSEDCLYLNVFIPQNVAPNASVLVFFHNTMDREESEGWPAIDGSFLAAVGNLIVVTASYRVGVFGFLSSGSGEVSGNWGLLDQVAALTWVQTHIRGFGGDPRRVSLAADRGGADVASIHLLTARATNSQLFRRAVLMGGSALSPAAVISHERAQQQAIALAKEVSCPMSSSQEVVSCLRQKPANVLNDAQTKLLAVSGPFHYWGPVIDGHFLREPPARALKRSLWVEVDLLIGSSQDDGLINRAKAVKQFEESRGRTSSKTAFYQALQNSLGGEDSDARVEAAATWYYSLEHSTDDYASFSRALENATRDYFIICPIIDMASAWAKRARGNVFMYHAPENYGHGSLELLADVQFALGLPFYPAYEGQFSLEEKSLSLKIMQYFSHFIRSGNPNYPYEFSRKVPTFATPWPDFVPRAGGENYKEFSELLPNRQGLKKADCSFWSKYISSLKTSADGAKGGQSAESEEEELTAGSGLREDLLSLQEPGSKTYSK

SEQ ID NO: 88746 - protein, 59 aa, Homo sapiens
  Payload ID: 17769
  Gene Name: thyroglobulin
  ENSP ID: ENSP00000427871
MALVLEIFTLLASICWVSANIFEYQVDAQPLRPCELQRETAFLKQADYVPQCAEDGSFQ

SEQ ID NO: 88747 - protein, 147 aa, Homo sapiens
  Payload ID: 17769
  Gene Name: thyroglobulin
  ENSP ID: ENSP00000428628
  MOD_RES (1)..(1): Any amino acid
XSAGASALLRSGPYMPQCDAFGSWEPVQCHAGTGHCWCVDEKGGFIPGSLTARSLQIPQCPTTCEKSRTSGLLSSWKQARSQENPSPKDLFVPACLEARGVRCHSTRRRWLVEQSCVRQSRAPQALPCSSANCCAARAPGACFHQGH

SEQ ID NO: 88748 - protein, 62 aa, Homo sapiens
  Payload ID: 17769
  Gene Name: thyroglobulin
  ENSP ID: ENSP00000429164
  MOD_RES (1)..(1): Any amino acid
XSDMGSRPESMGCRKDTVPRPASPTEAGCVQEHSFCQLAEITESASLYFTCTLYPEAQVCDD

SEQ ID NO: 88749 - protein, 226 aa, Homo sapiens
  Payload ID: 17769
  Gene Name: thyroglobulin
  ENSP ID: ENSP00000429605
  MOD_RES (1)..(1): Any amino acid
XGSWEPVQCHAGTGHCWCVDEKGGFIPGSLTARSLQIPQCPTTCEKSRTSGLLSSWKQARSQENPSPKDLFVPACLETGEYARLQASGAGTWCVDPASGEELRPGSSSSAQSCRAEDGGFSPVQCDQAQGSCWCVMDSGEEVPGTRVTGGQPACESPRCPLPFNASEVVGGTILCETISGPTGSAMQQCQLLCRQGSWSVFPPGPLICSLESGRWESQLPQPRACQ

SEQ ID NO: 88750 - protein, 194 aa, Homo sapiens
  Payload ID: 17769
  Gene Name: thyroglobulin
  ENSP ID: ENSP00000429761
  MOD_RES (1)..(1): Any amino acid
XHSECQWREHSLRPLPFLTPFSSLSQQESLCSAMRHLYLLCPFPPMAGCWAGPRPSRASCWQPGTRTSTSPGVSEDCLYLNVFIPQNVAPNASVLVFFHNTMDREESEGWPAIDGSFLAAVGNLIVVTASYRVGVFGFLSSGSGEVSGNWGLLDQVAALTWVQTHIRGFGGDPRRVSLAADRGGADVASIHLLT

SEQ ID NO: 88751 - protein, 74 aa, Homo sapiens
  Payload ID: 17769
  Gene Name: thyroglobulin
  ENSP ID: ENSP00000430087
  MOD_RES (1)..(1): Any amino acid
XGIQMCSEENGGAWRILDCGSPDIEVHTYPFGWYQKPIAQNNAPSFCPLVVLPSLTEKVFKVREVRGTQLKRME

SEQ ID NO: 88752 - protein, 172 aa, Homo sapiens
  Payload ID: 17769
  Gene Name: thyroglobulin
  ENSP ID: ENSP00000430161
SDARVEAAATWYYSLEHSTDDYASFSRALENATRDYFIICPIIDMASAWAKRARGNVFMYHAPENYGHGRNPNYPYEFSRKVPTFATPWPDFVPRAGGENYKEFSELLPNRQGLKKADCSFWSKYISSLKTSADGAKGGQSAESEEEELTAGSGLREDLLSLQEPGSKTYSK

SEQ ID NO: 88753 - protein, 901 aa, Homo sapiens
  Payload ID: 17769
  Gene Name: thyroglobulin
  ENSP ID: ENSP00000430430
MLPGLTTELFSPVDLNQVIVNGNQSLSSQKHWLFKHLFSAQQANLWCLSRCVQEHSFCQLAEITESASLYFTCTLYPEAQVCDDIMESNAQGCRLILPQMPKALFRKKVILEDKVKNFYTRLPFQKLMGISIRNKVPMSEKSISNGFFECERRCDADPCCTGFGFLNVSQLKGGEVTCLTLNSLGIQMCSEENGGAWRILDCGSPDIEVHTYPFGWYQKPMSLDSWQSLALSSVVVDPSIRHFDVAHVSTAATSNFSAVRDLCLSECSQHEACLITTLQTQPGAVRCMFYADTQSCTHSLQGQNCRLLLREEATHIYRKPGISLLSYEASVPSVPISTHGRLLGRSQAIQVGTSWKQVDQFLGVPYAAPPLAERRFQAPEPLNWTGSWDASKPRASCWQPGTRTSTSPGVSEDCLYLNVFIPQNVAPNASVLVFFHNTMDREESEGWPAIDGSFLAAVGNLIVVTASYRVGVFGFLSSGSGEVSGNWGLLDQVAALTWVQTHIRGFGGDPRRVSLAADRGGADVASIHLLTARATNSQLFRRAVLMGGSALSPAAVISHERAQQQAIALAKEVSCPMSSSQEVVSCLRQKPANVLNDAQTKLLAVSGPFHYWGPVIDGHFLREPPARALKRSLWVEVDLLIGSSQDDGLINRAKAVKQFEESRGRTSSKTAFYQALQNSLGGEDSDARVEAAATWYYSLEHSTDDYASFSRALENATRDYFIICPIIDMASAWAKRARGNVFMYHAPENYGHGSLELLADVQFALGLPFYPAYEGQFSLEEKSLSLKIMQYFSHFIRSGNPNYPYEFSRKVPTFATPWPDFVPRAGGENYKEFSELLPNRQGLKKADCSFWSKYISSLKTSADGAKGGQSAESEEEELTAGSGLREDLLSLQEPGSKTYSK

SEQ ID NO: 88754 - protein, 1224 aa, Homo sapiens
  Payload ID: 17769
  Gene Name: thyroglobulin
  ENSP ID: ENSP00000430523
  MOD_RES (1)..(1): Any amino acid
XQEQAGSLACVPCPVGRTTISAGAFSQTHCVTDCQRNEAGLQCDQNGQYRASQKDRGSGKAFCVDGEGRRLPWWETEAPLEDSQCLMMQKFEKVPESKVIFDANAPVAVRSKVPDSEFPVMQCLTDCTEDEACSFFTVSTTEPEISCDFYAWTSDNVACMTSDQKRDALGNSKATSFGSLRCQVKVRSHGQDSPAVYLKKGAIICGLLSSPSVLLCNVKDWMDPSEAWANATCPGVTYDQESHQVILRLGDQEFIKSLTPLEGTQDTFTNFQQVYLWKDSDMGSRPESMGCRKDTVPRPASPTEAGLTTELFSPVDLNQVIVNGNQSLSSQKHWLFKHLFSAQQANLWCLSRCVQEHSFCQLAEITESASLYFTCTLYPEAQVCDDIMESNAQGCRLILPQMPKALFRKKVILEDKVKNFYTRLPFQKLMGISIRNKVPMSEKSISNGFFECERRCDADPCCTGFGFLNVSQLKGGEVTCLTLNSLGIQMCSEENGGAWRILDCGSPDIEVHTYPFGWYQKPIAQNNAPSFCPLVVLPSLTEKVSLDSWQSLALSSVVVDPSIRHFDVAHVSTAATSNFSAVRDLCLSECSQHEACLITTLQTQPGAVRCMFYADTQSCTHSLQGQNCRLLLREEATHIYRKPGISLLSYEASVPSVPISTHGRLLGRSQAIQVGTSWKQVDQFLGVPYAAPPLAERRFQAPEPLNWTGSWDASKPRASCWQPGTRTSTSPGVSEDCLYLNVFIPQNVAPNASVLVFFHNTMDREESEGWPAIDGSFLAAVGNLIVVTASYRVGVFGFLSSGSGEVSGNWGLLDQVAALTWVQTHIRGFGGDPRRVSLAADRGGADVASIHLLTARATNSQLFRRAVLMGGSALSPAAVISHERAQQQAIALAKEVSCPMSSSQEVVSCLRQKPANVLNDAQTKLLAVSGPFHYWGPVIDGHFLREPPARALKRSLWVEVDLLIGSSQDDGLINRAKAVKQFEESRGRTSSKTAFYQALQNSLGGEDSDARVEAAATWYYSLEHSTDDYASFSRALENATRDYFIICPIIDMASAWAKRARGNVFMYHAPENYGHGSLELLADVQFALGLPFYPAYEGQFSLEEKSLSLKIMQYFSHFIRSGNPNYPYEFSRKVPTFATPWPDFVPRAGGENYKEFSELLPNRQGLKKADCSFWSKYISSLKTSADGAKGGQSAESEEEELTAGSGLREDLLSLQEPGSKTYSK

SEQ ID NO: 88755 - protein, 297 aa, Homo sapiens
  Payload ID: 17770
  Gene Name: thyroid adenoma associated
  ENSP ID: ENSP00000381647
MGVKKKKEMQVAALTICHQDLETLKSFADVEGKNLASLLLHCVQLTDGVSQIHYIKQIVPLLEKADKNGMCDPTIQSCLDILAGIYLSLSLKNPLKKVLASSLNSLPDFFLPEAMHRFTSRLQEELNTTDLYSYRKVTDNISSCMENFNLGRASVNNLLKNVLHFLQKSLIEILEENRKCAGNHIIQTQLMNDLLVGIRVSMMLVQKVQDFQGNLWKTSDSPIWQNMCGLLSIFTKVLSDDDLLQTVQSTSGLAIILFIKTMFHPSEKIPHLCAASFSGLHQCPRVVYEQLQEPLLW

SEQ ID NO: 88756 - protein, 297 aa, Homo sapiens; identical to SEQ ID NO: 88755
  Payload ID: 17770
  Gene Name: thyroid adenoma associated
  ENSP ID: ENSP00000384172

SEQ ID NO: 88757 - protein, 894 aa, Homo sapiens
  Payload ID: 17770
  Gene Name: thyroid adenoma associated
  Uniprot ID: Q6YHU6
  ENSP ID: ENSP00000384266
MGVKKKKEMQVAALTICHQDLETLKSFADVEGKNLASLLLHCVQLTDGVSQIHYIKQIVPLLEKADKNGMCDPTIQSCLDILAGIYLSLSLKNPLKKVLASSLNSLPDFFLPEAMHRFTSRLQEELNTTDLYSYRKVTDNISSCMENFNLGRASVNNLLKNVLHFLQKSLIEILEENRKCAGNHIIQTQLMNDLLVGIRVSMMLVQKVQDFQGNLWKTSDSPIWQNMCGLLSIFTKVLSDDDLLQTVQSTSGLAIILFIKTMFHPSEKIPHLISSVLLRSVDCTSVPEWFMSSCRSLCCGDISQSAVLFLCQGTLAMLDWQNGSMGRSGEALLLDTAHVLFTLSSQIKEPTLEMFLSRILASWTNSAIQVLESSSPSLTDSLNGNSSIVGRLLEYVYTHWEHPLDALRHQTKIMFKNLLQMHRLTVEGADFVPDPFFVELTESLLRLEWHIKGKYTCLGCLVECIGVEHILAIDKTIPSQILEVMGDQSLVPYASDLLETMFRNHKSHLKSQTAESSWIDQWHETWVSPLLFILCEGNLDQKSYVIDYYLPKLLSYSPESLQYMVKILQTSIDAKTGQEQSFPSLGSCNSRGALGALMACLRIARAHGHLQSATDTWENLVSDARIKQGLIHQHCQVRIDTLGLLCESNRSTEIVSMEEMQWIQFFITYNLNSQSPGVRQQICSLLKKLFCRIQESSQVLYKLEQSKSKREPENELTKQHPSVSLQQYKNFMSSICNSLFEALFPGSSYSTRFSALTILGSIAEVFHVPEGRIYTVYQLSHDIDVGRFQTLMECFTSTFEDVKILAFDLLMKLSKTAVHFQDSGKLQGLFQAALELSTSTKPYDCVTASYLLNFLIWQDALPSSLSAYLTQQVACDNGDRPAAVVERNTLMGLY

SEQ ID NO: 88758 - protein, 408 aa, Homo sapiens
  Payload ID: 17770
  Gene Name: thyroid adenoma associated
  ENSP ID: ENSP00000385003
LLQMHRLTVEGADFVPDPFFVELTESLLRLEWHIKGKYTCLGCLVECIGVEHILAIDKTIPSQILEVMGDQSLVPYASDLLETMFRNHKSHLKSQTAESSWIDQWHETWVSPLLFILCEGNLDQKSYVIDYYLPKLLSYSPESLQYMVKILQTSIDAKTGQEQSFPSLGSCNSRGALGALMACLRIARAHGHLQSATDTWENLVSDARIKQGLIHQHCQVRIDTLGLLCESNRSTEIVSMEEMQWIQFFITYNLNSQSPGVRQQICSLLKKLFCRIQESSQVLYKLEQSKSKREPENELTKQHPSVSLQQYKNFMSSICNSLFEALFPGSSYSTRFSALTILGSIAEVFHVPEGRIYTVYQLSHDIDVGRFQTLMECFTSTFEDVKILAFDLLMKLSKTAVHFQLSNA

SEQ ID NO: 88759 - protein, 937 aa, Homo sapiens
  Payload ID: 17770
  Gene Name: thyroid adenoma associated
  Uniprot ID: Q6YHU6
  ENSP ID: ENSP00000385441
MGVKKKKEMQVAALTICHQDLETLKSFADVEGKNLASLLLHCVQLTDGVSQIHYIKQIVPLLEKADKNGMCDPTIQSCLDILAGIYLSLSLKNPLKKVLASSLNSLPDFFLPEAMHRFTSRLQEELNTTDLYSYRKVTDNISSCMENFNLGRASVNNLLKNVLHFLQKSLIEILEENRKCAGNHIIQTQLMNDLLVGIRVSMMLVQKVQDFQGNLWKTSDSPIWQNMCGLLSIFTKVLSDDDLLQTVQSTSGLAIILFIKTMFHPSEKIPHLISSVLLRSVDCTSVPEWFMSSCRSLCCGDISQSAVLFLCQGTLAMLDWQNGSMGRSGEALLLDTAHVLFTLSSQIKEPTLEMFLSRILASWTNSAIQVLESSSPSLTDSLNGNSSIVGRLLEYVYTHWEHPLDALRHQTKIMFKNLLQMHRLTVEGADFVPDPFFVELTESLLRLEWHIKGKYTCLGCLVECIGVEHILAIDKTIPSQILEVMGDQSLVPYASDLLETMFRNHKSHLKSQTAESSWIDQWHETWVSPLLFILCEGNLDQKSYVIDYYLPKLLSYSPESLQYMVKILQTSIDAKTGQEQSFPSLGSCNSRGALGALMACLRIARAHGHLQSATDTWENLVSDARIKQGLIHQHCQVRIDTLGLLCESNRSTEIVSMEEMQWIQFFITYNLNSQSPGVRQQICSLLKKLFCRIQESSQVLYKLEQSKSKREPENELTKQHPSVSLQQYKNFMSSICNSLFEALFPGSSYSTRFSALTILGSIAEVFHVPEGRIYTVYQLSHDIDVGRFQTLMECFTSTFEDVKILAFDLLMKLSKTAVHFQDSGKLQGLFQAALELSTSTKPYDCVTASYLLNFLIWQDALPSSLSAYLTQQVACDNGDRPAAVVERNTLMVIKCLMENLEEEVSQAENSLLQAAAAFPMYGRVHCITGALQKLSLK

SEQ ID NO: 88760 - protein, 870 aa, Homo sapiens
  Payload ID: 17770
  Gene Name: thyroid adenoma associated
  ENSP ID: ENSP00000385469
MGVKKKKEMQVAALTICHQDLETLKSFADVEGKNLASLLLHCVQLTDGVSQIHYIKQIVPLLEKADKNGMCDPTIQSCLDILAGIYLSLSLKNPLKKVLASSLNSLPDFFLPEAMHRFTSRLQEELNTTDLYSYRKVTDNISSCMENFNLGRASVNNLLKNVLHFLQKSLIEILEENRKCAGNHIIQTQLMNDLLVGIRVSMMLVQKVQDFQGNLWKTSDSPIWQNMCGLLSIFTKVLSDDDLLQTVQSTSGLAIILFIKTMFHPSEKIPHLISSVLLRSVDCTSVPEWFMSSCRSLCCGDISQSAVLFLCQGTLAMLDWQNGSMGRSGEALLLDTAHVLFTLSSQIKEPTLEMFLSRILASWTNSAIQVLESSSPSLTDSLNGNSSIVGRLLEYVYTHWEHPLDALRHQTKIMFKNLLQMHRLTVEGADFVPDPFFVELTESLLRLEWHIKGKYTCLGCLVECIGVEHILAIDKTIPSQILEVMGDQSLVPYASDLLETMFRNHKSHLKSQTAESSWIDQWHETWVSPLLFILCEGNLDQKSYVIDYYLPKLLSYSPESLQYMVKILQTSIDAKTGQEQSFPSLGSCNSRGALGALMACLRIARAHGHLQSATDTWENLVSDARIKQGLIHQHCQVRIDTLGLLCESNRSTEIVSMEEMQWIQFFITYNLNSQSPGVRQQICSLLKKLFCRIQESSQVLYKLEQSKSKREPENELTKQHPSVSLQQYKNFMSSICNSLFEALFPGSSYSTRFSALTILGSIAEVFHVPEGKCLIMLGEVIFVFFQNILILHFALFEVSVLLPFFEVSFLPYNSCLYIMKFASKGQKRKKLSPFSLIIICQPQSIIFMDYAYYGKSSSYYLTNLFVAVLR

SEQ ID NO: 88761 - protein, 1953 aa, Homo sapiens
  Payload ID: 17770
  Gene Name: thyroid adenoma associated
  Uniprot ID: Q6YHU6
  ENSP ID: ENSP00000385995
MGVKKKKEMQVAALTICHQDLETLKSFADVEGKNLASLLLHCVQLTDGVSQIHYIKQIVPLLEKADKNGMCDPTIQSCLDILAGIYLSLSLKNPLKKVLASSLNSLPDFFLPEAMHRFTSRLQEELNTTDLYSYRKVTDNISSCMENFNLGRASVNNLLKNVLHFLQKSLIEILEENRKCAGNHIIQTQLMNDLLVGIRVSMMLVQKVQDFQGNLWKTSDSPIWQNMCGLLSIFTKVLSDDDLLQTVQSTSGLAIILFIKTMFHPSEKIPHLISSVLLRSVDCTSVPEWFMSSCRSLCCGDISQSAVLFLCQGTLAMLDWQNGSMGRSGEALLLDTAHVLFTLSSQIKEPTLEMFLSRILASWTNSAIQVLESSSPSLTDSLNGNSSIVGRLLEYVYTHWEHPLDALRHQTKIMFKNLLQMHRLTVEGADFVPDPFFVELTESLLRLEWHIKGKYTCLGCLVECIGVEHILAIDKTIPSQILEVMGDQSLVPYASDLLETMFRNHKSHLKSQTAESSWIDQWHETWVSPLLFILCEGNLDQKSYVIDYYLPKLLSYSPESLQYMVKILQTSIDAKTGQEQSFPSLGSCNSRGALGALMACLRIARAHGHLQSATDTWENLVSDARIKQGLIHQHCQVRIDTLGLLCESNRSTEIVSMEEMQWIQFFITYNLNSQSPGVRQQICSLLKKLFCRIQESSQVLYKLEQSKSKREPENELTKQHPSVSLQQYKNFMSSICNSLFEALFPGSSYSTRFSALTILGSIAEVFHVPEGRIYTVYQLSHDIDVGRFQTLMECFTSTFEDVKILAFDLLMKLSKTAVHFQDSGKLQGLFQAALELSTSTKPYDCVTASYLLNFLIWQDALPSSLSAYLTQQVACDNGDRPAAVVERNTLMVIKCLMENLEEEVSQAENSLLQAAAAFPMYGRVHCITGALQKLSLNSLQLVSEWRPVVEKLLLMSYRLSTVVSPVIQSSSPEGLIPMDTDSESASRLQMILNEIQPRDTNDYFNQAKILKEHDSFDMKDLNASVVNIDTSTEIKGKEVKTCDVTAQMVLVCCWRSMKEVALLLGMLCQLLPMQPVPESSDGLLTVEQVKEIGDYFKQHLLQSRHRGAFELAYTGFVKLTEVLNRCPNVSLQKLPEQWLWSVLEEIKCSDPSSKLCATRRSAGIPFYIQALLASEPKKGRMDLLKITMKELISLAGPTDDIQSTVPQVHALNILRALFRDTRLGENIIPYVADGAKAAILGFTSPVWAVRNSSTLLFSALITRIFGVKRAKDEHSKTNRMTGREFFSRFPELYPFLLKQLETVANTVDSDMGEPNRHPSMFLLLLVLERLYASPMDGTSSALSMGPFVPFIMRCGHSPVYHSREMAARALVPFVMIDHIPNTIRTLLSTLPSCTDQCFRQNHIHGTLLQVFHLLQAYSDSKHGTNSDFQHELTDITVCTKAKLWLAKRQNPCLVTRAVYIDILFLLTCCLNRSAKDNQPVLESLGFWEEVRGIISGSELITGFPWAFKVPGLPQYLQSLTRLAIAAVWAAAAKSGERETNVPISFSQLLESAFPEVRSLTLEALLEKFLAAASGLGEKGVPPLLCNMGEKFLLLAMKENHPECFCKILKILHCMDPGEWLPQTEHCVHLTPKEFLIWTMDIASNERSEIQSVALRLASKVISHHMQTCVENRELIAAELKQWVQLVILSCEDHLPTESRLAVVEVLTSTTPLFLTNPHPILELQDTLALWKCVLTLLQSEEQAVRDAATETVTTAMSQENTCQSTEFAFCQVDASIALALALAVLCDLLQQWDQLAPGLPILLGWLLGESDDLVACVESMHQVEEDYLFEKAEVNFWAETLIFVKYLCKHLFCLLSKSGWRPPSPEMLCHLQRMVSEQCHLLSQFFRELPPAAEFVKTVEFTRLRIQEERTLACLRLLAFLEGKEGEDTLVLSVWDSYAESRQLTLPRTEAAC

SEQ ID NO: 88762 - protein, 1953 aa, Homo sapiens; identical to SEQ ID NO: 88761
  Payload ID: 17770
  Gene Name: thyroid adenoma associated
  Uniprot ID: Q6YHU6
  ENSP ID: ENSP00000386088

SEQ ID NO: 88763 - protein, 1193 aa, Homo sapiens
  Payload ID: 17770
  Gene Name: thyroid adenoma associated
  ENSP ID: ENSP00000386112
  MOD_RES (1)..(1): Any amino acid
XKLFCRIQESSQVLYKLEQSKSKREPENELTKQHPSVSLQQYKNFMSSICNSLFEALFPGSSYSTRFSALTILGSIAEVFHVPEGRIYTVYQLSHDIDVGRFQTLMECFTSTFEDVKILAFDLLMKLSKTAVHFQDSGKLQGLFQAALELSTSTKPYDCVTASYLLNFLIWQDALPSSLSAYLTQQVACDNGDRPAAVVERNTLMVIKCLMENLEEEVSQAENSLLQAAAAFPMYGRVHCITGALQKLSLNSLQLVSEWRPVVEKLLLMSYRLSTVVSPVIQSSSPEGLIPMDTDSESASRLQMILNEIQPRDTNDYFNQAKILKEHDSFDMKDLNASVVNIDTSTEIKGKEVKTCDVTAQMVLVCCWRSMKEVALLLGMLCQLLPMQPVPESSDGLLTVEQVKEIGDYFKQHLLQSRHRGAFELAYTGFVKLTEVLNRCPNVSLQKLPEQWLWSVLEEIKCSDPSSKLCATRRSAGIPFYIQALLASEPKKGRMDLLKITMKELISLAGPTDDIQSTVPQVHALNILRALFRDTRLGENIIPYVADGAKAAILGFTSPVWAVRNSSTLLFSALITRIFGVKRAKDEHSKTNRCGHSPVYHSREMAARALVPFVMIDHIPNTIRTLLSTLPSCTDQCFRQNHIHGTLLQVFHLLQAYSDSKHGTNSDFQHELTDITVCTKAKLWLAKRQNPCLVTRAVYIDILFLLTCCLNRSAKDNQPVLESLGFWEEVRGIISGSELITGFPWAFKVPGLPQYLQSLTRLAIAAVWAAAAKSGERETNVPISFSQLLESAFPEVRSLTLEALLEKFLAAASGLGEKGVPPLLCNMGEKFLLLAMKENHPECFCKILKILHCMDPGEWLPQTEHCVHLTPKEFLIWTMDIASNERSEIQSVALRLASKVISHHMQTCVENRELIAAELKQWVQLVILSCEDHLPTESRLAVVEVLTSTTPLFLTNPHPILELQDTLALWKCVLTLLQSEEQAVRDAATETVTTAMSQENTCQSTEFAFCQVDASIALALALAVLCDLLQQWDQLAPGLPILLGWLLGESDDLVACVESMHQVEEDYLFEKAEVNFWAETLIFVKYLCKHLFCLLSKSGWRPPSPEMLCHLQRMVSEQCHLLSQFFRELPPAAEFVKTVEFTRLRIQEERTLACLRLLAFLEGKEGEDTLVLSVWDSYAESRQLTLPRTEAAC

SEQ ID NO: 88764 - protein, 348 aa, Homo sapiens
  Payload ID: 17770
  Gene Name: thyroid adenoma associated
  ENSP ID: ENSP00000445294
MGVKKKKEMQVAALTICHQDLETLKSFADVEGKNLASLLLHCVQLTDGVSQIHYIKQIVPLLEKADKNGMCDPTIQSCLDILAGIYLSLSLKNPLKKVLASSLNSLPDFFLPEAMHRFTSRLQEELNTTDLYSYRKVTDNISSCMENFNLGRASVNNLLKNVLHFLQKSLIEILEENRKCAGNHIIQTQLMNDLLVGIRVSMMLVQKVQDFQGNLWKTSDSPIWQNMCGLLSIFTKVLSDDDLLQTVQSTSGLAIILFIKTMFHPSEKIPHLISSVLLRSVDCTSVPEWFMSSCRSLCCGDISQSAVLFLCQGTLAMLDWQNGSMGRSGEALLLDTAHVLFTLSSQVL

SEQ ID NO: 88765 - protein, 955 aa, Homo sapiens
  Payload ID: 17771
  Gene Name: thyroid hormone receptor associated protein 3
  Uniprot ID: Q9Y2W1
  ENSP ID: ENSP00000346634
MSKTNKSKSGSRSSRSRSASRSRSRSFSKSRSRSRSLSRSRKRRLSSRSRSRSYSPAHNRERNHPRVYQNRDFRGHNRGYRRPYYFRGRNRGFYPWGQYNRGGYGNYRSNWQNYRQAYSPRRGRSRSRSPKRRSPSPRSRSHSRNSDKSSSDRSRRSSSSRSSSNHSRVESSKRKSAKEKKSSSKDSRPSQAAGDNQGDEAKEQTFSGGTSQDTKASESSKPWPDATYGTGSASRASAVSELSPRERSPALKSPLQSVVVRRRSPRPSPVPKPSPPLSSTSQMGSTLPSGAGYQSGTHQGQFDHGSGSLSPSKKSPVGKSPPSTGSTYGSSQKEESAASGGAAYTKRYLEEQKTENGKDKEQKQTNTDKEKIKEKGSFSDTGLGDGKMKSDSFAPKTDSEKPFRGSQSPKRYKLRDDFEKKMADFHKEEMDDQDKDKAKGRKESEFDDEPKFMSKVIGANKNQEEEKSGKWEGLVYAPPGKEKQRKTEELEEESFPERSKKEDRGKRSEGGHRGFVPEKNFRVTAYKAVQEKSSSPPPRKTSESRDKLGAKGDFPTGKSSFSITREAQVNVRMDSFDEDLARPSGLLAQERKLCRDLVHSNKKEQEFRSIFQHIQSAQSQRSPSELFAQHIVTIVHHVKEHHFGSSGMTLHERFTKYLKRGTEQEAAKNKKSPEIHRRIDISPSTFRKHGLAHDEMKSPREPGYKAEGKYKDDPVDLRLDIERRKKHKERDLKRGKSRESVDSRDSSHSRERSAEKTEKTHKGSKKQKKHRRARDRSRSSSSSSQSSHSYKAEEYTEETEEREESTTGFDKSRLGTKDFVGPSERGGGRARGTFQFRARGRGWGRGNYSGNNNNNSNNDFQKRNREEEWDPEYTPKSKKYYLHDDREGEGSDKWVSRGRGRGAFPRGRGRFMFRKSSTSPKWAHDKFSGEEGEIEDDESGTENREEKDNIQPTTE

SEQ ID NO: 88766 - protein, 40 aa, Homo sapiens
  Payload ID: 17771
  Gene Name: thyroid hormone receptor associated protein 3
  ENSP ID: ENSP00000433066
MSKTNKSKSGSRSSRSRSASRSRSRSFSKSRSRSRSLSRS

SEQ ID NO: 88767 - protein, 955 aa, Homo sapiens; identical to SEQ ID NO: 88765
  Payload ID: 17771
  Gene Name: thyroid hormone receptor associated protein 3
  Uniprot ID: Q9Y2W1
  ENSP ID: ENSP00000433825

SEQ ID NO: 88768 - protein, 601 aa, Homo sapiens
  Payload ID: 17772
  Gene Name: thyroid hormone receptor interactor 10
  Uniprot ID: Q15642
  ENSP ID: ENSP00000320117
MDWGTELWDQFEVLERHTQWGLDLLDRYVKFVKERTEVEQAYAKQLRSLVKKYLPKRPAKDDPESKFSQQQSFVQILQEVNDFAGQRELVAENLSVRVCLELTKYSQEMKQERKMHFQEGRRAQQQLENGFKQLENSKRKFERDCREAEKAAQTAERLDQDINATKADVEKAKQQAHLRSHMAEESKNEYAAQLQRFNRDQAHFYFSQMPQIFDKLQDMDERRATRLGAGYGLLSEAELEVVPIIAKCLEGMKVAANAVDPKNDSHVLIELHKSGFARPGDVEFEDFSQPMNRAPSDSSLGTPSDGRPELRGPGRSRTKRWPFGKKNKPRPPPLSPLGGPVPSALPNGPPSPRSGRDPLAILSEISKSVKPRLASFRSLRGSRGTVVTEDFSHLPPEQQRKRLQQQLEERSRELQKEVDQREALKKMKDVYEKTPQMGDPASLEPQIAETLSNIERLKLEVQKYEAWLAEAESRVLSNRGDSLSRHARPPDPPASAPPDSSSNSASQDTKESSEEPPSEESQDTPIYTEFDEDFEEEPTSPIGHCVAIYHFEGSSEGTISMAEGEDLSLMEEDKGDGWTRVRRKEGGEGYVPTSYLRVTLN

SEQ ID NO: 88769 - protein, 545 aa, Homo sapiens
  Payload ID: 17772
  Gene Name: thyroid hormone receptor interactor 10
  Uniprot ID: Q15642
  ENSP ID: ENSP00000320493
MDWGTELWDQFEVLERHTQWGLDLLDRYVKFVKERTEVEQAYAKQLRSLVKKYLPKRPAKDDPESKFSQQQSFVQILQEVNDFAGQRELVAENLSVRVCLELTKYSQEMKQERKMHFQEGRRAQQQLENGFKQLENSKRKFERDCREAEKAAQTAERLDQDINATKADVEKAKQQAHLRSHMAEESKNEYAAQLQRFNRDQAHFYFSQMPQIFDKLQDMDERRATRLGAGYGLLSEAELEVVPIIAKCLEGMKVAANAVDPKNDSHVLIELHKSGFARPGDVEFEDFSQPMNRAPSDSSLGTPSDGRPELRGPGRSRTKRWPFGKKNKTVVTEDFSHLPPEQQRKRLQQQLEERSRELQKEVDQREALKKMKDVYEKTPQMGDPASLEPQIAETLSNIERLKLEVQKYEAWLAEAESRVLSNRGDSLSRHARPPDPPASAPPDSSSNSASQDTKESSEEPPSEESQDTPIYTEFDEDFEEEPTSPIGHCVAIYHFEGSSEGTISMAEGEDLSLMEEDKGDGWTRVRRKEGGEGYVPTSYLRVTLN

SEQ ID NO: 88770 - protein, 593 aa, Homo sapiens
  Payload ID: 17772
  Gene Name: thyroid hormone receptor interactor 10
  ENSP ID: ENSP00000469360
MDWGTELWDQFEVLERHTQWGLDLLDRYVKFVKERTEVEQAYAKQLRSLVKKYLPKRPAKDDPESKFSQQQSFVQILQEVNDFAGQRELVAENLSVRVCLELTKYSQEMKQERKMHFQEGRRAQQQLENGFKQLENSKRKFERDCREAEKAAQTAERLDQDINATKADVEKAKQQAHLRSHMAEESKNEYAAQLQRFNRDQAHFYFSQMPQIFDKLQDMDERRATRLGAGYGLLSEAELEVVPIIAKCLEGMKVAANAVDPKNDSHVLIELHKSGFARPGDVEFEDFSQPMNRAPSDSSLGTPSDGRPELRGPGRSRTKRWPFGKKNKTVVTEDFSHLPPEQQRKRLQQQLEERSRELQKEVDQREALKKMKDVYEKTPQMGDPASLEPQIAETLSNIERLKLEVQKYEAWLAEAESRVLSNRGDSLSRHARPPDPPASAPPDSSSNSASQDTKESSEEPPSEESQDTPIYTEFDEDFEEEPTSPIGHCVAIYHFEDLGPPPPPSQGPARALSLWPRVKTSVLWKKTKGTAGPGSGGKREARATCPPPTSESRSIEPCQRREEGGCRLLLLGHGEPQDLCTLFLTPWLRLRPV

SEQ ID NO: 88771 - protein, 83 aa, Homo sapiens
  Payload ID: 17772
  Gene Name: thyroid hormone receptor interactor 10
  ENSP ID: ENSP00000471056
MKQERKMHFQEGRRAQQQLENGFKQLENSKRKFERDCREAEKAAQTAERLDQDINATKADVEKAKQQAHLRSHMAEESKNEYA

SEQ ID NO: 88772 - protein, 437 aa, Homo sapiens
  Payload ID: 17772
  Gene Name: thyroid hormone receptor interactor 10
  ENSP ID: ENSP00000471203
MKQERKMHFQEGRRAQQQLENGFKQLENSKRKFERDCREAEKAAQTAERLDQDINATKADVEKAKQQAHLRSHMAEESKNEYAAQLQRFNRDQAHFYFSQMPQIFDKLQDMDERRATRLGAGYGLLSEAELEVVPIIAKCLEGMKVAANAVDPKNDSHVLIELHKSGFARPGDVEFEDFSQPMNRAPSDSSLGTPSDGRPELRGPGRSRTKRWPFGKKNKTVVTEDFSHLPPEQQRKRLQQQLEERSRELQKEVDQREALKKMKDVYEKTPQMGDPASLEPQIAETLSNIERLKLEVQKYEAWLAEAESRVLSNRGDSLSRHARPPDPPASAPPDSSSNSASQDTKESSEEPPSEESQDTPIYTEFDEDFEEEPTSPIGHCVAIYHFEGSSEGTISMAEGEDLSLMEEDKGDGWTRVRRKEGGEGYVPTSYLRVTLN

SEQ ID NO: 88773 - protein, 343 aa, Homo sapiens
  Payload ID: 17772
  Gene Name: thyroid hormone receptor interactor 10
  ENSP ID: ENSP00000472580
MDWGTELWDQFEVLERHTQWGLDLLDRYVKFVKERTEVEQAYAKQLRSLVKKYLPKRPAKDDPESKFSQQQSFVQILQEVNDFAGQRELVAENLSVRVCLELTKYSQEMKQERKMHFQEGRRAQQQLENGFKQLENSKRKFERDCREAEKAAQTAERLDQDINATKADVEKAKQQAHLRSHMAEESKNEYAAQLQRFNRDQAHFYFSQMPQIFDKLQDMDERRATRLGAGYGLLSEAELEVVPIIAKCLEGMKVAANAVDPKNDSHVLIELHKSGFARPGDVEFEDFSQPMNRAPSDSSLGTPSDGRPELRGPGRSRTKRWPFGKKNKPSRQPWALYPPCRQW

SEQ ID NO: 88774 - protein, 1979 aa, Homo sapiens
  Payload ID: 17773
  Gene Name: thyroid hormone receptor interactor 11
  Uniprot ID: Q15643
  ENSP ID: ENSP00000267622
MSSWLGGLGSGLGQSLGQVGGSLASLTGQISNFTKDMLMEGTEEVEAELPDSRTKEIEAIHAILRSENERLKKLCTDLEEKHEASEIQIKQQSTSYRNQLQQKEVEISHLKARQIALQDQLLKLQSAAQSVPSGAGVPATTASSSFAYGISHHPSAFHDDDMDFGDIISSQQEINRLSNEVSRLESEVGHWRHIAQTSKAQGTDNSDQSEICKLQNIIKELKQNRSQEIDDHQHEMSVLQNAHQQKLTEISRRHREELSDYEERIEELENLLQQGGSGVIETDLSKIYEMQKTIQVLQIEKVESTKKMEQLEDKIKDINKKLSSAENDRDILRREQEQLNVEKRQIMEECENLKLECSKLQPSAVKQSDTMTEKERILAQSASVEEVFRLQQALSDAENEIMRLSSLNQDNSLAEDNLKLKMRIEVLEKEKSLLSQEKEELQMSLLKLNNEYEVIKSTATRDISLDSELHDLRLNLEAKEQELNQSISEKETLIAEIEELDRQNQEATKHMILIKDQLSKQQNEGDSIISKLKQDLNDEKKRVHQLEDDKMDITKELDVQKEKLIQSEVALNDLHLTKQKLEDKVENLVDQLNKSQESNVSIQKENLELKEHIRQNEEELSRIRNELMQSLNQDSNSNFKDTLLKEREAEVRNLKQNLSELEQLNENLKKVAFDVKMENEKLVLACEDVRHQLEECLAGNNQLSLEKNTIVETLKMEKGEIEAELCWAKKRLLEEANKYEKTIEELSNARNLNTSALQLEHEHLIKLNQKKDMEIAELKKNIEQMDTDHKETKDVLSSSLEEQKQLTQLINKKEIFIEKLKERSSKLQEELDKYSQALRKNEILRQTIEEKDRSLGSMKEENNHLQEELERLREEQSRTAPVADPKTLDSVTELASEVSQLNTIKEHLEEEIKHHQKIIEDQNQSKMQLLQSLQEQKKEMDEFRYQHEQMNATHTQLFLEKDEEIKSLQKTIEQIKTQLHEERQDIQTDNSDIFQETKVQSLNIENGSEKHDLSKAETERLVKGIKERELEIKLLNEKNISLTKQIDQLSKDEVGKLTQIIQQKDLEIQALHARISSTSHTQDVVYLQQQLQAYAMEREKVFAVLNEKTRENSHLKTEYHKMMDIVAAKEAALIKLQDENKKLSTRFESSGQDMFRETIQNLSRIIREKDIEIDALSQKCQTLLAVLQTSSTGNEAGGVNSNQFEELLQERDKLKQQVKKMEEWKQQVMTTVQNMQHESAQLQEELHQLQAQVLVDSDNNSKLQVDYTGLIQSYEQNETKLKNFGQELAQVQHSIGQLCNTKDLLLGKLDIISPQLSSASLLTPQSAECLRASKSEVLSESSELLQQELEELRKSLQEKDATIRTLQENNHRLSDSIAATSELERKEHEQTDSEIKQLKEKQDVLQKLLKEKDLLIKAKSDQLLSSNENFTNKVNENELLRQAVTNLKERILILEMDIGKLKGENEKIVETYRGKETEYQALQETNMKFSMMLREKEFECHSMKEKALAFEQLLKEKEQGKTGELNQLLNAVKSMQEKTVVFQQERDQVMLALKQKQMENTALQNEVQRLRDKEFRSNQELERLRNHLLESEDSYTREALAAEDREAKLRKKVTVLEEKLVSSSNAMENASHQASVQVESLQEQLNVVSKQRDETALQLSVSQEQVKQYALSLANLQMVLEHFQQEEKAMYSAELEKQKQLIAEWKKNAENLEGKVISLQECLDEANAALDSASRLTEQLDVKEEQIEELKRQNELRQEMLDDVQKKLMSLANSSEGKVDKVLMRNLFIGHFHTPKNQRHEVLRLMGSILGVRREEMEQLFHDDQGGVTRWMTGWLGGGSKSVPNTPLRPNQQSVVNSSFSELFVKFLETESHPSIPPPKLSVHDMKPLDSPGRRKRDTNAPESFKDTAESRSGRRTDVNPFLAPRSAAVPLINPAGLGPGGPGHLLLKPISDVLPTFTPLPALPDNSAGVVLKDLLKQ

SEQ ID NO: 88775 - protein, 1695 aa, Homo sapiens
  Payload ID: 17773
  Gene Name: thyroid hormone receptor interactor 11
  ENSP ID: ENSP00000451032
  MOD_RES (1)..(1): Any amino acid
XELSDYEERIEELENLLQQGGSGVIETDLSKIYEMQKTIQVLQIEKVESTKKMEQLEDKIKDINKKLSSAENDRDILRREQEQLNVEKRQIMEECENLKLECSKLQPSAVKQSDTMTEKERILAQSASVEEVFRLQQALSDAENEIMRLSSLNQEELQMSLLKLNNEYEVIKSTATRDISLDSELHDLRLNLEAKEQELNQSISEKETLIAEIEELDRQNQEATKHMILIKDQLSKQQNEGDSIISKLKQDLNDEKKRVHQLEDDKMDITKELDVQKEKLIQSEVALNDLHLTKQKLEDKVENLVDQLNKSQESNVSIQKENLELKEHIRQNEEELSRIRNELMQSLNQDSNSNFKDTLLKEREAEVRNLKQNLSELEQLNENLKKVAFDVKMENEKLVLACEDVRHQLEECLAGNNQLSLEKNTIVETLKMEKGEIEAELCWAKKRLLEEANKYEKTIEELSNARNLNTSALQLEHEHLIKLNQKKDMEIAELKKNIEQMDTDHKETKDVLSSSLEEQKQLTQLINKKEIFIEKLKERSSKLQEELDKYSQALRKNEILRQTIEEKDRSLGSMKEENNHLQEELERLREEQSRTAPVADPKTLDSVTELASEVSQLNTIKEHLEEEIKHHQKIIEDQNQSKMQLLQSLQEQKKEMDEFRYQHEQMNATHTQLFLEKDEEIKSLQKTIEQIKTQLHEERQDIQTDNSDIFQETKVQSLNIENGSEKHDLSKAETERLVKGIKERELEIKLLNEKNISLTKQIDQLSKDEVGKLTQIIQQKDLEIQALHARISSTSHTQDVVYLQQQLQAYAMEREKVFAVLNEKTRENSHLKTEYHKMMDIVAAKEAALIKLQDENKKLSTRFESSGQDMFRETIQNLSRIIREKDIEIDALSQKCQTLLAVLQTSSTGNEAGGVNSNQFEELLQERDKLKQQVKKMEEWKQQVMTTVQNMQHESAQLQEELHQLQAQVLVDSDNNSKLQVDYTGLIQSYEQNETKLKNFGQELAQVQHSIGQLCNTKDLLLGKLDIISPQLSSASLLTPQSAECLRASKSEVLSESSELLQQELEELRKSLQEKDATIRTLQENNHRLSDSIAATSELERKEHEQTDSEIKQLKEKQDVLQKLLKEKDLLIKAKSDQLLSSNENFTNKVNENELLRQAVTNLKERILILEMDIGKLKGENEKIVETYRGKETEYQALQETNMKFSMMLREKEFECHSMKEKALAFEQLLKEKEQGKTGELNQLLNAVKSMQEKTVVFQQERDQVMLALKQKQMENTALQNEVQRLRDKEFRSNQELERLRNHLLESEDSYTREALAAEDREAKLRKKVTVLEEKLVSSSNAMENASHQASVQVESLQEQLNVVSKQRDETALQLSVSQEQVKQYALSLANLQMVLEHFQQEEKAMYSAELEKQKQLIAEWKKNAENLEGKVISLQECLDEANAALDSASRLTEQLDVKEEQIEELKRQNELRQEMLDDVQKKLMSLANSSEGKVDKVLMRNLFIGHFHTPKNQRHEVLRLMGSILGVRREEMEQLFHDDQGGVTRWMTGWLGGGSKSVPNTPLRPNQQSVVNSSFSELFVKFLETESHPSIPPPKLSVHDMKPLDSPGRRKRDTNAPESFKDTAESRSGRRTDVNPFLAPRSAAVPLINPAGLGPGGPGHLLLKPISDVLPTFTPLPALPDNSAGVVLKDLLKQ

SEQ ID NO: 88776 - protein, 176 aa, Homo sapiens
  Payload ID: 17773
  Gene Name: thyroid hormone receptor interactor 11
  ENSP ID: ENSP00000451607
RNHLLESEDSYTREALAAEDREAKLRKKVTVLEEKLVSSSNAMENASHQASVQVESLQEQLNVVSKQRDETALQLSVSQEQVKQYALSLANLQMVLEHFQQEEKAMYSAELEKQKQLIAEWKKNAENLEGKVISLQECLDEANAALDSASRLTEQLDVKEEQIEELKRQNIIKKVR

SEQ ID NO: 88777 - protein, 67 aa, Homo sapiens
  Payload ID: 17773
  Gene Name: thyroid hormone receptor interactor 11
  ENSP ID: ENSP00000451944
MDFGDIISSQQEINRLSNEVSRLESEVGHWRHIAQTSKAQGTDNSDQSEICKLQNIIKELKQNRSQE

SEQ ID NO: 88778 - protein, 1992 aa, Homo sapiens
  Payload ID: 17774
  Gene Name: thyroid hormone receptor interactor 12
  Uniprot ID: Q14669
  ENSP ID: ENSP00000283943
MSNRPNNNPGGSLRRSQRNTAGAQPQDDSIGGRSCSSSSAVIVPQPEDPDRANTSERQKTGQVPKKDNSRGVKRSASPDYNRTNSPSSAKKPKALQHTESPSETNKPHSKSKKRHLDQEQQLKSAQSPSTSKAHTRKSGATGGSRSQKRKRTESSCVKSGSGSESTGAEERSAKPTKLASKSATSAKAGCSTITDSSSAASTSSSSSAVASASSTVPPGARVKQGKDQNKARRSRSASSPSPRRSSREKEQSKTGGSSKFDWAARFSPKVSLPKTKLSLPGSSKSETSKPGPSGLQAKLASLRKSTKKRSESPPAELPSLRRSTRQKTTGSCASTSRRGSGLGKRGAAEARRQEKMADPESNQEAVNSSAARTDEAPQGAAGAVGMTTSGESESDDSEMGRLQALLEARGLPPHLFGPLGPRMSQLFHRTIGSGASSKAQQLLQGLQASDESQQLQAVIEMCQLLVMGNEETLGGFPVKSVVPALITLLQMEHNFDIMNHACRALTYMMEALPRSSAVVVDAIPVFLEKLQVIQCIDVAEQALTALEMLSRRHSKAILQAGGLADCLLYLEFFSINAQRNALAIAANCCQSITPDEFHFVADSLPLLTQRLTHQDKKSVESTCLCFARLVDNFQHEENLLQQVASKDLLTNVQQLLVVTPPILSSGMFIMVVRMFSLMCSNCPTLAVQLMKQNIAETLHFLLCGASNGSCQEQIDLVPRSPQELYELTSLICELMPCLPKEGIFAVDTMLKKGNAQNTDGAIWQWRDDRGLWHPYNRIDSRIIEQINEDTGTARAIQRKPNPLANSNTSGYSESKKDDARAQLMKEDPELAKSFIKTLFGVLYEVYSSSAGPAVRHKCLRAILRIIYFADAELLKDVLKNHAVSSHIASMLSSQDLKIVVGALQMAEILMQKLPDIFSVYFRREGVMHQVKHLAESESLLTSPPKACTNGSGSMGSTTSVSSGTATAATHAAADLGSPSLQHSRDDSLDLSPQGRLSDVLKRKRLPKRGPRRPKYSPPRDDDKVDNQAKSPTTTQSPKSSFLASLNPKTWGRLSTQSNSNNIEPARTAGGSGLARAASKDTISNNREKIKGWIKEQAHKFVERYFSSENMDGSNPALNVLQRLCAATEQLNLQVDGGAECLVEIRSIVSESDVSSFEIQHSGFVKQLLLYLTSKSEKDAVSREIRLKRFLHVFFSSPLPGEEPIGRVEPVGNAPLLALVHKMNNCLSQMEQFPVKVHDFPSGNGTGGSFSLNRGSQALKFFNTHQLKCQLQRHPDCANVKQWKGGPVKIDPLALVQAIERYLVVRGYGRVREDDEDSDDDGSDEEIDESLAAQFLNSGNVRHRLQFYIGEHLLPYNMTVYQAVRQFSIQAEDERESTDDESNPLGRAGIWTKTHTIWYKPVREDEESNKDCVGGKRGRAQTAPTKTSPRNAKKHDELWHDGVCPSVSNPLEVYLIPTPPENITFEDPSLDVILLLRVLHAISRYWYYLYDNAMCKEIIPTSEFINSKLTAKANRQLQDPLVIMTGNIPTWLTELGKTCPFFFPFDTRQMLFYVTAFDRDRAMQRLLDTNPEINQSDSQDSRVAPRLDRKKRTVNREELLKQAESVMQDLGSSRAMLEIQYENEVGTGLGPTLEFYALVSQELQRADLGLWRGEEVTLSNPKGSQEGTKYIQNLQGLFALPFGRTAKPAHIAKVKMKFRFLGKLMAKAIMDFRLVDLPLGLPFYKWMLRQETSLTSHDLFDIDPVVARSVYHLEDIVRQKKRLEQDKSQTKESLQYALETLTMNGCSVEDLGLDFTLPGFPNIELKKGGKDIPVTIHNLEEYLRLVIFWALNEGVSRQFDSFRDGFESVFPLSHLQYFYPEELDQLLCGSKADTWDAKTLMECCRPDHGYTHDSRAVKFLFEILSSFDNEQQRLFLQFVTGSPRLPVGGFRSLNPPLTIVRKTFESTENPDDFLPSVMTCVNYLKLPDYSSIEIMREKLLIAAREGQQSFHLS

SEQ ID NO: 88779 - protein, 99 aa, Homo sapiens
  Payload ID: 17774
  Gene Name: thyroid hormone receptor interactor 12
  ENSP ID: ENSP00000342442
MSNRPNNNPGGSLRRSQRNTAGAQPQDDSIGGRSCSSSSAVIVPQPEDPDRANTSERQKTGQVPKKDNSRGVKRSASPDYNRTNSPSSAKKPKALQHTE

SEQ ID NO: 88780 - protein, 2040 aa, Homo sapiens
  Payload ID: 17774
  Gene Name: thyroid hormone receptor interactor 12
  Uniprot ID: Q14669
  ENSP ID: ENSP00000373696
MSNRPNNNPGGSLRRSQRNTAGAQPQDDSIGGRSHLGQAKHKGYSPPESRKSNSKAPKVQSNTTSELSRGHLSKRSCSSSSAVIVPQPEDPDRANTSERQKTGQVPKKDNSRGVKRSASPDYNRTNSPSSAKKPKALQHTESPSETNKPHSKSKKRHLDQEQQLKSAQSPSTSKAHTRKSGATGGSRSQKRKRTESSCVKSGSGSESTGAEERSAKPTKLASKSATSAKAGCSTITDSSSAASTSSSSSAVASASSTVPPGARVKQGKDQNKARRSRSASSPSPRRSSREKEQSKTGGSSKFDWAARFSPKVSLPKTKLSLPGSSKSETSKPGPSGLQAKLASLRKSTKKRSESPPAELPSLRRSTRQKTTGSCASTSRRGSGLGKRGAAEARRQEKMADPESNQEAVNSSAARTDEAPQGAAASSSVAGAVGMTTSGESESDDSEMGRLQALLEARGLPPHLFGPLGPRMSQLFHRTIGSGASSKAQQLLQGLQASDESQQLQAVIEMCQLLVMGNEETLGGFPVKSVVPALITLLQMEHNFDIMNHACRALTYMMEALPRSSAVVVDAIPVFLEKLQVIQCIDVAEQALTALEMLSRRHSKAILQAGGLADCLLYLEFFSINAQRNALAIAANCCQSITPDEFHFVADSLPLLTQRLTHQDKKSVESTCLCFARLVDNFQHEENLLQQVASKDLLTNVQQLLVVTPPILSSGMFIMVVRMFSLMCSNCPTLAVQLMKQNIAETLHFLLCGASNGSCQEQIDLVPRSPQELYELTSLICELMPCLPKEGIFAVDTMLKKGNAQNTDGAIWQWRDDRGLWHPYNRIDSRIIEQINEDTGTARAIQRKPNPLANSNTSGYSESKKDDARAQLMKEDPELAKSFIKTLFGVLYEVYSSSAGPAVRHKCLRAILRIIYFADAELLKDVLKNHAVSSHIASMLSSQDLKIVVGALQMAEILMQKLPDIFSVYFRREGVMHQVKHLAESESLLTSPPKACTNGSGSMGSTTSVSSGTATAATHAAADLGSPSLQHSRDDSLDLSPQGRLSDVLKRKRLPKRGPRRPKYSPPRDDDKVDNQAKSPTTTQSPKSSFLASLNPKTWGRLSTQSNSNNIEPARTAGGSGLARAASKDTISNNREKIKGWIKEQAHKFVERYFSSENMDGSNPALNVLQRLCAATEQLNLQVDGGAECLVEIRSIVSESDVSSFEIQHSGFVKQLLLYLTSKSEKDAVSREIRLKRFLHVFFSSPLPGEEPIGRVEPVGNAPLLALVHKMNNCLSQMEQFPVKVHDFPSGNGTGGSFSLNRGSQALKFFNTHQLKCQLQRHPDCANVKQWKGGPVKIDPLALVQAIERYLVVRGYGRVREDDEDSDDDGSDEEIDESLAAQFLNSGNVRHRLQFYIGEHLLPYNMTVYQAVRQFSIQAEDERESTDDESNPLGRAGIWTKTHTIWYKPVREDEESNKDCVGGKRGRAQTAPTKTSPRNAKKHDELWHDGVCPSVSNPLEVYLIPTPPENITFEDPSLDVILLLRVLHAISRYWYYLYDNAMCKEIIPTSEFINSKLTAKANRQLQDPLVIMTGNIPTWLTELGKTCPFFFPFDTRQMLFYVTAFDRDRAMQRLLDTNPEINQSDSQDSRVAPRLDRKKRTVNREELLKQAESVMQDLGSSRAMLEIQYENEVGTGLGPTLEFYALVSQELQRADLGLWRGEEVTLSNPKGSQEGTKYIQNLQGLFALPFGRTAKPAHIAKVKMKFRFLGKLMAKAIMDFRLVDLPLGLPFYKWMLRQETSLTSHDLFDIDPVVARSVYHLEDIVRQKKRLEQDKSQTKESLQYALETLTMNGCSVEDLGLDFTLPGFPNIELKKGGKDIPVTIHNLEEYLRLVIFWALNEGVSRQFDSFRDGFESVFPLSHLQYFYPEELDQLLCGSKADTWDAKTLMECCRPDHGYTHDSRAVKFLFEILSSFDNEQQRLFLQFVTGSPRLPVGGFRSLNPPLTIVRKTFESTENPDDFLPSVMTCVNYLKLPDYSSIEIMREKLLIAAREGQQSFHLS

SEQ ID NO: 88781 - protein, 1722 aa, Homo sapiens
  Payload ID: 17774
  Gene Name: thyroid hormone receptor interactor 12
  Uniprot ID: Q14669
  ENSP ID: ENSP00000373697
MSNRPNNNPGGSLRRSQRNTAGAQPQDDSIGGSRRGSGLGKRGAAEARRQEKMADPESNQEAVNSSAARTDEAPQGAAASSSVAGAVGMTTSGESESDDSEMGRLQALLEARGLPPHLFGPLGPRMSQLFHRTIGSGASSKAQQLLQGLQASDESQQLQAVIEMCQLLVMGNEETLGGFPVKSVVPALITLLQMEHNFDIMNHACRALTYMMEALPRSSAVVVDAIPVFLEKLQVIQCIDVAEQALTALEMLSRRHSKAILQAGGLADCLLYLEFFSINAQRNALAIAANCCQSITPDEFHFVADSLPLLTQRLTHQDKKSVESTCLCFARLVDNFQHEENLLQQVASKDLLTNVQQLLVVTPPILSSGMFIMVVRMFSLMCSNCPTLAVQLMKQNIAETLHFLLCGASNGSCQEQIDLVPRSPQELYELTSLICELMPCLPKEGIFAVDTMLKKGNAQNTDGAIWQWRDDRGLWHPYNRIDSRIIEAAHQVGEDEISLSTLGRVYTIDFNSMQQINEDTGTARAIQRKPNPLANSNTSGYSESKKDDARAQLMKEDPELAKSFIKTLFGVLYEVYSSSAGPAVRHKCLRAILRIIYFADAELLKDVLKNHAVSSHIASMLSSQDLKIVVGALQMAEILMQKLPDIFSVYFRREGVMHQVKHLAESESLLTSPPKACTNGSGSMGSTTSVSSGTATAATHAAADLGSPSLQHSRDDSLDLSPQGRLSDVLKRKRLPKRGPRRPKYSPPRDDDKVDNQAKSPTTTQSPKSSFLASLNPKTWGRLSTQSNSNNIEPARTAGGSGLARAASKDTISNNREKIKGWIKEQAHKFVERYFSSENMDGSNPALNVLQRLCAATEQLNLQVDGGAECLVEIRSIVSESDVSSFEIQHSGFVKQLLLYLTSKSEKDAVSREIRLKRFLHVFFSSPLPGEEPIGRVEPVGNAPLLALVHKMNNCLSQMEQFPVKVHDFPSGNGTGGSFSLNRGSQALKFFNTHQLKCQLQRHPDCANVKQWKGGPVKIDPLALVQAIERYLVVRGYGRVREDDEDSDDDGSDEEIDESLAAQFLNSGNVRHRLQFYIGEHLLPYNMTVYQAVRQFSIQAEDERESTDDESNPLGRAGIWTKTHTIWYKPVREDEESNKDCVGGKRGRAQTAPTKTSPRNAKKHDELWHDGVCPSVSNPLEVYLIPTPPENITFEDPSLDVILLLRVLHAISRYWYYLYDNAMCKEIIPTSEFINSKLTAKANRQLQDPLVIMTGNIPTWLTELGKTCPFFFPFDTRQMLFYVTAFDRDRAMQRLLDTNPEINQSDSQDSRVAPRLDRKKRTVNREELLKQAESVMQDLGSSRAMLEIQYENEVGTGLGPTLEFYALVSQELQRADLGLWRGEEVTLSNPKGSQEGTKYIQNLQGLFALPFGRTAKPAHIAKVKMKFRFLGKLMAKAIMDFRLVDLPLGLPFYKWMLRQETSLTSHDLFDIDPVVARSVYHLEDIVRQKKRLEQDKSQTKESLQYALETLTMNGCSVEDLGLDFTLPGFPNIELKKGGKDIPVTIHNLEEYLRLVIFWALNEGVSRQFDSFRDGFESVFPLSHLQYFYPEELDQLLCGSKADTWDAKTLMECCRPDHGYTHDSRAVKFLFEILSSFDNEQQRLFLQFVTGSPRLPVGGFRSLNPPLTIVRKTFESTENPDDFLPSVMTCVNYLKLPDYSSIEIMREKLLIAAREGQQSFHLS

SEQ ID NO: 88782 - protein, 430 aa, Homo sapiens
  Payload ID: 17774
  Gene Name: thyroid hormone receptor interactor 12
  ENSP ID: ENSP00000386388
MSNRPNNNPGGSLRRSQRNTAGAQPQDDSIGGRSHLGQAKHKGYSPPESRKSNSKAPKVQSNTTSELSRGHLSKRSCSSSSAVIVPQPEDPDRANTSERQKTGQVPKKDNSRGVKRSASPDYNRTNSPSSAKKPKALQHTESPSETNKPHSKSKKRHLDQEQQLKSAQSPSTSKAHTRKSGATGGSRSQKRKRTESSCVKSGSGSESTGAEERSAKPTKLASKSATSAKAGCSTITDSSSAASTSSSSSAVASASSTVPPGARVKQGKDQNKARRSRSASSPSPRRSSREKEQSKTGGSSKFDWAARFSPKVSLPKTKLSLPGSSKSETSKPGPSGLQAKLASLRKSTKKRSESPPAELPSLRRSTRQKTTGSCASTSRRGSGLGKRGAAEARRQEKMADPESNQEAVNSSAARTDEAPQGAAEEGFRTS

SEQ ID NO: 88783 - protein, 190 aa, Homo sapiens
  Payload ID: 17774
  Gene Name: thyroid hormone receptor interactor 12
  ENSP ID: ENSP00000389827
MSNRPNNNPGGSLRRSQRNTAGAQPQDDSIGGRSHLGQAKHKGYSPPESRKSNSKAPKVQSNTTSELSRGHLSKRSCSSSSAVIVPQPEDPDRANTSERQKTGQVPKKDNSRGVKRSASPDYNRTNSPSSAKKPKALQHTESPSETNKPHSKSKKRHLDQEQQLKSAQSPSTSKAHTRKSGATGGSRSQK

SEQ ID NO: 88784 - protein, 217 aa, Homo sapiens
  Payload ID: 17774
  Gene Name: thyroid hormone receptor interactor 12
  ENSP ID: ENSP00000400967
SKAHTRKSGATGGSRSQKRKRTESSCVKSGSGSESTGAEERSAKPTKLASKSATSAKAGCSTITDSSSAASTSSSSSAVASASSTVPPGARVKQGKDQNKARRSRSASSPSPRRSSREKEQRSSKSETSKPGPSGLQAKLASLRKSTKKRSESPPAELPSLRRSTRQKTTGSCASTSRRGSGLGKRGAAEARRQEKMADPESNQEAVNSSAARTDEA

SEQ ID NO: 88785 - protein, 187 aa, Homo sapiens
  Payload ID: 17774
  Gene Name: thyroid hormone receptor interactor 12
  ENSP ID: ENSP00000408330
LMAKAIMDFRLVDLPLGLPFYKWMLRQETSLTSHDLFDIDPVVARSVYHLEDIVRQKKRLEQDKSQTKESLQYALETLTMNGCSVEDLGLDFTLPGFPNIELKKGGKDIPVTIHNLEEYLRLDQLLCGSKADTWDAKTLMECCRPDHGYTHDSRAVKFLFEILSSFDNEQQRLFLQFVTGSPRLPVG

SEQ ID NO: 88786 - protein, 154 aa, Homo sapiens
  Payload ID: 17774
  Gene Name: thyroid hormone receptor interactor 12
  ENSP ID: ENSP00000409460
MSNRPNNNPGGSLRRSQRNTAGAQPQDDSIGGRSCSSSSAVIVPQPEDPDRANTSERQKTGQVPKKDNSRGVKRSASPDYNRTNSPSSAKKPKALQHTESPSETNKPHSKSKKRHLDQEQQLKSAQSPSTSKAHTRKSGATGGSRSQKRKRTES

SEQ ID NO: 88787 - protein, 149 aa, Homo sapiens
  Payload ID: 17774
  Gene Name: thyroid hormone receptor interactor 12
  ENSP ID: ENSP00000414385
MSNRPNNNPGGSLRRSQRNTAGAQPQDDSIGGRSCSSSSAVIVPQPEDPDRANTSERQKTGQVPKKDNSRGVKRSASPDYNRTNSPSSAKKPKALQHTESPSETNKPHSKSKKRHLDQEQQLKSAQSPSTSKAHTRKSGATGGSRSQKR

SEQ ID NO: 88788 - protein, 432 aa, Homo sapiens
  Payload ID: 17775
  Gene Name: thyroid hormone receptor interactor 13
  Uniprot ID: Q15645
  ENSP ID: ENSP00000166345
MDEAVGDLKQALPCVAESPTVHVEVHQRGSSTAKKEDINLSVRKLLNRHNIVFGDYTWTEFDEPFLTRNVQSVSIIDTELKVKDSQPIDLSACTVALHIFQLNEDGPSSENLEEETENIIAANHWVLPAAEFHGLWDSLVYDVEVKSHLLDYVMTTLLFSDKNVNSNLITWNRVVLLHGPPGTGKTSLCKALAQKLTIRLSSRYRYGQLIEINSHSLFSKWFSESGKLVTKMFQKIQDLIDDKDALVFVLIDEVESLTAARNACRAGTEPSDAIRVVNAVLTQIDQIKRHSNVVILTTSNITEKIDVAFVDRADIKQYIGPPSAAAIFKIYLSCLEELMKCQIIYPRQQLLTLRELEMIGFIENNVSKLSLLLNDISRKSEGLSGRVLRKLPFLAHALYVQAPTVTIEGFLQALSLAVDKQFEERKKLAAYI

SEQ ID NO: 88789 - protein, 249 aa, Homo sapiens
  Payload ID: 17775
  Gene Name: thyroid hormone receptor interactor 13
  ENSP ID: ENSP00000427528
  MOD_RES (1)..(1): Any amino acid
XGVGGTQRRGQTFTDPPYVHGGWIEVSTAKKEDINLSVRKLLNRHNIVFGDYTWTEFDEPFLTRNVQSVSIIDTELKVKDSQPIDLSACTVALHIFQLNEDGPSSENLEEETENIIAANHWVLPAAEFHGLWDSLVYDVEVKSHLLDYVMTTLLFSDKNVNSNLITWNRVVLLHGPPGTGKTSLCKALAQKLTIRLSSRYRYGQLIEINSHSLFSKWFSESGKLVTKMFQKIQDLIDDKDALVFVLIDE

SEQ ID NO: 88790 - protein, 581 aa, Homo sapiens
  Payload ID: 17776
  Gene Name: thyroid hormone receptor interactor 4
  Uniprot ID: Q15650
  ENSP ID: ENSP00000261884
MAVAGAVSGEPLVHWCTQQLRKTFGLDVSEEIIQYVLSIESAEEIREYVTDLLQGNEGKKGQFIEELITKWQKNDQELISDPLQQCFKKDEILDGQKSGDHLKRGRKKGRNRQEVPAFTEPDTTAEVKTPFDLAKAQENSNSVKKKTKFVNLYTREGQDRLAVLLPGRHPCDCLGQKHKLINNCLICGRIVCEQEGSGPCLFCGTLVCTHEEQDILQRDSNKSQKLLKKLMSGVENSGKVDISTKDLLPHQELRIKSGLEKAIKHKDKLLEFDRTSIRRTQVIDDESDYFASDSNQWLSKLERETLQKREEELRELRHASRLSKKVTIDFAGRKILEEENSLAEYHSRLDETIQAIANGTLNQPLTKLDRSSEEPLGVLVNPNMYQSPPQWVDHTGAASQKKAFRSSGFGLEFNSFQHQLRIQDQEFQEGFDGGWCLSVHQPWASLLVRGIKRVEGRSWYTPHRGRLWIAATAKKPSPQEVSELQATYRLLRGKDVEFPNDYPSGCLLGCVDLIDCLSQKQFKEQFPDISQESDSPFVFICKNPQEMVVKFPIKGNPKIWKLDSKIHQGAKKGLMKQNKAV

SEQ ID NO: 88791 - protein, 43 aa, Homo sapiens
  Payload ID: 17776
  Gene Name: thyroid hormone receptor interactor 4
  ENSP ID: ENSP00000452675
MAVAGAVSGEPLVHWCTQQLRKTFGLDVSEEIIQEMKAKKVNS

SEQ ID NO: 88792 - protein, 111 aa, Homo sapiens
  Payload ID: 17776
  Gene Name: thyroid hormone receptor interactor 4
  ENSP ID: ENSP00000452764
  MOD_RES (1)..(1): Any amino acid
XSELQATYRLLRGKDVEFPNDYPSGCLLGCVDLIDCLSQKQFKEQFPDISQESDSPFVFICKNPQEMVVKFPIKGNPKICSLEDERTSEFLGISWKSLFLLYLVSPISFPF

SEQ ID NO: 88793 - protein, 368 aa, Homo sapiens
  Payload ID: 17776
  Gene Name: thyroid hormone receptor interactor 4
  ENSP ID: ENSP00000453106
MAVAGAVSGEPLVHWCTQQLRKTFGLDVSEEIIQYVLSIESAEEIREYVTDLLQGNEGKKGQFIEELITKWQKNDQELISDPLQQCFKKDEILDGQKSGDHLKRGRKKGRNRQEVPAFTEPDTTAEVKTPFDLAKAQENSNSVKKKTKFVNLYTREGQDRLAVLLPGRHPCDCLGQKHKLINNCLICGRIVCEQEGSGPCLFCGTLVCTHEEQDILQRDSNKSQKLLKKLMSGVENSGKVDISTKDLLPHQELRIKSGLEKAIKHKDKLLEFDRTSIRRTQVIDDESDYFASDSNQWLSKLERETLQKREEELRELRHASRLSKKVTIDFAGRKILEEENSLAEYHSSGLTTQVQPHRRRLSVLQDLD

SEQ ID NO: 88794 - protein, 126 aa, Homo sapiens
  Payload ID: 17776
  Gene Name: thyroid hormone receptor interactor 4
  ENSP ID: ENSP00000453276
MAVAGAVSGEPLVHWCTQQLRKTFGLDVSEEIIQYVLSIESAEEIREYVTDLLQGNEGKKGQFIEELITKWQKNDQELISDPLQQCFKKDGTREQQLRKEEDKVCQFIHKRGTGQACSPAPWSSPL

SEQ ID NO: 88795 - protein, 61 aa, Homo sapiens
  Payload ID: 17776
  Gene Name: thyroid hormone receptor interactor 4
  ENSP ID: ENSP00000454558
  MOD_RES (1)..(1): Any amino acid
XELRELRHASRLSKKVTIDFAGRKILEEENSLAEYHSSFQTSVKSLILHLFSSAKILRKWL

SEQ ID NO: 88796 - protein, 476 aa, Homo sapiens
  Payload ID: 17777
  Gene Name: thyroid hormone receptor interactor 6
  Uniprot ID: Q15654
  ENSP ID: ENSP00000200457
MSGPTWLPPKQPEPARAPQGRAIPRGTPGPPPAHGAALQPHPRVNFCPLPSEQCYQAPGGPEDRGPAWVGSHGVLQHTQGLPADRGGLRPGSLDAEIDLLSSTLAELNGGRGHASRRPDRQAYEPPPPPAYRTGSLKPNPASPLPASPYGGPTPASYTTASTPAGPAFPVQVKVAQPVRGCGPPRRGASQASGPLPGPHFPLPGRGEVWGPGYRSQREPGPGAKEEAAGVSGPAGRGRGGEHGPQVPLSQPPEDELDRLTKKLVHDMNHPPSGEYFGQCGGCGEDVVGDGAGVVALDRVFHVGCFVCSTCRAQLRGQHFYAVERRAYCEGCYVATLEKCATCSQPILDRILRAMGKAYHPGCFTCVVCHRGLDGIPFTVDATSQIHCIEDFHRKFAPRCSVCGGAIMPEPGQEETVRIVALDRSFHIGCYKCEECGLLLSSEGECQGCYPLDGHILCKACSAWRIQELSATVTTDC

SEQ ID NO: 88797 - protein, 215 aa, Homo sapiens
  Payload ID: 17777
  Gene Name: thyroid hormone receptor interactor 6
  ENSP ID: ENSP00000389194
  MOD_RES (1)..(1): Any amino acid
XAGVSGPAGRGRGGEHGPQVPLSQPPEDELDRLTKKLVHDMNHPPSGEYFGQCGGCGEDVVGDGAGVVALDRVFHVGCFVCSTCRAQLRGQHFYAVERRAYCEGCYVSRSVAQTGVQWGDLCSLQPQPALVQAILMPQAPEQLGLQATLEKCATCSQPILDRILRAMGKAYHPGCFTCVVCHRGLDGIPFTVDATSQIHCIEDFHRKFAPRCSVC

SEQ ID NO: 88798 - protein, 80 aa, Homo sapiens
  Payload ID: 17777
  Gene Name: thyroid hormone receptor interactor 6
  Uniprot ID: Q15654
  ENSP ID: ENSP00000410736
MSGPTWLPPKQPEPARAPQGRAIPRGTPGPPPAHGAGAPCRQGGPSPWKPGRRDRLAEQHAGRAEWGSGSCVTATRPTGI

SEQ ID NO: 88799 - protein, 106 aa, Homo sapiens
  Payload ID: 17777
  Gene Name: thyroid hormone receptor interactor 6
  Uniprot ID: Q15654
  ENSP ID: ENSP00000413817
MSGPTWLPPKQPEPARAPQGRAIPRGTPGPPPAHGAVLPGPRGTGGSGAGVGGVPWSTPAHAGAPCRQGGPSPWKPGRRDRLAEQHAGRAEWGSGSCVTATRPTGI

SEQ ID NO: 88800 - protein, 80 aa, Homo sapiens; identical to SEQ ID NO: 88798
  Payload ID: 17777
  Gene Name: thyroid hormone receptor interactor 6
  Uniprot ID: Q15654
  ENSP ID: ENSP00000479865

SEQ ID NO: 88801 - protein, 339 aa, Homo sapiens
  Payload ID: 17777
  Gene Name: thyroid hormone receptor interactor 6
  ENSP ID: ENSP00000486847
MSGPTWLPPKQPEDRGPAWVGSHGVLQHTQGLPADRGGLRPGSLDAEIDLLSSTLAELNGGRGHASRRPDRQAYEPPPPPAYRTGSLKPNPASPLPASPYGGPTPASYTTASTPAGPAFPVQVKVAQPVRGCGPPRRGASQASGPLPGPHFPLPGRGEVWGPGYRSQREPGPGAKEEAAGVSGPAGRGRGGEHGPQVPLSQPPEDELDRLTKKLVHDMNHPPSGEYFGQCGGCGEDVVGDGAGVVALDRVFHVGCFVCSTCRAQLRGQHFYAVERRAYCEGCYVVSGWGWEEGVSGWMQGASIQGGNSVQDQRRNGAKSQATESDVQTGRNSASIKQVA

SEQ ID NO: 88802 - protein, 490 aa, Homo sapiens
  Payload ID: 17778
  Gene Name: thyroid hormone receptor, alpha
  Uniprot ID: P10827
  ENSP ID: ENSP00000264637
MEQKPSKVECGSDPEENSARSPDGKRKRKNGQCSLKTSMSGYIPSYLDKDEQCVVCGDKATGYHYRCITCEGCKGFFRRTIQKNLHPTYSCKYDSCCVIDKITRNQCQLCRFKKCIAVGMAMDLVLDDSKRVAKRKLIEQNRERRRKEEMIRSLQQRPEPTPEEWDLIHIATEAHRSTNAQGSHWKQRRKFLPDDIGQSPIVSMPDGDKVDLEAFSEFTKIITPAITRVVDFAKKLPMFSELPCEDQIILLKGCCMEIMSLRAAVRYDPESDTLTLSGEMAVKREQLKNGGLGVVSDAIFELGKSLSAFNLDDTEVALLQAVLLMSTDRSGLLCVDKIEKSQEAYLLAFEHYVNHRKHNIPHFWPKLLMKEREVQSSILYKGAAAEGRPGGSLGVHPEGQQLLGMHVVQGPQVRQLEQQLGEAGSLQGPVLQHQSPKSPQQRLLELLHRSGILHARAVCGEDDSSEADSPSSSEEEPEVCEDLAGNAASP

SEQ ID NO: 88803 - protein, 490 aa, Homo sapiens; identical to SEQ ID NO: 88802
  Payload ID: 17778
  Gene Name: thyroid hormone receptor, alpha
  Uniprot ID: P10827
  ENSP ID: ENSP00000377679

SEQ ID NO: 88804 - protein, 410 aa, Homo sapiens
  Payload ID: 17778
  Gene Name: thyroid hormone receptor, alpha
  Uniprot ID: P10827
  ENSP ID: ENSP00000395641
MEQKPSKVECGSDPEENSARSPDGKRKRKNGQCSLKTSMSGYIPSYLDKDEQCVVCGDKATGYHYRCITCEGCKGFFRRTIQKNLHPTYSCKYDSCCVIDKITRNQCQLCRFKKCIAVGMAMDLVLDDSKRVAKRKLIEQNRERRRKEEMIRSLQQRPEPTPEEWDLIHIATEAHRSTNAQGSHWKQRRKFLPDDIGQSPIVSMPDGDKVDLEAFSEFTKIITPAITRVVDFAKKLPMFSELPCEDQIILLKGCCMEIMSLRAAVRYDPESDTLTLSGEMAVKREQLKNGGLGVVSDAIFELGKSLSAFNLDDTEVALLQAVLLMSTDRSGLLCVDKIEKSQEAYLLAFEHYVNHRKHNIPHFWPKLLMKVTDLRMIGACHASRFLHMKVECPTELFPPLFLEVFEDQEV

SEQ ID NO: 88805 - protein, 410 aa, Homo sapiens; identical to SEQ ID NO: 88804
  Payload ID: 17778
  Gene Name: thyroid hormone receptor, alpha
  Uniprot ID: P10827
  ENSP ID: ENSP00000443972

SEQ ID NO: 88806 - protein, 72 aa, Homo sapiens
  Payload ID: 17778
  Gene Name: thyroid hormone receptor, alpha
  ENSP ID: ENSP00000462955
MEQKPSKVECGSDPEENSARSPDGKRKRKNGQCSLKTSMSGYIPSYLDKDEQCVVCGDKATGYHYRCITCEG

SEQ ID NO: 88807 - protein, 451 aa, Homo sapiens
  Payload ID: 17778
  Gene Name: thyroid hormone receptor, alpha
  Uniprot ID: P10827
  ENSP ID: ENSP00000463466
MEQKPSKVECGSDPEENSARSPDGKRKRKNGQCSLKTSMSGYIPSYLDKDEQCVVCGDKATGYHYRCITCEGCKGFFRRTIQKNLHPTYSCKYDSCCVIDKITRNQCQLCRFKKCIAVGMAMDLVLDDSKRVAKRKLIEQNRERRRKEEMIRSLQQRPEPTPEEWDLIHIATEAHRSTNAQGSHWKQRRKFLPDDIGQSPIVSMPDGDKVDLEAFSEFTKIITPAITRVVDFAKKLPMFSELPCEDQIILLKGCCMEIMSLRAAVRYDPESDTLTLSGEMAVKREQLKNGGLGVVSDAIFELGKSLSAFNLDDTEVALLQAVLLMSTDRSGLLCVDKIEKSQEAYLLAFEHYVNHRKHNIPHFWPKLLMKGPQVRQLEQQLGEAGSLQGPVLQHQSPKSPQQRLLELLHRSGILHARAVCGEDDSSEADSPSSSEEEPEVCEDLAGNAASP

SEQ ID NO: 88808 - protein, 31 aa, Homo sapiens
  Payload ID: 17778
  Gene Name: thyroid hormone receptor, alpha
  ENSP ID: ENSP00000464013
MEQKPSKVECGSDPEENSARSPDGKRKRKNG

SEQ ID NO: 88809 - protein, 84 aa, Homo sapiens
  Payload ID: 17778
  Gene Name: thyroid hormone receptor, alpha
  ENSP ID: ENSP00000464123
MEQKPSKVECGSDPEENSARSPDGKRKRKNGQCSLKTSMSGYIPSYLDKDEQCVVCGDKATGYHYRCITCEGCKGFFRRTIQKN

SEQ ID NO: 88810 - protein, 57 aa, Homo sapiens
  Payload ID: 17778
  Gene Name: thyroid hormone receptor, alpha
  ENSP ID: ENSP00000464414
MEQKPSKVECGSDPEENSARSPDGKRKRKNGQCSLKTSMSGYIPSYLDKDEQCVVCG

SEQ ID NO: 88811 - protein, 476 aa, Homo sapiens
  Payload ID: 17779
  Gene Name: thyroid hormone receptor, beta
  Uniprot ID: P10828
  ENSP ID: ENSP00000280696
MNYCMQEIYEVHPAAGSNCYMQSTDYYAYFEDSPGYSGCDAQAVPSNNIYMEQAWAVNQPYTCSYPGNMFKSKDSDLDMALNQYSQPEYFTEEKPTFSQVQSPSYSQKKGYIPSYLDKDELCVVCGDKATGYHYRCITCEGCKGFFRRTIQKNLHPSYSCKYEGKCVIDKVTRNQCQECRFKKCIYVGMATDLVLDDSKRLAKRKLIEENREKRRREELQKSIGHKPEPTDEEWELIKTVTEAHVATNAQGSHWKQKRKFLPEDIGQAPIVNAPEGGKVDLEAFSHFTKIITPAITRVVDFAKKLPMFCELPCEDQIILLKGCCMEIMSLRAAVRYDPESETLTLNGEMAVTRGQLKNGGLGVVSDAIFDLGMSLSSFNLDDTEVALLQAVLLMSSDRPGLACVERIEKYQDSFLLAFEHYINYRKHHVTHFWPKLLMKVTDLRMIGACHASRFLHMKVECPTELFPPLFLEVFED

SEQ ID NO: 88812 - protein, 461 aa, Homo sapiens
  Payload ID: 17779
  Gene Name: thyroid hormone receptor, beta
  Uniprot ID: P10828
  ENSP ID: ENSP00000348827
MTPNSMTENGLTAWDKPKHCPDREHDWKLVGMSEACLHRKSHSERRSTLKNEQSSPHLIQTTWTSSIFHLDHDDVNDQSVSSAQTFQTEEKKCKGYIPSYLDKDELCVVCGDKATGYHYRCITCEGCKGFFRRTIQKNLHPSYSCKYEGKCVIDKVTRNQCQECRFKKCIYVGMATDLVLDDSKRLAKRKLIEENREKRRREELQKSIGHKPEPTDEEWELIKTVTEAHVATNAQGSHWKQKRKFLPEDIGQAPIVNAPEGGKVDLEAFSHFTKIITPAITRVVDFAKKLPMFCELPCEDQIILLKGCCMEIMSLRAAVRYDPESETLTLNGEMAVTRGQLKNGGLGVVSDAIFDLGMSLSSFNLDDTEVALLQAVLLMSSDRPGLACVERIEKYQDSFLLAFEHYINYRKHHVTHFWPKLLMKVTDLRMIGACHASRFLHMKVECPTELFPPLFLEVFED

SEQ ID NO: 88813 - protein, 461 aa, Homo sapiens; identical to SEQ ID NO: 88812
  Payload ID: 17779
  Gene Name: thyroid hormone receptor, beta
  Uniprot ID: P10828
  ENSP ID: ENSP00000379904

SEQ ID NO: 88814 - protein, 122 aa, Homo sapiens
  Payload ID: 17779
  Gene Name: thyroid hormone receptor, beta
  ENSP ID: ENSP00000388467
MTPNSMTENGLTAWDKPKHCPDREHDWKLVGMSEACLHRKSHSERRSTLKNEQSSPHLIQTTWTSSIFHLDHDDVNDQSVSSAQTFQTEEKKCKGYIPSYLDKDELCVVCGDKATGYHYRCI

SEQ ID NO: 88815 - protein, 63 aa, Homo sapiens
  Payload ID: 17779
  Gene Name: thyroid hormone receptor, beta
  ENSP ID: ENSP00000393932
MTPNSMTENGLTAWDKPKHCPDREHDWKLVGMSEACLHRKSHSERRSTLKNEQSSPHLIQTTW

SEQ ID NO: 88816 - protein, 114 aa, Homo sapiens
  Payload ID: 17779
  Gene Name: thyroid hormone receptor, beta
  ENSP ID: ENSP00000395362
MTPNSMTENGLTAWDKPKHCPDREHDWKLVGMSEACLHRKSHSERRSTLKNEQSSPHLIQTTWTSSIFHLDHDDVNDQSVSSAQTFQTEEKKCKGYIPSYLDKDELCVVCGDKA

SEQ ID NO: 88817 - protein, 103 aa, Homo sapiens
  Payload ID: 17779
  Gene Name: thyroid hormone receptor, beta
  ENSP ID: ENSP00000399573
MTPNSMTENGLTAWDKPKHCPDREHDWKLVGMSEACLHRKSHSERRSTLKNEQSSPHLIQTTWTSSIFHLDHDDVNDQSVSSAQTFQTEEKKCKGYIPSYLDK

SEQ ID NO: 88818 - protein, 67 aa, Homo sapiens
  Payload ID: 17779
  Gene Name: thyroid hormone receptor, beta
  ENSP ID: ENSP00000404233
MTPNSMTENGLTAWDKPKHCPDREHDWKLVGMSEACLHRKSHSERRSTLKNEQSSPHLIQTTWTSSI

SEQ ID NO: 88819 - protein, 122 aa, Homo sapiens; identical to SEQ ID NO: 88814
  Payload ID: 17779
  Gene Name: thyroid hormone receptor, beta
  ENSP ID: ENSP00000404898

SEQ ID NO: 88820 - protein, 132 aa, Homo sapiens
  Payload ID: 17779
  Gene Name: thyroid hormone receptor, beta
  ENSP ID: ENSP00000414100
MSEACLHRKSHSERRSTLKNEQSSPHLIQTTWTSSIFHLDHDDVNDQSVSSAQTFQTEEKKCKGYIPSYLDKDELCVVCGDKATGYHYRCITCEGCKGFFRRTIQKNLHPSYSCKYEGKCVIDKVTRNQCQE

SEQ ID NO: 88821 - protein, 461 aa, Homo sapiens; identical to SEQ ID NO: 88812
  Payload ID: 17779
  Gene Name: thyroid hormone receptor, beta
  Uniprot ID: P10828
  ENSP ID: ENSP00000414444

SEQ ID NO: 88822 - protein, 121 aa, Homo sapiens
  Payload ID: 17779
  Gene Name: thyroid hormone receptor, beta
  ENSP ID: ENSP00000414910
MTPNSMTENGLTAWDKPKHCPDREHDWKLVGMSEACLHRKSHSERRSTLKNEQSSPHLIQTTWTSSIFHLDHDDVNDQSVSSAQTFQTEEKKCKGYIPSYLDKDELCVVCGDKATGYHYRC

SEQ ID NO: 88823 - protein, 146 aa, Homo sapiens
  Payload ID: 17780
  Gene Name: thyroid hormone responsive
  Uniprot ID: Q92748
  ENSP ID: ENSP00000281030
MQVLTKRYPKNCLLTVMDRYAAEVHNMEQVVMIPSLLRDVQLSGPGGQAQAEAPDLYTYFTMLKAICVDVDHGLLPREEWQAKVAGSEENGTAETEEVEDESASGELDLEAQFHLHFSSLHHILMHLTEKAQEVTRKYQEMTGQVW

SEQ ID NO: 88824 - protein, 889 aa, Homo sapiens
  Payload ID: 17781
  Gene Name: thyroid peroxidase
  Uniprot ID: P07202
  ENSP ID: ENSP00000263886
MRALAVLSVTLVMACTEAFFPFISRGKELLWGKPEESRVSSVLEESKRLVDTAMYATMQRNLKKRGILSPAQLLSFSKLPEPTSGVIARAAEIMETSIQAMKRKVNLKTQQSQHPTDALSEDLLSIIANMSGCLPYMLPPKCPNTCLANKYRPITGACNNRDHPRWGASNTALARWLPPVYEDGFSQPRGWNPGFLYNGFPLPPVREVTRHVIQVSNEVVTDDDRYSDLLMAWGQYIDHDIAFTPQSTSKAAFGGGADCQMTCENQNPCFPIQLPEEARPAAGTACLPFYRSSAACGTGDQGALFGNLSTANPRQQMNGLTSFLDASTVYGSSPALERQLRNWTSAEGLLRVHARLRDSGRAYLPFVPPRAPAACAPEPGIPGETRGPCFLAGDGRASEVPSLTALHTLWLREHNRLAAALKALNAHWSADAVYQEARKVVGALHQIITLRDYIPRILGPEAFQQYVGPYEGYDSTANPTVSNVFSTAAFRFGHATIHPLVRRLDASFQEHPDLPGLWLHQAFFSPWTLLRGGGLDPLIRGLLARPAKLQVQDQLMNEELTERLFVLSNSSTLDLASINLQRGRDHGLPGYNEWREFCGLPRLETPADLSTAIASRSVADKILDLYKHPDNIDVWLGGLAENFLPRARTGPLFACLIGKQMKALRDGDWFWWENSHVFTDAQRRELEKHSLSRVICDNTGLTRVPMDAFQVGKFPEDFESCDSITGMNLEAWRETFPQDDKCGFPESVENGDFVHCEESGRRVLVYSCRHGYELQGREQLTCTQEGWDFQPPLCKDSGRLPRVTWISMSLAALLIGGFAGLTSTVICRWTRTGTKSTLPISETGGGTPELRCGKHQAVGTSPQRAAAQDSEQESAGMEGRDTHRLPRAL

SEQ ID NO: 88825 - protein, 933 aa, Homo sapiens
  Payload ID: 17781
  Gene Name: thyroid peroxidase
  Uniprot ID: P07202
  ENSP ID: ENSP00000318820
MRALAVLSVTLVMACTEAFFPFISRGKELLWGKPEESRVSSVLEESKRLVDTAMYATMQRNLKKRGILSPAQLLSFSKLPEPTSGVIARAAEIMETSIQAMKRKVNLKTQQSQHPTDALSEDLLSIIANMSGCLPYMLPPKCPNTCLANKYRPITGACNNRDHPRWGASNTALARWLPPVYEDGFSQPRGWNPGFLYNGFPLPPVREVTRHVIQVSNEVVTDDDRYSDLLMAWGQYIDHDIAFTPQSTSKAAFGGGADCQMTCENQNPCFPIQLPEEARPAAGTACLPFYRSSAACGTGDQGALFGNLSTANPRQQMNGLTSFLDASTVYGSSPALERQLRNWTSAEGLLRVHARLRDSGRAYLPFVPPRAPAACAPEPGIPGETRGPCFLAGDGRASEVPSLTALHTLWLREHNRLAAALKALNAHWSADAVYQEARKVVGALHQIITLRDYIPRILGPEAFQQYVGPYEGYDSTANPTVSNVFSTAAFRFGHATIHPLVRRLDASFQEHPDLPGLWLHQAFFSPWTLLRGGGLDPLIRGLLARPAKLQVQDQLMNEELTERLFVLSNSSTLDLASINLQRGRDHGLPGYNEWREFCGLPRLETPADLSTAIASRSVADKILDLYKHPDNIDVWLGGLAENFLPRARTGPLFACLIGKQMKALRDGDWFWWENSHVFTDAQRRELEKHSLSRVICDNTGLTRVPMDAFQVGKFPEDFESCDSITGMNLEAWRETFPQDDKCGFPESVENGDFVHCEESGRRVLVYSCRHGYELQGREQLTCTQEGWDFQPPLCKDVNECADGAHPPCHASARCRNTKGGFQCLCADPYELGDDGRTCVDSGRLPRVTWISMSLAALLIGGFAGLTSTVICRWTRTGTKSTLPISETGGGTPELRCGKHQAVGTSPQRAAAQDSEQESAGMEGRDTHRLPRAL

SEQ ID NO: 88826 - protein, 933 aa, Homo sapiens; identical to SEQ ID NO: 88825
  Payload ID: 17781
  Gene Name: thyroid peroxidase
  Uniprot ID: P07202
  ENSP ID: ENSP00000329869

SEQ ID NO: 88827 - protein, 760 aa, Homo sapiens
  Payload ID: 17781
  Gene Name: thyroid peroxidase
  Uniprot ID: P07202
  ENSP ID: ENSP00000371633
MRALAVLSVTLVMACTEAFFPFISRGKELLWGKPEESRVSSVLEESKRLVDTAMYATMQRNLKKRGILSPAQLLSFSKLPEPTSGVIARAAEIMETSIQAMKRKVNLKTQQSQHPTDALSEDLLSIIANMSGCLPYMLPPKCPNTCLANKYRPITGACNNRDHPRWGASNTALARWLPPVYEDGFSQPRGWNPGFLYNGFPLPPVREVTRHVIQVSNEVVTDDDRYSDLLMAWGQYIDHDIAFTPQSTSKAAFGGGADCQMTCENQNPCFPIQIITLRDYIPRILGPEAFQQYVGPYEGYDSTANPTVSNVFSTAAFRFGHATIHPLVRRLDASFQEHPDLPGLWLHQAFFSPWTLLRGGGLDPLIRGLLARPAKLQVQDQLMNEELTERLFVLSNSSTLDLASINLQRGRDHGLPGYNEWREFCGLPRLETPADLSTAIASRSVADKILDLYKHPDNIDVWLGGLAENFLPRARTGPLFACLIGKQMKALRDGDWFWWENSHVFTDAQRRELEKHSLSRVICDNTGLTRVPMDAFQVGKFPEDFESCDSITGMNLEAWRETFPQDDKCGFPESVENGDFVHCEESGRRVLVYSCRHGYELQGREQLTCTQEGWDFQPPLCKDVNECADGAHPPCHASARCRNTKGGFQCLCADPYELGDDGRTCVDSGRLPRVTWISMSLAALLIGGFAGLTSTVICRWTRTGTKSTLPISETGGGTPELRCGKHQAVGTSPQRAAAQDSEQESAGMEGRDTHRLPRAL

SEQ ID NO: 88828 - protein, 876 aa, Homo sapiens
  Payload ID: 17781
  Gene Name: thyroid peroxidase
  Uniprot ID: P07202
  ENSP ID: ENSP00000371636
MRALAVLSVTLVMACTEAFFPFISRGKELLWGKPEESRVSSVLEESKRLVDTAMYATMQRNLKKRGILSPAQLLSFSKLPEPTSGVIARAAEIMETSIQAMKRKVNLKTQQSQHPTDALSEDLLSIIANMSGCLPYMLPPKCPNTCLANKYRPITGACNNRDHPRWGASNTALARWLPPVYEDGFSQPRGWNPGFLYNGFPLPPVREVTRHVIQVSNEVVTDDDRYSDLLMAWGQYIDHDIAFTPQSTSKAAFGGGADCQMTCENQNPCFPIQLPEEARPAAGTACLPFYRSSAACGTGDQGALFGNLSTANPRQQMNGLTSFLDASTVYGSSPALERQLRNWTSAEGLLRVHARLRDSGRAYLPFVPPRAPAACAPEPGIPGETRGPCFLAGDGRASEVPSLTALHTLWLREHNRLAAALKALNAHWSADAVYQEARKVVGALHQIITLRDYIPRILGPEAFQQYVGPYEGYDSTANPTVSNVFSTAAFRFGHATIHPLVRRLDASFQEHPDLPGLWLHQAFFSPWTLLRGGYNEWREFCGLPRLETPADLSTAIASRSVADKILDLYKHPDNIDVWLGGLAENFLPRARTGPLFACLIGKQMKALRDGDWFWWENSHVFTDAQRRELEKHSLSRVICDNTGLTRVPMDAFQVGKFPEDFESCDSITGMNLEAWRETFPQDDKCGFPESVENGDFVHCEESGRRVLVYSCRHGYELQGREQLTCTQEGWDFQPPLCKDVNECADGAHPPCHASARCRNTKGGFQCLCADPYELGDDGRTCVDSGRLPRVTWISMSLAALLIGGFAGLTSTVICRWTRTGTKSTLPISETGGGTPELRCGKHQAVGTSPQRAAAQDSEQESAGMEGRDTHRLPRAL

SEQ ID NO: 88829 - protein, 174 aa, Homo sapiens
  Payload ID: 17781
  Gene Name: thyroid peroxidase
  ENSP ID: ENSP00000371704
MRALAVLSVTLVMACTEAFFPFISRGKELLWGKPEESRVSSVLEESKRLVDTAMYATMQRNLKKRGILSPAQLLSFSKLPEPTSGVIARAAEIMETSIQAMKRKVNLKTQQSQHPTDALSEDLLSIIANMSGCLPYMLPPKCPNTCLANKYRPITGACNNRKMKYKPDHSETAN

SEQ ID NO: 88830 - protein, 171 aa, Homo sapiens
  Payload ID: 17781
  Gene Name: thyroid peroxidase
  ENSP ID: ENSP00000390994
MRALAVLSVTLVMACTEAFFPFISRGKELLWGKPEESRVSSVLEESKRLVDTAMYATMQRNLKKRGILSPAQLLSFSKLPEPTSGVIARAAEIMETSIQAMKRKVNLKTQQSQHPTDALSEDLLSIIANMSGCLPYMLPPKCPNTCLANKYRPITGACNNRDHPRWGASNT

SEQ ID NO: 88831 - protein, 404 aa, Homo sapiens
  Payload ID: 17781
  Gene Name: thyroid peroxidase
  ENSP ID: ENSP00000400033
  MOD_RES (1)..(1): Any amino acid
XYEGYDSTANPTVSNVFSTAAFRFGHATIHPLVRRLDASFQEHPDLPGLWLHQAFFSPWTLLRGGYNEWREFCGLPRLETPADLSTAIASRSVADKILDLYKHPDNIDVWLGGLAENFLPRARTGPLFACLIGKQMKALRDGDWFWWENSHVFTDAQRRELEKHSLSRVICDNTGLTRVPMDAFQVGKFPEDFESCDSITGMNLEAWRETFPQDDKCGFPESVENGDFVHCEESGRRVLVYSCRHGYELQGREQLTCTQEGWDFQPPLCKDVNECADGAHPPCHASARCRNTKGGFQCLCADPYELGDDGRTCVDSGRLPRVTWISMSLAALLIGGFAGLTSTVICRWRVLGWKAGILTGCREPSEGKVAGHCRTASCSQNHRTTLFQTQANPKSAGRLFSQHG

SEQ ID NO: 88832 - protein, 864 aa, Homo sapiens
  Payload ID: 17781
  Gene Name: thyroid peroxidase
  ENSP ID: ENSP00000405788
QLLSFSKLPEPTSGVIARAAEIMETSIQAMKRKVNLKTQQSQHPTDALSEDLLSIIANMSGCLPYMLPPKCPNTCLANKYRPITGACNNRDHPRWGASNTALARWLPPVYEDGFSQPRGWNPGFLYNGFPLPPVREVTRHVIQVSNEVVTDDDRYSDLLMAWGQYIDHDIAFTPQSTSKAAFGGGADCQMTCENQNPCFPIQLPEEARPAAGTACLPFYRSSAACGTGDQGALFGNLSTANPRQQMNGLTSFLDASTVYGSSPALERQLRNWTSAEGLLRVHARLRDSGRAYLPFVPPRAPAACAPEPGIPGETRGPCFLAGDGRASEVPSLTALHTLWLREHNRLAAALKALNAHWSADAVYQEARKVVGALHQIITLRDYIPRILGPEAFQQYVGPYEGYDSTANPTVSNVFSTAAFRFGHATIHPLVRRLDASFQEHPDLPGLWLHQAFFSPWTLLRGGGLDPLIRGLLARPAKLQVQDQLMNEELTERLFVLSNSSTLDLASINLQRGRDHGLPGYNEWREFCGLPRLETPADLSTAIASRSVADKILDLYKHPDNIDVWLGGLAENFLPRARTGPLFACLIGKQMKALRDGDWFWWENSHVFTDAQRRELEKHSLSRVICDNTGLTRVPMDAFQVGKFPEDFESCDSITGMNLEAWRETFPQDDKCGFPESVENGDFVHCEESGRRVLVYSCRHGYELQGREQLTCTQEGWDFQPPLCKDSGRLPRVTWISMSLAALLIGGFAGLTSTVICRWTRTGTKSTLPISETGGGTPELRCGKHQAVGTSPQRAAAQDSEQVGHTMPHVSSCHRSGWTGSGCRSSSAGAPCIFLFTPCFLVRSAPSSGRFYLQANDSEPECEPA

SEQ ID NO: 88833 - protein, 363 aa, Homo sapiens
  Payload ID: 17781
  Gene Name: thyroid peroxidase
  ENSP ID: ENSP00000419461
YEGYDSTANPTVSNVFSTAAFRFGHATIHPLVRRLDASFQEHPDLPGLWLHQAFFSPWTLLRGGYNEWREFCGLPRLETPADLSTAIASRSVADKILDLYKHPDNIDVWLGGLAENFLPRARTGPLFACLIGKQMKALRDGDWFWWENSHVFTDAQRRELEKHSLSRVICDNTGLTRVPMDAFQVGKFPEDFESCDSITGMNLEAWRETFPQDDKCGFPESVENGDFVHCEESGRRVLVYSCRHGYELQGREQLTCTQEGWDFQPPLCKDSGRLPRVTWISMSLAALLIGGFAGLTSTVICRWTRTGTKSTLPISETGGGTPELRCGKHQAVGTSPQRAAAQDSEQESAGMEGRDTHRLPRAL

SEQ ID NO: 88834 - protein, 174 aa, Homo sapiens; identical to SEQ ID NO: 88829
  Payload ID: 17781
  Gene Name: thyroid peroxidase
  ENSP ID: ENSP00000444840

SEQ ID NO: 88835 - protein, 174 aa, Homo sapiens; identical to SEQ ID NO: 88829
  Payload ID: 17781
  Gene Name: thyroid peroxidase
  ENSP ID: ENSP00000480200

SEQ ID NO: 88836 - protein, 889 aa, Homo sapiens
  Payload ID: 17781
  Gene Name: thyroid peroxidase
  ENSP ID: ENSP00000481794
MRALAVLSVTLVMACTEAFFPFISRGKELLWGKPEESRVSSVLEESKRLVDTAMYATMQRNLKKRGILSPAQLLSFSKLPEPTSGVIARAAEIMETSIQAMKRKVNLKTQQSQHPTDALSEDLLSIIANMSGCLPYMLPPKCPNTCLANKYRPITGACNNRDHPRWGASNTALARWLPPVYEDGFSQPRGWNPGFLYNGFPLPPVREVTRHVIQVSNEVVTDDDRYSDLLMAWGQYIDHDIAFTPQSTSKAAFGGGSDCQMTCENQNPCFPIQLPEEARPAAGTACLPFYRSSAACGTGDQGALFGNLSTANPRQQMNGLTSFLDASTVYGSSPALERQLRNWTSAEGLLRVHARLRDSGRAYLPFVPPRAPAACAPEPGIPGETRGPCFLAGDGRASEVPSLTALHTLWLREHNRLAAALKALNAHWSADAVYQEARKVVGALHQIITLRDYIPRILGPEAFQQYVGPYEGYDSTANPTVSNVFSTAAFRFGHATIHPLVRRLDASFQEHPDLPGLWLHQAFFSPWTLLRGGGLDPLIRGLLARPAKLQVQDQLMNEELTERLFVLSNSSTLDLASINLQRGRDHGLPGYNEWREFCGLPRLETPADLSTAIASRSVADKILDLYKHPDNIDVWLGGLAENFLPRARTGPLFACLIGKQMKALRDGDWFWWENSHVFTDAQRRELEKHSLSRVICDNTGLTRVPMDAFQVGKFPEDFESCDSITGMNLEAWRETFPQDDKCGFPESVENGDFVHCEESGRRVLVYSCRHGYELQGREQLTCTQEGWDFQPPLCKDSGRLPRVTWISMSLAALLIGGFAGLTSTVICRWTRTGTKSTLPISETGGGTPELRCGKHQAVGTSPQRAAAQDSEQESAGMEGRDTHRLPRAL

SEQ ID NO: 88837 - protein, 933 aa, Homo sapiens
  Payload ID: 17781
  Gene Name: thyroid peroxidase
  ENSP ID: ENSP00000482926
MRALAVLSVTLVMACTEAFFPFISRGKELLWGKPEESRVSSVLEESKRLVDTAMYATMQRNLKKRGILSPAQLLSFSKLPEPTSGVIARAAEIMETSIQAMKRKVNLKTQQSQHPTDALSEDLLSIIANMSGCLPYMLPPKCPNTCLANKYRPITGACNNRDHPRWGASNTALARWLPPVYEDGFSQPRGWNPGFLYNGFPLPPVREVTRHVIQVSNEVVTDDDRYSDLLMAWGQYIDHDIAFTPQSTSKAAFGGGSDCQMTCENQNPCFPIQLPEEARPAAGTACLPFYRSSAACGTGDQGALFGNLSTANPRQQMNGLTSFLDASTVYGSSPALERQLRNWTSAEGLLRVHARLRDSGRAYLPFVPPRAPAACAPEPGIPGETRGPCFLAGDGRASEVPSLTALHTLWLREHNRLAAALKALNAHWSADAVYQEARKVVGALHQIITLRDYIPRILGPEAFQQYVGPYEGYDSTANPTVSNVFSTAAFRFGHATIHPLVRRLDASFQEHPDLPGLWLHQAFFSPWTLLRGGGLDPLIRGLLARPAKLQVQDQLMNEELTERLFVLSNSSTLDLASINLQRGRDHGLPGYNEWREFCGLPRLETPADLSTAIASRSVADKILDLYKHPDNIDVWLGGLAENFLPRARTGPLFACLIGKQMKALRDGDWFWWENSHVFTDAQRRELEKHSLSRVICDNTGLTRVPMDAFQVGKFPEDFESCDSITGMNLEAWRETFPQDDKCGFPESVENGDFVHCEESGRRVLVYSCRHGYELQGREQLTCTQEGWDFQPPLCKDVNECADGAHPPCHASARCRNTKGGFQCLCADPYELGDDGRTCVDSGRLPRVTWISMSLAALLIGGFAGLTSTVICRWTRTGTKSTLPISETGGGTPELRCGKHQAVGTSPQRAAAQDSEQESAGMEGRDTHRLPRAL

SEQ ID NO: 88838 - protein, 859 aa, Homo sapiens
  Payload ID: 17781
  Gene Name: thyroid peroxidase
  ENSP ID: ENSP00000486403
MRALAVLSVTLVMACTEAFFPFISRGKELLWGKPEESRVSSVLEESKRLVDTAMYATMQRNLKKRGILSPAQLLSFSKLPEPTSGVIARAAEIMETSIQAMKRKVNLKTQQSQHPTDALSEDLLSIIANMSGCLPYMLPPKCPNTCLANKYRPITGACNNRDHPRWGASNTALARWLPPVYEDGFSQPRGWNPGFLYNGFPLPPVREVTRHVIQVSNEVVTDDDRYSDLLMAWGQYIDHDIAFTPQSTSKAAFGGGSDCQMTCENQNPCFPIQLPEEARPAAGTACLPFYRSSAACGTGDQGALFGNLSTANPRQQMNGLTSFLDASTVYGSSPALERQLRNWTSAEGLLRVHARLRDSGRAYLPFVPPRAPAACAPEPGIPGETRGPCFLAGDGRASEVPSLTALHTLWLREHNRLAAALKALNAHWSADAVYQEARKVVGALHQIITLRDYIPRILGPEAFQQYVGPYEGYDSTANPTVSNVFSTAAFRFGHATIHPLVRRLDASFQEHPDLPGLWLHQAFFSPWTLLRGGYNEWREFCGLPRLETPADLSTAIASRSVADKILDLYKHPDNIDVWLGGLAENFLPRARTGPLFACLIGKQMKALRDGDWFWWENSHVFTDAQRRELEKHSLSRVICDNTGLTRVPMDAFQVGKFPEDFESCDSITGMNLEAWRETFPQDDKCGFPESVENGDFVHCEESGRRVLVYSCRHGYELQGREQLTCTQEGWDFQPPLCKDVNECADGAHPPCHASARCRNTKGGFQCLCADPYELGDDGRTCVDSGRLPRVTWISMSLAALLIGGFAGLTSTVICRWTRTGTKSTLPISETGGGTPELRCGKHQAVGTSPQRAAAQDSEQ

SEQ ID NO: 88839 - protein, 864 aa, Homo sapiens
  Payload ID: 17781
  Gene Name: thyroid peroxidase
  ENSP ID: ENSP00000486520
QLLSFSKLPEPTSGVIARAAEIMETSIQAMKRKVNLKTQQSQHPTDALSEDLLSIIANMSGCLPYMLPPKCPNTCLANKYRPITGACNNRDHPRWGASNTALARWLPPVYEDGFSQPRGWNPGFLYNGFPLPPVREVTRHVIQVSNEVVTDDDRYSDLLMAWGQYIDHDIAFTPQSTSKAAFGGGSDCQMTCENQNPCFPIQLPEEARPAAGTACLPFYRSSAACGTGDQGALFGNLSTANPRQQMNGLTSFLDASTVYGSSPALERQLRNWTSAEGLLRVHARLRDSGRAYLPFVPPRAPAACAPEPGIPGETRGPCFLAGDGRASEVPSLTALHTLWLREHNRLAAALKALNAHWSADAVYQEARKVVGALHQIITLRDYIPRILGPEAFQQYVGPYEGYDSTANPTVSNVFSTAAFRFGHATIHPLVRRLDASFQEHPDLPGLWLHQAFFSPWTLLRGGGLDPLIRGLLARPAKLQVQDQLMNEELTERLFVLSNSSTLDLASINLQRGRDHGLPGYNEWREFCGLPRLETPADLSTAIASRSVADKILDLYKHPDNIDVWLGGLAENFLPRARTGPLFACLIGKQMKALRDGDWFWWENSHVFTDAQRRELEKHSLSRVICDNTGLTRVPMDAFQVGKFPEDFESCDSITGMNLEAWRETFPQDDKCGFPESVENGDFVHCEESGRRVLVYSCRHGYELQGREQLTCTQEGWDFQPPLCKDSGRLPRVTWISMSLAALLIGGFAGLTSTVICRWTRTGTKSTLPISETGGGTPELRCGKHQAVGTSPQRAAAQDSEQVGHTMPHVSSCHRSGWTGSGCRSSSAGAPCIFLFTPCFLVRSAPSSGRFYLQANDSEPECEPA

SEQ ID NO: 88840 - protein, 743 aa, Homo sapiens
  Payload ID: 17781
  Gene Name: thyroid peroxidase
  ENSP ID: ENSP00000486538
MRALAVLSVTLVMACTEAFFPFISRGKELLWGKPEESRVSSVLEESKRLVDTAMYATMQRNLKKRGILSPAQLLSFSKLPEPTSGVIARAAEIMETSIQAMKRKVNLKTQQSQHPTDALSEDLLSIIANMSGCLPYMLPPKCPNTCLANKYRPITGACNNRDHPRWGASNTALARWLPPVYEDGFSQPRGWNPGFLYNGFPLPPVREVTRHVIQVSNEVVTDDDRYSDLLMAWGQYIDHDIAFTPQSTSKAAFGGGSDCQMTCENQNPCFPIQIITLRDYIPRILGPEAFQQYVGPYEGYDSTANPTVSNVFSTAAFRFGHATIHPLVRRLDASFQEHPDLPGLWLHQAFFSPWTLLRGGGLDPLIRGLLARPAKLQVQDQLMNEELTERLFVLSNSSTLDLASINLQRGRDHGLPGYNEWREFCGLPRLETPADLSTAIASRSVADKILDLYKHPDNIDVWLGGLAENFLPRARTGPLFACLIGKQMKALRDGDWFWWENSHVFTDAQRRELEKHSLSRVICDNTGLTRVPMDAFQVGKFPEDFESCDSITGMNLEAWRETFPQDDKCGFPESVENGDFVHCEESGRRVLVYSCRHGYELQGREQLTCTQEGWDFQPPLCKDVNECADGAHPPCHASARCRNTKGGFQCLCADPYELGDDGRTCVDSGRLPRVTWISMSLAALLIGGFAGLTSTVICRWTRTGTKSTLPISETGGGTPELRCGKHQAVGTSPQRAAAQDSEQ

SEQ ID NO: 88841 - protein, 171 aa, Homo sapiens; identical to SEQ ID NO: 88830
  Payload ID: 17781
  Gene Name: thyroid peroxidase
  ENSP ID: ENSP00000486958

SEQ ID NO: 88842 - protein, 347 aa, Homo sapiens
  Payload ID: 17781
  Gene Name: thyroid peroxidase
  ENSP ID: ENSP00000487159
  MOD_RES (1)..(1): Any amino acid
XYEGYDSTANPTVSNVFSTAAFRFGHATIHPLVRRLDASFQEHPDLPGLWLHQAFFSPWTLLRGGYNEWREFCGLPRLETPADLSTAIASRSVADKILDLYKHPDNIDVWLGGLAENFLPRARTGPLFACLIGKQMKALRDGDWFWWENSHVFTDAQRRELEKHSLSRVICDNTGLTRVPMDAFQVGKFPEDFESCDSITGMNLEAWRETFPQDDKCGFPESVENGDFVHCEESGRRVLVYSCRHGYELQGREQLTCTQEGWDFQPPLCKDVNECADGAHPPCHASARCRNTKGGFQCLCADPYELGDDGRTCVDSGRLPRVTWISMSLAALLIGGFAGLTSTVICR

SEQ ID NO: 88843 - protein, 916 aa, Homo sapiens
  Payload ID: 17781
  Gene Name: thyroid peroxidase
  ENSP ID: ENSP00000487200
MRALAVLSVTLVMACTEAFFPFISRGKELLWGKPEESRVSSVLEESKRLVDTAMYATMQRNLKKRGILSPAQLLSFSKLPEPTSGVIARAAEIMETSIQAMKRKVNLKTQQSQHPTDALSEDLLSIIANMSGCLPYMLPPKCPNTCLANKYRPITGACNNRDHPRWGASNTALARWLPPVYEDGFSQPRGWNPGFLYNGFPLPPVREVTRHVIQVSNEVVTDDDRYSDLLMAWGQYIDHDIAFTPQSTSKAAFGGGSDCQMTCENQNPCFPIQLPEEARPAAGTACLPFYRSSAACGTGDQGALFGNLSTANPRQQMNGLTSFLDASTVYGSSPALERQLRNWTSAEGLLRVHARLRDSGRAYLPFVPPRAPAACAPEPGIPGETRGPCFLAGDGRASEVPSLTALHTLWLREHNRLAAALKALNAHWSADAVYQEARKVVGALHQIITLRDYIPRILGPEAFQQYVGPYEGYDSTANPTVSNVFSTAAFRFGHATIHPLVRRLDASFQEHPDLPGLWLHQAFFSPWTLLRGGGLDPLIRGLLARPAKLQVQDQLMNEELTERLFVLSNSSTLDLASINLQRGRDHGLPGYNEWREFCGLPRLETPADLSTAIASRSVADKILDLYKHPDNIDVWLGGLAENFLPRARTGPLFACLIGKQMKALRDGDWFWWENSHVFTDAQRRELEKHSLSRVICDNTGLTRVPMDAFQVGKFPEDFESCDSITGMNLEAWRETFPQDDKCGFPESVENGDFVHCEESGRRVLVYSCRHGYELQGREQLTCTQEGWDFQPPLCKDVNECADGAHPPCHASARCRNTKGGFQCLCADPYELGDDGRTCVDSGRLPRVTWISMSLAALLIGGFAGLTSTVICRWTRTGTKSTLPISETGGGTPELRCGKHQAVGTSPQRAAAQDSEQ

SEQ ID NO: 88844 - protein, 346 aa, Homo sapiens
  Payload ID: 17781
  Gene Name: thyroid peroxidase
  ENSP ID: ENSP00000487272
YEGYDSTANPTVSNVFSTAAFRFGHATIHPLVRRLDASFQEHPDLPGLWLHQAFFSPWTLLRGGYNEWREFCGLPRLETPADLSTAIASRSVADKILDLYKHPDNIDVWLGGLAENFLPRARTGPLFACLIGKQMKALRDGDWFWWENSHVFTDAQRRELEKHSLSRVICDNTGLTRVPMDAFQVGKFPEDFESCDSITGMNLEAWRETFPQDDKCGFPESVENGDFVHCEESGRRVLVYSCRHGYELQGREQLTCTQEGWDFQPPLCKDSGRLPRVTWISMSLAALLIGGFAGLTSTVICRWTRTGTKSTLPISETGGGTPELRCGKHQAVGTSPQRAAAQDSEQ

SEQ ID NO: 88845 - protein, 174 aa, Homo sapiens; identical to SEQ ID NO: 88829
  Payload ID: 17781
  Gene Name: thyroid peroxidase
  ENSP ID: ENSP00000487562

SEQ ID NO: 88846 - protein, 764 aa, Homo sapiens
  Payload ID: 17782
  Gene Name: thyroid stimulating hormone receptor
  ENSP ID: ENSP00000298171
MRPADLLQLVLLLDLPRDLGGMGCSSPPCECHQEEDFRVTCKDIQRIPSLPPSTQTLKLIETHLRTIPSHAFSNLPNISRIYVSIDVTLQQLESHSFYNLSKVTHIEIRNTRNLTYIDPDALKELPLLKFLGIFNTGLKMFPDLTKVYSTDIFFILEITDNPYMTSIPVNAFQGLCNETLTLKLYNNGFTSVQGYAFNGTKLDAVYLNKNKYLTVIDKDAFGGVYSGPSLLDVSQTSVTALPSKGLEHLKELIARNTWTLKKLPLSLSFLHLTRADLSYPSHCCAFKNQKKIRGILESLMCNESSMQSLRQRKSVNALNSPLHQEYEENLGDSIVGYKEKSKFQDTHNNAHYYVFFEEQEDEIIGFGQELKNPQEETLQAFDSHYDYTICGDSEDMVCTPKSDEFNPCEDIMGYKFLRIVVWFVSLLALLGNVFVLLILLTSHYKLNVPRFLMCNLAFADFCMGMYLLLIASVDLYTHSEYYNHAIDWQTGPGCNTAGFFTVFASELSVYTLTVITLERWYAITFAMRLDRKIRLRHACAIMVGGWVCCFLLALLPLVGISSYAKVSICLPMDTETPLALAYIVFVLTLNIVAFVIVCCCYVKIYITVRNPQYNPGDKDTKIAKRMAVLIFTDFICMAPISFYALSAILNKPLITVSNSKILLVLFYPLNSCANPFLYAIFTKAFQRDVFILLSKFGICKRQAQAYRGQRVPPKNSTDIQVQKVTHEMRQGLHNMEDVYELIENSHLTPKKQGQISEEYMQTVL

SEQ ID NO: 88847 - protein, 253 aa, Homo sapiens
  Payload ID: 17782
  Gene Name: thyroid stimulating hormone receptor
  Uniprot ID: P16473
  ENSP ID: ENSP00000340113
MRPADLLQLVLLLDLPRDLGGMGCSSPPCECHQEEDFRVTCKDIQRIPSLPPSTQTLKLIETHLRTIPSHAFSNLPNISRIYVSIDVTLQQLESHSFYNLSKVTHIEIRNTRNLTYIDPDALKELPLLKFLGIFNTGLKMFPDLTKVYSTDIFFILEITDNPYMTSIPVNAFQGLCNETLTLKLYNNGFTSVQGYAFNGTKLDAVYLNKNKYLTVIDKDAFGGVYSGPSLLLPLGRKSLSFETQKAPRSSMPS

SEQ ID NO: 88848 - protein, 764 aa, Homo sapiens; identical to SEQ ID NO: 88846
  Payload ID: 17782
  Gene Name: thyroid stimulating hormone receptor
  ENSP ID: ENSP00000441235

SEQ ID NO: 88849 - protein, 274 aa, Homo sapiens
  Payload ID: 17782
  Gene Name: thyroid stimulating hormone receptor
  Uniprot ID: P16473
  ENSP ID: ENSP00000450549
MRPADLLQLVLLLDLPRDLGGMGCSSPPCECHQEEDFRVTCKDIQRIPSLPPSTQTLKLIETHLRTIPSHAFSNLPNISRIYVSIDVTLQQLESHSFYNLSKVTHIEIRNTRNLTYIDPDALKELPLLKFLGIFNTGLKMFPDLTKVYSTDIFFILEITDNPYMTSIPVNAFQGLCNETLTLKLYNNGFTSVQGYAFNGTKLDAVYLNKNKYLTVIDKDAFGGVYSGPSLLVENVAVSGKGFCKSLFSWLYRLPLGRKSLSFETQKAPRSSMPS

SEQ ID NO: 88850 - protein, 112 aa, Homo sapiens
  Payload ID: 17782
  Gene Name: thyroid stimulating hormone receptor
  ENSP ID: ENSP00000451092
MRPADLLQLVLLLDLPRDLGGMGCSSPPCECHQEEDFRVTCKDIQRIPSLPPSTQTLKLIETHLRTIPSHAFSNLPNISRIYVSIDVTLQQLESHSFYNLSKVTHITDTDAL

SEQ ID NO: 88851 - protein, 231 aa, Homo sapiens
  Payload ID: 17782
  Gene Name: thyroid stimulating hormone receptor
  ENSP ID: ENSP00000451202
MRPADLLQLVLLLDLPRDLGGMGCSSPPCECHQEEDFRVTCKDIQRIPSLPPSTQTLKLIETHLRTIPSHAFSNLPNISRIYVSIDVTLQQLESHSFYNLSKVTHIEIRNTRNLTYIDPDALKELPLLKFLGIFNTGLKMFPDLTKVYSTDIFFILEITDNPYMTSIPVNAFQGLCNETLTLKLYNNGFTSVQGYAFNGTKLDAVYLNKNKYLTVIDKDAFGGVYSGPSLL

SEQ ID NO: 88852 - protein, 138 aa, Homo sapiens
  Payload ID: 17783
  Gene Name: thyroid stimulating hormone, beta
  Uniprot ID: P01222
  ENSP ID: ENSP00000256592
MTALFLMSMLFGLTCGQAMSFCIPTEYTMHIERRECAYCLTINTTICAGYCMTRDINGKLFLPKYALSQDVCTYRDFIYRTVEIPGCPLHVAPYFSYPVALSCKCGKCNTDYSDCIHEAIKTNYCTKPQKSYLVGFSV

SEQ ID NO: 88853 - protein, 138 aa, Homo sapiens; identical to SEQ ID NO: 88852
  Payload ID: 17783
  Gene Name: thyroid stimulating hormone, beta
  Uniprot ID: P01222
  ENSP ID: ENSP00000358530

SEQ ID NO: 88854 - protein, 303 aa, Homo sapiens
  Payload ID: 17784
  Gene Name: thyrotrophic embryonic factor
  Uniprot ID: Q10587
  ENSP ID: ENSP00000266304
MSDAGGGKKPPVDPQAGPGPGPGRAAGERGLSGSFPLVLKKLMENPPREARLDKEKGKEKLEEDEAAAASTMAVSASLMPPIWDKTIPYDGESFHLEYMDLDEFLLENGIPASPTHLAHNLLLPVAELEGKESASSSTASPPSSSTAIFQPSETVSSTESSLEKERETPSPIDPNCVEVDVNFNPDPADLVLSSVPGGELFNPRKHKFAEEDLKPQPMIKKAKKVFVPDEQKDEKYWTRRKKNNVAAKRSRDARRLKENQITIRAAFLEKENTALRTEVAELRKEVGKCKTIVSKYETKYGPL

SEQ ID NO: 88855 - protein, 273 aa, Homo sapiens
  Payload ID: 17784
  Gene Name: thyrotrophic embryonic factor
  Uniprot ID: Q10587
  ENSP ID: ENSP00000385256
MDMPEVLKSLLEHSLPWPEKRTDKEKGKEKLEEDEAAAASTMAVSASLMPPIWDKTIPYDGESFHLEYMDLDEFLLENGIPASPTHLAHNLLLPVAELEGKESASSSTASPPSSSTAIFQPSETVSSTESSLEKERETPSPIDPNCVEVDVNFNPDPADLVLSSVPGGELFNPRKHKFAEEDLKPQPMIKKAKKVFVPDEQKDEKYWTRRKKNNVAAKRSRDARRLKENQITIRAAFLEKENTALRTEVAELRKEVGKCKTIVSKYETKYGPL

SEQ ID NO: 88856 - protein, 184 aa, Homo sapiens
  Payload ID: 17784
  Gene Name: thyrotrophic embryonic factor
  ENSP ID: ENSP00000411170
  MOD_RES (1)..(1): Any amino acid
XFIFLPRPGTSLGRIRKADKEKGKEKLEEDEAAAASTMAVSASLMPPIWDKTIPYDGESFHLEYMDLDEFLLENGIPASPTHLAHNLLLPVAELEGKESASSSTASPPSSSTAIFQPSETVSSTESSLEKERETPSPIDPNCVEVDVNFNPDPADLVLSSVPGGELFNPRKHKFAEEDLKPQPM

SEQ ID NO: 88857 - protein, 242 aa, Homo sapiens
  Payload ID: 17785
  Gene Name: thyrotropin-releasing hormone
  Uniprot ID: P20396
  ENSP ID: ENSP00000303452
MPGPWLLLALALTLNLTGVPGGRAQPEAAQQEAVTAAEHPGLDDFLRQVERLLFLRENIQRLQGDQGEHSASQIFQSDWLSKRQHPGKREEEEEEGVEEEEEEEGGAVGPHKRQHPGRREDEASWSVDVTQHKRQHPGRRSPWLAYAVPKRQHPGRRLADPKAQRSWEEEEEEEEREEDLMPEKRQHPGKRALGGPCGPQGAYGQAGLLLGLLDDLSRSQGAEEKRQHPGRRAAWVREPLEE

SEQ ID NO: 88858 - protein, 238 aa, Homo sapiens
  Payload ID: 17785
  Gene Name: thyrotropin-releasing hormone
  ENSP ID: ENSP00000426522
MPGPWLLLALALTLNLTGVPGGRAQPEAAQQEAVTAAEHPGLDDFLRQVERLLFLRENIQRLQGDQASQIFQSDWLSKRQHPGKREEEEEEGVEEEEEEEGGAVGPHKRQHPGRREDEASWSVDVTQHKRQHPGRRSPWLAYAVPKRQHPGRRLADPKAQRSWEEEEEEEEREEDLMPEKRQHPGKRALGGPCGPQGAYGQAGLLLGLLDDLSRSQGAEEKRQHPGRRAAWVREPLEE

SEQ ID NO: 88859 - protein, 1024 aa, Homo sapiens
  Payload ID: 17786
  Gene Name: thyrotropin-releasing hormone degrading enzyme
  Uniprot ID: Q9UKU6
  ENSP ID: ENSP00000261180
MGEDDAALRAGSRGLSDPWADSVGVRPRTTERHIAVHKRLVLAFAVSLVALLAVTMLAVLLSLRFDECGASATPGADGGPSGFPERGGNGSLPGSARRNHHAGGDSWQPEAGGVASPGTTSAQPPSEEEREPWEPWTQLRLSGHLKPLHYNLMLTAFMENFTFSGEVNVEIACRNATRYVVLHASRVAVEKVQLAEDRAFGAVPVAGFFLYPQTQVLVVVLNRTLDAQRNYNLKIIYNALIENELLGFFRSSYVLHGERRFLGVTQFSPTHARKAFPCFDEPIYKATFKISIKHQATYLSLSNMPVETSVFEEDGWVTDHFSQTPLMSTYYLAWAICNFTYRETTTKSGVVVRLYARPDAIRRGSGDYALHITKRLIEFYEDYFKVPYSLPKLDLLAVPKHPYAAMENWGLSIFVEQRILLDPSVSSISYLLDVTMVIVHEICHQWFGDLVTPVWWEDVWLKEGFAHYFEFVGTDYLYPGWNMEKQRFLTDVLHEVMLLDGLASSHPVSQEVLQATDIDRVFDWIAYKKGAALIRMLANFMGHSVFQRGLQDYLTIHKYGNAARNDLWNTLSEALKRNGKYVNIQEVMDQWTLQMGYPVITILGNTTAENRIIITQQHFIYDISAKTKALKLQNNSYLWQIPLTIVVGNRSHVSSEAIIWVSNKSEHHRITYLDKGSWLLGNINQTGYFRVNYDLRNWRLLIDQLIRNHEVLSVSNRAGLIDDAFSLARAGYLPQNIPLEIIRYLSEEKDFLPWHAASRALYPLDKLLDRMENYNIFNEYILKQVATTYIKLGWPKNNFNGSLVQASYQHEELRREVIMLACSFGNKHCHQQASTLISDWISSNRNRIPLNVRDIVYCTGVSLLDEDVWEFIWMKFHSTTAVSEKKILLEALTCSDDRNLLNRLLNLSLNSEVVLDQDAIDVIIHVARNPHGRDLAWKFFRDKWKILNTRYGEALFMNSKLISGVTEFLNTEGELKELKNFMKNYDGVAAASFSRAVETVEANVRWKMLYQDELFQWLGKALRH

SEQ ID NO: 88860 - protein, 194 aa, Homo sapiens
  Payload ID: 17786
  Gene Name: thyrotropin-releasing hormone degrading enzyme
  ENSP ID: ENSP00000447822
  MOD_RES (1)..(1): Any amino acid
XIYNALIENELLGFFRSSYVLHGERRFLGVTQFSPTHARKAFPCFDEPIYKATFKISIKHQATYLSLSNMPVETSVFEEDGWVTDHFSQTPLMSTYYLAWAICNFTYRETTTKSGVVGAALIRMLANFMGHSVFQRGLQDYLTIHKYGNAARNDLWNTLSEALKRNGKYVNIQEVMDQWTLQMGYPVITILGNT

SEQ ID NO: 88861 - protein, 398 aa, Homo sapiens
  Payload ID: 17787
  Gene Name: thyrotropin-releasing hormone receptor
  Uniprot ID: P34981
  ENSP ID: ENSP00000309818
MENETVSELNQTQLQPRAVVALEYQVVTILLVLIICGLGIVGNIMVVLVVMRTKHMRTPTNCYLVSLAVADLMVLVAAGLPNITDSIYGSWVYGYVGCLCITYLQYLGINASSCSITAFTIERYIAICHPIKAQFLCTFSRAKKIIIFVWAFTSLYCMLWFFLLDLNISTYKDAIVISCGYKISRNYYSPIYLMDFGVFYVVPMILATVLYGFIARILFLNPIPSDPKENSKTWKNDSTHQNTNLNVNTSNRCFNSTVSSRKQVTKMLAVVVILFALLWMPYRTLVVVNSFLSSPFQENWFLLFCRICIYLNSAINPVIYNLMSQKFRAAFRKLCNCKQKPTEKPANYSVALNYSVIKESDHFSTELDDITVTDTYLSATKVSFDDTCLASEVSFSQS

SEQ ID NO: 88862 - protein, 398 aa, Homo sapiens; identical to SEQ ID NO: 88861
  Payload ID: 17787
  Gene Name: thyrotropin-releasing hormone receptor
  Uniprot ID: P34981
  ENSP ID: ENSP00000430711

SEQ ID NO: 88863 - protein, 385 aa, Homo sapiens
  Payload ID: 17788
  Gene Name: TIA1 cytotoxic granule-associated RNA binding protein
  ENSP ID: ENSP00000282574
MEDEMPKTLYVGNLSRDVTEALILQLFSQIGPCKNCKMIMDTAGNDPYCFVEFHEHRHAAAALAAMNGRKIMGKEVKVNWATTPSSQKKDTSSSTVVSTQRSQDHFHVFVGDLSPEITTEDIKAAFAPFGRISDARVVKDMATGKSKGYGFVSFFNKWDAENAIQQMGGQWLGGRQIRTNWATRKPPAPKSTYESNTKQLSYDEVVNQSSPSNCTVYCGGVTSGLTEQLMRQTFSPFGQIMEIRVFPDKGYSFVRFNSHESAAHAIVSVNGTTIEGHVVKCYWGKETLDMINPVQQNQIGYPQPYGQWGQWYGNAQQIGQYMPNGWQVPAYGMYGQAWNQQGFNQTQSSAPWMGPNYGVQPPQGQNGSMLPNQPSGYRVAGYETQ

SEQ ID NO: 88864 - protein, 152 aa, Homo sapiens
  Payload ID: 17788
  Gene Name: TIA1 cytotoxic granule-associated RNA binding protein
  ENSP ID: ENSP00000354838
  MOD_RES (1)..(1): Any amino acid
XYVGNLSRDVTEALILQLFSQIGPCKNCKMIMDTAGNDPYCFVEFHEHRHAAAALAAMNGRKIMGKEVKVNWATTPSSQKKDTSNHFHVFVGDLSPEITTEDIKAAFAPFGRISDARVVKDMATGKSKGYGFVSFFNKWVSSVRSAWIMLKE

SEQ ID NO: 88865 - protein, 285 aa, Homo sapiens
  Payload ID: 17788
  Gene Name: TIA1 cytotoxic granule-associated RNA binding protein
  ENSP ID: ENSP00000399567
MEDEMPKTLYVGNLSRDVTEALILQLFSQIGPCKNCKMIMDTAGNDPYCFVEFHEHRHAAAALAAMNGRKIMGKEVKVNWATTPSSQKKDTSNHFHVFVGDLSPEITTEDIKAAFAPFGRISDARVVKDMATGKSKGYGFVSFFNKWDAENAIQQMGGQWLGGRQIRTNWATRKPPAPKSTYESNTKQLSYDEVVNQSSPSNCTVYCGGVTSGLTEQLMRQTFSPFGQIMEIRVFPDKGYSFVRQTQSSAPWMGPNYGVQPPQGQNGSMLPNQPSGYRVAGYETQ

SEQ ID NO: 88866 - protein, 386 aa, Homo sapiens
  Payload ID: 17788
  Gene Name: TIA1 cytotoxic granule-associated RNA binding protein
  Uniprot ID: P31483
  ENSP ID: ENSP00000401371
MEDEMPKTLYVGNLSRDVTEALILQLFSQIGPCKNCKMIMDTAGNDPYCFVEFHEHRHAAAALAAMNGRKIMGKEVKVNWATTPSSQKKDTSSSTVVSTQRSQDHFHVFVGDLSPEITTEDIKAAFAPFGRISDARVVKDMATGKSKGYGFVSFFNKWDAENAIQQMGGQWLGGRQIRTNWATRKPPAPKSTYESNTKQLSYDEVVNQSSPSNCTVYCGGVTSGLTEQLMRQTFSPFGQIMEIRVFPDKGYSFVRFNSHESAAHAIVSVNGTTIEGHVVKCYWGKETLDMINPVQQQNQIGYPQPYGQWGQWYGNAQQIGQYMPNGWQVPAYGMYGQAWNQQGFNQTQSSAPWMGPNYGVQPPQGQNGSMLPNQPSGYRVAGYETQ

SEQ ID NO: 88867 - protein, 114 aa, Homo sapiens
  Payload ID: 17788
  Gene Name: TIA1 cytotoxic granule-associated RNA binding protein
  ENSP ID: ENSP00000402263
MRQTFSPFGQIMEIRVFPDKGYSFVRFNSHESAAHAIVSVNGTTIEGHVVKCYWGKETLDMINPVQQQNQIGYPQPYGQWGQWYGNAQQIGQYMPNGWQVPAYGMYGQAWNQQG

SEQ ID NO: 88868 - protein, 375 aa, Homo sapiens
  Payload ID: 17788
  Gene Name: TIA1 cytotoxic granule-associated RNA binding protein
  Uniprot ID: P31483
  ENSP ID: ENSP00000404023
MEDEMPKTLYVGNLSRDVTEALILQLFSQIGPCKNCKMIMDTAGNDPYCFVEFHEHRHAAAALAAMNGRKIMGKEVKVNWATTPSSQKKDTSNHFHVFVGDLSPEITTEDIKAAFAPFGRISDARVVKDMATGKSKGYGFVSFFNKWDAENAIQQMGGQWLGGRQIRTNWATRKPPAPKSTYESNTKQLSYDEVVNQSSPSNCTVYCGGVTSGLTEQLMRQTFSPFGQIMEIRVFPDKGYSFVRFNSHESAAHAIVSVNGTTIEGHVVKCYWGKETLDMINPVQQQNQIGYPQPYGQWGQWYGNAQQIGQYMPNGWQVPAYGMYGQAWNQQGFNQTQSSAPWMGPNYGVQPPQGQNGSMLPNQPSGYRVAGYETQ

SEQ ID NO: 88869 - protein, 214 aa, Homo sapiens
  Payload ID: 17788
  Gene Name: TIA1 cytotoxic granule-associated RNA binding protein
  Uniprot ID: P31483
  ENSP ID: ENSP00000413751
MEDEMPKTLYVGNLSRDVTEALILQLFSQIGPCKNCKMIMDTAGNDPYCFVEFHEHRHAAAALAAMNGRKIMGKEVKVNWATTPSSQKKDTSSSTVVSTQRSQDHFHVFVGDLSPEITTEDIKAAFAPFGRISDARVVKDMATGKSKGYGFVSFFNKWDAENAIQQMGGQWLGGRQIRTNWATRKPPAPKSTYECRCIGEEKEMWNFGEKYARF

SEQ ID NO: 88870 - protein, 161 aa, Homo sapiens
  Payload ID: 17788
  Gene Name: TIA1 cytotoxic granule-associated RNA binding protein
  ENSP ID: ENSP00000427794
MEDEMPKTLYVGNLSRDVTEALILQLFSQIGPCKNCKMIMDTAGNDPYCFVEFHEHRHAAAALAAMNGRKIMGKEVKVNWATTPSSQKKDTSSSTVVSTQRSQVLVHLHMDSHKLNGVMSGQPKLLAFEKTVKYFNIKLLQCKIISMSLLVISAQKLQLKI

SEQ ID NO: 88871 - protein, 144 aa, Homo sapiens
  Payload ID: 17788
  Gene Name: TIA1 cytotoxic granule-associated RNA binding protein
  ENSP ID: ENSP00000430969
MEDEMPKTLYVGNLSRDVTEALILQLFSQIGPCKNCKMIMDTAGNDPYCFVEFHEHRHAAAALAAMNGRKIMGKEVKVNWATTPSSQKKDTSSSTVVSTQRSQDHFHVFVGDLSPEITTEDIKAAFAPFGRISVSLKNGQNCPG

SEQ ID NO: 88872 - protein, 85 aa, Homo sapiens
  Payload ID: 17789
  Gene Name: TIA1 cytotoxic granule-associated RNA binding protein-like 1
  ENSP ID: ENSP00000358082
MITEHTSNDPYCFVEFYEHRDAAAALAAMNGRKILGKEVKVNWATTPSSQKKDTSNHFHVFVGDLSPEITTEDIKSAFAPFGKIS

SEQ ID NO: 88873 - protein, 392 aa, Homo sapiens
  Payload ID: 17789
  Gene Name: TIA1 cytotoxic granule-associated RNA binding protein-like 1
  Uniprot ID: Q01085
  ENSP ID: ENSP00000358089
MMEDDGQPRTLYVGNLSRDVTEVLILQLFSQIGPCKSCKMITEQPDSRRVNSSVGFSVLQHTSNDPYCFVEFYEHRDAAAALAAMNGRKILGKEVKVNWATTPSSQKKDTSNHFHVFVGDLSPEITTEDIKSAFAPFGKISDARVVKDMATGKSKGYGFVSFYNKLDAENAIVHMGGQWLGGRQIRTNWATRKPPAPKSTQENNTKQLRFEDVVNQSSPKNCTVYCGGIASGLTDQLMRQTFSPFGQIMEIRVFPEKGYSFVRFSTHESAAHAIVSVNGTTIEGHVVKCYWGKESPDMTKNFQQVDYSQWGQWSQVYGNPQQYGQYMANGWQVPPYGVYGQPWNQQGFGVDQSPSAAWMGGFGAQPPQGQAPPPVIPPPNQAGYGMASYQTQ

SEQ ID NO: 88874 - protein, 375 aa, Homo sapiens
  Payload ID: 17789
  Gene Name: TIA1 cytotoxic granule-associated RNA binding protein-like 1
  Uniprot ID: Q01085
  ENSP ID: ENSP00000394902
MMEDDGQPRTLYVGNLSRDVTEVLILQLFSQIGPCKSCKMITEHTSNDPYCFVEFYEHRDAAAALAAMNGRKILGKEVKVNWATTPSSQKKDTSNHFHVFVGDLSPEITTEDIKSAFAPFGKISDARVVKDMATGKSKGYGFVSFYNKLDAENAIVHMGGQWLGGRQIRTNWATRKPPAPKSTQENNTKQLRFEDVVNQSSPKNCTVYCGGIASGLTDQLMRQTFSPFGQIMEIRVFPEKGYSFVRFSTHESAAHAIVSVNGTTIEGHVVKCYWGKESPDMTKNFQQVDYSQWGQWSQVYGNPQQYGQYMANGWQVPPYGVYGQPWNQQGFGVDQSPSAAWMGGFGAQPPQGQAPPPVIPPPNQAGYGMASYQTQ

SEQ ID NO: 88875 - protein, 132 aa, Homo sapiens
  Payload ID: 17789
  Gene Name: TIA1 cytotoxic granule-associated RNA binding protein-like 1
  ENSP ID: ENSP00000403573
MITEHTSNDPYCFVEFYEHRDAAAALAAMNGRKILGKEVKVNWATTPSSQKKDTSNHFHVFVGDLSPEITTEDIKSAFAPFGKISDARVVKDMATGKSKGYGFVSFYNKLDAENAIVHMGGQWLGGRQIRTN

SEQ ID NO: 88876 - protein, 135 aa, Homo sapiens
  Payload ID: 17789
  Gene Name: TIA1 cytotoxic granule-associated RNA binding protein-like 1
  ENSP ID: ENSP00000431009
MMEDDGQPRTLYVGNLSRDVTEVLILQLFSQIGPCKSCKMITEHTSNDPYCFVEFYEHRDAAAALAAMNGRKILGKEVKVNWATTPSSQKKDTSNHFHVFVGDLSPEITTEDIKSAFAPFGKISIAHKNGQDLEG

SEQ ID NO: 88877 - protein, 28 aa, Homo sapiens
  Payload ID: 17789
  Gene Name: TIA1 cytotoxic granule-associated RNA binding protein-like 1
  ENSP ID: ENSP00000480825
MMEDDGQPRTLHTQAKTYGSIFRKQYGV

SEQ ID NO: 88878 - protein, 591 aa, Homo sapiens
  Payload ID: 17790
  Gene Name: tigger transposable element derived 1
  Uniprot ID: Q96MW7
  ENSP ID: ENSP00000386186
MASKCSSERKSRTSLTLNQKLEMIKLSEEGMSKAEIGRRLGLLRQTVSQVVNAKEKFLKEVKSATPMNTRMIRKRNSLIADMEKVLVVWIEDQTSRNIPLSQSLIQNKALTLFNSMKAERGVEAAEEKFEASRGWFMRFKERSHFHNIKAQGEAASADVEAAASYPEALAKIIDEGGYTKQQIFNVDETAFYWKKMPSRTFIAREEKSVPGFKASKDRLTLLLGANAAGDFKLKPMLIYHSENPRALKNYTKSTLPVLYKWNSKARMTAHLFTAWFTEYFKPTVETYCSEKKIPFKILLLIDNAPSHPRALMEIYEEINVIFMPANTTSILQPMDQGVISTFKSYYLRNTFHKALAAMDSDVSDGSGQSKLKTFWKGFTILDAIKNIRDSWEEVKLSTLTGVWKKLIPTLIDDYEGFKTSVEEVSADVVEIAKELELEVEPEDVTELLQSHDKTLTDEELFLMDAQRKWFLEMESTPGEDAVNIVEMTTKDLEYYINLVDKAAAGFERIDSNFERSSTVGKMLSNSIACYREIFHERKSQLMRKASPMSYFRKLPQPPQPSAATTLTSQQPSTSRQDPPPAKRVRLTEGSD

SEQ ID NO: 88879 - protein, 525 aa, Homo sapiens
  Payload ID: 17791
  Gene Name: tigger transposable element derived 2
  Uniprot ID: Q4W5G0
  ENSP ID: ENSP00000317170
MLGKRKRVVLTIKDKLDIIKKLEEGISFKKLSVVYGIGESTVRDIKKNKERIINYANSSDPTSGVSKRKSMKSSTYEELDRVMIEWFNQQKTDGIPVSGTICAKQAKFFFDALGMEGDFNASSGWLTRFKQRHGIPKAAGKGTKLKGDETAAREFCGSFQEFVEKENLQPEQIYGADQTGLFWKCLPSRTLTLETDQSTSGCRSSRERIIIMCCANATGLHKLNLCVVGKAKKPRAFKGTDLSNLPVTYYSQKGAWIEQSVFRQWFEKYFVPQVQKHLKSKGLLEKAVLLLDFPPARPNEEMLSSDDGRIIVKYLPPNVTSLIQPMSQGVLATVKRYYRAGLLQKYMDEGNDPKIFWKNLTVLDAIYEVSRAWNMVKSSTITKAWKKLFPGNEENSGMNIDEGAILAANLATVLQNTEECEHVDIENIDQWFDSRSSDSSCQVLTDSESAEDQTKAAEQKPSSKSRKTELNPEKHISHKAALEWTENLLDYLEQQDDMLLSDKLVLRRLRTIIRKKQKIQNNKNH

SEQ ID NO: 88880 - protein, 525 aa, Homo sapiens; identical to SEQ ID NO: 88879
  Payload ID: 17791
  Gene Name: tigger transposable element derived 2
  Uniprot ID: Q4W5G0
  ENSP ID: ENSP00000486687

SEQ ID NO: 88881 - protein, 471 aa, Homo sapiens
  Payload ID: 17792
  Gene Name: tigger transposable element derived 3
  Uniprot ID: Q6B0B8
  ENSP ID: ENSP00000308354
MELSSKKKLHALSLAEKIQVLELLDESKMSQSEVARRFQVSQPQISRICKNKEKLLADWCSGTANRERKRKRESKYSGIDEALLCWYHIARAKAWDVTGPMLLHKAKELADIMGQDFVPSIGWLVRWKRRNNVGFGARHVLAPSFPPEPPPPGLTSQAQLPLSLKDFSPEDVFGCAELPLLYRAVPGSFGACDQVQVLLCANSRGTEKRRVLLGGLQAAPRCFFGIRSEALPASYHPDLGIPWLEWLAQFDRDMGQQGRQVALLLAARVVEELAGLPGLYHVKLLPLAASSTTPPLPSSVVRAFKAHYRHRLLGKLAAIQSERDGTSLAEAGAGITVLDALHVASAAWAKVPPQLIFSSFIQEGLAPGKTPPSSHKTSEMPPVPGGLSLEEFSRFVDLEGEEPRSGVCKEEIGTEDEKGDREGAFEPLPTKADALRALGTLRRWFECNSTSPELFEKFYDCEEEVERLCCL

SEQ ID NO: 88882 - protein, 512 aa, Homo sapiens
  Payload ID: 17793
  Gene Name: tigger transposable element derived 4
  Uniprot ID: Q8IY51
  ENSP ID: ENSP00000355162
MAEASVDASTLPVTVKKKKSLSIEEKIDIINAVESGKKKAEIAAEYGIKKNSLSSIMKNKDKVLEAFESLRFDPKRKRLRTAFYTDLEEALMRWYRIAQCLNVPVNGPMLRLKANDFAQKLGHNDFKCSNGWLDRFKSRYGLVFRAQPVEATGVPVDPSTVWYQNVLPYYLNDYHPKNVFNIKETGLLYRMLPTNTFAFKGETCSVGKLCKDRITLVVGTNMDGSEKLPLLVIGKKRTPHCFKGLKSLPVCYEANRMAWMTSDVFEQWMRKLDEEFQAQQRRVVIFVESFPAHPEVKNLKSIELAFFPSCLSSKCIAMKQGVIKSLKIKYRHCLIKKFLSSVEGSKEFTFSLLDAVDTLHLCWRAVTPETIVKSYEEAGFKSQKGESDITNAEKDTGLDLVADALGAGVEFPEGLSIEEYAALDDDLETCEAAPNGDSICTKESKSDETGFYTSDEEDDDGSPGTELPLPSKSEAITALDTLKKFLRSQDMNDGLQNSLADLENFINSLSPK

SEQ ID NO: 88883 - protein, 642 aa, Homo sapiens
  Payload ID: 17794
  Gene Name: tigger transposable element derived 5
  Uniprot ID: Q53EQ6
  ENSP ID: ENSP00000315906
MYPAGPPAGPVPRRGRRPLPGPPAPAPAPVPAARPPPPAPGPRPRVAVKMAFRKAYSIKDKLQAIERVKGGERQASVCRDFGVPGGTLRGWLKDEPKLRWFLEQLGGEVGTQRKKMRLANEEEIDRAVYAWFLALRQHGVPLSGPLIQAQAEAFARQIYGPECTFKASHGWFWRWQKRHGISSQRFYGEAGPPAPSPAPGPPVKEEPALPSGAGPLPDRAPAPPPPAEGGYGDEQIYSASVTGLYWKLLPEQAAPPGAGDPGAGGCGRRWRGDRVTVLLAANLTGSHKLKPLVIGRLPDPPSLRHHNQDKFPASYRYSPDAWLSRPLLRGWFFEEFVPGVKRYLRRSCLQQKAVLLVAHPPCPSPAASMPALDSEDAPVRCRPEPLGPPEELQTPDGAVRVLFLSKGSSRAHIPAPLEQGVVAAFKQLYKRELLRLAVSCASGSPLDFMRSFMLKDMLYLAGLSWDLVQAGSIERCWLLGLRAAFEPRPGEDSAGQPAQAEEAAEHSRVLSDLTHLAALAYKCLAPEEVAEWLHLDDDGGPPEGCREEVGPALPPAAPPAPASLPSAMGGGEDEEEATDYGGTSVPTAGEAVRGLETALRWLENQDPREVGPLRLVQLRSLISMARRLGGIGHTPAGPYDGV

SEQ ID NO: 88884 - protein, 642 aa, Homo sapiens; identical to SEQ ID NO: 88883
  Payload ID: 17794
  Gene Name: tigger transposable element derived 5
  Uniprot ID: Q53EQ6
  ENSP ID: ENSP00000421489

SEQ ID NO: 88885 - protein, 521 aa, Homo sapiens
  Payload ID: 17795
  Gene Name: tigger transposable element derived 6
  Uniprot ID: Q17RP2
  ENSP ID: ENSP00000296736
MANKGNKKRRQFSLEEKMKVVGAVDSGKRKGDVAKEFGITPSTLSTFLKDRTKFEEKVREASVGPQRKRMRSALYDDIDKAVFAWFQEIHAKNILVTGSVIRKKALNLANMLGYDNFQASVGWLNRFRDRHGIALKAVCREDSDRLMNGLGIDKINEWHAGEIIKLIADYSPDDIFNADETGVFFQLLPQHTLAAKGDHCRGGKKAKQRLTALFCCNASGTEKMRPLIVGRSASPHCLKNIHSLPCDYRANQWAWMTRDLFNEWLMQVDARMKRAERRILLLIDNCSAHNMLPHLERIQVGYLPSNCTAVLQPLNLGIIHTMKVLYQSHLLKQILLKLNSSEDQEEVDIKQAIDMIAAAWWSVKPSTVVKCWQKAGIVPMEFAECDTESAASEPDIAIEKLWHTVAIATCVPNEVNFQDFVTADDDLIISQDTDIIQDMVAGENTSEAGSEDEGEVSLPEQPKVTITEAISSVQKLRQFLSTCVDIPDAIFGQLNGIDEYLMKRVTQTLIDSKITDFLQTK

SEQ ID NO: 88886 - protein, 521 aa, Homo sapiens; identical to SEQ ID NO: 88885
  Payload ID: 17795
  Gene Name: tigger transposable element derived 6
  Uniprot ID: Q17RP2
  ENSP ID: ENSP00000425318

SEQ ID NO: 88887 - protein, 549 aa, Homo sapiens
  Payload ID: 17796
  Gene Name: tigger transposable element derived 7
  Uniprot ID: Q6NT04
  ENSP ID: ENSP00000380071
MNKRGKYTTLNLEEKMKVLSRIEAGRSLKSVMDEFGISKSTFYDIKKNKKLILDFVLKQDMPLVGAEKRKRTTGAKYGDVDDAVYMWYQQKRSAGVPVRGVELQAAAERFARCFGRTDFKASTGWLFRFRNRHAIGNRKGCGEQVLSSVSENVEPFRQKLSMIIKEEKLCLAQLYSGDETDLFWKSMPENSQASRKDICLPGKKINKERLSAFLCANADGTHKLKSIIIGKSKLPKSVKEDTSTLPVIYKPSKDVWFTRELFSEWFFQNFVPEVRHFQLNVLRFHDEDVRALLLLDSCPAHPSSESLTSEDGRIKCMFFPHNTSTLIQPMNQGVILSCKRLYRWKQLEESLVIFEESDDEQEKGDKGVSKIKIYNIKSAIFNWAKSWEEVKQITIANAWENLLYKKEPEYDFQGLEHGDYREILEKCGELETKLDDDRVWLNGDEEKGCLLKTKGGITKEVVQKGGEAEKQTAEFKLSAVRESLDYLLDFVDATPEFQRFHFTLKEMQQEIVKKQFQSKIHSRIGSFLKPRPHNIKDSFSGPSTSGSNH

SEQ ID NO: 88888 - protein, 116 aa, Homo sapiens
  Payload ID: 17796
  Gene Name: tigger transposable element derived 7
  ENSP ID: ENSP00000459534
MNKRGKYTTLNLEEKMKVLSRIEAGRSLKSVMDEFGISKSTFYDIKKNKKLILDFVLKQDMPLVGAEKRKRTTGAKYGDVDDAVYMWYQQKRSAGVPVRGVELQAAAERFARCFGR

SEQ ID NO: 88889 - protein, 547 aa, Homo sapiens
  Payload ID: 17797
  Gene Name: tight junction associated protein 1 (peripheral)
  Uniprot ID: Q5JTD0
  ENSP ID: ENSP00000259751
MTSAAPAKKPYRKAPPEHRELRLEIPGSRLEQEEPLTDAERMKLLQEENEELRRRLASATRRTEALERELEIGQDCLELELGQSREELDKFKDKFRRLQNSYTASQRTNQELEDKLHTLIKKAEMDRKTLDWEIVELTNKLLDAKNTINKLEELNERYRLDCNLAVQLLKCNKSHFRNHKFADLPCELQDMVRKHLHSGQEAASPGPAPSLAPGAVVPTSVIARVLEKPESLLLNSAQSGSAGRPLAEDVFVHVDMSEGVPGDPASPPAPGSPTPQPNGECHSLGTARGSPEEELPLPAFEKLNPYPTPSPPHPLYPGRRVIEFSEDKVRIPRNSPLPNCTYATRQAISLSLVEEGSERARPSPVPSTPASAQASPHHQPSPAPLTLSAPASSASSEEDLLVSWQRAFVDRTPPPAAVAQRTAFGRDALPELQRHFAHSPADRDEVVQAPSARPEESELLLPTEPDSGFPREEEELNLPISPEEERQSLLPINRGTEEGPGTSHTEGRAWPLPSSSRPQRSPKRMGVHHLHRKDSLTQAQEQGNLLN

SEQ ID NO: 88890 - protein, 547 aa, Homo sapiens; identical to SEQ ID NO: 88889
  Payload ID: 17797
  Gene Name: tight junction associated protein 1 (peripheral)
  Uniprot ID: Q5JTD0
  ENSP ID: ENSP00000361521

SEQ ID NO: 88891 - protein, 557 aa, Homo sapiens
  Payload ID: 17797
  Gene Name: tight junction associated protein 1 (peripheral)
  Uniprot ID: Q5JTD0
  ENSP ID: ENSP00000361522
MTSAAPAKKPYRKAPPEHRELRLEIPGSRLEQEEPLTDAERMKLLQEENEELRRRLASATRRTEALERELEIGQDCLELELGQSREELDKFKDKFRRLQNSYTASQRTNQELEDKLHTLASLSHSWIFAIKKAEMDRKTLDWEIVELTNKLLDAKNTINKLEELNERYRLDCNLAVQLLKCNKSHFRNHKFADLPCELQDMVRKHLHSGQEAASPGPAPSLAPGAVVPTSVIARVLEKPESLLLNSAQSGSAGRPLAEDVFVHVDMSEGVPGDPASPPAPGSPTPQPNGECHSLGTARGSPEEELPLPAFEKLNPYPTPSPPHPLYPGRRVIEFSEDKVRIPRNSPLPNCTYATRQAISLSLVEEGSERARPSPVPSTPASAQASPHHQPSPAPLTLSAPASSASSEEDLLVSWQRAFVDRTPPPAAVAQRTAFGRDALPELQRHFAHSPADRDEVVQAPSARPEESELLLPTEPDSGFPREEEELNLPISPEEERQSLLPINRGTEEGPGTSHTEGRAWPLPSSSRPQRSPKRMGVHHLHRKDSLTQAQEQGNLLN

SEQ ID NO: 88892 - protein, 557 aa, Homo sapiens; identical to SEQ ID NO: 88891
  Payload ID: 17797
  Gene Name: tight junction associated protein 1 (peripheral)
  Uniprot ID: Q5JTD0
  ENSP ID: ENSP00000361527

SEQ ID NO: 88893 - protein, 547 aa, Homo sapiens; identical to SEQ ID NO: 88889
  Payload ID: 17797
  Gene Name: tight junction associated protein 1 (peripheral)
  Uniprot ID: Q5JTD0
  ENSP ID: ENSP00000361530

SEQ ID NO: 88894 - protein, 100 aa, Homo sapiens
  Payload ID: 17797
  Gene Name: tight junction associated protein 1 (peripheral)
  ENSP ID: ENSP00000361532
MTSAAPAKKPYRKAPPEHRELRLEIPGSRLEQEEPLTDAERMKLLQEENEELRRRLASATRRTEALERELEIGQDCLELELGQSREELDKFKDKFRRLQN

SEQ ID NO: 88895 - protein, 193 aa, Homo sapiens
  Payload ID: 17797
  Gene Name: tight junction associated protein 1 (peripheral)
  ENSP ID: ENSP00000390981
MTSAAPAKKPYRKAPPEHRELRLEIPGSRLEQEEPLTDAERMKLLQEENEELRRRLASATRRTEALERELEIGQDCLELELGQSREELDKFKDKFRRLQNSYTASQRTNQELEDKLHTLASLSHSWIFAIKKAEMDRKTLDWEIVELTNKLLDAKNTINKLEELNERYRLDCNLAVQLLKCNKSHFRNHKFAD

SEQ ID NO: 88896 - protein, 239 aa, Homo sapiens
  Payload ID: 17797
  Gene Name: tight junction associated protein 1 (peripheral)
  ENSP ID: ENSP00000391115
  MOD_RES (1)..(1): Any amino acid
XLLQEENEELRRRLASATRRTEALERELEIGQDCLELELGQSREELDKFKDKFRRLQNSYTASQRTNQELEDKLHTLIKKAEMDRKTLDWEIVELTNKLLDAKNTINKLEELNERYRLDCNLAVQLLKCNKSHFRNHKFADVSRTHPLPAHIDHSGHCRTPLTPVSAPLSVLLFPLCPPLASMSPLKPVNSATGWCPVYCPGPITSSGGPALLVSVTETEREDPGQEGEGSQSYLPKEY

SEQ ID NO: 88897 - protein, 547 aa, Homo sapiens; identical to SEQ ID NO: 88889
  Payload ID: 17797
  Gene Name: tight junction associated protein 1 (peripheral)
  Uniprot ID: Q5JTD0
  ENSP ID: ENSP00000407080

SEQ ID NO: 88898 - protein, 557 aa, Homo sapiens; identical to SEQ ID NO: 88891
  Payload ID: 17797
  Gene Name: tight junction associated protein 1 (peripheral)
  Uniprot ID: Q5JTD0
  ENSP ID: ENSP00000408769

SEQ ID NO: 88899 - protein, 43 aa, Homo sapiens
  Payload ID: 17797
  Gene Name: tight junction associated protein 1 (peripheral)
  Uniprot ID: Q5JTD0
  ENSP ID: ENSP00000484142
MTSAAPAKKPYRKAPPEHRELRLEIPGSRLEQEEPLTDAERMK

SEQ ID NO: 88900 - protein, 1748 aa, Homo sapiens
  Payload ID: 17798
  Gene Name: tight junction protein 1
  Uniprot ID: Q07157
  ENSP ID: ENSP00000281537
MSARAAAAKSTAMEETAIWEQHTVTLHRAPGFGFGIAISGGRDNPHFQSGETSIVISDVLKGGPAEGQLQENDRVAMVNGVSMDNVEHAFAVQQLRKSGKNAKITIRRKKKVQIPVSRPDPEPVSDNEEDSYDEEIHDPRSGRSGVVNRRSEKIWPRDRSASRERSLSPRSDRRSVASSQPAKPTKVTLVKSRKNEEYGLRLASHIFVKEISQDSLAARDGNIQEGDVVLKINGTVTENMSLTDAKTLIERSKGKLKMVVQRDERATLLNVPDLSDSIHSANASERDDISEIQSLASDHSGRSHDRPPRRSRSRSPDQRSEPSDHSRHSPQQPSNGSLRSRDEERISKPGAVSTPVKHADDHTPKTVEEVTVERNEKQTPSLPEPKPVYAQVGQPDVDLPVSPSDGVLPNSTHEDGILRPSMKLVKFRKGDSVGLRLAGGNDVGIFVAGVLEDSPAAKEGLEEGDQILRVNNVDFTNIIREEAVLFLLDLPKGEEVTILAQKKKDVYRRIVESDVGDSFYIRTHFEYEKESPYGLSFNKGEVFRVVDTLYNGKLGSWLAIRIGKNHKEVERGIIPNKNRAEQLASVQYTLPKTAGGDRADFWRFRGLRSSKRNLRKSREDLSAQPVQTKFPAYERVVLREAGFLRPVTIFGPIADVAREKLAREEPDIYQIAKSEPRDAGTDQRSSGIIRLHTIKQIIDQDKHALLDVTPNAVDRLNYAQWYPIVVFLNPDSKQGVKTMRMRLCPESRKSARKLYERSHKLRKNNHHLFTTTINLNSMNDGWYGALKEAIQQQQNQLVWVSEGKADGATSDDLDLHDDRLSYLSAPGSEYSMYSTDSRHTSDYEDTDTEGGAYTDQELDETLNDEVGTPPESAITRSSEPVREDSSGMHHENQTYPPYSPQAQPQPIHRIDSPGFKPASQQKAEASSPVPYLSPETNPASSTSAVNHNVNLTNVRLEEPTPAPSTSYSPQADSLRTPSTEAAHIMLRDQEPSLSSHVDPTKVYRKDPYPEEMMRQNHVLKQPAVSHPGHRPDKEPNLTYEPQLPYVEKQASRDLEQPTYRYESSSYTDQFSRNYEHRLRYEDRVPMYEEQWSYYDDKQPYPSRPPFDNQHSQDLDSRQHPEESSERGYFPRFEEPAPLSYDSRPRYEQAPRASALRHEEQPAPGYDTHGRLRPEAQPHPSAGPKPAESKQYFEQYSRSYEQVPPQGFTSRAGHFEPLHGAAAVPPLIPSSQHKPEALPSNTKPLPPPPTQTEEEEDPAMKPQSVLTRVKMFENKRSASLETKKDVNDTGSFKPPEVASKPSGAPIIGPKPTSQNQFSEHDKTLYRIPEPQKPQLKPPEDIVRSNHYDPEEDEEYYRKQLSYFDRRSFENKPPAHIAASHLSEPAKPAHSQNQSNFSSYSSKGKPPEADGVDRSFGEKRYEPIQATPPPPPLPSQYAQPSQPVTSASLHIHSKGAHGEGNSVSLDFQNSLVSKPDPPPSQNKPATFRPPNREDTAQAAFYPQKSFPDKAPVNGTEQTQKTVTPAYNRFTPKPYTSSARPFERKFESPKFNHNLLPSETAHKPDLSSKTPTSPKTLVKSHSLAQPPEFDSGVETFSIHAEKPKYQINNISTVPKAIPVSPSAVEEDEDEDGHTVVATARGIFNSNGGVLSSIETGVSIIIPQGAIPEGVEQEIYFKVCRDNSILPPLDKEKGETLLSPLVMCGPHGLKFLKPVELRLPHCDPKTWQNKCLPGDPNYLVGANCVSVLIDHF

SEQ ID NO: 88901 - protein, 1768 aa, Homo sapiens
  Payload ID: 17798
  Gene Name: tight junction protein 1
  ENSP ID: ENSP00000348416
MSARAAAAKSTAMEETAIWEQHTVTLHRAPGFGFGIAISGGRDNPHFQSGETSIVISDVLKGGPAEGQLQENDRVAMVNGVSMDNVEHAFAVQQLRKSGKNAKITIRRKKKVQIPVSRPDPEPVSDNEEDSYDEEIHDPRSGRSGVVNRRSEKIWPRDRSASRERSLSPRSDRRSVASSQPAKPTKVTLVKSRKNEEYGLRLASHIFVKEISQDSLAARDGNIQEGDVVLKINGTVTENMSLTDAKTLIERSKGKLKMVVQRDERATLLNVPDLSDSIHSANASERDDISEIQSLASDHSGRSHDRPPRRSRSRSPDQRSEPSDHSRHSPQQPSNGSLRSRDEERISKPGAVSTPVKHADDHTPKTVEEVTVERNEKQTPSLPEPKPVYAQVGQPDVDLPVSPSDGVLPNSTHEDGILRPSMKLVKFRKGDSVGLRLAGGNDVGIFVAGVLEDSPAAKEGLEEGDQILRVNNVDFTNIIREEAVLFLLDLPKGEEVTILAQKKKDVYRRIVESDVGDSFYIRTHFEYEKESPYGLSFNKGEVFRVVDTLYNGKLGSWLAIRIGKNHKEVERGIIPNKNRAEQLASVQYTLPKTAGGDRADFWRFRGLRSSKRNLRKSREDLSAQPVQTKFPAYERVVLREAGFLRPVTIFGPIADVAREKLAREEPDIYQIAKSEPRDAGTDQRSSGIIRLHTIKQIIDQDKHALLDVTPNAVDRLNYAQWYPIVVFLNPDSKQGVKTMRMRLCPESRKSARKLYERSHKLRKNNHHLFTTTINLNSMNDGWYGALKEAIQQQQNQLVWVSEGKADGATSDDLDLHDDRLSYLSAPGSEYSMYSTDSRHTSDYEDTDTEGGAYTDQELDETLNDEVGTPPESAITRSSEPVREDSSGMHHENQTYPPYSPQAQPQPIHRIDSPGFKPASQQKAEASSPVPYLSPETNPASSTSAVNHNVNLTNVRLEEPTPAPSTSYSPQADSLRTPSTEAAHIMLRDQEPSLSSHVDPTKVYRKDPYPEEMMRQNHVLKQPAVSHPGHRPDKEPNLTYEPQLPYVEKQASRDLEQPTYRYESSSYTDQFSRNYEHRLRYEDRVPMYEEQWSYYDDKQPYPSRPPFDNQHSQDLDSRQHPEESSERGYFPRFEEPAPLSYDSRPRYEQAPRASALRHEEQPAPGYDTHGRLRPEAQPHPSAGPKPAESKQYFEQYSRSYEQVPPQGFTSRAGHFEPLHGAAAVPPLIPSSQHKPEALPSNTKPLPPPPTQTEEEEDPAMKPQSVLTRVKMFENKRSASLETKKDVNDTGSFKPPEVASKPSGAPIIGPKPTSQNQFSEHDKTLYRIPEPQKPQLKPPEDIVRSNHYDPEEDEEYYRKQLSYFDRRSFENKPPAHIAASHLSEPAKPAHSQNQSNFSSYSSKGKPPEADGVDRSFGEKRYEPIQATPPPPPLPSQYAQPSQPVTSASLHIHSKGAHGEGNSVSLDFQNSLVSKPDPPPSQNKPATFRPPNREDTAQAAFYPQKSFPDKAPVNGTEQTQKTVTPAYNRFTPKPYTSSARPFERKFESPKFNHNLLPSETAHKPDLSSKTPTSPKTLVKSHSLAQPPEFDSGVETFSIHAEKPKYQINNISTVPKAIPVSPSAVEEDEDEDGHTVVATARGIFNSNGGVLSSIETGVSIIIPQGAIPEGVEQEIYFKVCRDNSILPPLDKEKGETLLSPLVMCGPHGLKFLKPVELRLPHCASMTPDGWSFALKSSDSSSGDPKTWQNKCLPGDPNYLVGANCVSVLIDHF

SEQ ID NO: 88902 - protein, 227 aa, Homo sapiens
  Payload ID: 17798
  Gene Name: tight junction protein 1
  ENSP ID: ENSP00000382887
  MOD_RES (1)..(1): Any amino acid
XKPYTSSARPFERKFESPKFNHNLLPSETAHKPDLSSKTPTSPKTLVKSHSLAQPPEFDSGVETFSIHAEKPKYQINNISTVPKAIPVSPSAVEEDEDEDGHTVVATARGIFNSNGGVLSSIETGVSIIIPQGAIPEGVEQEIYFKVCRDNSILPPLDKEKGETLLSPLVMCGPHGLKFLKPVELRLPHCASMTPDGDPKTWQNKCLPGDPNYLVGANCVSVLIDHF

SEQ ID NO: 88903 - protein, 1692 aa, Homo sapiens
  Payload ID: 17798
  Gene Name: tight junction protein 1
  ENSP ID: ENSP00000382890
MERNTFSMDCHSKSTAMEETAIWEQHTVTLHRAPGFGFGIAISGGRDNPHFQSGETSIVISDVLKGGPAEGQLQENDRVAMVNGVSMDNVEHAFAVQQLRKSGKNAKITIRRKKKVQIPVSRPDPEPVSDNEEDSYDEEIHDPRSGRSGVVNRRSEKIWPRDRSASRERSLSPRSDRRSVASSQPAKPTKVTLVKSRKNEEYGLRLASHIFVKEISQDSLAARDGNIQEGDVVLKINGTVTENMSLTDAKTLIERSKGKLKMVVQRDERATLLNVPDLSDSIHSANASERDDISEIQSLASDHSGRSHDRPPRRSRSRSPDQRSEPSDHSRHSPQQPSNGSLRSRDEERISKPGAVSTPVKHADDHTPKTVEEVTVERNEKQTPSLPEPKPVYAQVGQPDVDLPVSPSDGVLPNSTHEDGILRPSMKLVKFRKGDSVGLRLAGGNDVGIFVAGVLEDSPAAKEGLEEGDQILRVNNVDFTNIIREEAVLFLLDLPKGEEVTILAQKKKDVYRRIVESDVGDSFYIRTHFEYEKESPYGLSFNKGEVFRVVDTLYNGKLGSWLAIRIGKNHKEVERGIIPNKNRAEQLASVQYTLPKTAGGDRADFWRFRGLRSSKRNLRKSREDLSAQPVQTKFPAYERVVLREAGFLRPVTIFGPIADVAREKLAREEPDIYQIAKSEPRDAGTDQRSSGIIRLHTIKQIIDQDKHALLDVTPNAVDRLNYAQWYPIVVFLNPDSKQGVKTMRMRLCPESRKSARKLYERSHKLRKNNHHLFTTTINLNSMNDGWYGALKEAIQQQQNQLVWVSEGKADGATSDDLDLHDDRLSYLSAPGSEYSMYSTDSRHTSDYEDTDTEGGAYTDQELDETLNDEVGTPPESAITRSSEPVREDSSGMHHENQTYPPYSPQAQPQPIHRIDSPGFKPASQQVYRKDPYPEEMMRQNHVLKQPAVSHPGHRPDKEPNLTYEPQLPYVEKQASRDLEQPTYRYESSSYTDQFSRNYEHRLRYEDRVPMYEEQWSYYDDKQPYPSRPPFDNQHSQDLDSRQHPEESSERGYFPRFEEPAPLSYDSRPRYEQAPRASALRHEEQPAPGYDTHGRLRPEAQPHPSAGPKPAESKQYFEQYSRSYEQVPPQGFTSRAGHFEPLHGAAAVPPLIPSSQHKPEALPSNTKPLPPPPTQTEEEEDPAMKPQSVLTRVKMFENKRSASLETKKDVNDTGSFKPPEVASKPSGAPIIGPKPTSQNQFSEHDKTLYRIPEPQKPQLKPPEDIVRSNHYDPEEDEEYYRKQLSYFDRRSFENKPPAHIAASHLSEPAKPAHSQNQSNFSSYSSKGKPPEADGVDRSFGEKRYEPIQATPPPPPLPSQYAQPSQPVTSASLHIHSKGAHGEGNSVSLDFQNSLVSKPDPPPSQNKPATFRPPNREDTAQAAFYPQKSFPDKAPVNGTEQTQKTVTPAYNRFTPKPYTSSARPFERKFESPKFNHNLLPSETAHKPDLSSKTPTSPKTLVKSHSLAQPPEFDSGVETFSIHAEKPKYQINNISTVPKAIPVSPSAVEEDEDEDGHTVVATARGIFNSNGGVLSSIETGVSIIIPQGAIPEGVEQEIYFKVCRDNSILPPLDKEKGETLLSPLVMCGPHGLKFLKPVELRLPHCASMTPDGWSFALKSSDSSSGDPKTWQNKCLPGDPNYLVGANCVSVLIDHF

SEQ ID NO: 88904 - protein, 1668 aa, Homo sapiens
  Payload ID: 17798
  Gene Name: tight junction protein 1
  Uniprot ID: Q07157
  ENSP ID: ENSP00000441202
MSARAAAAKSTAMEETAIWEQHTVTLHRAPGFGFGIAISGGRDNPHFQSGETSIVISDVLKGGPAEGQLQENDRVAMVNGVSMDNVEHAFAVQQLRKSGKNAKITIRRKKKVQIPVSRPDPEPVSDNEEDSYDEEIHDPRSGRSGVVNRRSEKIWPRDRSASRERSLSPRSDRRSVASSQPAKPTKVTLVKSRKNEEYGLRLASHIFVKEISQDSLAARDGNIQEGDVVLKINGTVTENMSLTDAKTLIERSKGKLKMVVQRDERATLLNVPDLSDSIHSANASERDDISEIQSLASDHSGRSHDRPPRRSRSRSPDQRSEPSDHSRHSPQQPSNGSLRSRDEERISKPGAVSTPVKHADDHTPKTVEEVTVERNEKQTPSLPEPKPVYAQVGQPDVDLPVSPSDGVLPNSTHEDGILRPSMKLVKFRKGDSVGLRLAGGNDVGIFVAGVLEDSPAAKEGLEEGDQILRVNNVDFTNIIREEAVLFLLDLPKGEEVTILAQKKKDVYRRIVESDVGDSFYIRTHFEYEKESPYGLSFNKGEVFRVVDTLYNGKLGSWLAIRIGKNHKEVERGIIPNKNRAEQLASVQYTLPKTAGGDRADFWRFRGLRSSKRNLRKSREDLSAQPVQTKFPAYERVVLREAGFLRPVTIFGPIADVAREKLAREEPDIYQIAKSEPRDAGTDQRSSGIIRLHTIKQIIDQDKHALLDVTPNAVDRLNYAQWYPIVVFLNPDSKQGVKTMRMRLCPESRKSARKLYERSHKLRKNNHHLFTTTINLNSMNDGWYGALKEAIQQQQNQLVWVSEGKADGATSDDLDLHDDRLSYLSAPGSEYSMYSTDSRHTSDYEDTDTEGGAYTDQELDETLNDEVGTPPESAITRSSEPVREDSSGMHHENQTYPPYSPQAQPQPIHRIDSPGFKPASQQVYRKDPYPEEMMRQNHVLKQPAVSHPGHRPDKEPNLTYEPQLPYVEKQASRDLEQPTYRYESSSYTDQFSRNYEHRLRYEDRVPMYEEQWSYYDDKQPYPSRPPFDNQHSQDLDSRQHPEESSERGYFPRFEEPAPLSYDSRPRYEQAPRASALRHEEQPAPGYDTHGRLRPEAQPHPSAGPKPAESKQYFEQYSRSYEQVPPQGFTSRAGHFEPLHGAAAVPPLIPSSQHKPEALPSNTKPLPPPPTQTEEEEDPAMKPQSVLTRVKMFENKRSASLETKKDVNDTGSFKPPEVASKPSGAPIIGPKPTSQNQFSEHDKTLYRIPEPQKPQLKPPEDIVRSNHYDPEEDEEYYRKQLSYFDRRSFENKPPAHIAASHLSEPAKPAHSQNQSNFSSYSSKGKPPEADGVDRSFGEKRYEPIQATPPPPPLPSQYAQPSQPVTSASLHIHSKGAHGEGNSVSLDFQNSLVSKPDPPPSQNKPATFRPPNREDTAQAAFYPQKSFPDKAPVNGTEQTQKTVTPAYNRFTPKPYTSSARPFERKFESPKFNHNLLPSETAHKPDLSSKTPTSPKTLVKSHSLAQPPEFDSGVETFSIHAEKPKYQINNISTVPKAIPVSPSAVEEDEDEDGHTVVATARGIFNSNGGVLSSIETGVSIIIPQGAIPEGVEQEIYFKVCRDNSILPPLDKEKGETLLSPLVMCGPHGLKFLKPVELRLPHCDPKTWQNKCLPGDPNYLVGANCVSVLIDHF

SEQ ID NO: 88905 - protein, 383 aa, Homo sapiens
  Payload ID: 17798
  Gene Name: tight junction protein 1
  ENSP ID: ENSP00000452729
MSARAAAAKSTAMEETAIWEQHTVTLHRAPGFGFGIAISGGRDNPHFQSGETSIVISDVLKGGPAEGQLQENDRVAMVNGVSMDNVEHAFAVQQLRKSGKNAKITIRRKKKVQIPVSRPDPEPVSDNEEDSYDEEIHDPRSGRSGVVNRRSEKIWPRDRSASRERSLSPRSDRRSVASSQPAKPTKVTLVKSRKNEEYGLRLASHIFVKEISQDSLAARDGNIQEGDVVLKINGTVTENMSLTDAKTLIERSKGKLKMVVQRDERATLLNVPDLSDSIHSANASERDDISEIQSLASDHSGRSHDRPPRRSRSRSPDQRSEPSDHSRHSPQQPSNGRVTRTFENLKKIMILLSRKMCMCTYTQQLHTISGDSQGSIGHHLTHG

SEQ ID NO: 88906 - protein, 231 aa, Homo sapiens
  Payload ID: 17798
  Gene Name: tight junction protein 1
  ENSP ID: ENSP00000453334
MRRLEGLCLRRRRRRRGPARERSGDKMKYQKYLTVLQMAIGVTPSNRGSLLPLKRKLWVTPSSENPNGATSSVSQGKPSLRRIKGRLHRSKSLDSMDFCELTSTAMEETAIWEQHTVTLHRAPGFGFGIAISGGRDNPHFQSGETSIVISDVLKGGPAEGQLQENDRVAMVNGVSMDNVEHAFAVQQLRKSGKNAKITIRRKKKVQIPVSRPDPEPVSDNEEDSYDEEIHD

SEQ ID NO: 88907 - protein, 1676 aa, Homo sapiens
  Payload ID: 17798
  Gene Name: tight junction protein 1
  ENSP ID: ENSP00000481375
MEETAIWEQHTVTLHRAPGFGFGIAISGGRDNPHFQSGETSIVISDVLKGGPAEGQLQENDRVAMVNGVSMDNVEHAFAVQQLRKSGKNAKITIRRKKKVQIPVSRPDPEPVSDNEEDSYDEEIHDPRSGRSGVVNRRSEKIWPRDRSASRERSLSPRSDRRSVASSQPAKPTKVTLVKSRKNEEYGLRLASHIFVKEISQDSLAARDGNIQEGDVVLKINGTVTENMSLTDAKTLIERSKGKLKMVVQRDERATLLNVPDLSDSIHSANASERDDISEIQSLASDHSGRSHDRPPRRSRSRSPDQRSEPSDHSRHSPQQPSNGSLRSRDEERISKPGAVSTPVKHADDHTPKTVEEVTVERNEKQTPSLPEPKPVYAQVGQPDVDLPVSPSDGVLPNSTHEDGILRPSMKLVKFRKGDSVGLRLAGGNDVGIFVAGVLEDSPAAKEGLEEGDQILRVNNVDFTNIIREEAVLFLLDLPKGEEVTILAQKKKDVYRRIVESDVGDSFYIRTHFEYEKESPYGLSFNKGEVFRVVDTLYNGKLGSWLAIRIGKNHKEVERGIIPNKNRAEQLASVQYTLPKTAGGDRADFWRFRGLRSSKRNLRKSREDLSAQPVQTKFPAYERVVLREAGFLRPVTIFGPIADVAREKLAREEPDIYQIAKSEPRDAGTDQRSSGIIRLHTIKQIIDQDKHALLDVTPNAVDRLNYAQWYPIVVFLNPDSKQGVKTMRMRLCPESRKSARKLYERSHKLRKNNHHLFTTTINLNSMNDGWYGALKEAIQQQQNQLVWVSEGKADGATSDDLDLHDDRLSYLSAPGSEYSMYSTDSRHTSDYEDTDTEGGAYTDQELDETLNDEVGTPPESAITRSSEPVREDSSGMHHENQTYPPYSPQAQPQPIHRIDSPGFKPASQQVYRKDPYPEEMMRQNHVLKQPAVSHPGHRPDKEPNLTYEPQLPYVEKQASRDLEQPTYRYESSSYTDQFSRNYEHRLRYEDRVPMYEEQWSYYDDKQPYPSRPPFDNQHSQDLDSRQHPEESSERGYFPRFEEPAPLSYDSRPRYEQAPRASALRHEEQPAPGYDTHGRLRPEAQPHPSAGPKPAESKQYFEQYSRSYEQVPPQGFTSRAGHFEPLHGAAAVPPLIPSSQHKPEALPSNTKPLPPPPTQTEEEEDPAMKPQSVLTRVKMFENKRSASLETKKDVNDTGSFKPPEVASKPSGAPIIGPKPTSQNQFSEHDKTLYRIPEPQKPQLKPPEDIVRSNHYDPEEDEEYYRKQLSYFDRRSFENKPPAHIAASHLSEPAKPAHSQNQSNFSSYSSKGKPPEADGVDRSFGEKRYEPIQATPPPPPLPSQYAQPSQPVTSASLHIHSKGAHGEGNSVSLDFQNSLVSKPDPPPSQNKPATFRPPNREDTAQAAFYPQKSFPDKAPVNGTEQTQKTVTPAYNRFTPKPYTSSARPFERKFESPKFNHNLLPSETAHKPDLSSKTPTSPKTLVKSHSLAQPPEFDSGVETFSIHAEKPKYQINNISTVPKAIPVSPSAVEEDEDEDGHTVVATARGIFNSNGGVLSSIETGVSIIIPQGAIPEGVEQEIYFKVCRDNSILPPLDKEKGETLLSPLVMCGPHGLKFLKPVELRLPHCASMTPDGWSFALKSSDSSSGDPKTWQNKCLPGDPNYLVGANCVSVLIDHF

SEQ ID NO: 88908 - protein, 1692 aa, Homo sapiens; identical to SEQ ID NO: 88903
  Payload ID: 17798
  Gene Name: tight junction protein 1
  ENSP ID: ENSP00000482697

SEQ ID NO: 88909 - protein, 1676 aa, Homo sapiens; identical to SEQ ID NO: 88907
  Payload ID: 17798
  Gene Name: tight junction protein 1
  ENSP ID: ENSP00000483470

SEQ ID NO: 88910 - protein, 1768 aa, Homo sapiens; identical to SEQ ID NO: 88901
  Payload ID: 17798
  Gene Name: tight junction protein 1
  Uniprot ID: Q07157
  ENSP ID: ENSP00000484535

SEQ ID NO: 88911 - protein, 383 aa, Homo sapiens; identical to SEQ ID NO: 88905
  Payload ID: 17798
  Gene Name: tight junction protein 1
  ENSP ID: ENSP00000486189

SEQ ID NO: 88912 - protein, 993 aa, Homo sapiens
  Payload ID: 17799
  Gene Name: tight junction protein 2
  Uniprot ID: Q9UDY2
  ENSP ID: ENSP00000265384
MPVRGDRGFPPRRELSGWLRAPGMEELIWEQYTVTLQKDSKRGFGIAVSGGRDNPHFENGETSIVISDVLPGGPADGLLQENDRVVMVNGTPMEDVLHSFAVQQLRKSGKVAAIVVKRPRKVQVAALQASPPLDQDDRAFEVMDEFDGRSFRSGYSERSRLNSHGGRSRSWEDSPERGRPHERARSRERDLSRDRSRGRSLERGLDQDHARTRDRSRGRSLERGLDHDFGPSRDRDRDRSRGRSIDQDYERAYHRAYDPDYERAYSPEYRRGARHDARSRGPRSRSREHPHSRSPSPEPRGRPGPIGVLLMKSRANEEYGLRLGSQIFVKEMTRTGLATKDGNLHEGDIILKINGTVTENMSLTDARKLIEKSRGKLQLVVLRDSQQTLINIPSLNDSDSEIEDISEIESNRSFSPEERRHQYSDYDYHSSSEKLKERPSSREDTPSRLSRMGATPTPFKSTGDIAGTVVPETNKEPRYQEDPPAPQPKAAPRTFLRPSPEDEAIYGPNTKMVRFKKGDSVGLRLAGGNDVGIFVAGIQEGTSAEQEGLQEGDQILKVNTQDFRGLVREDAVLYLLEIPKGEMVTILAQSRADVYRDILACGRGDSFFIRSHFECEKETPQSLAFTRGEVFRVVDTLYDGKLGNWLAVRIGNELEKGLIPNKSRAEQMASVQNAQRDNAGDRADFWRMRGQRSGVKKNLRKSREDLTAVVSVSTKFPAYERVLLREAGFKRPVVLFGPIADIAMEKLANELPDWFQTAKTEPKDAGSEKSTGVVRLNTVRQIIEQDKHALLDVTPKAVDLLNYTQWFPIVIFFNPDSRQGVKTMRQRLNPTSNKSSRKLFDQANKLKKTCAHLFTATINLNSANDSWFGSLKDTIQHQQGEAVWVSEGKMEGMDDDPEDRMSYLTAMGADYLSCDSRLISDFEDTDGEGGAYTDNELDEPAEEPLVSSITRSSEPVQHEEVRRGRPRAGTGEPGVFLALSWTAVCSGCCGRHS

SEQ ID NO: 88913 - protein, 1043 aa, Homo sapiens
  Payload ID: 17799
  Gene Name: tight junction protein 2
  Uniprot ID: Q9UDY2
  ENSP ID: ENSP00000345893
MPVRGDRGFPPRRELSGWLRAPGMEELIWEQYTVTLQKDSKRGFGIAVSGGRDNPHFENGETSIVISDVLPGGPADGLLQENDRVVMVNGTPMEDVLHSFAVQQLRKSGKVAAIVVKRPRKVQVAALQASPPLDQDDRAFEVMDEFDGRSFRSGYSERSRLNSHGGRSRSWEDSPERGRPHERARSRERDLSRDRSRGRSLERGLDQDHARTRDRSRGRSLERGLDHDFGPSRDRDRDRSRGRSIDQDYERAYHRAYDPDYERAYSPEYRRGARHDARSRGPRSRSREHPHSRSPSPEPRGRPGPIGVLLMKSRANEEYGLRLGSQIFVKEMTRTGLATKDGNLHEGDIILKINGTVTENMSLTDARKLIEKSRGKLQLVVLRDSQQTLINIPSLNDSDSEIEDISEIESNRSFSPEERRHQYSDYDYHSSSEKLKERPSSREDTPSRLSRMGATPTPFKSTGDIAGTVVPETNKEPRYQEDPPAPQPKAAPRTFLRPSPEDEAIYGPNTKMVRFKKGDSVGLRLAGGNDVGIFVAGIQEGTSAEQEGLQEGDQILKVNTQDFRGLVREDAVLYLLEIPKGEMVTILAQSRADVYRDILACGRGDSFFIRSHFECEKETPQSLAFTRGEVFRVVDTLYDGKLGNWLAVRIGNELEKGLIPNKSRAEQMASVQNAQRDNAGDRADFWRMRGQRSGVKKNLRKSREDLTAVVSVSTKFPAYERVLLREAGFKRPVVLFGPIADIAMEKLANELPDWFQTAKTEPKDAGSEKSTGVVRLNTVRQIIEQDKHALLDVTPKAVDLLNYTQWFPIVIFFNPDSRQGVKTMRQRLNPTSNKSSRKLFDQANKLKKTCAHLFTATINLNSANDSWFGSLKDTIQHQQGEAVWVSEGKMEGMDDDPEDRMSYLTAMGADYLSCDSRLISDFEDTDGEGGAYTDNELDEPAEEPLVSSITRSSEPVQHEEIEIAQKHPDIYAVPIKTHKPDPGTPQHTSSRPPEPQKAPSRPYQDTRGSYGSDAEEEEYRQQLSEHSKRGYYGQSARYRDTEL

SEQ ID NO: 88914 - protein, 1190 aa, Homo sapiens
  Payload ID: 17799
  Gene Name: tight junction protein 2
  Uniprot ID: Q9UDY2
  ENSP ID: ENSP00000366453
MPVRGDRGFPPRRELSGWLRAPGMEELIWEQYTVTLQKDSKRGFGIAVSGGRDNPHFENGETSIVISDVLPGGPADGLLQENDRVVMVNGTPMEDVLHSFAVQQLRKSGKVAAIVVKRPRKVQVAALQASPPLDQDDRAFEVMDEFDGRSFRSGYSERSRLNSHGGRSRSWEDSPERGRPHERARSRERDLSRDRSRGRSLERGLDQDHARTRDRSRGRSLERGLDHDFGPSRDRDRDRSRGRSIDQDYERAYHRAYDPDYERAYSPEYRRGARHDARSRGPRSRSREHPHSRSPSPEPRGRPGPIGVLLMKSRANEEYGLRLGSQIFVKEMTRTGLATKDGNLHEGDIILKINGTVTENMSLTDARKLIEKSRGKLQLVVLRDSQQTLINIPSLNDSDSEIEDISEIESNRSFSPEERRHQYSDYDYHSSSEKLKERPSSREDTPSRLSRMGATPTPFKSTGDIAGTVVPETNKEPRYQEDPPAPQPKAAPRTFLRPSPEDEAIYGPNTKMVRFKKGDSVGLRLAGGNDVGIFVAGIQEGTSAEQEGLQEGDQILKVNTQDFRGLVREDAVLYLLEIPKGEMVTILAQSRADVYRDILACGRGDSFFIRSHFECEKETPQSLAFTRGEVFRVVDTLYDGKLGNWLAVRIGNELEKGLIPNKSRAEQMASVQNAQRDNAGDRADFWRMRGQRSGVKKNLRKSREDLTAVVSVSTKFPAYERVLLREAGFKRPVVLFGPIADIAMEKLANELPDWFQTAKTEPKDAGSEKSTGVVRLNTVRQIIEQDKHALLDVTPKAVDLLNYTQWFPIVIFFNPDSRQGVKTMRQRLNPTSNKSSRKLFDQANKLKKTCAHLFTATINLNSANDSWFGSLKDTIQHQQGEAVWVSEGKMEGMDDDPEDRMSYLTAMGADYLSCDSRLISDFEDTDGEGGAYTDNELDEPAEEPLVSSITRSSEPVQHEESIRKPSPEPRAQMRRAASSDQLRDNSPPPAFKPEPPKAKTQNKEESYDFSKSYEYKSNPSAVAGNETPGASTKGYPPPVAAKPTFGRSILKPSTPIPPQEGEEVGESSEEQDNAPKSVLGKVKIFEKMDHKARLQRMQELQEAQNARIEIAQKHPDIYAVPIKTHKPDPGTPQHTSSRPPEPQKAPSRPYQDTRGSYGSDAEEEEYRQQLSEHSKRGYYGQSARYRDTEL

SEQ ID NO: 88915 - protein, 101 aa, Homo sapiens
  Payload ID: 17799
  Gene Name: tight junction protein 2
  ENSP ID: ENSP00000366469
MEELIWEQYTVTLQKDSKRGFGIAVSGGRDNPHFENGETSIVISDVLPGGPADGLLQENDRVVMVNGTPMEDVLHSFAVQQLRKSGKVAAIVSTGFAFSLP

SEQ ID NO: 88916 - protein, 1020 aa, Homo sapiens
  Payload ID: 17799
  Gene Name: tight junction protein 2
  Uniprot ID: Q9UDY2
  ENSP ID: ENSP00000392178
MEELIWEQYTVTLQKDSKRGFGIAVSGGRDNPHFENGETSIVISDVLPGGPADGLLQENDRVVMVNGTPMEDVLHSFAVQQLRKSGKVAAIVVKRPRKVQVAALQASPPLDQDDRAFEVMDEFDGRSFRSGYSERSRLNSHGGRSRSWEDSPERGRPHERARSRERDLSRDRSRGRSLERGLDQDHARTRDRSRGRSLERGLDHDFGPSRDRDRDRSRGRSIDQDYERAYHRAYDPDYERAYSPEYRRGARHDARSRGPRSRSREHPHSRSPSPEPRGRPGPIGVLLMKSRANEEYGLRLGSQIFVKEMTRTGLATKDGNLHEGDIILKINGTVTENMSLTDARKLIEKSRGKLQLVVLRDSQQTLINIPSLNDSDSEIEDISEIESNRSFSPEERRHQYSDYDYHSSSEKLKERPSSREDTPSRLSRMGATPTPFKSTGDIAGTVVPETNKEPRYQEDPPAPQPKAAPRTFLRPSPEDEAIYGPNTKMVRFKKGDSVGLRLAGGNDVGIFVAGIQEGTSAEQEGLQEGDQILKVNTQDFRGLVREDAVLYLLEIPKGEMVTILAQSRADVYRDILACGRGDSFFIRSHFECEKETPQSLAFTRGEVFRVVDTLYDGKLGNWLAVRIGNELEKGLIPNKSRAEQMASVQNAQRDNAGDRADFWRMRGQRSGVKKNLRKSREDLTAVVSVSTKFPAYERVLLREAGFKRPVVLFGPIADIAMEKLANELPDWFQTAKTEPKDAGSEKSTGVVRLNTVRQIIEQDKHALLDVTPKAVDLLNYTQWFPIVIFFNPDSRQGVKTMRQRLNPTSNKSSRKLFDQANKLKKTCAHLFTATINLNSANDSWFGSLKDTIQHQQGEAVWVSEGKMEGMDDDPEDRMSYLTAMGADYLSCDSRLISDFEDTDGEGGAYTDNELDEPAEEPLVSSITRSSEPVQHEEIEIAQKHPDIYAVPIKTHKPDPGTPQHTSSRPPEPQKAPSRPYQDTRGSYGSDAEEEEYRQQLSEHSKRGYYGQSARYRDTEL

SEQ ID NO: 88917 - protein, 161 aa, Homo sapiens
  Payload ID: 17799
  Gene Name: tight junction protein 2
  ENSP ID: ENSP00000402941
MEELIWEQYTVTLQKDSKRGFGIAVSGGRDNPHFENGETSIVISDVLPGGPADGLLQENDRVVMVNGTPMEDVLHSFAVQQLRKSGKVAAIVVKRPRKVQVAALQASPPLDQDDRAFEVMDEFDGRSFRSGYSERSRLNSHGGRSRSWEDSPERGRPHERA

SEQ ID NO: 88918 - protein, 1221 aa, Homo sapiens
  Payload ID: 17799
  Gene Name: tight junction protein 2
  Uniprot ID: Q9UDY2
  ENSP ID: ENSP00000438262
MKTAQALHRMWIQAVKKLRRWKGRVSPSASSPLVFPNLSSWEGEGSKTILTAPGMEELIWEQYTVTLQKDSKRGFGIAVSGGRDNPHFENGETSIVISDVLPGGPADGLLQENDRVVMVNGTPMEDVLHSFAVQQLRKSGKVAAIVVKRPRKVQVAALQASPPLDQDDRAFEVMDEFDGRSFRSGYSERSRLNSHGGRSRSWEDSPERGRPHERARSRERDLSRDRSRGRSLERGLDQDHARTRDRSRGRSLERGLDHDFGPSRDRDRDRSRGRSIDQDYERAYHRAYDPDYERAYSPEYRRGARHDARSRGPRSRSREHPHSRSPSPEPRGRPGPIGVLLMKSRANEEYGLRLGSQIFVKEMTRTGLATKDGNLHEGDIILKINGTVTENMSLTDARKLIEKSRGKLQLVVLRDSQQTLINIPSLNDSDSEIEDISEIESNRSFSPEERRHQYSDYDYHSSSEKLKERPSSREDTPSRLSRMGATPTPFKSTGDIAGTVVPETNKEPRYQEDPPAPQPKAAPRTFLRPSPEDEAIYGPNTKMVRFKKGDSVGLRLAGGNDVGIFVAGIQEGTSAEQEGLQEGDQILKVNTQDFRGLVREDAVLYLLEIPKGEMVTILAQSRADVYRDILACGRGDSFFIRSHFECEKETPQSLAFTRGEVFRVVDTLYDGKLGNWLAVRIGNELEKGLIPNKSRAEQMASVQNAQRDNAGDRADFWRMRGQRSGVKKNLRKSREDLTAVVSVSTKFPAYERVLLREAGFKRPVVLFGPIADIAMEKLANELPDWFQTAKTEPKDAGSEKSTGVVRLNTVRQIIEQDKHALLDVTPKAVDLLNYTQWFPIVIFFNPDSRQGVKTMRQRLNPTSNKSSRKLFDQANKLKKTCAHLFTATINLNSANDSWFGSLKDTIQHQQGEAVWVSEGKMEGMDDDPEDRMSYLTAMGADYLSCDSRLISDFEDTDGEGGAYTDNELDEPAEEPLVSSITRSSEPVQHEESIRKPSPEPRAQMRRAASSDQLRDNSPPPAFKPEPPKAKTQNKEESYDFSKSYEYKSNPSAVAGNETPGASTKGYPPPVAAKPTFGRSILKPSTPIPPQEGEEVGESSEEQDNAPKSVLGKVKIFEKMDHKARLQRMQELQEAQNARIEIAQKHPDIYAVPIKTHKPDPGTPQHTSSRPPEPQKAPSRPYQDTRGSYGSDAEEEEYRQQLSEHSKRGYYGQSARYRDTEL

SEQ ID NO: 88919 - protein, 1157 aa, Homo sapiens
  Payload ID: 17799
  Gene Name: tight junction protein 2
  Uniprot ID: Q9UDY2
  ENSP ID: ENSP00000442090
MKTAQALHRMWIQAVKKLRRWKGRAPGMEELIWEQYTVTLQKDSKRGFGIAVSGGRDNPHFENGETSIVISDVLPGGPADGLLQENDRVVMVNGTPMEDVLHSFAVQQLRKSGKVAAIVVKRPRKVQVAALQASPPLDQDDRAFEVMDEFDGRSFRSGYSERSRLNSHGGRSRSWEDSPERGRPHERARSRERDLSRDRSRGRSLERGLDQDHARTRDRSRGRSLERGLDHDFGPSRDRDRDRSRGRSIDQDYERAYHRAYDPDYERAYSPEYRRGARHDARSRGPRSRSREHPHSRSPSPEPRGRPGPIGVLLMKSRANEEYGLRLGSQIFVKEMTRTGLATKDGNLHEGDIILKINGTVTENMSLTDARKLIEKSRGKLQLVVLRDSQQTLINIPSLNDSDSEIEDISEIESNRSFSPEERRHQYSDYDYHSSSEKLKERPSSREDTPSRLSRMGATPTPFKSTGDIAGTVVPETNKEPRYQEDPPAPQPKAAPRTFLRPSPEDEAIYGPNTKMVRFKKGDSVGLRLAGGNDVGIFVAGIQEGTSAEQEGLQEGDQILKVNTQDFRGLVREDAVLYLLEIPKGEMVTILAQSRADVYRDILACGRGDSFFIRSHFECEKETPQSLAFTRGEVFRVVDTLYDGKLGNWLAVRIGNELEKGLIPNKSRAEQMASVQNAQRDNAGDRADFWRMRGQRSGVKKNLRKSREDLTAVVSVSTKFPAYERVLLREAGFKRPVVLFGPIADIAMEKLANELPDWFQTAKTEPKDAGSEKSTGVVRLNTVRQIIEQDKHALLDVTPKAVDLLNYTQWFPIVIFFNPDSRQGVKTMRQRLNPTSNKSSRKLFDQANKLKKTCAHLFTATINLNSANDSWFGSLKDTIQHQQGEAVWVSEGKMEGMDDDPEDRMSYLTAMGADYLSCDSRLISDFEDTDGEGGAYTDNELDEPAEEPLVSSITRSSEPVQHEEAKTQNKEESYDFSKSYEYKSNPSAVAGNETPGASTKGYPPPVAAKPTFGRSILKPSTPIPPQEGEEVGESSEEQDNAPKSVLGKVKIFEKMDHKARLQRMQELQEAQNARIEIAQKHPDIYAVPIKTHKPDPGTPQHTSSRPPEPQKAPSRPYQDTRGSYGSDAEEEEYRQQLSEHSKRGYYGQSARYRDTEL

SEQ ID NO: 88920 - protein, 134 aa, Homo sapiens
  Payload ID: 17799
  Gene Name: tight junction protein 2
  ENSP ID: ENSP00000475926
MEELIWEQYTVTLQKDSKRGFGIAVSGGRDNPHFENGETSIVISDVLPGGPADGLLQENDRVVMVNGTPMEDVLHSFAVQQLRKSGKVAAIVVKRPRKVQVAALQASPPLDQDDRAFEVMDEFDGRSFRSGYSE

SEQ ID NO: 88921 - protein, 919 aa, Homo sapiens
  Payload ID: 17800
  Gene Name: tight junction protein 3
  Uniprot ID: O95049
  ENSP ID: ENSP00000439278
MEELTIWEQHTATLSKDPRRGFGIAISGGRDRPGGSMVVSDVVPGGPAEGRLQTGDHIVMVNGVSMENATSAFAIQILKTCTKMANITVKRPRRIHLPATKASPSSPGRQDSDEDDGPQRVEEVDQGRGYDGDSSSGSGRSWDERSRRPRPGRRGRAGSHGRRSPGGGSEANGLALVSGFKRLPRQDVQMKPVKSVLVKRRDSEEFGVKLGSQIFIKHITDSGLAARHRGLQEGDLILQINGVSSQNLSLNDTRRLIEKSEGKLSLLVLRDRGQFLVNIPPAVSDSDSSPLEDISDLASELSQAPPSHIPPPPRHAQRSPEASQTDSPVESPRLRRESSVDSRTISEPDEQRSELPRESSYDIYRVPSSQSMEDRGYSPDTRVVRFLKGKSIGLRLAGGNDVGIFVSGVQAGSPADGQGIQEGDQILQVNDVPFQNLTREEAVQFLLGLPPGEEMELVTQRKQDIFWKMVQSRVGDSFYIRTHFELEPSPPSGLGFTRGDVFHVLDTLHPGPGQSHARGGHWLAVRMGRDLREQERGIIPNQSRAEQLASLEAAQRAVGVGPGSSAGSNARAEFWRLRGLRRGAKKTTQRSREDLSALTRQGRYPPYERVVLREASFKRPVVILGPVADIAMQKLTAEMPDQFEIAETVSRTDSPSKIIKLDTVRVIAEKDKHALLDVTPSAIERLNYVQYYPIVVFFIPESRPALKALRQWLAPASRRSTRRLYAQAQKLRKHSSHLFTATIPLNGTSDTWYQELKAIIREQQTRPIWTAEDQLDGSLEDNLDLPHHGLADSSADLSCDSRVNSDYETDGEGGAYTDGEGYTDGEGGPYTDVDDEPPAPALARSSEPVQADESQSPRDRGRISAHQGAQVDSRHPQGQWRQDSMRTYEREALKKKFMRVHDAESSDEDGYDWGPATDL

SEQ ID NO: 88922 - protein, 883 aa, Homo sapiens
  Payload ID: 17800
  Gene Name: tight junction protein 3
  Uniprot ID: O95049
  ENSP ID: ENSP00000439991
MVVSDVVPGGPAEGRLQTGDHIVMVNGVSMENATSAFAIQILKTCTKMANITVKRPRRIHLPATKASPSSPGRQDSDEDDGPQRVEEVDQGRGYDGDSSSGSGRSWDERSRRPRPGRRGRAGSHGRRSPGGGSEANGLALVSGFKRLPRQDVQMKPVKSVLVKRRDSEEFGVKLGSQIFIKHITDSGLAARHRGLQEGDLILQINGVSSQNLSLNDTRRLIEKSEGKLSLLVLRDRGQFLVNIPPAVSDSDSSPLEDISDLASELSQAPPSHIPPPPRHAQRSPEASQTDSPVESPRLRRESSVDSRTISEPDEQRSELPRESSYDIYRVPSSQSMEDRGYSPDTRVVRFLKGKSIGLRLAGGNDVGIFVSGVQAGSPADGQGIQEGDQILQVNDVPFQNLTREEAVQFLLGLPPGEEMELVTQRKQDIFWKMVQSRVGDSFYIRTHFELEPSPPSGLGFTRGDVFHVLDTLHPGPGQSHARGGHWLAVRMGRDLREQERGIIPNQSRAEQLASLEAAQRAVGVGPGSSAGSNARAEFWRLRGLRRGAKKTTQRSREDLSALTRQGRYPPYERVVLREASFKRPVVILGPVADIAMQKLTAEMPDQFEIAETVSRTDSPSKIIKLDTVRVIAEKDKHALLDVTPSAIERLNYVQYYPIVVFFIPESRPALKALRQWLAPASRRSTRRLYAQAQKLRKHSSHLFTATIPLNGTSDTWYQELKAIIREQQTRPIWTAEDQLDGSLEDNLDLPHHGLADSSADLSCDSRVNSDYETDGEGGAYTDGEGYTDGEGGPYTDVDDEPPAPALARSSEPVQADESQSPRDRGRISAHQGAQVDSRHPQGQWRQDSMRTYEREALKKKFMRVHDAESSDEDGYDWGPATDL

SEQ ID NO: 88923 - protein, 59 aa, Homo sapiens
  Payload ID: 17800
  Gene Name: tight junction protein 3
  ENSP ID: ENSP00000465065
  MOD_RES (1)..(1): Any amino acid
XLYAQAQKLRKHSSHLFTGAQGHHSRAADAAHLDGGRSAGWLLGGQPRPPSPRPGRQLR

SEQ ID NO: 88924 - protein, 928 aa, Homo sapiens
  Payload ID: 17800
  Gene Name: tight junction protein 3
  Uniprot ID: O95049
  ENSP ID: ENSP00000465419
MAVRFQVADMEELTIWEQHTATLSKDPRRGFGIAISGGRDRPGGSMVVSDVVPGGPAEGRLQTGDHIVMVNGVSMENATSAFAIQILKTCTKMANITVKRPRRIHLPATKASPSSPGRQDSDEDDGPQRVEEVDQGRGYDGDSSSGSGRSWDERSRRPRPGRRGRAGSHGRRSPGGGSEANGLALVSGFKRLPRQDVQMKPVKSVLVKRRDSEEFGVKLGSQIFIKHITDSGLAARHRGLQEGDLILQINGVSSQNLSLNDTRRLIEKSEGKLSLLVLRDRGQFLVNIPPAVSDSDSSPLEDISDLASELSQAPPSHIPPPPRHAQRSPEASQTDSPVESPRLRRESSVDSRTISEPDEQRSELPRESSYDIYRVPSSQSMEDRGYSPDTRVVRFLKGKSIGLRLAGGNDVGIFVSGVQAGSPADGQGIQEGDQILQVNDVPFQNLTREEAVQFLLGLPPGEEMELVTQRKQDIFWKMVQSRVGDSFYIRTHFELEPSPPSGLGFTRGDVFHVLDTLHPGPGQSHARGGHWLAVRMGRDLREQERGIIPNQSRAEQLASLEAAQRAVGVGPGSSAGSNARAEFWRLRGLRRGAKKTTQRSREDLSALTRQGRYPPYERVVLREASFKRPVVILGPVADIAMQKLTAEMPDQFEIAETVSRTDSPSKIIKLDTVRVIAEKDKHALLDVTPSAIERLNYVQYYPIVVFFIPESRPALKALRQWLAPASRRSTRRLYAQAQKLRKHSSHLFTATIPLNGTSDTWYQELKAIIREQQTRPIWTAEDQLDGSLEDNLDLPHHGLADSSADLSCDSRVNSDYETDGEGGAYTDGEGYTDGEGGPYTDVDDEPPAPALARSSEPVQADESQSPRDRGRISAHQGAQVDSRHPQGQWRQDSMRTYEREALKKKFMRVHDAESSDEDGYDWGPATDL

SEQ ID NO: 88925 - protein, 938 aa, Homo sapiens
  Payload ID: 17800
  Gene Name: tight junction protein 3
  Uniprot ID: O95049
  ENSP ID: ENSP00000467864
MNLCGLMPIFPAPLDQVADMEELTIWEQHTATLSKDPRRGFGIAISGGRDRPGGSMVVSDVVPGGPAEGRLQTGDHIVMVNGVSMENATSAFAIQILKTCTKMANITVKRPRRIHLPATKASPSSPGRQDSDEDDGPQRVEEVDQGRGYDGDSSSGSGRSWDERSRRPRPGRRGRAGSHGRRSPGGGSEANGLALVSGFKRLPRQDVQMKPVKSVLVKRRDSEEFGVKLGSQIFIKHITDSGLAARHRGLQEGDLILQINGVSSQNLSLNDTRRLIEKSEGKLSLLVLRDRGQFLVNIPPAVSDSDSSPLEDISDLASELSQAPPSHIPPPPRHAQRSPEASQTDSPVESPRLRRESSVDSRTISEPDEQRSELPRESSYDIYRVPSSQSMEDRGYSPDTRVVRFLKGKSIGLRLAGGNDVGIFVSGVQAGSPADGQGIQEGDQILQVNDVPFQNLTREEAVQFLLGLPPGEEMELVTQRKQDIFWKMVQSRVGDSFYIRTHFELEPSPPSGLGFTRGDVFHVLDTLHPGPGQSHARGGHWLAVRMGRDLREQERGIIPNQSRAEQLASLEAAQRAVGVGPGSSAGSNARAEFWRLRGLRRGAKKTTQRSREDLSALTRQGRYPPYERVVLREASFKRPVVILGPVADIAMQKLTAEMPDQFEIAETVSRTDSPSKIIKLDTVRVIAEKDKHALLDVTPSAIERLNYVQYYPIVVFFIPESRPALKALRQWLAPASRRSTRRLYAQAQKLRKHSSHLFTATIPLNGTSDTWYQELKAIIREQQTRPIWTAEDQLDGSLEDNLDLPHHGLADSSADLSCDSRVNSDYETDGEGGAYTDGEGYTDGEGGPYTDVDDEPPAPALARSSEPVQADESQSPRDRGRISAHQGAQVDSRHPQGQWRQDSMRTYEREALKKKFMRVHDAESSDEDGYDWGPATDL

SEQ ID NO: 88926 - protein, 123 aa, Homo sapiens
  Payload ID: 17800
  Gene Name: tight junction protein 3
  ENSP ID: ENSP00000468641
MEELTIWEQHTATLSKQLFLPLILSQDPRRGFGIAISGGRDRPGGSMVVSDVVPGGPAEGRLQTGDHIVMVNGVSMENATSAFAIQILKTCTKMANITVKRPRRIHLPATKASPSSPGRQDSD

SEQ ID NO: 88927 - protein, 1207 aa, Homo sapiens
  Payload ID: 17801
  Gene Name: timeless circadian clock
  Uniprot ID: Q9UNS1
  ENSP ID: ENSP00000229201
MDLHMMNCELLATCSALGYLEGDTYHKEPDCLESVKDLIRYLRHEDETRDVRQQLGAAQILQSDLLPILTQHHQDKPLFDAVIRLMVNLTQPALLCFGNLPKEPSFRHHFLQVLTYLQAYKEAFASEKAFGVLSETLYELLQLGWEERQEEDNLLIERILLLVRNILHVPADLDQEKIDDDASAHDQLLWAIHLSGLDDLLLFLASSSAEEQWSLHVLEIVSLMFRDQNPEQLAGVGQGRLAQERSADFAELEVLRQREMAEKKTRALQRGNRHSRFGGSYIVQGLKSIGERDLIFHKGLHNLRNYSSDLGKQPKKVPKRRQAARELSIQRRSALNVRLFLRDFCSEFLENCYNRLMGSVKDHLLREKAQQHDETYYMWALAFFMAFNRAASFRPGLVSETLSVRTFHFIEQNLTNYYEMMLTDRKEAASWARRMHLALKAYQELLATVNEMDISPDEAVRESSRIIKNNIFYVMEYRELFLALFRKFDERCQPRSFLRDLVETTHLFLKMLERFCRSRGNLVVQNKQKKRRKKKKKVLDQAIVSGNVPSSPEEVEAVWPALAEQLQCCAQNSELSMDSVVPFDAASEVPVEEQRAEAMVRIQDCLLAGQAPQALTLLRSAREVWPEGDVFGSQDISPEEEIQLLKQILSAPLPRQQGPEERGAEEEEEEEEEEEEELQVVQVSEKEFNFLDYLKRFACSTVVRAYVLLLRSYQQNSAHTNHCIVKMLHRLAHDLKMEALLFQLSVFCLFNRLLSDPAAGAYKELVTFAKYILGKFFALAAVNQKAFVELLFWKNTAVVREMTEGYGSLDDRSSSRRAPTWSPEEEAHLRELYLANKDVEGQDVVEAILAHLNTVPRTRKQIIHHLVQMGLADSVKDFQRKGTHIVLWTGDQELELQRLFEEFRDSDDVLGHIMKNITAKRSRARIVDKLLALGLVAERRELYKKRQKKLASSILPNGAESLKDFCQEDLEEEENLPEEDSEEEEEGGSEAEQVQGSLVLSNENLGQSLHQEGFSIPLLWLQNCLIRAADDREEDGCSQAVPLVPLTEENEEAMENEQFQQLLRKLGVRPPASGQETFWRIPAKLSPTQLRRAAASLSQPEEEQKLQPELQPKVPGEQGSDEEHCKEHRAQALRALLLAHKKKAGLASPEEEDAVGKEPLKAAPKKRQLLDSDEEQEEDEGRNRAPELGAPGIQKKKRYQIEDDEDD

SEQ ID NO: 88928 - protein, 1208 aa, Homo sapiens
  Payload ID: 17801
  Gene Name: timeless circadian clock
  Uniprot ID: Q9UNS1
  ENSP ID: ENSP00000450607
MDLHMMNCELLATCSALGYLEGDTYHKEPDCLESVKDLIRYLRHEDETRDVRQQLGAAQILQSDLLPILTQHHQDKPLFDAVIRLMVNLTQPALLCFGNLPKEPSFRHHFLQVLTYLQAYKEAFASEKAFGVLSETLYELLQLGWEERQEEDNLLIERILLLVRNILHVPADLDQEKKIDDDASAHDQLLWAIHLSGLDDLLLFLASSSAEEQWSLHVLEIVSLMFRDQNPEQLAGVGQGRLAQERSADFAELEVLRQREMAEKKTRALQRGNRHSRFGGSYIVQGLKSIGERDLIFHKGLHNLRNYSSDLGKQPKKVPKRRQAARELSIQRRSALNVRLFLRDFCSEFLENCYNRLMGSVKDHLLREKAQQHDETYYMWALAFFMAFNRAASFRPGLVSETLSVRTFHFIEQNLTNYYEMMLTDRKEAASWARRMHLALKAYQELLATVNEMDISPDEAVRESSRIIKNNIFYVMEYRELFLALFRKFDERCQPRSFLRDLVETTHLFLKMLERFCRSRGNLVVQNKQKKRRKKKKKVLDQAIVSGNVPSSPEEVEAVWPALAEQLQCCAQNSELSMDSVVPFDAASEVPVEEQRAEAMVRIQDCLLAGQAPQALTLLRSAREVWPEGDVFGSQDISPEEEIQLLKQILSAPLPRQQGPEERGAEEEEEEEEEEEEELQVVQVSEKEFNFLDYLKRFACSTVVRAYVLLLRSYQQNSAHTNHCIVKMLHRLAHDLKMEALLFQLSVFCLFNRLLSDPAAGAYKELVTFAKYILGKFFALAAVNQKAFVELLFWKNTAVVREMTEGYGSLDDRSSSRRAPTWSPEEEAHLRELYLANKDVEGQDVVEAILAHLNTVPRTRKQIIHHLVQMGLADSVKDFQRKGTHIVLWTGDQELELQRLFEEFRDSDDVLGHIMKNITAKRSRARIVDKLLALGLVAERRELYKKRQKKLASSILPNGAESLKDFCQEDLEEEENLPEEDSEEEEEGGSEAEQVQGSLVLSNENLGQSLHQEGFSIPLLWLQNCLIRAADDREEDGCSQAVPLVPLTEENEEAMENEQFQQLLRKLGVRPPASGQETFWRIPAKLSPTQLRRAAASLSQPEEEQKLQPELQPKVPGEQGSDEEHCKEHRAQALRALLLAHKKKAGLASPEEEDAVGKEPLKAAPKKRQLLDSDEEQEEDEGRNRAPELGAPGIQKKKRYQIEDDEDD

SEQ ID NO: 88929 - protein, 301 aa, Homo sapiens
  Payload ID: 17802
  Gene Name: TIMELESS interacting protein
  Uniprot ID: Q9BVW5
  ENSP ID: ENSP00000261881
MLEPQENGVIDLPDYEHVEDETFPPFPPPASPERQDGEGTEPDEESGNGAPVRVPPKRTVKRNIPKLDAQRLISERGLPALRHVFDKAKFKGKGHEAEDLKMLIRHMEHWAHRLFPKLQFEDFIDRVEYLGSKKEVQTCLKRIRLDLPILHEDFVSNNDEVAENNEHDVTSTELDPFLTNLSESEMFASELSRSLTEEQQQRIERNKQLALERRQAKLLSNSQTLGNDMLMNTPRAHTVEEVNTDEDQKEESNGLNEDILDNPCNDAIANTLNEEETLLDQSFKNVQQQLDATSRNITEAR

SEQ ID NO: 88930 - protein, 74 aa, Homo sapiens
  Payload ID: 17802
  Gene Name: TIMELESS interacting protein
  ENSP ID: ENSP00000455656
MLEPQENGVIDLPDYEHVEDETFPPFPPPASPERQDGEGTEPDEESGNGAPVRVPPKRTVKRNIPKLDAQRLKT

SEQ ID NO: 88931 - protein, 141 aa, Homo sapiens
  Payload ID: 17802
  Gene Name: TIMELESS interacting protein
  ENSP ID: ENSP00000457172
MLEPQENGVIDLPDYEHVEDETFPPFPPPASPERQDGEGTEPDEESGNGAPVRVPPKRTVKRNIPKLDAQRLISERGLPALRHVFDKAKFKGKGHEAEDLKMLIRHMEHWAHRLFPKLQFEDFIDRVEYLGSKKEVQVSVE

SEQ ID NO: 88932 - protein, 294 aa, Homo sapiens
  Payload ID: 17802
  Gene Name: TIMELESS interacting protein
  ENSP ID: ENSP00000457406
MLEPQENGVIDLPDYEHVEDETFPPFPPPASPERQDGEGTEPDEESGNGAPVRVPPKRTVKRNIPKLDAQRLISERGLPALRHVFDKAKFKGKGHEAEDLKMLIRHMEHWAHRLFPKLQFEDFIDRVEYLGSKKEVQTCLKRIRLDLPILHEDFVSNNDEVAENNEHDVTSTELDPFLTNLSESEMFASELSRSLTEEQQQRIERNKQLALERRQAKLLSNSQTLGNDMLMNTPRAHTVEEVNTDEDQKEESNGLNEDILDNPCNDAIANTLNEEETLLDQSFKNVQQQLDATS

SEQ ID NO: 88933 - protein, 116 aa, Homo sapiens
  Payload ID: 17802
  Gene Name: TIMELESS interacting protein
  ENSP ID: ENSP00000458117
MLEPQENGVIDLPDYEHVEDETFPPFPPPASPERQDGEGTEPDEESGNGAPVRVPPKRTVKRNIPKLDAQRLISERGLPALRHVFDKAKFKGKGHEAEDLKMLIRHMEHWAHRLFP

SEQ ID NO: 88934 - protein, 207 aa, Homo sapiens
  Payload ID: 17803
  Gene Name: TIMP metallopeptidase inhibitor 1
  Uniprot ID: P01033
  ENSP ID: ENSP00000218388
MAPFEPLASGILLLLWLIAPSRACTCVPPHPQTAFCNSDLVIRAKFVGTPEVNQTTLYQRYEIKMTKMYKGFQALGDAADIRFVYTPAMESVCGYFHRSHNRSEEFLIAGKLQDGLLHITTCSFVAPWNSLSLAQRRGFTKTYTVGCEECTVFPCLSIPCKLQSGTHCLWTDQLLQGSEKGFQSRHLACLPREPGLCTWQSLRSQIA

SEQ ID NO: 88935 - protein, 143 aa, Homo sapiens
  Payload ID: 17803
  Gene Name: TIMP metallopeptidase inhibitor 1
  ENSP ID: ENSP00000366216
MTKMYKGFQALGDAADIRFVYTPAMESVCGYFHRSHNRSEEFLIAGKLQDGLLHITTCSFVAPWNSLSLAQRRGFTKTYTVGCEECTVFPCLSIPCKLQSGTHCLWTDQLLQGSEKGFQSRHLACLPREPGLCTWQSLRSQIA

SEQ ID NO: 88936 - protein, 95 aa, Homo sapiens
  Payload ID: 17803
  Gene Name: TIMP metallopeptidase inhibitor 1
  ENSP ID: ENSP00000405380
MPVYSAWPAEPTMAPFEPLASGILLLLWLIAPSRACTCVPPHPQTAFCNSDLVIRAKFVGTPEVNQTTLYQRYEIKMTKMYKGFQALGDAADIRF

SEQ ID NO: 88937 - protein, 136 aa, Homo sapiens
  Payload ID: 17803
  Gene Name: TIMP metallopeptidase inhibitor 1
  ENSP ID: ENSP00000406671
MAPFEPLASGILLLLWLIAPSRACTCVPPHPQTAFCNSDLVIRAKFVGTPEVNQTTLYQRYEIKMTKMYKGFQALGDAADIRFVYTPAMESVCGYFHRSHNRSEEFLIAGEAPSPRPVPHQPVPGARPSNHEGARL

SEQ ID NO: 88938 - protein, 165 aa, Homo sapiens
  Payload ID: 17803
  Gene Name: TIMP metallopeptidase inhibitor 1
  ENSP ID: ENSP00000410983
  MOD_RES (1)..(1): Any amino acid
XPRALCHTNQSLGRGLATTRGRGSDGNGPTGNGDHPNFSLSEGRAFGSLAAQPITSCLSVPAPPFSLGKLQDGLLHITTCSFVAPWNSLSLAQRRGFTKTYTVGCEECTVFPCLSIPCKLQSGTHCLWTDQLLQGSEKGFQSRHLACLPREPGLCTWQSLRSQIA

SEQ ID NO: 88939 - protein, 220 aa, Homo sapiens
  Payload ID: 17804
  Gene Name: TIMP metallopeptidase inhibitor 2
  Uniprot ID: P16035
  ENSP ID: ENSP00000262768
MGAAARTLRLALGLLLLATLLRPADACSCSPVHPQQAFCNADVVIRAKAVSEKEVDSGNDIYGNPIKRIQYEIKQIKMFKGPEKDIEFIYTAPSSAVCGVSLDVGGKKEYLIAGKAEGDGKMHITLCDFIVPWDTLSTTQKKSLNHRYQMGCECKITRCPMIPCYISSPDECLWMDWVTEKNINGHQAKFFACIKRSDGSCAWYRGAAPPKQEFLDIEDP

SEQ ID NO: 88940 - protein, 143 aa, Homo sapiens
  Payload ID: 17804
  Gene Name: TIMP metallopeptidase inhibitor 2
  ENSP ID: ENSP00000441724
MFKGPEKDIEFIYTAPSSAVCGVSLDVGGKKEYLIAGKAEGDGKMHITLCDFIVPWDTLSTTQKKSLNHRYQMGCECKITRCPMIPCYISSPDECLWMDWVTEKNINGHQAKFFACIKRSDGSCAWYRGAAPPKQEFLDIEDP

SEQ ID NO: 88941 - protein, 109 aa, Homo sapiens
  Payload ID: 17804
  Gene Name: TIMP metallopeptidase inhibitor 2
  ENSP ID: ENSP00000464930
MFKGPEKDIEFIYTAPSSAVCGVSLDVGGKKEYLIAGKAEGDGKMHITLCDFIVPWDTLSTTQKKSLNHRYQMGCECKVSRSCLCWSIASSQCLQMDGRDFDPWLSRTR

SEQ ID NO: 88942 - protein, 143 aa, Homo sapiens; identical to SEQ ID NO: 88940
  Payload ID: 17804
  Gene Name: TIMP metallopeptidase inhibitor 2
  ENSP ID: ENSP00000467584

SEQ ID NO: 88943 - protein, 143 aa, Homo sapiens; identical to SEQ ID NO: 88940
  Payload ID: 17804
  Gene Name: TIMP metallopeptidase inhibitor 2
  ENSP ID: ENSP00000468296

SEQ ID NO: 88944 - protein, 211 aa, Homo sapiens
  Payload ID: 17805
  Gene Name: TIMP metallopeptidase inhibitor 3
  Uniprot ID: P35625
  ENSP ID: ENSP00000266085
MTPWLGLIVLLGSWSLGDWGAEACTCSPSHPQDAFCNSDIVIRAKVVGKKLVKEGPFGTLVYTIKQMKMYRGFTKMPHVQYIHTEASESLCGLKLEVNKYQYLLTGRVYDGKMYTGLCNFVERWDQLTLSQRKGLNYRYHLGCNCKIKSCYYLPCFVTSKNECLWTDMLSNFGYPGYQSKHYACIRQKGGYCSWYRGWAPPDKSIINATDP

SEQ ID NO: 88945 - protein, 224 aa, Homo sapiens
  Payload ID: 17806
  Gene Name: TIMP metallopeptidase inhibitor 4
  Uniprot ID: Q99727
  ENSP ID: ENSP00000287814
MPGSPRPAPSWVLLLRLLALLRPPGLGEACSCAPAHPQQHICHSALVIRAKISSEKVVPASADPADTEKMLRYEIKQIKMFKGFEKVKDVQYIYTPFDSSLCGVKLEANSQKQYLLTGQVLSDGKVFIHLCNYIEPWEDLSLVQRESLNHHYHLNCGCQITTCYTVPCTISAPNECLWTDWLLERKLYGYQAQHYVCMKHVDGTCSWYRGHLPLRKEFVDIVQP

SEQ ID NO: 88946 - protein, 304 aa, Homo sapiens
  Payload ID: 17807
  Gene Name: tissue factor pathway inhibitor (lipoprotein-associated coagulation inhibitor)
  Uniprot ID: P10646
  ENSP ID: ENSP00000233156
MIYTMKKVHALWASVCLLLNLAPAPLNADSEEDEEHTIITDTELPPLKLMHSFCAFKADDGPCKAIMKRFFFNIFTRQCEEFIYGGCEGNQNRFESLEECKKMCTRDNANRIIKTTLQQEKPDFCFLEEDPGICRGYITRYFYNNQTKQCERFKYGGCLGNMNNFETLEECKNICEDGPNGFQVDNYGTQLNAVNNSLTPQSTKVPSLFEFHGPSWCLTPADRGLCRANENRFYYNSVIGKCRPFKYSGCGGNENNFTSKQECLRACKKGFIQRISKGGLIKTKRKRKKQRVKIAYEEIFVKNM

SEQ ID NO: 88947 - protein, 251 aa, Homo sapiens
  Payload ID: 17807
  Gene Name: tissue factor pathway inhibitor (lipoprotein-associated coagulation inhibitor)
  Uniprot ID: P10646
  ENSP ID: ENSP00000342306
MIYTMKKVHALWASVCLLLNLAPAPLNADSEEDEEHTIITDTELPPLKLMHSFCAFKADDGPCKAIMKRFFFNIFTRQCEEFIYGGCEGNQNRFESLEECKKMCTRDNANRIIKTTLQQEKPDFCFLEEDPGICRGYITRYFYNNQTKQCERFKYGGCLGNMNNFETLEECKNICEDGPNGFQVDNYGTQLNAVNNSLTPQSTKVPSLFVTKEGTNDGWKNAAHIYQVFLNAFCIHASMFFLGLDSISCLC

SEQ ID NO: 88948 - protein, 304 aa, Homo sapiens; identical to SEQ ID NO: 88946
  Payload ID: 17807
  Gene Name: tissue factor pathway inhibitor (lipoprotein-associated coagulation inhibitor)
  Uniprot ID: P10646
  ENSP ID: ENSP00000376172

SEQ ID NO: 88949 - protein, 251 aa, Homo sapiens; identical to SEQ ID NO: 88947
  Payload ID: 17807
  Gene Name: tissue factor pathway inhibitor (lipoprotein-associated coagulation inhibitor)
  Uniprot ID: P10646
  ENSP ID: ENSP00000386344

SEQ ID NO: 88950 - protein, 106 aa, Homo sapiens
  Payload ID: 17807
  Gene Name: tissue factor pathway inhibitor (lipoprotein-associated coagulation inhibitor)
  ENSP ID: ENSP00000388159
MIYTMKKVHALWASVCLLLNLAPAPLNADSEEDEEHTIITDTELPPLKLMHSFCAFKADDGPCKAIMKRFFFNIFTRQCEEFIYGGCEGNQNRFESLEECKKMCTR

SEQ ID NO: 88951 - protein, 105 aa, Homo sapiens
  Payload ID: 17807
  Gene Name: tissue factor pathway inhibitor (lipoprotein-associated coagulation inhibitor)
  ENSP ID: ENSP00000394185
MIYTMKKVHALWASVCLLLNLAPAPLNADSEEDEEHTIITDTELPPLKLMHSFCAFKADDGPCKAIMKRFFFNIFTRQCEEFIYGGCEGNQNRFESLEECKKMCT

SEQ ID NO: 88952 - protein, 288 aa, Homo sapiens
  Payload ID: 17807
  Gene Name: tissue factor pathway inhibitor (lipoprotein-associated coagulation inhibitor)
  ENSP ID: ENSP00000397248
MIYTMKKVHALWASVCLLLNLAPAPLNADSEEDEEHTIITDTELPPLKLMHSFCAFKADDGPCKAIMKRFFFNIFTRQCEEFIYGGCEGNQNRFESLEECKKMCTRDNANRIIKTTLQQEKPDFCFLEEDPGICRGYITRYFYNNQTKQCERFKYGGCLGNMNNFETLEECKNICEDGPNGFQVDNYGTQLNAVNNSLTPQSTKVPSLFEFHGPSWCLTPADRGLCRANENRFYYNSVIGKCRPFKYSGCGGNENNFTSKQECLRACKKGFIQRISKGGLIKTKRKRK

SEQ ID NO: 88953 - protein, 76 aa, Homo sapiens
  Payload ID: 17807
  Gene Name: tissue factor pathway inhibitor (lipoprotein-associated coagulation inhibitor)
  ENSP ID: ENSP00000400179
MIYTMKKVHALWASVCLLLNLAPAPLNADSEEDEEHTIITDTELPPLKLMHSFCAFKADDGPCKAIMKRFFFNIFT

SEQ ID NO: 88954 - protein, 61 aa, Homo sapiens
  Payload ID: 17807
  Gene Name: tissue factor pathway inhibitor (lipoprotein-associated coagulation inhibitor)
  ENSP ID: ENSP00000402954
MIYTMKKVHALWASVCLLLNLAPAPLNADSEEDEEHTIITDTELPPLKLMHSFCAFKADDG

SEQ ID NO: 88955 - protein, 106 aa, Homo sapiens; identical to SEQ ID NO: 88950
  Payload ID: 17807
  Gene Name: tissue factor pathway inhibitor (lipoprotein-associated coagulation inhibitor)
  ENSP ID: ENSP00000408170

SEQ ID NO: 88956 - protein, 215 aa, Homo sapiens
  Payload ID: 17807
  Gene Name: tissue factor pathway inhibitor (lipoprotein-associated coagulation inhibitor)
  ENSP ID: ENSP00000409177
MIYTMKKVHALWASVCLLLNLAPAPLNADSEEDEEHTIITDTELPPLKLMHSFCAFKADDGPCKAIMKRFFFNIFTRQCEEFIYGGCEGNQNRFESLEECKKMCTREKPDFCFLEEDPGICRGYITRYFYNNQTKQCERFKYGGCLGNMNNFETLEECKNICEDGPNGFQVDNYGTQLNAVNNSLTPQSTKVPSLFEFHGPSWCLTPADRGLCRA

SEQ ID NO: 88957 - protein, 235 aa, Homo sapiens
  Payload ID: 17808
  Gene Name: tissue factor pathway inhibitor 2
  Uniprot ID: P48307
  ENSP ID: ENSP00000222543
MDPARPLGLSILLLFLTEAALGDAAQEPTGNNAEICLLPLDYGPCRALLLRYYYDRYTQSCRQFLYGGCEGNANNFYTWEACDDACWRIEKVPKVCRLQVSVDDQCEGSTEKYFFNLSSMTCEKFFSGGCHRNRIENRFPDEATCMGFCAPKKIPSFCYSPKDEGLCSANVTRYYFNPRYRTCDAFTYTGCGGNDNNFVSREDCKRACAKALKKKKKMPKLRFASRIRKIRKKQF

SEQ ID NO: 88958 - protein, 107 aa, Homo sapiens
  Payload ID: 17808
  Gene Name: tissue factor pathway inhibitor 2
  ENSP ID: ENSP00000416370
EACDDACWRIEKVPKVCRLQVSVDDQCEGSTEKYFFNLSSMTCEKFFSGGCHRNRIENRFPDEATCMGFCAPKKNTEPVMLSPILAVEGMTITLLAGRIANVHVQKL

SEQ ID NO: 88959 - protein, 321 aa, Homo sapiens
  Payload ID: 17809
  Gene Name: tissue specific transplantation antigen P35B
  Uniprot ID: Q13630
  ENSP ID: ENSP00000398803
MGEPQGSMRILVTGGSGLVGKAIQKVVADGAGLPGEDWVFVSSKDADLTDTAQTRALFEKVQPTHVIHLAAMVGGLFRNIKYNLDFWRKNVHMNDNVLHSAFEVGARKVVSCLSTCIFPDKTTYPIDETMIHNGPPHNSNFGYSYAKRMIDVQNRAYFQQYGCTFTAVIPTNVFGPHDNFNIEDGHVLPGLIHKVHLAKSSGSALTVWGTGNPRRQFIYSLDLAQLFIWVLREYNEVEPIILSVGEEDEVSIKEAAEAVVEAMDFHGEVTFDTTKSDGQFKKTASNSKLRTYLPDFRFTPFKQAVKETCAWFTDNYEQARK

SEQ ID NO: 88960 - protein, 268 aa, Homo sapiens
  Payload ID: 17809
  Gene Name: tissue specific transplantation antigen P35B
  ENSP ID: ENSP00000431587
MGEPQGSMRILVTGGSGLVGKAIQKVVADGAGLPGEDWVFVSSKDADLTDTAQTRALFEKVQPTHVIHLAAMVGGLFRNIKYNLDFWRKNVHMNDNVLHSAFEVGARKVVSCLSTCIFPDKTTYPIDETMIHNGPPHNSNFGYSYAKRMIDVQNRAYFQQYGCTFTAVIPTNVFGPHDNFNIEDGHVLPGLIHKVHLAKSSGSALTVWGTGNPRRQFIYSLDLAQLFIWVLREYNEVEPIILSVGEEDEVSIKEAAEAVVEAMDFHGE

SEQ ID NO: 88961 - protein, 64 aa, Homo sapiens
  Payload ID: 17809
  Gene Name: tissue specific transplantation antigen P35B
  ENSP ID: ENSP00000432088
TVGEEDEVSIKEAAEAVVEAMDFHGEVTFDTTKSDGQFKKTASNSKLRTYLPDFRFTPFKQGEP

SEQ ID NO: 88962 - protein, 118 aa, Homo sapiens
  Payload ID: 17809
  Gene Name: tissue specific transplantation antigen P35B
  ENSP ID: ENSP00000433331
MGEPQGSMRILVTGGSGLVGKAIQKVVADGAGLPGEDWVFVSSKDADLTDTAQTRALFEKVQPTHVIHLAAMVGGLFRNIKYNLDFWRKNVHMNDNVLHSAFEVGARKVVSCLSTCIF

SEQ ID NO: 88963 - protein, 33 aa, Homo sapiens
  Payload ID: 17809
  Gene Name: tissue specific transplantation antigen P35B
  ENSP ID: ENSP00000435240
MVGGLFRNIKYNLDFWRKNVHMNDNVLHSAFEV

SEQ ID NO: 88964 - protein, 321 aa, Homo sapiens; identical to SEQ ID NO: 88959
  Payload ID: 17809
  Gene Name: tissue specific transplantation antigen P35B
  Uniprot ID: Q13630
  ENSP ID: ENSP00000435386

SEQ ID NO: 88965 - protein, 115 aa, Homo sapiens
  Payload ID: 17809
  Gene Name: tissue specific transplantation antigen P35B
  ENSP ID: ENSP00000436405
MGEPQGSMRILVTGGSGLVGKAIQKVVADGAGLPGEDWVFVSSKDADLTWLAWPGCAWLCSWKNKHPPISSWKPAPSYQPGPGATLPFDCPSCHSPTQFLHLAPNPGVLVPSRAS

SEQ ID NO: 88966 - protein, 198 aa, Homo sapiens
  Payload ID: 17809
  Gene Name: tissue specific transplantation antigen P35B
  ENSP ID: ENSP00000437012
MGEPQGSMRILVTGGSGLVGKAIQKVVADGAGLPGEDWVFVSSKDADLTDTAQTRALFEKVQPTHVIHLAAMVGGLFRNIKYNLDFWRKNVHMNDNVLHSAFEVGARKVVSCLSTCIFPDKTTYPIDETMIHNGPPHNSNFGYSYAKRMIDVQNRAYFQQYGCTFTAVIPTNVFGPHDNFNIEDGHVLPGLIHKVHLA

SEQ ID NO: 88967 - protein, 321 aa, Homo sapiens; identical to SEQ ID NO: 88959
  Payload ID: 17809
  Gene Name: tissue specific transplantation antigen P35B
  Uniprot ID: Q13630
  ENSP ID: ENSP00000478042

SEQ ID NO: 88968 - protein, 321 aa, Homo sapiens; identical to SEQ ID NO: 88959
  Payload ID: 17809
  Gene Name: tissue specific transplantation antigen P35B
  Uniprot ID: Q13630
  ENSP ID: ENSP00000487640

SEQ ID NO: 88969 - protein, 115 aa, Homo sapiens; identical to SEQ ID NO: 88965
  Payload ID: 17809
  Gene Name: tissue specific transplantation antigen P35B
  ENSP ID: ENSP00000487853

SEQ ID NO: 88970 - protein, 64 aa, Homo sapiens; identical to SEQ ID NO: 88961
  Payload ID: 17809
  Gene Name: tissue specific transplantation antigen P35B
  ENSP ID: ENSP00000487980

SEQ ID NO: 88971 - protein, 221 aa, Homo sapiens
  Payload ID: 17809
  Gene Name: tissue specific transplantation antigen P35B
  ENSP ID: ENSP00000488203
MRALAANRVNDLCQEPPSQGATDMGEPQGSMRILVTGGSGLVGKAIQKVVADGAGLPGEDWVFVSSKDADLTDTAQTRALFEKVQPTHVIHLAAMVGGLFRNIKYNLDFWRKNVHMNDNVLHSAFEVGARKVVSCLSTCIFPDKTTYPIDETMIHNGPPHNSNFGYSYAKRMIDVQNRAYFQQYGCTFTAVIPTNVFGPHDNFNIEDGHVLPGLIHKVHLA

SEQ ID NO: 88972 - protein, 118 aa, Homo sapiens; identical to SEQ ID NO: 88962
  Payload ID: 17809
  Gene Name: tissue specific transplantation antigen P35B
  ENSP ID: ENSP00000488379

SEQ ID NO: 88973 - protein, 33 aa, Homo sapiens; identical to SEQ ID NO: 88963
  Payload ID: 17809
  Gene Name: tissue specific transplantation antigen P35B
  ENSP ID: ENSP00000488496

SEQ ID NO: 88974 - protein, 268 aa, Homo sapiens; identical to SEQ ID NO: 88960
  Payload ID: 17809
  Gene Name: tissue specific transplantation antigen P35B
  ENSP ID: ENSP00000488614

SEQ ID NO: 88975 - protein, 27118 aa, Homo sapiens
  Payload ID: 17810
  Gene Name: titin
  ENSP ID: ENSP00000340554
MTTQAPTFTQPLQSVVVLEGSTATFEAHISGFPVPEVSWFRDGQVISTSTLPGVQISFSDGRAKLTIPAVTKANSGRYSLKATNGSGQATSTAELLVKAETAPPNFVQRLQSMTVRQGSQVRLQVRVTGIPTPVVKFYRDGAEIQSSLDFQISQEGDLYSLLIAEAYPEDSGTYSVNATNSVGRATSTAELLVQGEEEVPAKKTKTIVSTAQISESRQTRIEKKIEAHFDARSIATVEMVIDGAAGQQLPHKTPPRIPPKPKSRSPTPPSIAAKAQLARQQSPSPIRHSPSPVRHVRAPTPSPVRSVSPAARISTSPIRSVRSPLLMRKTQASTVATGPEVPPPWKQEGYVASSSEAEMRETTLTTSTQIRTEERWEGRYGVQEQVTISGAAGAAASVSASASYAAEAVATGAKEVKQDADKSAAVATVVAAVDMARVREPVISAVEQTAQRTTTTAVHIQPAQEQVRKEAEKTAVTKVVVAADKAKEQELKSRTKEVITTKQEQMHVTHEQIRKETEKTFVPKVVISAAKAKEQETRISEEITKKQKQVTQEAIMKETRKTVVPKVIVATPKVKEQDLVSRGREGITTKREQVQITQEKMRKEAEKTALSTIAVATAKAKEQETILRTRETMATRQEQIQVTHGKVDVGKKAEAVATVVAAVDQARVREPREPGHLEESYAQQTTLEYGYKERISAAKVAEPPQRPASEPHVVPKAVKPRVIQAPSETHIKTTDQKGMHISSQIKKTTDLTTERLVHVDKRPRTASPHFTVSKISVPKTEHGYEASIAGSAIATLQKELSATSSAQKITKSVKAPTVKPSETRVRAEPTPLPQFPFADTPDTYKSEAGVEVKKEVGVSITGTTVREERFEVLHGREAKVTETARVPAPVEIPVTPPTLVSGLKNVTVIEGESVTLECHISGYPSPTVTWYREDYQIESSIDFQITFQSGIARLMIREAFAEDSGRFTCSAVNEAGTVSTSCYLAVQVSEEFEKETTAVTEKFTTEEKRFVESRDVVMTDTSLTEEQAGPGEPAAPYFITKPVVQKLVEGGSVVFGCQVGGNPKPHVYWKKSGVPLTTGYRYKVSYNKQTGECKLVISMTFADDAGEYTIVVRNKHGETSASASLLEEADYELLMKSQQEMLYQTQVTAFVQEPKVGETAPGFVYSEYEKEYEKEQALIRKKMAKDTVVVRTYVEDQEFHISSFEERLIKEIEYRIIKTTLEELLEEDGEEKMAVDISESEAVESGFDSRIKNYRILEGMGVTFHCKMSGYPLPKIAWYKDGKRIKHGERYQMDFLQDGRASLRIPVVLPEDEGIYTAFASNIKGNAICSGKLYVEPAAPLGAPTYIPTLEPVSRIRSLSPRSVSRSPIRMSPARMSPARMSPARMSPARMSPGRRLEETDESQLERLYKPVFVLKPVSFKCLEGQTARFDLKVVGRPMPETFWFHDGQQIVNDYTHKVVIKEDGTQSLIIVPATPSDSGEWTVVAQNRAGRSSISVILTVEAVEHQVKPMFVEKLKNVNIKEGSRLEMKVRATGNPNPDIVWLKNSDIIVPHKYPKIRIEGTKGEAALKIDSTVSQDSAWYTATAINKAGRDTTRCKVNVEVEFAEPEPERKLIIPRGTYRAKEIAAPELEPLHLRYGQEQWEEGDLYDKEKQQKPFFKKKLTSLRLKRFGPAHFECRLTPIGDPTMVVEWLHDGKPLEAANRLRMINEFGYCSLDYGVAYSRDSGIITCRATNKYGTDHTSATLIVKDEKSLVEESQLPEGRKGLQRIEELERMAHEGALTGVTTDQKEKQKPDIVLYPEPVRVLEGETARFRCRVTGYPQPKVNWYLNGQLIRKSKRFRVRYDGIHYLDIVDCKSYDTGEVKVTAENPEGVIEHKVKLEIQQREDFRSVLRRAPEPRPEFHVHEPGKLQFEVQKVDRPVDTTETKEVVKLKRAERITHEKVPEESEELRSKFKRRTEEGYYEAITAVELKSRKKDESYEELLRKTKDELLHWTKELTEEEKKALAEEGKITIPTFKPDKIELSPSMEAPKIFERIQSQTVGQGSDAHFRVRVVGKPDPECEWYKNGVKIERSDRIYWYWPEDNVCELVIRDVTAEDSASIMVKAINIAGETSSHAFLLVQAKQLITFTQELQDVVAKEKDTMATFECETSEPFVKVKWYKDGMEVHEGDKYRMHSDRKVHFLSILTIDTSDAEDYSCVLVEDENVKTTAKLIVEGAVVEFVKELQDIEVPESYSGELECIVSPENIEGKWYHNDVELKSNGKYTITSRRGRQNLTVKDVTKEDQGEYSFVIDGKKTTCKLKMKPRPIAILQGLSDQKVCEGDIVQLEVKVSLESVEGVWMKDGQEVQPSDRVHIVIDKQSHMLLIEDMTKEDAGNYSFTIPALGLSTSGRVSVYSVDVITPLKDVNVIEGTKAVLECKVSVPDVTSVKWYLNDEQIKPDDRVQAIVKGTKQRLVINRTHASDEGPYKLIVGRVETNCNLSVEKIKIIRGLRDLTCTETQNVVFEVELSHSGIDVLWNFKDKEIKPSSKYKIEAHGKIYKLTVLNMMKDDEGKYTFYAGENMTSGKLTVAGGAISKPLTDQTVAESQEAVFECEVANPDSKGEWLRDGKHLPLTNNIRSESDGHKRRLIIAATKLDDIGEYTYKVATSKTSAKLKVEAVKIKKTLKNLTVTETQDAVFTVELTHPNVKGVQWIKNGVVLESNEKYAISVKGTIYSLRIKNCAIVDESVYGFRLGRLGASARLHVETVKIIKKPKDVTALENATVAFEVSVSHDTVPVKWFHKSVEIKPSDKHRLVSERKVHKLMLQNISPSDAGEYTAVVGQLECKAKLFVETLHITKTMKNIEVPETKTASFECEVSHFNVPSMWLKNGVEIEMSEKFKIVVQGKLHQLIIMNTSTEDSAEYTFVCGNDQVSATLTVTPIMITSMLKDINAEEKDTITFEVTVNYEGISYKWLKNGVEIKSTDKCQMRTKKLTHSLNIRNVHFGDAADYTFVAGKATSTATLYVEARHIEFRKHIKDIKVLEKKRAMFECEVSEPDITVQWMKDDQELQITDRIKIQKEKYVHRLLIPSTRMSDAGKYTVVAGGNVSTAKLFVEGRDVRIRSIKKEVQVIEKQRAVVEFEVNEDDVDAHWYKDGIEINFQVQERHKYVVERRIHRMFISETRQSDAGEYTFVAGRNRSSVTLYVNAPEPPQVLQELQPVTVQSGKPARFCAVISGRPQPKISWYKEEQLLSTGFKCKFLHDGQEYTLLLIEAFPEDAAVYTCEAKNDYGVATTSASLSVEVPEVVSPDQEMPVYPPAIITPLQDTVTSEGQPARFQCRVSGTDLKVSWYSKDKKIKPSRFFRMTQFEDTYQLEIAEAYPEDEGTYTFVASNAVGQVSSTANLSLEVQALDRQSSGKDVRESTKSQAVADSSFTKEESKISQKEIKSFQGSSYEYEVQVFESVSQSSIHTAASVQDTQLCHTASLSQIAESTELSKECAKESTGEAPKIFLHLQDVTVKCGDTAQFLCVLKDDSFIDVTWTHEGAKIEESERLKQSQNGNIQFLTICNVQLVDQGLYSCIVHNDCGERTTSAVLSVEGAPESILHERIEQEIEMEMKEFSSSFLSAEEEGLHSAELQLSKINETLELLSESPVYPTKFDSEKEGTGPIFIKEVSNADISMGDVATLSVTVIGIPKPKIQWFFNGVLLTPSADYKFVFDGDDHSLIILFTKLEDEGEYTCMASNDYGKTICSAYLKINSKGEGHKDTETESAVAKSLEKLGGPCPPHFLKELKPIRCAQGLPAIFEYTVVGEPAPTVTWFKENKQLCTSVYYTIIHNPNGSGTFIVNDPQREDSGLYICKAENMLGESTCAAELLVLLEDTDMTDTPCKAKSTPEAPEDFPQTPLKGPAVEALDSEQEIATFVKDTILKAALITEENQQLSYEHIAKANELSSQLPLGAQELQSILEQDKLTPESTREFLCINGSIHFQPLKEPSPNLQLQIVQSQKTFSKEGILMPEEPETQAVLSDTEKIFPSAMSIEQINSLTVEPLKTLLAEPEGNYPQSSIEPPMHSYLTSVAEEVLSPKEKTVSDTNREQRVTLQKQEAQSALILSQSLAEGHVESLQSPDVMISQVNYEPLVPSEHSCTEGGKILIESANPLENAGQDSAVRIEEGKSLRFPLALEEKQVLLKEEHSDNVVMPPDQIIESKREPVAIKKVQEVQGRDLLSKESLLSGIPEEQRLNLKIQICRALQAAVASEQPGLFSEWLRNIEKVEVEAVNITQEPRHIMCMYLVTSAKSVTEEVTIIIEDVDPQMANLKMELRDALCAIIYEEIDILTAEGPRIQQGAKTSLQEEMDSFSGSQKVEPITEPEVESKYLISTEEVSYFNVQSRVKYLDATPVTKGVASAVVSDEKQDESLKPSEEKEESSSESGTEEVATVKIQEAEGGLIKEDGPMIHTPLVDTVSEEGDIVHLTTSITNAKEVNWYFENKLVPSDEKFKCLQDQNTYTLVIDKVNTEDHQGEYVCEALNDSGKTATSAKLTVVKRAAPVIKRKIEPLEVALGHLAKFTCEIQSAPNVRFQWFKAGREIYESDKCSIRSSKYISSLEILRTQVVDCGEYTCKASNEYGSVSCTATLTVTVPGGEKKVRKLLPERKPEPKEEVVLKSVLRKRPEEEEPKVEPKKLEKVKKPAVPEPPPPKPVEEVEVPTVTKRERKIPEPTKVPEIKPAIPLPAPEPKPKPEAEVKTIKPPPVEPEPTPIAAPVTVPVVGKKAEAKAPKEEAAKPKGPIKGVPKKTPSPIEAERRKLRPGSGGEKPPDEAPFTYQLKAVPLKFVKEIKDIILTESEFVGSSAIFECLVSPSTAITTWMKDGSNIRESPKHRFIADGKDRKLHIIDVQLSDAGEYTCVLRLGNKEKTSTAKLVVEELPVRFVKTLEEEVTVVKGQPLYLSCELNKERDVVWRKDGKIVVEKPGRIVPGVIGLMRALTINDADDTDAGTYTVTVENANNLECSSCVKVVEVIRDWLVKPIRDQHVKPKGTAIFACDIAKDTPNIKWFKGYDEIPAEPNDKTEILRDGNHLYLKIKNAMPEDIAEYAVEIEGKRYPAKLTLGEREVELLKPIEDVTIYEKESASFDAEISEADIPGQWKLKGELLRPSPTCEIKAEGGKRFLTLHKVKLDQAGEVLYQALNAITTAILTVKEIELDFAVPLKDVTVPERRQARFECVLTREANVIWSKGPDIIKSSDKFDIIADGKKHILVINDSQFDDEGVYTAEVEGKKTSARLFVTGIRLKFMSPLEDQTVKEGETATFVCELSHEKMHVVWFKNDAKLHTSRTVLISSEGKTHKLEMKEVTLDDISQIKAQVKELSSTAQLKVLEADPYFTVKLHDKTAVEKDEITLKCEVSKDVPVKWFKDGEEIVPSPKYSIKADGLRRILKIKKADLKDKGEYVCDCGTDKTKANVTVEARLIKVEKPLYGVEVFVGETAHFEIELSEPDVHGQWKLKGQPLTASPDCEIIEDGKKHILILHNCQLGMTGEVSFQAANAKSAANLKVKELPLIFITPLSDVKVFEKDEAKFECEVSREPKTFRWLKGTQEITGDDRFELIKDGTKHSMVIKSAAFEDEAKYMFEAEDKHTSGKLIIEGIRLKFLTPLKDVTAKEKESAVFTVELSHDNIRVKWFKNDQRLHTTRSVSMQDEGKTHSITFKDLSIDDTSQIRVEAMGMSSEAKLTVLEGDPYFTGKLQDYTGVEKDEVILQCEISKADAPVKWFKDGKEIKPSKNAVIKADGKKRMLILKKALKSDIGQYTCDCGTDKTSGKLDIEDREIKLVRPLHSVEVMETETARFETEISEDDIHANWKLKGEALLQTPDCEIKEEGKIHSLVLHNCRLDQTGGVDFQAANVKSSAHLRVKPRVIGLLRPLKDVTVTAGETATFDCELSYEDIPVEWYLKGKKLEPSDKVVPRSEGKVHTLTLRDVKLEDAGEVQLTAKDFKTHANLFVKEPPVEFTKPLEDQTVEEGATAVLECEVSRENAKVKWFKNGTEILKSKKYEIVADGRVRKLVIHDCTPEDIKTYTCDAKDFKTSCNLNVVPPHVEFLRPLTDLQVREKEMARFECELSRENAKVKWFKDGAEIKKGKKYDIISKGAVRILVINKCLLDDEAEYSCEVRTARTSGMLTVLEEEAVFTKNLANIEVSETDTIKLVCEVSKPGAEVIWYKGDEEIIETGRYEILTEGRKRILVIQNAHLEDAGNYNCRLPSSRTDGKVKVHELAAEFISKPQNLEILEGEKAEFVCSISKESFPVQWKRDDKTLESGDKYDVIADGKKRVLVVKDATLQDMGTYVVMVGAARAAAHLTVIEKLRIVVPLKDTRVKEQQEVVFNCEVNTEGAKAKWFRNEEAIFDSSKYIILQKDLVYTLRIRDAHLDDQANYNVSLTNHRGENVKSAANLIVEEEDLRIVEPLKDIETMEKKSVTFWCKVNRLNVTLKWTKNGEEVPFDNRVSYRVDKYKHMLTIKDCGFPDEGEYIVTAGQDKSVAELLIIEAPTEFVEHLEDQTVTEFDDAVFSCQLSREKANVKWYRNGREIKEGKKYKFEKDGSIHRLIIKDCRLDDECEYACGVEDRKSRARLFVEEIPVEIIRPPQDILEAPGADVVFLAELNKDKVEVQWLRNNMVVVQGDKHQMMSEGKIHRLQICDIKPRDQGEYRFIAKDKEARAKLELAAAPKIKTADQDLVVDVGKPLTMVVPYDAYPKAEAEWFKENEPLSTKTIDTTAEQTSFRILEAKKGDKGRYKIVLQNKHGKAEGFINLKVIDVPGPVRNLEVTETFDGEVSLAWEEPLTDGGSKIIGYVVERRDIKRKTWVLATDRAESCEFTVTGLQKGGVEYLFRVSARNRVGTGEPVETDNPVEARSKYDVPGPPLNVTITDVNRFGVSLTWEPPEYDGGAEITNYVIELRDKTSIRWDTAMTVRAEDLSATVTDVVEGQEYSFRVRAQNRIGVGKPSAATPFVKVADPIERPSPPVNLTSSDQTQSSVQLKWEPPLKDGGSPILGYIIERCEEGKDNWIRCNMKLVPELTYKVTGLEKGNKYLYRVSAENKAGVSDPSEILGPLTADDAFVEPTMDLSAFKDGLEVIVPNPITILVPSTGYPRPTATWCFGDKVLETGDRVKMKTLSAYAELVISPSERSDKGIYTLKLENRVKTISGEIDVNVIARPSAPKELKFGDITKDSVHLTWEPPDDDGGSPLTGYVVEKREVSRKTWTKVMDFVTDLEFTVPDLVQGKEYLFKVCARNKCGPGEPAYVDEPVNMSTPATVPDPPENVKWRDRTANSIFLTWDPPKNDGGSRIKGYIVERCPRGSDKWVACGEPVAETKMEVTGLEEGKWYAYRVKALNRQGASKPSRPTEEIQAVDTQEAPEIFLDVKLLAGLTVKAGTKIELPATVTGKPEPKITWTKADMILKQDKRITIENVPKKSTVTIVDSKRSDTGTYIIEAVNVCGRATAVVEVNVLDKPGPPAAFDITDVTNESCLLTWNPPRDDGGSKITNYVVERRATDSEVWHKLSSTVKDTNFKATKLIPNKEYIFRVAAENMYGVGEPVQASPITAKYQFDPPGPPTRLEPSDITKDAVTLTWCEPDDDGGSPITGYWVERLDPDTDKWVRCNKMPVKDTTYRVKGLTNKKKYRFRVLAENLAGPGKPSKSTEPILIKDPIDPPWPPGKPTVKDVGKTSVRLNWTKPEHDGGAKIESYVIEMLKTGTDEWVRVAEGVPTTQHLLPGLMEGQEYSFRVRAVNKAGESEPSEPSDPVLCREKLYPPSPPRWLEVINITKNTADLKWTVPEKDGGSPITNYIVEKRDVRRKGWQTVDTTVKDTKCTVTPLTEGSLYVFRVAAENAIGQSDYTEIEDSVLAKDTFTTPGPPYALAVVDVTKRHVDLKWEPPKNDGGRPIQRYVIEKKERLGTRWVKAGKTAGPDCNFRVTDVIEGTEVQFQVRAENEAGVGHPSEPTEILSIEDPTSPPSPPLDLHVTDAGRKHIAIAWKPPEKNGGSPIIGYHVEMCPVGTEKWMRVNSRPIKDLKFKVEEGVVPDKEYVLRVRAVNAIGVSEPSEISENVVAKDPDCKPTIDLETHDIIVIEGEKLSIPVPFRAVPVPTVSWHKDGKEVKASDRLTMKNDHISAHLEVPKSVRADAGIYTITLENKLGSATASINVKVIGLPGPCKDIKASDITKSSCKLTWEPPEFDGGTPILHYVLERREAGRRTYIPVMSGENKLSWTVKDLIPNGEYFFRVKAVNKVGGGEYIELKNPVIAQDPKQPPDPPVDVEVHNPTAEAMTITWKPPLYDGGSKIMGYIIEKIAKGEERWKRCNEHLVPILTYTAKGLEEGKEYQFRVRAENAAGISEPSRATPPTKAVDPIDAPKVILRTSLEVKRGDEIALDASISGSPYPTITWIKDENVIVPEEIKKRAAPLVRRRKGEVQEEEPFVLPLTQRLSIDNSKKGESQLRVRDSLRPDHGLYMIKVENDHGIAKAPCTVSVLDTPGPPINFVFEDIRKTSVLCKWEPPLDDGGSEIINYTLEKKDKTKPDSEWIVVTSTLRHCKYSVTKLIEGKEYLFRVRAENRFGPGPPCVSKPLVAKDPFGPPDAPDKPIVEDVTSNSMLVKWNEPKDNGSPILGYWLEKREVNSTHWSRVNKSLLNALKANVDGLLEGLTYVFRVCAENAAGPGKFSPPSDPKTAHDPISPPGPPIPRVTDTSSTTIELEWEPPAFNGGGEIVGYFVDKQLVGTNEWSRCTEKMIKVRQYTVKEIREGADYKLRVSAVNAAGEGPPGETQPVTVAEPQEPPAVELDVSVKGGIQIMAGKTLRIPAVVTGRPVPTKVWTKEEGELDKDRVVIDNVGTKSELIIKDALRKDHGRYVITATNSCGSKFAAARVEVFDVPGPVLDLKPVVTNRKMCLLNWSDPEDDGGSEITGFIIERKDAKMHTWRQPIETERSKCDITGLLEGQEYKFRVIAKNKFGCGPPVEIGPILAVDPLGPPTSPERLTYTERTKSTITLDWKEPRSNGGSPIQGYIIEKRRHDKPDFERVNKRLCPTTSFLVENLDEHQMYEFRVKAVNEIGESEPSLPLNVVIQDDEVPPTIKLRLSVRGDTIKVKAGEPVHIPADVTGLPMPKIEWSKNETVIEKPTDALQITKEEVSRSEAKTELSIPKAVREDKGTYTVTASNRLGSVFRNVHVEVYDRPSPPRNLAVTDIKAESCYLTWDAPLDNGGSEITHYVIDKRDASRKKAEWEEVTNTAVEKRYGIWKLIPNGQYEFRVRAVNKYGISDECKSDKVVIQDPYRLPGPPGKPKVLARTKGSMLVSWTPPLDNGGSPITGYWLEKREEGSPYWSRVSRAPITKVGLKGVEFNVPRLLEGVKYQFRAMAINAAGIGPPSEPSDPEVAGDPIFPPGPPSCPEVKDKTKSSISLGWKPPAKDGGSPIKGYIVEMQEEGTTDWKRVNEPDKLITTCECVVPNLKELRKYRFRVKAVNEAGESEPSDTTGEIPATDIQEEPEVFIDIGAQDCLVCKAGSQIRIPAVIKGRPTPKSSWEFDGKAKKAMKDGVHDIPEDAQLETAENSSVIIIPECKRSHTGKYSITAKNKAGQKTANCRVKVMDVPGPPKDLKVSDITRGSCRLSWKMPDDDGGDRIKGYVIEKRTIDGKAWTKVNPDCGSTTFVVPDLLSEQQYFFRVRAENRFGIGPPVETIQRTTARDPIYPPDPPIKLKIGLITKNTVHLSWKPPKNDGGSPVTHYIVECLAWDPTGTKKEAWRQCNKRDVEELQFTVEDLVEGGEYEFRVKAVNAAGVSKPSATVGPVTVKDQTCPPSIDLKEFMEVEEGTNVNIVAKIKGVPFPTLTWFKAPPKKPDNKEPVLYDTHVNKLVVDDTCTLVIPQSRRSDTGLYTITAVNNLGTASKEMRLNVLGRPGPPVGPIKFESVSADQMTLSWFPPKDDGGSKITNYVIEKREANRKTWVHVSSEPKECTYTIPKLLEGHEYVFRIMAQNKYGIGEPLDSEPETARNLFSVPGAPDKPTVSSVTRNSMTVNWEEPEYDGGSPVTGYWLEMKDTTSKRWKRVNRDPIKAMTLGVSYKVTGLIEGSDYQFRVYAINAAGVGPASLPSDPATARDPIAPPGPPFPKVTDWTKSSADLEWSPPLKDGGSKVTGYIVEYKEEGKEEWEKGKDKEVRGTKLVVTGLKEGAFYKFRVRAVNIAGIGEPGEVTDVIEMKDRLVSPDLQLDASVRDRIVVHAGGVIRIIAYVSGKPPPTVTWNMNERTLPQEATIETTAISSSMVIKNCQRSHQGVYSLLAKNEAGERKKTIIVDVLDVPGPVGTPFLAHNLTNESCKLTWFSPEDDGGSPITNYVIEKRESDRRAWTPVTYTVTRQNATVQGLIQGKAYFFRIAAENSIGMGPFVETSEALVIREPITVPERPEDLEVKEVTKNTVTLTWNPPKYDGGSEIINYVLESRLIGTEKFHKVTNDNLLSRKYTVKGLKEGDTYEYRVSAVNIVGQGKPSFCTKPITCKDELAPPTLHLDFRDKLTIRVGEAFALTGRYSGKPKPKVSWFKDEADVLEDDRTHIKTTPATLALEKIKAKRSDSGKYCVVVENSTGSRKGFCQVNVVDRPGPPVGPVSFDEVTKDYMVISWKPPLDDGGSKITNYIIEKKEVGKDVWMPVTSASAKTTCKVSKLLEGKDYIFRIHAENLYGISDPLVSDSMKAKDRFRVPDAPDQPIVTEVTKDSALVTWNKPHDGGKPITNYILEKRETMSKRWARVTKDPIHPYTKFRVPDLLEGCQYEFRVSAENEIGIGDPSPPSKPVFAKDPIAKPSPPVNPEAIDTTCNSVDLTWQPPRHDGGSKILGYIVEYQKVGDEEWRRANHTPESCPETKYKVTGLRDGQTYKFRVLAVNAAGESDPAHVPEPVLVKDRLEPPELILDANMAREQHIKVGDTLRLSAIIKGVPFPKVTWKKEDRDAPTKARIDVTPVGSKLEIRNAAHEDGGIYSLTVENPAGSKTVSVKVLVLDKPGPPRDLEVSEIRKDSCYLTWKEPLDDGGSVITNYVVERRDVASAQWSPLSATSKKKSHFAKHLNEGNQYLFRVAAENQYGRGPFVETPKPIKALDPLHPPGPPKDLHHVDVDKTEVSLVWNKPDRDGGSPITGYLVEYQEEGTQDWIKFKTVTNLECVVTGLQQGKTYRFRVKAENIVGLGLPDTTIPIECQEKLVPPSVELDVKLIEGLVVKAGTTVRFPAIIRGVPVPTAKWTTDGSEIKTDEHYTVETDNFSSVLTIKNCLRRDTGEYQITVSNAAGSKTVAVHLTVLDVPGPPTGPINILDVTPEHMTISWQPPKDDGGSPVINYIVEKQDTRKDTWGVVSSGSSKTKLKIPHLQKGCEYVFRVRAENKIGVGPPLDSTPTVAKHKFSPPSPPGKPVVTDITENAATVSWTLPKSDGGSPITGYYMERREVTGKWVRVNKTPIADLKFRVTGLYEGNTYEFRVFAENLAGLSKPSPSSDPIKACRPIKPPGPPINPKLKDKSRETADLVWTKPLSDGGSPILGYVVECQKPGTAQWNRINKDELIRQCAFRVPGLIEGNEYRFRIKAANIVGEGEPRELAESVIAKDILHPPEVELDVTCRDVITVRVGQTIRILARVKGRPEPDITWTKEGKVLVREKRVDLIQDLPRVELQIKEAVRADHGKYIISAKNSSGHAQGSAIVNVLDRPGPCQNLKVTNVTKENCTISWENPLDNGGSEITNFIVEYRKPNQKGWSIVASDVTKRLIKANLLANNEYYFRVCAENKVGVGPTIETKTPILAINPIDRPGEPENLHIADKGKTFVYLKWRRPDYDGGSPNLSYHVERRLKGSDDWERVHKGSIKETHYMVDRCVENQIYEFRVQTKNEGGESDWVKTEEVVVKEDLQKPVLDLKLSGVLTVKAGDTIRLEAGVRGKPFPEVAWTKDKDATDLTRSPRVKIDTRADSSKFSLTKAKRSDGGKYVVTATNTAGSFVAYATVNVLDKPGPVRNLKIVDVSSDRCTVCWDPPEDDGGCEIQNYILEKCETKRMVWSTYSATVLTPGTTVTRLIEGNEYIFRVRAENKIGTGPPTESKPVIAKTKYDKPGRPDPPEVTKVSKEEMTVVWNPPEYDGGKSITGYFLEKKEKHSTRWVPVNKSAIPERRMKVQNLLPDHEYQFRVKAENEIGIGEPSLPSRPVVAKDPIEPPGPPTNFRVVDTTKHSITLGWGKPVYDGGAPIIGYVVEMRPKIADASPDEGWKRCNAAAQLVRKEFTVTSLDENQEYEFRVCAQNQVGIGRPAELKEAIKPKEILEPPEIDLDASMRKLVIVRAGCPIRLFAIVRGRPAPKVTWRKVGIDNVVRKGQVDLVDTMAFLVIPNSTRDDSGKYSLTLVNPAGEKAVFVNVRVLDTPGPVSDLKVSDVTKTSCHVSWAPPENDGGSQVTHYIVEKREADRKTWSTVTPEVKKTSFHVTNLVPGNEYYFRVTAVNEYGPGVPTDVPKPVLASDPLSEPDPPRKLEVTEMTKNSATLAWLPPLRDGGAKIDGYITSYREEEQPADRWTEYSVVKDLSLVVTGLKEGKKYKFRVAARNAVGVSLPREAEGVYEAKEQLLPPKILMPEQITIKAGKKLRIEAHVYGKPHPTCKWKKGEDEVVTSSHLAVHKADSSSILIIKDVTRKDSGYYSLTAENSSGTDTQKIKVVVMDAPGPPQPPFDISDIDADACSLSWHIPLEDGGSNITNYIVEKCDVSRGDWVTALASVTKTSCRVGKLIPGQEYIFRVRAENRFGISEPLTSPKMVAQFPFGVPSEPKNARVTKVNKDCIFVAWDRPDSDGGSPIIGYLIERKERNSLLWVKANDTLVRSTEYPCAGLVEGLEYSFRIYALNKAGSSPPSKPTEYVTARMPVDPPGKPEVIDVTKSTVSLIWARPKHDGGSKIIGYFVEACKLPGDKWVRCNTAPHQIPQEEYTATGLEEKAQYQFRAIARTAVNISPPSEPSDPVTILAENVPPRIDLSVAMKSLLTVKAGTNVCLDATVFGKPMPTVSWKKDGTLLKPAEGIKMAMQRNLCTLELFSVNRKDSGDYTITAENSSGSKSATIKLKVLDKPGPPASVKINKMYSDRAMLSWEPPLEDGGSEITNYIVDKRETSRPNWAQVSATVPITSCSVEKLIEGHEYQFRICAENKYGVGDPVFTEPAIAKNPYDPPGRCDPPVISNITKDHMTVSWKPPADDGGSPITGYLLEKRETQAVNWTKVNRKPIIERTLKATGLQEGTEYEFRVTAINKAGPGKPSDASKAAYARDPQYPPGPPAFPKVYDTTRSSVSLSWGKPAYDGGSPIIGYLVEVKRADSDNWVRCNLPQNLQKTRFEVTGLMEDTQYQFRVYAVNKIGYSDPSDVPDKHYPKDILIPPEGELDADLRKTLILRAGVTMRLYVPVKGRPPPKITWSKPNVNLRDRIGLDIKSTDFDTFLRCENVNKYDAGKYILTLENSCGKKEYTIVVKVLDTPGPPVNVTVKEISKDSAYVTWEPPIIDGGSPIINYVVQKRDAERKSWSTVTTECSKTSFRVANLEEGKSYFFRVFAENEYGIGDPGETRDAVKASQTPGPVVDLKVRSVSKSSCSIGWKKPHSDGGSRIIGYVVDFLTEENKWQRVMKSLSLQYSAKDLTEGKEYTFRVSAENENGEGTPSEITVVARDDVVAPDLDLKGLPDLCYLAKENSNFRLKIPIKGKPAPSVSWKKGEDPLATDTRVSVESSAVNTTLIVYDCQKSDAGKYTITLKNVAGTKEGTISIKVVGKPGIPTGPIKFDEVTAEAMTLKWAPPKDDGGSEITNYILEKRDSVNNKWVTCASAVQKTTFRVTRLHEGMEYTFRVSAENKYGVGEGLKSEPIVARHPFDVPDAPPPPNIVDVRHDSVSLTWTDPKKTGGSPITGYHLEFKERNSLLWKRANKTPIRMRDFKVTGLTEGLEYEFRVMAINLAGVGKPSLPSEPVVALDPIDPPGKPEVINITRNSVTLIWTEPKYDGGHKLTGYIVEKRDLPSKSWMKANHVNVPECAFTVTDLVEGGKYEFRIRAKNTAGAISAPSESTETIICKDEYEAPTIVLDPTIKDGLTIKAGDTIVLNAISILGKPLPKSSWSKAGKDIRPSDITQITSTPTSSMLTIKYATRKDAGEYTITATNPFGTKVEHVKVTVLDVPGPPGPVEISNVSAEKATLTWTPPLEDGGSPIKSYILEKRETSRLLWTVVSEDIQSCRHVATKLIQGNEYIFRVSAVNHYGKGEPVQSEPVKMVDRFGPPGPPEKPEVSNVTKNTATVSWKRPVDDGGSEITGYHVERREKKSLRWVRAIKTPVSDLRCKVTGLQEGSTYEFRVSAENRAGIGPPSEASDSVLMKDAAYPPGPPSNPHVTDTTKKSASLAWGKPHYDGGLEITGYVVEHQKVGDEAWIKDTTGTALRITQFVVPDLQTKEKYNFRISAINDAGVGEPAVIPDVEIVEREMAPDFELDAELRRTLVVRAGLSIRIFVPIKGRPAPEVTWTKDNINLKNRANIENTESFTLLIIPECNRYDTGKFVMTIENPAGKKSGFVNVRVLDTPGPVLNLRPTDITKDSVTLHWDLPLIDGGSRITNYIVEKREATRKSYSTATTKCHKCTYKVTGLSEGCEYFFRVMAENEYGIGEPTETTEPVKASEAPSPPDSLNIMDITKSTVSLAWPKPKHDGGSKITGYVIEAQRKGSDQWTHITTVKGLECVVRNLTEGEEYTFQVMAVNSAGRSAPRESRPVIVKEQTMLPELDLRGIYQKLVIAKAGDNIKVEIPVLGRPKPTVTWKKGDQILKQTQRVNFETTATSTILNINECVRSDSGPYPLTARNIVGEVGDVITIQVHDIPGPPTGPIKFDEVSSDFVTFSWDPPENDGGVPISNYVVEMRQTDSTTWVELATTVIRTTYKATRLTTGLEYQFRVKAQNRYGVGPGITSACIVANYPFKVPGPPGTPQVTAVTKDSMTISWHEPLSDGGSPILGYHVERKERNGILWQTVSKALVPGNIFKSSGLTDGIAYEFRVIAENMAGKSKPSKPSEPMLALDPIDPPGKPVPLNITRHTVTLKWAKPEYTGGFKITSYIVEKRDLPNGRWLKANFSNILENEFTVSGLTEDAAYEFRVIAKNAAGAISPPSEPSDAITCRDDVEAPKIKVDVKFKDTVILKAGEAFRLEADVSGRPPPTMEWSKDGKELEGTAKLEIKIADFSTNLVNKDSTRRDSGAYTLTATNPGGFAKHIFNVKVLDRPGPPEGPLAVTEVTSEKCVLSWFPPLDDGGAKIDHYIVQKRETSRLAWTNVASEVQVTKLKVTKLLKGNEYIFRVMAVNKYGVGEPLESEPVLAVNPYGPPDPPKNPEVTTITKDSMVVCWGHPDSDGGSEIINYIVERRDKAGQRWIKCNKKTLTDLRYKVSGLTEGHEYEFRIMAENAAGISAPSPTSPFYKACDTVFKPGPPGNPRVLDTSRSSISIAWNKPIYDGGSEITGYMVEIALPEEDEWQIVTPPAGLKATSYTITGLTENQEYKIRIYAMNSEGLGEPALVPGTPKAEDRMLPPEIELDADLRKVVTIRACCTLRLFVPIKGRPAPEVKWARDHGESLDKASIESTSSYTLLIVGNVNRFDSGKYILTVENSSGSKSAFVNVRVLDTPGPPQDLKVKEVTKTSVTLTWDPPLLDGGSKIKNYIVEKRESTRKAYSTVATNCHKTSWKVDQLQEGCSYYFRVLAENEYGIGLPAETAESVKASERPLPPGKITLMDVTRNSVSLSWEKPEHDGGSRILGYIVEMQTKGSDKWATCATVKVTEATITGLIQGEEYSFRVSAQNEKGISDPRQLSVPVIAKDLVIPPAFKLLFNTFTVLAGEDLKVDVPFIGRPTPAVTWHKDNVPLKQTTRVNAESTENNSLLTIKDACREDVGHYVVKLTNSAGEAIETLNVIVLDKPGPPTGPVKMDEVTADSITLSWGPPKYDGGSSINNYIVEKRDTSTTTWQIVSATVARTTIKACRLKTGCEYQFRIAAENRYGKSTYLNSEPTVAQYPFKVPGPPGTPVVTLSSRDSMEVQWNEPISDGGSRVIGYHLERKERNSILWVKLNKTPIPQTKFKTTGLEEGVEYEFRVSAENIVGIGKPSKVSECYVARDPCDPPGRPEAIIVTRNSVTLQWKKPTYDGGSKITGYIVEKKELPEGRWMKASFTNIIDTHFEVTGLVEDHRYEFRVIARNAAGVFSEPSESTGAITARDEVDPPRISMDPKYKDTIVVHAGESFKVDADIYGKPIPTIQWIKGDQELSNTARLEIKSTDFATSLSVKDAVRVDSGNYILKAKNVAGERSVTVNVKVLDRPGPPEGPVVISGVTAEKCTLAWKPPLQDGGSDIINYIVERRETSRLVWTVVDANVQTLSCKVTKLLEGNEYTFRIMAVNKYGVGEPLESEPVVAKNPFVVPDAPKAPEVTTVTKDSMIVVWERPASDGGSEILGYVLEKRDKEGIRWTRCHKRLIGELRLRVTGLIENHDYEFRVSAENAAGLSEPSPPSAYQKACDPIYKPGPPNNPKVIDITRSSVFLSWSKPIYDGGCEIQGYIVEKCDVSVGEWTMCTPPTGINKTNIEVEKLLEKHEYNFRICAINKAGVGEHADVPGPIIVEEKLEAPDIDLDLELRKIINIRAGGSLRLFVPIKGRPTPEVKWGKVDGEIRDAAIIDVTSSFTSLVLDNVNRYDSGKYTLTLENSSGTKSAFVTVRVLDTPSPPVNLKVTEITKDSVSITWEPPLLDGGSKIKNYIVEKREATRKSYAAVVTNCHKNSWKIDQLQEGCSYYFRVTAENEYGIGLPAQTADPIKVAEVPQPPGKITVDDVTRNSVSLSWTKPEHDGGSKIIQYIVEMQAKHSEKWSECARVKSLQAVITNLTQGEEYLFRVVAVNEKGRSDPRSLAVPIVAKDLVIEPDVKPAFSSYSVQVGQDLKIEVPISGRPKPTITWTKDGLPLKQTTRINVTDSLDLTTLSIKETHKDDGGQYGITVANVVGQKTASIEIVTLDKPDPPKGPVKFDDVSAESITLSWNPPLYTGGCQITNYIVQKRDTTTTVWDVVSATVARTTLKVTKLKTGTEYQFRIFAENRYGQSFALESDPIVAQYPYKEPGPPGTPFATAISKDSMVIQWHEPVNNGGSPVIGYHLERKERNSILWTKVNKTIIHDTQFKAQNLEEGIEYEFRVYAENIVGVGKASKNSECYVARDPCDPPGTPEPIMVKRNEITLQWTKPVYDGGSMITGYIVEKRDLPDGRWMKASFTNVIETQFTVSGLTEDQRYEFRVIAKNAAGAISKPSDSTGPITAKDEVELPRISMDPKFRDTIVVNAGETFRLEADVHGKPLPTIEWLRGDKEIEESARCEIKNTDFKALLIVKDAIRIDGGQYILRASNVAGSKSFPVNVKVLDRPGPPEGPVQVTGVTSEKCSLTWSPPLQDGGSDISHYVVEKRETSRLAWTVVASEVVTNSLKVTKLLEGNEYVFRIMAVNKYGVGEPLESAPVLMKNPFVLPGPPKSLEVTNIAKDSMTVCWNRPDSDGGSEIIGYIVEKRDRSGIRWIKCNKRRITDLRLRVTGLTEDHEYEFRVSAENAAGVGEPSPATVYYKACDPVFKPGPPTNAHIVDTTKNSITLAWGKPIYDGGSEILGYVVEICKADEEEWQIVTPQTGLRVTRFEISKLTEHQEYKIRVCALNKVGLGEATSVPGTVKPEDKLEAPELDLDSELRKGIVVRAGGSARIHIPFKGRPTPEITWSREEGEFTDKVQIEKGVNYTQLSIDNCDRNDAGKYILKLENSSGSKSAFVTVKVLDTPGPPQNLAVKEVRKDSAFLVWEPPIIDGGAKVKNYVIDKRESTRKAYANVSSKCSKTSFKVENLTEGAIYYFRVMAENEFGVGVPVETVDAVKAAEPPSPPGKVTLTDVSQTSASLMWEKPEHDGGSRVLGYVVEMQPKGTEKWSIVAESKVCNAVVTGLSSGQEYQFRVKAYNEKGKSDPRVLGVPVIAKDLTIQPSLKLPFNTYSIQAGEDLKIEIPVIGRPRPNISWVKDGEPLKQTTRVNVEETATSTVLHIKEGNKDDFGKYTVTATNSAGTATENLSVIVLEKPGPPVGPVRFDEVSADFVVISWEPPAYTGGCQISNYIVEKRDTTTTTWHMVSATVARTTIKITKLKTGTEYQFRIFAENRYGKSAPLDSKAVIVQYPFKEPGPPGTPFVTSISKDQMLVQWHEPVNDGGTKIIGYHLEQKEKNSILWVKLNKTPIQDTKFKTTGLDEGLEYEFKVSAENIVGIGKPSKVSECFVARDPCDPPGRPEAIVITRNNVTLKWKKPAYDGGSKITGYIVEKKDLPDGRWMKASFTNVLETEFTVSGLVEDQRYEFRVIARNAAGNFSEPSDSSGAITARDEIDAPNASLDPKYKDVIVVHAGETFVLEADIRGKPIPDVVWSKDGKELEETAARMEIKSTIQKTTLVVKDCIRTDGGQYILKLSNVGGTKSIPITVKVLDRPGPPEGPLKVTGVTAEKCYLAWNPPLQDGGANISHYIIEKRETSRLSWTQVSTEVQALNYKVTKLLPGNEYIFRVMAVNKYGIGEPLESGPVTACNPYKPPGPPSTPEVSAITKDSMVVTWARPVDDGGTEIEGYILEKRDKEGVRWTKCNKKTLTDLRLRVTGLTEGHSYEFRVAAENAAGVGEPSEPSVFYRACDALYPPGPPSNPKVTDTSRSSVSLAWSKPIYDGGAPVKGYVVEVKEAAADEWTTCTPPTGLQGKQFTVTKLKENTEYNFRICAINSEGVGEPATLPGSVVAQERIEPPEIELDADLRKVVVLRASATLRLFVTIKGRPEPEVKWEKAEGILTDRAQIEVTSSFTMLVIDNVTRFDSGRYNLTLENNSGSKTAFVNVRVLDSPSAPVNLTIREVKKDSVTLSWEPPLIDGGAKITNYIVEKRETTRKAYATITNNCTKTTFRIENLQEGCSYYFRVLASNEYGIGLPAETTEPVKVSEPPLPPGRVTLVDVTRNTATIKWEKPESDGGSKITGYVVEMQTKGSEKWSTCTQVKTLEATISGLTAGEEYVFRVAAVNEKGRSDPRQLGVPVIARDIEIKPSVELPFHTFNVKAREQLKIDVPFKGRPQATVNWRKDGQTLKETTRVNVSSSKTVTSLSIKEASKEDVGTYELCVSNSAGSITVPITIIVLDRPGPPGPIRIDEVSCDSITISWNPPEYDGGCQISNYIVEKKETTSTTWHIVSQAVARTSIKIVRLTTGSEYQFRVCAENRYGKSSYSESSAVVAEYPFSPPGPPGTPKVVHATKSTMLVTWQVPVNDGGSRVIGYHLEYKERSSILWSKANKILIADTQMKVSGLDEGLMYEYRVYAENIAGIGKCSKSCEPVPARDPCDPPGQPEVTNITRKSVSLKWSKPHYDGGAKITGYIVERRELPDGRWLKCNYTNIQETYFEVTELTEDQRYEFRVFARNAADSVSEPSESTGPIIVKDDVEPPRVMMDVKFRDVIVVKAGEVLKINADIAGRPLPVISWAKDGIEIEERARTEIISTDNHTLLTVKDCIRRDTGQYVLTLKNVAGTRSVAVNCKVLDKPGPPAGPLEINGLTAEKCSLSWGRPQEDGGADIDYYIVEKRETSHLAWTICEGELQMTSCKVTKLLKGNEYIFRVTGVNKYGVGEPLESVAIKALDPFTVPSPPTSLEITSVTKESMTLCWSRPESDGGSEISGYIIERREKNSLRWVRVNKKPVYDLRVKSTGLREGCEYEYRVYAENAAGLSLPSETSPLIRAEDPVFLPSPPSKPKIVDSGKTTITIAWVKPLFDGGAPITGYTVEYKKSDDTDWKTSIQSLRGTEYTISGLTTGAEYVFRVKSVNKVGASDPSDSSDPQIAKEREEEPLFDIDSEMRKTLIVKAGASFTMTVPFRGRPVPNVLWSKPDTDLRTRAYVDTTDSRTSLTIENANRNDSGKYTLTIQNVLSAASLTLVVKVLDTPGPPTNITVQDVTKESAVLSWDVPENDGGAPVKNYHIEKREASKKAWVSVTNNCNRLSYKVTNLQEGAIYYFRVSGENEFGVGIPAETKEGVKITEKPSPPEKLGVTSISKDSVSLTWLKPEHDGGSRIVHYVVEALEKGQKNWVKCAVAKSTHHVVSGLRENSEYFFRVFAENQAGLSDPRELLLPVLIKEQLEPPEIDMKNFPSHTVYVRAGSNLKVDIPISGKPLPKVTLSRDGVPLKATMRFNTEITAENLTINLKESVTADAGRYEITAANSSGTTKAFINIVVLDRPGPPTGPVVISDITEESVTLKWEPPKYDGGSQVTNYILLKRETSTAVWTEVSATVARTMMKVMKLTTGEEYQFRIKAENRFGISDHIDSACVTVKLPYTTPGPPSTPWVTNVTRESITVGWHEPVSNGGSAVVGYHLEMKDRNSILWQKANKLVIRTTHFKVTTISAGLIYEFRVYAENAAGVGKPSHPSEPVLAIDACEPPRNVRITDISKNSVSLSWQQPAFDGGSKITGYIVERRDLPDGRWTKASFTNVTETQFIISGLTQNSQYEFRVFARNAVGSISNPSEVVGPITCIDSYGGPVIDLPLEYTEVVKYRAGTSVKLRAGISGKPAPTIEWYKDDKELQTNALVCVENTTDLASILIKDADRLNSGCYELKLRNAMGSASATIRVQILDKPGPPGGPIEFKTVTAEKITLLWRPPADDGGAKITHYIVEKRETSRVVWSMVSEHLEECIITTTKIIKGNEYIFRVRAVNKYGIGEPLESDSVVAKNAFVTPGPPGIPEVTKITKNSMTVVWSRPIADGGSDISGYFLEKRDKKSLGWFKVLKETIRDTRQKVTGLTENSDYQYRVCAVNAAGQGPFSEPSEFYKAADPIDPPGPPAKIRIADSTKSSITLGWSKPVYDGGSAVTGYVVEIRQGEEEEWTTVSTKGEVRTTEYVVSNLKPGVNYYFRVSAVNCAGQGEPIEMNEPVQAKDILEAPEIDLDVALRTSVIAKAGEDVQVLIPFKGRPPPTVTWRKDEKNLGSDARYSIENTDSSSLLTIPQVTRNDTGKYILTIENGVGEPKSSTVSVKVLDTPAACQKLQVKHVSRGTVTLLWDPPLIDGGSPIINYVIEKRDATKRTWSVVSHKCSSTSFKLIDLSEKTPFFFRVLAENEIGIGEPCETTEPVKAAEVPAPIRDLSMKDSTKTSVILSWTKPDFDGGSVITEYVVERKGKGEQTWSHAGISKTCEIEVSQLKEQSVLEFRVFAKNEKGLSDPVTIGPITVKELIITPEVDLSDIPGAQVTVRIGHNVHLELPYKGKPKPSISWLKDGLPLKESEFVRFSKTENKITLSIKNAKKEHGGKYTVILDNAVCRIAVPITVITLGPPSKPKGPIRFDEIKADSVILSWDVPEDNGGGEITCYSIEKRETSQTNWKMVCSSVARTTFKVPNLVKDAEYQFRVRAENRYGVSQPLVSSIIVAKHQFRIPGPPGKPVIYNVTSDGMSLTWDAPVYDGGSEVTGFHVEKKERNSILWQKVNTSPISGREYRATGLVEGLDYQFRVYAENSAGLSSPSDPSKFTLAVSPVDPPGTPDYIDVTRETITLKWNPPLRDGGSKIVGYSIEKRQGNERWVRCNFTDVSECQYTVTGLSPGDRYEFRIIARNAVGTISPPSQSSGIIMTRDENVPPIVEFGPEYFDGLIIKSGESLRIKALVQGRPVPRVTWFKDGVEIEKRMNMEITDVLGSTSLFVRDATRDHRGVYTVEAKNASGSAKAEIKVKVQDTPGKVVGPIRFTNITGEKMTLWWDAPLNDGCAPITHYIIEKRETSRLAWALIEDKCEAQSYTAIKLINGNEYQFRVSAVNKFGVGRPLDSDPVVAQIQYTVPDAPGIPEPSNITGNSITLTWARPESDGGSEIQQYILERREKKSTRWVKVISKRPISETRFKVTGLTEGNEYEFHVMAENAAGVGPASGISRLIKCREPVNPPGPPTVVKVTDTSKTTVSLEWSKPVFDGGMEIIGYIIEMCKADLGDWHKVNAEACVKTRYTVTDLQAGEEYKFRVSAINGAGKGDSCEVTGTIKAVDRLTAPELDIDANFKQTHVVRAGASIRLFIAYQGRPTPTAVWSKPDSNLSLRADIHTTDSFSTLTVENCNRNDAGKYTLTVENNSGSKSITFTVKVLDTPGPPGPITFKDVTRGSATLMWDAPLLDGGARIHHYVVEKREASRRSWQVISEKCTRQIFKVNDLAEGVPYYFRVSAVNEYGVGEPYEMPEPIVATEQPAPPRRLDVVDTSKSSAVLAWLKPDHDGGSRITGYLLEMRQKGSDFWVEAGHTKQLTFTVERLVEKTEYEFRVKAKNDAGYSEPREAFSSVIIKEPQIEPTADLTGITNQLITCKAGSPFTIDVPISGRPAPKVTWKLEEMRLKETDRVSITTTKDRTTLTVKDSMRGDSGRYFLTLENTAGVKTFSVTVVVIGRPGPVTGPIEVSSVSAESCVLSWGEPKDGGGTEITNYIVEKRESGTTAWQLVNSSVKRTQIKVTHLTKYMEYSFRVSSENRFGVSKPLESAPIIAEHPFVPPSAPTRPEVYHVSANAMSIRWEEPYHDGGSKIIGYWVEKKERNTILWVKENKVPCLECNYKVTGLVEGLEYQFRTYALNAAGVSKASEASRPIMAQNPVDAPGRPEVTDVTRSTVSLIWSAPAYDGGSKVVGYIIERKPVSEVGDGRWLKCNYTIVSDNFFTVTALSEGDTYEFRVLAKNAAGVISKGSESTGPVTCRDEYAPPKAELDARLHGDLVTIRAGSDLVLDAAVGGKPEPKIIWTKGDKELDLCEKVSLQYTGKRATAVIKFCDRSDSGKYTLTVKNASGTKAVSVMVKVLDSPGPCGKLTVSRVTQEKCTLAWSLPQEDGGAEITHYIVERRETSRLNWVIVEGECPTLSYVVTRLIKNNEYIFRVRAVNKYGPGVPVESEPIVARNSFTIPSPPGIPEEVGTGKEHIIIQWTKPESDGGNEISNYLVDKREKKSLRWTRVNKDYVVYDTRLKVTSLMEGCDYQFRVTAVNAAGNSEPSEASNFISCREPSYTPGPPSAPRVVDTTKHSISLAWTKPMYDGGTDIVGYVLEMQEKDTDQWYRVHTNATIRNTEFTVPDLKMGQKYSFRVAAVNVKGMSEYSESIAEIEPVERIEIPDLELADDLKKTVTIRAGASLRLMVSVSGRPPPVITWSKQGIDLASRAIIDTTESYSLLIVDKVNRYDAGKYTIEAENQSGKKSATVLVKVYDTPGPCPSVKVKEVSRDSVTITWEIPTIDGGAPVNNYIVEKREAAMRAFKTVTTKCSKTLYRISGLVEGTMYYFRVLPENIYGIGEPCETSDAVLVSEVPLVPAKLEVVDVTKSTVTLAWEKPLYDGGSRLTGYVLEACKAGTERWMKVVTLKPTVLEHTVTSLNEGEQYLFRIRAQNEKGVSEPRETVTAVTVQDLRVLPTIDLSTMPQKTIHVPAGRPVELVIPIAGRPPPAASWFFAGSKLRESERVTVETHTKVAKLTIRETTIRDTGEYTLELKNVTGTTSETIKVIILDKPGPPTGPIKIDEIDATSITISWEPPELDGGAPLSGYVVEQRDAHRPGWLPVSESVTRSTFKFTRLTEGNEYVFRVAATNRFGIGSYLQSEVIECRSSIRIPGPPETLQIFDVSRDGMTLTWYPPEDDGGSQVTGYIVERKEVRADRWVRVNKVPVTMTRYRSTGLTEGLEYEHRVTAINARGSGKPSRPSKPIVAMDPIAPPGKPQNPRVTDTTRTSVSLAWSVPEDEGGSKVTGYLIEMQKVDQHEWTKCNTTPTKIREYTLTHLPQGAEYRFRVLACNAGGPGEPAEVPGTVKVTEMLEYPDYELDERYQEGIFVRQGGVIRLTIPIKGKPFPICKWTKEGQDISKRAMIATSETHTELVIKEADRGDSGTYDLVLENKCGKKAVYIKVRVIGSPNSPEGPLEYDDIQVRSVRVSWRPPADDGGADILGYILERREVPKAAWYTIDSRVRGTSLVVKGLKENVEYHFRVSAENQFGISKPLKSEEPVTPKTPLNPPEPPSNPPEVLDVTKSSVSLSWSRPKDDGGSRVTGYYIERKETSTDKWVRHNKTQITTTMYTVTGLVPDAEYQFRIIAQNDVGLSETSPASEPVVCKDPFDKPSQPGELEILSISKDSVTLQWEKPECDGGKEILGYWVEYRQSGDSAWKKSNKERIKDKQFTIGGLLEATEYEFRVFAENETGLSRPRRTAMSIKTKLTSGEAPGIRKEMKDVTTKLGEAAQLSCQIVGRPLPDIKWYRFGKELIQSRKYKMSSDGRTHTLTVMTEEQEDEGVYTCIATNEVGEVETSSKLLLQATPQFHPGYPLKEKYYGAVGSTLRLHVMYIGRPVPAMTWFHGQKLLQNSENITIENTEHYTHLVMKNVQRKTHAGKYKVQLSNVFGTVDAILDVEIQDKPDKPTGPIVIEALLKNSAVISWKPPADDGGSWITNYVVEKCEAKEGAEWQLVSSAISVTTCRIVNLTENAGYYFRVSAQNTFGISDPLEVSSVVIIKSPFEKPGAPGKPTITAVTKDSCVVAWKPPASDGGAKIRNYYLEKREKKQNKWISVTTEEIRETVFSVKNLIEGLEYEFRVKCENLGGESEWSEISEPITPKSDVPIQAPHFKEELRNLNVRYQSNATLVCKVTGHPKPIVKWYRQGKEIIADGLKYRIQEFKGGYHQLIIASVTDDDATVYQVRATNQGGSVSGTASLEVEVPAKIHLPKTLEGMGAVHALRGEVVSIKIPFSGKPDPVITWQKGQDLIDNNGHYQVIVTRSFTSLVFPNGVERKDAGFYVVCAKNRFGIDQKTVELDVADVPDPPRGVKVSDVSRDSVNLTWTEPASDGGSKITNYIVEKCATTAERWLRVGQARETRYTVINLFGKTSYQFRVIAENKFGLSKPSEPSEPTITKEDKTRAMNYDEEVDETREVSMTKASHSSTKELYEKYMIAEDLGRGEFGIVHRCVETSSKKTYMAKFVKVKGTDQVLVKKEISILNIARHRNILHLHESFESMEELVMIFEFISGLDIFERINTSAFELNEREIVSYVHQVCEALQFLHSHNIGHFDIRPENIIYQTRRSSTIKIIEFGQARQLKPGDNFRLLFTAPEYYAPEVHQHDVVSTATDMWSLGTLVYVLLSGINPFLAETNQQIIENIMNAEYTFDEEAFKEISIEAMDFVDRLLVKERKSRMTASEALQHPWLKQKIERVSTKVIRTLKHRRYYHTLIKKDLNMVVSAARISCGGAIRSQKGVSVAKVKVASIEIGPVSGQIMHAVGEEGGHVKYVCKIENYDQSTQVTWYFGVRQLENSEKYEITYEDGVAILYVKDITKLDDGTYRCKVVNDYGEDSSYAELFVKGVREVYDYYCRRTMKKIKRRTDTMRLLERPPEFTLPLYNKTAYVGENVRFGVTITVHPEPHVTWYKSGQKIKPGDNDKKYTFESDKGLYQLTINSVTTDDDAEYTVVARNKYGEDSCKAKLTVTLHPPPTDSTLRPMFKRLLANAECQEGQSVCFEIRVSGIPPPTLKWEKDGQPLSLGPNIEIIHEGLDYYALHIRDTLPEDTGYYRVTATNTAGSTSCQAHLQVERLRYKKQEFKSKEEHERHVQKQIDKTLRMAEILSGTESVPLTQVAKEALREAAVLYKPAVSTKTVKGEFRLEIEEKKEERKLRMPYDVPEPRKYKQTTIEEDQRIKQFVPMSDMKWYKKIRDQYEMPGKLDRVVQKRPKRIRLSRWEQFYVMPLPRITDQYRPKWRIPKLSQDDLEIVRPARRRTPSPDYDFYYRPRRRSLGDISDEELLLPIDDYLAMKRTEEERLRLEEELELGFSASPPSRSPPHFELSSLRYSSPQAHVKVEETRKDFRYSTYHIPTKAEASTSYAELRERHAQAAYRQPKQRQRIMAEREDEELLRPVTTTQHLSEYKSELDFMSKEEKSRKKSRRQREVTEITEIEEEYEISKHAQRESSSSASRLLRRRRSLSPTYIELMRPVSELIRSRPQPAEEYEDDTERRSPTPERTRPRSPSPVSSERSLSRFERSARFDIFSRYESMKAALKTQKTSERKYEVLSQQPFTLDHAPRITLRMRSHRVPCGQNTRFILNVQSKPTAEVKWYHNGVELQESSKIHYTNTSGVLTLEILDCHTDDSGTYRAVCTNYKGEASDYATLDVTGGDYTTYASQRRDEEVPRSVFPELTRTEAYAVSSFKKTSEMEASSSVREVKSQMTETRESLSSYEHSASAEMKSAALEEKSLEEKSTTRKIKTTLAARILTKPRSMTVYEGESARFSCDTDGEPVPTVTWLRKGQVLSTSARHQVTTTKYKSTFEISSVQASDEGNYSVVVENSEGKQEAEFTLTIQKARVTEKAVTSPPRVKSPEPRVKSPEAVKSPKRVKSPEPSHPKAVSPTETKPTPTEKVQHLPVSAPPKITQFLKAEASKEIAKLTCVVESSVLRAKEVTWYKDGKKLKENGHFQFHYSADGTYELKINNLTESDQGEYVCEISGEGGTSKTNLQFMGQAFKSIHEKVSKISETKKSDQKTTESTVTRKTEPKAPEPISSKPVIVTGLQDTTVSSDSVAKFAVKATGEPRPTAIWTKDGKAITQGGKYKLSEDKGGFFLEIHKTDTSDSGLYTCTVKNSAGSVSSSCKLTIKAIKDTEAQKVSTQKTSEITPQKKAVVQEEISQKALRSEEIKMSEAKSQEKLALKEEASKVLISEEVKKSAATSLEKSIVHEEITKTSQASEEVRTHAEIKAFSTQMSINEGQRLVLKANIAGATDVKWVLNGVELTNSEEYRYGVSGSDQTLTIKQASHRDEGILTCISKTKEGIVKCQYDLTLSKELSDAPAFISQPRSQNINEGQNVLFTCEISGEPSPEIEWFKNNLPISISSNVSISRSRNVYSLEIRNASVSDSGKYTIKAKNFRGQCSATASLMVLPLVEEPSREVVLRTSGDTSLQGSFSSQSVQMSASKQEASFSSFSSSSASSMTEMKFASMSAQSMSSMQESFVEMSSSSFMGISNMTQLESSTSKMLKAGIRGIPPKIEALPSDISIDEGKVLTVACAFTGEPTPEVTWSCGGRKIHSQEQGRFHIENTDDLTTLIIMDVQKQDGGLYTLSLGNEFGSDSATVNIHIRSI

SEQ ID NO: 88976 - protein, 32767 aa, Homo sapiens
  Payload ID: 17810
  Gene Name: titin
  Uniprot ID: Q8WZ42
  ENSP ID: ENSP00000343764
MTTQAPTFTQPLQSVVVLEGSTATFEAHISGFPVPEVSWFRDGQVISTSTLPGVQISFSDGRAKLTIPAVTKANSGRYSLKATNGSGQATSTAELLVKAETAPPNFVQRLQSMTVRQGSQVRLQVRVTGIPTPVVKFYRDGAEIQSSLDFQISQEGDLYSLLIAEAYPEDSGTYSVNATNSVGRATSTAELLVQGEEEVPAKKTKTIVSTAQISESRQTRIEKKIEAHFDARSIATVEMVIDGAAGQQLPHKTPPRIPPKPKSRSPTPPSIAAKAQLARQQSPSPIRHSPSPVRHVRAPTPSPVRSVSPAARISTSPIRSVRSPLLMRKTQASTVATGPEVPPPWKQEGYVASSSEAEMRETTLTTSTQIRTEERWEGRYGVQEQVTISGAAGAAASVSASASYAAEAVATGAKEVKQDADKSAAVATVVAAVDMARVREPVISAVEQTAQRTTTTAVHIQPAQEQVRKEAEKTAVTKVVVAADKAKEQELKSRTKEVITTKQEQMHVTHEQIRKETEKTFVPKVVISAAKAKEQETRISEEITKKQKQVTQEAIRQETEITAASMVVVATAKSTKLETVPGAQEETTTQQDQMHLSYEKIMKETRKTVVPKVIVATPKVKEQDLVSRGREGITTKREQVQITQEKMRKEAEKTALSTIAVATAKAKEQETILRTRETMATRQEQIQVTHGKVDVGKKAEAVATVVAAVDQARVREPREPGHLEESYAQQTTLEYGYKERISAAKVAEPPQRPASEPHVVPKAVKPRVIQAPSETHIKTTDQKGMHISSQIKKTTDLTTERLVHVDKRPRTASPHFTVSKISVPKTEHGYEASIAGSAIATLQKELSATSSAQKITKSVKAPTVKPSETRVRAEPTPLPQFPFADTPDTYKSEAGVEVKKEVGVSITGTTVREERFEVLHGREAKVTETARVPAPVEIPVTPPTLVSGLKNVTVIEGESVTLECHISGYPSPTVTWYREDYQIESSIDFQITFQSGIARLMIREAFAEDSGRFTCSAVNEAGTVSTSCYLAVQVSEEFEKETTAVTEKFTTEEKRFVESRDVVMTDTSLTEEQAGPGEPAAPYFITKPVVQKLVEGGSVVFGCQVGGNPKPHVYWKKSGVPLTTGYRYKVSYNKQTGECKLVISMTFADDAGEYTIVVRNKHGETSASASLLEEADYELLMKSQQEMLYQTQVTAFVQEPKVGETAPGFVYSEYEKEYEKEQALIRKKMAKDTVVVRTYVEDQEFHISSFEERLIKEIEYRIIKTTLEELLEEDGEEKMAVDISESEAVESGFDSRIKNYRILEGMGVTFHCKMSGYPLPKIAWYKDGKRIKHGERYQMDFLQDGRASLRIPVVLPEDEGIYTAFASNIKGNAICSGKLYVEPAAPLGAPTYIPTLEPVSRIRSLSPRSVSRSPIRMSPARMSPARMSPARMSPARMSPGRRLEETDESQLERLYKPVFVLKPVSFKCLEGQTARFDLKVVGRPMPETFWFHDGQQIVNDYTHKVVIKEDGTQSLIIVPATPSDSGEWTVVAQNRAGRSSISVILTVEAVEHQVKPMFVEKLKNVNIKEGSRLEMKVRATGNPNPDIVWLKNSDIIVPHKYPKIRIEGTKGEAALKIDSTVSQDSAWYTATAINKAGRDTTRCKVNVEVEFAEPEPERKLIIPRGTYRAKEIAAPELEPLHLRYGQEQWEEGDLYDKEKQQKPFFKKKLTSLRLKRFGPAHFECRLTPIGDPTMVVEWLHDGKPLEAANRLRMINEFGYCSLDYGVAYSRDSGIITCRATNKYGTDHTSATLIVKDEKSLVEESQLPEGRKGLQRIEELERMAHEGALTGVTTDQKEKQKPDIVLYPEPVRVLEGETARFRCRVTGYPQPKVNWYLNGQLIRKSKRFRVRYDGIHYLDIVDCKSYDTGEVKVTAENPEGVIEHKVKLEIQQREDFRSVLRRAPEPRPEFHVHEPGKLQFEVQKVDRPVDTTETKEVVKLKRAERITHEKVPEESEELRSKFKRRTEEGYYEAITAVELKSRKKDESYEELLRKTKDELLHWTKELTEEEKKALAEEGKITIPTFKPDKIELSPSMEAPKIFERIQSQTVGQGSDAHFRVRVVGKPDPECEWYKNGVKIERSDRIYWYWPEDNVCELVIRDVTAEDSASIMVKAINIAGETSSHAFLLVQAKQLITFTQELQDVVAKEKDTMATFECETSEPFVKVKWYKDGMEVHEGDKYRMHSDRKVHFLSILTIDTSDAEDYSCVLVEDENVKTTAKLIVEGAVVEFVKELQDIEVPESYSGELECIVSPENIEGKWYHNDVELKSNGKYTITSRRGRQNLTVKDVTKEDQGEYSFVIDGKKTTCKLKMKPRPIAILQGLSDQKVCEGDIVQLEVKVSLESVEGVWMKDGQEVQPSDRVHIVIDKQSHMLLIEDMTKEDAGNYSFTIPALGLSTSGRVSVYSVDVITPLKDVNVIEGTKAVLECKVSVPDVTSVKWYLNDEQIKPDDRVQAIVKGTKQRLVINRTHASDEGPYKLIVGRVETNCNLSVEKIKIIRGLRDLTCTETQNVVFEVELSHSGIDVLWNFKDKEIKPSSKYKIEAHGKIYKLTVLNMMKDDEGKYTFYAGENMTSGKLTVAGGAISKPLTDQTVAESQEAVFECEVANPDSKGEWLRDGKHLPLTNNIRSESDGHKRRLIIAATKLDDIGEYTYKVATSKTSAKLKVEAVKIKKTLKNLTVTETQDAVFTVELTHPNVKGVQWIKNGVVLESNEKYAISVKGTIYSLRIKNCAIVDESVYGFRLGRLGASARLHVETVKIIKKPKDVTALENATVAFEVSVSHDTVPVKWFHKSVEIKPSDKHRLVSERKVHKLMLQNISPSDAGEYTAVVGQLECKAKLFVETLHITKTMKNIEVPETKTASFECEVSHFNVPSMWLKNGVEIEMSEKFKIVVQGKLHQLIIMNTSTEDSAEYTFVCGNDQVSATLTVTPIMITSMLKDINAEEKDTITFEVTVNYEGISYKWLKNGVEIKSTDKCQMRTKKLTHSLNIRNVHFGDAADYTFVAGKATSTATLYVEARHIEFRKHIKDIKVLEKKRAMFECEVSEPDITVQWMKDDQELQITDRIKIQKEKYVHRLLIPSTRMSDAGKYTVVAGGNVSTAKLFVEGRDVRIRSIKKEVQVIEKQRAVVEFEVNEDDVDAHWYKDGIEINFQVQERHKYVVERRIHRMFISETRQSDAGEYTFVAGRNRSSVTLYVNAPEPPQVLQELQPVTVQSGKPARFCAVISGRPQPKISWYKEEQLLSTGFKCKFLHDGQEYTLLLIEAFPEDAAVYTCEAKNDYGVATTSASLSVEVPEVVSPDQEMPVYPPAIITPLQDTVTSEGQPARFQCRVSGTDLKVSWYSKDKKIKPSRFFRMTQFEDTYQLEIAEAYPEDEGTYTFVASNAVGQVSSTANLSLEAPESILHERIEQEIEMEMKAAPVIKRKIEPLEVALGHLAKFTCEIQSAPNVRFQWFKAGREIYESDKCSIRSSKYISSLEILRTQVVDCGEYTCKASNEYGSVSCTATLTVTEAYPPTFLSRPKSLTTFVGKAAKFICTVTGTPVIETIWQKDGAALSPSPNWRISDAENKHILELSNLTIQDRGVYSCKASNKFGADICQAELIIIDKPHFIKELEPVQSAINKKVHLECQVDEDRKVTVTWSKDGQKLPPGKDYKICFEDKIATLEIPLAKLKDSGTYVCTASNEAGSSSCSATVTVREPPSFVKKVDPSYLMLPGESARLHCKLKGSPVIQVTWFKNNKELSESNTVRMYFVNSEAILDITDVKVEDSGSYSCEAVNDVGSDSCSTEIVIKEPPSFIKTLEPADIVRGTNALLQCEVSGTGPFEISWFKDKKQIRSSKKYRLFSQKSLVCLEIFSFNSADVGEYECVVANEVGKCGCMATHLLKEPPTFVKKVDDLIALGGQTVTLQAAVRGSEPISVTWMKGQEVIREDGKIKMSFSNGVAVLIIPDVQISFGGKYTCLAENEAGSQTSVGELIVKEPAKIIERAELIQVTAGDPATLEYTVAGTPELKPKWYKDGRPLVASKKYRISFKNNVAQLKFYSAELHDSGQYTFEISNEVGSSSCETTFTVLDRDIAPFFTKPLRNVDSVVNGTCRLDCKIAGSLPMRVSWFKDGKEIAASDRYRIAFVEGTASLEIIRVDMNDAGNFTCRATNSVGSKDSSGALIVQEPPSFVTKPGSKDVLPGSAVCLKSTFQGSTPLTIRWFKGNKELVSGGSCYITKEALESSLELYLVKTSDSGTYTCKVSNVAGGVECSANLFVKEPATFVEKLEPSQLLKKGDATQLACKVTGTPPIKITWFANDREIKESSKHRMSFVESTAVLRLTDVGIEDSGEYMCEAQNEAGSDHCSSIVIVKESPYFTKEFKPIEVLKEYDVMLLAEVAGTPPFEITWFKDNTILRSGRKYKTFIQDHLVSLQILKFVAADAGEYQCRVTNEVGSSICSARVTLREPPSFIKKIESTSSLRGGTAAFQATLKGSLPITVTWLKDSDEITEDDNIRMTFENNVASLYLSGIEVKHDGKYVCQAKNDAGIQRCSALLSVKEPATITEEAVSIDVTQGDPATLQVKFSGTKEITAKWFKDGQELTLGSKYKISVTDTVSILKIISTEKKDSGEYTFEVQNDVGRSSCKARINVLDLIIPPSFTKKLKKMDSIKGSFIDLECIVAGSHPISIQWFKDDQEISASEKYKFSFHDNTAFLEISQLEGTDSGTYTCSATNKAGHNQCSGHLTVKEPPYFVEKPQSQDVNPNTRVQLKALVGGTAPMTIKWFKDNKELHSGAARSVWKDDTSTSLELFAAKATDSGTYICQLSNDVGTATSKATLFVKEPPQFIKKPSPVLVLRNGQSTTFECQITGTPKIRVSWYLDGNEITAIQKHGISFIDGLATFQISGARVENSGTYVCEARNDAGTASCSIELKVKEPPTFIRELKPVEVVKYSDVELECEVTGTPPFEVTWLKNNREIRSSKKYTLTDRVSVFNLHITKCDPSDTGEYQCIVSNEGGSCSCSTRVALKEPPSFIKKIENTTTVLKSSATFQSTVAGSPPISITWLKDDQILDEDDNVYISFVDSVATLQIRSVDNGHSGRYTCQAKNESGVERCYAFLLVQEPAQIVEKAKSVDVTEKDPMTLECVVAGTPELKVKWLKDGKQIVPSRYFSMSFENNVASFRIQSVMKQDSGQYTFKVENDFGSSSCDAYLRVLDQNIPPSFTKKLTKMDKVLGSSIHMECKVSGSLPISAQWFKDGKEISTSAKYRLVCHERSVSLEVNNLELEDTANYTCKVSNVAGDDACSGILTVKEPPSFLVKPGRQQAIPDSTVEFKAILKGTPPFKIKWFKDDVELVSGPKCFIGLEGSTSFLNLYSVDASKTGQYTCHVTNDVGSDSCTTMLLVTEPPKFVKKLEASKIVKAGDSSRLECKIAGSPEIRVVWFRNEHELPASDKYRMTFIDSVAVIQMNNLSTEDSGDFICEAQNPAGSTSCSTKVIVKEPPVFSSFPPIVETLKNAEVSLECELSGTPPFEVVWYKDKRQLRSSKKYKIASKNFHTSIHILNVDTSDIGEYHCKAQNEVGSDTCVCTVKLKEPPRFVSKLNSLTVVAGEPAELQASIEGAQPIFVQWLKEKEEVIRESENIRITFVENVATLQFAKAEPANAGKYICQIKNDGGMRENMATLMVLEPAVIVEKAGPMTVTVGETCTLECKVAGTPELSVEWYKDGKLLTSSQKHKFSFYNKISSLRILSVERQDAGTYTFQVQNNVGKSSCTAVVDVSDRAVPPSFTRRLKNTGGVLGASCILECKVAGSSPISVAWFHEKTKIVSGAKYQTTFSDNVCTLQLNSLDSSDMGNYTCVAANVAGSDECRAVLTVQEPPSFVKEPEPLEVLPGKNVTFTSVIRGTPPFKVNWFRGARELVKGDRCNIYFEDTVAELELFNIDISQSGEYTCVVSNNAGQASCTTRLFVKEPAAFLKRLSDHSVEPGKSIILESTYTGTLPISVTWKKDGFNITTSEKCNIVTTEKTCILEILNSTKRDAGQYSCEIENEAGRDVCGALVSTLEPPYFVTELEPLEAAVGDSVSLQCQVAGTPEITVSWYKGDTKLRPTPEYRTYFTNNVATLVFNKVNINDSGEYTCKAENSIGTASSKTVFRIQERQLPPSFARQLKDIEQTVGLPVTLTCRLNGSAPIQVCWYRDGVLLRDDENLQTSFVDNVATLKILQTDLSHSGQYSCSASNPLGTASSSARLTAREPKKSPFFDIKPVSIDVIAGESADFECHVTGAQPMRITWSKDNKEIRPGGNYTITCVGNTPHLRILKVGKGDSGQYTCQATNDVGKDMCSAQLSVKEPPKFVKKLEASKVAKQGESIQLECKISGSPEIKVSWFRNDSELHESWKYNMSFINSVALLTINEASAEDSGDYICEAHNGVGDASCSTALTVKAPPVFTQKPSPVGALKGSDVILQCEISGTPPFEVVWVKDRKQVRNSKKFKITSKHFDTSLHILNLEASDVGEYHCKATNEVGSDTCSCSVKFKEPPRFVKKLSDTSTLIGDAVELRAIVEGFQPISVVWLKDRGEVIRESENTRISFIDNIATLQLGSPEASNSGKYICQIKNDAGMRECSAVLTVLEPARIIEKPEPMTVTTGNPFALECVVTGTPELSAKWFKDGRELSADSKHHITFINKVASLKIPCAEMSDKGLYSFEVKNSVGKSNCTVSVHVSDRIVPPSFIRKLKDVNAILGASVVLECRVSGSAPISVGWFQDGNEIVSGPKCQSSFSENVCTLNLSLLEPSDTGIYTCVAANVAGSDECSAVLTVQEPPSFEQTPDSVEVLPGMSLTFTSVIRGTPPFKVKWFKGSRELVPGESCNISLEDFVTELELFEVQPLESGDYSCLVTNDAGSASCTTHLFVKEPATFVKRLADFSVETGSPIVLEATYTGTPPISVSWIKDEYLISQSERCSITMTEKSTILEILESTIEDYAQYSCLIENEAGQDICEALVSVLEPPYFIEPLEHVEAVIGEPATLQCKVDGTPEIRISWYKEHTKLRSAPAYKMQFKNNVASLVINKVDHSDVGEYSCKADNSVGAVASSAVLVIKARKLPPFFARKLKDVHETLGFPVAFECRINGSEPLQVSWYKDGVLLKDDANLQTSFVHNVATLQILQTDQSHIGQYNCSASNPLGTASSSAKLILSEHEVPPFFDLKPVSVDLALGESGTFKCHVTGTAPIKITWAKDNREIRPGGNYKMTLVENTATLTVLKVGKGDAGQYTCYASNIAGKDSCSAQLGVQEPPRFIKKLEPSRIVKQDEFTRYECKIGGSPEIKVLWYKDETEIQESSKFRMSFVDSVAVLEMHNLSVEDSGDYTCEAHNAAGSASSSTSLKVKEPPIFRKKPHPIETLKGADVHLECELQGTPPFHVSWYKDKRELRSGKKYKIMSENFLTSIHILNVDAADIGEYQCKATNDVGSDTCVGSIALKAPPRFVKKLSDISTVVGKEVQLQTTIEGAEPISVVWFKDKGEIVRESDNIWISYSENIATLQFSRVEPANAGKYTCQIKNDAGMQECFATLSVLEPATIVEKPESIKVTTGDTCTLECTVAGTPELSTKWFKDGKELTSDNKYKISFFNKVSGLKIINVAPSDSGVYSFEVQNPVGKDSCTASLQVSDRTVPPSFTRKLKETNGLSGSSVVMECKVYGSPPISVSWFHEGNEISSGRKYQTTLTDNTCALTVNMLEESDSGDYTCIATNMAGSDECSAPLTVREPPSFVQKPDPMDVLTGTNVTFTSIVKGTPPFSVSWFKGSSELVPGDRCNVSLEDSVAELELFDVDTSQSGEYTCIVSNEAGKASCTTHLYIKAPAKFVKRLNDYSIEKGKPLILEGTFTGTPPISVTWKKNGINVTPSQRCNITTTEKSAILEIPSSTVEDAGQYNCYIENASGKDSCSAQILILEPPYFVKQLEPVKVSVGDSASLQCQLAGTPEIGVSWYKGDTKLRPTTTYKMHFRNNVATLVFNQVDINDSGEYICKAENSVGEVSASTFLTVQEQKLPPSFSRQLRDVQETVGLPVVFDCAISGSEPISVSWYKDGKPLKDSPNVQTSFLDNTATLNIFKTDRSLAGQYSCTATNPIGSASSSARLILTEGKNPPFFDIRLAPVDAVVGESADFECHVTGTQPIKVSWAKDSREIRSGGKYQISYLENSAHLTVLKVDKGDSGQYTCYAVNEVGKDSCTAQLNIKERLIPPSFTKRLSETVEETEGNSFKLEGRVAGSQPITVAWYKNNIEIQPTSNCEITFKNNTLVLQVRKAGMNDAGLYTCKVSNDAGSALCTSSIVIKEPKKPPVFDQHLTPVTVSEGEYVQLSCHVQGSEPIRIQWLKAGREIKPSDRCSFSFASGTAVLELRDVAKADSGDYVCKASNVAGSDTTKSKVTIKDKPAVAPATKKAAVDGRLFFVSEPQSIRVVEKTTATFIAKVGGDPIPNVKWTKGKWRQLNQGGRVFIHQKGDEAKLEIRDTTKTDSGLYRCVAFNEHGEIESNVNLQVDERKKQEKIEGDLRAMLKKTPILKKGAGEEEEIDIMELLKNVDPKEYEKYARMYGITDFRGLLQAFELLKQSQEEETHRLEIEEIERSERDEKEFEELVSFIQQRLSQTEPVTLIKDIENQTVLKDNDAVFEIDIKINYPEIKLSWYKGTEKLEPSDKFEISIDGDRHTLRVKNCQLKDQGNYRLVCGPHIASAKLTVIEPAWERHLQDVTLKEGQTCTMTCQFSVPNVKSEWFRNGRILKPQGRHKTEVEHKVHKLTIADVRAEDQGQYTCKYEDLETSAELRIEAEPIQFTKRIQNIVVSEHQSATFECEVSFDDAIVTWYKGPTELTESQKYNFRNDGRCHYMTIHNVTPDDEGVYSVIARLEPRGEARSTAELYLTTKEIKLELKPPDIPDSRVPIPTMPIRAVPPEEIPPVVAPPIPLLLPTPEEKKPPPKRIEVTKKAVKKDAKKVVAKPKEMTPREEIVKKPPPPTTLIPAKAPEIIDVSSKAEEVKIMTITRKKEVQKEKEAVYEKKQAVHKEKRVFIESFEEPYDELEVEPYTEPFEQPYYEEPDEDYEEIKVEAKKEVHEEWEEDFEEGQEYYEREEGYDEGEEEWEEAYQEREVIQVQKEVYEESHERKVPAKVPEKKAPPPPKVIKKPVIEKIEKTSRRMEEEKVQVTKVPEVSKKIVPQKPSRTPVQEEVIEVKVPAVHTKKMVISEEKMFFASHTEEEVSVTVPEVQKEIVTEEKIHVAISKRVEPPPKVPELPEKPAPEEVAPVPIPKKVEPPAPKVPEVPKKPVPEEKKPVPVPKKEPAAPPKVPEVPKKPVPEEKIPVPVAKKKEAPPAKVPEVQKGVVTEEKITIVTQREESPPPAVPEIPKKKVPEERKPVPRKEEEVPPPPKVPALPKKPVPEEKVAVPVPVAKKAPPPRAEVSKKTVVEEKRFVAEEKLSFAVPQRVEVTRHEVSAEEEWSYSEEEEGVSISVYREEEREEEEEAEVTEYEVMEEPEEYVVEEKLHIISKRVEAEPAEVTERQEKKIVLKPKIPAKIEEPPPAKVPEAPKKIVPEKKVPAPVPKKEKVPPPKVPEEPKKPVPEKKVPPKVIKMEEPLPAKVTERHMQITQEEKVLVAVTKKEAPPKARVPEEPKRAVPEEKVLKLKPKREEEPPAKVTEFRKRVVKEEKVSIEAPKREPQPIKEVTIMEEKERAYTLEEEAVSVQREEEYEEYEEYDYKEFEEYEPTEEYDQYEEYEEREYERYEEHEEYITEPEKPIPVKPVPEEPVPTKPKAPPAKVLKKAVPEEKVPVPIPKKLKPPPPKVPEEPKKVFEEKIRISITKREKEQVTEPAAKVPMKPKRVVAEEKVPVPRKEVAPPVRVPEVPKELEPEEVAFEEEVVTHVEEYLVEEEEEYIHEEEEFITEEEVVPVIPVKVPEVPRKPVPEEKKPVPVPKKKEAPPAKVPEVPKKPEEKVPVLIPKKEKPPPAKVPEVPKKPVPEEKVPVPVPKKVEAPPAKVPEVPKKPVPEKKVPVPAPKKVEAPPAKVPEVPKKLIPEEKKPTPVPKKVEAPPPKVPKKREPVPVPVALPQEEEVLFEEEIVPEEEVLPEEEEVLPEEEEVLPEEEEVLPEEEEIPPEEEEVPPEEEYVPEEEEFVPEEEVLPEVKPKVPVPAPVPEIKKKVTEKKVVIPKKEEAPPAKVPEVPKKVEEKRIILPKEEEVLPVEVTEEPEEEPISEEEIPEEPPSIEEVEEVAPPRVPEVIKKAVPEAPTPVPKKVEAPPAKVSKKIPEEKVPVPVQKKEAPPAKVPEVPKKVPEKKVLVPKKEAVPPAKGRTVLEEKVSVAFRQEVVVKERLELEVVEAEVEEIPEEEEFHEVEEYFEEGEFHEVEEFIKLEQHRVEEEHRVEKVHRVIEVFEAEEVEVFEKPKAPPKGPEISEKIIPPKKPPTKVVPRKEPPAKVPEVPKKIVVEEKVRVPEEPRVPPTKVPEVLPPKEVVPEKKVPVPPAKKPEAPPPKVPEAPKEVVPEKKVPVPPPKKPEVPPTKVPEVPKAAVPEKKVPEAIPPKPESPPPEVPEAPKEVVPEKKVPAAPPKKPEVTPVKVPEAPKEVVPEKKVPVPPPKKPEVPPTKVPEVPKVAVPEKKVPEAIPPKPESPPPEVFEEPEEVALEEPPAEVVEEPEPAAPPQVTVPPKKPVPEKKAPAVVAKKPELPPVKVPEVPKEVVPEKKVPLVVPKKPEAPPAKVPEVPKEVVPEKKVAVPKKPEVPPAKVPEVPKKPVLEEKPAVPVPERAESPPPEVYEEPEEIAPEEEIAPEEEKPVPVAEEEEPEVPPPAVPEEPKKIIPEKKVPVIKKPEAPPPKEPEPEKVIEKPKLKPRPPPPPPAPPKEDVKEKIFQLKAIPKKKVPEKPQVPEKVELTPLKVPGGEKKVRKLLPERKPEPKEEVVLKSVLRKRPEEEEPKVEPKKLEKVKKPAVPEPPPPKPVEEVEVPTVTKRERKIPEPTKVPEIKPAIPLPAPEPKPKPEAEVKTIKPPPVEPEPTPIAAPVTVPVVGKKAEAKAPKEEAAKPKGPIKGVPKKTPSPIEAERRKLRPGSGGEKPPDEAPFTYQLKAVPLKFVKEIKDIILTESEFVGSSAIFECLVSPSTAITTWMKDGSNIRESPKHRFIADGKDRKLHIIDVQLSDAGEYTCVLRLGNKEKTSTAKLVVEELPVRFVKTLEEEVTVVKGQPLYLSCELNKERDVVWRKDGKIVVEKPGRIVPGVIGLMRALTINDADDTDAGTYTVTVENANNLECSSCVKVVEVIRDWLVKPIRDQHVKPKGTAIFACDIAKDTPNIKWFKGYDEIPAEPNDKTEILRDGNHLYLKIKNAMPEDIAEYAVEIEGKRYPAKLTLGEREVELLKPIEDVTIYEKESASFDAEISEADIPGQWKLKGELLRPSPTCEIKAEGGKRFLTLHKVKLDQAGEVLYQALNAITTAILTVKEIELDFAVPLKDVTVPERRQARFECVLTREANVIWSKGPDIIKSSDKFDIIADGKKHILVINDSQFDDEGVYTAEVEGKKTSARLFVTGIRLKFMSPLEDQTVKEGETATFVCELSHEKMHVVWFKNDAKLHTSRTVLISSEGKTHKLEMKEVTLDDISQIKAQVKELSSTAQLKVLEADPYFTVKLHDKTAVEKDEITLKCEVSKDVPVKWFKDGEEIVPSPKYSIKADGLRRILKIKKADLKDKGEYVCDCGTDKTKANVTVEARLIKVEKPLYGVEVFVGETAHFEIELSEPDVHGQWKLKGQPLTASPDCEIIEDGKKHILILHNCQLGMTGEVSFQAANAKSAANLKVKELPLIFITPLSDVKVFEKDEAKFECEVSREPKTFRWLKGTQEITGDDRFELIKDGTKHSMVIKSAAFEDEAKYMFEAEDKHTSGKLIIEGIRLKFLTPLKDVTAKEKESAVFTVELSHDNIRVKWFKNDQRLHTTRSVSMQDEGKTHSITFKDLSIDDTSQIRVEAMGMSSEAKLTVLEGDPYFTGKLQDYTGVEKDEVILQCEISKADAPVKWFKDGKEIKPSKNAVIKADGKKRMLILKKALKSDIGQYTCDCGTDKTSGKLDIEDREIKLVRPLHSVEVMETETARFETEISEDDIHANWKLKGEALLQTPDCEIKEEGKIHSLVLHNCRLDQTGGVDFQAANVKSSAHLRVKPRVIGLLRPLKDVTVTAGETATFDCELSYEDIPVEWYLKGKKLEPSDKVVPRSEGKVHTLTLRDVKLEDAGEVQLTAKDFKTHANLFVKEPPVEFTKPLEDQTVEEGATAVLECEVSRENAKVKWFKNGTEILKSKKYEIVADGRVRKLVIHDCTPEDIKTYTCDAKDFKTSCNLNVVPPHVEFLRPLTDLQVREKEMARFECELSRENAKVKWFKDGAEIKKGKKYDIISKGAVRILVINKCLLDDEAEYSCEVRTARTSGMLTVLEEEAVFTKNLANIEVSETDTIKLVCEVSKPGAEVIWYKGDEEIIETGRYEILTEGRKRILVIQNAHLEDAGNYNCRLPSSRTDGKVKVHELAAEFISKPQNLEILEGEKAEFVCSISKESFPVQWKRDDKTLESGDKYDVIADGKKRVLVVKDATLQDMGTYVVMVGAARAAAHLTVIEKLRIVVPLKDTRVKEQQEVVFNCEVNTEGAKAKWFRNEEAIFDSSKYIILQKDLVYTLRIRDAHLDDQANYNVSLTNHRGENVKSAANLIVEEEDLRIVEPLKDIETMEKKSVTFWCKVNRLNVTLKWTKNGEEVPFDNRVSYRVDKYKHMLTIKDCGFPDEGEYIVTAGQDKSVAELLIIEAPTEFVEHLEDQTVTEFDDAVFSCQLSREKANVKWYRNGREIKEGKKYKFEKDGSIHRLIIKDCRLDDECEYACGVEDRKSRARLFVEEIPVEIIRPPQDILEAPGADVVFLAELNKDKVEVQWLRNNMVVVQGDKHQMMSEGKIHRLQICDIKPRDQGEYRFIAKDKEARAKLELAAAPKIKTADQDLVVDVGKPLTMVVPYDAYPKAEAEWFKENEPLSTKTIDTTAEQTSFRILEAKKGDKGRYKIVLQNKHGKAEGFINLKVIDVPGPVRNLEVTETFDGEVSLAWEEPLTDGGSKIIGYVVERRDIKRKTWVLATDRAESCEFTVTGLQKGGVEYLFRVSARNRVGTGEPVETDNPVEARSKYDVPGPPLNVTITDVNRFGVSLTWEPPEYDGGAEITNYVIELRDKTSIRWDTAMTVRAEDLSATVTDVVEGQEYSFRVRAQNRIGVGKPSAATPFVKVADPIERPSPPVNLTSSDQTQSSVQLKWEPPLKDGGSPILGYIIERCEEGKDNWIRCNMKLVPELTYKVTGLEKGNKYLYRVSAENKAGVSDPSEILGPLTADDAFVEPTMDLSAFKDGLEVIVPNPITILVPSTGYPRPTATWCFGDKVLETGDRVKMKTLSAYAELVISPSERSDKGIYTLKLENRVKTISGEIDVNVIARPSAPKELKFGDITKDSVHLTWEPPDDDGGSPLTGYVVEKREVSRKTWTKVMDFVTDLEFTVPDLVQGKEYLFKVCARNKCGPGEPAYVDEPVNMSTPATVPDPPENVKWRDRTANSIFLTWDPPKNDGGSRIKGYIVERCPRGSDKWVACGEPVAETKMEVTGLEEGKWYAYRVKALNRQGASKPSRPTEEIQAVDTQEAPEIFLDVKLLAGLTVKAGTKIELPATVTGKPEPKITWTKADMILKQDKRITIENVPKKSTVTIVDSKRSDTGTYIIEAVNVCGRATAVVEVNVLDKPGPPAAFDITDVTNESCLLTWNPPRDDGGSKITNYVVERRATDSEVWHKLSSTVKDTNFKATKLIPNKEYIFRVAAENMYGVGEPVQASPITAKYQFDPPGPPTRLEPSDITKDAVTLTWCEPDDDGGSPITGYWVERLDPDTDKWVRCNKMPVKDTTYRVKGLTNKKKYRFRVLAENLAGPGKPSKSTEPILIKDPIDPPWPPGKPTVKDVGKTSVRLNWTKPEHDGGAKIESYVIEMLKTGTDEWVRVAEGVPTTQHLLPGLMEGQEYSFRVRAVNKAGESEPSEPSDPVLCREKLYPPSPPRWLEVINITKNTADLKWTVPEKDGGSPITNYIVEKRDVRRKGWQTVDTTVKDTKCTVTPLTEGSLYVFRVAAENAIGQSDYTEIEDSVLAKDTFTTPGPPYALAVVDVTKRHVDLKWEPPKNDGGRPIQRYVIEKKERLGTRWVKAGKTAGPDCNFRVTDVIEGTEVQFQVRAENEAGVGHPSEPTEILSIEDPTSPPSPPLDLHVTDAGRKHIAIAWKPPEKNGGSPIIGYHVEMCPVGTEKWMRVNSRPIKDLKFKVEEGVVPDKEYVLRVRAVNAIGVSEPSEISENVVAKDPDCKPTIDLETHDIIVIEGEKLSIPVPFRAVPVPTVSWHKDGKEVKASDRLTMKNDHISAHLEVPKSVRADAGIYTITLENKLGSATASINVKVIGLPGPCKDIKASDITKSSCKLTWEPPEFDGGTPILHYVLERREAGRRTYIPVMSGENKLSWTVKDLIPNGEYFFRVKAVNKVGGGEYIELKNPVIAQDPKQPPDPPVDVEVHNPTAEAMTITWKPPLYDGGSKIMGYIIEKIAKGEERWKRCNEHLVPILTYTAKGLEEGKEYQFRVRAENAAGISEPSRATPPTKAVDPIDAPKVILRTSLEVKRGDEIALDASISGSPYPTITWIKDENVIVPEEIKKRAAPLVRRRKGEVQEEEPFVLPLTQRLSIDNSKKGESQLRVRDSLRPDHGLYMIKVENDHGIAKAPCTVSVLDTPGPPINFVFEDIRKTSVLCKWEPPLDDGGSEIINYTLEKKDKTKPDSEWIVVTSTLRHCKYSVTKLIEGKEYLFRVRAENRFGPGPPCVSKPLVAKDPFGPPDAPDKPIVEDVTSNSMLVKWNEPKDNGSPILGYWLEKREVNSTHWSRVNKSLLNALKANVDGLLEGLTYVFRVCAENAAGPGKFSPPSDPKTAHDPISPPGPPIPRVTDTSSTTIELEWEPPAFNGGGEIVGYFVDKQLVGTNEWSRCTEKMIKVRQYTVKEIREGADYKLRVSAVNAAGEGPPGETQPVTVAEPQEPPAVELDVSVKGGIQIMAGKTLRIPAVVTGRPVPTKVWTKEEGELDKDRVVIDNVGTKSELIIKDALRKDHGRYVITATNSCGSKFAAARVEVFDVPGPVLDLKPVVTNRKMCLLNWSDPEDDGGSEITGFIIERKDAKMHTWRQPIETERSKCDITGLLEGQEYKFRVIAKNKFGCGPPVEIGPILAVDPLGPPTSPERLTYTERTKSTITLDWKEPRSNGGSPIQGYIIEKRRHDKPDFERVNKRLCPTTSFLVENLDEHQMYEFRVKAVNEIGESEPSLPLNVVIQDDEVPPTIKLRLSVRGDTIKVKAGEPVHIPADVTGLPMPKIEWSKNETVIEKPTDALQITKEEVSRSEAKTELSIPKAVREDKGTYTVTASNRLGSVFRNVHVEVYDRPSPPRNLAVTDIKAESCYLTWDAPLDNGGSEITHYVIDKRDASRKKAEWEEVTNTAVEKRYGIWKLIPNGQYEFRVRAVNKYGISDECKSDKVVIQDPYRLPGPPGKPKVLARTKGSMLVSWTPPLDNGGSPITGYWLEKREEGSPYWSRVSRAPITKVGLKGVEFNVPRLLEGVKYQFRAMAINAAGIGPPSEPSDPEVAGDPIFPPGPPSCPEVKDKTKSSISLGWKPPAKDGGSPIKGYIVEMQEEGTTDWKRVNEPDKLITTCECVVPNLKELRKYRFRVKAVNEAGESEPSDTTGEIPATDIQEEPEVFIDIGAQDCLVCKAGSQIRIPAVIKGRPTPKSSWEFDGKAKKAMKDGVHDIPEDAQLETAENSSVIIIPECKRSHTGKYSITAKNKAGQKTANCRVKVMDVPGPPKDLKVSDITRGSCRLSWKMPDDDGGDRIKGYVIEKRTIDGKAWTKVNPDCGSTTFVVPDLLSEQQYFFRVRAENRFGIGPPVETIQRTTARDPIYPPDPPIKLKIGLITKNTVHLSWKPPKNDGGSPVTHYIVECLAWDPTGTKKEAWRQCNKRDVEELQFTVEDLVEGGEYEFRVKAVNAAGVSKPSATVGPVTVKDQTCPPSIDLKEFMEVEEGTNVNIVAKIKGVPFPTLTWFKAPPKKPDNKEPVLYDTHVNKLVVDDTCTLVIPQSRRSDTGLYTITAVNNLGTASKEMRLNVLGRPGPPVGPIKFESVSADQMTLSWFPPKDDGGSKITNYVIEKREANRKTWVHVSSEPKECTYTIPKLLEGHEYVFRIMAQNKYGIGEPLDSEPETARNLFSVPGAPDKPTVSSVTRNSMTVNWEEPEYDGGSPVTGYWLEMKDTTSKRWKRVNRDPIKAMTLGVSYKVTGLIEGSDYQFRVYAINAAGVGPASLPSDPATARDPIAPPGPPFPKVTDWTKSSADLEWSPPLKDGGSKVTGYIVEYKEEGKEEWEKGKDKEVRGTKLVVTGLKEGAFYKFRVRAVNIAGIGEPGEVTDVIEMKDRLVSPDLQLDASVRDRIVVHAGGVIRIIAYVSGKPPPTVTWNMNERTLPQEATIETTAISSSMVIKNCQRSHQGVYSLLAKNEAGERKKTIIVDVLDVPGPVGTPFLAHNLTNESCKLTWFSPEDDGGSPITNYVIEKRESDRRAWTPVTYTVTRQNATVQGLIQGKAYFFRIAAENSIGMGPFVETSEALVIREPITVPERPEDLEVKEVTKNTVTLTWNPPKYDGGSEIINYVLESRLIGTEKFHKVTNDNLLSRKYTVKGLKEGDTYEYRVSAVNIVGQGKPSFCTKPITCKDELAPPTLHLDFRDKLTIRVGEAFALTGRYSGKPKPKVSWFKDEADVLEDDRTHIKTTPATLALEKIKAKRSDSGKYCVVVENSTGSRKGFCQVNVVDRPGPPVGPVSFDEVTKDYMVISWKPPLDDGGSKITNYIIEKKEVGKDVWMPVTSASAKTTCKVSKLLEGKDYIFRIHAENLYGISDPLVSDSMKAKDRFRVPDAPDQPIVTEVTKDSALVTWNKPHDGGKPITNYILEKRETMSKRWARVTKDPIHPYTKFRVPDLLEGCQYEFRVSAENEIGIGDPSPPSKPVFAKDPIAKPSPPVNPEAIDTTCNSVDLTWQPPRHDGGSKILGYIVEYQKVGDEEWRRANHTPESCPETKYKVTGLRDGQTYKFRVLAVNAAGESDPAHVPEPVLVKDRLEPPELILDANMAREQHIKVGDTLRLSAIIKGVPFPKVTWKKEDRDAPTKARIDVTPVGSKLEIRNAAHEDGGIYSLTVENPAGSKTVSVKVLVLDKPGPPRDLEVSEIRKDSCYLTWKEPLDDGGSVITNYVVERRDVASAQWSPLSATSKKKSHFAKHLNEGNQYLFRVAAENQYGRGPFVETPKPIKALDPLHPPGPPKDLHHVDVDKTEVSLVWNKPDRDGGSPITGYLVEYQEEGTQDWIKFKTVTNLECVVTGLQQGKTYRFRVKAENIVGLGLPDTTIPIECQEKLVPPSVELDVKLIEGLVVKAGTTVRFPAIIRGVPVPTAKWTTDGSEIKTDEHYTVETDNFSSVLTIKNCLRRDTGEYQITVSNAAGSKTVAVHLTVLDVPGPPTGPINILDVTPEHMTISWQPPKDDGGSPVINYIVEKQDTRKDTWGVVSSGSSKTKLKIPHLQKGCEYVFRVRAENKIGVGPPLDSTPTVAKHKFSPPSPPGKPVVTDITENAATVSWTLPKSDGGSPITGYYMERREVTGKWVRVNKTPIADLKFRVTGLYEGNTYEFRVFAENLAGLSKPSPSSDPIKACRPIKPPGPPINPKLKDKSRETADLVWTKPLSDGGSPILGYVVECQKPGTAQWNRINKDELIRQCAFRVPGLIEGNEYRFRIKAANIVGEGEPRELAESVIAKDILHPPEVELDVTCRDVITVRVGQTIRILARVKGRPEPDITWTKEGKVLVREKRVDLIQDLPRVELQIKEAVRADHGKYIISAKNSSGHAQGSAIVNVLDRPGPCQNLKVTNVTKENCTISWENPLDNGGSEITNFIVEYRKPNQKGWSIVASDVTKRLIKANLLANNEYYFRVCAENKVGVGPTIETKTPILAINPIDRPGEPENLHIADKGKTFVYLKWRRPDYDGGSPNLSYHVERRLKGSDDWERVHKGSIKETHYMVDRCVENQIYEFRVQTKNEGGESDWVKTEEVVVKEDLQKPVLDLKLSGVLTVKAGDTIRLEAGVRGKPFPEVAWTKDKDATDLTRSPRVKIDTRADSSKFSLTKAKRSDGGKYVVTATNTAGSFVAYATVNVLDKPGPVRNLKIVDVSSDRCTVCWDPPEDDGGCEIQNYILEKCETKRMVWSTYSATVLTPGTTVTRLIEGNEYIFRVRAENKIGTGPPTESKPVIAKTKYDKPGRPDPPEVTKVSKEEMTVVWNPPEYDGGKSITGYFLEKKEKHSTRWVPVNKSAIPERRMKVQNLLPDHEYQFRVKAENEIGIGEPSLPSRPVVAKDPIEPPGPPTNFRVVDTTKHSITLGWGKPVYDGGAPIIGYVVEMRPKIADASPDEGWKRCNAAAQLVRKEFTVTSLDENQEYEFRVCAQNQVGIGRPAELKEAIKPKEILEPPEIDLDASMRKLVIVRAGCPIRLFAIVRGRPAPKVTWRKVGIDNVVRKGQVDLVDTMAFLVIPNSTRDDSGKYSLTLVNPAGEKAVFVNVRVLDTPGPVSDLKVSDVTKTSCHVSWAPPENDGGSQVTHYIVEKREADRKTWSTVTPEVKKTSFHVTNLVPGNEYYFRVTAVNEYGPGVPTDVPKPVLASDPLSEPDPPRKLEVTEMTKNSATLAWLPPLRDGGAKIDGYITSYREEEQPADRWTEYSVVKDLSLVVTGLKEGKKYKFRVAARNAVGVSLPREAEGVYEAKEQLLPPKILMPEQITIKAGKKLRIEAHVYGKPHPTCKWKKGEDEVVTSSHLAVHKADSSSILIIKDVTRKDSGYYSLTAENSSGTDTQKIKVVVMDAPGPPQPPFDISDIDADACSLSWHIPLEDGGSNITNYIVEKCDVSRGDWVTALASVTKTSCRVGKLIPGQEYIFRVRAENRFGISEPLTSPKMVAQFPFGVPSEPKNARVTKVNKDCIFVAWDRPDSDGGSPIIGYLIERKERNSLLWVKANDTLVRSTEYPCAGLVEGLEYSFRIYALNKAGSSPPSKPTEYVTARMPVDPPGKPEVIDVTKSTVSLIWARPKHDGGSKIIGYFVEACKLPGDKWVRCNTAPHQIPQEEYTATGLEEKAQYQFRAIARTAVNISPPSEPSDPVTILAENVPPRIDLSVAMKSLLTVKAGTNVCLDATVFGKPMPTVSWKKDGTLLKPAEGIKMAMQRNLCTLELFSVNRKDSGDYTITAENSSGSKSATIKLKVLDKPGPPASVKINKMYSDRAMLSWEPPLEDGGSEITNYIVDKRETSRPNWAQVSATVPITSCSVEKLIEGHEYQFRICAENKYGVGDPVFTEPAIAKNPYDPPGRCDPPVISNITKDHMTVSWKPPADDGGSPITGYLLEKRETQAVNWTKVNRKPIIERTLKATGLQEGTEYEFRVTAINKAGPGKPSDASKAAYARDPQYPPGPPAFPKVYDTTRSSVSLSWGKPAYDGGSPIIGYLVEVKRADSDNWVRCNLPQNLQKTRFEVTGLMEDTQYQFRVYAVNKIGYSDPSDVPDKHYPKDILIPPEGELDADLRKTLILRAGVTMRLYVPVKGRPPPKITWSKPNVNLRDRIGLDIKSTDFDTFLRCENVNKYDAGKYILTLENSCGKKEYTIVVKVLDTPGPPVNVTVKEISKDSAYVTWEPPIIDGGSPIINYVVQKRDAERKSWSTVTTECSKTSFRVANLEEGKSYFFRVFAENEYGIGDPGETRDAVKASQTPGPVVDLKVRSVSKSSCSIGWKKPHSDGGSRIIGYVVDFLTEENKWQRVMKSLSLQYSAKDLTEGKEYTFRVSAENENGEGTPSEITVVARDDVVAPDLDLKGLPDLCYLAKENSNFRLKIPIKGKPAPSVSWKKGEDPLATDTRVSVESSAVNTTLIVYDCQKSDAGKYTITLKNVAGTKEGTISIKVVGKPGIPTGPIKFDEVTAEAMTLKWAPPKDDGGSEITNYILEKRDSVNNKWVTCASAVQKTTFRVTRLHEGMEYTFRVSAENKYGVGEGLKSEPIVARHPFDVPDAPPPPNIVDVRHDSVSLTWTDPKKTGGSPITGYHLEFKERNSLLWKRANKTPIRMRDFKVTGLTEGLEYEFRVMAINLAGVGKPSLPSEPVVALDPIDPPGKPEVINITRNSVTLIWTEPKYDGGHKLTGYIVEKRDLPSKSWMKANHVNVPECAFTVTDLVEGGKYEFRIRAKNTAGAISAPSESTETIICKDEYEAPTIVLDPTIKDGLTIKAGDTIVLNAISILGKPLPKSSWSKAGKDIRPSDITQITSTPTSSMLTIKYATRKDAGEYTITATNPFGTKVEHVKVTVLDVPGPPGPVEISNVSAEKATLTWTPPLEDGGSPIKSYILEKRETSRLLWTVVSEDIQSCRHVATKLIQGNEYIFRVSAVNHYGKGEPVQSEPVKMVDRFGPPGPPEKPEVSNVTKNTATVSWKRPVDDGGSEITGYHVERREKKSLRWVRAIKTPVSDLRCKVTGLQEGSTYEFRVSAENRAGIGPPSEASDSVLMKDAAYPPGPPSNPHVTDTTKKSASLAWGKPHYDGGLEITGYVVEHQKVGDEAWIKDTTGTALRITQFVVPDLQTKEKYNFRISAINDAGVGEPAVIPDVEIVEREMAPDFELDAELRRTLVVRAGLSIRIFVPIKGRPAPEVTWTKDNINLKNRANIENTESFTLLIIPECNRYDTGKFVMTIENPAGKKSGFVNVRVLDTPGPVLNLRPTDITKDSVTLHWDLPLIDGGSRITNYIVEKREATRKSYSTATTKCHKCTYKVTGLSEGCEYFFRVMAENEYGIGEPTETTEPVKASEAPSPPDSLNIMDITKSTVSLAWPKPKHDGGSKITGYVIEAQRKGSDQWTHITTVKGLECVVRNLTEGEEYTFQVMAVNSAGRSAPRESRPVIVKEQTMLPELDLRGIYQKLVIAKAGDNIKVEIPVLGRPKPTVTWKKGDQILKQTQRVNFETTATSTILNINECVRSDSGPYPLTARNIVGEVGDVITIQVHDIPGPPTGPIKFDEVSSDFVTFSWDPPENDGGVPISNYVVEMRQTDSTTWVELATTVIRTTYKATRLTTGLEYQFRVKAQNRYGVGPGITSACIVANYPFKVPGPPGTPQVTAVTKDSMTISWHEPLSDGGSPILGYHVERKERNGILWQTVSKALVPGNIFKSSGLTDGIAYEFRVIAENMAGKSKPSKPSEPMLALDPIDPPGKPVPLNITRHTVTLKWAKPEYTGGFKITSYIVEKRDLPNGRWLKANFSNILENEFTVSGLTEDAAYEFRVIAKNAAGAISPPSEPSDAITCRDDVEAPKIKVDVKFKDTVILKAGEAFRLEADVSGRPPPTMEWSKDGKELEGTAKLEIKIADFSTNLVNKDSTRRDSGAYTLTATNPGGFAKHIFNVKVLDRPGPPEGPLAVTEVTSEKCVLSWFPPLDDGGAKIDHYIVQKRETSRLAWTNVASEVQVTKLKVTKLLKGNEYIFRVMAVNKYGVGEPLESEPVLAVNPYGPPDPPKNPEVTTITKDSMVVCWGHPDSDGGSEIINYIVERRDKAGQRWIKCNKKTLTDLRYKVSGLTEGHEYEFRIMAENAAGISAPSPTSPFYKACDTVFKPGPPGNPRVLDTSRSSISIAWNKPIYDGGSEITGYMVEIALPEEDEWQIVTPPAGLKATSYTITGLTENQEYKIRIYAMNSEGLGEPALVPGTPKAEDRMLPPEIELDADLRKVVTIRACCTLRLFVPIKGRPAPEVKWARDHGESLDKASIESTSSYTLLIVGNVNRFDSGKYILTVENSSGSKSAFVNVRVLDTPGPPQDLKVKEVTKTSVTLTWDPPLLDGGSKIKNYIVEKRESTRKAYSTVATNCHKTSWKVDQLQEGCSYYFRVLAENEYGIGLPAETAESVKASERPLPPGKITLMDVTRNSVSLSWEKPEHDGGSRILGYIVEMQTKGSDKWATCATVKVTEATITGLIQGEEYSFRVSAQNEKGISDPRQLSVPVIAKDLVIPPAFKLLFNTFTVLAGEDLKVDVPFIGRPTPAVTWHKDNVPLKQTTRVNAESTENNSLLTIKDACREDVGHYVVKLTNSAGEAIETLNVIVLDKPGPPTGPVKMDEVTADSITLSWGPPKYDGGSSINNYIVEKRDTSTTTWQIVSATVARTTIKACRLKTGCEYQFRIAAENRYGKSTYLNSEPTVAQYPFKVPGPPGTPVVTLSSRDSMEVQWNEPISDGGSRVIGYHLERKERNSILWVKLNKTPIPQTKFKTTGLEEGVEYEFRVSAENIVGIGKPSKVSECYVARDPCDPPGRPEAIIVTRNSVTLQWKKPTYDGGSKITGYIVEKKELPEGRWMKASFTNIIDTHFEVTGLVEDHRYEFRVIARNAAGVFSEPSESTGAITARDEVDPPRISMDPKYKDTIVVHAGESFKVDADIYGKPIPTIQWIKGDQELSNTARLEIKSTDFATSLSVKDAVRVDSGNYILKAKNVAGERSVTVNVKVLDRPGPPEGPVVISGVTAEKCTLAWKPPLQDGGSDIINYIVERRETSRLVWTVVDANVQTLSCKVTKLLEGNEYTFRIMAVNKYGVGEPLESEPVVAKNPFVVPDAPKAPEVTTVTKDSMIVVWERPASDGGSEILGYVLEKRDKEGIRWTRCHKRLIGELRLRVTGLIENHDYEFRVSAENAAGLSEPSPPSAYQKACDPIYKPGPPNNPKVIDITRSSVFLSWSKPIYDGGCEIQGYIVEKCDVSVGEWTMCTPPTGINKTNIEVEKLLEKHEYNFRICAINKAGVGEHADVPGPIIVEEKLEAPDIDLDLELRKIINIRAGGSLRLFVPIKGRPTPEVKWGKVDGEIRDAAIIDVTSSFTSLVLDNVNRYDSGKYTLTLENSSGTKSAFVTVRVLDTPSPPVNLKVTEITKDSVSITWEPPLLDGGSKIKNYIVEKREATRKSYAAVVTNCHKNSWKIDQLQEGCSYYFRVTAENEYGIGLPAQTADPIKVAEVPQPPGKITVDDVTRNSVSLSWTKPEHDGGSKIIQYIVEMQAKHSEKWSECARVKSLQAVITNLTQGEEYLFRVVAVNEKGRSDPRSLAVPIVAKDLVIEPDVKPAFSSYSVQVGQDLKIEVPISGRPKPTITWTKDGLPLKQTTRINVTDSLDLTTLSIKETHKDDGGQYGITVANVVGQKTASIEIVTLDKPDPPKGPVKFDDVSAESITLSWNPPLYTGGCQITNYIVQKRDTTTTVWDVVSATVARTTLKVTKLKTGTEYQFRIFAENRYGQSFALESDPIVAQYPYKEPGPPGTPFATAISKDSMVIQWHEPVNNGGSPVIGYHLERKERNSILWTKVNKTIIHDTQFKAQNLEEGIEYEFRVYAENIVGVGKASKNSECYVARDPCDPPGTPEPIMVKRNEITLQWTKPVYDGGSMITGYIVEKRDLPDGRWMKASFTNVIETQFTVSGLTEDQRYEFRVIAKNAAGAISKPSDSTGPITAKDEVELPRISMDPKFRDTIVVNAGETFRLEADVHGKPLPTIEWLRGDKEIEESARCEIKNTDFKALLIVKDAIRIDGGQYILRASNVAGSKSFPVNVKVLDRPGPPEGPVQVTGVTSEKCSLTWSPPLQDGGSDISHYVVEKRETSRLAWTVVASEVVTNSLKVTKLLEGNEYVFRIMAVNKYGVGEPLESAPVLMKNPFVLPGPPKSLEVTNIAKDSMTVCWNRPDSDGGSEIIGYIVEKRDRSGIRWIKCNKRRITDLRLRVTGLTEDHEYEFRVSAENAAGVGEPSPATVYYKACDPVFKPGPPTNAHIVDTTKNSITLAWGKPIYDGGSEILGYVVEICKADEEEWQIVTPQTGLRVTRFEISKLTEHQEYKIRVCALNKVGLGEATSVPGTVKPEDKLEAPELDLDSELRKGIVVRAGGSARIHIPFKGRPTPEITWSREEGEFTDKVQIEKGVNYTQLSIDNCDRNDAGKYILKLENSSGSKSAFVTVKVLDTPGPPQNLAVKEVRKDSAFLVWEPPIIDGGAKVKNYVIDKRESTRKAYANVSSKCSKTSFKVENLTEGAIYYFRVMAENEFGVGVPVETVDAVKAAEPPSPPGKVTLTDVSQTSASLMWEKPEHDGGSRVLGYVVEMQPKGTEKWSIVAESKVCNAVVTGLSSGQEYQFRVKAYNEKGKSDPRVLGVPVIAKDLTIQPSLKLPFNTYSIQAGEDLKIEIPVIGRPRPNISWVKDGEPLKQTTRVNVEETATSTVLHIKEGNKDDFGKYTVTATNSAGTATENLSVIVLEKPGPPVGPVRFDEVSADFVVISWEPPAYTGGCQISNYIVEKRDTTTTTWHMVSATVARTTIKITKLKTGTEYQFRIFAENRYGKSAPLDSKAVIVQYPFKEPGPPGTPFVTSISKDQMLVQWHEPVNDGGTKIIGYHLEQKEKNSILWVKLNKTPIQDTKFKTTGLDEGLEYEFKVSAENIVGIGKPSKVSECFVARDPCDPPGRPEAIVITRNNVTLKWKKPAYDGGSKITGYIVEKKDLPDGRWMKASFTNVLETEFTVSGLVEDQRYEFRVIARNAAGNFSEPSDSSGAITARDEIDAPNASLDPKYKDVIVVHAGETFVLEADIRGKPIPDVVWSKDGKELEETAARMEIKSTIQKTTLVVKDCIRTDGGQYILKLSNVGGTKSIPITVKVLDRPGPPEGPLKVTGVTAEKCYLAWNPPLQDGGANISHYIIEKRETSRLSWTQVSTEVQALNYKVTKLLPGNEYIFRVMAVNKYGIGEPLESGPVTACNPYKPPGPPSTPEVSAITKDSMVVTWARPVDDGGTEIEGYILEKRDKEGVRWTKCNKKTLTDLRLRVTGLTEGHSYEFRVAAENAAGVGEPSEPSVFYRACDALYPPGPPSNPKVTDTSRSSVSLAWSKPIYDGGAPVKGYVVEVKEAAADEWTTCTPPTGLQGKQFTVTKLKENTEYNFRICAINSEGVGEPATLPGSVVAQERIEPPEIELDADLRKVVVLRASATLRLFVTIKGRPEPEVKWEKAEGILTDRAQIEVTSSFTMLVIDNVTRFDSGRYNLTLENNSGSKTAFVNVRVLDSPSAPVNLTIREVKKDSVTLSWEPPLIDGGAKITNYIVEKRETTRKAYATITNNCTKTTFRIENLQEGCSYYFRVLASNEYGIGLPAETTEPVKVSEPPLPPGRVTLVDVTRNTATIKWEKPESDGGSKITGYVVEMQTKGSEKWSTCTQVKTLEATISGLTAGEEYVFRVAAVNEKGRSDPRQLGVPVIARDIEIKPSVELPFHTFNVKAREQLKIDVPFKGRPQATVNWRKDGQTLKETTRVNVSSSKTVTSLSIKEASKEDVGTYELCVSNSAGSITVPITIIVLDRPGPPGPIRIDEVSCDSITISWNPPEYDGGCQISNYIVEKKETTSTTWHIVSQAVARTSIKIVRLTTGSEYQFRVCAENRYGKSSYSESSAVVAEYPFSPPGPPGTPKVVHATKSTMLVTWQVPVNDGGSRVIGYHLEYKERSSILWSKANKILIADTQMKVSGLDEGLMYEYRVYAENIAGIGKCSKSCEPVPARDPCDPPGQPEVTNITRKSVSLKWSKPHYDGGAKITGYIVERRELPDGRWLKCNYTNIQETYFEVTELTEDQRYEFRVFARNAADSVSEPSESTGPIIVKDDVEPPRVMMDVKFRDVIVVKAGEVLKINADIAGRPLPVISWAKDGIEIEERARTEIISTDNHTLLTVKDCIRRDTGQYVLTLKNVAGTRSVAVNCKVLDKPGPPAGPLEINGLTAEKCSLSWGRPQEDGGADIDYYIVEKRETSHLAWTICEGELQMTSCKVTKLLKGNEYIFRVTGVNKYGVGEPLESVAIKALDPFTVPSPPTSLEITSVTKESMTLCWSRPESDGGSEISGYIIERREKNSLRWVRVNKKPVYDLRVKSTGLREGCEYEYRVYAENAAGLSLPSETSPLIRAEDPVFLPSPPSKPKIVDSGKTTITIAWVKPLFDGGAPITGYTVEYKKSDDTDWKTSIQSLRGTEYTISGLTTGAEYVFRVKSVNKVGASDPSDSSDPQIAKEREEEPLFDIDSEMRKTLIVKAGASFTMTVPFRGRPVPNVLWSKPDTDLRTRAYVDTTDSRTSLTIENANRNDSGKYTLTIQNVLSAASLTLVVKVLDTPGPPTNITVQDVTKESAVLSWDVPENDGGAPVKNYHIEKREASKKAWVSVTNNCNRLSYKVTNLQEGAIYYFRVSGENEFGVGIPAETKEGVKITEKPSPPEKLGVTSISKDSVSLTWLKPEHDGGSRIVHYVVEALEKGQKNWVKCAVAKSTHHVVSGLRENSEYFFRVFAENQAGLSDPRELLLPVLIKEQLEPPEIDMKNFPSHTVYVRAGSNLKVDIPISGKPLPKVTLSRDGVPLKATMRFNTEITAENLTINLKESVTADAGRYEITAANSSGTTKAFINIVVLDRPGPPTGPVVISDITEESVTLKWEPPKYDGGSQVTNYILLKRETSTAVWTEVSATVARTMMKVMKLTTGEEYQFRIKAENRFGISDHIDSACVTVKLPYTTPGPPSTPWVTNVTRESITVGWHEPVSNGGSAVVGYHLEMKDRNSILWQKANKLVIRTTHFKVTTISAGLIYEFRVYAENAAGVGKPSHPSEPVLAIDACEPPRNVRITDISKNSVSLSWQQPAFDGGSKITGYIVERRDLPDGRWTKASFTNVTETQFIISGLTQNSQYEFRVFARNAVGSISNPSEVVGPITCIDSYGGPVIDLPLEYTEVVKYRAGTSVKLRAGISGKPAPTIEWYKDDKELQTNALVCVENTTDLASILIKDADRLNSGCYELKLRNAMGSASATIRVQILDKPGPPGGPIEFKTVTAEKITLLWRPPADDGGAKITHYIVEKRETSRVVWSMVSEHLEECIITTTKIIKGNEYIFRVRAVNKYGIGEPLESDSVVAKNAFVTPGPPGIPEVTKITKNSMTVVWSRPIADGGSDISGYFLEKRDKKSLGWFKVLKETIRDTRQKVTGLTENSDYQYRVCAVNAAGQGPFSEPSEFYKAADPIDPPGPPAKIRIADSTKSSITLGWSKPVYDGGSAVTGYVVEIRQGEEEEWTTVSTKGEVRTTEYVVSNLKPGVNYYFRVSAVNCAGQGEPIEMNEPVQAKDILEAPEIDLDVALRTSVIAKAGEDVQVLIPFKGRPPPTVTWRKDEKNLGSDARYSIENTDSSSLLTIPQVTRNDTGKYILTIENGVGEPKSSTVSVKVLDTPAACQKLQVKHVSRGTVTLLWDPPLIDGGSPIINYVIEKRDATKRTWSVVSHKCSSTSFKLIDLSEKTPFFFRVLAENEIGIGEPCETTEPVKAAEVPAPIRDLSMKDSTKTSVILSWTKPDFDGGSVITEYVVERKGKGEQTWSHAGISKTCEIEVSQLKEQSVLEFRVFAKNEKGLSDPVTIGPITVKELIITPEVDLSDIPGAQVTVRIGHNVHLELPYKGKPKPSISWLKDGLPLKESEFVRFSKTENKITLSIKNAKKEHGGKYTVILDNAVCRIAVPITVITLGPPSKPKGPIRFDEIKADSVILSWDVPEDNGGGEITCYSIEKRETSQTNWKMVCSSVARTTFKVPNLVKDAEYQFRVRAENRYGVSQPLVSSIIVAKHQFRIPGPPGKPVIYNVTSDGMSLTWDAPVYDGGSEVTGFHVEKKERNSILWQKVNTSPISGREYRATGLVEGLDYQFRVYAENSAGLSSPSDPSKFTLAVSPVDPPGTPDYIDVTRETITLKWNPPLRDGGSKIVGYSIEKRQGNERWVRCNFTDVSECQYTVTGLSPGDRYEFRIIARNAVGTISPPSQSSGIIMTRDENVPPIVEFGPEYFDGLIIKSGESLRIKALVQGRPVPRVTWFKDGVEIEKRMNMEITDVLGSTSLFVRDATRDHRGVYTVEAKNASGSAKAEIKVKVQDTPGKVVGPIRFTNITGEKMTLWWDAPLNDGCAPITHYIIEKRETSRLAWALIEDKCEAQSYTAIKLINGNEYQFRVSAVNKFGVGRPLDSDPVVAQIQYTVPDAPGIPEPSNITGNSITLTWARPESDGGSEIQQYILERREKKSTRWVKVISKRPISETRFKVTGLTEGNEYEFHVMAENAAGVGPASGISRLIKCREPVNPPGPPTVVKVTDTSKTTVSLEWSKPVFDGGMEIIGYIIEMCKADLGDWHKVNAEACVKTRYTVTDLQAGEEYKFRVSAINGAGKGDSCEVTGTIKAVDRLTAPELDIDANFKQTHVVRAGASIRLFIAYQGRPTPTAVWSKPDSNLSLRADIHTTDSFSTLTVENCNRNDAGKYTLTVENNSGSKSITFTVKVLDTPGPPGPITFKDVTRGSATLMWDAPLLDGGARIHHYVVEKREASRRSWQVISEKCTRQIFKVNDLAEGVPYYFRVSAVNEYGVGEPYEMPEPIVATEQPAPPRRLDVVDTSKSSAVLAWLKPDHDGGSRITGYLLEMRQKGSDFWVEAGHTKQLTFTVERLVEKTEYEFRVKAKNDAGYSEPREAFSSVIIKEPQIEPTADLTGITNQLITCKAGSPFTIDVPISGRPAPKVTWKLEEMRLKETDRVSITTTKDRTTLTVKDSMRGDSGRYFLTLENTAGVKTFSVTVVVIGRPGPVTGPIEVSSVSAESCVLSWGEPKDGGGTEITNYIVEKRESGTTAWQLVNSSVKRTQIKVTHLTKYMEYSFRVSSENRFGVSKPLESAPIIAEHPFVPPSAPTRPEVYHVSANAMSIRWEEPYHDGGSKIIGYWVEKKERNTILWVKENKVPCLECNYKVTGLVEGLEYQFRTYALNAAGVSKASEASRPIMAQNPVDAPGRPEVTDVTRSTVSLIWSAPAYDGGSKVVGYIIERKPVSEVGDGRWLKCNYTIVSDNFFTVTALSEGDTYEFRVLAKNAAGVISKGSESTGPVTCRDEYAPPKAELDARLHGDLVTIRAGSDLVLDAAVGGKPEPKIIWTKGDKELDLCEKVSLQYTGKRATAVIKFCDRSDSGKYTLTVKNASGTKAVSVMVKVLDSPGPCGKLTVSRVTQEKCTLAWSLPQEDGGAEITHYIVERRETSRLNWVIVEGECPTLSYVVTRLIKNNEYIFRVRAVNKYGPGVPVESEPIVARNSFTIPSPPGIPEEVGTGKEHIIIQWTKPESDGGNEISNYLVDKREKKSLRWTRVNKDYVVYDTRLKVTSLMEGCDYQFRVTAVNAAGNSEPSEASNFISCREPSYTPGPPSAPRVVDTTKHSISLAWTKPMYDGGTDIVGYVLEMQEKDTDQWYRVHTNATIRNTEFTVPDLKMGQKYSFRVAAVNVKGMSEYSESIAEIEPVERIEIPDLELADDLKKTVTIRAGASLRLMVSVSGRPPPVITWSKQGIDLASRAIIDTTESYSLLIVDKVNRYDAGKYTIEAENQSGKKSATVLVKVYDTPGPCPSVKVKEVSRDSVTITWEIPTIDGGAPVNNYIVEKREAAMRAFKTVTTKCSKTLYRISGLVEGTMYYFRVLPENIYGIGEPCETSDAVLVSEVPLVPAKLEVVDVTKSTVTLAWEKPLYDGGSRLTGYVLEACKAGTERWMKVVTLKPTVLEHTVTSLNEGEQYLFRIRAQNEKGVSEPRETVTAVTVQDLRVLPTIDLSTMPQKTIHVPAGRPVELVIPIAGRPPPAASWFFAGSKLRESERVTVETHTKVAKLTIRETTIRDTGEYTLELKNVTGTTSETIKVIILDKPGPPTGPIKIDEIDATSITISWEPPELDGGAPLSGYVVEQRDAHRPGWLPVSESVTRSTFKFTRLTEGNEYVFRVAATNRFGIGSYLQSEVIECRSSIRIPGPPETLQIFDVSRDGMTLTWYPPEDDGGSQVTGYIVERKEVRADRWVRVNKVPVTMTRYRSTGLTEGLEYEHRVTAINARGSGKPSRPSKPIVAMDPIAPPGKPQNPRVTDTTRTSVSLAWSVPEDEGGSKVTGYLIEMQKVDQHEWTKCNTTPTKIREYTLTHLPQGAEYRFRVLACNAGGPGEPAEVPGTVKVTEMLEYPDYELDERYQEGIFVRQGGVIRLTIPIKGKPFPICKWTKEGQDISKRAMIATSETHTELVIKEADRGDSGTYDLVLENKCGKKAVYIKVRVIGSPNSPEGPLEYDDIQVRSVRVSWRPPADDGGADILGYILERREVPKAAWYTIDSRVRGTSLVVKGLKENVEYHFRVSAENQFGISKPLKSEEPVTPKTPLNPPEPPSNPPEVLDVTKSSVSLSWSRPKDDGGSRVTGYYIERKETSTDKWVRHNKTQITTTMYTVTGLVPDAEYQFRIIAQNDVGLSETSPASEPVVCKDPFDKPSQPGELEILSISKDSVTLQWEKPECDGGKEILGYWVEYRQSGDSAWKKSNKERIKDKQFTIGGLLEATEYEFRVFAENETGLSRPRRTAMSIKTKLTSGEAPGIRKEMKDVTTKLGEAAQLSCQIVGRPLPDIKWYRFGKELIQSRKYKMSSDGRTHTLTVMTEEQEDEGVYTCIATNEVGEVETSSKLLLQATPQFHPGYPLKEKYYGAVGSTLRLHVMYIGRPVPAMTWFHGQKLLQNSENITIENTEHYTHLVMKNVQRKTHAGKYKVQLSNVFGTVDAILDVEIQDKPDKPTGPIVIEALLKNSAVISWKPPADDGGSWITNYVVEKCEAKEGAEWQLVSSAISVTTCRIVNLTENAGYYFRVSAQNTFGISDPLEVSSVVIIKSPFEKPGAPGKPTITAVTKDSCVVAWKPPASDGGAKIRNYYLEKREKKQNKWISVTTEEIRETVFSVKNLIEGLEYEFRVKCENLGGESEWSEISEPITPKSDVPIQAPHFKEELRNLNVRYQSNATLVCKVTGHPKPIVKWYRQGKEIIADGLKYRIQEFKGGYHQLIIASVTDDDATVYQVRATNQGGSVSGTASLEVEVPAKIHLPKTLEGMGAVHALRGEVVSIKIPFSGKPDPVITWQKGQDLIDNNGHYQVIVTRSFTSLVFPNGVERKDAGFYVVCAKNRFGIDQKTVELDVADVPDPPRGVKVSDVSRDSVNLTWTEPASDGGSKITNYIVEKCATTAERWLRVGQARETRYTVINLFGKTSYQFRVIAENKFGLSKPSEPSEPTITKEDKTRAMNYDEEVDETREVSMTKASHSSTKELYEKYMIAEDLGRGEFGIVHRCVETSSKKTYMAKFVKVKGTDQVLVKKEISILNIARHRNILHLHESFESMEELVMIFEFISGLDIFERINTSAFELNEREIVSYVHQVCEALQFLHSHNIGHFDIRPENIIYQTRRSSTIKIIEFGQARQLKPGDNFRLLFTAPEYYAPEVHQHDVVSTATDMWSLGTLVYVLLSGINPFLAETNQQIIENIMNAEYTFDEEAFKEISIEAMDFVDRLLVKERKSRMTASEALQHPWLKQKIERVSTKVIRTLKHRRYYHTLIKKDLNMVVSAARISCGGAIRSQKGVSVAKVKVASIEIGPVSGQIMHAVGEEGGHVKYVCKIENYDQSTQVTWYFGVRQLENSEKYEITYEDGVAILYVKDITKLDDGTYRCKVVNDYGEDSSYAELFVKGVREVYDYYCRRTMKKIKRRTDTMRLLERPPEFTLPLYNKTAYVGENVRFGVTITVHPEPHVTWYKSGQKIKPGDNDKKYTFESDKGLYQLTINSVTTDDDAEYTVVARNKYGEDSCKAKLTVTLHPPPTDSTLRPMFKRLLANAECQEGQSVCFEIRVSGIPPPTLKWEKDGQPLSLGPNIEIIHEGLDYYALHIRDTLPEDTGYYRVTATNTAGSTSCQAHLQVERLRYKKQEFKSKEEHERHVQKQIDKTLRMAEILSGTESVPLTQVAKEALREAAVLYKPAVSTKTVKGEFRLEIEEKKEERKLRMPYDVPEPRKYKQTTIEEDQRIKQFVPMSDMKWYKKIRDQYEMPGKLDRVVQKRPKRIRLSRWEQFYVMPLPRITDQYRPKWRIPKLSQDDLEIVRPARRRTPSPDYDFYYRPRRRSLGDISDEELLLPIDDYLAMKRTEEERLRLEEELELGFSASPPSRSPPHFELSSLRYSSPQAHVKVEETRKDFRYSTYHIPTKAEASTSYAELRERHAQAAYRQPKQRQRIMAEREDEELLRPVTTTQHLSEYKSELDFMSKEEKSRKKSRRQREVTEITEIEEEYEISKHAQRESSSSASRLLRRRRSLSPTYIELMRPVSELIRSRPQPAEEYEDDTERRSPTPERTRPRSPSPVSSERSLSRFERSARFDIFSRYESMKAALKTQKTSERKYEVLSQQPFTLDHAPRITLRMRSHRVPCGQNTRFILNVQSKPTAEVKWYHNGVELQESSKIHYTNTSGVLTLEILDCHTDDSGTYRAVCTNYKGEASDYATLDVTGGDYTTYASQRRDEEVPRSVFPELTRTEAYAVSSFKKTSEMEASSSVREVKSQMTETRESLSSYEHSASAEMKSAALEEKSLEEKSTTRKIKTTLAARILTKPRSMTVYEGESARFSCDTDGEPVPTVTWLRKGQVLSTSARHQVTTTKYKSTFEISSVQASDEGNYSVVVENSEGKQEAEFTLTIQKARVTEKAVTSPPRVKSPEPRVKSPEAVKSPKRVKSPEPSHPKAVSPTETKPTPTEKVQHLPVSAPPKITQFLKAEASKEIAKLTCVVESSVLRAKEVTWYKDGKKLKENGHFQFH

SEQ ID NO: 88977 - protein, 27051 aa, Homo sapiens
  Payload ID: 17810
  Gene Name: titin
  Uniprot ID: Q8WZ42
  ENSP ID: ENSP00000352154
MTTQAPTFTQPLQSVVVLEGSTATFEAHISGFPVPEVSWFRDGQVISTSTLPGVQISFSDGRAKLTIPAVTKANSGRYSLKATNGSGQATSTAELLVKAETAPPNFVQRLQSMTVRQGSQVRLQVRVTGIPTPVVKFYRDGAEIQSSLDFQISQEGDLYSLLIAEAYPEDSGTYSVNATNSVGRATSTAELLVQGEEEVPAKKTKTIVSTAQISESRQTRIEKKIEAHFDARSIATVEMVIDGAAGQQLPHKTPPRIPPKPKSRSPTPPSIAAKAQLARQQSPSPIRHSPSPVRHVRAPTPSPVRSVSPAARISTSPIRSVRSPLLMRKTQASTVATGPEVPPPWKQEGYVASSSEAEMRETTLTTSTQIRTEERWEGRYGVQEQVTISGAAGAAASVSASASYAAEAVATGAKEVKQDADKSAAVATVVAAVDMARVREPVISAVEQTAQRTTTTAVHIQPAQEQVRKEAEKTAVTKVVVAADKAKEQELKSRTKEVITTKQEQMHVTHEQIRKETEKTFVPKVVISAAKAKEQETRISEEITKKQKQVTQEAIMKETRKTVVPKVIVATPKVKEQDLVSRGREGITTKREQVQITQEKMRKEAEKTALSTIAVATAKAKEQETILRTRETMATRQEQIQVTHGKVDVGKKAEAVATVVAAVDQARVREPREPGHLEESYAQQTTLEYGYKERISAAKVAEPPQRPASEPHVVPKAVKPRVIQAPSETHIKTTDQKGMHISSQIKKTTDLTTERLVHVDKRPRTASPHFTVSKISVPKTEHGYEASIAGSAIATLQKELSATSSAQKITKSVKAPTVKPSETRVRAEPTPLPQFPFADTPDTYKSEAGVEVKKEVGVSITGTTVREERFEVLHGREAKVTETARVPAPVEIPVTPPTLVSGLKNVTVIEGESVTLECHISGYPSPTVTWYREDYQIESSIDFQITFQSGIARLMIREAFAEDSGRFTCSAVNEAGTVSTSCYLAVQVSEEFEKETTAVTEKFTTEEKRFVESRDVVMTDTSLTEEQAGPGEPAAPYFITKPVVQKLVEGGSVVFGCQVGGNPKPHVYWKKSGVPLTTGYRYKVSYNKQTGECKLVISMTFADDAGEYTIVVRNKHGETSASASLLEEADYELLMKSQQEMLYQTQVTAFVQEPKVGETAPGFVYSEYEKEYEKEQALIRKKMAKDTVVVRTYVEDQEFHISSFEERLIKEIEYRIIKTTLEELLEEDGEEKMAVDISESEAVESGFDSRIKNYRILEGMGVTFHCKMSGYPLPKIAWYKDGKRIKHGERYQMDFLQDGRASLRIPVVLPEDEGIYTAFASNIKGNAICSGKLYVEPAAPLGAPTYIPTLEPVSRIRSLSPRSVSRSPIRMSPARMSPARMSPARMSPARMSPGRRLEETDESQLERLYKPVFVLKPVSFKCLEGQTARFDLKVVGRPMPETFWFHDGQQIVNDYTHKVVIKEDGTQSLIIVPATPSDSGEWTVVAQNRAGRSSISVILTVEAVEHQVKPMFVEKLKNVNIKEGSRLEMKVRATGNPNPDIVWLKNSDIIVPHKYPKIRIEGTKGEAALKIDSTVSQDSAWYTATAINKAGRDTTRCKVNVEVEFAEPEPERKLIIPRGTYRAKEIAAPELEPLHLRYGQEQWEEGDLYDKEKQQKPFFKKKLTSLRLKRFGPAHFECRLTPIGDPTMVVEWLHDGKPLEAANRLRMINEFGYCSLDYGVAYSRDSGIITCRATNKYGTDHTSATLIVKDEKSLVEESQLPEGRKGLQRIEELERMAHEGALTGVTTDQKEKQKPDIVLYPEPVRVLEGETARFRCRVTGYPQPKVNWYLNGQLIRKSKRFRVRYDGIHYLDIVDCKSYDTGEVKVTAENPEGVIEHKVKLEIQQREDFRSVLRRAPEPRPEFHVHEPGKLQFEVQKVDRPVDTTETKEVVKLKRAERITHEKVPEESEELRSKFKRRTEEGYYEAITAVELKSRKKDESYEELLRKTKDELLHWTKELTEEEKKALAEEGKITIPTFKPDKIELSPSMEAPKIFERIQSQTVGQGSDAHFRVRVVGKPDPECEWYKNGVKIERSDRIYWYWPEDNVCELVIRDVTAEDSASIMVKAINIAGETSSHAFLLVQAKQLITFTQELQDVVAKEKDTMATFECETSEPFVKVKWYKDGMEVHEGDKYRMHSDRKVHFLSILTIDTSDAEDYSCVLVEDENVKTTAKLIVEGAVVEFVKELQDIEVPESYSGELECIVSPENIEGKWYHNDVELKSNGKYTITSRRGRQNLTVKDVTKEDQGEYSFVIDGKKTTCKLKMKPRPIAILQGLSDQKVCEGDIVQLEVKVSLESVEGVWMKDGQEVQPSDRVHIVIDKQSHMLLIEDMTKEDAGNYSFTIPALGLSTSGRVSVYSVDVITPLKDVNVIEGTKAVLECKVSVPDVTSVKWYLNDEQIKPDDRVQAIVKGTKQRLVINRTHASDEGPYKLIVGRVETNCNLSVEKIKIIRGLRDLTCTETQNVVFEVELSHSGIDVLWNFKDKEIKPSSKYKIEAHGKIYKLTVLNMMKDDEGKYTFYAGENMTSGKLTVAGGAISKPLTDQTVAESQEAVFECEVANPDSKGEWLRDGKHLPLTNNIRSESDGHKRRLIIAATKLDDIGEYTYKVATSKTSAKLKVEAVKIKKTLKNLTVTETQDAVFTVELTHPNVKGVQWIKNGVVLESNEKYAISVKGTIYSLRIKNCAIVDESVYGFRLGRLGASARLHVETVKIIKKPKDVTALENATVAFEVSVSHDTVPVKWFHKSVEIKPSDKHRLVSERKVHKLMLQNISPSDAGEYTAVVGQLECKAKLFVETLHITKTMKNIEVPETKTASFECEVSHFNVPSMWLKNGVEIEMSEKFKIVVQGKLHQLIIMNTSTEDSAEYTFVCGNDQVSATLTVTPIMITSMLKDINAEEKDTITFEVTVNYEGISYKWLKNGVEIKSTDKCQMRTKKLTHSLNIRNVHFGDAADYTFVAGKATSTATLYVEARHIEFRKHIKDIKVLEKKRAMFECEVSEPDITVQWMKDDQELQITDRIKIQKEKYVHRLLIPSTRMSDAGKYTVVAGGNVSTAKLFVEGRDVRIRSIKKEVQVIEKQRAVVEFEVNEDDVDAHWYKDGIEINFQVQERHKYVVERRIHRMFISETRQSDAGEYTFVAGRNRSSVTLYVNAPEPPQVLQELQPVTVQSGKPARFCAVISGRPQPKISWYKEEQLLSTGFKCKFLHDGQEYTLLLIEAFPEDAAVYTCEAKNDYGVATTSASLSVEVPEVVSPDQEMPVYPPAIITPLQDTVTSEGQPARFQCRVSGTDLKVSWYSKDKKIKPSRFFRMTQFEDTYQLEIAEAYPEDEGTYTFVASNAVGQVSSTANLSLEGFSKFEENTSNSQWHVSLSVSFKKEPLGQKPSFIQPLSSLRVHNGETVRFHARVSGIPKPEIQWFHNQQLILPTKDVVFHFEESTGMALMLIVDAYSEHAGQYSCKAANSAGEATCAATLTVTPKAPESILHERIEQEIEMEMKEFSSSFLSAEEEGLHSAELQLSKINETLELLSESPVYPTKFDSEKEGTGPIFIKEVSNADISMGDVATLSVTVIGIPKPKIQWFFNGVLLTPSADYKFVFDGDDHSLIILFTKLEDEGEYTCMASNDYGKTICSAYLKINSKGEGHKDTETESAVAKSLEKLGGPCPPHFLKELKPIRCAQGLPAIFEYTVVGEPAPTVTWFKENKQLCTSVYYTIIHNPNGSGTFIVNDPQREDSGLYICKAENMLGESTCAAELLVLLEDTDMTDTPCKAKSTPEAPEDFPQTPLKGPAVEALDSEQEIATFVKDTILKAALITEENQQLSYEHIAKANELSSQLPLGAQELQSILEQDKLTPESTREFLCINGSIHFQPLKEPSPNLQLQIVQSQKTFSKEGILMPEEPETQAVLSDTEKIFPSAMSIEQINSLTVEPLKTLLAEPEGNYPQSSIEPPMHSYLTSVAEEVLSPKEKTVSDTNREQRVTLQKQEAQSALILSQSLAEGHVESLQSPDVMISQVNYEPLVPSEHSCTEGGKILIESANPLENAGQDSAVRIEEGKSLRFPLALEEKQVLLKEEHSDNVVMPPDQIIESKREPVAIKKVQEVQGRDLLSKESLLSGIPEEQRLNLKIQICRALQAAVASEQPGLFSEWLRNIEKVEVEAVNITQEPRHIMCMYLVTSAKSVTEEVTIIIEDVDPQMANLKMELRDALCAIIYEEIDILTAEGPRIQQGAKTSLQEEMDSFSGSQKVEPITEPEVESKYLISTEEVSYFNVQSRVKYLDATPVTKGVASAVVSDEKQDESLKPSEEKEESSSESGTEEVATVKIQEAEGGLIKEDGPMIHTPLVDTVSEEGDIVHLTTSITNAKEVNWYFENKLVPSDEKFKCLQDQNTYTLVIDKVNTEDHQGEYVCEALNDSGKTATSAKLTVVKRAAPVIKRKIEPLEVALGHLAKFTCEIQSAPNVRFQWFKAGREIYESDKCSIRSSKYISSLEILRTQVVDCGEYTCKASNEYGSVSCTATLTVTVPGGEKKVRKLLPERKPEPKEEVVLKSVLRKRPEEEEPKVEPKKLEKVKKPAVPEPPPPKPVEEVEVPTVTKRERKIPEPTKVPEIKPAIPLPAPEPKPKPEAEVKTIKPPPVEPEPTPIAAPVTVPVVGKKAEAKAPKEEAAKPKGPIKGVPKKTPSPIEAERRKLRPGSGGEKPPDEAPFTYQLKAVPLKFVKEIKDIILTESEFVGSSAIFECLVSPSTAITTWMKDGSNIRESPKHRFIADGKDRKLHIIDVQLSDAGEYTCVLRLGNKEKTSTAKLVVEELPVRFVKTLEEEVTVVKGQPLYLSCELNKERDVVWRKDGKIVVEKPGRIVPGVIGLMRALTINDADDTDAGTYTVTVENANNLECSSCVKVVEVIRDWLVKPIRDQHVKPKGTAIFACDIAKDTPNIKWFKGYDEIPAEPNDKTEILRDGNHLYLKIKNAMPEDIAEYAVEIEGKRYPAKLTLGEREVELLKPIEDVTIYEKESASFDAEISEADIPGQWKLKGELLRPSPTCEIKAEGGKRFLTLHKVKLDQAGEVLYQALNAITTAILTVKEIELDFAVPLKDVTVPERRQARFECVLTREANVIWSKGPDIIKSSDKFDIIADGKKHILVINDSQFDDEGVYTAEVEGKKTSARLFVTGIRLKFMSPLEDQTVKEGETATFVCELSHEKMHVVWFKNDAKLHTSRTVLISSEGKTHKLEMKEVTLDDISQIKAQVKELSSTAQLKVLEADPYFTVKLHDKTAVEKDEITLKCEVSKDVPVKWFKDGEEIVPSPKYSIKADGLRRILKIKKADLKDKGEYVCDCGTDKTKANVTVEARLIKVEKPLYGVEVFVGETAHFEIELSEPDVHGQWKLKGQPLTASPDCEIIEDGKKHILILHNCQLGMTGEVSFQAANAKSAANLKVKELPLIFITPLSDVKVFEKDEAKFECEVSREPKTFRWLKGTQEITGDDRFELIKDGTKHSMVIKSAAFEDEAKYMFEAEDKHTSGKLIIEGIRLKFLTPLKDVTAKEKESAVFTVELSHDNIRVKWFKNDQRLHTTRSVSMQDEGKTHSITFKDLSIDDTSQIRVEAMGMSSEAKLTVLEGDPYFTGKLQDYTGVEKDEVILQCEISKADAPVKWFKDGKEIKPSKNAVIKADGKKRMLILKKALKSDIGQYTCDCGTDKTSGKLDIEDREIKLVRPLHSVEVMETETARFETEISEDDIHANWKLKGEALLQTPDCEIKEEGKIHSLVLHNCRLDQTGGVDFQAANVKSSAHLRVKPRVIGLLRPLKDVTVTAGETATFDCELSYEDIPVEWYLKGKKLEPSDKVVPRSEGKVHTLTLRDVKLEDAGEVQLTAKDFKTHANLFVKEPPVEFTKPLEDQTVEEGATAVLECEVSRENAKVKWFKNGTEILKSKKYEIVADGRVRKLVIHDCTPEDIKTYTCDAKDFKTSCNLNVVPPHVEFLRPLTDLQVREKEMARFECELSRENAKVKWFKDGAEIKKGKKYDIISKGAVRILVINKCLLDDEAEYSCEVRTARTSGMLTVLEEEAVFTKNLANIEVSETDTIKLVCEVSKPGAEVIWYKGDEEIIETGRYEILTEGRKRILVIQNAHLEDAGNYNCRLPSSRTDGKVKVHELAAEFISKPQNLEILEGEKAEFVCSISKESFPVQWKRDDKTLESGDKYDVIADGKKRVLVVKDATLQDMGTYVVMVGAARAAAHLTVIEKLRIVVPLKDTRVKEQQEVVFNCEVNTEGAKAKWFRNEEAIFDSSKYIILQKDLVYTLRIRDAHLDDQANYNVSLTNHRGENVKSAANLIVEEEDLRIVEPLKDIETMEKKSVTFWCKVNRLNVTLKWTKNGEEVPFDNRVSYRVDKYKHMLTIKDCGFPDEGEYIVTAGQDKSVAELLIIEAPTEFVEHLEDQTVTEFDDAVFSCQLSREKANVKWYRNGREIKEGKKYKFEKDGSIHRLIIKDCRLDDECEYACGVEDRKSRARLFVEEIPVEIIRPPQDILEAPGADVVFLAELNKDKVEVQWLRNNMVVVQGDKHQMMSEGKIHRLQICDIKPRDQGEYRFIAKDKEARAKLELAAAPKIKTADQDLVVDVGKPLTMVVPYDAYPKAEAEWFKENEPLSTKTIDTTAEQTSFRILEAKKGDKGRYKIVLQNKHGKAEGFINLKVIDVPGPVRNLEVTETFDGEVSLAWEEPLTDGGSKIIGYVVERRDIKRKTWVLATDRAESCEFTVTGLQKGGVEYLFRVSARNRVGTGEPVETDNPVEARSKYDVPGPPLNVTITDVNRFGVSLTWEPPEYDGGAEITNYVIELRDKTSIRWDTAMTVRAEDLSATVTDVVEGQEYSFRVRAQNRIGVGKPSAATPFVKVADPIERPSPPVNLTSSDQTQSSVQLKWEPPLKDGGSPILGYIIERCEEGKDNWIRCNMKLVPELTYKVTGLEKGNKYLYRVSAENKAGVSDPSEILGPLTADDAFVEPTMDLSAFKDGLEVIVPNPITILVPSTGYPRPTATWCFGDKVLETGDRVKMKTLSAYAELVISPSERSDKGIYTLKLENRVKTISGEIDVNVIARPSAPKELKFGDITKDSVHLTWEPPDDDGGSPLTGYVVEKREVSRKTWTKVMDFVTDLEFTVPDLVQGKEYLFKVCARNKCGPGEPAYVDEPVNMSTPATVPDPPENVKWRDRTANSIFLTWDPPKNDGGSRIKGYIVERCPRGSDKWVACGEPVAETKMEVTGLEEGKWYAYRVKALNRQGASKPSRPTEEIQAVDTQEAPEIFLDVKLLAGLTVKAGTKIELPATVTGKPEPKITWTKADMILKQDKRITIENVPKKSTVTIVDSKRSDTGTYIIEAVNVCGRATAVVEVNVLDKPGPPAAFDITDVTNESCLLTWNPPRDDGGSKITNYVVERRATDSEVWHKLSSTVKDTNFKATKLIPNKEYIFRVAAENMYGVGEPVQASPITAKYQFDPPGPPTRLEPSDITKDAVTLTWCEPDDDGGSPITGYWVERLDPDTDKWVRCNKMPVKDTTYRVKGLTNKKKYRFRVLAENLAGPGKPSKSTEPILIKDPIDPPWPPGKPTVKDVGKTSVRLNWTKPEHDGGAKIESYVIEMLKTGTDEWVRVAEGVPTTQHLLPGLMEGQEYSFRVRAVNKAGESEPSEPSDPVLCREKLYPPSPPRWLEVINITKNTADLKWTVPEKDGGSPITNYIVEKRDVRRKGWQTVDTTVKDTKCTVTPLTEGSLYVFRVAAENAIGQSDYTEIEDSVLAKDTFTTPGPPYALAVVDVTKRHVDLKWEPPKNDGGRPIQRYVIEKKERLGTRWVKAGKTAGPDCNFRVTDVIEGTEVQFQVRAENEAGVGHPSEPTEILSIEDPTSPPSPPLDLHVTDAGRKHIAIAWKPPEKNGGSPIIGYHVEMCPVGTEKWMRVNSRPIKDLKFKVEEGVVPDKEYVLRVRAVNAIGVSEPSEISENVVAKDPDCKPTIDLETHDIIVIEGEKLSIPVPFRAVPVPTVSWHKDGKEVKASDRLTMKNDHISAHLEVPKSVRADAGIYTITLENKLGSATASINVKVIGLPGPCKDIKASDITKSSCKLTWEPPEFDGGTPILHYVLERREAGRRTYIPVMSGENKLSWTVKDLIPNGEYFFRVKAVNKVGGGEYIELKNPVIAQDPKQPPDPPVDVEVHNPTAEAMTITWKPPLYDGGSKIMGYIIEKIAKGEERWKRCNEHLVPILTYTAKGLEEGKEYQFRVRAENAAGISEPSRATPPTKAVDPIDAPKVILRTSLEVKRGDEIALDASISGSPYPTITWIKDENVIVPEEIKKRAAPLVRRRKGEVQEEEPFVLPLTQRLSIDNSKKGESQLRVRDSLRPDHGLYMIKVENDHGIAKAPCTVSVLDTPGPPINFVFEDIRKTSVLCKWEPPLDDGGSEIINYTLEKKDKTKPDSEWIVVTSTLRHCKYSVTKLIEGKEYLFRVRAENRFGPGPPCVSKPLVAKDPFGPPDAPDKPIVEDVTSNSMLVKWNEPKDNGSPILGYWLEKREVNSTHWSRVNKSLLNALKANVDGLLEGLTYVFRVCAENAAGPGKFSPPSDPKTAHDPISPPGPPIPRVTDTSSTTIELEWEPPAFNGGGEIVGYFVDKQLVGTNEWSRCTEKMIKVRQYTVKEIREGADYKLRVSAVNAAGEGPPGETQPVTVAEPQEPPAVELDVSVKGGIQIMAGKTLRIPAVVTGRPVPTKVWTKEEGELDKDRVVIDNVGTKSELIIKDALRKDHGRYVITATNSCGSKFAAARVEVFDVPGPVLDLKPVVTNRKMCLLNWSDPEDDGGSEITGFIIERKDAKMHTWRQPIETERSKCDITGLLEGQEYKFRVIAKNKFGCGPPVEIGPILAVDPLGPPTSPERLTYTERTKSTITLDWKEPRSNGGSPIQGYIIEKRRHDKPDFERVNKRLCPTTSFLVENLDEHQMYEFRVKAVNEIGESEPSLPLNVVIQDDEVPPTIKLRLSVRGDTIKVKAGEPVHIPADVTGLPMPKIEWSKNETVIEKPTDALQITKEEVSRSEAKTELSIPKAVREDKGTYTVTASNRLGSVFRNVHVEVYDRPSPPRNLAVTDIKAESCYLTWDAPLDNGGSEITHYVIDKRDASRKKAEWEEVTNTAVEKRYGIWKLIPNGQYEFRVRAVNKYGISDECKSDKVVIQDPYRLPGPPGKPKVLARTKGSMLVSWTPPLDNGGSPITGYWLEKREEGSPYWSRVSRAPITKVGLKGVEFNVPRLLEGVKYQFRAMAINAAGIGPPSEPSDPEVAGDPIFPPGPPSCPEVKDKTKSSISLGWKPPAKDGGSPIKGYIVEMQEEGTTDWKRVNEPDKLITTCECVVPNLKELRKYRFRVKAVNEAGESEPSDTTGEIPATDIQEEPEVFIDIGAQDCLVCKAGSQIRIPAVIKGRPTPKSSWEFDGKAKKAMKDGVHDIPEDAQLETAENSSVIIIPECKRSHTGKYSITAKNKAGQKTANCRVKVMDVPGPPKDLKVSDITRGSCRLSWKMPDDDGGDRIKGYVIEKRTIDGKAWTKVNPDCGSTTFVVPDLLSEQQYFFRVRAENRFGIGPPVETIQRTTARDPIYPPDPPIKLKIGLITKNTVHLSWKPPKNDGGSPVTHYIVECLAWDPTGTKKEAWRQCNKRDVEELQFTVEDLVEGGEYEFRVKAVNAAGVSKPSATVGPVTVKDQTCPPSIDLKEFMEVEEGTNVNIVAKIKGVPFPTLTWFKAPPKKPDNKEPVLYDTHVNKLVVDDTCTLVIPQSRRSDTGLYTITAVNNLGTASKEMRLNVLGRPGPPVGPIKFESVSADQMTLSWFPPKDDGGSKITNYVIEKREANRKTWVHVSSEPKECTYTIPKLLEGHEYVFRIMAQNKYGIGEPLDSEPETARNLFSVPGAPDKPTVSSVTRNSMTVNWEEPEYDGGSPVTGYWLEMKDTTSKRWKRVNRDPIKAMTLGVSYKVTGLIEGSDYQFRVYAINAAGVGPASLPSDPATARDPIAPPGPPFPKVTDWTKSSADLEWSPPLKDGGSKVTGYIVEYKEEGKEEWEKGKDKEVRGTKLVVTGLKEGAFYKFRVRAVNIAGIGEPGEVTDVIEMKDRLVSPDLQLDASVRDRIVVHAGGVIRIIAYVSGKPPPTVTWNMNERTLPQEATIETTAISSSMVIKNCQRSHQGVYSLLAKNEAGERKKTIIVDVLDVPGPVGTPFLAHNLTNESCKLTWFSPEDDGGSPITNYVIEKRESDRRAWTPVTYTVTRQNATVQGLIQGKAYFFRIAAENSIGMGPFVETSEALVIREPITVPERPEDLEVKEVTKNTVTLTWNPPKYDGGSEIINYVLESRLIGTEKFHKVTNDNLLSRKYTVKGLKEGDTYEYRVSAVNIVGQGKPSFCTKPITCKDELAPPTLHLDFRDKLTIRVGEAFALTGRYSGKPKPKVSWFKDEADVLEDDRTHIKTTPATLALEKIKAKRSDSGKYCVVVENSTGSRKGFCQVNVVDRPGPPVGPVSFDEVTKDYMVISWKPPLDDGGSKITNYIIEKKEVGKDVWMPVTSASAKTTCKVSKLLEGKDYIFRIHAENLYGISDPLVSDSMKAKDRFRVPDAPDQPIVTEVTKDSALVTWNKPHDGGKPITNYILEKRETMSKRWARVTKDPIHPYTKFRVPDLLEGCQYEFRVSAENEIGIGDPSPPSKPVFAKDPIAKPSPPVNPEAIDTTCNSVDLTWQPPRHDGGSKILGYIVEYQKVGDEEWRRANHTPESCPETKYKVTGLRDGQTYKFRVLAVNAAGESDPAHVPEPVLVKDRLEPPELILDANMAREQHIKVGDTLRLSAIIKGVPFPKVTWKKEDRDAPTKARIDVTPVGSKLEIRNAAHEDGGIYSLTVENPAGSKTVSVKVLVLDKPGPPRDLEVSEIRKDSCYLTWKEPLDDGGSVITNYVVERRDVASAQWSPLSATSKKKSHFAKHLNEGNQYLFRVAAENQYGRGPFVETPKPIKALDPLHPPGPPKDLHHVDVDKTEVSLVWNKPDRDGGSPITGYLVEYQEEGTQDWIKFKTVTNLECVVTGLQQGKTYRFRVKAENIVGLGLPDTTIPIECQEKLVPPSVELDVKLIEGLVVKAGTTVRFPAIIRGVPVPTAKWTTDGSEIKTDEHYTVETDNFSSVLTIKNCLRRDTGEYQITVSNAAGSKTVAVHLTVLDVPGPPTGPINILDVTPEHMTISWQPPKDDGGSPVINYIVEKQDTRKDTWGVVSSGSSKTKLKIPHLQKGCEYVFRVRAENKIGVGPPLDSTPTVAKHKFSPPSPPGKPVVTDITENAATVSWTLPKSDGGSPITGYYMERREVTGKWVRVNKTPIADLKFRVTGLYEGNTYEFRVFAENLAGLSKPSPSSDPIKACRPIKPPGPPINPKLKDKSRETADLVWTKPLSDGGSPILGYVVECQKPGTAQWNRINKDELIRQCAFRVPGLIEGNEYRFRIKAANIVGEGEPRELAESVIAKDILHPPEVELDVTCRDVITVRVGQTIRILARVKGRPEPDITWTKEGKVLVREKRVDLIQDLPRVELQIKEAVRADHGKYIISAKNSSGHAQGSAIVNVLDRPGPCQNLKVTNVTKENCTISWENPLDNGGSEITNFIVEYRKPNQKGWSIVASDVTKRLIKANLLANNEYYFRVCAENKVGVGPTIETKTPILAINPIDRPGEPENLHIADKGKTFVYLKWRRPDYDGGSPNLSYHVERRLKGSDDWERVHKGSIKETHYMVDRCVENQIYEFRVQTKNEGGESDWVKTEEVVVKEDLQKPVLDLKLSGVLTVKAGDTIRLEAGVRGKPFPEVAWTKDKDATDLTRSPRVKIDTRADSSKFSLTKAKRSDGGKYVVTATNTAGSFVAYATVNVLDKPGPVRNLKIVDVSSDRCTVCWDPPEDDGGCEIQNYILEKCETKRMVWSTYSATVLTPGTTVTRLIEGNEYIFRVRAENKIGTGPPTESKPVIAKTKYDKPGRPDPPEVTKVSKEEMTVVWNPPEYDGGKSITGYFLEKKEKHSTRWVPVNKSAIPERRMKVQNLLPDHEYQFRVKAENEIGIGEPSLPSRPVVAKDPIEPPGPPTNFRVVDTTKHSITLGWGKPVYDGGAPIIGYVVEMRPKIADASPDEGWKRCNAAAQLVRKEFTVTSLDENQEYEFRVCAQNQVGIGRPAELKEAIKPKEILEPPEIDLDASMRKLVIVRAGCPIRLFAIVRGRPAPKVTWRKVGIDNVVRKGQVDLVDTMAFLVIPNSTRDDSGKYSLTLVNPAGEKAVFVNVRVLDTPGPVSDLKVSDVTKTSCHVSWAPPENDGGSQVTHYIVEKREADRKTWSTVTPEVKKTSFHVTNLVPGNEYYFRVTAVNEYGPGVPTDVPKPVLASDPLSEPDPPRKLEVTEMTKNSATLAWLPPLRDGGAKIDGYITSYREEEQPADRWTEYSVVKDLSLVVTGLKEGKKYKFRVAARNAVGVSLPREAEGVYEAKEQLLPPKILMPEQITIKAGKKLRIEAHVYGKPHPTCKWKKGEDEVVTSSHLAVHKADSSSILIIKDVTRKDSGYYSLTAENSSGTDTQKIKVVVMDAPGPPQPPFDISDIDADACSLSWHIPLEDGGSNITNYIVEKCDVSRGDWVTALASVTKTSCRVGKLIPGQEYIFRVRAENRFGISEPLTSPKMVAQFPFGVPSEPKNARVTKVNKDCIFVAWDRPDSDGGSPIIGYLIERKERNSLLWVKANDTLVRSTEYPCAGLVEGLEYSFRIYALNKAGSSPPSKPTEYVTARMPVDPPGKPEVIDVTKSTVSLIWARPKHDGGSKIIGYFVEACKLPGDKWVRCNTAPHQIPQEEYTATGLEEKAQYQFRAIARTAVNISPPSEPSDPVTILAENVPPRIDLSVAMKSLLTVKAGTNVCLDATVFGKPMPTVSWKKDGTLLKPAEGIKMAMQRNLCTLELFSVNRKDSGDYTITAENSSGSKSATIKLKVLDKPGPPASVKINKMYSDRAMLSWEPPLEDGGSEITNYIVDKRETSRPNWAQVSATVPITSCSVEKLIEGHEYQFRICAENKYGVGDPVFTEPAIAKNPYDPPGRCDPPVISNITKDHMTVSWKPPADDGGSPITGYLLEKRETQAVNWTKVNRKPIIERTLKATGLQEGTEYEFRVTAINKAGPGKPSDASKAAYARDPQYPPGPPAFPKVYDTTRSSVSLSWGKPAYDGGSPIIGYLVEVKRADSDNWVRCNLPQNLQKTRFEVTGLMEDTQYQFRVYAVNKIGYSDPSDVPDKHYPKDILIPPEGELDADLRKTLILRAGVTMRLYVPVKGRPPPKITWSKPNVNLRDRIGLDIKSTDFDTFLRCENVNKYDAGKYILTLENSCGKKEYTIVVKVLDTPGPPVNVTVKEISKDSAYVTWEPPIIDGGSPIINYVVQKRDAERKSWSTVTTECSKTSFRVANLEEGKSYFFRVFAENEYGIGDPGETRDAVKASQTPGPVVDLKVRSVSKSSCSIGWKKPHSDGGSRIIGYVVDFLTEENKWQRVMKSLSLQYSAKDLTEGKEYTFRVSAENENGEGTPSEITVVARDDVVAPDLDLKGLPDLCYLAKENSNFRLKIPIKGKPAPSVSWKKGEDPLATDTRVSVESSAVNTTLIVYDCQKSDAGKYTITLKNVAGTKEGTISIKVVGKPGIPTGPIKFDEVTAEAMTLKWAPPKDDGGSEITNYILEKRDSVNNKWVTCASAVQKTTFRVTRLHEGMEYTFRVSAENKYGVGEGLKSEPIVARHPFDVPDAPPPPNIVDVRHDSVSLTWTDPKKTGGSPITGYHLEFKERNSLLWKRANKTPIRMRDFKVTGLTEGLEYEFRVMAINLAGVGKPSLPSEPVVALDPIDPPGKPEVINITRNSVTLIWTEPKYDGGHKLTGYIVEKRDLPSKSWMKANHVNVPECAFTVTDLVEGGKYEFRIRAKNTAGAISAPSESTETIICKDEYEAPTIVLDPTIKDGLTIKAGDTIVLNAISILGKPLPKSSWSKAGKDIRPSDITQITSTPTSSMLTIKYATRKDAGEYTITATNPFGTKVEHVKVTVLDVPGPPGPVEISNVSAEKATLTWTPPLEDGGSPIKSYILEKRETSRLLWTVVSEDIQSCRHVATKLIQGNEYIFRVSAVNHYGKGEPVQSEPVKMVDRFGPPGPPEKPEVSNVTKNTATVSWKRPVDDGGSEITGYHVERREKKSLRWVRAIKTPVSDLRCKVTGLQEGSTYEFRVSAENRAGIGPPSEASDSVLMKDAAYPPGPPSNPHVTDTTKKSASLAWGKPHYDGGLEITGYVVEHQKVGDEAWIKDTTGTALRITQFVVPDLQTKEKYNFRISAINDAGVGEPAVIPDVEIVEREMAPDFELDAELRRTLVVRAGLSIRIFVPIKGRPAPEVTWTKDNINLKNRANIENTESFTLLIIPECNRYDTGKFVMTIENPAGKKSGFVNVRVLDTPGPVLNLRPTDITKDSVTLHWDLPLIDGGSRITNYIVEKREATRKSYSTATTKCHKCTYKVTGLSEGCEYFFRVMAENEYGIGEPTETTEPVKASEAPSPPDSLNIMDITKSTVSLAWPKPKHDGGSKITGYVIEAQRKGSDQWTHITTVKGLECVVRNLTEGEEYTFQVMAVNSAGRSAPRESRPVIVKEQTMLPELDLRGIYQKLVIAKAGDNIKVEIPVLGRPKPTVTWKKGDQILKQTQRVNFETTATSTILNINECVRSDSGPYPLTARNIVGEVGDVITIQVHDIPGPPTGPIKFDEVSSDFVTFSWDPPENDGGVPISNYVVEMRQTDSTTWVELATTVIRTTYKATRLTTGLEYQFRVKAQNRYGVGPGITSACIVANYPFKVPGPPGTPQVTAVTKDSMTISWHEPLSDGGSPILGYHVERKERNGILWQTVSKALVPGNIFKSSGLTDGIAYEFRVIAENMAGKSKPSKPSEPMLALDPIDPPGKPVPLNITRHTVTLKWAKPEYTGGFKITSYIVEKRDLPNGRWLKANFSNILENEFTVSGLTEDAAYEFRVIAKNAAGAISPPSEPSDAITCRDDVEAPKIKVDVKFKDTVILKAGEAFRLEADVSGRPPPTMEWSKDGKELEGTAKLEIKIADFSTNLVNKDSTRRDSGAYTLTATNPGGFAKHIFNVKVLDRPGPPEGPLAVTEVTSEKCVLSWFPPLDDGGAKIDHYIVQKRETSRLAWTNVASEVQVTKLKVTKLLKGNEYIFRVMAVNKYGVGEPLESEPVLAVNPYGPPDPPKNPEVTTITKDSMVVCWGHPDSDGGSEIINYIVERRDKAGQRWIKCNKKTLTDLRYKVSGLTEGHEYEFRIMAENAAGISAPSPTSPFYKACDTVFKPGPPGNPRVLDTSRSSISIAWNKPIYDGGSEITGYMVEIALPEEDEWQIVTPPAGLKATSYTITGLTENQEYKIRIYAMNSEGLGEPALVPGTPKAEDRMLPPEIELDADLRKVVTIRACCTLRLFVPIKGRPAPEVKWARDHGESLDKASIESTSSYTLLIVGNVNRFDSGKYILTVENSSGSKSAFVNVRVLDTPGPPQDLKVKEVTKTSVTLTWDPPLLDGGSKIKNYIVEKRESTRKAYSTVATNCHKTSWKVDQLQEGCSYYFRVLAENEYGIGLPAETAESVKASERPLPPGKITLMDVTRNSVSLSWEKPEHDGGSRILGYIVEMQTKGSDKWATCATVKVTEATITGLIQGEEYSFRVSAQNEKGISDPRQLSVPVIAKDLVIPPAFKLLFNTFTVLAGEDLKVDVPFIGRPTPAVTWHKDNVPLKQTTRVNAESTENNSLLTIKDACREDVGHYVVKLTNSAGEAIETLNVIVLDKPGPPTGPVKMDEVTADSITLSWGPPKYDGGSSINNYIVEKRDTSTTTWQIVSATVARTTIKACRLKTGCEYQFRIAAENRYGKSTYLNSEPTVAQYPFKVPGPPGTPVVTLSSRDSMEVQWNEPISDGGSRVIGYHLERKERNSILWVKLNKTPIPQTKFKTTGLEEGVEYEFRVSAENIVGIGKPSKVSECYVARDPCDPPGRPEAIIVTRNSVTLQWKKPTYDGGSKITGYIVEKKELPEGRWMKASFTNIIDTHFEVTGLVEDHRYEFRVIARNAAGVFSEPSESTGAITARDEVDPPRISMDPKYKDTIVVHAGESFKVDADIYGKPIPTIQWIKGDQELSNTARLEIKSTDFATSLSVKDAVRVDSGNYILKAKNVAGERSVTVNVKVLDRPGPPEGPVVISGVTAEKCTLAWKPPLQDGGSDIINYIVERRETSRLVWTVVDANVQTLSCKVTKLLEGNEYTFRIMAVNKYGVGEPLESEPVVAKNPFVVPDAPKAPEVTTVTKDSMIVVWERPASDGGSEILGYVLEKRDKEGIRWTRCHKRLIGELRLRVTGLIENHDYEFRVSAENAAGLSEPSPPSAYQKACDPIYKPGPPNNPKVIDITRSSVFLSWSKPIYDGGCEIQGYIVEKCDVSVGEWTMCTPPTGINKTNIEVEKLLEKHEYNFRICAINKAGVGEHADVPGPIIVEEKLEAPDIDLDLELRKIINIRAGGSLRLFVPIKGRPTPEVKWGKVDGEIRDAAIIDVTSSFTSLVLDNVNRYDSGKYTLTLENSSGTKSAFVTVRVLDTPSPPVNLKVTEITKDSVSITWEPPLLDGGSKIKNYIVEKREATRKSYAAVVTNCHKNSWKIDQLQEGCSYYFRVTAENEYGIGLPAQTADPIKVAEVPQPPGKITVDDVTRNSVSLSWTKPEHDGGSKIIQYIVEMQAKHSEKWSECARVKSLQAVITNLTQGEEYLFRVVAVNEKGRSDPRSLAVPIVAKDLVIEPDVKPAFSSYSVQVGQDLKIEVPISGRPKPTITWTKDGLPLKQTTRINVTDSLDLTTLSIKETHKDDGGQYGITVANVVGQKTASIEIVTLDKPDPPKGPVKFDDVSAESITLSWNPPLYTGGCQITNYIVQKRDTTTTVWDVVSATVARTTLKVTKLKTGTEYQFRIFAENRYGQSFALESDPIVAQYPYKEPGPPGTPFATAISKDSMVIQWHEPVNNGGSPVIGYHLERKERNSILWTKVNKTIIHDTQFKAQNLEEGIEYEFRVYAENIVGVGKASKNSECYVARDPCDPPGTPEPIMVKRNEITLQWTKPVYDGGSMITGYIVEKRDLPDGRWMKASFTNVIETQFTVSGLTEDQRYEFRVIAKNAAGAISKPSDSTGPITAKDEVELPRISMDPKFRDTIVVNAGETFRLEADVHGKPLPTIEWLRGDKEIEESARCEIKNTDFKALLIVKDAIRIDGGQYILRASNVAGSKSFPVNVKVLDRPGPPEGPVQVTGVTSEKCSLTWSPPLQDGGSDISHYVVEKRETSRLAWTVVASEVVTNSLKVTKLLEGNEYVFRIMAVNKYGVGEPLESAPVLMKNPFVLPGPPKSLEVTNIAKDSMTVCWNRPDSDGGSEIIGYIVEKRDRSGIRWIKCNKRRITDLRLRVTGLTEDHEYEFRVSAENAAGVGEPSPATVYYKACDPVFKPGPPTNAHIVDTTKNSITLAWGKPIYDGGSEILGYVVEICKADEEEWQIVTPQTGLRVTRFEISKLTEHQEYKIRVCALNKVGLGEATSVPGTVKPEDKLEAPELDLDSELRKGIVVRAGGSARIHIPFKGRPTPEITWSREEGEFTDKVQIEKGVNYTQLSIDNCDRNDAGKYILKLENSSGSKSAFVTVKVLDTPGPPQNLAVKEVRKDSAFLVWEPPIIDGGAKVKNYVIDKRESTRKAYANVSSKCSKTSFKVENLTEGAIYYFRVMAENEFGVGVPVETVDAVKAAEPPSPPGKVTLTDVSQTSASLMWEKPEHDGGSRVLGYVVEMQPKGTEKWSIVAESKVCNAVVTGLSSGQEYQFRVKAYNEKGKSDPRVLGVPVIAKDLTIQPSLKLPFNTYSIQAGEDLKIEIPVIGRPRPNISWVKDGEPLKQTTRVNVEETATSTVLHIKEGNKDDFGKYTVTATNSAGTATENLSVIVLEKPGPPVGPVRFDEVSADFVVISWEPPAYTGGCQISNYIVEKRDTTTTTWHMVSATVARTTIKITKLKTGTEYQFRIFAENRYGKSAPLDSKAVIVQYPFKEPGPPGTPFVTSISKDQMLVQWHEPVNDGGTKIIGYHLEQKEKNSILWVKLNKTPIQDTKFKTTGLDEGLEYEFKVSAENIVGIGKPSKVSECFVARDPCDPPGRPEAIVITRNNVTLKWKKPAYDGGSKITGYIVEKKDLPDGRWMKASFTNVLETEFTVSGLVEDQRYEFRVIARNAAGNFSEPSDSSGAITARDEIDAPNASLDPKYKDVIVVHAGETFVLEADIRGKPIPDVVWSKDGKELEETAARMEIKSTIQKTTLVVKDCIRTDGGQYILKLSNVGGTKSIPITVKVLDRPGPPEGPLKVTGVTAEKCYLAWNPPLQDGGANISHYIIEKRETSRLSWTQVSTEVQALNYKVTKLLPGNEYIFRVMAVNKYGIGEPLESGPVTACNPYKPPGPPSTPEVSAITKDSMVVTWARPVDDGGTEIEGYILEKRDKEGVRWTKCNKKTLTDLRLRVTGLTEGHSYEFRVAAENAAGVGEPSEPSVFYRACDALYPPGPPSNPKVTDTSRSSVSLAWSKPIYDGGAPVKGYVVEVKEAAADEWTTCTPPTGLQGKQFTVTKLKENTEYNFRICAINSEGVGEPATLPGSVVAQERIEPPEIELDADLRKVVVLRASATLRLFVTIKGRPEPEVKWEKAEGILTDRAQIEVTSSFTMLVIDNVTRFDSGRYNLTLENNSGSKTAFVNVRVLDSPSAPVNLTIREVKKDSVTLSWEPPLIDGGAKITNYIVEKRETTRKAYATITNNCTKTTFRIENLQEGCSYYFRVLASNEYGIGLPAETTEPVKVSEPPLPPGRVTLVDVTRNTATIKWEKPESDGGSKITGYVVEMQTKGSEKWSTCTQVKTLEATISGLTAGEEYVFRVAAVNEKGRSDPRQLGVPVIARDIEIKPSVELPFHTFNVKAREQLKIDVPFKGRPQATVNWRKDGQTLKETTRVNVSSSKTVTSLSIKEASKEDVGTYELCVSNSAGSITVPITIIVLDRPGPPGPIRIDEVSCDSITISWNPPEYDGGCQISNYIVEKKETTSTTWHIVSQAVARTSIKIVRLTTGSEYQFRVCAENRYGKSSYSESSAVVAEYPFSPPGPPGTPKVVHATKSTMLVTWQVPVNDGGSRVIGYHLEYKERSSILWSKANKILIADTQMKVSGLDEGLMYEYRVYAENIAGIGKCSKSCEPVPARDPCDPPGQPEVTNITRKSVSLKWSKPHYDGGAKITGYIVERRELPDGRWLKCNYTNIQETYFEVTELTEDQRYEFRVFARNAADSVSEPSESTGPIIVKDDVEPPRVMMDVKFRDVIVVKAGEVLKINADIAGRPLPVISWAKDGIEIEERARTEIISTDNHTLLTVKDCIRRDTGQYVLTLKNVAGTRSVAVNCKVLDKPGPPAGPLEINGLTAEKCSLSWGRPQEDGGADIDYYIVEKRETSHLAWTICEGELQMTSCKVTKLLKGNEYIFRVTGVNKYGVGEPLESVAIKALDPFTVPSPPTSLEITSVTKESMTLCWSRPESDGGSEISGYIIERREKNSLRWVRVNKKPVYDLRVKSTGLREGCEYEYRVYAENAAGLSLPSETSPLIRAEDPVFLPSPPSKPKIVDSGKTTITIAWVKPLFDGGAPITGYTVEYKKSDDTDWKTSIQSLRGTEYTISGLTTGAEYVFRVKSVNKVGASDPSDSSDPQIAKEREEEPLFDIDSEMRKTLIVKAGASFTMTVPFRGRPVPNVLWSKPDTDLRTRAYVDTTDSRTSLTIENANRNDSGKYTLTIQNVLSAASLTLVVKVLDTPGPPTNITVQDVTKESAVLSWDVPENDGGAPVKNYHIEKREASKKAWVSVTNNCNRLSYKVTNLQEGAIYYFRVSGENEFGVGIPAETKEGVKITEKPSPPEKLGVTSISKDSVSLTWLKPEHDGGSRIVHYVVEALEKGQKNWVKCAVAKSTHHVVSGLRENSEYFFRVFAENQAGLSDPRELLLPVLIKEQLEPPEIDMKNFPSHTVYVRAGSNLKVDIPISGKPLPKVTLSRDGVPLKATMRFNTEITAENLTINLKESVTADAGRYEITAANSSGTTKAFINIVVLDRPGPPTGPVVISDITEESVTLKWEPPKYDGGSQVTNYILLKRETSTAVWTEVSATVARTMMKVMKLTTGEEYQFRIKAENRFGISDHIDSACVTVKLPYTTPGPPSTPWVTNVTRESITVGWHEPVSNGGSAVVGYHLEMKDRNSILWQKANKLVIRTTHFKVTTISAGLIYEFRVYAENAAGVGKPSHPSEPVLAIDACEPPRNVRITDISKNSVSLSWQQPAFDGGSKITGYIVERRDLPDGRWTKASFTNVTETQFIISGLTQNSQYEFRVFARNAVGSISNPSEVVGPITCIDSYGGPVIDLPLEYTEVVKYRAGTSVKLRAGISGKPAPTIEWYKDDKELQTNALVCVENTTDLASILIKDADRLNSGCYELKLRNAMGSASATIRVQILDKPGPPGGPIEFKTVTAEKITLLWRPPADDGGAKITHYIVEKRETSRVVWSMVSEHLEECIITTTKIIKGNEYIFRVRAVNKYGIGEPLESDSVVAKNAFVTPGPPGIPEVTKITKNSMTVVWSRPIADGGSDISGYFLEKRDKKSLGWFKVLKETIRDTRQKVTGLTENSDYQYRVCAVNAAGQGPFSEPSEFYKAADPIDPPGPPAKIRIADSTKSSITLGWSKPVYDGGSAVTGYVVEIRQGEEEEWTTVSTKGEVRTTEYVVSNLKPGVNYYFRVSAVNCAGQGEPIEMNEPVQAKDILEAPEIDLDVALRTSVIAKAGEDVQVLIPFKGRPPPTVTWRKDEKNLGSDARYSIENTDSSSLLTIPQVTRNDTGKYILTIENGVGEPKSSTVSVKVLDTPAACQKLQVKHVSRGTVTLLWDPPLIDGGSPIINYVIEKRDATKRTWSVVSHKCSSTSFKLIDLSEKTPFFFRVLAENEIGIGEPCETTEPVKAAEVPAPIRDLSMKDSTKTSVILSWTKPDFDGGSVITEYVVERKGKGEQTWSHAGISKTCEIEVSQLKEQSVLEFRVFAKNEKGLSDPVTIGPITVKELIITPEVDLSDIPGAQVTVRIGHNVHLELPYKGKPKPSISWLKDGLPLKESEFVRFSKTENKITLSIKNAKKEHGGKYTVILDNAVCRIAVPITVITLGPPSKPKGPIRFDEIKADSVILSWDVPEDNGGGEITCYSIEKRETSQTNWKMVCSSVARTTFKVPNLVKDAEYQFRVRAENRYGVSQPLVSSIIVAKHQFRIPGPPGKPVIYNVTSDGMSLTWDAPVYDGGSEVTGFHVEKKERNSILWQKVNTSPISGREYRATGLVEGLDYQFRVYAENSAGLSSPSDPSKFTLAVSPVDPPGTPDYIDVTRETITLKWNPPLRDGGSKIVGYSIEKRQGNERWVRCNFTDVSECQYTVTGLSPGDRYEFRIIARNAVGTISPPSQSSGIIMTRDENVPPIVEFGPEYFDGLIIKSGESLRIKALVQGRPVPRVTWFKDGVEIEKRMNMEITDVLGSTSLFVRDATRDHRGVYTVEAKNASGSAKAEIKVKVQDTPGKVVGPIRFTNITGEKMTLWWDAPLNDGCAPITHYIIEKRETSRLAWALIEDKCEAQSYTAIKLINGNEYQFRVSAVNKFGVGRPLDSDPVVAQIQYTVPDAPGIPEPSNITGNSITLTWARPESDGGSEIQQYILERREKKSTRWVKVISKRPISETRFKVTGLTEGNEYEFHVMAENAAGVGPASGISRLIKCREPVNPPGPPTVVKVTDTSKTTVSLEWSKPVFDGGMEIIGYIIEMCKADLGDWHKVNAEACVKTRYTVTDLQAGEEYKFRVSAINGAGKGDSCEVTGTIKAVDRLTAPELDIDANFKQTHVVRAGASIRLFIAYQGRPTPTAVWSKPDSNLSLRADIHTTDSFSTLTVENCNRNDAGKYTLTVENNSGSKSITFTVKVLDTPGPPGPITFKDVTRGSATLMWDAPLLDGGARIHHYVVEKREASRRSWQVISEKCTRQIFKVNDLAEGVPYYFRVSAVNEYGVGEPYEMPEPIVATEQPAPPRRLDVVDTSKSSAVLAWLKPDHDGGSRITGYLLEMRQKGSDFWVEAGHTKQLTFTVERLVEKTEYEFRVKAKNDAGYSEPREAFSSVIIKEPQIEPTADLTGITNQLITCKAGSPFTIDVPISGRPAPKVTWKLEEMRLKETDRVSITTTKDRTTLTVKDSMRGDSGRYFLTLENTAGVKTFSVTVVVIGRPGPVTGPIEVSSVSAESCVLSWGEPKDGGGTEITNYIVEKRESGTTAWQLVNSSVKRTQIKVTHLTKYMEYSFRVSSENRFGVSKPLESAPIIAEHPFVPPSAPTRPEVYHVSANAMSIRWEEPYHDGGSKIIGYWVEKKERNTILWVKENKVPCLECNYKVTGLVEGLEYQFRTYALNAAGVSKASEASRPIMAQNPVDAPGRPEVTDVTRSTVSLIWSAPAYDGGSKVVGYIIERKPVSEVGDGRWLKCNYTIVSDNFFTVTALSEGDTYEFRVLAKNAAGVISKGSESTGPVTCRDEYAPPKAELDARLHGDLVTIRAGSDLVLDAAVGGKPEPKIIWTKGDKELDLCEKVSLQYTGKRATAVIKFCDRSDSGKYTLTVKNASGTKAVSVMVKVLDSPGPCGKLTVSRVTQEKCTLAWSLPQEDGGAEITHYIVERRETSRLNWVIVEGECPTLSYVVTRLIKNNEYIFRVRAVNKYGPGVPVESEPIVARNSFTIPSPPGIPEEVGTGKEHIIIQWTKPESDGGNEISNYLVDKREKKSLRWTRVNKDYVVYDTRLKVTSLMEGCDYQFRVTAVNAAGNSEPSEASNFISCREPSYTPGPPSAPRVVDTTKHSISLAWTKPMYDGGTDIVGYVLEMQEKDTDQWYRVHTNATIRNTEFTVPDLKMGQKYSFRVAAVNVKGMSEYSESIAEIEPVERIEIPDLELADDLKKTVTIRAGASLRLMVSVSGRPPPVITWSKQGIDLASRAIIDTTESYSLLIVDKVNRYDAGKYTIEAENQSGKKSATVLVKVYDTPGPCPSVKVKEVSRDSVTITWEIPTIDGGAPVNNYIVEKREAAMRAFKTVTTKCSKTLYRISGLVEGTMYYFRVLPENIYGIGEPCETSDAVLVSEVPLVPAKLEVVDVTKSTVTLAWEKPLYDGGSRLTGYVLEACKAGTERWMKVVTLKPTVLEHTVTSLNEGEQYLFRIRAQNEKGVSEPRETVTAVTVQDLRVLPTIDLSTMPQKTIHVPAGRPVELVIPIAGRPPPAASWFFAGSKLRESERVTVETHTKVAKLTIRETTIRDTGEYTLELKNVTGTTSETIKVIILDKPGPPTGPIKIDEIDATSITISWEPPELDGGAPLSGYVVEQRDAHRPGWLPVSESVTRSTFKFTRLTEGNEYVFRVAATNRFGIGSYLQSEVIECRSSIRIPGPPETLQIFDVSRDGMTLTWYPPEDDGGSQVTGYIVERKEVRADRWVRVNKVPVTMTRYRSTGLTEGLEYEHRVTAINARGSGKPSRPSKPIVAMDPIAPPGKPQNPRVTDTTRTSVSLAWSVPEDEGGSKVTGYLIEMQKVDQHEWTKCNTTPTKIREYTLTHLPQGAEYRFRVLACNAGGPGEPAEVPGTVKVTEMLEYPDYELDERYQEGIFVRQGGVIRLTIPIKGKPFPICKWTKEGQDISKRAMIATSETHTELVIKEADRGDSGTYDLVLENKCGKKAVYIKVRVIGSPNSPEGPLEYDDIQVRSVRVSWRPPADDGGADILGYILERREVPKAAWYTIDSRVRGTSLVVKGLKENVEYHFRVSAENQFGISKPLKSEEPVTPKTPLNPPEPPSNPPEVLDVTKSSVSLSWSRPKDDGGSRVTGYYIERKETSTDKWVRHNKTQITTTMYTVTGLVPDAEYQFRIIAQNDVGLSETSPASEPVVCKDPFDKPSQPGELEILSISKDSVTLQWEKPECDGGKEILGYWVEYRQSGDSAWKKSNKERIKDKQFTIGGLLEATEYEFRVFAENETGLSRPRRTAMSIKTKLTSGEAPGIRKEMKDVTTKLGEAAQLSCQIVGRPLPDIKWYRFGKELIQSRKYKMSSDGRTHTLTVMTEEQEDEGVYTCIATNEVGEVETSSKLLLQATPQFHPGYPLKEKYYGAVGSTLRLHVMYIGRPVPAMTWFHGQKLLQNSENITIENTEHYTHLVMKNVQRKTHAGKYKVQLSNVFGTVDAILDVEIQDKPDKPTGPIVIEALLKNSAVISWKPPADDGGSWITNYVVEKCEAKEGAEWQLVSSAISVTTCRIVNLTENAGYYFRVSAQNTFGISDPLEVSSVVIIKSPFEKPGAPGKPTITAVTKDSCVVAWKPPASDGGAKIRNYYLEKREKKQNKWISVTTEEIRETVFSVKNLIEGLEYEFRVKCENLGGESEWSEISEPITPKSDVPIQAPHFKEELRNLNVRYQSNATLVCKVTGHPKPIVKWYRQGKEIIADGLKYRIQEFKGGYHQLIIASVTDDDATVYQVRATNQGGSVSGTASLEVEVPAKIHLPKTLEGMGAVHALRGEVVSIKIPFSGKPDPVITWQKGQDLIDNNGHYQVIVTRSFTSLVFPNGVERKDAGFYVVCAKNRFGIDQKTVELDVADVPDPPRGVKVSDVSRDSVNLTWTEPASDGGSKITNYIVEKCATTAERWLRVGQARETRYTVINLFGKTSYQFRVIAENKFGLSKPSEPSEPTITKEDKTRAMNYDEEVDETREVSMTKASHSSTKELYEKYMIAEDLGRGEFGIVHRCVETSSKKTYMAKFVKVKGTDQVLVKKEISILNIARHRNILHLHESFESMEELVMIFEFISGLDIFERINTSAFELNEREIVSYVHQVCEALQFLHSHNIGHFDIRPENIIYQTRRSSTIKIIEFGQARQLKPGDNFRLLFTAPEYYAPEVHQHDVVSTATDMWSLGTLVYVLLSGINPFLAETNQQIIENIMNAEYTFDEEAFKEISIEAMDFVDRLLVKERKSRMTASEALQHPWLKQKIERVSTKVIRTLKHRRYYHTLIKKDLNMVVSAARISCGGAIRSQKGVSVAKVKVASIEIGPVSGQIMHAVGEEGGHVKYVCKIENYDQSTQVTWYFGVRQLENSEKYEITYEDGVAILYVKDITKLDDGTYRCKVVNDYGEDSSYAELFVKGVREVYDYYCRRTMKKIKRRTDTMRLLERPPEFTLPLYNKTAYVGENVRFGVTITVHPEPHVTWYKSGQKIKPGDNDKKYTFESDKGLYQLTINSVTTDDDAEYTVVARNKYGEDSCKAKLTVTLHPPPTDSTLRPMFKRLLANAECQEGQSVCFEIRVSGIPPPTLKWEKDGQPLSLGPNIEIIHEGLDYYALHIRDTLPEDTGYYRVTATNTAGSTSCQAHLQVERLRYKKQEFKSKEEHERHVQKQIDKTLRMAEILSGTESVPLTQVAKEALREAAVLYKPAVSTKTVKGEFRLEIEEKKEERKLRMPYDVPEPRKYKQTTIEEDQRIKQFVPMSDMKWYKKIRDQYEMPGKLDRVVQKRPKRIRLSRWEQFYVMPLPRITDQYRPKWRIPKLSQDDLEIVRPARRRTPSPDYDFYYRPRRRSLGDISDEELLLPIDDYLAMKRTEEERLRLEEELELGFSASPPSRSPPHFELSSLRYSSPQAHVKVEETRKDFRYSTYHIPTKAEASTSYAELRERHAQAAYRQPKQRQRIMAEREDEELLRPVTTTQHLSEYKSELDFMSKEEKSRKKSRRQREVTEITEIEEEYEISKHAQRESSSSASRLLRRRRSLSPTYIELMRPVSELIRSRPQPAEEYEDDTERRSPTPERTRPRSPSPVSSERSLSRFERSARFDIFSRYESMKAALKTQKTSERKYEVLSQQPFTLDHAPRITLRMRSHRVPCGQNTRFILNVQSKPTAEVKWYHNGVELQESSKIHYTNTSGVLTLEILDCHTDDSGTYRAVCTNYKGEASDYATLDVTGGDYTTYASQRRDEEVPRSVFPELTRTEAYAVSSFKKTSEMEASSSVREVKSQMTETRESLSSYEHSASAEMKSAALEEKSLEEKSTTRKIKTTLAARILTKPRSMTVYEGESARFSCDTDGEPVPTVTWLRKGQVLSTSARHQVTTTKYKSTFEISSVQASDEGNYSVVVENSEGKQEAEFTLTIQKARVTEKAVTSPPRVKSPEPRVKSPEAVKSPKRVKSPEPSHPKAVSPTETKPTPTEKVQHLPVSAPPKITQFLKAEASKEIAKLTCVVESSVLRAKEVTWYKDGKKLKENGHFQFHYSADGTYELKINNLTESDQGEYVCEISGEGGTSKTNLQFMGQAFKSIHEKVSKISETKKSDQKTTESTVTRKTEPKAPEPISSKPVIVTGLQDTTVSSDSVAKFAVKATGEPRPTAIWTKDGKAITQGGKYKLSEDKGGFFLEIHKTDTSDSGLYTCTVKNSAGSVSSSCKLTIKAIKDTEAQKVSTQKTSEITPQKKAVVQEEISQKALRSEEIKMSEAKSQEKLALKEEASKVLISEEVKKSAATSLEKSIVHEEITKTSQASEEVRTHAEIKAFSTQMSINEGQRLVLKANIAGATDVKWVLNGVELTNSEEYRYGVSGSDQTLTIKQASHRDEGILTCISKTKEGIVKCQYDLTLSKELSDAPAFISQPRSQNINEGQNVLFTCEISGEPSPEIEWFKNNLPISISSNVSISRSRNVYSLEIRNASVSDSGKYTIKAKNFRGQCSATASLMVLPLVEEPSREVVLRTSGDTSLQGSFSSQSVQMSASKQEASFSSFSSSSASSMTEMKFASMSAQSMSSMQESFVEMSSSSFMGISNMTQLESSTSKMLKAGIRGIPPKIEALPSDISIDEGKVLTVACAFTGEPTPEVTWSCGGRKIHSQEQGRFHIENTDDLTTLIIMDVQKQDGGLYTLSLGNEFGSDSATVNIHIRSI

SEQ ID NO: 88978 - protein, 5604 aa, Homo sapiens
  Payload ID: 17810
  Gene Name: titin
  Uniprot ID: Q8WZ42
  ENSP ID: ENSP00000354117
MTTQAPTFTQPLQSVVVLEGSTATFEAHISGFPVPEVSWFRDGQVISTSTLPGVQISFSDGRAKLTIPAVTKANSGRYSLKATNGSGQATSTAELLVKAETAPPNFVQRLQSMTVRQGSQVRLQVRVTGIPTPVVKFYRDGAEIQSSLDFQISQEGDLYSLLIAEAYPEDSGTYSVNATNSVGRATSTAELLVQGEEEVPAKKTKTIVSTAQISESRQTRIEKKIEAHFDARSIATVEMVIDGAAGQQLPHKTPPRIPPKPKSRSPTPPSIAAKAQLARQQSPSPIRHSPSPVRHVRAPTPSPVRSVSPAARISTSPIRSVRSPLLMRKTQASTVATGPEVPPPWKQEGYVASSSEAEMRETTLTTSTQIRTEERWEGRYGVQEQVTISGAAGAAASVSASASYAAEAVATGAKEVKQDADKSAAVATVVAAVDMARVREPVISAVEQTAQRTTTTAVHIQPAQEQVRKEAEKTAVTKVVVAADKAKEQELKSRTKEVITTKQEQMHVTHEQIRKETEKTFVPKVVISAAKAKEQETRISEEITKKQKQVTQEAIRQETEITAASMVVVATAKSTKLETVPGAQEETTTQQDQMHLSYEKIMKETRKTVVPKVIVATPKVKEQDLVSRGREGITTKREQVQITQEKMRKEAEKTALSTIAVATAKAKEQETILRTRETMATRQEQIQVTHGKVDVGKKAEAVATVVAAVDQARVREPREPGHLEESYAQQTTLEYGYKERISAAKVAEPPQRPASEPHVVPKAVKPRVIQAPSETHIKTTDQKGMHISSQIKKTTDLTTERLVHVDKRPRTASPHFTVSKISVPKTEHGYEASIAGSAIATLQKELSATSSAQKITKSVKAPTVKPSETRVRAEPTPLPQFPFADTPDTYKSEAGVEVKKEVGVSITGTTVREERFEVLHGREAKVTETARVPAPVEIPVTPPTLVSGLKNVTVIEGESVTLECHISGYPSPTVTWYREDYQIESSIDFQITFQSGIARLMIREAFAEDSGRFTCSAVNEAGTVSTSCYLAVQVSEEFEKETTAVTEKFTTEEKRFVESRDVVMTDTSLTEEQAGPGEPAAPYFITKPVVQKLVEGGSVVFGCQVGGNPKPHVYWKKSGVPLTTGYRYKVSYNKQTGECKLVISMTFADDAGEYTIVVRNKHGETSASASLLEEADYELLMKSQQEMLYQTQVTAFVQEPKVGETAPGFVYSEYEKEYEKEQALIRKKMAKDTVVVRTYVEDQEFHISSFEERLIKEIEYRIIKTTLEELLEEDGEEKMAVDISESEAVESGFDSRIKNYRILEGMGVTFHCKMSGYPLPKIAWYKDGKRIKHGERYQMDFLQDGRASLRIPVVLPEDEGIYTAFASNIKGNAICSGKLYVEPAAPLGAPTYIPTLEPVSRIRSLSPRSVSRSPIRMSPARMSPARMSPARMSPARMSPGRRLEETDESQLERLYKPVFVLKPVSFKCLEGQTARFDLKVVGRPMPETFWFHDGQQIVNDYTHKVVIKEDGTQSLIIVPATPSDSGEWTVVAQNRAGRSSISVILTVEAVEHQVKPMFVEKLKNVNIKEGSRLEMKVRATGNPNPDIVWLKNSDIIVPHKYPKIRIEGTKGEAALKIDSTVSQDSAWYTATAINKAGRDTTRCKVNVEVEFAEPEPERKLIIPRGTYRAKEIAAPELEPLHLRYGQEQWEEGDLYDKEKQQKPFFKKKLTSLRLKRFGPAHFECRLTPIGDPTMVVEWLHDGKPLEAANRLRMINEFGYCSLDYGVAYSRDSGIITCRATNKYGTDHTSATLIVKDEKSLVEESQLPEGRKGLQRIEELERMAHEGALTGVTTDQKEKQKPDIVLYPEPVRVLEGETARFRCRVTGYPQPKVNWYLNGQLIRKSKRFRVRYDGIHYLDIVDCKSYDTGEVKVTAENPEGVIEHKVKLEIQQREDFRSVLRRAPEPRPEFHVHEPGKLQFEVQKVDRPVDTTETKEVVKLKRAERITHEKVPEESEELRSKFKRRTEEGYYEAITAVELKSRKKDESYEELLRKTKDELLHWTKELTEEEKKALAEEGKITIPTFKPDKIELSPSMEAPKIFERIQSQTVGQGSDAHFRVRVVGKPDPECEWYKNGVKIERSDRIYWYWPEDNVCELVIRDVTAEDSASIMVKAINIAGETSSHAFLLVQAKQLITFTQELQDVVAKEKDTMATFECETSEPFVKVKWYKDGMEVHEGDKYRMHSDRKVHFLSILTIDTSDAEDYSCVLVEDENVKTTAKLIVEGAVVEFVKELQDIEVPESYSGELECIVSPENIEGKWYHNDVELKSNGKYTITSRRGRQNLTVKDVTKEDQGEYSFVIDGKKTTCKLKMKPRPIAILQGLSDQKVCEGDIVQLEVKVSLESVEGVWMKDGQEVQPSDRVHIVIDKQSHMLLIEDMTKEDAGNYSFTIPALGLSTSGRVSVYSVDVITPLKDVNVIEGTKAVLECKVSVPDVTSVKWYLNDEQIKPDDRVQAIVKGTKQRLVINRTHASDEGPYKLIVGRVETNCNLSVEKIKIIRGLRDLTCTETQNVVFEVELSHSGIDVLWNFKDKEIKPSSKYKIEAHGKIYKLTVLNMMKDDEGKYTFYAGENMTSGKLTVAGGAISKPLTDQTVAESQEAVFECEVANPDSKGEWLRDGKHLPLTNNIRSESDGHKRRLIIAATKLDDIGEYTYKVATSKTSAKLKVEAVKIKKTLKNLTVTETQDAVFTVELTHPNVKGVQWIKNGVVLESNEKYAISVKGTIYSLRIKNCAIVDESVYGFRLGRLGASARLHVETVKIIKKPKDVTALENATVAFEVSVSHDTVPVKWFHKSVEIKPSDKHRLVSERKVHKLMLQNISPSDAGEYTAVVGQLECKAKLFVETLHITKTMKNIEVPETKTASFECEVSHFNVPSMWLKNGVEIEMSEKFKIVVQGKLHQLIIMNTSTEDSAEYTFVCGNDQVSATLTVTPIMITSMLKDINAEEKDTITFEVTVNYEGISYKWLKNGVEIKSTDKCQMRTKKLTHSLNIRNVHFGDAADYTFVAGKATSTATLYVEARHIEFRKHIKDIKVLEKKRAMFECEVSEPDITVQWMKDDQELQITDRIKIQKEKYVHRLLIPSTRMSDAGKYTVVAGGNVSTAKLFVEGRDVRIRSIKKEVQVIEKQRAVVEFEVNEDDVDAHWYKDGIEINFQVQERHKYVVERRIHRMFISETRQSDAGEYTFVAGRNRSSVTLYVNAPEPPQVLQELQPVTVQSGKPARFCAVISGRPQPKISWYKEEQLLSTGFKCKFLHDGQEYTLLLIEAFPEDAAVYTCEAKNDYGVATTSASLSVEVPEVVSPDQEMPVYPPAIITPLQDTVTSEGQPARFQCRVSGTDLKVSWYSKDKKIKPSRFFRMTQFEDTYQLEIAEAYPEDEGTYTFVASNAVGQVSSTANLSLEAPESILHERIEQEIEMEMKELFSEGESEHSERDTRDAFSDSEDIDHKSMAAKRYASRISSTSSWPEYFKPSFTQKLTFKYVLEGEPVVFTCRLIACPTPEMTWFHNNRPIPTGLRRIIKAESDLHHHSSSLEIKRVQDRDSGSYRLLAINSEGSAESTASLLVIQKGQDEKYLEFLKRAERTHENVEALVERGEDRIKVDLRFTGSPFNKKQDVEQKGMMRTIHFKTMSSAKKTDYMYDEEYLESKSDIRGWLNVGESFLDKETKVKLQRLREARKTLMEKKKLSLLDTSSEISSRTLRSEASDKDILFSREDMKIRSMSDLAESYKVDHSAESIVQNPHALSNQMDQNIESEELPTSFQTIVDEEIFQTEIRMSQEALVKESLPKDHLYGEILVNENTQARGQLEEIMANTTIGESSTYITNVCEKEEVYETPENVSQAITPHASESFGTLVNVEESEEIASERIKKDDLRELQLSASTRIDEFKTEQKEENMRFFENSFRKRPQRCPPSFLQEIESQEVYEGDSCNFVCHFQGYPQPIVTWYNNDMPIPRNQNFIIHSLENYSILTLSSVHHQNEGSITCVLFNQYGTVKTTSMLKVKAKQKHDVKAHKVPVFHDYLDEEEELALVFDQAKGAHPSMSQEGQTNLHLLKTNPPVPPSGDTELLSFPVEIQVTAATPIPEQDKESKEVFQTEELEPKAMPQDQVTQSPKHRFVFLSDITNEPPKMLQEMPKHARCREGDSIILECLISGEPQPVVTWFQNGVLLKQNQKFQFEEVNCSHQLYIKDVNSQDSGKYKCVAENNSGAVESVSDLTVEPVTYRENSQFENIGEIYGKYSRDQQLQDQGESVRAHFYDYPAGPFTPWTNVKEYSVRDYFQSLETIEQIDQKEQVRCIPSREKIPRFVHGASRTIKISKPIRAEFIQCQAEGKERHVSEKSKLHQAEGTVYPFVDDFSDVTIKKEIRNNFGKLGRSEKENVQECAQSDYLPNIHSERISDSYNTKDSSAIVYEESLGEEIHYPGKKVKHRIIEFEKLHVEKGVLEKRPTRTSIVNPPQKKIDDKAFSLKQRESRSSNLNANMYQAEKMSPNTESDSSNIAINLKLLSSQTHKEFDAQEREQQEKISLIDKPAISKRAEHESPITFDLKQFHTQIKHTDVKFQELDSGQPEEAYFKIQHPADTENIVFDLKQMYSHIGDPALEFQGQETREQQEIHYKEKIPSPETLQPDTHNISKSVQNNVFASQEISSSQELSNRTMVEKSSIDENSISLEKEVRHVQEQNLDILKTDLSLKSFSEEIYSESCALLPTSSADIEETDLSEKSCPLENGGRSSISHLKKAASEEKPLGVGEMEEECTLEPELAAFPKQDGGTQEYTDATLEDHRGDVQEADTLHRQLSLSQCFPLLMTEEQQNPGEQISTNIHASGEEKCYEEVQVQNEASFSTLEGEMIETSFSQNIPKLDEAHTTEAAESETSLTQYLLAAGKREVPETKDTRDQAKLVQSESITSMEVEEVTFNTVYEYYNQKQESLGRPLSPESDISIGVGSTTSEEISELDQFYTPPSSVEYFESPKSPDLYFNPSDITKQSSIHSGGETVERYSTPLGEVAERYSTPSEGEVGERYSTPPGETLERYSTPPGETLERYSTPPGETLERYSTPPGETLERYSTPPGETLERYSTPPGEALERYSIPTGGPNPTGTFKTYPSKIEREDGTPNEHFYTPTEERGSAYEIWRSDSFGTPNEAIEPKDNEMPPSFIEPLTKRKVYENTTLGFIVEVEGLPVPGVKWYRNKSLLEPDERIKMERVGNVCSLEISNIQKGEGGEYMCHAVNIIGEAKSFANVDIMPQEERVVALPPPVTHQHVMEFDLEHTTSSRTPSPQEIVLEVELSEKDVKEFEKQVKIVTVPEFTPDHKSMIVSLDVLPFNFVDPNMDSREGEDKELKIDLEVFEMPPRFIMPICDFKIPENSDAVFKCSVIGIPTPEVKWYKEYMCIEPDNIKYVISEEKGSHTLKIRNVCLSDSATYRCRAVNCVGEAICRGFLTMGDSEIFAVIAKKSKVTLSSLMEELVLKSNYTDSFFEFQVVEGPPRFIKGISDCYAPIGTAAYFQCLVRGSPRPTVYWYKDGKLVQGRRFTVEESGTGFHNLFITSLVKSDEGEYRCVATNKSGMAESFAALTLT

SEQ ID NO: 88979 - protein, 256 aa, Homo sapiens
  Payload ID: 17810
  Gene Name: titin
  ENSP ID: ENSP00000392336
  MOD_RES (1)..(1): Any amino acid
XEVVPEKKVPLVVPKKPEAPPAKVPEVPKEVVPEKKVAVPKKPEVPPAKVPEVPKKPVLEEKPAVPVPERAESPPPEVYEEPEEIAPEEEIAPEEEKPVPVAEEEEPEVPPPAVPEEPKKIIPEKKVPVIKKPEAPPPKEPEPEKVIEKPKLKPRPPPPPPAPPKEDVKEKIFQLKAIPKKKVPEKPQVPEKVELTPLKVPEPPPPKPVEEVEVPTVTKRERKIPEPTKVPEIKPAIPLPAPEPKPKPEAEVKTIK

SEQ ID NO: 88980 - protein, 48 aa, Homo sapiens
  Payload ID: 17810
  Gene Name: titin
  ENSP ID: ENSP00000394672
MTTQAPTFTQPLQSVVVLEGSTATFEAHISGFPVPEVSWFRDGQVIST

SEQ ID NO: 88981 - protein, 241 aa, Homo sapiens
  Payload ID: 17810
  Gene Name: titin
  ENSP ID: ENSP00000396805
  MOD_RES (1)..(1): Any amino acid
XRGIFPEVEPPEAIPEIPEHPPTEEFEVFKEVIPEGETPIVKRRKTPSPTAPEAMKEVVPEMKIFEDVPEEPETPRMKTPEAPQEIIPAKTVPSKKREPPSVKVPEALQEIVPEKKTLVVPLRKPEVLPDEVPEALREVVPEKKVHPPQRAEVVPVKVHEAPKEIIPEKKVSVVPPKKPEVPPVKVPEASKEVIREEKVPLAPPKEPEVPPVKVPEPPKEVVPEKKAPVAPPKEPEVPPVK

SEQ ID NO: 88982 - protein, 173 aa, Homo sapiens
  Payload ID: 17810
  Gene Name: titin
  ENSP ID: ENSP00000399176
  MOD_RES (1)..(1): Any amino acid
XPAKGRTVLEEKVSVAFRQEVVVKERLELEVVEAEVEEIPEEEEFHEVEEYFEEGEFHEVEEFIKLEQHRVEEEHRVEKVHRVIEVFEAEEVEVFEKPKAPPKGPEISEKIIPPKKPPTKVVPRKEPPAKVPEVPKKIVVEEKVRVPEEPRVPPTKAPEVPKKIVPEEKVREA

SEQ ID NO: 88983 - protein, 962 aa, Homo sapiens [sequence omitted]

SEQ ID NO: 88984 - protein, 213 aa, Homo sapiens [sequence omitted]

SEQ ID NO: 88985 - protein, 372 aa, Homo sapiens
  Payload ID: 17810
  Gene Name: titin
  ENSP ID: ENSP00000408004
VVPEKKVPLVVPKKPEAPPAKVPEVPKEVVPEKKVAVPKKPEVPPAKVPEVPKKPVLEEKPAVPVPERAESPPPEVYEEPEEIAPEEEIAPEEEKPVPVAEEEEPEVPPPAVPEEPKKIIPEKKVPVIKKPEAPPPKEPEMPKKVVPVKKVPTVKKPETPAAKVPEVPKKLVPVKKEPVPVTKKPEVLPEKVPKVPEKIIPEKEVSVPIPAEPEVPPAEVEETPEEIIYEEKASITIGRKETPPVEEREIEKYIKPEEPEPEPQPEEIPVKEPEPEKVIEKPKLKPRPPPPPPAPPKEDVKEKIFQLKAIPKKKVPEKPQVPEKVELTPLKVPEPPPPKPVEEVEVPTVTKRERKIPEPTKVPEIKPAIPLP

SEQ ID NO: 88986 - protein, 26926 aa, Homo sapiens
  Payload ID: 17810
  Gene Name: titin
  Uniprot ID: Q8WZ42
  ENSP ID: ENSP00000434586
MTTQAPTFTQPLQSVVVLEGSTATFEAHISGFPVPEVSWFRDGQVISTSTLPGVQISFSDGRAKLTIPAVTKANSGRYSLKATNGSGQATSTAELLVKAETAPPNFVQRLQSMTVRQGSQVRLQVRVTGIPTPVVKFYRDGAEIQSSLDFQISQEGDLYSLLIAEAYPEDSGTYSVNATNSVGRATSTAELLVQGEEEVPAKKTKTIVSTAQISESRQTRIEKKIEAHFDARSIATVEMVIDGAAGQQLPHKTPPRIPPKPKSRSPTPPSIAAKAQLARQQSPSPIRHSPSPVRHVRAPTPSPVRSVSPAARISTSPIRSVRSPLLMRKTQASTVATGPEVPPPWKQEGYVASSSEAEMRETTLTTSTQIRTEERWEGRYGVQEQVTISGAAGAAASVSASASYAAEAVATGAKEVKQDADKSAAVATVVAAVDMARVREPVISAVEQTAQRTTTTAVHIQPAQEQVRKEAEKTAVTKVVVAADKAKEQELKSRTKEVITTKQEQMHVTHEQIRKETEKTFVPKVVISAAKAKEQETRISEEITKKQKQVTQEAIMKETRKTVVPKVIVATPKVKEQDLVSRGREGITTKREQVQITQEKMRKEAEKTALSTIAVATAKAKEQETILRTRETMATRQEQIQVTHGKVDVGKKAEAVATVVAAVDQARVREPREPGHLEESYAQQTTLEYGYKERISAAKVAEPPQRPASEPHVVPKAVKPRVIQAPSETHIKTTDQKGMHISSQIKKTTDLTTERLVHVDKRPRTASPHFTVSKISVPKTEHGYEASIAGSAIATLQKELSATSSAQKITKSVKAPTVKPSETRVRAEPTPLPQFPFADTPDTYKSEAGVEVKKEVGVSITGTTVREERFEVLHGREAKVTETARVPAPVEIPVTPPTLVSGLKNVTVIEGESVTLECHISGYPSPTVTWYREDYQIESSIDFQITFQSGIARLMIREAFAEDSGRFTCSAVNEAGTVSTSCYLAVQVSEEFEKETTAVTEKFTTEEKRFVESRDVVMTDTSLTEEQAGPGEPAAPYFITKPVVQKLVEGGSVVFGCQVGGNPKPHVYWKKSGVPLTTGYRYKVSYNKQTGECKLVISMTFADDAGEYTIVVRNKHGETSASASLLEEADYELLMKSQQEMLYQTQVTAFVQEPKVGETAPGFVYSEYEKEYEKEQALIRKKMAKDTVVVRTYVEDQEFHISSFEERLIKEIEYRIIKTTLEELLEEDGEEKMAVDISESEAVESGFDSRIKNYRILEGMGVTFHCKMSGYPLPKIAWYKDGKRIKHGERYQMDFLQDGRASLRIPVVLPEDEGIYTAFASNIKGNAICSGKLYVEPAAPLGAPTYIPTLEPVSRIRSLSPRSVSRSPIRMSPARMSPARMSPARMSPARMSPGRRLEETDESQLERLYKPVFVLKPVSFKCLEGQTARFDLKVVGRPMPETFWFHDGQQIVNDYTHKVVIKEDGTQSLIIVPATPSDSGEWTVVAQNRAGRSSISVILTVEAVEHQVKPMFVEKLKNVNIKEGSRLEMKVRATGNPNPDIVWLKNSDIIVPHKYPKIRIEGTKGEAALKIDSTVSQDSAWYTATAINKAGRDTTRCKVNVEVEFAEPEPERKLIIPRGTYRAKEIAAPELEPLHLRYGQEQWEEGDLYDKEKQQKPFFKKKLTSLRLKRFGPAHFECRLTPIGDPTMVVEWLHDGKPLEAANRLRMINEFGYCSLDYGVAYSRDSGIITCRATNKYGTDHTSATLIVKDEKSLVEESQLPEGRKGLQRIEELERMAHEGALTGVTTDQKEKQKPDIVLYPEPVRVLEGETARFRCRVTGYPQPKVNWYLNGQLIRKSKRFRVRYDGIHYLDIVDCKSYDTGEVKVTAENPEGVIEHKVKLEIQQREDFRSVLRRAPEPRPEFHVHEPGKLQFEVQKVDRPVDTTETKEVVKLKRAERITHEKVPEESEELRSKFKRRTEEGYYEAITAVELKSRKKDESYEELLRKTKDELLHWTKELTEEEKKALAEEGKITIPTFKPDKIELSPSMEAPKIFERIQSQTVGQGSDAHFRVRVVGKPDPECEWYKNGVKIERSDRIYWYWPEDNVCELVIRDVTAEDSASIMVKAINIAGETSSHAFLLVQAKQLITFTQELQDVVAKEKDTMATFECETSEPFVKVKWYKDGMEVHEGDKYRMHSDRKVHFLSILTIDTSDAEDYSCVLVEDENVKTTAKLIVEGAVVEFVKELQDIEVPESYSGELECIVSPENIEGKWYHNDVELKSNGKYTITSRRGRQNLTVKDVTKEDQGEYSFVIDGKKTTCKLKMKPRPIAILQGLSDQKVCEGDIVQLEVKVSLESVEGVWMKDGQEVQPSDRVHIVIDKQSHMLLIEDMTKEDAGNYSFTIPALGLSTSGRVSVYSVDVITPLKDVNVIEGTKAVLECKVSVPDVTSVKWYLNDEQIKPDDRVQAIVKGTKQRLVINRTHASDEGPYKLIVGRVETNCNLSVEKIKIIRGLRDLTCTETQNVVFEVELSHSGIDVLWNFKDKEIKPSSKYKIEAHGKIYKLTVLNMMKDDEGKYTFYAGENMTSGKLTVAGGAISKPLTDQTVAESQEAVFECEVANPDSKGEWLRDGKHLPLTNNIRSESDGHKRRLIIAATKLDDIGEYTYKVATSKTSAKLKVEAVKIKKTLKNLTVTETQDAVFTVELTHPNVKGVQWIKNGVVLESNEKYAISVKGTIYSLRIKNCAIVDESVYGFRLGRLGASARLHVETVKIIKKPKDVTALENATVAFEVSVSHDTVPVKWFHKSVEIKPSDKHRLVSERKVHKLMLQNISPSDAGEYTAVVGQLECKAKLFVETLHITKTMKNIEVPETKTASFECEVSHFNVPSMWLKNGVEIEMSEKFKIVVQGKLHQLIIMNTSTEDSAEYTFVCGNDQVSATLTVTPIMITSMLKDINAEEKDTITFEVTVNYEGISYKWLKNGVEIKSTDKCQMRTKKLTHSLNIRNVHFGDAADYTFVAGKATSTATLYVEARHIEFRKHIKDIKVLEKKRAMFECEVSEPDITVQWMKDDQELQITDRIKIQKEKYVHRLLIPSTRMSDAGKYTVVAGGNVSTAKLFVEGRDVRIRSIKKEVQVIEKQRAVVEFEVNEDDVDAHWYKDGIEINFQVQERHKYVVERRIHRMFISETRQSDAGEYTFVAGRNRSSVTLYVNAPEPPQVLQELQPVTVQSGKPARFCAVISGRPQPKISWYKEEQLLSTGFKCKFLHDGQEYTLLLIEAFPEDAAVYTCEAKNDYGVATTSASLSVEVPEVVSPDQEMPVYPPAIITPLQDTVTSEGQPARFQCRVSGTDLKVSWYSKDKKIKPSRFFRMTQFEDTYQLEIAEAYPEDEGTYTFVASNAVGQVSSTANLSLEAPESILHERIEQEIEMEMKEFSSSFLSAEEEGLHSAELQLSKINETLELLSESPVYPTKFDSEKEGTGPIFIKEVSNADISMGDVATLSVTVIGIPKPKIQWFFNGVLLTPSADYKFVFDGDDHSLIILFTKLEDEGEYTCMASNDYGKTICSAYLKINSKGEGHKDTETESAVAKSLEKLGGPCPPHFLKELKPIRCAQGLPAIFEYTVVGEPAPTVTWFKENKQLCTSVYYTIIHNPNGSGTFIVNDPQREDSGLYICKAENMLGESTCAAELLVLLEDTDMTDTPCKAKSTPEAPEDFPQTPLKGPAVEALDSEQEIATFVKDTILKAALITEENQQLSYEHIAKANELSSQLPLGAQELQSILEQDKLTPESTREFLCINGSIHFQPLKEPSPNLQLQIVQSQKTFSKEGILMPEEPETQAVLSDTEKIFPSAMSIEQINSLTVEPLKTLLAEPEGNYPQSSIEPPMHSYLTSVAEEVLSPKEKTVSDTNREQRVTLQKQEAQSALILSQSLAEGHVESLQSPDVMISQVNYEPLVPSEHSCTEGGKILIESANPLENAGQDSAVRIEEGKSLRFPLALEEKQVLLKEEHSDNVVMPPDQIIESKREPVAIKKVQEVQGRDLLSKESLLSGIPEEQRLNLKIQICRALQAAVASEQPGLFSEWLRNIEKVEVEAVNITQEPRHIMCMYLVTSAKSVTEEVTIIIEDVDPQMANLKMELRDALCAIIYEEIDILTAEGPRIQQGAKTSLQEEMDSFSGSQKVEPITEPEVESKYLISTEEVSYFNVQSRVKYLDATPVTKGVASAVVSDEKQDESLKPSEEKEESSSESGTEEVATVKIQEAEGGLIKEDGPMIHTPLVDTVSEEGDIVHLTTSITNAKEVNWYFENKLVPSDEKFKCLQDQNTYTLVIDKVNTEDHQGEYVCEALNDSGKTATSAKLTVVKRAAPVIKRKIEPLEVALGHLAKFTCEIQSAPNVRFQWFKAGREIYESDKCSIRSSKYISSLEILRTQVVDCGEYTCKASNEYGSVSCTATLTVTVPGGEKKVRKLLPERKPEPKEEVVLKSVLRKRPEEEEPKVEPKKLEKVKKPAVPEPPPPKPVEEVEVPTVTKRERKIPEPTKVPEIKPAIPLPAPEPKPKPEAEVKTIKPPPVEPEPTPIAAPVTVPVVGKKAEAKAPKEEAAKPKGPIKGVPKKTPSPIEAERRKLRPGSGGEKPPDEAPFTYQLKAVPLKFVKEIKDIILTESEFVGSSAIFECLVSPSTAITTWMKDGSNIRESPKHRFIADGKDRKLHIIDVQLSDAGEYTCVLRLGNKEKTSTAKLVVEELPVRFVKTLEEEVTVVKGQPLYLSCELNKERDVVWRKDGKIVVEKPGRIVPGVIGLMRALTINDADDTDAGTYTVTVENANNLECSSCVKVVEVIRDWLVKPIRDQHVKPKGTAIFACDIAKDTPNIKWFKGYDEIPAEPNDKTEILRDGNHLYLKIKNAMPEDIAEYAVEIEGKRYPAKLTLGEREVELLKPIEDVTIYEKESASFDAEISEADIPGQWKLKGELLRPSPTCEIKAEGGKRFLTLHKVKLDQAGEVLYQALNAITTAILTVKEIELDFAVPLKDVTVPERRQARFECVLTREANVIWSKGPDIIKSSDKFDIIADGKKHILVINDSQFDDEGVYTAEVEGKKTSARLFVTGIRLKFMSPLEDQTVKEGETATFVCELSHEKMHVVWFKNDAKLHTSRTVLISSEGKTHKLEMKEVTLDDISQIKAQVKELSSTAQLKVLEADPYFTVKLHDKTAVEKDEITLKCEVSKDVPVKWFKDGEEIVPSPKYSIKADGLRRILKIKKADLKDKGEYVCDCGTDKTKANVTVEARLIKVEKPLYGVEVFVGETAHFEIELSEPDVHGQWKLKGQPLTASPDCEIIEDGKKHILILHNCQLGMTGEVSFQAANAKSAANLKVKELPLIFITPLSDVKVFEKDEAKFECEVSREPKTFRWLKGTQEITGDDRFELIKDGTKHSMVIKSAAFEDEAKYMFEAEDKHTSGKLIIEGIRLKFLTPLKDVTAKEKESAVFTVELSHDNIRVKWFKNDQRLHTTRSVSMQDEGKTHSITFKDLSIDDTSQIRVEAMGMSSEAKLTVLEGDPYFTGKLQDYTGVEKDEVILQCEISKADAPVKWFKDGKEIKPSKNAVIKADGKKRMLILKKALKSDIGQYTCDCGTDKTSGKLDIEDREIKLVRPLHSVEVMETETARFETEISEDDIHANWKLKGEALLQTPDCEIKEEGKIHSLVLHNCRLDQTGGVDFQAANVKSSAHLRVKPRVIGLLRPLKDVTVTAGETATFDCELSYEDIPVEWYLKGKKLEPSDKVVPRSEGKVHTLTLRDVKLEDAGEVQLTAKDFKTHANLFVKEPPVEFTKPLEDQTVEEGATAVLECEVSRENAKVKWFKNGTEILKSKKYEIVADGRVRKLVIHDCTPEDIKTYTCDAKDFKTSCNLNVVPPHVEFLRPLTDLQVREKEMARFECELSRENAKVKWFKDGAEIKKGKKYDIISKGAVRILVINKCLLDDEAEYSCEVRTARTSGMLTVLEEEAVFTKNLANIEVSETDTIKLVCEVSKPGAEVIWYKGDEEIIETGRYEILTEGRKRILVIQNAHLEDAGNYNCRLPSSRTDGKVKVHELAAEFISKPQNLEILEGEKAEFVCSISKESFPVQWKRDDKTLESGDKYDVIADGKKRVLVVKDATLQDMGTYVVMVGAARAAAHLTVIEKLRIVVPLKDTRVKEQQEVVFNCEVNTEGAKAKWFRNEEAIFDSSKYIILQKDLVYTLRIRDAHLDDQANYNVSLTNHRGENVKSAANLIVEEEDLRIVEPLKDIETMEKKSVTFWCKVNRLNVTLKWTKNGEEVPFDNRVSYRVDKYKHMLTIKDCGFPDEGEYIVTAGQDKSVAELLIIEAPTEFVEHLEDQTVTEFDDAVFSCQLSREKANVKWYRNGREIKEGKKYKFEKDGSIHRLIIKDCRLDDECEYACGVEDRKSRARLFVEEIPVEIIRPPQDILEAPGADVVFLAELNKDKVEVQWLRNNMVVVQGDKHQMMSEGKIHRLQICDIKPRDQGEYRFIAKDKEARAKLELAAAPKIKTADQDLVVDVGKPLTMVVPYDAYPKAEAEWFKENEPLSTKTIDTTAEQTSFRILEAKKGDKGRYKIVLQNKHGKAEGFINLKVIDVPGPVRNLEVTETFDGEVSLAWEEPLTDGGSKIIGYVVERRDIKRKTWVLATDRAESCEFTVTGLQKGGVEYLFRVSARNRVGTGEPVETDNPVEARSKYDVPGPPLNVTITDVNRFGVSLTWEPPEYDGGAEITNYVIELRDKTSIRWDTAMTVRAEDLSATVTDVVEGQEYSFRVRAQNRIGVGKPSAATPFVKVADPIERPSPPVNLTSSDQTQSSVQLKWEPPLKDGGSPILGYIIERCEEGKDNWIRCNMKLVPELTYKVTGLEKGNKYLYRVSAENKAGVSDPSEILGPLTADDAFVEPTMDLSAFKDGLEVIVPNPITILVPSTGYPRPTATWCFGDKVLETGDRVKMKTLSAYAELVISPSERSDKGIYTLKLENRVKTISGEIDVNVIARPSAPKELKFGDITKDSVHLTWEPPDDDGGSPLTGYVVEKREVSRKTWTKVMDFVTDLEFTVPDLVQGKEYLFKVCARNKCGPGEPAYVDEPVNMSTPATVPDPPENVKWRDRTANSIFLTWDPPKNDGGSRIKGYIVERCPRGSDKWVACGEPVAETKMEVTGLEEGKWYAYRVKALNRQGASKPSRPTEEIQAVDTQEAPEIFLDVKLLAGLTVKAGTKIELPATVTGKPEPKITWTKADMILKQDKRITIENVPKKSTVTIVDSKRSDTGTYIIEAVNVCGRATAVVEVNVLDKPGPPAAFDITDVTNESCLLTWNPPRDDGGSKITNYVVERRATDSEVWHKLSSTVKDTNFKATKLIPNKEYIFRVAAENMYGVGEPVQASPITAKYQFDPPGPPTRLEPSDITKDAVTLTWCEPDDDGGSPITGYWVERLDPDTDKWVRCNKMPVKDTTYRVKGLTNKKKYRFRVLAENLAGPGKPSKSTEPILIKDPIDPPWPPGKPTVKDVGKTSVRLNWTKPEHDGGAKIESYVIEMLKTGTDEWVRVAEGVPTTQHLLPGLMEGQEYSFRVRAVNKAGESEPSEPSDPVLCREKLYPPSPPRWLEVINITKNTADLKWTVPEKDGGSPITNYIVEKRDVRRKGWQTVDTTVKDTKCTVTPLTEGSLYVFRVAAENAIGQSDYTEIEDSVLAKDTFTTPGPPYALAVVDVTKRHVDLKWEPPKNDGGRPIQRYVIEKKERLGTRWVKAGKTAGPDCNFRVTDVIEGTEVQFQVRAENEAGVGHPSEPTEILSIEDPTSPPSPPLDLHVTDAGRKHIAIAWKPPEKNGGSPIIGYHVEMCPVGTEKWMRVNSRPIKDLKFKVEEGVVPDKEYVLRVRAVNAIGVSEPSEISENVVAKDPDCKPTIDLETHDIIVIEGEKLSIPVPFRAVPVPTVSWHKDGKEVKASDRLTMKNDHISAHLEVPKSVRADAGIYTITLENKLGSATASINVKVIGLPGPCKDIKASDITKSSCKLTWEPPEFDGGTPILHYVLERREAGRRTYIPVMSGENKLSWTVKDLIPNGEYFFRVKAVNKVGGGEYIELKNPVIAQDPKQPPDPPVDVEVHNPTAEAMTITWKPPLYDGGSKIMGYIIEKIAKGEERWKRCNEHLVPILTYTAKGLEEGKEYQFRVRAENAAGISEPSRATPPTKAVDPIDAPKVILRTSLEVKRGDEIALDASISGSPYPTITWIKDENVIVPEEIKKRAAPLVRRRKGEVQEEEPFVLPLTQRLSIDNSKKGESQLRVRDSLRPDHGLYMIKVENDHGIAKAPCTVSVLDTPGPPINFVFEDIRKTSVLCKWEPPLDDGGSEIINYTLEKKDKTKPDSEWIVVTSTLRHCKYSVTKLIEGKEYLFRVRAENRFGPGPPCVSKPLVAKDPFGPPDAPDKPIVEDVTSNSMLVKWNEPKDNGSPILGYWLEKREVNSTHWSRVNKSLLNALKANVDGLLEGLTYVFRVCAENAAGPGKFSPPSDPKTAHDPISPPGPPIPRVTDTSSTTIELEWEPPAFNGGGEIVGYFVDKQLVGTNEWSRCTEKMIKVRQYTVKEIREGADYKLRVSAVNAAGEGPPGETQPVTVAEPQEPPAVELDVSVKGGIQIMAGKTLRIPAVVTGRPVPTKVWTKEEGELDKDRVVIDNVGTKSELIIKDALRKDHGRYVITATNSCGSKFAAARVEVFDVPGPVLDLKPVVTNRKMCLLNWSDPEDDGGSEITGFIIERKDAKMHTWRQPIETERSKCDITGLLEGQEYKFRVIAKNKFGCGPPVEIGPILAVDPLGPPTSPERLTYTERTKSTITLDWKEPRSNGGSPIQGYIIEKRRHDKPDFERVNKRLCPTTSFLVENLDEHQMYEFRVKAVNEIGESEPSLPLNVVIQDDEVPPTIKLRLSVRGDTIKVKAGEPVHIPADVTGLPMPKIEWSKNETVIEKPTDALQITKEEVSRSEAKTELSIPKAVREDKGTYTVTASNRLGSVFRNVHVEVYDRPSPPRNLAVTDIKAESCYLTWDAPLDNGGSEITHYVIDKRDASRKKAEWEEVTNTAVEKRYGIWKLIPNGQYEFRVRAVNKYGISDECKSDKVVIQDPYRLPGPPGKPKVLARTKGSMLVSWTPPLDNGGSPITGYWLEKREEGSPYWSRVSRAPITKVGLKGVEFNVPRLLEGVKYQFRAMAINAAGIGPPSEPSDPEVAGDPIFPPGPPSCPEVKDKTKSSISLGWKPPAKDGGSPIKGYIVEMQEEGTTDWKRVNEPDKLITTCECVVPNLKELRKYRFRVKAVNEAGESEPSDTTGEIPATDIQEEPEVFIDIGAQDCLVCKAGSQIRIPAVIKGRPTPKSSWEFDGKAKKAMKDGVHDIPEDAQLETAENSSVIIIPECKRSHTGKYSITAKNKAGQKTANCRVKVMDVPGPPKDLKVSDITRGSCRLSWKMPDDDGGDRIKGYVIEKRTIDGKAWTKVNPDCGSTTFVVPDLLSEQQYFFRVRAENRFGIGPPVETIQRTTARDPIYPPDPPIKLKIGLITKNTVHLSWKPPKNDGGSPVTHYIVECLAWDPTGTKKEAWRQCNKRDVEELQFTVEDLVEGGEYEFRVKAVNAAGVSKPSATVGPVTVKDQTCPPSIDLKEFMEVEEGTNVNIVAKIKGVPFPTLTWFKAPPKKPDNKEPVLYDTHVNKLVVDDTCTLVIPQSRRSDTGLYTITAVNNLGTASKEMRLNVLGRPGPPVGPIKFESVSADQMTLSWFPPKDDGGSKITNYVIEKREANRKTWVHVSSEPKECTYTIPKLLEGHEYVFRIMAQNKYGIGEPLDSEPETARNLFSVPGAPDKPTVSSVTRNSMTVNWEEPEYDGGSPVTGYWLEMKDTTSKRWKRVNRDPIKAMTLGVSYKVTGLIEGSDYQFRVYAINAAGVGPASLPSDPATARDPIAPPGPPFPKVTDWTKSSADLEWSPPLKDGGSKVTGYIVEYKEEGKEEWEKGKDKEVRGTKLVVTGLKEGAFYKFRVRAVNIAGIGEPGEVTDVIEMKDRLVSPDLQLDASVRDRIVVHAGGVIRIIAYVSGKPPPTVTWNMNERTLPQEATIETTAISSSMVIKNCQRSHQGVYSLLAKNEAGERKKTIIVDVLDVPGPVGTPFLAHNLTNESCKLTWFSPEDDGGSPITNYVIEKRESDRRAWTPVTYTVTRQNATVQGLIQGKAYFFRIAAENSIGMGPFVETSEALVIREPITVPERPEDLEVKEVTKNTVTLTWNPPKYDGGSEIINYVLESRLIGTEKFHKVTNDNLLSRKYTVKGLKEGDTYEYRVSAVNIVGQGKPSFCTKPITCKDELAPPTLHLDFRDKLTIRVGEAFALTGRYSGKPKPKVSWFKDEADVLEDDRTHIKTTPATLALEKIKAKRSDSGKYCVVVENSTGSRKGFCQVNVVDRPGPPVGPVSFDEVTKDYMVISWKPPLDDGGSKITNYIIEKKEVGKDVWMPVTSASAKTTCKVSKLLEGKDYIFRIHAENLYGISDPLVSDSMKAKDRFRVPDAPDQPIVTEVTKDSALVTWNKPHDGGKPITNYILEKRETMSKRWARVTKDPIHPYTKFRVPDLLEGCQYEFRVSAENEIGIGDPSPPSKPVFAKDPIAKPSPPVNPEAIDTTCNSVDLTWQPPRHDGGSKILGYIVEYQKVGDEEWRRANHTPESCPETKYKVTGLRDGQTYKFRVLAVNAAGESDPAHVPEPVLVKDRLEPPELILDANMAREQHIKVGDTLRLSAIIKGVPFPKVTWKKEDRDAPTKARIDVTPVGSKLEIRNAAHEDGGIYSLTVENPAGSKTVSVKVLVLDKPGPPRDLEVSEIRKDSCYLTWKEPLDDGGSVITNYVVERRDVASAQWSPLSATSKKKSHFAKHLNEGNQYLFRVAAENQYGRGPFVETPKPIKALDPLHPPGPPKDLHHVDVDKTEVSLVWNKPDRDGGSPITGYLVEYQEEGTQDWIKFKTVTNLECVVTGLQQGKTYRFRVKAENIVGLGLPDTTIPIECQEKLVPPSVELDVKLIEGLVVKAGTTVRFPAIIRGVPVPTAKWTTDGSEIKTDEHYTVETDNFSSVLTIKNCLRRDTGEYQITVSNAAGSKTVAVHLTVLDVPGPPTGPINILDVTPEHMTISWQPPKDDGGSPVINYIVEKQDTRKDTWGVVSSGSSKTKLKIPHLQKGCEYVFRVRAENKIGVGPPLDSTPTVAKHKFSPPSPPGKPVVTDITENAATVSWTLPKSDGGSPITGYYMERREVTGKWVRVNKTPIADLKFRVTGLYEGNTYEFRVFAENLAGLSKPSPSSDPIKACRPIKPPGPPINPKLKDKSRETADLVWTKPLSDGGSPILGYVVECQKPGTAQWNRINKDELIRQCAFRVPGLIEGNEYRFRIKAANIVGEGEPRELAESVIAKDILHPPEVELDVTCRDVITVRVGQTIRILARVKGRPEPDITWTKEGKVLVREKRVDLIQDLPRVELQIKEAVRADHGKYIISAKNSSGHAQGSAIVNVLDRPGPCQNLKVTNVTKENCTISWENPLDNGGSEITNFIVEYRKPNQKGWSIVASDVTKRLIKANLLANNEYYFRVCAENKVGVGPTIETKTPILAINPIDRPGEPENLHIADKGKTFVYLKWRRPDYDGGSPNLSYHVERRLKGSDDWERVHKGSIKETHYMVDRCVENQIYEFRVQTKNEGGESDWVKTEEVVVKEDLQKPVLDLKLSGVLTVKAGDTIRLEAGVRGKPFPEVAWTKDKDATDLTRSPRVKIDTRADSSKFSLTKAKRSDGGKYVVTATNTAGSFVAYATVNVLDKPGPVRNLKIVDVSSDRCTVCWDPPEDDGGCEIQNYILEKCETKRMVWSTYSATVLTPGTTVTRLIEGNEYIFRVRAENKIGTGPPTESKPVIAKTKYDKPGRPDPPEVTKVSKEEMTVVWNPPEYDGGKSITGYFLEKKEKHSTRWVPVNKSAIPERRMKVQNLLPDHEYQFRVKAENEIGIGEPSLPSRPVVAKDPIEPPGPPTNFRVVDTTKHSITLGWGKPVYDGGAPIIGYVVEMRPKIADASPDEGWKRCNAAAQLVRKEFTVTSLDENQEYEFRVCAQNQVGIGRPAELKEAIKPKEILEPPEIDLDASMRKLVIVRAGCPIRLFAIVRGRPAPKVTWRKVGIDNVVRKGQVDLVDTMAFLVIPNSTRDDSGKYSLTLVNPAGEKAVFVNVRVLDTPGPVSDLKVSDVTKTSCHVSWAPPENDGGSQVTHYIVEKREADRKTWSTVTPEVKKTSFHVTNLVPGNEYYFRVTAVNEYGPGVPTDVPKPVLASDPLSEPDPPRKLEVTEMTKNSATLAWLPPLRDGGAKIDGYITSYREEEQPADRWTEYSVVKDLSLVVTGLKEGKKYKFRVAARNAVGVSLPREAEGVYEAKEQLLPPKILMPEQITIKAGKKLRIEAHVYGKPHPTCKWKKGEDEVVTSSHLAVHKADSSSILIIKDVTRKDSGYYSLTAENSSGTDTQKIKVVVMDAPGPPQPPFDISDIDADACSLSWHIPLEDGGSNITNYIVEKCDVSRGDWVTALASVTKTSCRVGKLIPGQEYIFRVRAENRFGISEPLTSPKMVAQFPFGVPSEPKNARVTKVNKDCIFVAWDRPDSDGGSPIIGYLIERKERNSLLWVKANDTLVRSTEYPCAGLVEGLEYSFRIYALNKAGSSPPSKPTEYVTARMPVDPPGKPEVIDVTKSTVSLIWARPKHDGGSKIIGYFVEACKLPGDKWVRCNTAPHQIPQEEYTATGLEEKAQYQFRAIARTAVNISPPSEPSDPVTILAENVPPRIDLSVAMKSLLTVKAGTNVCLDATVFGKPMPTVSWKKDGTLLKPAEGIKMAMQRNLCTLELFSVNRKDSGDYTITAENSSGSKSATIKLKVLDKPGPPASVKINKMYSDRAMLSWEPPLEDGGSEITNYIVDKRETSRPNWAQVSATVPITSCSVEKLIEGHEYQFRICAENKYGVGDPVFTEPAIAKNPYDPPGRCDPPVISNITKDHMTVSWKPPADDGGSPITGYLLEKRETQAVNWTKVNRKPIIERTLKATGLQEGTEYEFRVTAINKAGPGKPSDASKAAYARDPQYPPGPPAFPKVYDTTRSSVSLSWGKPAYDGGSPIIGYLVEVKRADSDNWVRCNLPQNLQKTRFEVTGLMEDTQYQFRVYAVNKIGYSDPSDVPDKHYPKDILIPPEGELDADLRKTLILRAGVTMRLYVPVKGRPPPKITWSKPNVNLRDRIGLDIKSTDFDTFLRCENVNKYDAGKYILTLENSCGKKEYTIVVKVLDTPGPPVNVTVKEISKDSAYVTWEPPIIDGGSPIINYVVQKRDAERKSWSTVTTECSKTSFRVANLEEGKSYFFRVFAENEYGIGDPGETRDAVKASQTPGPVVDLKVRSVSKSSCSIGWKKPHSDGGSRIIGYVVDFLTEENKWQRVMKSLSLQYSAKDLTEGKEYTFRVSAENENGEGTPSEITVVARDDVVAPDLDLKGLPDLCYLAKENSNFRLKIPIKGKPAPSVSWKKGEDPLATDTRVSVESSAVNTTLIVYDCQKSDAGKYTITLKNVAGTKEGTISIKVVGKPGIPTGPIKFDEVTAEAMTLKWAPPKDDGGSEITNYILEKRDSVNNKWVTCASAVQKTTFRVTRLHEGMEYTFRVSAENKYGVGEGLKSEPIVARHPFDVPDAPPPPNIVDVRHDSVSLTWTDPKKTGGSPITGYHLEFKERNSLLWKRANKTPIRMRDFKVTGLTEGLEYEFRVMAINLAGVGKPSLPSEPVVALDPIDPPGKPEVINITRNSVTLIWTEPKYDGGHKLTGYIVEKRDLPSKSWMKANHVNVPECAFTVTDLVEGGKYEFRIRAKNTAGAISAPSESTETIICKDEYEAPTIVLDPTIKDGLTIKAGDTIVLNAISILGKPLPKSSWSKAGKDIRPSDITQITSTPTSSMLTIKYATRKDAGEYTITATNPFGTKVEHVKVTVLDVPGPPGPVEISNVSAEKATLTWTPPLEDGGSPIKSYILEKRETSRLLWTVVSEDIQSCRHVATKLIQGNEYIFRVSAVNHYGKGEPVQSEPVKMVDRFGPPGPPEKPEVSNVTKNTATVSWKRPVDDGGSEITGYHVERREKKSLRWVRAIKTPVSDLRCKVTGLQEGSTYEFRVSAENRAGIGPPSEASDSVLMKDAAYPPGPPSNPHVTDTTKKSASLAWGKPHYDGGLEITGYVVEHQKVGDEAWIKDTTGTALRITQFVVPDLQTKEKYNFRISAINDAGVGEPAVIPDVEIVEREMAPDFELDAELRRTLVVRAGLSIRIFVPIKGRPAPEVTWTKDNINLKNRANIENTESFTLLIIPECNRYDTGKFVMTIENPAGKKSGFVNVRVLDTPGPVLNLRPTDITKDSVTLHWDLPLIDGGSRITNYIVEKREATRKSYSTATTKCHKCTYKVTGLSEGCEYFFRVMAENEYGIGEPTETTEPVKASEAPSPPDSLNIMDITKSTVSLAWPKPKHDGGSKITGYVIEAQRKGSDQWTHITTVKGLECVVRNLTEGEEYTFQVMAVNSAGRSAPRESRPVIVKEQTMLPELDLRGIYQKLVIAKAGDNIKVEIPVLGRPKPTVTWKKGDQILKQTQRVNFETTATSTILNINECVRSDSGPYPLTARNIVGEVGDVITIQVHDIPGPPTGPIKFDEVSSDFVTFSWDPPENDGGVPISNYVVEMRQTDSTTWVELATTVIRTTYKATRLTTGLEYQFRVKAQNRYGVGPGITSACIVANYPFKVPGPPGTPQVTAVTKDSMTISWHEPLSDGGSPILGYHVERKERNGILWQTVSKALVPGNIFKSSGLTDGIAYEFRVIAENMAGKSKPSKPSEPMLALDPIDPPGKPVPLNITRHTVTLKWAKPEYTGGFKITSYIVEKRDLPNGRWLKANFSNILENEFTVSGLTEDAAYEFRVIAKNAAGAISPPSEPSDAITCRDDVEAPKIKVDVKFKDTVILKAGEAFRLEADVSGRPPPTMEWSKDGKELEGTAKLEIKIADFSTNLVNKDSTRRDSGAYTLTATNPGGFAKHIFNVKVLDRPGPPEGPLAVTEVTSEKCVLSWFPPLDDGGAKIDHYIVQKRETSRLAWTNVASEVQVTKLKVTKLLKGNEYIFRVMAVNKYGVGEPLESEPVLAVNPYGPPDPPKNPEVTTITKDSMVVCWGHPDSDGGSEIINYIVERRDKAGQRWIKCNKKTLTDLRYKVSGLTEGHEYEFRIMAENAAGISAPSPTSPFYKACDTVFKPGPPGNPRVLDTSRSSISIAWNKPIYDGGSEITGYMVEIALPEEDEWQIVTPPAGLKATSYTITGLTENQEYKIRIYAMNSEGLGEPALVPGTPKAEDRMLPPEIELDADLRKVVTIRACCTLRLFVPIKGRPAPEVKWARDHGESLDKASIESTSSYTLLIVGNVNRFDSGKYILTVENSSGSKSAFVNVRVLDTPGPPQDLKVKEVTKTSVTLTWDPPLLDGGSKIKNYIVEKRESTRKAYSTVATNCHKTSWKVDQLQEGCSYYFRVLAENEYGIGLPAETAESVKASERPLPPGKITLMDVTRNSVSLSWEKPEHDGGSRILGYIVEMQTKGSDKWATCATVKVTEATITGLIQGEEYSFRVSAQNEKGISDPRQLSVPVIAKDLVIPPAFKLLFNTFTVLAGEDLKVDVPFIGRPTPAVTWHKDNVPLKQTTRVNAESTENNSLLTIKDACREDVGHYVVKLTNSAGEAIETLNVIVLDKPGPPTGPVKMDEVTADSITLSWGPPKYDGGSSINNYIVEKRDTSTTTWQIVSATVARTTIKACRLKTGCEYQFRIAAENRYGKSTYLNSEPTVAQYPFKVPGPPGTPVVTLSSRDSMEVQWNEPISDGGSRVIGYHLERKERNSILWVKLNKTPIPQTKFKTTGLEEGVEYEFRVSAENIVGIGKPSKVSECYVARDPCDPPGRPEAIIVTRNSVTLQWKKPTYDGGSKITGYIVEKKELPEGRWMKASFTNIIDTHFEVTGLVEDHRYEFRVIARNAAGVFSEPSESTGAITARDEVDPPRISMDPKYKDTIVVHAGESFKVDADIYGKPIPTIQWIKGDQELSNTARLEIKSTDFATSLSVKDAVRVDSGNYILKAKNVAGERSVTVNVKVLDRPGPPEGPVVISGVTAEKCTLAWKPPLQDGGSDIINYIVERRETSRLVWTVVDANVQTLSCKVTKLLEGNEYTFRIMAVNKYGVGEPLESEPVVAKNPFVVPDAPKAPEVTTVTKDSMIVVWERPASDGGSEILGYVLEKRDKEGIRWTRCHKRLIGELRLRVTGLIENHDYEFRVSAENAAGLSEPSPPSAYQKACDPIYKPGPPNNPKVIDITRSSVFLSWSKPIYDGGCEIQGYIVEKCDVSVGEWTMCTPPTGINKTNIEVEKLLEKHEYNFRICAINKAGVGEHADVPGPIIVEEKLEAPDIDLDLELRKIINIRAGGSLRLFVPIKGRPTPEVKWGKVDGEIRDAAIIDVTSSFTSLVLDNVNRYDSGKYTLTLENSSGTKSAFVTVRVLDTPSPPVNLKVTEITKDSVSITWEPPLLDGGSKIKNYIVEKREATRKSYAAVVTNCHKNSWKIDQLQEGCSYYFRVTAENEYGIGLPAQTADPIKVAEVPQPPGKITVDDVTRNSVSLSWTKPEHDGGSKIIQYIVEMQAKHSEKWSECARVKSLQAVITNLTQGEEYLFRVVAVNEKGRSDPRSLAVPIVAKDLVIEPDVKPAFSSYSVQVGQDLKIEVPISGRPKPTITWTKDGLPLKQTTRINVTDSLDLTTLSIKETHKDDGGQYGITVANVVGQKTASIEIVTLDKPDPPKGPVKFDDVSAESITLSWNPPLYTGGCQITNYIVQKRDTTTTVWDVVSATVARTTLKVTKLKTGTEYQFRIFAENRYGQSFALESDPIVAQYPYKEPGPPGTPFATAISKDSMVIQWHEPVNNGGSPVIGYHLERKERNSILWTKVNKTIIHDTQFKAQNLEEGIEYEFRVYAENIVGVGKASKNSECYVARDPCDPPGTPEPIMVKRNEITLQWTKPVYDGGSMITGYIVEKRDLPDGRWMKASFTNVIETQFTVSGLTEDQRYEFRVIAKNAAGAISKPSDSTGPITAKDEVELPRISMDPKFRDTIVVNAGETFRLEADVHGKPLPTIEWLRGDKEIEESARCEIKNTDFKALLIVKDAIRIDGGQYILRASNVAGSKSFPVNVKVLDRPGPPEGPVQVTGVTSEKCSLTWSPPLQDGGSDISHYVVEKRETSRLAWTVVASEVVTNSLKVTKLLEGNEYVFRIMAVNKYGVGEPLESAPVLMKNPFVLPGPPKSLEVTNIAKDSMTVCWNRPDSDGGSEIIGYIVEKRDRSGIRWIKCNKRRITDLRLRVTGLTEDHEYEFRVSAENAAGVGEPSPATVYYKACDPVFKPGPPTNAHIVDTTKNSITLAWGKPIYDGGSEILGYVVEICKADEEEWQIVTPQTGLRVTRFEISKLTEHQEYKIRVCALNKVGLGEATSVPGTVKPEDKLEAPELDLDSELRKGIVVRAGGSARIHIPFKGRPTPEITWSREEGEFTDKVQIEKGVNYTQLSIDNCDRNDAGKYILKLENSSGSKSAFVTVKVLDTPGPPQNLAVKEVRKDSAFLVWEPPIIDGGAKVKNYVIDKRESTRKAYANVSSKCSKTSFKVENLTEGAIYYFRVMAENEFGVGVPVETVDAVKAAEPPSPPGKVTLTDVSQTSASLMWEKPEHDGGSRVLGYVVEMQPKGTEKWSIVAESKVCNAVVTGLSSGQEYQFRVKAYNEKGKSDPRVLGVPVIAKDLTIQPSLKLPFNTYSIQAGEDLKIEIPVIGRPRPNISWVKDGEPLKQTTRVNVEETATSTVLHIKEGNKDDFGKYTVTATNSAGTATENLSVIVLEKPGPPVGPVRFDEVSADFVVISWEPPAYTGGCQISNYIVEKRDTTTTTWHMVSATVARTTIKITKLKTGTEYQFRIFAENRYGKSAPLDSKAVIVQYPFKEPGPPGTPFVTSISKDQMLVQWHEPVNDGGTKIIGYHLEQKEKNSILWVKLNKTPIQDTKFKTTGLDEGLEYEFKVSAENIVGIGKPSKVSECFVARDPCDPPGRPEAIVITRNNVTLKWKKPAYDGGSKITGYIVEKKDLPDGRWMKASFTNVLETEFTVSGLVEDQRYEFRVIARNAAGNFSEPSDSSGAITARDEIDAPNASLDPKYKDVIVVHAGETFVLEADIRGKPIPDVVWSKDGKELEETAARMEIKSTIQKTTLVVKDCIRTDGGQYILKLSNVGGTKSIPITVKVLDRPGPPEGPLKVTGVTAEKCYLAWNPPLQDGGANISHYIIEKRETSRLSWTQVSTEVQALNYKVTKLLPGNEYIFRVMAVNKYGIGEPLESGPVTACNPYKPPGPPSTPEVSAITKDSMVVTWARPVDDGGTEIEGYILEKRDKEGVRWTKCNKKTLTDLRLRVTGLTEGHSYEFRVAAENAAGVGEPSEPSVFYRACDALYPPGPPSNPKVTDTSRSSVSLAWSKPIYDGGAPVKGYVVEVKEAAADEWTTCTPPTGLQGKQFTVTKLKENTEYNFRICAINSEGVGEPATLPGSVVAQERIEPPEIELDADLRKVVVLRASATLRLFVTIKGRPEPEVKWEKAEGILTDRAQIEVTSSFTMLVIDNVTRFDSGRYNLTLENNSGSKTAFVNVRVLDSPSAPVNLTIREVKKDSVTLSWEPPLIDGGAKITNYIVEKRETTRKAYATITNNCTKTTFRIENLQEGCSYYFRVLASNEYGIGLPAETTEPVKVSEPPLPPGRVTLVDVTRNTATIKWEKPESDGGSKITGYVVEMQTKGSEKWSTCTQVKTLEATISGLTAGEEYVFRVAAVNEKGRSDPRQLGVPVIARDIEIKPSVELPFHTFNVKAREQLKIDVPFKGRPQATVNWRKDGQTLKETTRVNVSSSKTVTSLSIKEASKEDVGTYELCVSNSAGSITVPITIIVLDRPGPPGPIRIDEVSCDSITISWNPPEYDGGCQISNYIVEKKETTSTTWHIVSQAVARTSIKIVRLTTGSEYQFRVCAENRYGKSSYSESSAVVAEYPFSPPGPPGTPKVVHATKSTMLVTWQVPVNDGGSRVIGYHLEYKERSSILWSKANKILIADTQMKVSGLDEGLMYEYRVYAENIAGIGKCSKSCEPVPARDPCDPPGQPEVTNITRKSVSLKWSKPHYDGGAKITGYIVERRELPDGRWLKCNYTNIQETYFEVTELTEDQRYEFRVFARNAADSVSEPSESTGPIIVKDDVEPPRVMMDVKFRDVIVVKAGEVLKINADIAGRPLPVISWAKDGIEIEERARTEIISTDNHTLLTVKDCIRRDTGQYVLTLKNVAGTRSVAVNCKVLDKPGPPAGPLEINGLTAEKCSLSWGRPQEDGGADIDYYIVEKRETSHLAWTICEGELQMTSCKVTKLLKGNEYIFRVTGVNKYGVGEPLESVAIKALDPFTVPSPPTSLEITSVTKESMTLCWSRPESDGGSEISGYIIERREKNSLRWVRVNKKPVYDLRVKSTGLREGCEYEYRVYAENAAGLSLPSETSPLIRAEDPVFLPSPPSKPKIVDSGKTTITIAWVKPLFDGGAPITGYTVEYKKSDDTDWKTSIQSLRGTEYTISGLTTGAEYVFRVKSVNKVGASDPSDSSDPQIAKEREEEPLFDIDSEMRKTLIVKAGASFTMTVPFRGRPVPNVLWSKPDTDLRTRAYVDTTDSRTSLTIENANRNDSGKYTLTIQNVLSAASLTLVVKVLDTPGPPTNITVQDVTKESAVLSWDVPENDGGAPVKNYHIEKREASKKAWVSVTNNCNRLSYKVTNLQEGAIYYFRVSGENEFGVGIPAETKEGVKITEKPSPPEKLGVTSISKDSVSLTWLKPEHDGGSRIVHYVVEALEKGQKNWVKCAVAKSTHHVVSGLRENSEYFFRVFAENQAGLSDPRELLLPVLIKEQLEPPEIDMKNFPSHTVYVRAGSNLKVDIPISGKPLPKVTLSRDGVPLKATMRFNTEITAENLTINLKESVTADAGRYEITAANSSGTTKAFINIVVLDRPGPPTGPVVISDITEESVTLKWEPPKYDGGSQVTNYILLKRETSTAVWTEVSATVARTMMKVMKLTTGEEYQFRIKAENRFGISDHIDSACVTVKLPYTTPGPPSTPWVTNVTRESITVGWHEPVSNGGSAVVGYHLEMKDRNSILWQKANKLVIRTTHFKVTTISAGLIYEFRVYAENAAGVGKPSHPSEPVLAIDACEPPRNVRITDISKNSVSLSWQQPAFDGGSKITGYIVERRDLPDGRWTKASFTNVTETQFIISGLTQNSQYEFRVFARNAVGSISNPSEVVGPITCIDSYGGPVIDLPLEYTEVVKYRAGTSVKLRAGISGKPAPTIEWYKDDKELQTNALVCVENTTDLASILIKDADRLNSGCYELKLRNAMGSASATIRVQILDKPGPPGGPIEFKTVTAEKITLLWRPPADDGGAKITHYIVEKRETSRVVWSMVSEHLEECIITTTKIIKGNEYIFRVRAVNKYGIGEPLESDSVVAKNAFVTPGPPGIPEVTKITKNSMTVVWSRPIADGGSDISGYFLEKRDKKSLGWFKVLKETIRDTRQKVTGLTENSDYQYRVCAVNAAGQGPFSEPSEFYKAADPIDPPGPPAKIRIADSTKSSITLGWSKPVYDGGSAVTGYVVEIRQGEEEEWTTVSTKGEVRTTEYVVSNLKPGVNYYFRVSAVNCAGQGEPIEMNEPVQAKDILEAPEIDLDVALRTSVIAKAGEDVQVLIPFKGRPPPTVTWRKDEKNLGSDARYSIENTDSSSLLTIPQVTRNDTGKYILTIENGVGEPKSSTVSVKVLDTPAACQKLQVKHVSRGTVTLLWDPPLIDGGSPIINYVIEKRDATKRTWSVVSHKCSSTSFKLIDLSEKTPFFFRVLAENEIGIGEPCETTEPVKAAEVPAPIRDLSMKDSTKTSVILSWTKPDFDGGSVITEYVVERKGKGEQTWSHAGISKTCEIEVSQLKEQSVLEFRVFAKNEKGLSDPVTIGPITVKELIITPEVDLSDIPGAQVTVRIGHNVHLELPYKGKPKPSISWLKDGLPLKESEFVRFSKTENKITLSIKNAKKEHGGKYTVILDNAVCRIAVPITVITLGPPSKPKGPIRFDEIKADSVILSWDVPEDNGGGEITCYSIEKRETSQTNWKMVCSSVARTTFKVPNLVKDAEYQFRVRAENRYGVSQPLVSSIIVAKHQFRIPGPPGKPVIYNVTSDGMSLTWDAPVYDGGSEVTGFHVEKKERNSILWQKVNTSPISGREYRATGLVEGLDYQFRVYAENSAGLSSPSDPSKFTLAVSPVDPPGTPDYIDVTRETITLKWNPPLRDGGSKIVGYSIEKRQGNERWVRCNFTDVSECQYTVTGLSPGDRYEFRIIARNAVGTISPPSQSSGIIMTRDENVPPIVEFGPEYFDGLIIKSGESLRIKALVQGRPVPRVTWFKDGVEIEKRMNMEITDVLGSTSLFVRDATRDHRGVYTVEAKNASGSAKAEIKVKVQDTPGKVVGPIRFTNITGEKMTLWWDAPLNDGCAPITHYIIEKRETSRLAWALIEDKCEAQSYTAIKLINGNEYQFRVSAVNKFGVGRPLDSDPVVAQIQYTVPDAPGIPEPSNITGNSITLTWARPESDGGSEIQQYILERREKKSTRWVKVISKRPISETRFKVTGLTEGNEYEFHVMAENAAGVGPASGISRLIKCREPVNPPGPPTVVKVTDTSKTTVSLEWSKPVFDGGMEIIGYIIEMCKADLGDWHKVNAEACVKTRYTVTDLQAGEEYKFRVSAINGAGKGDSCEVTGTIKAVDRLTAPELDIDANFKQTHVVRAGASIRLFIAYQGRPTPTAVWSKPDSNLSLRADIHTTDSFSTLTVENCNRNDAGKYTLTVENNSGSKSITFTVKVLDTPGPPGPITFKDVTRGSATLMWDAPLLDGGARIHHYVVEKREASRRSWQVISEKCTRQIFKVNDLAEGVPYYFRVSAVNEYGVGEPYEMPEPIVATEQPAPPRRLDVVDTSKSSAVLAWLKPDHDGGSRITGYLLEMRQKGSDFWVEAGHTKQLTFTVERLVEKTEYEFRVKAKNDAGYSEPREAFSSVIIKEPQIEPTADLTGITNQLITCKAGSPFTIDVPISGRPAPKVTWKLEEMRLKETDRVSITTTKDRTTLTVKDSMRGDSGRYFLTLENTAGVKTFSVTVVVIGRPGPVTGPIEVSSVSAESCVLSWGEPKDGGGTEITNYIVEKRESGTTAWQLVNSSVKRTQIKVTHLTKYMEYSFRVSSENRFGVSKPLESAPIIAEHPFVPPSAPTRPEVYHVSANAMSIRWEEPYHDGGSKIIGYWVEKKERNTILWVKENKVPCLECNYKVTGLVEGLEYQFRTYALNAAGVSKASEASRPIMAQNPVDAPGRPEVTDVTRSTVSLIWSAPAYDGGSKVVGYIIERKPVSEVGDGRWLKCNYTIVSDNFFTVTALSEGDTYEFRVLAKNAAGVISKGSESTGPVTCRDEYAPPKAELDARLHGDLVTIRAGSDLVLDAAVGGKPEPKIIWTKGDKELDLCEKVSLQYTGKRATAVIKFCDRSDSGKYTLTVKNASGTKAVSVMVKVLDSPGPCGKLTVSRVTQEKCTLAWSLPQEDGGAEITHYIVERRETSRLNWVIVEGECPTLSYVVTRLIKNNEYIFRVRAVNKYGPGVPVESEPIVARNSFTIPSPPGIPEEVGTGKEHIIIQWTKPESDGGNEISNYLVDKREKKSLRWTRVNKDYVVYDTRLKVTSLMEGCDYQFRVTAVNAAGNSEPSEASNFISCREPSYTPGPPSAPRVVDTTKHSISLAWTKPMYDGGTDIVGYVLEMQEKDTDQWYRVHTNATIRNTEFTVPDLKMGQKYSFRVAAVNVKGMSEYSESIAEIEPVERIEIPDLELADDLKKTVTIRAGASLRLMVSVSGRPPPVITWSKQGIDLASRAIIDTTESYSLLIVDKVNRYDAGKYTIEAENQSGKKSATVLVKVYDTPGPCPSVKVKEVSRDSVTITWEIPTIDGGAPVNNYIVEKREAAMRAFKTVTTKCSKTLYRISGLVEGTMYYFRVLPENIYGIGEPCETSDAVLVSEVPLVPAKLEVVDVTKSTVTLAWEKPLYDGGSRLTGYVLEACKAGTERWMKVVTLKPTVLEHTVTSLNEGEQYLFRIRAQNEKGVSEPRETVTAVTVQDLRVLPTIDLSTMPQKTIHVPAGRPVELVIPIAGRPPPAASWFFAGSKLRESERVTVETHTKVAKLTIRETTIRDTGEYTLELKNVTGTTSETIKVIILDKPGPPTGPIKIDEIDATSITISWEPPELDGGAPLSGYVVEQRDAHRPGWLPVSESVTRSTFKFTRLTEGNEYVFRVAATNRFGIGSYLQSEVIECRSSIRIPGPPETLQIFDVSRDGMTLTWYPPEDDGGSQVTGYIVERKEVRADRWVRVNKVPVTMTRYRSTGLTEGLEYEHRVTAINARGSGKPSRPSKPIVAMDPIAPPGKPQNPRVTDTTRTSVSLAWSVPEDEGGSKVTGYLIEMQKVDQHEWTKCNTTPTKIREYTLTHLPQGAEYRFRVLACNAGGPGEPAEVPGTVKVTEMLEYPDYELDERYQEGIFVRQGGVIRLTIPIKGKPFPICKWTKEGQDISKRAMIATSETHTELVIKEADRGDSGTYDLVLENKCGKKAVYIKVRVIGSPNSPEGPLEYDDIQVRSVRVSWRPPADDGGADILGYILERREVPKAAWYTIDSRVRGTSLVVKGLKENVEYHFRVSAENQFGISKPLKSEEPVTPKTPLNPPEPPSNPPEVLDVTKSSVSLSWSRPKDDGGSRVTGYYIERKETSTDKWVRHNKTQITTTMYTVTGLVPDAEYQFRIIAQNDVGLSETSPASEPVVCKDPFDKPSQPGELEILSISKDSVTLQWEKPECDGGKEILGYWVEYRQSGDSAWKKSNKERIKDKQFTIGGLLEATEYEFRVFAENETGLSRPRRTAMSIKTKLTSGEAPGIRKEMKDVTTKLGEAAQLSCQIVGRPLPDIKWYRFGKELIQSRKYKMSSDGRTHTLTVMTEEQEDEGVYTCIATNEVGEVETSSKLLLQATPQFHPGYPLKEKYYGAVGSTLRLHVMYIGRPVPAMTWFHGQKLLQNSENITIENTEHYTHLVMKNVQRKTHAGKYKVQLSNVFGTVDAILDVEIQDKPDKPTGPIVIEALLKNSAVISWKPPADDGGSWITNYVVEKCEAKEGAEWQLVSSAISVTTCRIVNLTENAGYYFRVSAQNTFGISDPLEVSSVVIIKSPFEKPGAPGKPTITAVTKDSCVVAWKPPASDGGAKIRNYYLEKREKKQNKWISVTTEEIRETVFSVKNLIEGLEYEFRVKCENLGGESEWSEISEPITPKSDVPIQAPHFKEELRNLNVRYQSNATLVCKVTGHPKPIVKWYRQGKEIIADGLKYRIQEFKGGYHQLIIASVTDDDATVYQVRATNQGGSVSGTASLEVEVPAKIHLPKTLEGMGAVHALRGEVVSIKIPFSGKPDPVITWQKGQDLIDNNGHYQVIVTRSFTSLVFPNGVERKDAGFYVVCAKNRFGIDQKTVELDVADVPDPPRGVKVSDVSRDSVNLTWTEPASDGGSKITNYIVEKCATTAERWLRVGQARETRYTVINLFGKTSYQFRVIAENKFGLSKPSEPSEPTITKEDKTRAMNYDEEVDETREVSMTKASHSSTKELYEKYMIAEDLGRGEFGIVHRCVETSSKKTYMAKFVKVKGTDQVLVKKEISILNIARHRNILHLHESFESMEELVMIFEFISGLDIFERINTSAFELNEREIVSYVHQVCEALQFLHSHNIGHFDIRPENIIYQTRRSSTIKIIEFGQARQLKPGDNFRLLFTAPEYYAPEVHQHDVVSTATDMWSLGTLVYVLLSGINPFLAETNQQIIENIMNAEYTFDEEAFKEISIEAMDFVDRLLVKERKSRMTASEALQHPWLKQKIERVSTKVIRTLKHRRYYHTLIKKDLNMVVSAARISCGGAIRSQKGVSVAKVKVASIEIGPVSGQIMHAVGEEGGHVKYVCKIENYDQSTQVTWYFGVRQLENSEKYEITYEDGVAILYVKDITKLDDGTYRCKVVNDYGEDSSYAELFVKGVREVYDYYCRRTMKKIKRRTDTMRLLERPPEFTLPLYNKTAYVGENVRFGVTITVHPEPHVTWYKSGQKIKPGDNDKKYTFESDKGLYQLTINSVTTDDDAEYTVVARNKYGEDSCKAKLTVTLHPPPTDSTLRPMFKRLLANAECQEGQSVCFEIRVSGIPPPTLKWEKDGQPLSLGPNIEIIHEGLDYYALHIRDTLPEDTGYYRVTATNTAGSTSCQAHLQVERLRYKKQEFKSKEEHERHVQKQIDKTLRMAEILSGTESVPLTQVAKEALREAAVLYKPAVSTKTVKGEFRLEIEEKKEERKLRMPYDVPEPRKYKQTTIEEDQRIKQFVPMSDMKWYKKIRDQYEMPGKLDRVVQKRPKRIRLSRWEQFYVMPLPRITDQYRPKWRIPKLSQDDLEIVRPARRRTPSPDYDFYYRPRRRSLGDISDEELLLPIDDYLAMKRTEEERLRLEEELELGFSASPPSRSPPHFELSSLRYSSPQAHVKVEETRKDFRYSTYHIPTKAEASTSYAELRERHAQAAYRQPKQRQRIMAEREDEELLRPVTTTQHLSEYKSELDFMSKEEKSRKKSRRQREVTEITEIEEEYEISKHAQRESSSSASRLLRRRRSLSPTYIELMRPVSELIRSRPQPAEEYEDDTERRSPTPERTRPRSPSPVSSERSLSRFERSARFDIFSRYESMKAALKTQKTSERKYEVLSQQPFTLDHAPRITLRMRSHRVPCGQNTRFILNVQSKPTAEVKWYHNGVELQESSKIHYTNTSGVLTLEILDCHTDDSGTYRAVCTNYKGEASDYATLDVTGGDYTTYASQRRDEEVPRSVFPELTRTEAYAVSSFKKTSEMEASSSVREVKSQMTETRESLSSYEHSASAEMKSAALEEKSLEEKSTTRKIKTTLAARILTKPRSMTVYEGESARFSCDTDGEPVPTVTWLRKGQVLSTSARHQVTTTKYKSTFEISSVQASDEGNYSVVVENSEGKQEAEFTLTIQKARVTEKAVTSPPRVKSPEPRVKSPEAVKSPKRVKSPEPSHPKAVSPTETKPTPTEKVQHLPVSAPPKITQFLKAEASKEIAKLTCVVESSVLRAKEVTWYKDGKKLKENGHFQFHYSADGTYELKINNLTESDQGEYVCEISGEGGTSKTNLQFMGQAFKSIHEKVSKISETKKSDQKTTESTVTRKTEPKAPEPISSKPVIVTGLQDTTVSSDSVAKFAVKATGEPRPTAIWTKDGKAITQGGKYKLSEDKGGFFLEIHKTDTSDSGLYTCTVKNSAGSVSSSCKLTIKAIKDTEAQKVSTQKTSEITPQKKAVVQEEISQKALRSEEIKMSEAKSQEKLALKEEASKVLISEEVKKSAATSLEKSIVHEEITKTSQASEEVRTHAEIKAFSTQMSINEGQRLVLKANIAGATDVKWVLNGVELTNSEEYRYGVSGSDQTLTIKQASHRDEGILTCISKTKEGIVKCQYDLTLSKELSDAPAFISQPRSQNINEGQNVLFTCEISGEPSPEIEWFKNNLPISISSNVSISRSRNVYSLEIRNASVSDSGKYTIKAKNFRGQCSATASLMVLPLVEEPSREVVLRTSGDTSLQGSFSSQSVQMSASKQEASFSSFSSSSASSMTEMKFASMSAQSMSSMQESFVEMSSSSFMGISNMTQLESSTSKMLKAGIRGIPPKIEALPSDISIDEGKVLTVACAFTGEPTPEVTWSCGGRKIHSQEQGRFHIENTDDLTTLIIMDVQKQDGGLYTLSLGNEFGSDSATVNIHIRSI

SEQ ID NO: 88987 - protein, 32767 aa, Homo sapiens
  Payload ID: 17810
  Gene Name: titin
  Uniprot ID: Q8WZ42
  ENSP ID: ENSP00000465570
MTTQAPTFTQPLQSVVVLEGSTATFEAHISGFPVPEVSWFRDGQVISTSTLPGVQISFSDGRAKLTIPAVTKANSGRYSLKATNGSGQATSTAELLVKAETAPPNFVQRLQSMTVRQGSQVRLQVRVTGIPTPVVKFYRDGAEIQSSLDFQISQEGDLYSLLIAEAYPEDSGTYSVNATNSVGRATSTAELLVQGEEEVPAKKTKTIVSTAQISESRQTRIEKKIEAHFDARSIATVEMVIDGAAGQQLPHKTPPRIPPKPKSRSPTPPSIAAKAQLARQQSPSPIRHSPSPVRHVRAPTPSPVRSVSPAARISTSPIRSVRSPLLMRKTQASTVATGPEVPPPWKQEGYVASSSEAEMRETTLTTSTQIRTEERWEGRYGVQEQVTISGAAGAAASVSASASYAAEAVATGAKEVKQDADKSAAVATVVAAVDMARVREPVISAVEQTAQRTTTTAVHIQPAQEQVRKEAEKTAVTKVVVAADKAKEQELKSRTKEVITTKQEQMHVTHEQIRKETEKTFVPKVVISAAKAKEQETRISEEITKKQKQVTQEAIRQETEITAASMVVVATAKSTKLETVPGAQEETTTQQDQMHLSYEKIMKETRKTVVPKVIVATPKVKEQDLVSRGREGITTKREQVQITQEKMRKEAEKTALSTIAVATAKAKEQETILRTRETMATRQEQIQVTHGKVDVGKKAEAVATVVAAVDQARVREPREPGHLEESYAQQTTLEYGYKERISAAKVAEPPQRPASEPHVVPKAVKPRVIQAPSETHIKTTDQKGMHISSQIKKTTDLTTERLVHVDKRPRTASPHFTVSKISVPKTEHGYEASIAGSAIATLQKELSATSSAQKITKSVKAPTVKPSETRVRAEPTPLPQFPFADTPDTYKSEAGVEVKKEVGVSITGTTVREERFEVLHGREAKVTETARVPAPVEIPVTPPTLVSGLKNVTVIEGESVTLECHISGYPSPTVTWYREDYQIESSIDFQITFQSGIARLMIREAFAEDSGRFTCSAVNEAGTVSTSCYLAVQVSEEFEKETTAVTEKFTTEEKRFVESRDVVMTDTSLTEEQAGPGEPAAPYFITKPVVQKLVEGGSVVFGCQVGGNPKPHVYWKKSGVPLTTGYRYKVSYNKQTGECKLVISMTFADDAGEYTIVVRNKHGETSASASLLEEADYELLMKSQQEMLYQTQVTAFVQEPKVGETAPGFVYSEYEKEYEKEQALIRKKMAKDTVVVRTYVEDQEFHISSFEERLIKEIEYRIIKTTLEELLEEDGEEKMAVDISESEAVESGFDSRIKNYRILEGMGVTFHCKMSGYPLPKIAWYKDGKRIKHGERYQMDFLQDGRASLRIPVVLPEDEGIYTAFASNIKGNAICSGKLYVEPAAPLGAPTYIPTLEPVSRIRSLSPRSVSRSPIRMSPARMSPARMSPARMSPARMSPGRRLEETDESQLERLYKPVFVLKPVSFKCLEGQTARFDLKVVGRPMPETFWFHDGQQIVNDYTHKVVIKEDGTQSLIIVPATPSDSGEWTVVAQNRAGRSSISVILTVEAVEHQVKPMFVEKLKNVNIKEGSRLEMKVRATGNPNPDIVWLKNSDIIVPHKYPKIRIEGTKGEAALKIDSTVSQDSAWYTATAINKAGRDTTRCKVNVEVEFAEPEPERKLIIPRGTYRAKEIAAPELEPLHLRYGQEQWEEGDLYDKEKQQKPFFKKKLTSLRLKRFGPAHFECRLTPIGDPTMVVEWLHDGKPLEAANRLRMINEFGYCSLDYGVAYSRDSGIITCRATNKYGTDHTSATLIVKDEKSLVEESQLPEGRKGLQRIEELERMAHEGALTGVTTDQKEKQKPDIVLYPEPVRVLEGETARFRCRVTGYPQPKVNWYLNGQLIRKSKRFRVRYDGIHYLDIVDCKSYDTGEVKVTAENPEGVIEHKVKLEIQQREDFRSVLRRAPEPRPEFHVHEPGKLQFEVQKVDRPVDTTETKEVVKLKRAERITHEKVPEESEELRSKFKRRTEEGYYEAITAVELKSRKKDESYEELLRKTKDELLHWTKELTEEEKKALAEEGKITIPTFKPDKIELSPSMEAPKIFERIQSQTVGQGSDAHFRVRVVGKPDPECEWYKNGVKIERSDRIYWYWPEDNVCELVIRDVTAEDSASIMVKAINIAGETSSHAFLLVQAKQLITFTQELQDVVAKEKDTMATFECETSEPFVKVKWYKDGMEVHEGDKYRMHSDRKVHFLSILTIDTSDAEDYSCVLVEDENVKTTAKLIVEGAVVEFVKELQDIEVPESYSGELECIVSPENIEGKWYHNDVELKSNGKYTITSRRGRQNLTVKDVTKEDQGEYSFVIDGKKTTCKLKMKPRPIAILQGLSDQKVCEGDIVQLEVKVSLESVEGVWMKDGQEVQPSDRVHIVIDKQSHMLLIEDMTKEDAGNYSFTIPALGLSTSGRVSVYSVDVITPLKDVNVIEGTKAVLECKVSVPDVTSVKWYLNDEQIKPDDRVQAIVKGTKQRLVINRTHASDEGPYKLIVGRVETNCNLSVEKIKIIRGLRDLTCTETQNVVFEVELSHSGIDVLWNFKDKEIKPSSKYKIEAHGKIYKLTVLNMMKDDEGKYTFYAGENMTSGKLTVAGGAISKPLTDQTVAESQEAVFECEVANPDSKGEWLRDGKHLPLTNNIRSESDGHKRRLIIAATKLDDIGEYTYKVATSKTSAKLKVEAVKIKKTLKNLTVTETQDAVFTVELTHPNVKGVQWIKNGVVLESNEKYAISVKGTIYSLRIKNCAIVDESVYGFRLGRLGASARLHVETVKIIKKPKDVTALENATVAFEVSVSHDTVPVKWFHKSVEIKPSDKHRLVSERKVHKLMLQNISPSDAGEYTAVVGQLECKAKLFVETLHITKTMKNIEVPETKTASFECEVSHFNVPSMWLKNGVEIEMSEKFKIVVQGKLHQLIIMNTSTEDSAEYTFVCGNDQVSATLTVTPIMITSMLKDINAEEKDTITFEVTVNYEGISYKWLKNGVEIKSTDKCQMRTKKLTHSLNIRNVHFGDAADYTFVAGKATSTATLYVEARHIEFRKHIKDIKVLEKKRAMFECEVSEPDITVQWMKDDQELQITDRIKIQKEKYVHRLLIPSTRMSDAGKYTVVAGGNVSTAKLFVEGRDVRIRSIKKEVQVIEKQRAVVEFEVNEDDVDAHWYKDGIEINFQVQERHKYVVERRIHRMFISETRQSDAGEYTFVAGRNRSSVTLYVNAPEPPQVLQELQPVTVQSGKPARFCAVISGRPQPKISWYKEEQLLSTGFKCKFLHDGQEYTLLLIEAFPEDAAVYTCEAKNDYGVATTSASLSVEVPEVVSPDQEMPVYPPAIITPLQDTVTSEGQPARFQCRVSGTDLKVSWYSKDKKIKPSRFFRMTQFEDTYQLEIAEAYPEDEGTYTFVASNAVGQVSSTANLSLEAPESILHERIEQEIEMEMKEFSSSFLSAEEEGLHSAELQLSKINETLELLSESPVYPTKFDSEKEGTGPIFIKEVSNADISMGDVATLSVTVIGIPKPKIQWFFNGVLLTPSADYKFVFDGDDHSLIILFTKLEDEGEYTCMASNDYGKTICSAYLKINSKGEGHKDTETESAVAKSLEKLGGPCPPHFLKELKPIRCAQGLPAIFEYTVVGEPAPTVTWFKENKQLCTSVYYTIIHNPNGSGTFIVNDPQREDSGLYICKAENMLGESTCAAELLVLLEDTDMTDTPCKAKSTPEAPEDFPQTPLKGPAVEALDSEQEIATFVKDTILKAALITEENQQLSYEHIAKANELSSQLPLGAQELQSILEQDKLTPESTREFLCINGSIHFQPLKEPSPNLQLQIVQSQKTFSKEGILMPEEPETQAVLSDTEKIFPSAMSIEQINSLTVEPLKTLLAEPEGNYPQSSIEPPMHSYLTSVAEEVLSPKEKTVSDTNREQRVTLQKQEAQSALILSQSLAEGHVESLQSPDVMISQVNYEPLVPSEHSCTEGGKILIESANPLENAGQDSAVRIEEGKSLRFPLALEEKQVLLKEEHSDNVVMPPDQIIESKREPVAIKKVQEVQGRDLLSKESLLSGIPEEQRLNLKIQICRALQAAVASEQPGLFSEWLRNIEKVEVEAVNITQEPRHIMCMYLVTSAKSVTEEVTIIIEDVDPQMANLKMELRDALCAIIYEEIDILTAEGPRIQQGAKTSLQEEMDSFSGSQKVEPITEPEVESKYLISTEEVSYFNVQSRVKYLDATPVTKGVASAVVSDEKQDESLKPSEEKEESSSESGTEEVATVKIQEAEGGLIKEDGPMIHTPLVDTVSEEGDIVHLTTSITNAKEVNWYFENKLVPSDEKFKCLQDQNTYTLVIDKVNTEDHQGEYVCEALNDSGKTATSAKLTVVKRAAPVIKRKIEPLEVALGHLAKFTCEIQSAPNVRFQWFKAGREIYESDKCSIRSSKYISSLEILRTQVVDCGEYTCKASNEYGSVSCTATLTVTEAYPPTFLSRPKSLTTFVGKAAKFICTVTGTPVIETIWQKDGAALSPSPNWRISDAENKHILELSNLTIQDRGVYSCKASNKFGADICQAELIIIDKPHFIKELEPVQSAINKKVHLECQVDEDRKVTVTWSKDGQKLPPGKDYKICFEDKIATLEIPLAKLKDSGTYVCTASNEAGSSSCSATVTVREPPSFVKKVDPSYLMLPGESARLHCKLKGSPVIQVTWFKNNKELSESNTVRMYFVNSEAILDITDVKVEDSGSYSCEAVNDVGSDSCSTEIVIKEPPSFIKTLEPADIVRGTNALLQCEVSGTGPFEISWFKDKKQIRSSKKYRLFSQKSLVCLEIFSFNSADVGEYECVVANEVGKCGCMATHLLKEPPTFVKKVDDLIALGGQTVTLQAAVRGSEPISVTWMKGQEVIREDGKIKMSFSNGVAVLIIPDVQISFGGKYTCLAENEAGSQTSVGELIVKEPAKIIERAELIQVTAGDPATLEYTVAGTPELKPKWYKDGRPLVASKKYRISFKNNVAQLKFYSAELHDSGQYTFEISNEVGSSSCETTFTVLDRDIAPFFTKPLRNVDSVVNGTCRLDCKIAGSLPMRVSWFKDGKEIAASDRYRIAFVEGTASLEIIRVDMNDAGNFTCRATNSVGSKDSSGALIVQEPPSFVTKPGSKDVLPGSAVCLKSTFQGSTPLTIRWFKGNKELVSGGSCYITKEALESSLELYLVKTSDSGTYTCKVSNVAGGVECSANLFVKEPATFVEKLEPSQLLKKGDATQLACKVTGTPPIKITWFANDREIKESSKHRMSFVESTAVLRLTDVGIEDSGEYMCEAQNEAGSDHCSSIVIVKESPYFTKEFKPIEVLKEYDVMLLAEVAGTPPFEITWFKDNTILRSGRKYKTFIQDHLVSLQILKFVAADAGEYQCRVTNEVGSSICSARVTLREPPSFIKKIESTSSLRGGTAAFQATLKGSLPITVTWLKDSDEITEDDNIRMTFENNVASLYLSGIEVKHDGKYVCQAKNDAGIQRCSALLSVKEPATITEEAVSIDVTQGDPATLQVKFSGTKEITAKWFKDGQELTLGSKYKISVTDTVSILKIISTEKKDSGEYTFEVQNDVGRSSCKARINVLDLIIPPSFTKKLKKMDSIKGSFIDLECIVAGSHPISIQWFKDDQEISASEKYKFSFHDNTAFLEISQLEGTDSGTYTCSATNKAGHNQCSGHLTVKEPPYFVEKPQSQDVNPNTRVQLKALVGGTAPMTIKWFKDNKELHSGAARSVWKDDTSTSLELFAAKATDSGTYICQLSNDVGTATSKATLFVKEPPQFIKKPSPVLVLRNGQSTTFECQITGTPKIRVSWYLDGNEITAIQKHGISFIDGLATFQISGARVENSGTYVCEARNDAGTASCSIELKVKEPPTFIRELKPVEVVKYSDVELECEVTGTPPFEVTWLKNNREIRSSKKYTLTDRVSVFNLHITKCDPSDTGEYQCIVSNEGGSCSCSTRVALKEPPSFIKKIENTTTVLKSSATFQSTVAGSPPISITWLKDDQILDEDDNVYISFVDSVATLQIRSVDNGHSGRYTCQAKNESGVERCYAFLLVQEPAQIVEKAKSVDVTEKDPMTLECVVAGTPELKVKWLKDGKQIVPSRYFSMSFENNVASFRIQSVMKQDSGQYTFKVENDFGSSSCDAYLRVLDQNIPPSFTKKLTKMDKVLGSSIHMECKVSGSLPISAQWFKDGKEISTSAKYRLVCHERSVSLEVNNLELEDTANYTCKVSNVAGDDACSGILTVKEPPSFLVKPGRQQAIPDSTVEFKAILKGTPPFKIKWFKDDVELVSGPKCFIGLEGSTSFLNLYSVDASKTGQYTCHVTNDVGSDSCTTMLLVTEPPKFVKKLEASKIVKAGDSSRLECKIAGSPEIRVVWFRNEHELPASDKYRMTFIDSVAVIQMNNLSTEDSGDFICEAQNPAGSTSCSTKVIVKEPPVFSSFPPIVETLKNAEVSLECELSGTPPFEVVWYKDKRQLRSSKKYKIASKNFHTSIHILNVDTSDIGEYHCKAQNEVGSDTCVCTVKLKEPPRFVSKLNSLTVVAGEPAELQASIEGAQPIFVQWLKEKEEVIRESENIRITFVENVATLQFAKAEPANAGKYICQIKNDGGMRENMATLMVLEPAVIVEKAGPMTVTVGETCTLECKVAGTPELSVEWYKDGKLLTSSQKHKFSFYNKISSLRILSVERQDAGTYTFQVQNNVGKSSCTAVVDVSDRAVPPSFTRRLKNTGGVLGASCILECKVAGSSPISVAWFHEKTKIVSGAKYQTTFSDNVCTLQLNSLDSSDMGNYTCVAANVAGSDECRAVLTVQEPPSFVKEPEPLEVLPGKNVTFTSVIRGTPPFKVNWFRGARELVKGDRCNIYFEDTVAELELFNIDISQSGEYTCVVSNNAGQASCTTRLFVKEPAAFLKRLSDHSVEPGKSIILESTYTGTLPISVTWKKDGFNITTSEKCNIVTTEKTCILEILNSTKRDAGQYSCEIENEAGRDVCGALVSTLEPPYFVTELEPLEAAVGDSVSLQCQVAGTPEITVSWYKGDTKLRPTPEYRTYFTNNVATLVFNKVNINDSGEYTCKAENSIGTASSKTVFRIQERQLPPSFARQLKDIEQTVGLPVTLTCRLNGSAPIQVCWYRDGVLLRDDENLQTSFVDNVATLKILQTDLSHSGQYSCSASNPLGTASSSARLTAREPKKSPFFDIKPVSIDVIAGESADFECHVTGAQPMRITWSKDNKEIRPGGNYTITCVGNTPHLRILKVGKGDSGQYTCQATNDVGKDMCSAQLSVKEPPKFVKKLEASKVAKQGESIQLECKISGSPEIKVSWFRNDSELHESWKYNMSFINSVALLTINEASAEDSGDYICEAHNGVGDASCSTALTVKAPPVFTQKPSPVGALKGSDVILQCEISGTPPFEVVWVKDRKQVRNSKKFKITSKHFDTSLHILNLEASDVGEYHCKATNEVGSDTCSCSVKFKEPPRFVKKLSDTSTLIGDAVELRAIVEGFQPISVVWLKDRGEVIRESENTRISFIDNIATLQLGSPEASNSGKYICQIKNDAGMRECSAVLTVLEPARIIEKPEPMTVTTGNPFALECVVTGTPELSAKWFKDGRELSADSKHHITFINKVASLKIPCAEMSDKGLYSFEVKNSVGKSNCTVSVHVSDRIVPPSFIRKLKDVNAILGASVVLECRVSGSAPISVGWFQDGNEIVSGPKCQSSFSENVCTLNLSLLEPSDTGIYTCVAANVAGSDECSAVLTVQEPPSFEQTPDSVEVLPGMSLTFTSVIRGTPPFKVKWFKGSRELVPGESCNISLEDFVTELELFEVQPLESGDYSCLVTNDAGSASCTTHLFVKEPATFVKRLADFSVETGSPIVLEATYTGTPPISVSWIKDEYLISQSERCSITMTEKSTILEILESTIEDYAQYSCLIENEAGQDICEALVSVLEPPYFIEPLEHVEAVIGEPATLQCKVDGTPEIRISWYKEHTKLRSAPAYKMQFKNNVASLVINKVDHSDVGEYSCKADNSVGAVASSAVLVIKARKLPPFFARKLKDVHETLGFPVAFECRINGSEPLQVSWYKDGVLLKDDANLQTSFVHNVATLQILQTDQSHIGQYNCSASNPLGTASSSAKLILSEHEVPPFFDLKPVSVDLALGESGTFKCHVTGTAPIKITWAKDNREIRPGGNYKMTLVENTATLTVLKVGKGDAGQYTCYASNIAGKDSCSAQLGVQEPPRFIKKLEPSRIVKQDEFTRYECKIGGSPEIKVLWYKDETEIQESSKFRMSFVDSVAVLEMHNLSVEDSGDYTCEAHNAAGSASSSTSLKVKEPPIFRKKPHPIETLKGADVHLECELQGTPPFHVSWYKDKRELRSGKKYKIMSENFLTSIHILNVDAADIGEYQCKATNDVGSDTCVGSIALKAPPRFVKKLSDISTVVGKEVQLQTTIEGAEPISVVWFKDKGEIVRESDNIWISYSENIATLQFSRVEPANAGKYTCQIKNDAGMQECFATLSVLEPATIVEKPESIKVTTGDTCTLECTVAGTPELSTKWFKDGKELTSDNKYKISFFNKVSGLKIINVAPSDSGVYSFEVQNPVGKDSCTASLQVSDRTVPPSFTRKLKETNGLSGSSVVMECKVYGSPPISVSWFHEGNEISSGRKYQTTLTDNTCALTVNMLEESDSGDYTCIATNMAGSDECSAPLTVREPPSFVQKPDPMDVLTGTNVTFTSIVKGTPPFSVSWFKGSSELVPGDRCNVSLEDSVAELELFDVDTSQSGEYTCIVSNEAGKASCTTHLYIKAPAKFVKRLNDYSIEKGKPLILEGTFTGTPPISVTWKKNGINVTPSQRCNITTTEKSAILEIPSSTVEDAGQYNCYIENASGKDSCSAQILILEPPYFVKQLEPVKVSVGDSASLQCQLAGTPEIGVSWYKGDTKLRPTTTYKMHFRNNVATLVFNQVDINDSGEYICKAENSVGEVSASTFLTVQEQKLPPSFSRQLRDVQETVGLPVVFDCAISGSEPISVSWYKDGKPLKDSPNVQTSFLDNTATLNIFKTDRSLAGQYSCTATNPIGSASSSARLILTEGKNPPFFDIRLAPVDAVVGESADFECHVTGTQPIKVSWAKDSREIRSGGKYQISYLENSAHLTVLKVDKGDSGQYTCYAVNEVGKDSCTAQLNIKERLIPPSFTKRLSETVEETEGNSFKLEGRVAGSQPITVAWYKNNIEIQPTSNCEITFKNNTLVLQVRKAGMNDAGLYTCKVSNDAGSALCTSSIVIKEPKKPPVFDQHLTPVTVSEGEYVQLSCHVQGSEPIRIQWLKAGREIKPSDRCSFSFASGTAVLELRDVAKADSGDYVCKASNVAGSDTTKSKVTIKDKPAVAPATKKAAVDGRLFFVSEPQSIRVVEKTTATFIAKVGGDPIPNVKWTKGKWRQLNQGGRVFIHQKGDEAKLEIRDTTKTDSGLYRCVAFNEHGEIESNVNLQVDERKKQEKIEGDLRAMLKKTPILKKGAGEEEEIDIMELLKNVDPKEYEKYARMYGITDFRGLLQAFELLKQSQEEETHRLEIEEIERSERDEKEFEELVSFIQQRLSQTEPVTLIKDIENQTVLKDNDAVFEIDIKINYPEIKLSWYKGTEKLEPSDKFEISIDGDRHTLRVKNCQLKDQGNYRLVCGPHIASAKLTVIEPAWERHLQDVTLKEGQTCTMTCQFSVPNVKSEWFRNGRILKPQGRHKTEVEHKVHKLTIADVRAEDQGQYTCKYEDLETSAELRIEAEPIQFTKRIQNIVVSEHQSATFECEVSFDDAIVTWYKGPTELTESQKYNFRNDGRCHYMTIHNVTPDDEGVYSVIARLEPRGEARSTAELYLTTKEIKLELKPPDIPDSRVPIPTMPIRAVPPEEIPPVVAPPIPLLLPTPEEKKPPPKRIEVTKKAVKKDAKKVVAKPKEMTPREEIVKKPPPPTTLIPAKAPEIIDVSSKAEEVKIMTITRKKEVQKEKEAVYEKKQAVHKEKRVFIESFEEPYDELEVEPYTEPFEQPYYEEPDEDYEEIKVEAKKEVHEEWEEDFEEGQEYYEREEGYDEGEEEWEEAYQEREVIQVQKEVYEESHERKVPAKVPEKKAPPPPKVIKKPVIEKIEKTSRRMEEEKVQVTKVPEVSKKIVPQKPSRTPVQEEVIEVKVPAVHTKKMVISEEKMFFASHTEEEVSVTVPEVQKEIVTEEKIHVAISKRVEPPPKVPELPEKPAPEEVAPVPIPKKVEPPAPKVPEVPKKPVPEEKKPVPVPKKEPAAPPKVPEVPKKPVPEEKIPVPVAKKKEAPPAKVPEVQKGVVTEEKITIVTQREESPPPAVPEIPKKKVPEERKPVPRKEEEVPPPPKVPALPKKPVPEEKVAVPVPVAKKAPPPRAEVSKKTVVEEKRFVAEEKLSFAVPQRVEVTRHEVSAEEEWSYSEEEEGVSISVYREEEREEEEEAEVTEYEVMEEPEEYVVEEKLHIISKRVEAEPAEVTERQEKKIVLKPKIPAKIEEPPPAKVPEAPKKIVPEKKVPAPVPKKEKVPPPKVPEEPKKPVPEKKVPPKVIKMEEPLPAKVTERHMQITQEEKVLVAVTKKEAPPKARVPEEPKRAVPEEKVLKLKPKREEEPPAKVTEFRKRVVKEEKVSIEAPKREPQPIKEVTIMEEKERAYTLEEEAVSVQREEEYEEYEEYDYKEFEEYEPTEEYDQYEEYEEREYERYEEHEEYITEPEKPIPVKPVPEEPVPTKPKAPPAKVLKKAVPEEKVPVPIPKKLKPPPPKVPEEPKKVFEEKIRISITKREKEQVTEPAAKVPMKPKRVVAEEKVPVPRKEVAPPVRVPEVPKELEPEEVAFEEEVVTHVEEYLVEEEEEYIHEEEEFITEEEVVPVIPVKVPEVPRKPVPEEKKPVPVPKKKEAPPAKVPEVPKKPEEKVPVLIPKKEKPPPAKVPEVPKKPVPEEKVPVPVPKKVEAPPAKVPEVPKKPVPEKKVPVPAPKKVEAPPAKVPEVPKKLIPEEKKPTPVPKKVEAPPPKVPKKREPVPVPVALPQEEEVLFEEEIVPEEEVLPEEEEVLPEEEEVLPEEEEVLPEEEEIPPEEEEVPPEEEYVPEEEEFVPEEEVLPEVKPKVPVPAPVPEIKKKVTEKKVVIPKKEEAPPAKVPEVPKKVEEKRIILPKEEEVLPVEVTEEPEEEPISEEEIPEEPPSIEEVEEVAPPRVPEVIKKAVPEAPTPVPKKVEAPPAKVSKKIPEEKVPVPVQKKEAPPAKVPEVPKKVPEKKVLVPKKEAVPPAKGRTVLEEKVSVAFRQEVVVKERLELEVVEAEVEEIPEEEEFHEVEEYFEEGEFHEVEEFIKLEQHRVEEEHRVEKVHRVIEVFEAEEVEVFEKPKAPPKGPEISEKIIPPKKPPTKVVPRKEPPAKVPEVPKKIVVEEKVRVPEEPRVPPTKVPEVLPPKEVVPEKKVPVPPAKKPEAPPPKVPEAPKEVVPEKKVPVPPPKKPEVPPTKVPEVPKAAVPEKKVPEAIPPKPESPPPEVPEAPKEVVPEKKVPAAPPKKPEVTPVKVPEAPKEVVPEKKVPVPPPKKPEVPPTKVPEVPKVAVPEKKVPEAIPPKPESPPPEVFEEPEEVALEEPPAEVVEEPEPAAPPQVTVPPKKPVPEKKAPAVVAKKPELPPVKVPEVPKEVVPEKKVPLVVPKKPEAPPAKVPEVPKEVVPEKKVAVPKKPEVPPAKVPEVPKKPVLEEKPAVPVPERAESPPPEVYEEPEEIAPEEEIAPEEEKPVPVAEEEEPEVPPPAVPEEPKKIIPEKKVPVIKKPEAPPPKEPEPEKVIEKPKLKPRPPPPPPAPPKEDVKEKIFQLKAIPKKKVPEKPQVPEKVELTPLKVPGGEKKVRKLLPERKPEPKEEVVLKSVLRKRPEEEEPKVEPKKLEKVKKPAVPEPPPPKPVEEVEVPTVTKRERKIPEPTKVPEIKPAIPLPAPEPKPKPEAEVKTIKPPPVEPEPTPIAAPVTVPVVGKKAEAKAPKEEAAKPKGPIKGVPKKTPSPIEAERRKLRPGSGGEKPPDEAPFTYQLKAVPLKFVKEIKDIILTESEFVGSSAIFECLVSPSTAITTWMKDGSNIRESPKHRFIADGKDRKLHIIDVQLSDAGEYTCVLRLGNKEKTSTAKLVVEELPVRFVKTLEEEVTVVKGQPLYLSCELNKERDVVWRKDGKIVVEKPGRIVPGVIGLMRALTINDADDTDAGTYTVTVENANNLECSSCVKVVEVIRDWLVKPIRDQHVKPKGTAIFACDIAKDTPNIKWFKGYDEIPAEPNDKTEILRDGNHLYLKIKNAMPEDIAEYAVEIEGKRYPAKLTLGEREVELLKPIEDVTIYEKESASFDAEISEADIPGQWKLKGELLRPSPTCEIKAEGGKRFLTLHKVKLDQAGEVLYQALNAITTAILTVKEIELDFAVPLKDVTVPERRQARFECVLTREANVIWSKGPDIIKSSDKFDIIADGKKHILVINDSQFDDEGVYTAEVEGKKTSARLFVTGIRLKFMSPLEDQTVKEGETATFVCELSHEKMHVVWFKNDAKLHTSRTVLISSEGKTHKLEMKEVTLDDISQIKAQVKELSSTAQLKVLEADPYFTVKLHDKTAVEKDEITLKCEVSKDVPVKWFKDGEEIVPSPKYSIKADGLRRILKIKKADLKDKGEYVCDCGTDKTKANVTVEARLIKVEKPLYGVEVFVGETAHFEIELSEPDVHGQWKLKGQPLTASPDCEIIEDGKKHILILHNCQLGMTGEVSFQAANAKSAANLKVKELPLIFITPLSDVKVFEKDEAKFECEVSREPKTFRWLKGTQEITGDDRFELIKDGTKHSMVIKSAAFEDEAKYMFEAEDKHTSGKLIIEGIRLKFLTPLKDVTAKEKESAVFTVELSHDNIRVKWFKNDQRLHTTRSVSMQDEGKTHSITFKDLSIDDTSQIRVEAMGMSSEAKLTVLEGDPYFTGKLQDYTGVEKDEVILQCEISKADAPVKWFKDGKEIKPSKNAVIKADGKKRMLILKKALKSDIGQYTCDCGTDKTSGKLDIEDREIKLVRPLHSVEVMETETARFETEISEDDIHANWKLKGEALLQTPDCEIKEEGKIHSLVLHNCRLDQTGGVDFQAANVKSSAHLRVKPRVIGLLRPLKDVTVTAGETATFDCELSYEDIPVEWYLKGKKLEPSDKVVPRSEGKVHTLTLRDVKLEDAGEVQLTAKDFKTHANLFVKEPPVEFTKPLEDQTVEEGATAVLECEVSRENAKVKWFKNGTEILKSKKYEIVADGRVRKLVIHDCTPEDIKTYTCDAKDFKTSCNLNVVPPHVEFLRPLTDLQVREKEMARFECELSRENAKVKWFKDGAEIKKGKKYDIISKGAVRILVINKCLLDDEAEYSCEVRTARTSGMLTVLEEEAVFTKNLANIEVSETDTIKLVCEVSKPGAEVIWYKGDEEIIETGRYEILTEGRKRILVIQNAHLEDAGNYNCRLPSSRTDGKVKVHELAAEFISKPQNLEILEGEKAEFVCSISKESFPVQWKRDDKTLESGDKYDVIADGKKRVLVVKDATLQDMGTYVVMVGAARAAAHLTVIEKLRIVVPLKDTRVKEQQEVVFNCEVNTEGAKAKWFRNEEAIFDSSKYIILQKDLVYTLRIRDAHLDDQANYNVSLTNHRGENVKSAANLIVEEEDLRIVEPLKDIETMEKKSVTFWCKVNRLNVTLKWTKNGEEVPFDNRVSYRVDKYKHMLTIKDCGFPDEGEYIVTAGQDKSVAELLIIEAPTEFVEHLEDQTVTEFDDAVFSCQLSREKANVKWYRNGREIKEGKKYKFEKDGSIHRLIIKDCRLDDECEYACGVEDRKSRARLFVEEIPVEIIRPPQDILEAPGADVVFLAELNKDKVEVQWLRNNMVVVQGDKHQMMSEGKIHRLQICDIKPRDQGEYRFIAKDKEARAKLELAAAPKIKTADQDLVVDVGKPLTMVVPYDAYPKAEAEWFKENEPLSTKTIDTTAEQTSFRILEAKKGDKGRYKIVLQNKHGKAEGFINLKVIDVPGPVRNLEVTETFDGEVSLAWEEPLTDGGSKIIGYVVERRDIKRKTWVLATDRAESCEFTVTGLQKGGVEYLFRVSARNRVGTGEPVETDNPVEARSKYDVPGPPLNVTITDVNRFGVSLTWEPPEYDGGAEITNYVIELRDKTSIRWDTAMTVRAEDLSATVTDVVEGQEYSFRVRAQNRIGVGKPSAATPFVKVADPIERPSPPVNLTSSDQTQSSVQLKWEPPLKDGGSPILGYIIERCEEGKDNWIRCNMKLVPELTYKVTGLEKGNKYLYRVSAENKAGVSDPSEILGPLTADDAFVEPTMDLSAFKDGLEVIVPNPITILVPSTGYPRPTATWCFGDKVLETGDRVKMKTLSAYAELVISPSERSDKGIYTLKLENRVKTISGEIDVNVIARPSAPKELKFGDITKDSVHLTWEPPDDDGGSPLTGYVVEKREVSRKTWTKVMDFVTDLEFTVPDLVQGKEYLFKVCARNKCGPGEPAYVDEPVNMSTPATVPDPPENVKWRDRTANSIFLTWDPPKNDGGSRIKGYIVERCPRGSDKWVACGEPVAETKMEVTGLEEGKWYAYRVKALNRQGASKPSRPTEEIQAVDTQEAPEIFLDVKLLAGLTVKAGTKIELPATVTGKPEPKITWTKADMILKQDKRITIENVPKKSTVTIVDSKRSDTGTYIIEAVNVCGRATAVVEVNVLDKPGPPAAFDITDVTNESCLLTWNPPRDDGGSKITNYVVERRATDSEVWHKLSSTVKDTNFKATKLIPNKEYIFRVAAENMYGVGEPVQASPITAKYQFDPPGPPTRLEPSDITKDAVTLTWCEPDDDGGSPITGYWVERLDPDTDKWVRCNKMPVKDTTYRVKGLTNKKKYRFRVLAENLAGPGKPSKSTEPILIKDPIDPPWPPGKPTVKDVGKTSVRLNWTKPEHDGGAKIESYVIEMLKTGTDEWVRVAEGVPTTQHLLPGLMEGQEYSFRVRAVNKAGESEPSEPSDPVLCREKLYPPSPPRWLEVINITKNTADLKWTVPEKDGGSPITNYIVEKRDVRRKGWQTVDTTVKDTKCTVTPLTEGSLYVFRVAAENAIGQSDYTEIEDSVLAKDTFTTPGPPYALAVVDVTKRHVDLKWEPPKNDGGRPIQRYVIEKKERLGTRWVKAGKTAGPDCNFRVTDVIEGTEVQFQVRAENEAGVGHPSEPTEILSIEDPTSPPSPPLDLHVTDAGRKHIAIAWKPPEKNGGSPIIGYHVEMCPVGTEKWMRVNSRPIKDLKFKVEEGVVPDKEYVLRVRAVNAIGVSEPSEISENVVAKDPDCKPTIDLETHDIIVIEGEKLSIPVPFRAVPVPTVSWHKDGKEVKASDRLTMKNDHISAHLEVPKSVRADAGIYTITLENKLGSATASINVKVIGLPGPCKDIKASDITKSSCKLTWEPPEFDGGTPILHYVLERREAGRRTYIPVMSGENKLSWTVKDLIPNGEYFFRVKAVNKVGGGEYIELKNPVIAQDPKQPPDPPVDVEVHNPTAEAMTITWKPPLYDGGSKIMGYIIEKIAKGEERWKRCNEHLVPILTYTAKGLEEGKEYQFRVRAENAAGISEPSRATPPTKAVDPIDAPKVILRTSLEVKRGDEIALDASISGSPYPTITWIKDENVIVPEEIKKRAAPLVRRRKGEVQEEEPFVLPLTQRLSIDNSKKGESQLRVRDSLRPDHGLYMIKVENDHGIAKAPCTVSVLDTPGPPINFVFEDIRKTSVLCKWEPPLDDGGSEIINYTLEKKDKTKPDSEWIVVTSTLRHCKYSVTKLIEGKEYLFRVRAENRFGPGPPCVSKPLVAKDPFGPPDAPDKPIVEDVTSNSMLVKWNEPKDNGSPILGYWLEKREVNSTHWSRVNKSLLNALKANVDGLLEGLTYVFRVCAENAAGPGKFSPPSDPKTAHDPISPPGPPIPRVTDTSSTTIELEWEPPAFNGGGEIVGYFVDKQLVGTNEWSRCTEKMIKVRQYTVKEIREGADYKLRVSAVNAAGEGPPGETQPVTVAEPQEPPAVELDVSVKGGIQIMAGKTLRIPAVVTGRPVPTKVWTKEEGELDKDRVVIDNVGTKSELIIKDALRKDHGRYVITATNSCGSKFAAARVEVFDVPGPVLDLKPVVTNRKMCLLNWSDPEDDGGSEITGFIIERKDAKMHTWRQPIETERSKCDITGLLEGQEYKFRVIAKNKFGCGPPVEIGPILAVDPLGPPTSPERLTYTERTKSTITLDWKEPRSNGGSPIQGYIIEKRRHDKPDFERVNKRLCPTTSFLVENLDEHQMYEFRVKAVNEIGESEPSLPLNVVIQDDEVPPTIKLRLSVRGDTIKVKAGEPVHIPADVTGLPMPKIEWSKNETVIEKPTDALQITKEEVSRSEAKTELSIPKAVREDKGTYTVTASNRLGSVFRNVHVEVYDRPSPPRNLAVTDIKAESCYLTWDAPLDNGGSEITHYVIDKRDASRKKAEWEEVTNTAVEKRYGIWKLIPNGQYEFRVRAVNKYGISDECKSDKVVIQDPYRLPGPPGKPKVLARTKGSMLVSWTPPLDNGGSPITGYWLEKREEGSPYWSRVSRAPITKVGLKGVEFNVPRLLEGVKYQFRAMAINAAGIGPPSEPSDPEVAGDPIFPPGPPSCPEVKDKTKSSISLGWKPPAKDGGSPIKGYIVEMQEEGTTDWKRVNEPDKLITTCECVVPNLKELRKYRFRVKAVNEAGESEPSDTTGEIPATDIQEEPEVFIDIGAQDCLVCKAGSQIRIPAVIKGRPTPKSSWEFDGKAKKAMKDGVHDIPEDAQLETAENSSVIIIPECKRSHTGKYSITAKNKAGQKTANCRVKVMDVPGPPKDLKVSDITRGSCRLSWKMPDDDGGDRIKGYVIEKRTIDGKAWTKVNPDCGSTTFVVPDLLSEQQYFFRVRAENRFGIGPPVETIQRTTARDPIYPPDPPIKLKIGLITKNTVHLSWKPPKNDGGSPVTHYIVECLAWDPTGTKKEAWRQCNKRDVEELQFTVEDLVEGGEYEFRVKAVNAAGVSKPSATVGPVTVKDQTCPPSIDLKEFMEVEEGTNVNIVAKIKGVPFPTLTWFKAPPKKPDNKEPVLYDTHVNKLVVDDTCTLVIPQSRRSDTGLYTITAVNNLGTASKEMRLNVLGRPGPPVGPIKFESVSADQMTLSWFPPKDDGGSKITNYVIEKREANRKTWVHVSSEPKECTYTIPKLLEGHEYVFRIMAQNKYGIGEPLDSEPETARNLFSVPGAPDKPTVSSVTRNSMTVNWEEPEYDGGSPVTGYWLEMKDTTSKRWKRVNRDPIKAMTLGVSYKVTGLIEGSDYQFRVYAINAAGVGPASLPSDPATARDPIAPPGPPFPKVTDWTKSSADLEWSPPLKDGGSKVTGYIVEYKEEGKEEWEKGKDKEVRGTKLVVTGLKEGAFYKFRVRAVNIAGIGEPGEVTDVIEMKDRLVSPDLQLDASVRDRIVVHAGGVIRIIAYVSGKPPPTVTWNMNERTLPQEATIETTAISSSMVIKNCQRSHQGVYSLLAKNEAGERKKTIIVDVLDVPGPVGTPFLAHNLTNESCKLTWFSPEDDGGSPITNYVIEKRESDRRAWTPVTYTVTRQNATVQGLIQGKAYFFRIAAENSIGMGPFVETSEALVIREPITVPERPEDLEVKEVTKNTVTLTWNPPKYDGGSEIINYVLESRLIGTEKFHKVTNDNLLSRKYTVKGLKEGDTYEYRVSAVNIVGQGKPSFCTKPITCKDELAPPTLHLDFRDKLTIRVGEAFALTGRYSGKPKPKVSWFKDEADVLEDDRTHIKTTPATLALEKIKAKRSDSGKYCVVVENSTGSRKGFCQVNVVDRPGPPVGPVSFDEVTKDYMVISWKPPLDDGGSKITNYIIEKKEVGKDVWMPVTSASAKTTCKVSKLLEGKDYIFRIHAENLYGISDPLVSDSMKAKDRFRVPDAPDQPIVTEVTKDSALVTWNKPHDGGKPITNYILEKRETMSKRWARVTKDPIHPYTKFRVPDLLEGCQYEFRVSAENEIGIGDPSPPSKPVFAKDPIAKPSPPVNPEAIDTTCNSVDLTWQPPRHDGGSKILGYIVEYQKVGDEEWRRANHTPESCPETKYKVTGLRDGQTYKFRVLAVNAAGESDPAHVPEPVLVKDRLEPPELILDANMAREQHIKVGDTLRLSAIIKGVPFPKVTWKKEDRDAPTKARIDVTPVGSKLEIRNAAHEDGGIYSLTVENPAGSKTVSVKVLVLDKPGPPRDLEVSEIRKDSCYLTWKEPLDDGGSVITNYVVERRDVASAQWSPLSATSKKKSHFAKHLNEGNQYLFRVAAENQYGRGPFVETPKPIKALDPLHPPGPPKDLHHVDVDKTEVSLVWNKPDRDGGSPITGYLVEYQEEGTQDWIKFKTVTNLECVVTGLQQGKTYRFRVKAENIVGLGLPDTTIPIECQEKLVPPSVELDVKLIEGLVVKAGTTVRFPAIIRGVPVPTAKWTTDGSEIKTDEHYTVETDNFSSVLTIKNCLRRDTGEYQITVSNAAGSKTVAVHLTVLDVPGPPTGPINILDVTPEHMTISWQPPKDDGGSPVINYIVEKQDTRKDTWGVVSSGSSKTKLKIPHLQKGCEYVFRVRAENKIGVGPPLDSTPTVAKHKFSPPSPPGKPVVTDITENAATVSWTLPKSDGGSPITGYYMERREVTGKWVRVNKTPIADLKFRVTGLYEGNTYEFRVFAENLAGLSKPSPSSDPIKACRPIKPPGPPINPKLKDKSRETADLVWTKPLSDGGSPILGYVVECQKPGTAQWNRINKDELIRQCAFRVPGLIEGNEYRFRIKAANIVGEGEPRELAESVIAKDILHPPEVELDVTCRDVITVRVGQTIRILARVKGRPEPDITWTKEGKVLVREKRVDLIQDLPRVELQIKEAVRADHGKYIISAKNSSGHAQGSAIVNVLDRPGPCQNLKVTNVTKENCTISWENPLDNGGSEITNFIVEYRKPNQKGWSIVASDVTKRLIKANLLANNEYYFRVCAENKVGVGPTIETKTPILAINPIDRPGEPENLHIADKGKTFVYLKWRRPDYDGGSPNLSYHVERRLKGSDDWERVHKGSIKETHYMVDRCVENQIYEFRVQTKNEGGESDWVKTEEVVVKEDLQKPVLDLKLSGVLTVKAGDTIRLEAGVRGKPFPEVAWTKDKDATDLTRSPRVKIDTRADSSKFSLTKAKRSDGGKYVVTATNTAGSFVAYATVNVLDKPGPVRNLKIVDVSSDRCTVCWDPPEDDGGCEIQNYILEKCETKRMVWSTYSATVLTPGTTVTRLIEGNEYIFRVRAENKIGTGPPTESKPVIAKTKYDKPGRPDPPEVTKVSKEEMTVVWNPPEYDGGKSITGYFLEKKEKHSTRWVPVNKSAIPERRMKVQNLLPDHEYQFRVKAENEIGIGEPSLPSRPVVAKDPIEPPGPPTNFRVVDTTKHSITLGWGKPVYDGGAPIIGYVVEMRPKIADASPDEGWKRCNAAAQLVRKEFTVTSLDENQEYEFRVCAQNQVGIGRPAELKEAIKPKEILEPPEIDLDASMRKLVIVRAGCPIRLFAIVRGRPAPKVTWRKVGIDNVVRKGQVDLVDTMAFLVIPNSTRDDSGKYSLTLVNPAGEKAVFVNVRVLDTPGPVSDLKVSDVTKTSCHVSWAPPENDGGSQVTHYIVEKREADRKTWSTVTPEVKKTSFHVTNLVPGNEYYFRVTAVNEYGPGVPTDVPKPVLASDPLSEPDPPRKLEVTEMTKNSATLAWLPPLRDGGAKIDGYITSYREEEQPADRWTEYSVVKDLSLVVTGLKEGKKYKFRVAARNAVGVSLPREAEGVYEAKEQLLPPKILMPEQITIKAGKKLRIEAHVYGKPHPTCKWKKGEDEVVTSSHLAVHKADSSSILIIKDVTRKDSGYYSLTAENSSGTDTQKIKVVVMDAPGPPQPPFDISDIDADACSLSWHIPLEDGGSNITNYIVEKCDVSRGDWVTALASVTKTSCRVGKLIPGQEYIFRVRAENRFGISEPLTSPKMVAQFPFGVPSEPKNARVTKVNKDCIFVAWDRPDSDGGSPIIGYLIERKERNSLLWVKANDTLVRSTEYPCAGLVEGLEYSFRIYALNKAGSSPPSKPTEYVTARMPVDPPGKPEVIDVTKSTVSLIWARPKHDGGSKIIGYFVEACKLPGDKWVRCNTAPHQIPQEEYTATGLEEKAQYQFRAIARTAVNISPPSEPSDPVTILAENVPPRIDLSVAMKSLLTVKAGTNVCLDATVFGKPMPTVSWKKDGTLLKPAEGIKMAMQRNLCTLELFSVNRKDSGDYTITAENSSGSKSATIKLKVLDKPGPPASVKINKMYSDRAMLSWEPPLEDGGSEITNYIVDKRETSRPNWAQVSATVPITSCSVEKLIEGHEYQFRICAENKYGVGDPVFTEPAIAKNPYDPPGRCDPPVISNITKDHMTVSWKPPADDGGSPITGYLLEKRETQAVNWTKVNRKPIIERTLKATGLQEGTEYEFRVTAINKAGPGKPSDASKAAYARDPQYPPGPPAFPKVYDTTRSSVSLSWGKPAYDGGSPIIGYLVEVKRADSDNWVRCNLPQNLQKTRFEVTGLMEDTQYQFRVYAVNKIGYSDPSDVPDKHYPKDILIPPEGELDADLRKTLILRAGVTMRLYVPVKGRPPPKITWSKPNVNLRDRIGLDIKSTDFDTFLRCENVNKYDAGKYILTLENSCGKKEYTIVVKVLDTPGPPVNVTVKEISKDSAYVTWEPPIIDGGSPIINYVVQKRDAERKSWSTVTTECSKTSFRVANLEEGKSYFFRVFAENEYGIGDPGETRDAVKASQTPGPVVDLKVRSVSKSSCSIGWKKPHSDGGSRIIGYVVDFLTEENKWQRVMKSLSLQYSAKDLTEGKEYTFRVSAENENGEGTPSEITVVARDDVVAPDLDLKGLPDLCYLAKENSNFRLKIPIKGKPAPSVSWKKGEDPLATDTRVSVESSAVNTTLIVYDCQKSDAGKYTITLKNVAGTKEGTISIKVVGKPGIPTGPIKFDEVTAEAMTLKWAPPKDDGGSEITNYILEKRDSVNNKWVTCASAVQKTTFRVTRLHEGMEYTFRVSAENKYGVGEGLKSEPIVARHPFDVPDAPPPPNIVDVRHDSVSLTWTDPKKTGGSPITGYHLEFKERNSLLWKRANKTPIRMRDFKVTGLTEGLEYEFRVMAINLAGVGKPSLPSEPVVALDPIDPPGKPEVINITRNSVTLIWTEPKYDGGHKLTGYIVEKRDLPSKSWMKANHVNVPECAFTVTDLVEGGKYEFRIRAKNTAGAISAPSESTETIICKDEYEAPTIVLDPTIKDGLTIKAGDTIVLNAISILGKPLPKSSWSKAGKDIRPSDITQITSTPTSSMLTIKYATRKDAGEYTITATNPFGTKVEHVKVTVLDVPGPPGPVEISNVSAEKATLTWTPPLEDGGSPIKSYILEKRETSRLLWTVVSEDIQSCRHVATKLIQGNEYIFRVSAVNHYGKGEPVQSEPVKMVDRFGPPGPPEKPEVSNVTKNTATVSWKRPVDDGGSEITGYHVERREKKSLRWVRAIKTPVSDLRCKVTGLQEGSTYEFRVSAENRAGIGPPSEASDSVLMKDAAYPPGPPSNPHVTDTTKKSASLAWGKPHYDGGLEITGYVVEHQKVGDEAWIKDTTGTALRITQFVVPDLQTKEKYNFRISAINDAGVGEPAVIPDVEIVEREMAPDFELDAELRRTLVVRAGLSIRIFVPIKGRPAPEVTWTKDNINLKNRANIENTESFTLLIIPECNRYDTGKFVMTIENPAGKKSGFVNVRVLDTPGPVLNLRPTDITKDSVTLHWDLPLIDGGSRITNYIVEKREATRKSYSTATTKCHKCTYKVTGLSEGCEYFFRVMAENEYGIGEPTETTEPVKASEAPSPPDSLNIMDITKSTVSLAWPKPKHDGGSKITGYVIEAQRKGSDQWTHITTVKGLECVVRNLTEGEEYTFQVMAVNSAGRSAPRESRPVIVKEQTMLPELDLRGIYQKLVIAKAGDNIKVEIPVLGRPKPTVTWKKGDQILKQTQRVNFETTATSTILNINECVRSDSGPYPLTARNIVGEVGDVITIQVHDIPGPPTGPIKFDEVSSDFVTFSWDPPENDGGVPISNYVVEMRQTDSTTWVELATTVIRTTYKATRLTTGLEYQFRVKAQNRYGVGPGITSACIVANYPFKVPGPPGTPQVTAVTKDSMTISWHEPLSDGGSPILGYHVERKERNGILWQTVSKALVPGNIFKSSGLTDGIAYEFRVIAENMAGKSKPSKPSEPMLALDPIDPPGKPVPLNITRHTVTLKWAKPEYTGGFKITSYIVEKRDLPNGRWLKANFSNILENEFTVSGLTEDAAYEFRVIAKNAAGAISPPSEPSDAITCRDDVEAPKIKVDVKFKDTVILKAGEAFRLEADVSGRPPPTMEWSKDGKELEGTAKLEIKIADFSTNLVNKDSTRRDSGAYTLTATNPGGFAKHIFNVKVLDRPGPPEGPLAVTEVTSEKCVLSWFPPLDDGGAKIDHYIVQKRETSRLAWTNVASEVQVTKLKVTKLLKGNEYIFRVMAVNKYGVGEPLESEPVLAVNPYGPPDPPKNPEVTTITKDSMVVCWGHPDSDGGSEIINYIVERRDKAGQRWIKCNKKTLTDLRYKVSGLTEGHEYEFRIMAENAAGISAPSPTSPFYKACDTVFKPGPPGNPRVLDTSRSSISIAWNKPIYDGGSEITGYMVEIALPEEDEWQIVTPPAGLKATSYTITGLTENQEYKIRIYAMNSEGLGEPALVPGTPKAEDRMLPPEIELDADLRKVVTIRACCTLRLFVPIKGRPAPEVKWARDHGESLDKASIESTSSYTLLIVGNVNRFDSGKYILTVENSSGSKSAFVNVRVLDTPGPPQDLKVKEVTKTSVTLTWDPPLLDGGSKIKNYIVEKRESTRKAYSTVATNCHKTSWKVDQLQEGCSYYFRVLAENEYGIGLPAETAESVKASERPLPPGKITLMDVTRNSVSLSWEKPEHDGGSRILGYIVEMQTKGSDKWATCATVKVTEATITGLIQGEEYSFRVSAQNEKGISDPRQLSVPVIAKDLVIPPAFKLLFNTFTVLAGEDLKVDVPFIGRPTPAVTWHKDNVPLKQTTRVNAESTENNSLLTIKDACREDVGHYVVKLTNSAGEAIETLNVIVLDKPGPPTGPVKMDEVTADSITLSWGPPKYDGGSSINNYIVEKRDTSTTTWQIVSATVARTTIKACRLKTGCEYQFRIAAENRYGKSTYLNSEPTVAQYPFKVPGPPGTPVVTLSSRDSMEVQWNEPISDGGSRVIGYHLERKERNSILWVKLNKTPIPQTKFKTTGLEEGVEYEFRVSAENIVGIGKPSKVSECYVARDPCDPPGRPEAIIVTRNSVTLQWKKPTYDGGSKITGYIVEKKELPEGRWMKASFTNIIDTHFEVTGLVEDHRYEFRVIARNAAGVFSEPSESTGAITARDEVDPPRISMDPKYKDTIVVHAGESFKVDADIYGKPIPTIQWIKGDQELSNTARLEIKSTDFATSLSVKDAVRVDSGNYILKAKNVAGERSVTVNVKVLDRPGPPEGPVVISGVTAEKCTLAWKPPLQDGGSDIINYIVERRETSRLVWTVVDANVQTLSCKVTKLLEGNEYTFRIMAVNKYGVGEPLESEPVVAKNPFVVPDAPKAPEVTTVTKDSMIVVWERPASDGGSEILGYVLEKRDKEGIRWTRCHKRLIGELRLRVTGLIENHDYEFRVSAENAAGLSEPSPPSAYQKACDPIYKPGPPNNPKVIDITRSSVFLSWSKPIYDGGCEIQGYIVEKCDVSVGEWTMCTPPTGINKTNIEVEKLLEKHEYNFRICAINKAGVGEHADVPGPIIVEEKLEAPDIDLDLELRKIINIRAGGSLRLFVPIKGRPTPEVKWGKVDGEIRDAAIIDVTSSFTSLVLDNVNRYDSGKYTLTLENSSGTKSAFVTVRVLDTPSPPVNLKVTEITKDSVSITWEPPLLDGGSKIKNYIVEKREATRKSYAAVVTNCHKNSWKIDQLQEGCSYYFRVTAENEYGIGLPAQTADPIKVAEVPQPPGKITVDDVTRNSVSLSWTKPEHDGGSKIIQYIVEMQAKHSEKWSECARVKSLQAVITNLTQGEEYLFRVVAVNEKGRSDPRSLAVPIVAKDLVIEPDVKPAFSSYSVQVGQDLKIEVPISGRPKPTITWTKDGLPLKQTTRINVTDSLDLTTLSIKETHKDDGGQYGITVANVVGQKTASIEIVTLDKPDPPKGPVKFDDVSAESITLSWNPPLYTGGCQITNYIVQKRDTTTTVWDVVSATVARTTLKVTKLKTGTEYQFRIFAENRYGQSFALESDPIVAQYPYKEPGPPGTPFATAISKDSMVIQWHEPVNNGGSPVIGYHLERKERNSILWTKVNKTIIHDTQFKAQNLEEGIEYEFRVYAENIVGVGKASKNSECYVARDPCDPPGTPEPIMVKRNEITLQWTKPVYDGGSMITGYIVEKRDLPDGRWMKASFTNVIETQFTVSGLTEDQRYEFRVIAKNAAGAISKPSDSTGPITAKDEVELPRISMDPKFRDTIVVNAGETFRLEADVHGKPLPTIEWLRGDKEIEESARCEIKNTDFKALLIVKDAIRIDGGQYILRASNVAGSKSFPVNVKVLDRPGPPEGPVQVTGVTSEKCSLTWSPPLQDGGSDISHYVVEKRETSRLAWTVVASEVVTNSLKVTKLLEGNEYVFRIMAVNKYGVGEPLESAPVLMKNPFVLPGPPKSLEVTNIAKDSMTVCWNRPDSDGGSEIIGYIVEKRDRSGIRWIKCNKRRITDLRLRVTGLTEDHEYEFRVSAENAAGVGEPSPATVYYKACDPVFKPGPPTNAHIVDTTKNSITLAWGKPIYDGGSEILGYVVEICKADEEEWQIVTPQTGLRVTRFEISKLTEHQEYKIRVCALNKVGLGEATSVPGTVKPEDKLEAPELDLDSELRKGIVVRAGGSARIHIPFKGRPTPEITWSREEGEFTDKVQIEKGVNYTQLSIDNCDRNDAGKYILKLENSSGSKSAFVTVKVLDTPGPPQNLAVKEVRKDSAFLVWEPPIIDGGAKVKNYVIDKRESTRKAYANVSSKCSKTSFKVENLTEGAIYYFRVMAENEFGVGVPVETVDAVKAAEPPSPPGKVTLTDVSQTSASLMWEKPEHDGGSRVLGYVVEMQPKGTEKWSIVAESKVCNAVVTGLSSGQEYQFRVKAYNEKGKSDPRVLGVPVIAKDLTIQPSLKLPFNTYSIQAGEDLKIEIPVIGRPRPNISWVKDGEPLKQTTRVNVEETATSTVLHIKEGNKDDFGKYTVTATNSAGTATENLSVIVLEKPGPPVGPVRFDEVSADFVVISWEPPAYTGGCQISNYIVEKRDTTTTTWHMVSATVARTTIKITKLKTGTEYQFRIFAENRYGKSAPLDSKAVIVQYPFKEPGPPGTPFVTSISKDQMLVQWHEPVNDGGTKIIGYHLEQKEKNSILWVKLNKTPIQDTKFKTTGLDEGLEYEFKVSAENIVGIGKPSKVSECFVARDPCDPPGRPEAIVITRNNVTLKWKKPAYDGGSKITGYIVEKKDLPDGRWMKASFTNVLETEFTVSGLVEDQRYEFRVIARNAAGNFSEPSDSSGAITARDEIDAPNASLDPKYKDVIVVHAGETFVLEADIRGKPIPDVVWSKDGKELEETAARMEIKSTIQKTTLVVKDCIRTDGGQYILKLSNVGGTKSIPITVKVLDRPGPPEGPLKVTGVTAEKCYLAWNPPLQDGGANISHYIIEKRETSRLSWTQVSTEVQALNYKVTKLLPGNEYIFRVMAVNKYGIGEPLESGPVTACNPYKPPGPPSTPEVSAITKDSMVVTWARPVDDGGTEIEGYILEKRDKEGVRWTKCNKKTLTDLRLRVTGLTEGHSYEFRVAAENAAGVGEPSEPSVFYRACDALYPPGPPSNPKVTDTSRSSVSLAWSKPIYDGGAPVKGYVVEVKEAAADEWTTCTPPTGLQGKQFTVTKLKENTEYNFRICAINSEGVGEPATLPGSVVAQERIEPPEIELDADLRKVVVLRASATLRLFVTIKGRPEPEVKWEKAEGILTDRAQIEVTSSFTMLVIDNVTRFDSGRYNLTLENNSGSKTAFVNVRVLDSPSAPVNLTIREVKKDSVTLSWEPPLIDGGAKITNYIVEKRETTRKAYATITNNCTKTTFRIENLQEGCSYYFRVLASNEYGIGLPAETTEPVKVSEPPLPPGRVTLVDVTRNTATIKWEKPESDGGSKITGYVVEMQTKGSEKWSTCTQVKTLEATISGLTAGEEYVFRVAAVNEKGRSDPRQLGVPVIARDIEIKPSVELPFHTFNVKAREQLKIDVPFKGRPQATVNWRKDGQTLKETTRVNVSSSKTVTSLSIKEASKEDVGTYELCVSNSAGSITVPITIIVLDRPGPPGPIRIDEVSCDSITISWNPPEYDGGCQISNYIVEKKETTSTTWHIVSQAVARTSIKIVRLTTGSEYQFRVCAENRYGKSSYSESSAVVAEYPFSPPGPPGTPKVVHATKSTMLVTWQVPVNDGGSRVIGYHLEYKERSSILWSKANKILIADTQMKVSGLDEGLMYEYRVYAENIAGIGKCSKSCEPVPARDPCDPPGQPEVTNITRKSVSLKWSKPHYDGGAKITGYIVERRELPDGRWLKCNYTNIQETYFEVTELTEDQRYEFRVFARNAADSVSEPSESTGPIIVKDDVEPPRVMMDVKFRDVIVVKAGEVLKINADIAGRPLPVISWAKDGIEIEERARTEIISTDNHTLLTVKDCIRRDTGQYVLTLKNVAGTRSVAVNCKVLDKPGPPAGPLEINGLTAEKCSLSWGRPQEDGGADIDYYIVEKRETSHLAWTICEGELQMTSCKVTKLLKGNEYIFRVTGVNKYGVGEPLESVAIKALDPFTVPSPPTSLEITSVTKESMTLCWSRPESDGGSEISGYIIERREKNSLRWVRVNKKPVYDLRVKSTGLREGCEYEYRVYAENAAGLSLPSETSPLIRAEDPVFLPSPPSKPKIVDSGKTTITIAWVKPLFDGGAPITGYTVEYKKSDDTDWKTSIQSLRGTEYTISGLTTGAEYVFRVKSVNKVGASDPSDSSDPQIAKEREEEPLFDIDSEMRKTLIVKAGASFTMTVPFRGRPVPNVLWSKPDTDLRTRAYVDTTDSRTSLTIENANRNDSGKYTLTIQNVLSAASLTLVVKVLDTPGPPTNITVQDVTKESAVLSWDVPENDGGAPVKNYHIEKREASKKAWVSVTNNCNRLSYKVTNLQEGAIYYFRVSGENEFGVGIPAETKEGVKITEKPSPPEKLGVTSISKDSVSLTWLKPEHDGGSRIVHYVVEALEKGQKNWVKCAVAKSTHHVVSGLRENSEYFFRVFAENQAGLSDPRELLLPVLIKEQLEPPEIDMKNFPSHTVYVRAGSNLKVDIPISGKPLPKVTLSRDGVPLKATMRFNTEITAENLTINLKESVTADAGRYEITAANSSGTTKAFINIVVLDRPGPPTGPVVISDITEESVTLKWEPPKYDGGSQVTNYILLKRETSTAVWTEVSATVARTMMKVMKLTTGEEYQFRIKAENRFGISDHIDSACVTVKLPYTTPGPPSTPWVTNVTRESITVGWHEPVSNGGSAVVGYHLEMKDRNSILWQKANKLVIRTTHFKVTTISAGLIYEFRVYAENAAGVGKPSHPSEPVLAIDACEPPRNVRITDISKNSVSLSWQQPAFDGGSKITGYIVERRDLPDGRWTKASFTNVTETQFIISGLTQNSQYEFRVFARNAVGSISNPSEVVGPITCIDSYGGPVIDLPLEYTEVVKYRAGTSVKLRAGISGKPAPTIEWYKDDKELQTNALVCVENTTDLASILIKDADRLNSGCYELKLRNAMGSASATIRVQILDKPGPPGGPIEFKTVTAEKITLLWRPPADDGGAKITHYIVEKRETSRVVWSMVSEHLEECIITTTKIIKGNEYIFRVRAVNKYGIGEPLESDSVVAKNAFVTPGPPGIPEVTKITKNSMTVVWSRPIADGGSDISGYFLEKRDKKSLGWFKVLKETIRDTRQKVTGLTENSDYQYRVCAVNAAGQGPFSEPSEFYKAADPIDPPGPPAKIRIADSTKSSITLGWSKPVYDGGSAVTGYVVEIRQGEEEEWTTVSTKGEVRTTEYVVSNLKPGVNYYFRVSAVNCAGQGEPIEMNEPVQAKDILEAPEIDLDVALRTSVIAKAGEDVQVLIPFKGRPPPTVTWRKDEKNLGSDARYSIENTDSSSLLTIPQVTRNDTGKYILTIENGVGEPKSSTVSVKVLDTPAACQKLQVKHVSRGTVTLLWDPPLIDGGSPIINYVIEKRDATKRTWSVVSHKCSSTSFKLIDLSEKTPFFFRVLAENEIGIGEPCETTEPVKAAEVPAPIRDLSMKDSTKTSVILSWTKPDFDGGSVITEYVVERKGKGEQTWSHAGISKTCEIEVSQLKEQSVLEFRVFAKNEKGLSDPVTIGPITVKELIITPEVDLSDIPGAQVTVRIGHNVHLELPYKGKPKPSISWLKDGLPLKESEFVRFSKTENKITLSIKNAKKEHGGKYTVILDNAVCRIAVPITVITLGPPSKPKGPIRFDEIKADSVILSWDVPEDNGGGEITCYSIEKRETSQTNWKMVCSSVARTTFKVPNLVKDAEYQFRVRAENRYGVSQPLVSSIIVAKHQFRIPGPPGKPVIYNVTSDGMSLTWDAPVYDGGSEVTGFHVEKKERNSILWQKVNTSPISGREYRATGLVEGLDYQFRVYAENSAGLSSPSDPSKFTLAVSPVDPPGTPDYIDVTRETITLKWNPPLRDGGSKIVGYSIEKRQGNERWVRCNFTDVSECQYTVTGLSPGDRYEFRIIARNAVGTISPPSQSSGIIMTRDENVPPIVEFGPEYFDGLIIKSGESLRIKALVQGRPVPRVTWFKDGVEIEKRMNMEITDVLGSTSLFVRDATRDHRGVYTVEAKNASGSAKAEIKVKVQDTPGKVVGPIRFTNITGEKMTLWWDAPLNDGCAPITHYIIEKRETSRLAWALIEDKCEAQSYTAIKLINGNEYQFRVSAVNKFGVGRPLDSDPVVAQIQYTVPDAPGIPEPSNITGNSITLTWARPESDGGSEIQQYILERREKKSTRWVKVISKRPISETRFKVTGLTEGNEYEFHVMAENAAGVGPASGISRLIKCREPVNPPGPPTVVKVTDTSKTTVSLEWSKPVFDGGMEIIGYIIEMCKADLGDWHKVNAEACVKTRYTVTDLQAGEEYKFRVSAINGAGKGDSCEVTGTIKAVDRLTAPELDIDANFKQTHVVRAGASIRLFIAYQGRPTPTAVWSKPDSNLSLRADIHTTDSFSTLTVENCNRNDAGKYTLTVENNSGSKSITFTVKVLDTPGPPGPITFKDVTRGSATLMWDAPLLDGGARIHHYVVEKREASRRSWQVISEKCTRQIFKVNDLAEGVPYYFRVSAVNEYGVGEPYEMPEPIVATEQPAPPRRLDVVDTSKSSAVLAWLKPDHDGGSRITGYLLEMRQKGSDFWVEAGHTKQLTFTVERLVEKTEYEFRVKAKNDAGYSEPREAFSSVIIKEPQIEPTADLTGITNQLITCKAGSPFTIDVPISGRPAPKVTWKLEEMRLKETDRVSITTTKDRTTLTVKDSMRGDSGRYFLTLENTAGVKTFSVTVVVIGRPGPVTGPIEVSSVSAESCVLSWGEPKDGGGTEITNYIVEKRESGTTAWQLVNSSVKRTQIKVTHLTKYMEYSFRVSSENRFGVSKPLESAPIIAEHPFVPPSAPTRPEVYHVSANAMSIRWEEPYHDGGSKIIGYWVEKKERNTILWVKENKVPCLECNYKVTGLVEGLEYQFRTYALNAAGVSKASEASRPIMAQNPVDAPGRPEVTDVTRSTVSLIWSAPAYDGGSKVVGYIIERKPVSEVGDGRWLKCNYTIVSDNFFTVTALSEGDTYEFRVLAKNAAGVISKGSESTGPVTCRDEYAPPKAELDARLHGDLVTIRAGSDLVLDAAVGGKPEPKIIWTKGDKELDLCEKVSLQYTGKRATAVIKFCDRSDSGKYTLTVKNASGTKAVSVMVKVLDSPGPCGKLTVSRVTQEKCTLAWSLPQEDGGAEITHYIVERRETSRLNWVIVEGECPTLSYVVTRLIKNNEYIFRVRAVNKYGPGVPVESEPIVARNSFTIPSPPGIPEEVGTGKEHIIIQWTKPESDGGNEISNYLVDKREKKSLRWTRVNKDYVVYDTRLKVTSLMEGCDYQFRVTAVNAAGNSEPSEASNFISCREPSYTPGPPSAPRVVDTTKHSISLAWTKPMYDGGTDIVGYVLEMQEKDTDQWYRVHTNATIRNTEFTVPDLKMGQKYSFRVAAVNVKGMSEYSESIAEIEPVERIEIPDLELADDLKKTVTIRAGASLRLMVSVSGRPPPVITWSKQGIDLASRAIIDTTESYSLLIVDKVNRYDAGKYTIEAENQSGKKSATVLVKVYDTPGPCPSVKVKEVSRDSVTITWEIPTIDGGAPVNNYIVEKREAAMRAFKTVTTKCSKTLYRISGLVEGTMYYFRVLPENIYGIGEPCETSDAVLVSEVPLVPAKLEVVDVTKSTVTLAWEKPLYDGGSRLTGYVLEACKAGTERWMKVVTLKPTVLEHTVTSLNEGEQYLFRIRAQNEKGVSEPRETVTAVTVQDLRVLPTIDLSTMPQKTIHVPAGRPVELVIPIAGRPPPAASWFFAGSKLRESERVTVETHTKVAKLTIRETTIRDTGEYTLELKNVTGTTSETIKVIILDKPGPPTGPIKIDEIDATSITISWEPPELDGGAPLSGYVVEQRDAHRPGWLPVSESVTRSTFKFTRLTEGNEYVFRVAATNRFGIGSYLQSEVIECRSSIRIPGPPETLQIFDVSRDGMTLTWYPPEDDGGSQVTGYIVERKEVRADRWVRVNKVPVTMTRYRSTGLTEGLEYEHRVTAINARGSGKPSRPSKPIVAMDPIAPPGKPQNPRVTDTTRTSVSLAWSVPEDEGGSKVTGYLIEMQKVDQHEWTKCNTTPTKIREYTLTHLPQGAEYRFRVLACNAGGPGEPAEVPGTVKVTEMLEYPDYELDERYQEGIFVRQGGVIRLTIPIKGKPFPICKWTKEGQDISKRAMIATSETHTELVIKEADRGDSGTYDLVLENKCGKKAVYIKVRVIGSPNSPEGPLEYDDIQVRSVRVSWRPPADDGGADILGYILERREVPKAAWYTIDSRVRGTSLVVKGLKENVEYHFRVSAENQFGISKPLKSEEPVTPKTPLNPPEPPSNPPEVLDVTKSSVSLSWSRPKDDGGSRVTGYYIERKETSTDKWVRHNKTQITTTMYTVTGLVPDAEYQFRIIAQNDVGLSETSPASEPVVCKDPFDKPSQPGELEILSISKDSVTLQWEKPECDGGKEILGYWVEYRQSGDSAWKKSNKERIKDKQFTIGGLLEATEYEFRVFAENETGLSRPRRTAMSIKTKLTSGEAPGIRKEMKDVTTKLGEAAQLSCQIVGRPLPDIKWYRFGKELIQSRKYKMSSDGRTHTLTVMTEEQEDEGVYTCIATNEVGEVETSSKLLLQATPQFHPGYPLKEKYYGAVGSTLRLHVMYIGRPVPAMTWFHGQKLLQNSENITIENTEHYTHLVMKNVQRKTHAGKYKVQLSNVFGTVDAILDVEIQDKPDKPTGPIVIEALLKNSAVISWKPPADDGGSWITNYVVEKCEAKEGAEWQLVSSAISVTTCRIVNLTENAGYYFRVSAQNTFGISDPLEVSSVVIIKSPFEKPGAPGKPTITAVTKDSCVVAWKPPASDGGAKIRNYYLEKREKKQNKWISVTTEEIRETVFSVKNLIEGLEYEFRVKCENLGGESEWSEISEPITPKSDVPIQAPHFKEELRNLNVRYQSNATLVCKVTGHPKPIVKWYRQGKEIIADGLKYRIQEFKGGYHQLIIASVTDDDATVYQVRATNQGGSVSGTASLEVEVPAKIHLPKTLEGMGAVHALRGEVVSIKIPFSGKPDPVITWQKGQDLIDNNGHYQVIVTRSFTSLVFPNGVERKDAGFYVVCAKNRFGIDQKTVELDVADVPDPPRGVKVSDVSRDSVNLTWTEPASDGGSKITNYIVEKCATTAERWLRVGQARETRYTVINLFGKTSYQFRVIAENKFGLSKPSEPSEPTITKEDKTRAMNYDEEVDETREVSMTKASHSSTKELYEKYMIAEDLGRGEFGIVHRCVETSSKKTYMAKFVKVKGTDQVLVKKEISILNIARHRNILHLHESFESMEELVMIFEFISGLDIFERINTSAFELNEREIVSYVHQVCEALQFLHSHNIGHFDIRPENIIYQTRRSSTIKIIEFGQARQLKPGDNFRLLFTAPEYYAPEVHQHDVVSTATDMWSLGTLVYVLLSGINPFLAETNQQIIENIMNAEYTFDEEAFKEISIEAMDFVDRLLVKERKSRMTASEALQHPWLKQKIERVSTKVIRTLKHRRYYHTLIKKDLNMVVSAARISCGGAIRSQKGVSVAKVKVASIEIGPVSGQIMHAVGEEGGHVKYVCKIENYDQSTQVTWYFGVRQLENSEKYEITYEDGVAILYVKDITKLDDGTYRCKVVNDYGEDSSYAELFVKGVREVYDYYCRRTMKKIKRRTDTMRLLERPPEFTLPLYNKTAYVGENVRFGVTITVHPEPHVTWYKSGQKIKPGDNDKKYTFESDKGLYQLTINSVTTDDDAEYTVVARNKYGEDSCKAKLTVTLHPPPTDSTLRPMFKRLLANAECQEGQSVCFEIRVSGIPPPTLKWEKDGQPLSLGPN

SEQ ID NO: 88988 - protein, 32767 aa, Homo sapiens
  Payload ID: 17810
  Gene Name: titin
  ENSP ID: ENSP00000467141
MTTQAPTFTQPLQSVVVLEGSTATFEAHISGFPVPEVSWFRDGQVISTSTLPGVQISFSDGRAKLTIPAVTKANSGRYSLKATNGSGQATSTAELLVKAETAPPNFVQRLQSMTVRQGSQVRLQVRVTGIPTPVVKFYRDGAEIQSSLDFQISQEGDLYSLLIAEAYPEDSGTYSVNATNSVGRATSTAELLVQGEEEVPAKKTKTIVSTAQISESRQTRIEKKIEAHFDARSIATVEMVIDGAAGQQLPHKTPPRIPPKPKSRSPTPPSIAAKAQLARQQSPSPIRHSPSPVRHVRAPTPSPVRSVSPAARISTSPIRSVRSPLLMRKTQASTVATGPEVPPPWKQEGYVASSSEAEMRETTLTTSTQIRTEERWEGRYGVQEQVTISGAAGAAASVSASASYAAEAVATGAKEVKQDADKSAAVATVVAAVDMARVREPVISAVEQTAQRTTTTAVHIQPAQEQVRKEAEKTAVTKVVVAADKAKEQELKSRTKEVITTKQEQMHVTHEQIRKETEKTFVPKVVISAAKAKEQETRISEEITKKQKQVTQEAIRQETEITAASMVVVATAKSTKLETVPGAQEETTTQQDQMHLSYEKIMKETRKTVVPKVIVATPKVKEQDLVSRGREGITTKREQVQITQEKMRKEAEKTALSTIAVATAKAKEQETILRTRETMATRQEQIQVTHGKVDVGKKAEAVATVVAAVDQARVREPREPGHLEESYAQQTTLEYGYKERISAAKVAEPPQRPASEPHVVPKAVKPRVIQAPSETHIKTTDQKGMHISSQIKKTTDLTTERLVHVDKRPRTASPHFTVSKISVPKTEHGYEASIAGSAIATLQKELSATSSAQKITKSVKAPTVKPSETRVRAEPTPLPQFPFADTPDTYKSEAGVEVKKEVGVSITGTTVREERFEVLHGREAKVTETARVPAPVEIPVTPPTLVSGLKNVTVIEGESVTLECHISGYPSPTVTWYREDYQIESSIDFQITFQSGIARLMIREAFAEDSGRFTCSAVNEAGTVSTSCYLAVQVSEEFEKETTAVTEKFTTEEKRFVESRDVVMTDTSLTEEQAGPGEPAAPYFITKPVVQKLVEGGSVVFGCQVGGNPKPHVYWKKSGVPLTTGYRYKVSYNKQTGECKLVISMTFADDAGEYTIVVRNKHGETSASASLLEEADYELLMKSQQEMLYQTQVTAFVQEPKVGETAPGFVYSEYEKEYEKEQALIRKKMAKDTVVVRTYVEDQEFHISSFEERLIKEIEYRIIKTTLEELLEEDGEEKMAVDISESEAVESGFDSRIKNYRILEGMGVTFHCKMSGYPLPKIAWYKDGKRIKHGERYQMDFLQDGRASLRIPVVLPEDEGIYTAFASNIKGNAICSGKLYVEPAAPLGAPTYIPTLEPVSRIRSLSPRSVSRSPIRMSPARMSPARMSPARMSPARMSPGRRLEETDESQLERLYKPVFVLKPVSFKCLEGQTARFDLKVVGRPMPETFWFHDGQQIVNDYTHKVVIKEDGTQSLIIVPATPSDSGEWTVVAQNRAGRSSISVILTVEAVEHQVKPMFVEKLKNVNIKEGSRLEMKVRATGNPNPDIVWLKNSDIIVPHKYPKIRIEGTKGEAALKIDSTVSQDSAWYTATAINKAGRDTTRCKVNVEVEFAEPEPERKLIIPRGTYRAKEIAAPELEPLHLRYGQEQWEEGDLYDKEKQQKPFFKKKLTSLRLKRFGPAHFECRLTPIGDPTMVVEWLHDGKPLEAANRLRMINEFGYCSLDYGVAYSRDSGIITCRATNKYGTDHTSATLIVKDEKSLVEESQLPEGRKGLQRIEELERMAHEGALTGVTTDQKEKQKPDIVLYPEPVRVLEGETARFRCRVTGYPQPKVNWYLNGQLIRKSKRFRVRYDGIHYLDIVDCKSYDTGEVKVTAENPEGVIEHKVKLEIQQREDFRSVLRRAPEPRPEFHVHEPGKLQFEVQKVDRPVDTTETKEVVKLKRAERITHEKVPEESEELRSKFKRRTEEGYYEAITAVELKSRKKDESYEELLRKTKDELLHWTKELTEEEKKALAEEGKITIPTFKPDKIELSPSMEAPKIFERIQSQTVGQGSDAHFRVRVVGKPDPECEWYKNGVKIERSDRIYWYWPEDNVCELVIRDVTAEDSASIMVKAINIAGETSSHAFLLVQAKQLITFTQELQDVVAKEKDTMATFECETSEPFVKVKWYKDGMEVHEGDKYRMHSDRKVHFLSILTIDTSDAEDYSCVLVEDENVKTTAKLIVEGAVVEFVKELQDIEVPESYSGELECIVSPENIEGKWYHNDVELKSNGKYTITSRRGRQNLTVKDVTKEDQGEYSFVIDGKKTTCKLKMKPRPIAILQGLSDQKVCEGDIVQLEVKVSLESVEGVWMKDGQEVQPSDRVHIVIDKQSHMLLIEDMTKEDAGNYSFTIPALGLSTSGRVSVYSVDVITPLKDVNVIEGTKAVLECKVSVPDVTSVKWYLNDEQIKPDDRVQAIVKGTKQRLVINRTHASDEGPYKLIVGRVETNCNLSVEKIKIIRGLRDLTCTETQNVVFEVELSHSGIDVLWNFKDKEIKPSSKYKIEAHGKIYKLTVLNMMKDDEGKYTFYAGENMTSGKLTVAGGAISKPLTDQTVAESQEAVFECEVANPDSKGEWLRDGKHLPLTNNIRSESDGHKRRLIIAATKLDDIGEYTYKVATSKTSAKLKVEAVKIKKTLKNLTVTETQDAVFTVELTHPNVKGVQWIKNGVVLESNEKYAISVKGTIYSLRIKNCAIVDESVYGFRLGRLGASARLHVETVKIIKKPKDVTALENATVAFEVSVSHDTVPVKWFHKSVEIKPSDKHRLVSERKVHKLMLQNISPSDAGEYTAVVGQLECKAKLFVETLHITKTMKNIEVPETKTASFECEVSHFNVPSMWLKNGVEIEMSEKFKIVVQGKLHQLIIMNTSTEDSAEYTFVCGNDQVSATLTVTPIMITSMLKDINAEEKDTITFEVTVNYEGISYKWLKNGVEIKSTDKCQMRTKKLTHSLNIRNVHFGDAADYTFVAGKATSTATLYVEARHIEFRKHIKDIKVLEKKRAMFECEVSEPDITVQWMKDDQELQITDRIKIQKEKYVHRLLIPSTRMSDAGKYTVVAGGNVSTAKLFVEGRDVRIRSIKKEVQVIEKQRAVVEFEVNEDDVDAHWYKDGIEINFQVQERHKYVVERRIHRMFISETRQSDAGEYTFVAGRNRSSVTLYVNAPEPPQVLQELQPVTVQSGKPARFCAVISGRPQPKISWYKEEQLLSTGFKCKFLHDGQEYTLLLIEAFPEDAAVYTCEAKNDYGVATTSASLSVEVPEVVSPDQEMPVYPPAIITPLQDTVTSEGQPARFQCRVSGTDLKVSWYSKDKKIKPSRFFRMTQFEDTYQLEIAEAYPEDEGTYTFVASNAVGQVSSTANLSLEGFSKFEENTSNSQWHVSLSVSFKKEPLGQKPSFIQPLSSLRVHNGETVRFHARVSGIPKPEIQWFHNQQLILPTKDVVFHFEESTGMALMLIVDAYSEHAGQYSCKAANSAGEATCAATLTVTPKVQALDRQSSGKDVRESTKSQAVADSSFTKEESKISQKEIKSFQGSSYEYEVQVFESVSQSSIHTAASVQDTQLCHTASLSQIAESTELSKECAKESTGEAPKIFLHLQDVTVKCGDTAQFLCVLKDDSFIDVTWTHEGAKIEESERLKQSQNGNIQFLTICNVQLVDQGLYSCIVHNDCGERTTSAVLSVEGAPESILHERIEQEIEMEMKEFSSSFLSAEEEGLHSAELQLSKINETLELLSESPVYPTKFDSEKEGTGPIFIKEVSNADISMGDVATLSVTVIGIPKPKIQWFFNGVLLTPSADYKFVFDGDDHSLIILFTKLEDEGEYTCMASNDYGKTICSAYLKINSKGEGHKDTETESAVAKSLEKLGGPCPPHFLKELKPIRCAQGLPAIFEYTVVGEPAPTVTWFKENKQLCTSVYYTIIHNPNGSGTFIVNDPQREDSGLYICKAENMLGESTCAAELLVLLEDTDMTDTPCKAKSTPEAPEDFPQTPLKGPAVEALDSEQEIATFVKDTILKAALITEENQQLSYEHIAKANELSSQLPLGAQELQSILEQDKLTPESTREFLCINGSIHFQPLKEPSPNLQLQIVQSQKTFSKEGILMPEEPETQAVLSDTEKIFPSAMSIEQINSLTVEPLKTLLAEPEGNYPQSSIEPPMHSYLTSVAEEVLSPKEKTVSDTNREQRVTLQKQEAQSALILSQSLAEGHVESLQSPDVMISQVNYEPLVPSEHSCTEGGKILIESANPLENAGQDSAVRIEEGKSLRFPLALEEKQVLLKEEHSDNVVMPPDQIIESKREPVAIKKVQEVQGRDLLSKESLLSGIPEEQRLNLKIQICRALQAAVASEQPGLFSEWLRNIEKVEVEAVNITQEPRHIMCMYLVTSAKSVTEEVTIIIEDVDPQMANLKMELRDALCAIIYEEIDILTAEGPRIQQGAKTSLQEEMDSFSGSQKVEPITEPEVESKYLISTEEVSYFNVQSRVKYLDATPVTKGVASAVVSDEKQDESLKPSEEKEESSSESGTEEVATVKIQEAEGGLIKEDGPMIHTPLVDTVSEEGDIVHLTTSITNAKEVNWYFENKLVPSDEKFKCLQDQNTYTLVIDKVNTEDHQGEYVCEALNDSGKTATSAKLTVVKRAAPVIKRKIEPLEVALGHLAKFTCEIQSAPNVRFQWFKAGREIYESDKCSIRSSKYISSLEILRTQVVDCGEYTCKASNEYGSVSCTATLTVTEAYPPTFLSRPKSLTTFVGKAAKFICTVTGTPVIETIWQKDGAALSPSPNWRISDAENKHILELSNLTIQDRGVYSCKASNKFGADICQAELIIIDKPHFIKELEPVQSAINKKVHLECQVDEDRKVTVTWSKDGQKLPPGKDYKICFEDKIATLEIPLAKLKDSGTYVCTASNEAGSSSCSATVTVREPPSFVKKVDPSYLMLPGESARLHCKLKGSPVIQVTWFKNNKELSESNTVRMYFVNSEAILDITDVKVEDSGSYSCEAVNDVGSDSCSTEIVIKEPPSFIKTLEPADIVRGTNALLQCEVSGTGPFEISWFKDKKQIRSSKKYRLFSQKSLVCLEIFSFNSADVGEYECVVANEVGKCGCMATHLLKEPPTFVKKVDDLIALGGQTVTLQAAVRGSEPISVTWMKGQEVIREDGKIKMSFSNGVAVLIIPDVQISFGGKYTCLAENEAGSQTSVGELIVKEPAKIIERAELIQVTAGDPATLEYTVAGTPELKPKWYKDGRPLVASKKYRISFKNNVAQLKFYSAELHDSGQYTFEISNEVGSSSCETTFTVLDRDIAPFFTKPLRNVDSVVNGTCRLDCKIAGSLPMRVSWFKDGKEIAASDRYRIAFVEGTASLEIIRVDMNDAGNFTCRATNSVGSKDSSGALIVQEPPSFVTKPGSKDVLPGSAVCLKSTFQGSTPLTIRWFKGNKELVSGGSCYITKEALESSLELYLVKTSDSGTYTCKVSNVAGGVECSANLFVKEPATFVEKLEPSQLLKKGDATQLACKVTGTPPIKITWFANDREIKESSKHRMSFVESTAVLRLTDVGIEDSGEYMCEAQNEAGSDHCSSIVIVKESPYFTKEFKPIEVLKEYDVMLLAEVAGTPPFEITWFKDNTILRSGRKYKTFIQDHLVSLQILKFVAADAGEYQCRVTNEVGSSICSARVTLREPPSFIKKIESTSSLRGGTAAFQATLKGSLPITVTWLKDSDEITEDDNIRMTFENNVASLYLSGIEVKHDGKYVCQAKNDAGIQRCSALLSVKEPATITEEAVSIDVTQGDPATLQVKFSGTKEITAKWFKDGQELTLGSKYKISVTDTVSILKIISTEKKDSGEYTFEVQNDVGRSSCKARINVLDLIIPPSFTKKLKKMDSIKGSFIDLECIVAGSHPISIQWFKDDQEISASEKYKFSFHDNTAFLEISQLEGTDSGTYTCSATNKAGHNQCSGHLTVKEPPYFVEKPQSQDVNPNTRVQLKALVGGTAPMTIKWFKDNKELHSGAARSVWKDDTSTSLELFAAKATDSGTYICQLSNDVGTATSKATLFVKEPPQFIKKPSPVLVLRNGQSTTFECQITGTPKIRVSWYLDGNEITAIQKHGISFIDGLATFQISGARVENSGTYVCEARNDAGTASCSIELKVKEPPTFIRELKPVEVVKYSDVELECEVTGTPPFEVTWLKNNREIRSSKKYTLTDRVSVFNLHITKCDPSDTGEYQCIVSNEGGSCSCSTRVALKEPPSFIKKIENTTTVLKSSATFQSTVAGSPPISITWLKDDQILDEDDNVYISFVDSVATLQIRSVDNGHSGRYTCQAKNESGVERCYAFLLVQEPAQIVEKAKSVDVTEKDPMTLECVVAGTPELKVKWLKDGKQIVPSRYFSMSFENNVASFRIQSVMKQDSGQYTFKVENDFGSSSCDAYLRVLDQNIPPSFTKKLTKMDKVLGSSIHMECKVSGSLPISAQWFKDGKEISTSAKYRLVCHERSVSLEVNNLELEDTANYTCKVSNVAGDDACSGILTVKEPPSFLVKPGRQQAIPDSTVEFKAILKGTPPFKIKWFKDDVELVSGPKCFIGLEGSTSFLNLYSVDASKTGQYTCHVTNDVGSDSCTTMLLVTEPPKFVKKLEASKIVKAGDSSRLECKIAGSPEIRVVWFRNEHELPASDKYRMTFIDSVAVIQMNNLSTEDSGDFICEAQNPAGSTSCSTKVIVKEPPVFSSFPPIVETLKNAEVSLECELSGTPPFEVVWYKDKRQLRSSKKYKIASKNFHTSIHILNVDTSDIGEYHCKAQNEVGSDTCVCTVKLKEPPRFVSKLNSLTVVAGEPAELQASIEGAQPIFVQWLKEKEEVIRESENIRITFVENVATLQFAKAEPANAGKYICQIKNDGGMRENMATLMVLEPAVIVEKAGPMTVTVGETCTLECKVAGTPELSVEWYKDGKLLTSSQKHKFSFYNKISSLRILSVERQDAGTYTFQVQNNVGKSSCTAVVDVSDRAVPPSFTRRLKNTGGVLGASCILECKVAGSSPISVAWFHEKTKIVSGAKYQTTFSDNVCTLQLNSLDSSDMGNYTCVAANVAGSDECRAVLTVQEPPSFVKEPEPLEVLPGKNVTFTSVIRGTPPFKVNWFRGARELVKGDRCNIYFEDTVAELELFNIDISQSGEYTCVVSNNAGQASCTTRLFVKEPAAFLKRLSDHSVEPGKSIILESTYTGTLPISVTWKKDGFNITTSEKCNIVTTEKTCILEILNSTKRDAGQYSCEIENEAGRDVCGALVSTLEPPYFVTELEPLEAAVGDSVSLQCQVAGTPEITVSWYKGDTKLRPTPEYRTYFTNNVATLVFNKVNINDSGEYTCKAENSIGTASSKTVFRIQERQLPPSFARQLKDIEQTVGLPVTLTCRLNGSAPIQVCWYRDGVLLRDDENLQTSFVDNVATLKILQTDLSHSGQYSCSASNPLGTASSSARLTAREPKKSPFFDIKPVSIDVIAGESADFECHVTGAQPMRITWSKDNKEIRPGGNYTITCVGNTPHLRILKVGKGDSGQYTCQATNDVGKDMCSAQLSVKEPPKFVKKLEASKVAKQGESIQLECKISGSPEIKVSWFRNDSELHESWKYNMSFINSVALLTINEASAEDSGDYICEAHNGVGDASCSTALTVKAPPVFTQKPSPVGALKGSDVILQCEISGTPPFEVVWVKDRKQVRNSKKFKITSKHFDTSLHILNLEASDVGEYHCKATNEVGSDTCSCSVKFKEPPRFVKKLSDTSTLIGDAVELRAIVEGFQPISVVWLKDRGEVIRESENTRISFIDNIATLQLGSPEASNSGKYICQIKNDAGMRECSAVLTVLEPARIIEKPEPMTVTTGNPFALECVVTGTPELSAKWFKDGRELSADSKHHITFINKVASLKIPCAEMSDKGLYSFEVKNSVGKSNCTVSVHVSDRIVPPSFIRKLKDVNAILGASVVLECRVSGSAPISVGWFQDGNEIVSGPKCQSSFSENVCTLNLSLLEPSDTGIYTCVAANVAGSDECSAVLTVQEPPSFEQTPDSVEVLPGMSLTFTSVIRGTPPFKVKWFKGSRELVPGESCNISLEDFVTELELFEVQPLESGDYSCLVTNDAGSASCTTHLFVKEPATFVKRLADFSVETGSPIVLEATYTGTPPISVSWIKDEYLISQSERCSITMTEKSTILEILESTIEDYAQYSCLIENEAGQDICEALVSVLEPPYFIEPLEHVEAVIGEPATLQCKVDGTPEIRISWYKEHTKLRSAPAYKMQFKNNVASLVINKVDHSDVGEYSCKADNSVGAVASSAVLVIKARKLPPFFARKLKDVHETLGFPVAFECRINGSEPLQVSWYKDGVLLKDDANLQTSFVHNVATLQILQTDQSHIGQYNCSASNPLGTASSSAKLILSEHEVPPFFDLKPVSVDLALGESGTFKCHVTGTAPIKITWAKDNREIRPGGNYKMTLVENTATLTVLKVGKGDAGQYTCYASNIAGKDSCSAQLGVQEPPRFIKKLEPSRIVKQDEFTRYECKIGGSPEIKVLWYKDETEIQESSKFRMSFVDSVAVLEMHNLSVEDSGDYTCEAHNAAGSASSSTSLKVKEPPIFRKKPHPIETLKGADVHLECELQGTPPFHVSWYKDKRELRSGKKYKIMSENFLTSIHILNVDAADIGEYQCKATNDVGSDTCVGSIALKAPPRFVKKLSDISTVVGKEVQLQTTIEGAEPISVVWFKDKGEIVRESDNIWISYSENIATLQFSRVEPANAGKYTCQIKNDAGMQECFATLSVLEPATIVEKPESIKVTTGDTCTLECTVAGTPELSTKWFKDGKELTSDNKYKISFFNKVSGLKIINVAPSDSGVYSFEVQNPVGKDSCTASLQVSDRTVPPSFTRKLKETNGLSGSSVVMECKVYGSPPISVSWFHEGNEISSGRKYQTTLTDNTCALTVNMLEESDSGDYTCIATNMAGSDECSAPLTVREPPSFVQKPDPMDVLTGTNVTFTSIVKGTPPFSVSWFKGSSELVPGDRCNVSLEDSVAELELFDVDTSQSGEYTCIVSNEAGKASCTTHLYIKAPAKFVKRLNDYSIEKGKPLILEGTFTGTPPISVTWKKNGINVTPSQRCNITTTEKSAILEIPSSTVEDAGQYNCYIENASGKDSCSAQILILEPPYFVKQLEPVKVSVGDSASLQCQLAGTPEIGVSWYKGDTKLRPTTTYKMHFRNNVATLVFNQVDINDSGEYICKAENSVGEVSASTFLTVQEQKLPPSFSRQLRDVQETVGLPVVFDCAISGSEPISVSWYKDGKPLKDSPNVQTSFLDNTATLNIFKTDRSLAGQYSCTATNPIGSASSSARLILTEGKNPPFFDIRLAPVDAVVGESADFECHVTGTQPIKVSWAKDSREIRSGGKYQISYLENSAHLTVLKVDKGDSGQYTCYAVNEVGKDSCTAQLNIKERLIPPSFTKRLSETVEETEGNSFKLEGRVAGSQPITVAWYKNNIEIQPTSNCEITFKNNTLVLQVRKAGMNDAGLYTCKVSNDAGSALCTSSIVIKEPKKPPVFDQHLTPVTVSEGEYVQLSCHVQGSEPIRIQWLKAGREIKPSDRCSFSFASGTAVLELRDVAKADSGDYVCKASNVAGSDTTKSKVTIKDKPAVAPATKKAAVDGRLFFVSEPQSIRVVEKTTATFIAKVGGDPIPNVKWTKGKWRQLNQGGRVFIHQKGDEAKLEIRDTTKTDSGLYRCVAFNEHGEIESNVNLQVDERKKQEKIEGDLRAMLKKTPILKKGAGEEEEIDIMELLKNVDPKEYEKYARMYGITDFRGLLQAFELLKQSQEEETHRLEIEEIERSERDEKEFEELVSFIQQRLSQTEPVTLIKDIENQTVLKDNDAVFEIDIKINYPEIKLSWYKGTEKLEPSDKFEISIDGDRHTLRVKNCQLKDQGNYRLVCGPHIASAKLTVIEPAWERHLQDVTLKEGQTCTMTCQFSVPNVKSEWFRNGRILKPQGRHKTEVEHKVHKLTIADVRAEDQGQYTCKYEDLETSAELRIEAEPIQFTKRIQNIVVSEHQSATFECEVSFDDAIVTWYKGPTELTESQKYNFRNDGRCHYMTIHNVTPDDEGVYSVIARLEPRGEARSTAELYLTTKEIKLELKPPDIPDSRVPIPTMPIRAVPPEEIPPVVAPPIPLLLPTPEEKKPPPKRIEVTKKAVKKDAKKVVAKPKEMTPREEIVKKPPPPTTLIPAKAPEIIDVSSKAEEVKIMTITRKKEVQKEKEAVYEKKQAVHKEKRVFIESFEEPYDELEVEPYTEPFEQPYYEEPDEDYEEIKVEAKKEVHEEWEEDFEEGQEYYEREEGYDEGEEEWEEAYQEREVIQVQKEVYEESHERKVPAKVPEKKAPPPPKVIKKPVIEKIEKTSRRMEEEKVQVTKVPEVSKKIVPQKPSRTPVQEEVIEVKVPAVHTKKMVISEEKMFFASHTEEEVSVTVPEVQKEIVTEEKIHVAISKRVEPPPKVPELPEKPAPEEVAPVPIPKKVEPPAPKVPEVPKKPVPEEKKPVPVPKKEPAAPPKVPEVPKKPVPEEKIPVPVAKKKEAPPAKVPEVQKGVVTEEKITIVTQREESPPPAVPEIPKKKVPEERKPVPRKEEEVPPPPKVPALPKKPVPEEKVAVPVPVAKKAPPPRAEVSKKTVVEEKRFVAEEKLSFAVPQRVEVTRHEVSAEEEWSYSEEEEGVSISVYREEEREEEEEAEVTEYEVMEEPEEYVVEEKLHIISKRVEAEPAEVTERQEKKIVLKPKIPAKIEEPPPAKVPEAPKKIVPEKKVPAPVPKKEKVPPPKVPEEPKKPVPEKKVPPKVIKMEEPLPAKVTERHMQITQEEKVLVAVTKKEAPPKARVPEEPKRAVPEEKVLKLKPKREEEPPAKVTEFRKRVVKEEKVSIEAPKREPQPIKEVTIMEEKERAYTLEEEAVSVQREEEYEEYEEYDYKEFEEYEPTEEYDQYEEYEEREYERYEEHEEYITEPEKPIPVKPVPEEPVPTKPKAPPAKVLKKAVPEEKVPVPIPKKLKPPPPKVPEEPKKVFEEKIRISITKREKEQVTEPAAKVPMKPKRVVAEEKVPVPRKEVAPPVRVPEVPKELEPEEVAFEEEVVTHVEEYLVEEEEEYIHEEEEFITEEEVVPVIPVKVPEVPRKPVPEEKKPVPVPKKKEAPPAKVPEVPKKPEEKVPVLIPKKEKPPPAKVPEVPKKPVPEEKVPVPVPKKVEAPPAKVPEVPKKPVPEKKVPVPAPKKVEAPPAKVPEVPKKLIPEEKKPTPVPKKVEAPPPKVPKKREPVPVPVALPQEEEVLFEEEIVPEEEVLPEEEEVLPEEEEVLPEEEEVLPEEEEIPPEEEEVPPEEEYVPEEEEFVPEEEVLPEVKPKVPVPAPVPEVPKKPVPEKKVPVPAPKKVEPPPPPKVPEIKKKVTEKKVVIPKKEEAPPAKVSVVPKKPEPEKKVPPPGLKKAVAPPAKVPEVPKKVEEKRIILPKEEEVLPVEVTEEPEEEPISEEEIPEEPPSIEEVEEVAPPRVPEVIKKAVPEAPTPVPKKVEAPPAKVSKKIPEEKVPVPVQKKEAPPAKVPEVPKKVPEKKVLVPKKEAVPPAKGRTVLEEKVSVAFRQEVVVKERLELEVVEAEVEEIPEEEEFHEVEEYFEEGEFHEVEEFIKLEQHRVEEEHRVEKVHRVIEVFEAEEVEVFEKPKAPPKGPEISEKIIPPKKPPTKVVPRKEPPAKVPEVPKKIVVEEKVRVPEEPRVPPTKAPEVPKKIVPEEKVREAVLKKPEVPPAKVPGMPKKSVQEEKSPIVISEDTEMYIYEASEEAVLEEKVLVTQPQKTKPKLAKVPEPPKKVVPEDKIYVTIPKKRETPATKEPDTTRGIFPEVEPPEAIPEIPEHPPTEEFEVFKEVIPEGETPIVKRRKTPSPTVPESPREIVPVKETPMAAPLEIEIPPTKAPEAMKEVVPEMKIFEDVPEEPETPRMKTPEAPQEIIPAKTVPSKKREPPSVKVPEALQEIVPEKKTLVVPLRKPEVLPDEVPEALREVVPEKKVHPPQRAEVVPVKVHEAPKEIIPEKKVSVVPPKKPEVPPVKVPEASKEVIREEKVPLAPPKEPEVPPVKVPEPPKEVVPEKKAPVAPPKEPEVPPVKVPEAPKEVVPEKKVPVPPPKKPEVPPTKVPEVPKAAVPEKKLPEAIPPKPESPPPEVPEVLPPKEVVPEKKVPVPPAKKPEAPPPKVPEAPKEVVLEKKASVAVPKKPEAPRAKVPEAAQEVVPEKKIPKAPIKKPEAPAVTVPEVPQEATEKEIPVAPPKKPEAPIVPVPEAQEVVPEKKVPKAPPTKPEAPPATVPEVPQEIVPEKKTLVLPKKPEVPPVTVPEAPKEVVLEKKVPSAPPKKPEVPPVKVPEAPKEVVPEKKVPVPPPKKPEVPPTKVPEVPKAAVPEKKVPEAIPPKPESPPPEVPEVLPPKEVVPEKKVPVPPAKKPEAPPPKVPEAPKEVVLEKKASVAVPKKPEAPRAKVPEAAQEVVPEKKIPKAPIKKPEAPAVTVPEVPQEAAEKEIPVAPPKKPEAPIVPVPEAQEVVPEKKVPKAPPTKPEAPPATVPEVPQEIVPEKKTLVLPKKPEVPPVTVPEAPKEVVLEKKVPSTPPKKPEVPPVKVPEAPKEVVPEKKVPVPPPKKPEVPPTKVPEVPKAAVPEKKVPEAIPPKPESPPPEVPEVLPPKEVVPEKKVPVPPAKKPEAPPPKVPEAPKEVVLEKKVSVAVPKKPEAPRAKVPEAAQEVVPEKKIPKAPIKKPEAPAVTVPEVPQEAAEKEIPVAPPKKPEAPIVPVPEAQEVVPEKKVPKAPPTKPEAPPATVPEVPQEIVPEKKTLVLPKKPEVPPVTVPEAPKEVVLEKKVPLAPPKKPEVPPVKVPEAPKEVVPEKKVPVTPPKKPEVPPVKVPEAPIEVVPEKKMPLAPPKKPEVPPVKVPEAPKEVVPEKKVPSAPPKKPEVPPVKVPEAPKEVVPEKKVPAAPPKKPEVTPVKVPEAPKEVVPEKKVPVPPPKKPEVPPTKVPEVPKVAVPEKKVPEAIPPKPESPPPEVFEEPEEVALEEPPAEVVEEPEPAAPPQVTVPPKKPVPEKKAPAVVAKKPELPPVKVPEVPKEVVPEKKVPLVVPKKPEAPPAKVPEVPKEVVPEKKVAVPKKPEVPPAKVPEVPKKPVLEEKPAVPVPERAESPPPEVYEEPEEIAPEEEIAPEEEKPVPVAEEEEPEVPPPAVPEEPKKIIPEKKVPVIKKPEAPPPKEPEMPKKVVPVKKVPTVKKPETPAAKVPEVPKKLVPVKKEPVPVTKKPEVLPEKVPKVPEKIIPEKEVSVPIPAEPEVPPAEVEETPEEIIYEEKASITIGRKETPPVEEREIEKYIKPEEPEPEPQPEEIPVKEPEPEKVIEKPKLKPRPPPPPPAPPKEDVKEKIFQLKAIPKKKVPEKPQVPEKVELTPLKVPGGEKKVRKLLPERKPEPKEEVVLKSVLRKRPEEEEPKVEPKKLEKVKKPAVPEPPPPKPVEEVEVPTVTKRERKIPEPTKVPEIKPAIPLPAPEPKPKPEAEVKTIKPPPVEPEPTPIAAPVTVPVVGKKAEAKAPKEEAAKPKGPIKGVPKKTPSPIEAERRKLRPGSGGEKPPDEAPFTYQLKAVPLKFVKEIKDIILTESEFVGSSAIFECLVSPSTAITTWMKDGSNIRESPKHRFIADGKDRKLHIIDVQLSDAGEYTCVLRLGNKEKTSTAKLVVEELPVRFVKTLEEEVTVVKGQPLYLSCELNKERDVVWRKDGKIVVEKPGRIVPGVIGLMRALTINDADDTDAGTYTVTVENANNLECSSCVKVVEVIRDWLVKPIRDQHVKPKGTAIFACDIAKDTPNIKWFKGYDEIPAEPNDKTEILRDGNHLYLKIKNAMPEDIAEYAVEIEGKRYPAKLTLGEREVELLKPIEDVTIYEKESASFDAEISEADIPGQWKLKGELLRPSPTCEIKAEGGKRFLTLHKVKLDQAGEVLYQALNAITTAILTVKEIELDFAVPLKDVTVPERRQARFECVLTREANVIWSKGPDIIKSSDKFDIIADGKKHILVINDSQFDDEGVYTAEVEGKKTSARLFVTGIRLKFMSPLEDQTVKEGETATFVCELSHEKMHVVWFKNDAKLHTSRTVLISSEGKTHKLEMKEVTLDDISQIKAQVKELSSTAQLKVLEADPYFTVKLHDKTAVEKDEITLKCEVSKDVPVKWFKDGEEIVPSPKYSIKADGLRRILKIKKADLKDKGEYVCDCGTDKTKANVTVEARLIKVEKPLYGVEVFVGETAHFEIELSEPDVHGQWKLKGQPLTASPDCEIIEDGKKHILILHNCQLGMTGEVSFQAANAKSAANLKVKELPLIFITPLSDVKVFEKDEAKFECEVSREPKTFRWLKGTQEITGDDRFELIKDGTKHSMVIKSAAFEDEAKYMFEAEDKHTSGKLIIEGIRLKFLTPLKDVTAKEKESAVFTVELSHDNIRVKWFKNDQRLHTTRSVSMQDEGKTHSITFKDLSIDDTSQIRVEAMGMSSEAKLTVLEGDPYFTGKLQDYTGVEKDEVILQCEISKADAPVKWFKDGKEIKPSKNAVIKADGKKRMLILKKALKSDIGQYTCDCGTDKTSGKLDIEDREIKLVRPLHSVEVMETETARFETEISEDDIHANWKLKGEALLQTPDCEIKEEGKIHSLVLHNCRLDQTGGVDFQAANVKSSAHLRVKPRVIGLLRPLKDVTVTAGETATFDCELSYEDIPVEWYLKGKKLEPSDKVVPRSEGKVHTLTLRDVKLEDAGEVQLTAKDFKTHANLFVKEPPVEFTKPLEDQTVEEGATAVLECEVSRENAKVKWFKNGTEILKSKKYEIVADGRVRKLVIHDCTPEDIKTYTCDAKDFKTSCNLNVVPPHVEFLRPLTDLQVREKEMARFECELSRENAKVKWFKDGAEIKKGKKYDIISKGAVRILVINKCLLDDEAEYSCEVRTARTSGMLTVLEEEAVFTKNLANIEVSETDTIKLVCEVSKPGAEVIWYKGDEEIIETGRYEILTEGRKRILVIQNAHLEDAGNYNCRLPSSRTDGKVKVHELAAEFISKPQNLEILEGEKAEFVCSISKESFPVQWKRDDKTLESGDKYDVIADGKKRVLVVKDATLQDMGTYVVMVGAARAAAHLTVIEKLRIVVPLKDTRVKEQQEVVFNCEVNTEGAKAKWFRNEEAIFDSSKYIILQKDLVYTLRIRDAHLDDQANYNVSLTNHRGENVKSAANLIVEEEDLRIVEPLKDIETMEKKSVTFWCKVNRLNVTLKWTKNGEEVPFDNRVSYRVDKYKHMLTIKDCGFPDEGEYIVTAGQDKSVAELLIIEAPTEFVEHLEDQTVTEFDDAVFSCQLSREKANVKWYRNGREIKEGKKYKFEKDGSIHRLIIKDCRLDDECEYACGVEDRKSRARLFVEEIPVEIIRPPQDILEAPGADVVFLAELNKDKVEVQWLRNNMVVVQGDKHQMMSEGKIHRLQICDIKPRDQGEYRFIAKDKEARAKLELAAAPKIKTADQDLVVDVGKPLTMVVPYDAYPKAEAEWFKENEPLSTKTIDTTAEQTSFRILEAKKGDKGRYKIVLQNKHGKAEGFINLKVIDVPGPVRNLEVTETFDGEVSLAWEEPLTDGGSKIIGYVVERRDIKRKTWVLATDRAESCEFTVTGLQKGGVEYLFRVSARNRVGTGEPVETDNPVEARSKYDVPGPPLNVTITDVNRFGVSLTWEPPEYDGGAEITNYVIELRDKTSIRWDTAMTVRAEDLSATVTDVVEGQEYSFRVRAQNRIGVGKPSAATPFVKVADPIERPSPPVNLTSSDQTQSSVQLKWEPPLKDGGSPILGYIIERCEEGKDNWIRCNMKLVPELTYKVTGLEKGNKYLYRVSAENKAGVSDPSEILGPLTADDAFVEPTMDLSAFKDGLEVIVPNPITILVPSTGYPRPTATWCFGDKVLETGDRVKMKTLSAYAELVISPSERSDKGIYTLKLENRVKTISGEIDVNVIARPSAPKELKFGDITKDSVHLTWEPPDDDGGSPLTGYVVEKREVSRKTWTKVMDFVTDLEFTVPDLVQGKEYLFKVCARNKCGPGEPAYVDEPVNMSTPATVPDPPENVKWRDRTANSIFLTWDPPKNDGGSRIKGYIVERCPRGSDKWVACGEPVAETKMEVTGLEEGKWYAYRVKALNRQGASKPSRPTEEIQAVDTQEAPEIFLDVKLLAGLTVKAGTKIELPATVTGKPEPKITWTKADMILKQDKRITIENVPKKSTVTIVDSKRSDTGTYIIEAVNVCGRATAVVEVNVLDKPGPPAAFDITDVTNESCLLTWNPPRDDGGSKITNYVVERRATDSEVWHKLSSTVKDTNFKATKLIPNKEYIFRVAAENMYGVGEPVQASPITAKYQFDPPGPPTRLEPSDITKDAVTLTWCEPDDDGGSPITGYWVERLDPDTDKWVRCNKMPVKDTTYRVKGLTNKKKYRFRVLAENLAGPGKPSKSTEPILIKDPIDPPWPPGKPTVKDVGKTSVRLNWTKPEHDGGAKIESYVIEMLKTGTDEWVRVAEGVPTTQHLLPGLMEGQEYSFRVRAVNKAGESEPSEPSDPVLCREKLYPPSPPRWLEVINITKNTADLKWTVPEKDGGSPITNYIVEKRDVRRKGWQTVDTTVKDTKCTVTPLTEGSLYVFRVAAENAIGQSDYTEIEDSVLAKDTFTTPGPPYALAVVDVTKRHVDLKWEPPKNDGGRPIQRYVIEKKERLGTRWVKAGKTAGPDCNFRVTDVIEGTEVQFQVRAENEAGVGHPSEPTEILSIEDPTSPPSPPLDLHVTDAGRKHIAIAWKPPEKNGGSPIIGYHVEMCPVGTEKWMRVNSRPIKDLKFKVEEGVVPDKEYVLRVRAVNAIGVSEPSEISENVVAKDPDCKPTIDLETHDIIVIEGEKLSIPVPFRAVPVPTVSWHKDGKEVKASDRLTMKNDHISAHLEVPKSVRADAGIYTITLENKLGSATASINVKVIGLPGPCKDIKASDITKSSCKLTWEPPEFDGGTPILHYVLERREAGRRTYIPVMSGENKLSWTVKDLIPNGEYFFRVKAVNKVGGGEYIELKNPVIAQDPKQPPDPPVDVEVHNPTAEAMTITWKPPLYDGGSKIMGYIIEKIAKGEERWKRCNEHLVPILTYTAKGLEEGKEYQFRVRAENAAGISEPSRATPPTKAVDPIDAPKVILRTSLEVKRGDEIALDASISGSPYPTITWIKDENVIVPEEIKKRAAPLVRRRKGEVQEEEPFVLPLTQRLSIDNSKKGESQLRVRDSLRPDHGLYMIKVENDHGIAKAPCTVSVLDTPGPPINFVFEDIRKTSVLCKWEPPLDDGGSEIINYTLEKKDKTKPDSEWIVVTSTLRHCKYSVTKLIEGKEYLFRVRAENRFGPGPPCVSKPLVAKDPFGPPDAPDKPIVEDVTSNSMLVKWNEPKDNGSPILGYWLEKREVNSTHWSRVNKSLLNALKANVDGLLEGLTYVFRVCAENAAGPGKFSPPSDPKTAHDPISPPGPPIPRVTDTSSTTIELEWEPPAFNGGGEIVGYFVDKQLVGTNEWSRCTEKMIKVRQYTVKEIREGADYKLRVSAVNAAGEGPPGETQPVTVAEPQEPPAVELDVSVKGGIQIMAGKTLRIPAVVTGRPVPTKVWTKEEGELDKDRVVIDNVGTKSELIIKDALRKDHGRYVITATNSCGSKFAAARVEVFDVPGPVLDLKPVVTNRKMCLLNWSDPEDDGGSEITGFIIERKDAKMHTWRQPIETERSKCDITGLLEGQEYKFRVIAKNKFGCGPPVEIGPILAVDPLGPPTSPERLTYTERTKSTITLDWKEPRSNGGSPIQGYIIEKRRHDKPDFERVNKRLCPTTSFLVENLDEHQMYEFRVKAVNEIGESEPSLPLNVVIQDDEVPPTIKLRLSVRGDTIKVKAGEPVHIPADVTGLPMPKIEWSKNETVIEKPTDALQITKEEVSRSEAKTELSIPKAVREDKGTYTVTASNRLGSVFRNVHVEVYDRPSPPRNLAVTDIKAESCYLTWDAPLDNGGSEITHYVIDKRDASRKKAEWEEVTNTAVEKRYGIWKLIPNGQYEFRVRAVNKYGISDECKSDKVVIQDPYRLPGPPGKPKVLARTKGSMLVSWTPPLDNGGSPITGYWLEKREEGSPYWSRVSRAPITKVGLKGVEFNVPRLLEGVKYQFRAMAINAAGIGPPSEPSDPEVAGDPIFPPGPPSCPEVKDKTKSSISLGWKPPAKDGGSPIKGYIVEMQEEGTTDWKRVNEPDKLITTCECVVPNLKELRKYRFRVKAVNEAGESEPSDTTGEIPATDIQEEPEVFIDIGAQDCLVCKAGSQIRIPAVIKGRPTPKSSWEFDGKAKKAMKDGVHDIPEDAQLETAENSSVIIIPECKRSHTGKYSITAKNKAGQKTANCRVKVMDVPGPPKDLKVSDITRGSCRLSWKMPDDDGGDRIKGYVIEKRTIDGKAWTKVNPDCGSTTFVVPDLLSEQQYFFRVRAENRFGIGPPVETIQRTTARDPIYPPDPPIKLKIGLITKNTVHLSWKPPKNDGGSPVTHYIVECLAWDPTGTKKEAWRQCNKRDVEELQFTVEDLVEGGEYEFRVKAVNAAGVSKPSATVGPVTVKDQTCPPSIDLKEFMEVEEGTNVNIVAKIKGVPFPTLTWFKAPPKKPDNKEPVLYDTHVNKLVVDDTCTLVIPQSRRSDTGLYTITAVNNLGTASKEMRLNVLGRPGPPVGPIKFESVSADQMTLSWFPPKDDGGSKITNYVIEKREANRKTWVHVSSEPKECTYTIPKLLEGHEYVFRIMAQNKYGIGEPLDSEPETARNLFSVPGAPDKPTVSSVTRNSMTVNWEEPEYDGGSPVTGYWLEMKDTTSKRWKRVNRDPIKAMTLGVSYKVTGLIEGSDYQFRVYAINAAGVGPASLPSDPATARDPIAPPGPPFPKVTDWTKSSADLEWSPPLKDGGSKVTGYIVEYKEEGKEEWEKGKDKEVRGTKLVVTGLKEGAFYKFRVRAVNIAGIGEPGEVTDVIEMKDRLVSPDLQLDASVRDRIVVHAGGVIRIIAYVSGKPPPTVTWNMNERTLPQEATIETTAISSSMVIKNCQRSHQGVYSLLAKNEAGERKKTIIVDVLDVPGPVGTPFLAHNLTNESCKLTWFSPEDDGGSPITNYVIEKRESDRRAWTPVTYTVTRQNATVQGLIQGKAYFFRIAAENSIGMGPFVETSEALVIREPITVPERPEDLEVKEVTKNTVTLTWNPPKYDGGSEIINYVLESRLIGTEKFHKVTNDNLLSRKYTVKGLKEGDTYEYRVSAVNIVGQGKPSFCTKPITCKDELAPPTLHLDFRDKLTIRVGEAFALTGRYSGKPKPKVSWFKDEADVLEDDRTHIKTTPATLALEKIKAKRSDSGKYCVVVENSTGSRKGFCQVNVVDRPGPPVGPVSFDEVTKDYMVISWKPPLDDGGSKITNYIIEKKEVGKDVWMPVTSASAKTTCKVSKLLEGKDYIFRIHAENLYGISDPLVSDSMKAKDRFRVPDAPDQPIVTEVTKDSALVTWNKPHDGGKPITNYILEKRETMSKRWARVTKDPIHPYTKFRVPDLLEGCQYEFRVSAENEIGIGDPSPPSKPVFAKDPIAKPSPPVNPEAIDTTCNSVDLTWQPPRHDGGSKILGYIVEYQKVGDEEWRRANHTPESCPETKYKVTGLRDGQTYKFRVLAVNAAGESDPAHVPEPVLVKDRLEPPELILDANMAREQHIKVGDTLRLSAIIKGVPFPKVTWKKEDRDAPTKARIDVTPVGSKLEIRNAAHEDGGIYSLTVENPAGSKTVSVKVLVLDKPGPPRDLEVSEIRKDSCYLTWKEPLDDGGSVITNYVVERRDVASAQWSPLSATSKKKSHFAKHLNEGNQYLFRVAAENQYGRGPFVETPKPIKALDPLHPPGPPKDLHHVDVDKTEVSLVWNKPDRDGGSPITGYLVEYQEEGTQDWIKFKTVTNLECVVTGLQQGKTYRFRVKAENIVGLGLPDTTIPIECQEKLVPPSVELDVKLIEGLVVKAGTTVRFPAIIRGVPVPTAKWTTDGSEIKTDEHYTVETDNFSSVLTIKNCLRRDTGEYQITVSNAAGSKTVAVHLTVLDVPGPPTGPINILDVTPEHMTISWQPPKDDGGSPVINYIVEKQDTRKDTWGVVSSGSSKTKLKIPHLQKGCEYVFRVRAENKIGVGPPLDSTPTVAKHKFSPPSPPGKPVVTDITENAATVSWTLPKSDGGSPITGYYMERREVTGKWVRVNKTPIADLKFRVTGLYEGNTYEFRVFAENLAGLSKPSPSSDPIKACRPIKPPGPPINPKLKDKSRETADLVWTKPLSDGGSPILGYVVECQKPGTAQWNRINKDELIRQCAFRVPGLIEGNEYRFRIKAANIVGEGEPRELAESVIAKDILHPPEVELDVTCRDVITVRVGQTIRILARVKGRPEPDITWTKEGKVLVREKRVDLIQDLPRVELQIKEAVRADHGKYIISAKNSSGHAQGSAIVNVLDRPGPCQNLKVTNVTKENCTISWENPLDNGGSEITNFIVEYRKPNQKGWSIVASDVTKRLIKANLLANNEYYFRVCAENKVGVGPTIETKTPILAINPIDRPGEPENLHIADKGKTFVYLKWRRPDYDGGSPNLSYHVERRLKGSDDWERVHKGSIKETHYMVDRCVENQIYEFRVQTKNEGGESDWVKTEEVVVKEDLQKPVLDLKLSGVLTVKAGDTIRLEAGVRGKPFPEVAWTKDKDATDLTRSPRVKIDTRADSSKFSLTKAKRSDGGKYVVTATNTAGSFVAYATVNVLDKPGPVRNLKIVDVSSDRCTVCWDPPEDDGGCEIQNYILEKCETKRMVWSTYSATVLTPGTTVTRLIEGNEYIFRVRAENKIGTGPPTESKPVIAKTKYDKPGRPDPPEVTKVSKEEMTVVWNPPEYDGGKSITGYFLEKKEKHSTRWVPVNKSAIPERRMKVQNLLPDHEYQFRVKAENEIGIGEPSLPSRPVVAKDPIEPPGPPTNFRVVDTTKHSITLGWGKPVYDGGAPIIGYVVEMRPKIADASPDEGWKRCNAAAQLVRKEFTVTSLDENQEYEFRVCAQNQVGIGRPAELKEAIKPKEILEPPEIDLDASMRKLVIVRAGCPIRLFAIVRGRPAPKVTWRKVGIDNVVRKGQVDLVDTMAFLVIPNSTRDDSGKYSLTLVNPAGEKAVFVNVRVLDTPGPVSDLKVSDVTKTSCHVSWAPPENDGGSQVTHYIVEKREADRKTWSTVTPEVKKTSFHVTNLVPGNEYYFRVTAVNEYGPGVPTDVPKPVLASDPLSEPDPPRKLEVTEMTKNSATLAWLPPLRDGGAKIDGYITSYREEEQPADRWTEYSVVKDLSLVVTGLKEGKKYKFRVAARNAVGVSLPREAEGVYEAKEQLLPPKILMPEQITIKAGKKLRIEAHVYGKPHPTCKWKKGEDEVVTSSHLAVHKADSSSILIIKDVTRKDSGYYSLTAENSSGTDTQKIKVVVMDAPGPPQPPFDISDIDADACSLSWHIPLEDGGSNITNYIVEKCDVSRGDWVTALASVTKTSCRVGKLIPGQEYIFRVRAENRFGISEPLTSPKMVAQFPFGVPSEPKNARVTKVNKDCIFVAWDRPDSDGGSPIIGYLIERKERNSLLWVKANDTLVRSTEYPCAGLVEGLEYSFRIYALNKAGSSPPSKPTEYVTARMPVDPPGKPEVIDVTKSTVSLIWARPKHDGGSKIIGYFVEACKLPGDKWVRCNTAPHQIPQEEYTATGLEEKAQYQFRAIARTAVNISPPSEPSDPVTILAENVPPRIDLSVAMKSLLTVKAGTNVCLDATVFGKPMPTVSWKKDGTLLKPAEGIKMAMQRNLCTLELFSVNRKDSGDYTITAENSSGSKSATIKLKVLDKPGPPASVKINKMYSDRAMLSWEPPLEDGGSEITNYIVDKRETSRPNWAQVSATVPITSCSVEKLIEGHEYQFRICAENKYGVGDPVFTEPAIAKNPYDPPGRCDPPVISNITKDHMTVSWKPPADDGGSPITGYLLEKRETQAVNWTKVNRKPIIERTLKATGLQEGTEYEFRVTAINKAGPGKPSDASKAAYARDPQYPPGPPAFPKVYDTTRSSVSLSWGKPAYDGGSPIIGYLVEVKRADSDNWVRCNLPQNLQKTRFEVTGLMEDTQYQFRVYAVNKIGYSDPSDVPDKHYPKDILIPPEGELDADLRKTLILRAGVTMRLYVPVKGRPPPKITWSKPNVNLRDRIGLDIKSTDFDTFLRCENVNKYDAGKYILTLENSCGKKEYTIVVKVLDTPGPPVNVTVKEISKDSAYVTWEPPIIDGGSPIINYVVQKRDAERKSWSTVTTECSKTSFRVANLEEGKSYFFRVFAENEYGIGDPGETRDAVKASQTPGPVVDLKVRSVSKSSCSIGWKKPHSDGGSRIIGYVVDFLTEENKWQRVMKSLSLQYSAKDLTEGKEYTFRVSAENENGEGTPSEITVVARDDVVAPDLDLKGLPDLCYLAKENSNFRLKIPIKGKPAPSVSWKKGEDPLATDTRVSVESSAVNTTLIVYDCQKSDAGKYTITLKNVAGTKEGTISIKVVGKPGIPTGPIKFDEVTAEAMTLKWAPPKDDGGSEITNYILEKRDSVNNKWVTCASAVQKTTFRVTRLHEGMEYTFRVSAENKYGVGEGLKSEPIVARHPFDVPDAPPPPNIVDVRHDSVSLTWTDPKKTGGSPITGYHLEFKERNSLLWKRANKTPIRMRDFKVTGLTEGLEYEFRVMAINLAGVGKPSLPSEPVVALDPIDPPGKPEVINITRNSVTLIWTEPKYDGGHKLTGYIVEKRDLPSKSWMKANHVNVPECAFTVTDLVEGGKYEFRIRAKNTAGAISAPSESTETIICKDEYEAPTIVLDPTIKDGLTIKAGDTIVLNAISILGKPLPKSSWSKAGKDIRPSDITQITSTPTSSMLTIKYATRKDAGEYTITATNPFGTKVEHVKVTVLDVPGPPGPVEISNVSAEKATLTWTPPLEDGGSPIKSYILEKRETSRLLWTVVSEDIQSCRHVATKLIQGNEYIFRVSAVNHYGKGEPVQSEPVKMVDRFGPPGPPEKPEVSNVTKNTATVSWKRPVDDGGSEITGYHVERREKKSLRWVRAIKTPVSDLRCKVTGLQEGSTYEFRVSAENRAGIGPPSEASDSVLMKDAAYPPGPPSNPHVTDTTKKSASLAWGKPHYDGGLEITGYVVEHQKVGDEAWIKDTTGTALRITQFVVPDLQTKEKYNFRISAINDAGVGEPAVIPDVEIVEREMAPDFELDAELRRTLVVRAGLSIRIFVPIKGRPAPEVTWTKDNINLKNRANIENTESFTLLIIPECNRYDTGKFVMTIENPAGKKSGFVNVRVLDTPGPVLNLRPTDITKDSVTLHWDLPLIDGGSRITNYIVEKREATRKSYSTATTKCHKCTYKVTGLSEGCEYFFRVMAENEYGIGEPTETTEPVKASEAPSPPDSLNIMDITKSTVSLAWPKPKHDGGSKITGYVIEAQRKGSDQWTHITTVKGLECVVRNLTEGEEYTFQVMAVNSAGRSAPRESRPVIVKEQTMLPELDLRGIYQKLVIAKAGDNIKVEIPVLGRPKPTVTWKKGDQILKQTQRVNFETTATSTILNINECVRSDSGPYPLTARNIVGEVGDVITIQVHDIPGPPTGPIKFDEVSSDFVTFSWDPPENDGGVPISNYVVEMRQTDSTTWVELATTVIRTTYKATRLTTGLEYQFRVKAQNRYGVGPGITSACIVANYPFKVPGPPGTPQVTAVTKDSMTISWHEPLSDGGSPILGYHVERKERNGILWQTVSKALVPGNIFKSSGLTDGIAYEFRVIAENMAGKSKPSKPSEPMLALDPIDPPGKPVPLNITRHTVTLKWAKPEYTGGFKITSYIVEKRDLPNGRWLKANFSNILENEFTVSGLTEDAAYEFRVIAKNAAGAISPPSEPSDAITCRDDVEAPKIKVDVKFKDTVILKAGEAFRLEADVSGRPPPTMEWSKDGKELEGTAKLEIKIADFSTNLVNKDSTRRDSGAYTLTATNPGGFAKHIFNVKVLDRPGPPEGPLAVTEVTSEKCVLSWFPPLDDGGAKIDHYIVQKRETSRLAWTNVASEVQVTKLKVTKLLKGNEYIFRVMAVNKYGVGEPLESEPVLAVNPYGPPDPPKNPEVTTITKDSMVVCWGHPDSDGGSEIINYIVERRDKAGQRWIKCNKKTLTDLRYKVSGLTEGHEYEFRIMAENAAGISAPSPTSPFYKACDTVFKPGPPGNPRVLDTSRSSISIAWNKPIYDGGSEITGYMVEIALPEEDEWQIVTPPAGLKATSYTITGLTENQEYKIRIYAMNSEGLGEPALVPGTPKAEDRMLPPEIELDADLRKVVTIRACCTLRLFVPIKGRPAPEVKWARDHGESLDKASIESTSSYTLLIVGNVNRFDSGKYILTVENSSGSKSAFVNVRVLDTPGPPQDLKVKEVTKTSVTLTWDPPLLDGGSKIKNYIVEKRESTRKAYSTVATNCHKTSWKVDQLQEGCSYYFRVLAENEYGIGLPAETAESVKASERPLPPGKITLMDVTRNSVSLSWEKPEHDGGSRILGYIVEMQTKGSDKWATCATVKVTEATITGLIQGEEYSFRVSAQNEKGISDPRQLSVPVIAKDLVIPPAFKLLFNTFTVLAGEDLKVDVPFIGRPTPAVTWHKDNVPLKQTTRVNAESTENNSLLTIKDACREDVGHYVVKLTNSAGEAIETLNVIVLDKPGPPTGPVKMDEVTADSITLSWGPPKYDGGSSINNYIVEKRDTSTTTWQIVSATVARTTIKACRLKTGCEYQFRIAAENRYGKSTYLNSEPTVAQYPFKVPGPPGTPVVTLSSRDSMEVQWNEPISDGGSRVIGYHLERKERNSILWVKLNKTPIPQTKFKTTGLEEGVEYEFRVSAENIVGIGKPSKVSECYVARDPCDPPGRPEAIIVTRNSVTLQWKKPTYDGGSKITGYIVEKKELPEGRWMKASFTNIIDTHFEVTGLVEDHRYEFRVIARNAAGVFSEPSESTGAITARDEVDPPRISMDPKYKDTIVVHAGESFKVDADIYGKPIPTIQWIKGDQELSNTARLEIKSTDFATSLSVKDAVRVDSGNYILKAKNVAGERSVTVNVKVLDRPGPPEGPVVISGVTAEKCTLAWKPPLQDGGSDIINYIVERRETSRLVWTVVDANVQTLSCKVTKLLEGNEYTFRIMAVNKYGVGEPLESEPVVAKNPFVVPDAPKAPEVTTVTKDSMIVVWERPASDGGSEILGYVLEKRDKEGIRWTRCHKRLIGELRLRVTGLIENHDYEFRVSAENAAGLSEPSPPSAYQKACDPIYKPGPPNNPKVIDITRSSVFLSWSKPIYDGGCEIQGYIVEKCDVSVGEWTMCTPPTGINKTNIEVEKLLEKHEYNFRICAINKAGVGEHADVPGPIIVEEKLEAPDIDLDLELRKIINIRAGGSLRLFVPIKGRPTPEVKWGKVDGEIRDAAIIDVTSSFTSLVLDNVNRYDSGKYTLTLENSSGTKSAFVTVRVLDTPSPPVNLKVTEITKDSVSITWEPPLLDGGSKIKNYIVEKREATRKSYAAVVTNCHKNSWKIDQLQEGCSYYFRVTAENEYGIGLPAQTADPIKVAEVPQPPGKITVDDVTRNSVSLSWTKPEHDGGSKIIQYIVEMQAKHSEKWSECARVKSLQAVITNLTQGEEYLFRVVAVNEKGRSDPRSLAVPIVAKDLVIEPDVKPAFSSYSVQVGQDLKIEVPISGRPKPTITWTKDGLPLKQTTRINVTDSLDLTTLSIKETHKDDGGQYGITVANVVGQKTASIEIVTLDKPDPPKGPVKFDDVSAESITLSWNPPLYTGGCQITNYIVQKRDTTTTVWDVVSATVARTTLKVTKLKTGTEYQFRIFAENRYGQSFALESDPIVAQYPYKEPGPPGTPFATAISKDSMVIQWHEPVNNGGSPVIGYHLERKERNSILWTKVNKTIIHDTQFKAQNLEEGIEYEFRVYAENIVGVGKASKNSECYVARDPCDPPGTPEPIMVKRNEITLQWTKPVYDGGSMITGYIVEKRDLPDGRWMKASFTNVIETQFTVSGLTEDQRYEFRVIAKNAAGAISKPSDSTGPITAKDEVELPRISMDPKFRDTIVVNAGETFRLEADVHGKPLPTIEWLRGDKEIEESARCEIKNTDFKALLIVKDAIRIDGGQYILRASNVAGSKSFPVNVKVLDRPGPPEGPVQVTGVTSEKCSLTWSPPLQDGGSDISHYVVEKRETSRLAWTVVASEVVTNSLKVTKLLEGNEYVFRIMAVNKYGVGEPLESAPVLMKNPFVLPGPPKSLEVTNIAKDSMTVCWNRPDSDGGSEIIGYIVEKRDRSGIRWIKCNKRRITDLRLRVTGLTEDHEYEFRVSAENAAGVGEPSPATVYYKACDPVFKPGPPTNAHIVDTTKNSITLAWGKPIYDGGSEILGYVVEICKADEEEWQIVTPQTGLRVTRFEISKLTEHQEYKIRVCALNKVGLGEATSVPGTVKPEDKLEAPELDLDSELRKGIVVRAGGSARIHIPFKGRPTPEITWSREEGEFTDKVQIEKGVNYTQLSIDNCDRNDAGKYILKLENSSGSKSAFVTVKVLDTPGPPQNLAVKEVRKDSAFLVWEPPIIDGGAKVKNYVIDKRESTRKAYANVSSKCSKTSFKVENLTEGAIYYFRVMAENEFGVGVPVETVDAVKAAEPPSPPGKVTLTDVSQTSASLMWEKPEHDGGSRVLGYVVEMQPKGTEKWSIVAESKVCNAVVTGLSSGQEYQFRVKAYNEKGKSDPRVLGVPVIAKDLTIQPSLKLPFNTYSIQAGEDLKIEIPVIGRPRPNISWVKDGEPLKQTTRVNVEETATSTVLHIKEGNKDDFGKYTVTATNSAGTATENLSVIVLEKPGPPVGPVRFDEVSADFVVISWEPPAYTGGCQISNYIVEKRDTTTTTWHMVSATVARTTIKITKLKTGTEYQFRIFAENRYGKSAPLDSKAVIVQYPFKEPGPPGTPFVTSISKDQMLVQWHEPVNDGGTKIIGYHLEQKEKNSILWVKLNKTPIQDTKFKTTGLDEGLEYEFKVSAENIVGIGKPSKVSECFVARDPCDPPGRPEAIVITRNNVTLKWKKPAYDGGSKITGYIVEKKDLPDGRWMKASFTNVLETEFTVSGLVEDQRYEFRVIARNAAGNFSEPSDSSGAITARDEIDAPNASLDPKYKDVIVVHAGETFVLEADIRGKPIPDVVWSKDGKELEETAARMEIKSTIQKTTLVVKDCIRTDGGQYILKLSNVGGTKSIPITVKVLDRPGPPEGPLKVTGVTAEKCYLAWNPPLQDGGANISHYIIEKRETSRLSWTQVSTEVQALNYKVTKLLPGNEYIFRVMAVNKYGIGEPLESGPVTACNPYKPPGPPSTPEVSAITKDSMVVTWARPVDDGGTEIEGYILEKRDKEGVRWTKCNKKTLTDLRLRVTGLTEGHSYEFRVAAENAAGVGEPSEPSVFYRACDALYPPGPPSNPKVTDTSRSSVSLAWSKPIYDGGAPVKGYVVEVKEAAADEWTTCTPPTGLQGKQFTVTKLKENTEYNFRICAINSEGVGEPATLPGSVVAQERIEPPEIELDADLRKVVVLRASATLRLFVTIKGRPEPEVKWEKAEGILTDRAQIEVTSSFTMLVIDNVTRFDSGRYNLTLENNSGSKTAFVNVRVLDSPSAPVNLTIREVKKDSVTLSWEPPLIDGGAKITNYIVEKRETTRKAYATITNNCTKTTFRIENLQEGCSYYFRVLASNEYGIGLPAETTEPVKVSEPPLPPGRVTLVDVTRNTATIKWEKPESDGGSKITGYVVEMQTKGSEKWSTCTQVKTLEATISGLTAGEEYVFRVAAVNEKGRSDPRQLGVPVIARDIEIKPSVELPFHTFNVKAREQLKIDVPFKGRPQATVNWRKDGQTLKETTRVNVSSSKTVTSLSIKEASKEDVGTYELCVSNSAGSITVPITIIVLDRPGPPGPIRIDEVSCDSITISWNPPEYDGGCQISNYIVEKKETTSTTWHIVSQAVARTSIKIVRLTTGSEYQFRVCAENRYGKSSYSESSAVVAEYPFSPPGPPGTPKVVHATKSTMLVTWQVPVNDGGSRVIGYHLEYKERSSILWSKANKILIADTQMKVSGLDEGLMYEYRVYAENIAGIGKCSKSCEPVPARDPCDPPGQPEVTNITRKSVSLKWSKPHYDGGAKITGYIVERRELPDGRWLKCNYTNIQETYFEVTELTEDQRYEFRVFARNAADSVSEPSESTGPIIVKDDVEPPRVMMDVKFRDVIVVKAGEVLKINADIAGRPLPVISWAKDGIEIEERARTEIISTDNHTLLTVKDCIRRDTGQYVLTLKNVAGTRSVAVNCKVLDKPGPPAGPLEINGLTAEKCSLSWGRPQEDGGADIDYYIVEKRETSHLAWTICEGELQMTSCKVTKLLKGNEYIFRVTGVNKYGVGEPLESVAIKALDPFTVPSPPTSLEITSVTKESMTLCWSRPESDGGSEISGYIIERREKNSLRWVRVNKKPVYDLRVKSTGLREGCEYEYRVYAENAAGLSLPSETSPLIRAEDPVFLPSPPSKPKIVDSGKTTITIAWVKPLFDGGAPITGYTVEYKKSDDTDWKTSIQSLRGTEYTISGLTTGAEYVFRVKSVNKVGASDPSDSSDPQIAKEREEEPLFDIDSEMRKTLIVKAGASFTMTVPFRGRPVPNVLWSKPDTDLRTRAYVDTTDSRTSLTIENANRNDSGKYTLTIQNVLSAASLTLVVKVLDTPGPPTNITVQDVTKESAVLSWDVPENDGGAPVKNYHIEKREASKKAWVSVTNNCNRLSYKVTNLQEGAIYYFRVSGENEFGVGIPAETKEGVKITEKPSPPEKLGVTSISKDSVSLTWLKPEHDGGSRIVHYVVEALEKGQKNWVKCAVAKSTHHVVSGLRENSEYFFRVFAENQAGLSDPRELLLPVLIKEQLEPPEIDMKNFPSHTVYVRAGSNLKVDIPISGKPLPKVTLSRDGVPLKATMRFNTEITAENLTINLKESVTADAGRYEITAANSSGTTKAFINIVVLDRPGPPTGPVVISDITEESVTLKWEPPKYDGGSQVTNYILLKRETSTAVWTEVSATVARTMMKVMKLTTGEEYQFRIKAENRFGISDHIDSACVTVKLPYTTPGPPSTPWVTNVTRESITVGWHEPVSNGGSAVVGYHLEMKDRNSILWQKANKLVIRTTHFKVTTISAGLIYEFRVYAENAAGVGKPSHPSEPVLAIDACEPPRNVRITDISKNSVSLSWQQPAFDGGSKITGYIVERRDLPDGRWTKASFTNVTETQFIISGLTQNSQYEFRVFARNAVGSISNPSEVVGPITCIDSYGGPVIDLPLEYTEVVKYRAGTSVKLRAGISGKPAPTIEWYKDDKELQTNALVCVENTTDLASILIKDADRLNSGCYELKLRNAMGSASATIRVQILDKPGPPGGPIEFKTVTAEKITLLWRPPADDGGAKITHYIVEKRETSRVVWSMVSEHLEECIITTTKIIKGNEYIFRVRAVNKYGIGEPLESDSVVAKNAFVTPGPPGIPEVTKITKNSMTVVWSRPIADGGSDISGYFLEKRDKKSLGWFKVLKETIRDTRQKVTGLTENSDYQYRVCAVNAAGQGPFSEPSEFYKAADPIDPPGPPAKIRIADSTKSSITLGWSKPVYDGGSAVTGYVVEIRQGEEEEWTTVSTKGEVRTTEYVVSNLKPGVNYYFRVSAVNCAGQGEPIEMNEPVQAKDILEAPEIDLDVALRTSVIAKAGEDVQVLIPFKGRPPPTVTWRKDEKNLGSDARYSIENTDSSSLLTIPQVTRNDTGKYILTIENGVGEPKSSTVSVKVLDTPAACQKLQVKHVSRGTVTLLWDPPLIDGGSPIINYVIEKRDATKRTWSVVSHKCSSTSFKLIDLSEKTPFFFRVLAENEIGIGEPCETTEPVKAAEVPAPIRDLSMKDSTKTSVILSWTKPDFDGGSVITEYVVERKGKGEQTWSHAGISKTCEIEVSQLKEQSVLEFRVFAKNEKGLSDPVTIGPITVKELIITPEVDLSDIPGAQVTVRIGHNVHLELPYKGKPKPSISWLKDGLPLKESEFVRFSKTENKITLSIKNAKKEHGGKYTVILDNAVCRIAVPITVITLGPPSKPKGPIRFDEIKADSVILSWDVPEDNGGGEITCYSIEKRETSQTNWKMVCSSVARTTFKVPNLVKDAEYQFRVRAENRYGVSQPLVSSIIVAKHQFRIPGPPGKPVIYNVTSDGMSLTWDAPVYDGGSEVTGFHVEKKERNSILWQKVNTSPISGREYRATGLVEGLDYQFRVYAENSAGLSSPSDPSKFTLAVSPVDPPGTPDYIDVTRETITLKWNPPLRDGGSKIVGYSIEKRQGNERWVRCNFTDVSECQYTVTGLSPGDRYEFRIIARNAVGTISPPSQSSGIIMTRDENVPPIVEFGPEYFDGLIIKSGESLRIKALVQGRPVPRVTWFKDGVEIEKRMNMEITDVLGSTSLFVRDATRDHRGVYTVEAKNASGSAKAEIKVKVQDTPGKVVGPIRFTNITGEKMTLWWDAPLNDGCAPITHYIIEKRETSRLAWALIEDKCEAQSYTAIKLINGNEYQFRVSAVNKFGVGRPLDSDPVVAQIQYTVPDAPGIPEPSNITGNSITLTWARPESDGGSEIQQYILERREKKSTRWVKVISKRPISETRFKVTGLTEGNEYEFHVMAENAAGVGPASGISRLIKCREPVNPPGPPTVVKVTDTSKTTVSLEWSKPVFDGGMEIIGYIIEMCKADLGDWHKVNAEACVKTRYTVTDLQAGEEYKFRVSAINGAGKGDSCEVTGTIKAVDRLTAPELDIDANFKQTHVVRAGASIRLFIAYQGRPTPTAVWSKPDSNLSLRADIHTTDSFSTLTVENCNRNDAGKYTLTVENNSGSKSITFTVKVLDTPGPPGPITFKDVTRGSATLMWDAPLLDGGARIHHYVVEKREASRRSWQVISEKCTRQIFKVNDLAEGVPYYFRVSAVNEYGVGEPYEMPEPIVATEQPAPPRRLDVVDTSKSSAVLAWLKPDHDGGSRITGYLLEMRQKGSDFWVEAGHTKQLTFTVERLVEKTEYEFRVKAKNDAGYSEPREAFSSVIIKEPQIEPTADLTGITNQLITCKAGSPFTIDVPISGRPAPKVTWKLEEMRLKETDRVSITTTKDRTTLTVKDSMRGDSGRYFLTLENTAGVKTFSVTVVVIGRPGPVTGPIEVSSVSAESCVLSWGEPKDGGGTEITNYIVEKRESGTTAWQLVNSSVKRTQIKVTHLTKYMEYSFRVSSENRFGVSKPLESAPIIAEHPFVPPSAPTRPEVYHVSANAMSIRWEEPYHDGGSKIIGYWVEKKERNTILWVKENKVPCLECNYKVTGLVEGLEYQFRTYALNAAGVSKASEASRPIMAQNPVDAPGRPEVTDVTRSTVSLIWSAPAYDGGSKVVGYIIERKPVSEVGDGRWLKCNYTIVSDNFFTVTALSEGDTYEFRVLAKNAAGVISKGSESTGPVTCRDEYAPPKAELDARLHGDLVTIRAGSDLVLDAAVGGKPEPKIIWTKGDKELDLCEKVSLQYTGKRATAVIKFCDRSDSGKYTLTVKNASGTKAVSVMVKVLDSPGPCGKLTVSRVTQEKCTLAWSLPQEDGGAEITHYIVERRETSRLNWVIVEGECPTLSYVVTRLIKNNEYIFRVRAVNKYGPGVPVESEPIVARNSFTIPSPPGIPEEVGTGKEHIIIQWTKPESDGGNEISNYLVDKREKKSLRWTRVNKDYVVYDTRLKVTSLMEGCDYQFRVTAVNAAGNSEPSEASNFISCREPSYTPGPPSAPRVVDTTKHSISLAWTKPMYDGGTDIVGYVLEMQEKDTDQWYRVHTNATIRNTEFTVPDLKMGQKYSFRVAAVNVKGMSEYSESIAEIEPVERIEIPDLELADDLKKTVTIRAGASLRLMVSVSGRPPPVITWSKQGIDLASRAIIDTTESYSLLIVDKVNRYDAGKYTIEAENQSGKKSATVLVKVYDTPGPCPSVKVKEVSRDSVTITWEIPTIDGGAPVNNYIVEKREAAMRAFKTVTTKCSKTLYRISGLVEGTMYYFRVLPENIYGIGEPCETSDAVLVSEVPLVPAKLEVVDVTKSTVTLAWEKPLYDGGSRLTGYVLEACKAGTERWMKVVTLKPTVLEHTVTSLNEGEQYLFRIRAQNEKGVSEPRETVTAVTVQDLRVLPTIDLSTMPQKTIHVPAGRPVELVIPIAGRPPPAASWFFAGSKLRESERVTVETHTKVAKLTIRETTIRDTGEYTLELKNVTGTTSETIKVIILDKPGPPTGPIKIDEIDATSITISWEPPELDGGAPLSGYVVEQRDAHRPGWLPVSESVTRSTFKFTRLTEGNEYVFRVAATNRFGIGSYLQSEVIECRSSIRIPGPPETLQIFDVSRDGMTLTWYPPEDDGGSQVTGYIVERKEVRADRWVRVNKVPVTMTRYRSTGLTEGLEYEHRVTAINARGSGKPSRPSKPIVAMDPIAPPGKPQNPRVTDTTRTSVSLAWSVPEDEGGSKVTGYLIEMQKVDQHEWTKCNTTPTKIREYTLTHLPQGAEYRFRVLACNAGGPGEPAEVPGTVKVTEMLEYPDYELDERYQEGIFVRQGGVIRLTIPIKGKPFPICKWTKEGQDISKRAMIATSETHTELVIKEADR

SEQ ID NO: 88989 - protein, 32767 aa, Homo sapiens; identical to SEQ ID NO: 88987
  Payload ID: 17810
  Gene Name: titin
  Uniprot ID: Q8WZ42
  ENSP ID: ENSP00000483597

SEQ ID NO: 88990 - protein, 354 aa, Homo sapiens
  Payload ID: 17810
  Gene Name: titin
  ENSP ID: ENSP00000489532
  MOD_RES (1)..(1): Any amino acid
XSTAKLFVEGRDVRIRSIKKEVQVIEKQRAVVEFEVNEDDVDAHWYKDGIEINFQVQERHKYVVERRIHRMFISETRQSDAGEYTFVAGRNRSSVTLYVNAPEPPQVLQELQPVTVQSGKPARFCAVISGRPQPKISWYKEEQLLSTGFKCKFLHDGQEYTLLLIEAFPEDAAVYTCEAKNDYGVATTSASLSVEVPEVVSPDQEMPVYPPAIITPLQDTVTSEGQPARFQCRVSGTDLKVSWYSKDKKIKPSRFFRMTQFEDTYQLEIAEAYPEDEGTYTFVASNAVGQVSSTANLSLEAKESQARALTKITLGSDTKSIKTLRESQIKTTREVKRESSKKTSSLSLTSCQKP

SEQ ID NO: 88991 - protein, 167 aa, Homo sapiens
  Payload ID: 17811
  Gene Name: titin-cap
  Uniprot ID: O15273
  ENSP ID: ENSP00000312624
MATSELSCEVSEENCERREAFWAEWKDLTLSTRPEEGCSLHEEDTQRHETYHQQGQCQVLVQRSPWLMMRMGILGRGLQEYQLPYQRVLPLPIFTPAKMGATKEEREDTPIQLQELLALETALGGQCVDRQEVAEITKQLPPVVPVSKPGALRRSLSRSMSQEAQRG

SEQ ID NO: 88992 - protein, 143 aa, Homo sapiens
  Payload ID: 17811
  Gene Name: titin-cap
  ENSP ID: ENSP00000462787
MATSELSCEVSEENCERREAFWAEWKDLTLSTRPEEGCSLHEEDTQRHETYHQQGQCQLPYQRVLPLPIFTPAKMGATKEEREDTPIQLQELLALETALGGQCVDRQEVAEITKQLPPVVPVSKPGALRRSLSRSMSQEAQRG

SEQ ID NO: 88993 - protein, 247 aa, Homo sapiens
  Payload ID: 17812
  Gene Name: TLC domain containing 1
  Uniprot ID: Q96CP7
  ENSP ID: ENSP00000292090
MPRLLHPALPLLLGATLTFRALRRALCRLPLPVHVRADPLRTWRWHNLLVSFAHSIVSGIWALLCVWQTPDMLVEIETAWSLSGYLLVCFSAGYFIHDTVDIVASGQTRASWEYLVHHVMAMGAFFSGIFWSSFVGGGVLTLLVEVSNIFLTIRMMMKISNAQDHLLYRVNKYVNLVMYFLFRLAPQAYLTHFFLRYVNQRTLGTFLLGILLMLDVMIIIYFSRLLRSDFCPEHVPKKQHKDKFLTE

SEQ ID NO: 88994 - protein, 200 aa, Homo sapiens
  Payload ID: 17812
  Gene Name: TLC domain containing 1
  Uniprot ID: Q96CP7
  ENSP ID: ENSP00000378391
MGYSAVPKCPPRGRGRDSVWQTPDMLVEIETAWSLSGYLLVCFSAGYFIHDTVDIVASGQTRASWEYLVHHVMAMGAFFSGIFWSSFVGGGVLTLLVEVSNIFLTIRMMMKISNAQDHLLYRVNKYVNLVMYFLFRLAPQAYLTHFFLRYVNQRTLGTFLLGILLMLDVMIIIYFSRLLRSDFCPEHVPKKQHKDKFLTE

SEQ ID NO: 88995 - protein, 147 aa, Homo sapiens
  Payload ID: 17812
  Gene Name: TLC domain containing 1
  ENSP ID: ENSP00000466264
MLVEIETAWSLSGYLLVCFSAGYFIHDTVDIVASGQTRASWEYLVHHVMAMGAFFSGIFWSSFVGGGVLTLLVEVSNIFLTIRMMMKISNAQDHLLYRVNKYVNLVMYFLFRLAPQAYLTHFFLRYVNQRTLGTFLLGILLMLDVMI

SEQ ID NO: 88996 - protein, 53 aa, Homo sapiens
  Payload ID: 17812
  Gene Name: TLC domain containing 1
  ENSP ID: ENSP00000468670
  MOD_RES (1)..(1): Any amino acid
XGGGVLTLLVEVSNIFLTIRMMMKISNAQDHLLYRVNKGPWAPSCWVSCSCWT

SEQ ID NO: 88997 - protein, 264 aa, Homo sapiens
  Payload ID: 17813
  Gene Name: TLC domain containing 2
  Uniprot ID: A6NGC4
  ENSP ID: ENSP00000331965
MAPTGLLVAGASFLAFRGLHWGLRRLPTPESAARDRWQWWNLCVSLAHSLLSGTGALLGLSLYPQMAADPIHGHPRWALVLVAVSVGYFLADGADLLWNQTLGKTWDLLCHHLVVVSCLSTAVLSGHYVGFSMVSLLLELNSACLHLRKLLLLSRQAPSLAFSVTSWASLATLALFRLVPLGWMSLWLFRQHHQVPLALVTLGGIGLVTVGIMSIILGIRILVNDVLQSRPHPPSPGHEKTRGTRTRRDNGPVTSNSSTLSLKD

SEQ ID NO: 88998 - protein, 264 aa, Homo sapiens; identical to SEQ ID NO: 88997
  Payload ID: 17813
  Gene Name: TLC domain containing 2
  Uniprot ID: A6NGC4
  ENSP ID: ENSP00000479301

SEQ ID NO: 88999 - protein, 811 aa, Homo sapiens
  Payload ID: 17814
  Gene Name: TLR4 interactor with leucine-rich repeats
  Uniprot ID: Q7L0X0
  ENSP ID: ENSP00000479256
MEAARALRLLLVVCGCLALPPLAEPVCPERCDCQHPQHLLCTNRGLRVVPKTSSLPSPHDVLTYSLGGNFITNITAFDFHRLGQLRRLDLQYNQIRSLHPKTFEKLSRLEELYLGNNLLQALAPGTLAPLRKLRILYANGNEISRLSRGSFEGLESLVKLRLDGNALGALPDAVFAPLGNLLYLHLESNRIRFLGKNAFAQLGKLRFLNLSANELQPSLRHAATFAPLRSLSSLILSANNLQHLGPRIFQHLPRLGLLSLRGNQLTHLAPEAFWGLEALRELRLEGNRLSQLPTALLEPLHSLEALDLSGNELSALHPATFGHLGRLRELSLRNNALSALSGDIFAASPALYRLDLDGNGWTCDCRLRGLKRWMGDWHSQGRLLTVFVQCRHPPALRGKYLDYLDDQQLQNGSCADPSPSASLTADRRRQPLPTAAGEEMTPPAGLAEELPPQPQLQQQGRFLAGVAWDGAARELVGNRSALRLSRRGPGLQQPSPSVAAAAGPAPQSLDLHKKPQRGRPTRADPALAEPTPTASPGSAPSPAGDPWQRATKHRLGTEHQERAAQSDGGAGLPPLVSDPCDFNKFILCNLTVEAVGADSASVRWAVREHRSPRPLGGARFRLLFDRFGQQPKFHRFVYLPESSDSATLRELRGDTPYLVCVEGVLGGRVCPVAPRDHCAGLVTLPEAGSRGGVDYQLLTLALLTVNALLVLLALAAWASRWLRRKLRARRKGGAPVHVRHMYSTRRPLRSMGTGVSADFSGFQSHRPRTTVCALSEADLIEFPCDRFMDSAGGGAGGSLRREDRLLQRFAD

SEQ ID NO: 89000 - protein, 207 aa, Homo sapiens
  Payload ID: 17815
  Gene Name: TM2 domain containing 1
  Uniprot ID: Q9BX74
  ENSP ID: ENSP00000294613
MAAAWPSGPSAPEAVTARLVGVLWFVSVTTGPWGAVATSAGGEESLKCEDLKVGQYICKDPKINDATQEPVNCTNYTAHVSCFPAPNITCKDSSGNETHFTGNEVGFFKPISCRNVNGYSYKVAVALSLFLGWLGADRFYLGYPALGLLKFCTVGFCGIGSLIDFILISMQIVGPSDGSSYIIDYYGTRLTRLSITNETFRKTQLYP

SEQ ID NO: 89001 - protein, 269 aa, Homo sapiens
  Payload ID: 17815
  Gene Name: TM2 domain containing 1
  ENSP ID: ENSP00000360222
MHILKGSPNVIPRAHGQKNTRRDGTGLYPMRGPFKNLALLPFSLPLLGGGGSGSGEKVSVSKMAAAWPSGPSAPEAVTARLVGVLWFVSVTTGPWGAVATSAGGEESLKCEDLKVGQYICKDPKINDATQEPVNCTNYTAHVSCFPAPNITCKDSSGNETHFTGNEVGFFKPISCRNVNGYSYKVAVALSLFLGWLGADRFYLGYPALGLLKFCTVGFCGIGSLIDFILISMQIVGPSDGSSYIIDYYGTRLTRLSITNETFRKTQLYP

SEQ ID NO: 89002 - protein, 53 aa, Homo sapiens
  Payload ID: 17815
  Gene Name: TM2 domain containing 1
  ENSP ID: ENSP00000475186
  MOD_RES (1)..(1): Any amino acid
XLVGVLWFVSVTTGPWGAVATSAGGEESLKCEDLKVGQYPLWRTPPHGGEIQK

SEQ ID NO: 89003 - protein, 186 aa, Homo sapiens
  Payload ID: 17815
  Gene Name: TM2 domain containing 1
  ENSP ID: ENSP00000475297
MAAAWPSGPSAPEAVTARLVGVLWFVSVTTGPWGAVATSAGGEESLKCEDLKVGQYICKDPKINDATQEPVNCTNYTAHVSCFPAPNITCKDSSGNETHFTGNEVGFFKPISCRNVNGYSYKVAVALSLFLGWLGADRFYLGYPALGKETVTREVKGFTESRGFPLFCDIFVVIIFVLWIGKLSRD

SEQ ID NO: 89004 - protein, 76 aa, Homo sapiens
  Payload ID: 17815
  Gene Name: TM2 domain containing 1
  ENSP ID: ENSP00000475529
MAAAWPSGPSAPEAVTARLVGVLWFVSVTTGPWGAVATSAGGEESLKCEDLKVGQYPLWRTPPHGGEVELGSQIQK

SEQ ID NO: 89005 - protein, 207 aa, Homo sapiens; identical to SEQ ID NO: 89000
  Payload ID: 17815
  Gene Name: TM2 domain containing 1
  Uniprot ID: Q9BX74
  ENSP ID: ENSP00000475700

SEQ ID NO: 89006 - protein, 77 aa, Homo sapiens
  Payload ID: 17815
  Gene Name: TM2 domain containing 1
  ENSP ID: ENSP00000475844
  MOD_RES (1)..(1): Any amino acid
XFVSVTTGPWGAVATSAGGEESLKCEDLKVGQYPLWRTPPHGGEGLTLSPWLEYSGTISAHCSLRLPGSVNSPASAS

SEQ ID NO: 89007 - protein, 104 aa, Homo sapiens
  Payload ID: 17815
  Gene Name: TM2 domain containing 1
  ENSP ID: ENSP00000476178
  MOD_RES (1)..(1): Any amino acid
XAWPSGPSAPEAVTARLVGVLWFVSVTTGPWGAVATSAGGEESLKCEDLKVGQYPLWRTPPHGGEVELGSQGLTLSPWLEYSGTISAHCSLRLPGSVNSPASAS

SEQ ID NO: 89008 - protein, 171 aa, Homo sapiens
  Payload ID: 17816
  Gene Name: TM2 domain containing 2
  Uniprot ID: Q9BX73
  ENSP ID: ENSP00000380260
MKKCLLPVLITCMQTAICKDRMMMIMILLVNYRPDEFIECEDPVDHVGNATASQELGYGCLKFGGQAYSDVEHTSVQCHALDGIECASPRTFLRENKPCIKYTGHYFITTLLYSFFLGCFGVDRFCLGHTGTAVGKLLTLGGLGIWWFVDLILLITGGLMPSDGSNWCTVY

SEQ ID NO: 89009 - protein, 171 aa, Homo sapiens; identical to SEQ ID NO: 89008
  Payload ID: 17816
  Gene Name: TM2 domain containing 2
  Uniprot ID: Q9BX73
  ENSP ID: ENSP00000391674

SEQ ID NO: 89010 - protein, 214 aa, Homo sapiens
  Payload ID: 17816
  Gene Name: TM2 domain containing 2
  Uniprot ID: Q9BX73
  ENSP ID: ENSP00000416050
MVLGGCPVSYLLLCGQAALLLGNLLLLHCVSRSHSQNATAEPELTSAGAAQPEGPGGAASWEYGDPHSPVILCSYLPDEFIECEDPVDHVGNATASQELGYGCLKFGGQAYSDVEHTSVQCHALDGIECASPRTFLRENKPCIKYTGHYFITTLLYSFFLGCFGVDRFCLGHTGTAVGKLLTLGGLGIWWFVDLILLITGGLMPSDGSNWCTVY

SEQ ID NO: 89011 - protein, 45 aa, Homo sapiens
  Payload ID: 17816
  Gene Name: TM2 domain containing 2
  ENSP ID: ENSP00000428203
MKKCLLPVLITCMQTAICKDRMMMIMILLVNYRPDEFIECEDPVD

SEQ ID NO: 89012 - protein, 120 aa, Homo sapiens
  Payload ID: 17816
  Gene Name: TM2 domain containing 2
  ENSP ID: ENSP00000428394
MKKCLLPVLITCMQTAICKDRMMMIMILLVNYRPDEFIECEDPVDHVGNATASQELGYGCLKFGGQAYSDVEHTSVQCHALDGIECASPRTFLRENKPCIKYTGHYFITTLLYSFFLGCF

SEQ ID NO: 89013 - protein, 62 aa, Homo sapiens
  Payload ID: 17816
  Gene Name: TM2 domain containing 2
  ENSP ID: ENSP00000430685
MKKCLLPVLITCMQTAICKDRMMMIMILLVNYRPDEFIECEDPVDHVGNATASQELGYGCLK

SEQ ID NO: 89014 - protein, 221 aa, Homo sapiens
  Payload ID: 17817
  Gene Name: TM2 domain containing 3
  Uniprot ID: Q9BRN9
  ENSP ID: ENSP00000327584
MAGGVLPLRGLRALCRVLLFLSQFCILSGGESTEIPPYVMKCPSNGLCSRLPADCIDCTTNFSCTYGKPVTFDCAVKPSVTCVDQDFKSQKNFIINMTCRFCWQLPETDYECTNSTSCMTVSCPRQRYPANCTVRDHVHCLGNRTFPKMLYCNWTGGYKWSTALALSITLGGFGADRFYLGQWREGLGKLFSFGGLGIWTLIDVLLIGVGYVGPADGSLYI

SEQ ID NO: 89015 - protein, 247 aa, Homo sapiens
  Payload ID: 17817
  Gene Name: TM2 domain containing 3
  Uniprot ID: Q9BRN9
  ENSP ID: ENSP00000330433
MAGGVLPLRGLRALCRVLLFLSQFCILSGGEQSQALAQSIKDPGPTRTFTVVPRAAESTEIPPYVMKCPSNGLCSRLPADCIDCTTNFSCTYGKPVTFDCAVKPSVTCVDQDFKSQKNFIINMTCRFCWQLPETDYECTNSTSCMTVSCPRQRYPANCTVRDHVHCLGNRTFPKMLYCNWTGGYKWSTALALSITLGGFGADRFYLGQWREGLGKLFSFGGLGIWTLIDVLLIGVGYVGPADGSLYI

SEQ ID NO: 89016 - protein, 183 aa, Homo sapiens
  Payload ID: 17817
  Gene Name: TM2 domain containing 3
  ENSP ID: ENSP00000402179
MAGGVLPLRGLRALCRVLLFLSQFCILSGGESTEIPPYVMKCPSNGLCSRLPADCIDCTTNFSCTYGKPVTFDCAVKPSVTCVDQDFKSQKNFIINMTCRFCWQLPETDYECTNSTSCMTVSCPRQRYPANCTVRDHVHCLGNRTFPKMLYCNWTGGYKWSTALALSLQAQVGLHVQLTVGLH

SEQ ID NO: 89017 - protein, 182 aa, Homo sapiens
  Payload ID: 17817
  Gene Name: TM2 domain containing 3
  ENSP ID: ENSP00000452823
MKCPSNGLCSRLPADCIDCTTNFSCTYGKPVTFDCAVKPSVTCVDQDFKSQKNFIINMTCRFCWQLPETDYECTNSTSCMTVSCPRQRYPANCTVRDHVHCLGNRTFPKMLYCNWTGGYKWSTALALSITLGGFGADRFYLGQWREGLGKLFSFGGLGIWTLIDVLLIGVGYVGPADGSLYI

SEQ ID NO: 89018 - protein, 42 aa, Homo sapiens
  Payload ID: 17817
  Gene Name: TM2 domain containing 3
  ENSP ID: ENSP00000453503
MAGGVLPLRGLRALCRVLLFLSQFCILSGGGESKAGFSAGWG

SEQ ID NO: 89019 - protein, 161 aa, Homo sapiens
  Payload ID: 17817
  Gene Name: TM2 domain containing 3
  ENSP ID: ENSP00000453990
  MOD_RES (1)..(1): Any amino acid
XSTEIPPYVMKCPSNGLCSRLPADCIDCTTNFSCTYGKPVTFDCAVKPSVTCVDQDFKSQKNFIINMTCRFCWQLPETDYECTNSTSCMTVSCPRQRYPANCTVRDHVHCLGNRTFPKMLYCNWTGGYKWSTALALRVGLFIDTVTTPLHSSLSHRARHCL

SEQ ID NO: 89020 - protein, 209 aa, Homo sapiens
  Payload ID: 17817
  Gene Name: TM2 domain containing 3
  ENSP ID: ENSP00000454131
MAGGVLPLRGLRALCRVLLFLSQFCILSGGEQSQALAQSIKDPGPTRTFTVVPRAAESTEIPPYVMKCPSNGLCSRLPADCIDCTTNFSCTYGKPVTFDCAVKPSVTCVDQDFKSQKNFIINMTCRFCWQLPETDYECTNSTSCMTVSCPRQRYPANCTVRDHVHCLGNRTFPKMLYCNWTGGYKWSTALALSLQAQVGLHVQLTVGLH

SEQ ID NO: 89021 - protein, 21 aa, Homo sapiens
  Payload ID: 17817
  Gene Name: TM2 domain containing 3
  ENSP ID: ENSP00000456921
  MOD_RES (1)..(1): Any amino acid
XQFCILSGGGESKAGFSAGWG

SEQ ID NO: 89022 - protein, 209 aa, Homo sapiens
  Payload ID: 17818
  Gene Name: TM4SF19-TCTEX1D2 readthrough (NMD candidate)
  ENSP ID: ENSP00000405973
MVSSPCTQASSRTCSRILGLSLGTAALFAAGANVALLLPNWDVTYLLRGLLGRHAMLGTGLWGGGLMVLTAAILISLMGWRYGCFSKSGLCRSVLTALLSGGLALLGALICFVTSGVALKDGPFCMFDVSSFNQTQAWKYGYPFKDLHSRNYLYDRSLWNSVCLEPSAAVVWHVSLFSALLCISLLQLLLVVVHVINSLLGLFCSLCEK

SEQ ID NO: 89023 - protein, 404 aa, Homo sapiens
  Payload ID: 17819
  Gene Name: TMED7-TICAM2 readthrough
  ENSP ID: ENSP00000282382
MPRPGSAQRWAAVAGRWGCRLLALLLLVPGPGGASEITFELPDNAKQCFYEDIAQGTKCTLEFQVITGGHYDVDCRLEDPDGKVLYKEMKKQYDSFTFTASKNGTYKFCFSNEFSTFTHKTVYFDFQVGEDPPLFPSENRVSALTQMESACVSIHEALKSVIDYQTHFRLREAQGRSRAEDLNTRVAYWHSVDTSPGYHESDSKKSEDLSLCNVAEHSNTTEGPTGKQEGAQSVEEMFEEEAEEEVFLKFVILHAEDDTDEALRVQNLLQDDFGIKPGIIFAEMPCGRQHLQNLDDAVNGSAWTILLLTENFLRDTWCNFQFYTSLMNSVNRQHKYNSVIPMRPLNNPLPRERTPFALQTINALEEESRGFPTQVERIFQESVYKTQQTIWKETRNMVQRQFIA

SEQ ID NO: 89024 - protein, 188 aa, Homo sapiens
  Payload ID: 17819
  Gene Name: TMED7-TICAM2 readthrough
  ENSP ID: ENSP00000333650
MPRPGSAQRWAAVAGRWGCRLLALLLLVPGPGGASEITFELPDNAKQCFYEDIAQGTKCTLEFQVITGGHYDVDCRLEDPDGKVLYKEMKKQYDSFTFTASKNGTYKFCFSNEFSTFTHKTVYFDFQVGEDPPLFPSENRVSALTQMESACVSIHEALKSVIDYQTHFRLREAQGRSRAEDLNTRVAY

SEQ ID NO: 89025 - protein, 148 aa, Homo sapiens
  Payload ID: 17820
  Gene Name: TMEM110-MUSTN1 readthrough
  ENSP ID: ENSP00000422189
  MOD_RES (1)..(1): Any amino acid
XVVDNFLMRKGKTKAKLEERGANQDSRNGSKVRYRRAASHEESESEILISADDEMEESDVEEDLRRLTPLKPVKKKKHRFGLPLLPAREAPSETQRLHNTHHVPGWCSGSPYQEEAPPCEGRGPEGGPRKPDQEPGNQVQDLPGHARV

SEQ ID NO: 89026 - protein, 372 aa, Homo sapiens
  Payload ID: 17820
  Gene Name: TMEM110-MUSTN1 readthrough
  ENSP ID: ENSP00000422941
MQGPAGNASRGLPGGPPSTVASGAGRCESGALMHSFGIFLQGLLGVVAFSTLMLKRFREPKHERRPWRIWFLDTSKQAIGMLFIHFANVYLADLTEEDPCSLYLINFLLDATVGMLLIYVGVRAVSVLVEWQQWESLRFGEYGDPLQCGAWVGQCALYIVIMIFEKSVVFIVLLILQWKKVALLNPIENPDLKLAIVMLIVPFFVNALMFWVVDNFLMRKGKTKAKLEERGANQDSRNGSKVRYRRAASHEESESEILISADDEMEESDVEEDLRRLTPLKPVKKKKHRFGLPAGAQEAPIKKKRPPVKDEDLKGARGNLTKNQEIKSKTYQVMRECEQAGSAAPSVFSRTRTGTETVFEKPKAGPTKSVFG

SEQ ID NO: 89027 - protein, 370 aa, Homo sapiens
  Payload ID: 17821
  Gene Name: TMEM189-UBE2V1 readthrough
  ENSP ID: ENSP00000344166
MAGAENWPGQQLELDEDEASCCRWGAQHAGARELAALYSPGKRLQEWCSVILCFSLIAHNLVHLLLLARWEDTPLVILGVVAGALIADFLSGLVHWGADTWGSVELPIVGKAFIRPFREHHIDPTAITRHDFIETNGDNCLVTLLPLLNMAYKFRTHSPEALEQLYPWECFVFCLIIFGTFTNQIHKWSHTYFGLPRWVTLLQDWHVILPRKHHRIHHVSPHETYFCITTGVKVPRNFRLLEELEEGQKGVGDGTVSWGLEDDEDMTLTRWTGMIIGPPRTIYENRIYSLKIECGPKYPEAPPFVRFVTKINMNGVNSSNGVVDPRAISVLAKWQNSYSIKVVLQELRRLMMSKENMKLPQPPEGQCYSN

SEQ ID NO: 89028 - protein, 68 aa, Homo sapiens
  Payload ID: 17822
  Gene Name: TMEM256-PLSCR3
  ENSP ID: ENSP00000466104
MAGPAAAFRRLGALSGAAALGFASYGAHGAQFPDAYGKELFDKANKHHFLHSLALLGVPHCRKPLWAA

SEQ ID NO: 89029 - protein, 41 aa, Homo sapiens
  Payload ID: 17822
  Gene Name: TMEM256-PLSCR3
  ENSP ID: ENSP00000466960
MAGPAAAFRRLGALSGAAALGFASYGAHGAQFPDAYGKEAA

SEQ ID NO: 89030 - protein, 68 aa, Homo sapiens; identical to SEQ ID NO: 89028
  Payload ID: 17822
  Gene Name: TMEM256-PLSCR3
  ENSP ID: ENSP00000468219

SEQ ID NO: 89031 - protein, 28 aa, Homo sapiens
  Payload ID: 17822
  Gene Name: TMEM256-PLSCR3
  ENSP ID: ENSP00000468730
FDKANKHHFLHSLALLGVPHCRKPLWAA

SEQ ID NO: 89032 - protein, 295 aa, Homo sapiens
  Payload ID: 17823
  Gene Name: TMEM256-PLSCR3 readthrough (NMD candidate)
  Uniprot ID: Q9NRY6
  ENSP ID: ENSP00000316021
MAGYLPPKGYAPSPPPPYPVTPGYPEPALHPGPGQAPVPAQVPAPAPGFALFPSPGPVALGSAAPFLPLPGVPSGLEFLVQIDQILIHQKAERVETFLGWETCNRYELRSGAGQPLGQAAEESNCCARLCCGARRPLRVRLADPGDREVLRLLRPLHCGCSCCPCGLQEMEVQAPPGTTIGHVLQTWHPFLPKFSIQDADRQTVLRVVGPCWTCGCGTDTNFEVKTRDESRSVGRISKQWGGLVREALTDADDFGLQFPLDLDVRVKAVLLGATFLIDYMFFEKRGGAGPSAVTS

SEQ ID NO: 89033 - protein, 295 aa, Homo sapiens; identical to SEQ ID NO: 89032
  Payload ID: 17823
  Gene Name: TMEM256-PLSCR3 readthrough (NMD candidate)
  Uniprot ID: Q9NRY6
  ENSP ID: ENSP00000438547

SEQ ID NO: 89034 - protein, 170 aa, Homo sapiens
  Payload ID: 17823
  Gene Name: TMEM256-PLSCR3 readthrough (NMD candidate)
  ENSP ID: ENSP00000458596
MEVQAPPGTTIGHVLQTWHPFLPKFSIQDADRQTVLRVVGPCWTCGCGTDTNFEVKTRDESRSVGRISKQWGGLVREALTDADDFGLQFPLDLDVRVKAVLLGATFLIVSWLPLPPPPACPLLSFEALCISWPLARGKSGIGVVGVEVLELACDSQAGLAQPDLPLTVAS

SEQ ID NO: 89035 - protein, 118 aa, Homo sapiens
  Payload ID: 17823
  Gene Name: TMEM256-PLSCR3 readthrough (NMD candidate)
  ENSP ID: ENSP00000458988
MAGYLPPKGYAPSPPPPYPVTPGYPEPALHPGPGQAPVPAQVPAPAPGFALFPSPGPVALGSAAPFLPLPGVPSGLEFLVQIDQILIHQKAERVENGSTGSTRHHHWPRATDLASLPP

SEQ ID NO: 89036 - protein, 295 aa, Homo sapiens; identical to SEQ ID NO: 89032
  Payload ID: 17823
  Gene Name: TMEM256-PLSCR3 readthrough (NMD candidate)
  Uniprot ID: Q9NRY6
  ENSP ID: ENSP00000459019

SEQ ID NO: 89037 - protein, 148 aa, Homo sapiens
  Payload ID: 17823
  Gene Name: TMEM256-PLSCR3 readthrough (NMD candidate)
  ENSP ID: ENSP00000459122
MAGYLPPKGYAPSPPPPYPVTPGYPEPALHPGPGQAPVPAQVPAPAPGFALFPSPGPVALGSAAPFLPLPGVPSGLEFLVQIDQILIHQKAERVENGSTGSTRHHHWPRATDLASLPPQVLHPGCRSPDSLASGGALLDLWLWHRHQL

SEQ ID NO: 89038 - protein, 295 aa, Homo sapiens; identical to SEQ ID NO: 89032
  Payload ID: 17823
  Gene Name: TMEM256-PLSCR3 readthrough (NMD candidate)
  Uniprot ID: Q9NRY6
  ENSP ID: ENSP00000459419

SEQ ID NO: 89039 - protein, 271 aa, Homo sapiens
  Payload ID: 17823
  Gene Name: TMEM256-PLSCR3 readthrough (NMD candidate)
  ENSP ID: ENSP00000460800
MAGYLPPKGYAPSPPPPYPVTPGYPEPALHPGPGQAPVPAQVPAPAPGFALFPSPGPVALGSAAPFLPLPGVPSGLEFLVQIDQILIHQKAERVETFLGWETCNRYELRSGAGQPLGQAAEESNCCARLCCGARRPLRVRLADPGDREVLRLLRPLHCGCSCCPCGLQEFSIQDADRQTVLRVVGPCWTCGCGTDTNFEVKTRDESRSVGRISKQWGGLVREALTDADDFGLQFPLDLDVRVKAVLLGATFLIDYMFFEKRGGAGPSAVTS

SEQ ID NO: 89040 - protein, 35 aa, Homo sapiens
  Payload ID: 17823
  Gene Name: TMEM256-PLSCR3 readthrough (NMD candidate)
  ENSP ID: ENSP00000461205
MEVQAPPGTTIGHVLQTWHPFLPKFSIQDADRQTV

SEQ ID NO: 89041 - protein, 171 aa, Homo sapiens
  Payload ID: 17823
  Gene Name: TMEM256-PLSCR3 readthrough (NMD candidate)
  ENSP ID: ENSP00000461843
AERVETFLGWETCNRYELRSGAGQPLGQAAEESNCCARLCCGARRPLRVRLADPGDREVLRLLRPLHCGCSCCPCGLQEMEVQAPPGTTIGHVLQTWHPFLPKFSIQDADRQTVLRVVGPCWTCGCGTDTNFEFPLDLDVRVKAVLLGATFLIDYMFFEKRGGAGPSAVTS

SEQ ID NO: 89042 - protein, 223 aa, Homo sapiens
  Payload ID: 17823
  Gene Name: TMEM256-PLSCR3 readthrough (NMD candidate)
  ENSP ID: ENSP00000483743
MAGYLPPKGYAPSPPPPYPVTPGYPEPALHPGPGQAPVPAQVPAPAPGFALFPSPGPVALGSAAPFLPLPGVPSGLEFLVQIDQILIHQKAERVETFLGWRPVIGMNCALGPGSPWVRRPRRATAAPVCAVAPAGRCVSAWPTPGTVRCCVCSARCTVAAAAAPVASRRWKYRLHQAPPLATCYRPGIPSSPSSPSRMPIARQSCEWWGPAGPVAVAQTPTLR

SEQ ID NO: 89043 - protein, 108 aa, Homo sapiens
  Payload ID: 17824
  Gene Name: TMEM56-RWDD3 readthrough
  ENSP ID: ENSP00000474793
  MOD_RES (1)..(1): Any amino acid
XMHHCASLYAYYLVLKNGVLAYIGNFRLLAELSSPFVNQRPKAVVTGNMDLFSSLTLHLSTLSLQSPANNQFLAFEVKEYSALDELQKEFETAGLKKLFSEFVLALVK

SEQ ID NO: 89044 - protein, 201 aa, Homo sapiens
  Payload ID: 17824
  Gene Name: TMEM56-RWDD3 readthrough
  ENSP ID: ENSP00000475025
MEINTKLLISVTCISFFTFQLLFYFVSYWFSAKVSPGFNSLSFKKKIEWNSRVVSTCHSLVVGIFGLYIFLFDEATKADPLWGGPSLANVNIAIASGYLISDLSIIILYWKVIGDKFFIMHHCASLYAYYLVLKNGVLAYIGNFRLLAELSSPFVNQRPKAVVTGNMDLFSSLTLHLSTLSLQSPANNQDRWDRVQNSHKS

SEQ ID NO: 89045 - protein, 124 aa, Homo sapiens
  Payload ID: 17825
  Gene Name: TMEM9 domain family, member B
  Uniprot ID: Q9NQ34
  ENSP ID: ENSP00000311842
MPVRGPDVEAYCLRCECKYEERSSVTIKVTIIIYLSILGLLLLYMVYLTLVEPILKRRLFGHAQLIQSDDDIGDHQPFANAHDVLARSRSRANVLNKVEYAQQRWKLQVQEQRKSVFDRHVVLS

SEQ ID NO: 89046 - protein, 124 aa, Homo sapiens; identical to SEQ ID NO: 89045
  Payload ID: 17825
  Gene Name: TMEM9 domain family, member B
  Uniprot ID: Q9NQ34
  ENSP ID: ENSP00000431487

SEQ ID NO: 89047 - protein, 95 aa, Homo sapiens
  Payload ID: 17825
  Gene Name: TMEM9 domain family, member B
  ENSP ID: ENSP00000432373
MPVRGPDVEAYCLRCECKYEERSSVTIKVTIIIYLSILGLLLLYMVYLTLVEPILKRRLFGHAQLIQSDDDIGVSSQPALAAHGQSLSSFDVKCK

SEQ ID NO: 89048 - protein, 198 aa, Homo sapiens
  Payload ID: 17825
  Gene Name: TMEM9 domain family, member B
  Uniprot ID: Q9NQ34
  ENSP ID: ENSP00000433361
MATLWGGLLRLGSLLSLSCLALSVLLLAQLSDAAKNFEDVRCKCICPPYKENSGHIYNKNISQKDCDCLHVVEPMPVRGPDVEAYCLRCECKYEERSSVTIKVTIIIYLSILGLLLLYMVYLTLVEPILKRRLFGHAQLIQSDDDIGDHQPFANAHDVLARSRSRANVLNKVEYAQQRWKLQVQEQRKSVFDRHVVLS

SEQ ID NO: 89049 - protein, 53 aa, Homo sapiens
  Payload ID: 17825
  Gene Name: TMEM9 domain family, member B
  ENSP ID: ENSP00000434961
MPVRGPDVEAYCLRCECKYEERSSVTIKVTIIIYLSILGLLLLYMVYLTLVEP

SEQ ID NO: 89050 - protein, 227 aa, Homo sapiens
  Payload ID: 17826
  Gene Name: TMF1-regulated nuclear protein 1
  Uniprot ID: Q6NT89
  ENSP ID: ENSP00000429216
MPGCRISACGPGAQEGTAEQRSPPPPWDPMPSSQPPPPTPTLTPTPTPGQSPPLPDAAGASAGAAEDQELQRWRQGASGIAGLAGPGGGSGAAAGAGGRALELAEARRRLLEVEGRRRLVSELESRVLQLHRVFLAAELRLAHRAESLSRLSGGVAQAELYLAAHGSRLKKGPRRGRRGRPPALLASALGLGGCVPWGAGRLRRGHGPEPDSPFRRSPPRGPASPQR

SEQ ID NO: 89051 - protein, 50 aa, Homo sapiens
  Payload ID: 17826
  Gene Name: TMF1-regulated nuclear protein 1
  ENSP ID: ENSP00000436467
  MOD_RES (1)..(1): Any amino acid
XGRPPALLASALGLGGCVPWGAGRLRRGHGPEPDSPFRRSPPRGPASPQR

SEQ ID NO: 89052 - protein, 103 aa, Homo sapiens
  Payload ID: 17827
  Gene Name: TMX2-CTNND1 readthrough (NMD candidate)
  ENSP ID: ENSP00000456881
MAVLAPLIALVYSVPRLSRWLAQPYYLLSALLSAAFLLVRKLPPLCHGLPTQREDGNPCDFDWREVEILMFLSAIVMMKNRRSTLSFLLPPCCGGWDASSMIF

SEQ ID NO: 89053 - protein, 416 aa, Homo sapiens
  Payload ID: 17828
  Gene Name: TNF receptor-associated factor 1
  Uniprot ID: Q13077
  ENSP ID: ENSP00000362994
MASSSGSSPRPAPDENEFPFGCPPTVCQDPKEPRALCCAGCLSENPRNGEDQICPKCRGEDLQSISPGSRLRTQEKAHPEVAEAGIGCPFAGVGCSFKGSPQSVQEHEVTSQTSHLNLLLGFMKQWKARLGCGLESGPMALEQNLSDLQLQAAVEVAGDLEVDCYRAPCSESQEELALQHFMKEKLLAELEGKLRVFENIVAVLNKEVEASHLALATSIHQSQLDRERILSLEQRVVELQQTLAQKDQALGKLEQSLRLMEEASFDGTFLWKITNVTRRCHESACGRTVSLFSPAFYTAKYGYKLCLRLYLNGDGTGKRTHLSLFIVIMRGEYDALLPWPFRNKVTFMLLDQNNREHAIDAFRPDLSSASFQRPQSETNVASGCPLFFPLSKLQSPKHAYVKDDTMFLKCIVETST

SEQ ID NO: 89054 - protein, 294 aa, Homo sapiens
  Payload ID: 17828
  Gene Name: TNF receptor-associated factor 1
  Uniprot ID: Q13077
  ENSP ID: ENSP00000438583
MKQWKARLGCGLESGPMALEQNLSDLQLQAAVEVAGDLEVDCYRAPCSESQEELALQHFMKEKLLAELEGKLRVFENIVAVLNKEVEASHLALATSIHQSQLDRERILSLEQRVVELQQTLAQKDQALGKLEQSLRLMEEASFDGTFLWKITNVTRRCHESACGRTVSLFSPAFYTAKYGYKLCLRLYLNGDGTGKRTHLSLFIVIMRGEYDALLPWPFRNKVTFMLLDQNNREHAIDAFRPDLSSASFQRPQSETNVASGCPLFFPLSKLQSPKHAYVKDDTMFLKCIVETST

SEQ ID NO: 89055 - protein, 416 aa, Homo sapiens; identical to SEQ ID NO: 89053
  Payload ID: 17828
  Gene Name: TNF receptor-associated factor 1
  Uniprot ID: Q13077
  ENSP ID: ENSP00000443183

SEQ ID NO: 89056 - protein, 501 aa, Homo sapiens
  Payload ID: 17829
  Gene Name: TNF receptor-associated factor 2
  Uniprot ID: Q12933
  ENSP ID: ENSP00000247668
MAAASVTPPGSLELLQPGFSKTLLGTKLEAKYLCSACRNVLRRPFQAQCGHRYCSFCLASILSSGPQNCAACVHEGIYEEGISILESSSAFPDNAARREVESLPAVCPSDGCTWKGTLKEYESCHEGRCPLMLTECPACKGLVRLGEKERHLEHECPERSLSCRHCRAPCCGADVKAHHEVCPKFPLTCDGCGKKKIPREKFQDHVKTCGKCRVPCRFHAIGCLETVEGEKQQEHEVQWLREHLAMLLSSVLEAKPLLGDQSHAGSELLQRCESLEKKTATFENIVCVLNREVERVAMTAEACSRQHRLDQDKIEALSSKVQQLERSIGLKDLAMADLEQKVLEMEASTYDGVFIWKISDFARKRQEAVAGRIPAIFSPAFYTSRYGYKMCLRIYLNGDGTGRGTHLSLFFVVMKGPNDALLRWPFNQKVTLMLLDQNNREHVIDAFRPDVTSSSFQRPVNDMNIASGCPLFCPVSKMEAKNSYVRDDAIFIKAIVDLTGL

SEQ ID NO: 89057 - protein, 121 aa, Homo sapiens
  Payload ID: 17829
  Gene Name: TNF receptor-associated factor 2
  ENSP ID: ENSP00000397653
MAAASVTPPGSLELLQPGFSKTLLGTKLEAKYLCSACRNVLRRPFQAQCGHRYCSFCLASILSSGPQNCAACVHEGIYEEGISILESSSAFPDNAARREVESLPAVCPSDGCTWKGTLKEY

SEQ ID NO: 89058 - protein, 171 aa, Homo sapiens
  Payload ID: 17829
  Gene Name: TNF receptor-associated factor 2
  ENSP ID: ENSP00000405860
MAAASVTPPGSLELLQPGFSKTLLGTKLEAKYLCSACRNVLRRPFQAQCGHRYCSFCLASILSSGPQNCAACVHEGIYEEGISILESSSAFPDNAARREVESLPAVCPSDGCTWKGTLKEYESCHEGRCPLMLTECPACKGLVRLGEKERHLEHECPERSLSCRHCRAPCC

SEQ ID NO: 89059 - protein, 193 aa, Homo sapiens
  Payload ID: 17829
  Gene Name: TNF receptor-associated factor 2
  ENSP ID: ENSP00000406524
MAAASVTPPGSLELLQPGFSKTLLGTKLEAKYLCSACRNVLRRPFQAQCGHRYCSFCLASILSSGPQNCAACVHEGIYEEGISILESSSAFPDNAARREVESLPAVCPSDGCTWKGTLKEYESCHEGRCPLMLTECPACKGLVRLGEKERHLEHECPERSLSCRHCRAPCCGADVKAHHEVCPKFPLTCDGCG

SEQ ID NO: 89060 - protein, 543 aa, Homo sapiens
  Payload ID: 17830
  Gene Name: TNF receptor-associated factor 3
  ENSP ID: ENSP00000328003
MESSKKMDSPGALQTNPPLKLHTDRSAGTPVFVPEQGGYKEKFVKTVEDKYKCEKCHLVLCSPKQTECGHRFCESCMAALLSSSSPKCTACQESIVKDKVFKDNCCKREILALQIYCRNESRGCAEQLMLGHLLVHLKNDCHFEELPCVRPDCKEKVLRKDLRDHVEKACKYREATCSHCKSQVPMIALQKHEDTDCPCVVVSCPHKCSVQTLLRSEGTNQQIKAHEASSAVQHVNLLKEWSNSLEKKVSLLQNESVEKNKSIQSLHNQICSFEIEIERQKEMLRNNESKILHLQRVIDSQAEKLKELDKEIRPFRQNWEEADSMKSSVESLQNRVTELESVDKSAGQVARNTGLLESQLSRHDQMLSVHDIRLADMDLRFQVLETASYNGVLIWKIRDYKRRKQEAVMGKTLSLYSQPFYTGYFGYKMCARVYLNGDGMGKGTHLSLFFVIMRGEYDALLPWPFKQKVTLMLMDQGSSRRHLGDAFKPDPNSSSFKKPTGEMNIASGCPVFVAQTVLENGTYIKDDTIFIKVIVDTSDLPDP

SEQ ID NO: 89061 - protein, 543 aa, Homo sapiens; identical to SEQ ID NO: 89060
  Payload ID: 17830
  Gene Name: TNF receptor-associated factor 3
  ENSP ID: ENSP00000332468

SEQ ID NO: 89062 - protein, 568 aa, Homo sapiens
  Payload ID: 17830
  Gene Name: TNF receptor-associated factor 3
  Uniprot ID: Q13114
  ENSP ID: ENSP00000376500
MESSKKMDSPGALQTNPPLKLHTDRSAGTPVFVPEQGGYKEKFVKTVEDKYKCEKCHLVLCSPKQTECGHRFCESCMAALLSSSSPKCTACQESIVKDKVFKDNCCKREILALQIYCRNESRGCAEQLMLGHLLVHLKNDCHFEELPCVRPDCKEKVLRKDLRDHVEKACKYREATCSHCKSQVPMIALQKHEDTDCPCVVVSCPHKCSVQTLLRSELSAHLSECVNAPSTCSFKRYGCVFQGTNQQIKAHEASSAVQHVNLLKEWSNSLEKKVSLLQNESVEKNKSIQSLHNQICSFEIEIERQKEMLRNNESKILHLQRVIDSQAEKLKELDKEIRPFRQNWEEADSMKSSVESLQNRVTELESVDKSAGQVARNTGLLESQLSRHDQMLSVHDIRLADMDLRFQVLETASYNGVLIWKIRDYKRRKQEAVMGKTLSLYSQPFYTGYFGYKMCARVYLNGDGMGKGTHLSLFFVIMRGEYDALLPWPFKQKVTLMLMDQGSSRRHLGDAFKPDPNSSSFKKPTGEMNIASGCPVFVAQTVLENGTYIKDDTIFIKVIVDTSDLPDP

SEQ ID NO: 89063 - protein, 485 aa, Homo sapiens
  Payload ID: 17830
  Gene Name: TNF receptor-associated factor 3
  Uniprot ID: Q13114
  ENSP ID: ENSP00000445998
MESSKKMDSPGALQTNPPLKLHTDRSAGTPVFVPEQGGYKEKFVKTVEDKYKCEKCHLVLCSPKQTECGHRFCESCMAALLSSSSPKCTACQESIVKDKVFKDNCCKREILALQIYCRNESRGCAEQLMLGHLLVHLKNDCHFEELPCVRPDCKEKVLRKDLRDHVEKACKYREATCSHCKSQVPMIALQVSLLQNESVEKNKSIQSLHNQICSFEIEIERQKEMLRNNESKILHLQRVIDSQAEKLKELDKEIRPFRQNWEEADSMKSSVESLQNRVTELESVDKSAGQVARNTGLLESQLSRHDQMLSVHDIRLADMDLRFQVLETASYNGVLIWKIRDYKRRKQEAVMGKTLSLYSQPFYTGYFGYKMCARVYLNGDGMGKGTHLSLFFVIMRGEYDALLPWPFKQKVTLMLMDQGSSRRHLGDAFKPDPNSSSFKKPTGEMNIASGCPVFVAQTVLENGTYIKDDTIFIKVIVDTSDLPDP

SEQ ID NO: 89064 - protein, 207 aa, Homo sapiens
  Payload ID: 17830
  Gene Name: TNF receptor-associated factor 3
  ENSP ID: ENSP00000453031
PKCTACQESIVKDKVFKDNCCKREILALQIYCRNESRGCAEQLMLGHLLVHLKNDCHFEELPCVRPDCKEKVLRKDLRDHVEKACKYREATCSHCKSQVPMIALQKHEDTDCPCVVVSCPHKCSVQTLLRSELSAHLSECVNAPSTCSFKRYGCVFQGTNQQIKAHEASSAVQHVNLLKEWSNSLEKKGYENKESENSVPSLTDGNE

SEQ ID NO: 89065 - protein, 290 aa, Homo sapiens
  Payload ID: 17830
  Gene Name: TNF receptor-associated factor 3
  ENSP ID: ENSP00000453032
SRGCAEQLMLGHLLVHLKNDCHFEELPCVRPDCKEKVLRKDLRDHVEKACKYREATCSHCKSQVPMIALQGTNQQIKAHEASSAVQHVNLLKEWSNSLEKKVSLLQNESVEKNKSIQSLHNQICSFEIEIERQKEMLRNNESKILHLQRVIDSQAEKLKELDKEIRPFRQNWEEADSMKSSVESLQNRVTELESVDKSAGQVARNTGLLESQLSRHDQMLSVHDIRLADMDLRFQVLETASYNGVLIWKIRDYKRRKQEAVMGKTLSLYSQPFYTGYFGYKMCARVYLNG

SEQ ID NO: 89066 - protein, 94 aa, Homo sapiens
  Payload ID: 17830
  Gene Name: TNF receptor-associated factor 3
  ENSP ID: ENSP00000453623
MESSKKMDSPGALQTNPPLKLHTDRSAGTPVFVPEQGGYKEKFVKTVEDKYKCEKCHLVLCSPKQTECGHRFCESCMAALLSSSSPKCTACQES

SEQ ID NO: 89067 - protein, 568 aa, Homo sapiens; identical to SEQ ID NO: 89062
  Payload ID: 17830
  Gene Name: TNF receptor-associated factor 3
  Uniprot ID: Q13114
  ENSP ID: ENSP00000454207

SEQ ID NO: 89068 - protein, 691 aa, Homo sapiens
  Payload ID: 17831
  Gene Name: TNF receptor-associated factor 3 interacting protein 1
  Uniprot ID: Q8TDR0
  ENSP ID: ENSP00000362424
MNAAVVRRTQEALGKVIRRPPLTEKLLSKPPFRYLHDIITEVIRMTGFMKGLYTDAEMKSDNVKDKDAKISFLQKAIDVVVMVSGEPLLAKPARIVAGHEPERTNELLQIIGKCCLNKLSSDDAVRRVLAGEKGEVKGRASLTSRSQELDNKNVREEESRVHKNTEDRGDAEIKERSTSRDRKQKEELKEDRKPREKDKDKEKAKENGGNRHREGERERAKARARPDNERQKDRGNRERDRDSERKKETERKSEGGKEKERLRDRDRERDRDKGKDRDRRRVKNGEHSWDLDREKNREHDKPEKKSASSGEMSKKLSDGTFKDSKAETETEISTRASKSLTTKTSKRRSKNSVEGRKEDNISAKSLDSIVSGINNEPNQETTTSEIGTKEANINSTSISDDNSASLRCENIQPNPTEKQKGDSTSDAEGDAGPAGQDKSEVPETPEIPNELSSNIRRIPRPGSARPAPPRVKRQDSMEALQMDRSGSGKTVSNVITESHNSDNEEDDQFVVEAAPQLSEMSEIEMVTAVELEEEEKHGGLVKKILETKKDYEKLQQSPKPGEKERSLFESAWKKEKDIVSKEIEKLRTSIQTLCKSALPLGKIMDYIQEDVDAMQNELQMWHSENRQHAEALQQEQRITDCAVEPLKAELAELEQLIKDQQDKICAVKANILKNEEKIQKMVYSINLTSRR

SEQ ID NO: 89069 - protein, 625 aa, Homo sapiens
  Payload ID: 17831
  Gene Name: TNF receptor-associated factor 3 interacting protein 1
  Uniprot ID: Q8TDR0
  ENSP ID: ENSP00000375851
MNAAVVRRTQEALGKVIRRPPLTEKLLSKPPFRYLHDIITEVIRMTGFMKGLYTDAEMKSDNVKDKDAKISFLQKAIDVVVMVSGEPLLAKPARIVAGHEPERTNELLQIIGKCCLNKLSSDDAVRRVLAGEKGEVKGRASLTSRSQELDNKNVREEESRVHKNTEDRGDAEIKERSTSRDRKQKEELKEDRKPREKDKDKEKAKENGGNRHREGERERAKARARPDNERQKDRGNRERDRDSERKKETERKSEGGKEKERLRDRDRERDRDKGKDRDRRRVKNGEHSWDLDREKNREHDKPEKKSASSGEMSKKLSDGTFKDSKAETETEISTRASKSLTTKTSKRRSKNSVEGDSTSDAEGDAGPAGQDKSEVPETPEIPNELSSNIRRIPRPGSARPAPPRVKRQDSMEALQMDRSGSGKTVSNVITESHNSDNEEDDQFVVEAAPQLSEMSEIEMVTAVELEEEEKHGGLVKKILETKKDYEKLQQSPKPGEKERSLFESAWKKEKDIVSKEIEKLRTSIQTLCKSALPLGKIMDYIQEDVDAMQNELQMWHSENRQHAEALQQEQRITDCAVEPLKAELAELEQLIKDQQDKICAVKANILKNEEKIQKMVYSINLTSRR

SEQ ID NO: 89070 - protein, 52 aa, Homo sapiens
  Payload ID: 17831
  Gene Name: TNF receptor-associated factor 3 interacting protein 1
  ENSP ID: ENSP00000386648
MNAAVVRRTQEALGKVIRRPPLTEKLLSKPPFRYLHDIITEVGAGDRARPGD

SEQ ID NO: 89071 - protein, 470 aa, Homo sapiens
  Payload ID: 17832
  Gene Name: TNF receptor-associated factor 4
  Uniprot ID: Q9BUZ4
  ENSP ID: ENSP00000262395
MPGFDYKFLEKPKRRLLCPLCGKPMREPVQVSTCGHRFCDTCLQEFLSEGVFKCPEDQLPLDYAKIYPDPELEVQVLGLPIRCIHSEEGCRWSGPLRHLQGHLNTCSFNVIPCPNRCPMKLSRRDLPAHLQHDCPKRRLKCEFCGCDFSGEAYESHEGMCPQESVYCENKCGARMMRRLLAQHATSECPKRTQPCTYCTKEFVFDTIQSHQYQCPRLPVACPNQCGVGTVAREDLPGHLKDSCNTALVLCPFKDSGCKHRCPKLAMARHVEESVKPHLAMMCALVSRQRQELQELRRELEELSVGSDGVLIWKIGSYGRRLQEAKAKPNLECFSPAFYTHKYGYKLQVSAFLNGNGSGEGTHLSLYIRVLPGAFDNLLEWPFARRVTFSLLDQSDPGLAKPQHVTETFHPDPNWKNFQKPGTWRGSLDESSLGFGYPKFISHQDIRKRNYVRDDAVFIRAAVELPRKILS

SEQ ID NO: 89072 - protein, 195 aa, Homo sapiens
  Payload ID: 17832
  Gene Name: TNF receptor-associated factor 4
  ENSP ID: ENSP00000262396
MPGFDYKFLEKPKRRLLCPLCGKPMREPVQVSTCGHRFCDTCLQEFLSEGVFKCPEDQLPLDYAKIYPDPELEVQVLGLPIRCIHSEEGCRWSGPLRHLQGHLNTCSFNVIPCPNRCPMKLSRRDLPAHLQHDCPKRRLKCEFCGCDFSGEAYESSLGFGYPKFISHQDIRKRNYVRDDAVFIRAAVELPRKILS

SEQ ID NO: 89073 - protein, 112 aa, Homo sapiens
  Payload ID: 17832
  Gene Name: TNF receptor-associated factor 4
  ENSP ID: ENSP00000396602
EGVFKCPEDQLPLDYAKIYPDPELEVQVLGLPIRCIHSEEGCRWSGPLRHLQGHLNTCSFNVIPCPNRCPMKLSRRDLPAHLQHDCPKRRLKAMRVCAPRRVSTVRISVVPA

SEQ ID NO: 89074 - protein, 182 aa, Homo sapiens
  Payload ID: 17832
  Gene Name: TNF receptor-associated factor 4
  ENSP ID: ENSP00000415789
MPGFDYKFLEKPKRRLLCPLCGKPMREPVQVSTCGHRFCDTCLQEFLSEGVFKCPEDQLPLDYAKFPHPYPQIYPDPELEVQVLGLPIRCIHSEEGCRWSGPLRHLQGHLNTCSFNVIPCPNRCPMKLSRRDLPAHLQHDCPKRRLKCEFCGCDFSGEAYESHEGMCPQESVYCENKCGARM

SEQ ID NO: 89075 - protein, 437 aa, Homo sapiens
  Payload ID: 17832
  Gene Name: TNF receptor-associated factor 4
  ENSP ID: ENSP00000438154
MPGFDYKFLEKPKRRLLCPLCGKPMREPVQVSTCGHRFCDTCLQEFLSEGVFKCPEDQLPLDYAKIYPDPELEVQVLGLPIRCIHSEEGCRWSGPLRHLQGHLNTCSFNVIPCPNRCPMKLSRRDLPAHLQHDCPKRRLKCEFCGCDFSGEAYESHEGMCPQESVYCENKCGARMMRRLLAQHATSECPKRTQPCTYCTKEFVFDTIQSHQYQCPRLPVACPNQCGVGTVAREDLPGHLKDSCNTALVLCPFKDSGCKHRCPKLAMARHVEESVKPHLAMMCALVSRQRQELQELRRELEELSVGSDGVLIWKIGSYGRRLQEAKAKPNLECFSPAFYTHKYGYKLQVSAFLNGNGSGEGTHLSLYIRVLPGAFDNLLEWPFARRGLSPFLGRADMPWCRSHSTRTEVPAQVLCPKSHKGVGIGEGERVVQRVCLEI

SEQ ID NO: 89076 - protein, 49 aa, Homo sapiens
  Payload ID: 17832
  Gene Name: TNF receptor-associated factor 4
  ENSP ID: ENSP00000464097
MPGFDYKFLEKPKRRLLCPLCGKPMREPVQVSTCGHRFCDTCLQEFLRS

SEQ ID NO: 89077 - protein, 92 aa, Homo sapiens
  Payload ID: 17832
  Gene Name: TNF receptor-associated factor 4
  ENSP ID: ENSP00000464583
  MOD_RES (1)..(1): Any amino acid
XFCDTCLQEFLSEGVFKCPEDQLPLDYAKVSPHCQEEAQAQSVALGGRSCWQPVGSGPVSTKSLGMVRLHKDLPRPGAGSTSIGPAYPLHPQ

SEQ ID NO: 89078 - protein, 48 aa, Homo sapiens
  Payload ID: 17832
  Gene Name: TNF receptor-associated factor 4
  ENSP ID: ENSP00000465164
MKLSRRDLPAHLQHDCPKRRLKCEFCGCDFSGEAYESHEGMCPQESVY

SEQ ID NO: 89079 - protein, 53 aa, Homo sapiens
  Payload ID: 17832
  Gene Name: TNF receptor-associated factor 4
  ENSP ID: ENSP00000466306
MPGFDYKFLEKPKRRLLCPLCGKPMREPVQVSTCGHRFCDTCLQEFLRSLQVP

SEQ ID NO: 89080 - protein, 90 aa, Homo sapiens
  Payload ID: 17832
  Gene Name: TNF receptor-associated factor 4
  ENSP ID: ENSP00000468107
MKLSRRDLPAHLQHDCPKRRLKCEFCGCDFSGEAYESHEGMCPQESVYCENKCGARMMRRLLAQHATSECPKRTQPCTYCTKEFVFDTIQ

SEQ ID NO: 89081 - protein, 144 aa, Homo sapiens
  Payload ID: 17832
  Gene Name: TNF receptor-associated factor 4
  ENSP ID: ENSP00000481248
MPGFDYKFLEKPKRRLLCPLCGKPMREPVQVSTCGHRFCDTCLQEFLSEGVFKWPFARRVTFSLLDQSDPGLAKPQHVTETFHPDPNWKNFQKPGTWRGSLDESSLGFGYPKFISHQDIRKRNYVRDDAVFIRAAVELPRKILS

SEQ ID NO: 89082 - protein, 557 aa, Homo sapiens
  Payload ID: 17833
  Gene Name: TNF receptor-associated factor 5
  Uniprot ID: O00463
  ENSP ID: ENSP00000261464
MAYSEEHKGMPCGFIRQNSGNSISLDFEPSIEYQFVERLEERYKCAFCHSVLHNPHQTGCGHRFCQHCILSLRELNTVPICPVDKEVIKSQEVFKDNCCKREVLNLYVYCSNAPGCNAKVILGRYQDHLQQCLFQPVQCSNEKCREPVLRKDLKEHLSASCQFRKEKCLYCKKDVVVINLQNHEENLCPEYPVFCPNNCAKIILKTEVDEHLAVCPEAEQDCPFKHYGCAVTDKRRNLQQHEHSALREHMRLVLEKNVQLEEQISDLHKSLEQKESKIQQLAETIKKLEKEFKQFAQLFGKNGSFLPNIQVFASHIDKSAWLEAQVHQLLQMVNQQQNKFDLRPLMEAVDTVKQKITLLENNDQRLAVLEEETNKHDTHINIHKAQLSKNEERFKLLEGTCYNGKLIWKVTDYKMKKREAVDGHTVSIFSQSFYTSRCGYRLCARAYLNGDGSGRGSHLSLYFVVMRGEFDSLLQWPFRQRVTLMLLDQSGKKNIMETFKPDPNSSSFKRPDGEMNIASGCPRFVAHSVLENAKNAYIKDDTLFLKVAVDLTDLEDL

SEQ ID NO: 89083 - protein, 557 aa, Homo sapiens; identical to SEQ ID NO: 89082
  Payload ID: 17833
  Gene Name: TNF receptor-associated factor 5
  Uniprot ID: O00463
  ENSP ID: ENSP00000336825

SEQ ID NO: 89084 - protein, 557 aa, Homo sapiens; identical to SEQ ID NO: 89082
  Payload ID: 17833
  Gene Name: TNF receptor-associated factor 5
  Uniprot ID: O00463
  ENSP ID: ENSP00000355971

SEQ ID NO: 89085 - protein, 522 aa, Homo sapiens
  Payload ID: 17834
  Gene Name: TNF receptor-associated factor 6, E3 ubiquitin protein ligase
  Uniprot ID: Q9Y4K3
  ENSP ID: ENSP00000337853
MSLLNCENSCGSSQSESDCCVAMASSCSAVTKDDSVGGTASTGNLSSSFMEEIQGYDVEFDPPLESKYECPICLMALREAVQTPCGHRFCKACIIKSIRDAGHKCPVDNEILLENQLFPDNFAKREILSLMVKCPNEGCLHKMELRHLEDHQAHCEFALMDCPQCQRPFQKFHINIHILKDCPRRQVSCDNCAASMAFEDKEIHDQNCPLANVICEYCNTILIREQMPNHYDLDCPTAPIPCTFSTFGCHEKMQRNHLARHLQENTQSHMRMLAQAVHSLSVIPDSGYISEVRNFQETIHQLEGRLVRQDHQIRELTAKMETQSMYVSELKRTIRTLEDKVAEIEAQQCNGIYIWKIGNFGMHLKCQEEEKPVVIHSPGFYTGKPGYKLCMRLHLQLPTAQRCANYISLFVHTMQGEYDSHLPWPFQGTIRLTILDQSEAPVRQNHEEIMDAKPELLAFQRPTIPRNPKGFGYVTFMHLEALRQRTFIKDDTLLVRCEVSTRFDMGSLRREGFQPRSTDAGV

SEQ ID NO: 89086 - protein, 522 aa, Homo sapiens; identical to SEQ ID NO: 89085
  Payload ID: 17834
  Gene Name: TNF receptor-associated factor 6, E3 ubiquitin protein ligase
  Uniprot ID: Q9Y4K3
  ENSP ID: ENSP00000433623

SEQ ID NO: 89087 - protein, 670 aa, Homo sapiens
  Payload ID: 17835
  Gene Name: TNF receptor-associated factor 7, E3 ubiquitin protein ligase
  Uniprot ID: Q6Q0C0
  ENSP ID: ENSP00000318944
MSSGKSARYNRFSGGPSNLPTPDVTTGTRMETTFGPAFSAVTTITKADGTSTYKQHCRTPSSSSTLAYSPRDEEDSMPPISTPRRSDSAISVRSLHSESSMSLRSTFSLPEEEEEPEPLVFAEQPSVKLCCQLCCSVFKDPVITTCGHTFCRRCALKSEKCPVDNVKLTVVVNNIAVAEQIGELFIHCRHGCRVAGSGKPPIFEVDPRGCPFTIKLSARKDHEGSCDYRPVRCPNNPSCPPLLRMNLEAHLKECEHIKCPHSKYGCTFIGNQDTYETHLETCRFEGLKEFLQQTDDRFHEMHVALAQKDQEIAFLRSMLGKLSEKIDQLEKSLELKFDVLDENQSKLSEDLMEFRRDASMLNDELSHINARLNMGILGSYDPQQIFKCKGTFVGHQGPVWCLCVYSMGDLLFSGSSDKTIKVWDTCTTYKCQKTLEGHDGIVLALCIQGCKLYSGSADCTIIVWDIQNLQKVNTIRAHDNPVCTLVSSHNVLFSGSLKAIKVWDIVGTELKLKKELTGLNHWVRALVAAQSYLYSGSYQTIKIWDIRTLDCIHVLQTSGGSVYSIAVTNHHIVCGTYENLIHVWDIESKEQVRTLTGHVGTVYALAVISTPDQTKVFSASYDRSLRVWSMDNMICTQTLLRHQGSVTALAVSRGRLFSGAVDSTVKVWTC

SEQ ID NO: 89088 - protein, 147 aa, Homo sapiens
  Payload ID: 17835
  Gene Name: TNF receptor-associated factor 7, E3 ubiquitin protein ligase
  ENSP ID: ENSP00000456034
MSSGKSARYNRFSGGPSNLPTPDVTTGTRMETTFGPAFSAVTTITKADGTSTYKQHCRTPSSSSTLAYSPRDEEDSMPPISTPRRSDSAISVRSLHSESSMSLRSTFSLPEEEEEPEPLVFAEQPSVKLCCQLCCSVFKDPVITTCG

SEQ ID NO: 89089 - protein, 54 aa, Homo sapiens
  Payload ID: 17835
  Gene Name: TNF receptor-associated factor 7, E3 ubiquitin protein ligase
  ENSP ID: ENSP00000457735
MSSGKSARYNRFSGGPSNLPTPDVTTGVSSVLPLDQNGNDLRTRLFSRHHHHKS

SEQ ID NO: 89090 - protein, 86 aa, Homo sapiens
  Payload ID: 17835
  Gene Name: TNF receptor-associated factor 7, E3 ubiquitin protein ligase
  ENSP ID: ENSP00000478515
MSSGKSARYNRFSGGPSNLPTPDVTTGTRMETTFGPAFSAVTTITKADGTSTYKQHCRTPSSSSTLAYSPRDEEDSMVGPYPQEPV

SEQ ID NO: 89091 - protein, 54 aa, Homo sapiens; identical to SEQ ID NO: 89089
  Payload ID: 17835
  Gene Name: TNF receptor-associated factor 7, E3 ubiquitin protein ligase
  ENSP ID: ENSP00000479297

SEQ ID NO: 89092 - protein, 704 aa, Homo sapiens
  Payload ID: 17836
  Gene Name: TNF receptor-associated protein 1
  Uniprot ID: Q12931
  ENSP ID: ENSP00000246957
MARELRALLLWGRRLRPLLRAPALAAVPGGKPILCPRRTTAQLGPRRNPAWSLQAGRLFSTQTAEDKEEPLHSIISSTESVQGSTSKHEFQAETKKLLDIVARSLYSEKEVFIRELISNASDALEKLRHKLVSDGQALPEMEIHLQTNAEKGTITIQDTGIGMTQEELVSNLGTIARSGSKAFLDALQNQAEASSKIIGQFGVGFYSAFMVADRVEVYSRSAAPGSLGYQWLSDGSGVFEIAEASGVRTGTKIIIHLKSDCKEFSSEARVRDVVTKYSNFVSFPLYLNGRRMNTLQAIWMMDPKDVREWQHEEFYRYVAQAHDKPRYTLHYKTDAPLNIRSIFYVPDMKPSMFDVSRELGSSVALYSRKVLIQTKATDILPKWLRFIRGVVDSEDIPLNLSRELLQESALIRKLRDVLQQRLIKFFIDQSKKDAEKYAKFFEDYGLFMREGIVTATEQEVKEDIAKLLRYESSALPSGQLTSLSEYASRMRAGTRNIYYLCAPNRHLAEHSPYYEAMKKKDTEVLFCFEQFDELTLLHLREFDKKKLISVETDIVVDHYKEEKFEDRSPAAECLSEKETEELMAWMRNVLGSRVTNVKVTLRLDTHPAMVTVLEMGAARHFLRMQQLAKTQEERAQLLQPTLEINPRHALIKKLNQLRASEPGLAQLLVDQIYENAMIAAGLVDDPRAMVGRLNELLVKALERH

SEQ ID NO: 89093 - protein, 651 aa, Homo sapiens
  Payload ID: 17836
  Gene Name: TNF receptor-associated protein 1
  Uniprot ID: Q12931
  ENSP ID: ENSP00000442070
MARELRALLLWGRRLRPLLRAPALAAVPGGSTSKHEFQAETKKLLDIVARSLYSEKEVFIRELISNASDALEKLRHKLVSDGQALPEMEIHLQTNAEKGTITIQDTGIGMTQEELVSNLGTIARSGSKAFLDALQNQAEASSKIIGQFGVGFYSAFMVADRVEVYSRSAAPGSLGYQWLSDGSGVFEIAEASGVRTGTKIIIHLKSDCKEFSSEARVRDVVTKYSNFVSFPLYLNGRRMNTLQAIWMMDPKDVREWQHEEFYRYVAQAHDKPRYTLHYKTDAPLNIRSIFYVPDMKPSMFDVSRELGSSVALYSRKVLIQTKATDILPKWLRFIRGVVDSEDIPLNLSRELLQESALIRKLRDVLQQRLIKFFIDQSKKDAEKYAKFFEDYGLFMREGIVTATEQEVKEDIAKLLRYESSALPSGQLTSLSEYASRMRAGTRNIYYLCAPNRHLAEHSPYYEAMKKKDTEVLFCFEQFDELTLLHLREFDKKKLISVETDIVVDHYKEEKFEDRSPAAECLSEKETEELMAWMRNVLGSRVTNVKVTLRLDTHPAMVTVLEMGAARHFLRMQQLAKTQEERAQLLQPTLEINPRHALIKKLNQLRASEPGLAQLLVDQIYENAMIAAGLVDDPRAMVGRLNELLVKALERH

SEQ ID NO: 89094 - protein, 495 aa, Homo sapiens
  Payload ID: 17836
  Gene Name: TNF receptor-associated protein 1
  ENSP ID: ENSP00000458166
MVADRVEVYSRSAAPGSLGYQWLSDGSGVFEIAEASGVRTGTKIIIHLKSDCKEFSSEARVRDVVTKYSNFVSFPLYLNGRRMNTLQAIWMMDPKDVREWQHEEFYRYVAQAHDKPRYTLHYKTDAPLNIRSIFYVPDMKPSMFDVSRELGSSVALYSRKVLIQTKATDILPKWLRFIRGVVDSEDIPLNLSRELLQESALIRKLRDVLQQRLIKFFIDQSKKDAEKYAKFFEDYGLFMREGIVTATEQEVKEDIAKLLRYESSALPSGQLTSLSEYASRMRAGTRNIYYLCAPNRHLAEHSPYYEAMKKKDTEVLFCFEQFDELTLLHLREFDKKKLISVETDIVVDHYKEEKFEDRSPAAECLSEKETEELMAWMRNVLGSRVTNVKVTLRLDTHPAMVTVLEMGAARHFLRMQQLAKTQEERAQLLQPTLEINPRHALIKKLNQLRASEPGLAQLLVDQIYENAMIAAGLVDDPRAMVGRLNELLVKALERH

SEQ ID NO: 89095 - protein, 35 aa, Homo sapiens
  Payload ID: 17836
  Gene Name: TNF receptor-associated protein 1
  ENSP ID: ENSP00000458244
MEIHLQTNAEKGTITIQDTGIGMTQEELVSNLGTI

SEQ ID NO: 89096 - protein, 215 aa, Homo sapiens
  Payload ID: 17836
  Gene Name: TNF receptor-associated protein 1
  ENSP ID: ENSP00000459354
SLYSEKEVYSRSAAPGSLGYQWLSDGSGVFEIAEASGVRTGTKIIIHLKSDCKEFSSEARVRDVVTKYSNFVSFPLYLNGRRMNTLQAIWMMDPKDVREWQHEEFYRYVAQAHDKPRYTLHYKTDAPLNIRSIFYVPDMKPSMFDVSRELGSSVALYSRKVLIQTKATDILPKWLRFIRGVVDSEDIPLNLSRELLQESALIRKLRDVLQQRLIK

SEQ ID NO: 89097 - protein, 59 aa, Homo sapiens
  Payload ID: 17836
  Gene Name: TNF receptor-associated protein 1
  ENSP ID: ENSP00000459385
  MOD_RES (1)..(1): Any amino acid
XRHALIKKLNQLRASEPGLAQLLVDQIYENAMIAAGLVDDPRAMVGRLNELLVKALERH

SEQ ID NO: 89098 - protein, 108 aa, Homo sapiens
  Payload ID: 17836
  Gene Name: TNF receptor-associated protein 1
  ENSP ID: ENSP00000459585
  MOD_RES (1)..(1): Any amino acid
XADRVEVYSRSAAPGSLGYQWLSDGSGVFEIAEASGVRTGTKIIIHLKSDCKEFSSEARVRDVVTKYSNFVSFPLYLNGRRMNTLQEPVQGQALHWLRPARWWRRRAW

SEQ ID NO: 89099 - protein, 86 aa, Homo sapiens
  Payload ID: 17836
  Gene Name: TNF receptor-associated protein 1
  ENSP ID: ENSP00000460545
MARELRALLLWGRRLRPLLRAPALAAVPGGKPILCPRRTTAQLGPRRNPAWSLQAGRLFSTQTAEDKEEPLHSIISSTESVQGRVL

SEQ ID NO: 89100 - protein, 37 aa, Homo sapiens
  Payload ID: 17836
  Gene Name: TNF receptor-associated protein 1
  ENSP ID: ENSP00000461354
MARELRALLLWGRRLRPLLRAPALAAVPGGSRRAIEM

SEQ ID NO: 89101 - protein, 37 aa, Homo sapiens; identical to SEQ ID NO: 89100
  Payload ID: 17836
  Gene Name: TNF receptor-associated protein 1
  ENSP ID: ENSP00000461618

SEQ ID NO: 89102 - protein, 636 aa, Homo sapiens
  Payload ID: 17837
  Gene Name: TNFAIP3 interacting protein 1
  Uniprot ID: Q15025
  ENSP ID: ENSP00000317891
MEGRGPYRIYDPGGSVPSGEASAAFERLVKENSRLKEKMQGIKMLGELLEESQMEATRLRQKAEELVKDNELLPPPSPSLGSFDPLAELTGKDSNVTASPTAPACPSDKPAPVQKPPSSGTSSEFEVVTPEEQNSPESSSHANAMALGPLPREDGNLMLHLQRLETTLSVCAEEPDHGQLFTHLGRMALEFNRLASKVHKNEQRTSILQTLCEQLRKENEALKAKLDKGLEQRDQAAERLREENLELKKLLMSNGNKEGASGRPGSPKMEGTGKKAVAGQQQASVTAGKVPEVVALGAAEKKVKMLEQQRSELLEVNKQWDQHFRSMKQQYEQKITELRQKLADLQKQVTDLEAEREQKQRDFDRKLLLAKSKIEMEETDKEQLTAEAKELRQKVKYLQDQLSPLTRQREYQEKEIQRLNKALEEALSIQTPPSSPPTAFGSPEGAGALLRKQELVTQNELLKQQVKIFEEDFQRERSDRERMNEEKEELKKQVEKLQAQVTLSNAQLKAFKDEEKAREALRQQKRKAKASGERYHVEPHPEHLCGAYPYAYPPMPAMVPHHGFEDWSQIRYPPPPMAMEHPPPLPNSRLFHLPEYTWRLPCGGVRNPNQSSQVMDPPTARPTEPESPKNDREGPQ

SEQ ID NO: 89103 - protein, 619 aa, Homo sapiens
  Payload ID: 17837
  Gene Name: TNFAIP3 interacting protein 1
  ENSP ID: ENSP00000374029
MEGRGPYRIYDPGGSVPSGEASAAFERLVKENSRLKEKMQGIKMLGELLEESQMEATRLRQKAEELVKDNELLPPPSPSLGSFDPLAELTGKDSNVTASPTAPACPSDKPAPVQKPPSSGTSSEFEVVTPEEQNSPESSSHANAMALGPLPREDGNLMLHLQRLETTLSVCAEEPDHGQLFTHLGRMALEFNRLASKVHKNEQRTSILQTLCEQLRKENEALKAKLDKGLEQRDQAAERLREENLELKKLLMSNGNKEGASGRPGSPKMEGTGKKAVAGQQQASVTAGKVPEVVALGAAEKKVKMLEQQRSELLEVNKQWDQHFRSMKQQYEQKITELRQKLADLQKQVTDLEAEREQKQRDFDRKLLLAKSKIEMEETDKEQLTAEAKELRQKVKYLQDQLSPLTRQREYQEKEIQRLNKALEEALSIQTPPSSPPTAFGSPEGAGALLRKQELVTQNELLKQQVKIFEEDFQRERSDRERMNEEKEELKKQVEKLQAQVTLSNAQLKAFKDEEKAREALRQQKRKAKASGERYHVEPHPEHLCGAYPYAYPPMPAMVPHHGFEDWSQIRYPPPPMAMEHPPPLPNSRLFHLHQFCRSRNTPGVYPVEGFEIQIRAPK

SEQ ID NO: 89104 - protein, 492 aa, Homo sapiens
  Payload ID: 17837
  Gene Name: TNFAIP3 interacting protein 1
  ENSP ID: ENSP00000427854
MEATRLRQKAEELVKDNELLPPPSPSLGSFDPLAELTGKDSNVTASPTAPACPSDKPAPVQKPPSSGTSSEFEVVTPEEQNSPESSSHANAMALGPLPREDGNLMLHLQRLETTLSVCAEEPDHGQLFTHLGRMALEFNRLASKVHKNEQRTSILQTLCEQLRKENEALKAKLDKGLEQRDQAAERLREENLELKKLLMSNGNKEGASGRPGSPKMEGTGKKAVAGQQQASVTAGKVPEVVALGAAEKKVKMLEQQRSELLEVNKQWDQHFRSMKQQYEQKITELRQKLADLQKQVTDLEAEREQKQRDFDRKLLLAKSKIEMEETDKEQLTAEAKELRQKVKYLQDQLSPLTRQREYQEKEIQRLNKALEEALSIQTPPSSPPTAFGSPEGAGALLRKQELVTQNELLKQQVKIFEEDFQRERSDRERMNEEKEELKKQVEKLQAQVTLSNAQLKAFKDEEKAREALRQQKRKAKGTHRGCPRHLPERKVK

SEQ ID NO: 89105 - protein, 636 aa, Homo sapiens; identical to SEQ ID NO: 89102
  Payload ID: 17837
  Gene Name: TNFAIP3 interacting protein 1
  Uniprot ID: Q15025
  ENSP ID: ENSP00000428187

SEQ ID NO: 89106 - protein, 635 aa, Homo sapiens
  Payload ID: 17837
  Gene Name: TNFAIP3 interacting protein 1
  Uniprot ID: Q15025
  ENSP ID: ENSP00000428243
MEGRGPYRIYDPGGSVPSGEASAAFERLVKENSRLKEKMQGIKMLGELLEESQMEATRLRQKAEELVKDNELLPPPSPSLGSFDPLAELTGKDSNVTASPTAPACPSDKPAPVQKPPSSGTSSEFEVVTPEEQNSPESSSHANAMALGPLPREDGNLMLHLQRLETTLSVCAEEPDHGQLFTHLGRMALEFNRLASKVHKNEQRTSILQTLCEQLRKENEALKAKLDKGLEQRDQAAERLREENLELKKLLMSNGNKEGASGRPGSPKMEGTGKKAVAGQQQASVTAGKVPEVVALGAAEKKVKMLEQQRSELLEVNKQWDQHFRSMKQQYEQKITELRQKLADLQKQVTDLEAEREQKQRDFDRKLLLAKSKIEMEETDKEQLTAEAKELRQKVKYLQDQLSPLTRQREYQEKEIQRLNKALEEALSIQTPPSSPPTAFGSPEGAGALLRKQELVTQNELLKQQVKIFEEDFQRERSDRERMNEEKEELKKQVEKLQAQVTLSNAQLKAFKDEEKAREALRQQKRKAKASGERYHVEPHPEHLCGAYPYAYPPMPAMVPHHGFEDWSQIRYPPPPMAMEHPPPLPNSRLFHLPEYTWRLPCGGVRNPNQSSQVMDPPTARPTEPEPADLRLPRN

SEQ ID NO: 89107 - protein, 133 aa, Homo sapiens
  Payload ID: 17837
  Gene Name: TNFAIP3 interacting protein 1
  ENSP ID: ENSP00000428404
MEGRGPYRIYDPGGSVPSGEASAAFERLVKENSRLKEKMQGIKMLGELLEESQMEATRLRQKAEELVKDNELLPPPSPSLGSFDPLAELTGKDSNVTASPTAPACPSDKPAPVQKPPSSGTSSEFEVVTPEEQ

SEQ ID NO: 89108 - protein, 257 aa, Homo sapiens
  Payload ID: 17837
  Gene Name: TNFAIP3 interacting protein 1
  ENSP ID: ENSP00000428487
MEATRLRQKAEELVKDNELLPPPSPSLGSFDPLAELTGKDSNVTASPTAPACPSDKPAPVQKPPSSGTSSEFEVVTPEEQNSPESSSHANAMALGPLPREDGNLMLHLQRLETTLSVCAEEPDHGQLFTHLGRMALEFNRLASKVHKNEQRTSILQTLCEQLRKENEALKAKLDKGLEQRDQAAERLREENLELKKLLMSNGNKEGASGRPGSPKMEGTGKKAVAGQQQASVTAGKVPEVVALGAAEKKVKMLEQQR

SEQ ID NO: 89109 - protein, 583 aa, Homo sapiens
  Payload ID: 17837
  Gene Name: TNFAIP3 interacting protein 1
  Uniprot ID: Q15025
  ENSP ID: ENSP00000429891
MEATRLRQKAEELVKDNELLPPPSPSLGSFDPLAELTGKDSNVTASPTAPACPSDKPAPVQKPPSSGTSSEFEVVTPEEQNSPESSSHANAMALGPLPREDGNLMLHLQRLETTLSVCAEEPDHGQLFTHLGRMALEFNRLASKVHKNEQRTSILQTLCEQLRKENEALKAKLDKGLEQRDQAAERLREENLELKKLLMSNGNKEGASGRPGSPKMEGTGKKAVAGQQQASVTAGKVPEVVALGAAEKKVKMLEQQRSELLEVNKQWDQHFRSMKQQYEQKITELRQKLADLQKQVTDLEAEREQKQRDFDRKLLLAKSKIEMEETDKEQLTAEAKELRQKVKYLQDQLSPLTRQREYQEKEIQRLNKALEEALSIQTPPSSPPTAFGSPEGAGALLRKQELVTQNELLKQQVKIFEEDFQRERSDRERMNEEKEELKKQVEKLQAQVTLSNAQLKAFKDEEKAREALRQQKRKAKASGERYHVEPHPEHLCGAYPYAYPPMPAMVPHHGFEDWSQIRYPPPPMAMEHPPPLPNSRLFHLPEYTWRLPCGGVRNPNQSSQVMDPPTARPTEPESPKNDREGPQ

SEQ ID NO: 89110 - protein, 556 aa, Homo sapiens
  Payload ID: 17837
  Gene Name: TNFAIP3 interacting protein 1
  Uniprot ID: Q15025
  ENSP ID: ENSP00000429912
MEGRGPYRIYDPGGSVPSGEASAAFERLVKENSRLKEKMQGIKMLGELLEESQMEATRLRQKAEELVKDNELLPPPSPSLGSFDPLAELTGKDSNVTASPTAPACPSDKPAPVQKPPSSGTSSEFEVVTPEEQNSPESSSHANAMALGPLPREDGNLMLHLQRLETTLSVCAEEPDHGQLFTHLGRMALEFNRLASKVHKNEQRTSILQTLCEQLRKENEALKAKLDKGLEQRDQAAERLREENLELKKLLMSNGNKEGASGRPGSPKMEGTGKKAVAGQQQASVTAGKVPEVVALGAAEKKVKMLEQQRSELLEVNKQWDQHFRSMKQQYEQKITELRQKLADLQKQVTDLEAEREQKQRDFDRKLLLAKSKIEMEETDKEQLTAEAKELRQKVKYLQDQLSPLTRQREYQEKEIQRLNKALEEALSIQTPPSSPPTAFGSPEGAGALLRKQELVTQNELLKQQVKIFEEDFQRERSDRERMNEEKEELKKQVEKLQAQVTLSNAQLKAFKDEEKAREALRQQKRKAKSLQKMTVRGLSETRLCHLAPPSSCRAS

SEQ ID NO: 89111 - protein, 143 aa, Homo sapiens
  Payload ID: 17837
  Gene Name: TNFAIP3 interacting protein 1
  ENSP ID: ENSP00000430279
MEGRGPYRIYDPGGSVPSGEASAAFERLVKENSRLKEKMQGIKMLGELLEESQMEATRLRQKAEELVKDNELLPPPSPSLGSFDPLAELTGKDSNVTASPTAPACPSDKPAPVQKPPSSGTSSEFEVVTPEEQNSPESSSHAN

SEQ ID NO: 89112 - protein, 146 aa, Homo sapiens
  Payload ID: 17837
  Gene Name: TNFAIP3 interacting protein 1
  ENSP ID: ENSP00000430739
AKELRQKVKYLQDQLSPLTRQREYQEKEIQRLNKALEEALSIQTPPSSPPTAFGSPEGAGALLRKQELVTQNELLKQQVKIFEEDFQRERSDRERMNEEKEELKKQVEKLQAQVTLSNAQLKAFKDEEKAMPATSAEGRQPEAARP

SEQ ID NO: 89113 - protein, 636 aa, Homo sapiens; identical to SEQ ID NO: 89102
  Payload ID: 17837
  Gene Name: TNFAIP3 interacting protein 1
  Uniprot ID: Q15025
  ENSP ID: ENSP00000430760

SEQ ID NO: 89114 - protein, 635 aa, Homo sapiens; identical to SEQ ID NO: 89106
  Payload ID: 17837
  Gene Name: TNFAIP3 interacting protein 1
  Uniprot ID: Q15025
  ENSP ID: ENSP00000430971

SEQ ID NO: 89115 - protein, 572 aa, Homo sapiens
  Payload ID: 17837
  Gene Name: TNFAIP3 interacting protein 1
  Uniprot ID: Q15025
  ENSP ID: ENSP00000431105
MEGRGPYRIYDPGGSVPSGEASAAFERLVKENSRLKEKMQGIKMLGELLEESQMEATRLRQKAEELVKDNELLPPPSPSLGSFDPLAELTGKDSNVTASPTAPACPSDKPAPVQKPPSSGTSSEFEVVTPEEQNSPESSSHANAMALGPLPREDGNLMLHLQRLETTLSVCAEEPDHGQLFTHLGRMALEFNRLASKVHKNEQRTSILQTLCEQLRKENEALKAKLDKGLEQRDQAAERLREENLELKKLLMSNGNKEGASGRPGSPKMEGTGKKAVAGQQQASVTAGKVPEVVALGAAEKKVKMLEQQRSELLEVNKQWDQHFRSMKQQYEQKITELRQKLADLQKQVTDLEAEREQKQRDFDRKLLLAKSKIEMEETDKEQLTAEAKELRQKVKYLQDQLSPLTRQREYQEKEIQRLNKALEEALSIQTPPSSPPTAFGSPEGAGALLRKQELVTQNELLKQQVKIFEEDFQRERSDRERMNEEKEELKKQVEKLQAQVTLSNAQLKAFKDEEKAREALRQQKRKAKPEYTWRLPCGGVRNPNQSSQVMDPPTARPTEPESPKNDREGPQ

SEQ ID NO: 89116 - protein, 572 aa, Homo sapiens; identical to SEQ ID NO: 89115
  Payload ID: 17837
  Gene Name: TNFAIP3 interacting protein 1
  Uniprot ID: Q15025
  ENSP ID: ENSP00000483944

SEQ ID NO: 89117 - protein, 556 aa, Homo sapiens; identical to SEQ ID NO: 89110
  Payload ID: 17837
  Gene Name: TNFAIP3 interacting protein 1
  Uniprot ID: Q15025
  ENSP ID: ENSP00000484665

SEQ ID NO: 89118 - protein, 429 aa, Homo sapiens
  Payload ID: 17838
  Gene Name: TNFAIP3 interacting protein 2
  Uniprot ID: Q8NFZ5
  ENSP ID: ENSP00000321203
MSRDPGSGGWEEAPRAAAALCTLYHEAGQRLRRLQDQLAARDALIARLRARLAALEGDAAPSLVDALLEQVARFREQLRRQEGGAAEAQMRQEIERLTERLEEKEREMQQLLSQPQHEREKEVVLLRRSMAEGERARAASDVLCRSLANETHQLRRTLTATAHMCQHLAKCLDERQHAQRNVGERSPDQSEHTDGHTSVQSVIEKLQEENRLLKQKVTHVEDLNAKWQRYNASRDEYVRGLHAQLRGLQIPHEPELMRKEISRLNRQLEEKINDCAEVKQELAASRTARDAALERVQMLEQQILAYKDDFMSERADRERAQSRIQELEEKVASLLHQVSWRQDSREPDAGRIHAGSKTAKYLAADALELMVPGGWRPGTGSQQPEPPAEGGHPGAAQRGQGDLQCPHCLQCFSDEQGEELLRHVAECCQ

SEQ ID NO: 89119 - protein, 346 aa, Homo sapiens
  Payload ID: 17838
  Gene Name: TNFAIP3 interacting protein 2
  ENSP ID: ENSP00000426314
MSRDPGSGGWEEAPRAAAALCTLYHEAGQRLRRLQDQLAARDALIARLRARLAALEGDAAPSLVDALLEQVARFREQLRRQEGGAAEAQMRQEIERLTERLEEKEREMQQLLSQPQHEREKEVVLLRRSMAEGERARAASDVLCRSLANETHQLRRTLTATAHMCQHLAKCLDERQHAQRNVGERSPDQSEHTDGHTSVQSVIEKLQEENRLLKQKVTHILAYKDDFMSERADRERAQSRIQELEEKVASLLHQVSWRQDSREPDAGRIHAGSKTAKYLAADALELMVPGGWRPGTGSQQPEPPAEGGHPGAAQRGQGDLQCPHCLQCFSDEQGEELLRHVAECCQ

SEQ ID NO: 89120 - protein, 322 aa, Homo sapiens
  Payload ID: 17838
  Gene Name: TNFAIP3 interacting protein 2
  Uniprot ID: Q8NFZ5
  ENSP ID: ENSP00000427613
MQQLLSQPQHEREKEVVLLRRSMAEGERARAASDVLCRSLANETHQLRRTLTATAHMCQHLAKCLDERQHAQRNVGERSPDQSEHTDGHTSVQSVIEKLQEENRLLKQKVTHVEDLNAKWQRYNASRDEYVRGLHAQLRGLQIPHEPELMRKEISRLNRQLEEKINDCAEVKQELAASRTARDAALERVQMLEQQILAYKDDFMSERADRERAQSRIQELEEKVASLLHQVSWRQDSREPDAGRIHAGSKTAKYLAADALELMVPGGWRPGTGSQQPEPPAEGGHPGAAQRGQGDLQCPHCLQCFSDEQGEELLRHVAECCQ

SEQ ID NO: 89121 - protein, 325 aa, Homo sapiens
  Payload ID: 17839
  Gene Name: TNFAIP3 interacting protein 3
  Uniprot ID: Q96KP6
  ENSP ID: ENSP00000057513
MAHFVQGTSRMIAAESSTEHKECAEPSTRKNLMNSLEQKIRCLEKQRKELLEVNQQWDQQFRSMKELYERKVAELKTKLDAAERFLSTREKDPHQRQRKDDRQREDDRQRDLTRDRLQREEKEKERLNEELHELKEENKLLKGKNTLANKEKEHYECEIKRLNKALQDALNIKCSFSEDCLRKSRVEFCHEEMRTEMEVLKQQVQIYEEDFKKERSDRERLNQEKEELQQINETSQSQLNRLNSQIKACQMEKEKLEKQLKQMYCPPCNCGLVFHLQDPWVPTGPGAVQKQREHPPDYQWYALDQLPPDVQHKANGLSSVKKVHP

SEQ ID NO: 89122 - protein, 86 aa, Homo sapiens
  Payload ID: 17839
  Gene Name: TNFAIP3 interacting protein 3
  ENSP ID: ENSP00000424284
CNCGLVFHLQDPWVPTGPGAVQKQREHPPDYQWYALDQLPPDVQHKANESAILSTACFYGLVRPPRSGLYKLSYNQNPTSILIKYT

SEQ ID NO: 89123 - protein, 376 aa, Homo sapiens
  Payload ID: 17839
  Gene Name: TNFAIP3 interacting protein 3
  Uniprot ID: Q96KP6
  ENSP ID: ENSP00000426613
MIPCGWLMNKNEKHDDKLVMFTNQSEDSERCESMELDKKIQDLIERNASPHPKRFTPEAMPTHRNLCSLKTPGKTASMAHFVQGTSRMIAAESSTEHKECAEPSTRKNLMNSLEQKIRCLEKQRKELLEVNQQWDQQFRSMKELYERKVAELKTKLDAAERFLSTREKDPHQRQRKDDRQREDDRQRDLTRDRLQREEKEKERLNEELHELKEENKLLKGKNTLANKEKEHYECEIKRLNKALQDALNIKCSFSEDCLRKSRVEFCHEEMRTEMEVLKQQVQIYEEDFKKERSDRERLNQEKEELQQINETSQSQLNRLNSQIKACQMEKEKLEKQLKQMYCPPCNCGLVFHLQDPWVPTGPGAVQKQREHPVYPQ

SEQ ID NO: 89124 - protein, 369 aa, Homo sapiens
  Payload ID: 17839
  Gene Name: TNFAIP3 interacting protein 3
  Uniprot ID: Q96KP6
  ENSP ID: ENSP00000427106
MNKNEKHDDKLVMFTNQSEDSERCESMELDKKIQDLIERNASPHPKRFTPEAMPTHRNLCSLKTPGKTASMAHFVQGTSRMIAAESSTEHKECAEPSTRKNLMNSLEQKIRCLEKQRKELLEVNQQWDQQFRSMKELYERKVAELKTKLDAAERFLSTREKDPHQRQRKDDRQREDDRQRDLTRDRLQREEKEKERLNEELHELKEENKLLKGKNTLANKEKEHYECEIKRLNKALQDALNIKCSFSEDCLRKSRVEFCHEEMRTEMEVLKQQVQIYEEDFKKERSDRERLNQEKEELQQINETSQSQLNRLNSQIKACQMEKEKLEKQLKQMYCPPCNCGLVFHLQDPWVPTGPGAVQKQREHPVYPQ

SEQ ID NO: 89125 - protein, 312 aa, Homo sapiens
  Payload ID: 17840
  Gene Name: TNFRSF1A-associated via death domain
  Uniprot ID: Q15628
  ENSP ID: ENSP00000341268
MAAGQNGHEEWVGSAYLFVESSLDKVVLSDAYAHPQQKVAVYRALQAALAESGGSPDVLQMLKIHRSDPQLIVQLRFCGRQPCGRFLRAYREGALRAALQRSLAAALAQHSVPLQLELRAGAERLDALLADEERCLSCILAQQPDRLRDEELAELEDALRNLKCGSGARGGDGEVASAPLQPPVPSLSEVKPPPPPPPAQTFLFQGQPVVNRPLSLKDQQTFARSVGLKWRKVGRSLQRGCRALRDPALDSLAYEYEREGLYEQAFQLLRRFVQAEGRRATLQRLVEALEENELTSLAEDLLGLTDPNGGLA

SEQ ID NO: 89126 - protein, 252 aa, Homo sapiens
  Payload ID: 17840
  Gene Name: TNFRSF1A-associated via death domain
  Uniprot ID: Q15628
  ENSP ID: ENSP00000462591
MLKIHRSDPQLIVQLRFCGRQPCGRFLRAYREGALRAALQRSLAAALAQHSVPLQLELRAGAERLDALLADEERCLSCILAQQPDRLRDEELAELEDALRNLKCGSGARGGDGEVASAPLQPPVPSLSEVKPPPPPPPAQTFLFQGQPVVNRPLSLKDQQTFARSVGLKWRKVGRSLQRGCRALRDPALDSLAYEYEREGLYEQAFQLLRRFVQAEGRRATLQRLVEALEENELTSLAEDLLGLTDPNGGLA

SEQ ID NO: 89127 - protein, 330 aa, Homo sapiens
  Payload ID: 17841
  Gene Name: TNFSF12-TNFSF13 readthrough
  ENSP ID: ENSP00000293826
MAARRSQRRRGRRGEPGTALLVPLALGLGLALACLGLLLAVVSLGSRASLSAQEPAQEELVAEEDQDPSELNPQTEESQDPAPFLNRLVRPRRSAPKGRKTRARRAIAAHYEVHPRPGQDGAQAGVDGTVSGWEEARINSSSPLRYNRQIGEFIVTRAGLYYLYCQSSDALEAWENGERSRKRRAVLTQKQKKQHSVLHLVPINATSKDDSDVTEVMWQPALRRGRGLQAQGYGVRIQDAGVYLLYSQVLFQDVTFTMGQVVSREGQGRQETLFRCIRSMPSHPDRAYNSCYSAGVFHLHQGDILSVIIPRARAKLNLSPHGTFLGFVKL

SEQ ID NO: 89128 - protein, 835 aa, Homo sapiens
  Payload ID: 17842
  Gene Name: TNNI3 interacting kinase
  Uniprot ID: Q59H18
  ENSP ID: ENSP00000322251
MGNYKSRPTQTCTDEWKKKVSESYVITIERLEDDLQIKEKELTELRNIFGSDEAFSKVNLNYRTENGLSLLHLCCICGGKKSHIRTLMLKGLRPSRLTRNGFTALHLAVYKDNAELITSLLHSGADIQQVGYGGLTALHIATIAGHLEAADVLLQHGANVNIQDAVFFTPLHIAAYYGHEQVTRLLLKFGADVNVSGEVGDRPLHLASAKGFLNIAKLLMEEGSKADVNAQDNEDHVPLHFCSRFGHHDIVKYLLQSDLEVQPHVVNIYGDTPLHLACYNGKFEVAKEIIQISGTESLTKENIFSETAFHSACTYGKSIDLVKFLLDQNVININHQGRDGHTGLHSACYHGHIRLVQFLLDNGADMNLVACDPSRSSGEKDEQTCLMWAYEKGHDAIVTLLKHYKRPQDELPCNEYSQPGGDGSYVSVPSPLGKIKSMTKEKADILLLRAGLPSHFHLQLSEIEFHEIIGSGSFGKVYKGRCRNKIVAIKRYRANTYCSKSDVDMFCREVSILCQLNHPCVIQFVGACLNDPSQFAIVTQYISGGSLFSLLHEQKRILDLQSKLIIAVDVAKGMEYLHNLTQPIIHRDLNSHNILLYEDGHAVVADFGESRFLQSLDEDNMTKQPGNLRWMAPEVFTQCTRYTIKADVFSYALCLWEILTGEIPFAHLKPAAAAADMAYHHIRPPIGYSIPKPISSLLIRGWNACPEGRPEFSEVVMKLEECLCNIELMSPASSNSSGSLSPSSSSDCLVNRGGPGRSHVAALRSRFELEYALNARSYAALSQSAGQYSSQGLSLEEMKRSLQYTPIDKYGYVSDPMSSMHFHSCRNSSSFEDSS

SEQ ID NO: 89129 - protein, 150 aa, Homo sapiens
  Payload ID: 17842
  Gene Name: TNNI3 interacting kinase
  ENSP ID: ENSP00000431465
  MOD_RES (1)..(1): Any amino acid
XHFHLQLSEIEFHEIIGSGSFGKVYKGRCRNKIVAIKRYRANTYCSKSDVDMFCREVSILCQLNHPCVIQFVGACLNDPSQFAIVTQYISGGSLFSLLHEQKRILDLQSKLIIAVDVAKGMEYLHNLTQPIIHRDLNRCCTGWLSCYHPD

SEQ ID NO: 89130 - protein, 113 aa, Homo sapiens
  Payload ID: 17842
  Gene Name: TNNI3 interacting kinase
  ENSP ID: ENSP00000433550
  MOD_RES (1)..(1): Any amino acid
XCRNKIVAIKRYRANTYCSKSDVDMFCREVSILCQLNHPCVIQFVGACLNDPSQFAIVTQYISGGSLFSLLHEQKRILDLQSKLIIAVDVAKGMEYLHNLTQPIIHRDLNRAS

SEQ ID NO: 89131 - protein, 188 aa, Homo sapiens
  Payload ID: 17842
  Gene Name: TNNI3 interacting kinase
  ENSP ID: ENSP00000434975
VYKGRCRNKIVAIKRYRANTYCSKSDVDMFCREVSILCQLNHPCVIQFVGACLNDPSQFAIVTQYISGGSLFSLLHEQKRILDLQSKLIIAVDVAKGMEYLHNLTQPIIHRDLNRSAITSRIWITHSICIWRGAHYFNREECNFRCMLTSAILKESRFLQSLDEDNMTKQPGNLRWMAPEVFTQCTRY

SEQ ID NO: 89132 - protein, 278 aa, Homo sapiens
  Payload ID: 17843
  Gene Name: tocopherol (alpha) transfer protein
  Uniprot ID: P49638
  ENSP ID: ENSP00000260116
MAEARSQPSAGPQLNALPDHSPLLQPGLAALRRRAREAGVPLAPLPLTDSFLLRFLRARDFDLDLAWRLLKNYYKWRAECPEISADLHPRSIIGLLKAGYHGVLRSRDPTGSKVLIYRIAHWDPKVFTAYDVFRVSLITSELIVQEVETQRNGIKAIFDLEGWQFSHAFQITPSVAKKIAAVLTDSFPLKVRGIHLINEPVIFHAVFSMIKPFLTEKIKERIHMHGNNYKQSLLQHFPDILPLEYGGEEFSMEDICQEWTNFIMKSEDYLSSISESIQ

SEQ ID NO: 89133 - protein, 342 aa, Homo sapiens
  Payload ID: 17844
  Gene Name: tocopherol (alpha) transfer protein-like
  Uniprot ID: Q9BTX7
  ENSP ID: ENSP00000262605
MSEESDSLRTSPSVASLSENELPPPPEPPGYVCSLTEDLVTKAREELQEKPEWRLRDVQALRDMVRKEYPNLSTSLDDAFLLRFLRARKFDYDRALQLLVNYHSCRRSWPEVFNNLKPSALKDVLASGFLTVLPHTDPRGCHVVCIRPDRWIPSNYPITENIRAIYLTLEKLIQSEETQVNGIVILADYKGVSLSKASHFGPFIAKKVIGILQDGFPIRIKAVHVVNEPRIFKGIFAIIKPFLKEKIANRFFLHGSDLNSLHTNLPRSILPKEYGGTAGELDTATWNAVLLASEDDFVKEFCQPVPACDSILGQTLLPEGLTSDAQCDDSLRAVKSQLYSCY

SEQ ID NO: 89134 - protein, 342 aa, Homo sapiens; identical to SEQ ID NO: 89133
  Payload ID: 17844
  Gene Name: tocopherol (alpha) transfer protein-like
  Uniprot ID: Q9BTX7
  ENSP ID: ENSP00000361995

SEQ ID NO: 89135 - protein, 154 aa, Homo sapiens
  Payload ID: 17844
  Gene Name: tocopherol (alpha) transfer protein-like
  ENSP ID: ENSP00000361997
MSEESDSLRTSPSVASLSENELPPPPEPPGYVCSLTEDLVTKAREELQEKPEWRLRDVQALRDMVRKEYPNLSTSLDDAFLLRFLRARKFDYDRALQLLVNYHSCRRSWPEVFNNLKPSALKDVLASGFLTVLPHTDPRGCHVVCIRPVLPPWV

SEQ ID NO: 89136 - protein, 279 aa, Homo sapiens
  Payload ID: 17844
  Gene Name: tocopherol (alpha) transfer protein-like
  ENSP ID: ENSP00000412720
MSEESDSLRTSPSVASLSENELPPPPEPPGYVCSLTEDLVTKAREELQEKPEWRLRDVQALRDMVRKEYPNLSTSLDDAFLLRFLRARKFDYDRALQLLVNYHSCRRSWPEVFNNLKPSALKDVLASGFLTVLPHTDPRGCHVVCIRPDRWIPSNYPITENIRAIYLTLEKLIQSEETQDGFPIRIKAVHVVNEPRIFKGIFAIIKPFLKEKIANRFFLHGSDLNSLHTNLPRSILPKEYGGTAGELDTATWNAVLLASEDDFVKEFCQPVPACDSILG

SEQ ID NO: 89137 - protein, 246 aa, Homo sapiens
  Payload ID: 17845
  Gene Name: toll interacting protein
  ENSP ID: ENSP00000263646
MATTVQLDAQAAQQLQYGGAVGTVGRLNITVVQAKLAKNYGMTRMDPYCRLRLGYAVYETPTAHNGAKNPRWNKVIHCTVPPGVDSFYLEIFDERAFSMDDRIAWTHITIPESLRQGKVEDKWYSLSGRQGDDKEGMINLVMSYALLPAAMVMPPQPVVLMPTVYQQGVGYVPITGMPAVCSPGMVPVALPPAAVNAQPRCSEEDLKAIQDMFPNMDQEVIRSVLEAQRGNKDAAINSLLQMGEEP

SEQ ID NO: 89138 - protein, 274 aa, Homo sapiens
  Payload ID: 17845
  Gene Name: toll interacting protein
  Uniprot ID: Q9H0E2
  ENSP ID: ENSP00000314733
MATTVSTQRGPVYIGELPQDFLRITPTQQQRQVQLDAQAAQQLQYGGAVGTVGRLNITVVQAKLAKNYGMTRMDPYCRLRLGYAVYETPTAHNGAKNPRWNKVIHCTVPPGVDSFYLEIFDERAFSMDDRIAWTHITIPESLRQGKVEDKWYSLSGRQGDDKEGMINLVMSYALLPAAMVMPPQPVVLMPTVYQQGVGYVPITGMPAVCSPGMVPVALPPAAVNAQPRCSEEDLKAIQDMFPNMDQEVIRSVLEAQRGNKDAAINSLLQMGEEP

SEQ ID NO: 89139 - protein, 213 aa, Homo sapiens
  Payload ID: 17845
  Gene Name: toll interacting protein
  ENSP ID: ENSP00000432668
MATTVSTQRGPVYIGELPQDFLRITPTQQQRQVQLDAQAAQQLQYGGAVGTVGRLNITVVQRAFSMDDRIAWTHITIPESLRQGKVEDKWYSLSGRQGDDKEGMINLVMSYALLPAAMVMPPQPVVLMPTVYQQGVGYVPITGMPAVCSPGMVPVALPPAAVNAQPRCSEEDLKAIQDMFPNMDQEVIRSVLEAQRGNKDAAINSLLQMGEEP

SEQ ID NO: 89140 - protein, 80 aa, Homo sapiens
  Payload ID: 17845
  Gene Name: toll interacting protein
  ENSP ID: ENSP00000432778
MATTVSTQRGPVYIGELPQDFLRITPTQQQRQVQLDAQAAQQLQYGGAVGTVGRLNITVVQGCPLSVAPAWCPWPCPRPP

SEQ ID NO: 89141 - protein, 205 aa, Homo sapiens
  Payload ID: 17845
  Gene Name: toll interacting protein
  Uniprot ID: Q9H0E2
  ENSP ID: ENSP00000434035
MTRMDPYCRLRLGYAVYETPTAHNGAKNPRWNKVIHCTVPPGVDSFYLEIFDERAFSMDDRIAWTHITIPESLRQGKVEDKWYSLSGRQGDDKEGMINLVMSYALLPAAMVMPPQPVVLMPTVYQQGVGYVPITGMPAVCSPGMVPVALPPAAVNAQPRCSEEDLKAIQDMFPNMDQEVIRSVLEAQRGNKDAAINSLLQMGEEP

SEQ ID NO: 89142 - protein, 186 aa, Homo sapiens
  Payload ID: 17845
  Gene Name: toll interacting protein
  ENSP ID: ENSP00000434494
MATTVSTQRGPAKLAKNYGMTRMDPYCRLRLGYAVYETPTAHNGAKNPRWNKVIHCTVPPGVDSFYLEIFDERAFSMDDRIAWTHITIPESLRQGKVEDKWYSLSGRQGDDKEGMINLVMSYALLPAAMVMPPQPVVLMPTVYQQGVGYVPITGMPAVCSPGMVPVALPPAAVNAQPRCSEEDLKA

SEQ ID NO: 89143 - protein, 179 aa, Homo sapiens
  Payload ID: 17845
  Gene Name: toll interacting protein
  ENSP ID: ENSP00000436393
MATTVSTQRGPAKLAKNYGMTRMDPYCRLRLGYAVYETPTAHNGAKNPRWNKVIHCTVPPGVDSFYLEIFDERAFSMDDRIAWTHITIPESLRQGKVEDKWYSLSGRQGDDKEGMINLVMSYALLPAAMVMPPQPVVLMPTVYQQGVGYVPITDIVNFGTAPHFIEKFPRRCRNICQSL

SEQ ID NO: 89144 - protein, 235 aa, Homo sapiens
  Payload ID: 17846
  Gene Name: toll-interleukin 1 receptor (TIR) domain containing adaptor protein
  Uniprot ID: P58753
  ENSP ID: ENSP00000376445
MASSTSLPAPGSRPKKPLGKMADWFRQTLLKKPKKRPNSPESTSSDASQPTSQDSPLPPSLSSVTSPSLPPTHASDSGSSRWSKDYDVCVCHSEEDLVAAQDLVSYLEGSTASLRCFLQLRDATPGGAIVSELCQALSSSHCRVLLITPGFLQDPWCKYQMLQALTEAPGAEGCTIPLLSGLSRAAYPPELRFMYYVDGRGPDGGFRQVKEAVMRCKLLQEGEGERDSATVSDLL

SEQ ID NO: 89145 - protein, 221 aa, Homo sapiens
  Payload ID: 17846
  Gene Name: toll-interleukin 1 receptor (TIR) domain containing adaptor protein
  Uniprot ID: P58753
  ENSP ID: ENSP00000376446
MASSTSLPAPGSRPKKPLGKMADWFRQTLLKKPKKRPNSPESTSSDASQPTSQDSPLPPSLSSVTSPSLPPTHASDSGSSRWSKDYDVCVCHSEEDLVAAQDLVSYLEGSTASLRCFLQLRDATPGGAIVSELCQALSSSHCRVLLITPGFLQDPWCKYQMLQALTEAPGAEGCTIPLLSGLSRAAYPPELRFMYYVDGRGPDGGFRQVKEAVMRYLQTLS

SEQ ID NO: 89146 - protein, 221 aa, Homo sapiens; identical to SEQ ID NO: 89145
  Payload ID: 17846
  Gene Name: toll-interleukin 1 receptor (TIR) domain containing adaptor protein
  Uniprot ID: P58753
  ENSP ID: ENSP00000376447

SEQ ID NO: 89147 - protein, 221 aa, Homo sapiens; identical to SEQ ID NO: 89145
  Payload ID: 17846
  Gene Name: toll-interleukin 1 receptor (TIR) domain containing adaptor protein
  Uniprot ID: P58753
  ENSP ID: ENSP00000436967

SEQ ID NO: 89148 - protein, 49 aa, Homo sapiens
  Payload ID: 17846
  Gene Name: toll-interleukin 1 receptor (TIR) domain containing adaptor protein
  ENSP ID: ENSP00000446213
MASSTSLPAPGSRPKKPLGKMADWFRQTLLKKPKKRPGSLTYLTLHYLS

SEQ ID NO: 89149 - protein, 786 aa, Homo sapiens
  Payload ID: 17847
  Gene Name: toll-like receptor 1
  Uniprot ID: Q15399
  ENSP ID: ENSP00000354932
MTSIFHFAIIFMLILQIRIQLSEESEFLVDRSKNGLIHVPKDLSQKTTILNISQNYISELWTSDILSLSKLRILIISHNRIQYLDISVFKFNQELEYLDLSHNKLVKISCHPTVNLKHLDLSFNAFDALPICKEFGNMSQLKFLGLSTTHLEKSSVLPIAHLNISKVLLVLGETYGEKEDPEGLQDFNTESLHIVFPTNKEFHFILDVSVKTVANLELSNIKCVLEDNKCSYFLSILAKLQTNPKLSNLTLNNIETTWNSFIRILQLVWHTTVWYFSISNVKLQGQLDFRDFDYSGTSLKALSIHQVVSDVFGFPQSYIYEIFSNMNIKNFTVSGTRMVHMLCPSKISPFLHLDFSNNLLTDTVFENCGHLTELETLILQMNQLKELSKIAEMTTQMKSLQQLDISQNSVSYDEKKGDCSWTKSLLSLNMSSNILTDTIFRCLPPRIKVLDLHSNKIKSIPKQVVKLEALQELNVAFNSLTDLPGCGSFSSLSVLIIDHNSVSHPSADFFQSCQKMRSIKAGDNPFQCTCELGEFVKNIDQVSSEVLEGWPDSYKCDYPESYRGTLLKDFHMSELSCNITLLIVTIVATMLVLAVTVTSLCSYLDLPWYLRMVCQWTQTRRRARNIPLEELQRNLQFHAFISYSGHDSFWVKNELLPNLEKEGMQICLHERNFVPGKSIVENIITCIEKSYKSIFVLSPNFVQSEWCHYELYFAHHNLFHEGSNSLILILLEPIPQYSIPSSYHKLKSLMARRTYLEWPKEKSKRGLFWANLRAAINIKLTEQAKK

SEQ ID NO: 89150 - protein, 786 aa, Homo sapiens; identical to SEQ ID NO: 89149
  Payload ID: 17847
  Gene Name: toll-like receptor 1
  Uniprot ID: Q15399
  ENSP ID: ENSP00000421259

SEQ ID NO: 89151 - protein, 161 aa, Homo sapiens
  Payload ID: 17847
  Gene Name: toll-like receptor 1
  ENSP ID: ENSP00000421856
MTSIFHFAIIFMLILQIRIQLSEESEFLVDRSKNGLIHVPKDLSQKTTILNISQNYISELWTSDILSLSKLRILIISHNRIQYLDISVFKFNQELEYLDLSHNKLVKISCHPTVNLKHLDLSFNAFDALPICKEFGNMSQLKFLGLSTTHLEKSSVLPIAH

SEQ ID NO: 89152 - protein, 90 aa, Homo sapiens
  Payload ID: 17847
  Gene Name: toll-like receptor 1
  ENSP ID: ENSP00000423017
MTSIFHFAIIFMLILQIRIQLSEESEFLVDRSKNGLIHVPKDLSQKTTILNISQNYISELWTSDILSLSKLRILIISHNRIQYLDISVFK

SEQ ID NO: 89153 - protein, 48 aa, Homo sapiens
  Payload ID: 17847
  Gene Name: toll-like receptor 1
  ENSP ID: ENSP00000423725
MTSIFHFAIIFMLILQIRIQLSEESEFLVDRSKNGLIHVPKDLSQKTT

SEQ ID NO: 89154 - protein, 23 aa, Homo sapiens
  Payload ID: 17847
  Gene Name: toll-like receptor 1
  ENSP ID: ENSP00000424894
MTSIFHFAIIFMLILQIRIQLSE

SEQ ID NO: 89155 - protein, 811 aa, Homo sapiens
  Payload ID: 17848
  Gene Name: toll-like receptor 10
  Uniprot ID: Q9BXR5
  ENSP ID: ENSP00000308925
MRLIRNIYIFCSIVMTAEGDAPELPEERELMTNCSNMSLRKVPADLTPATTTLDLSYNLLFQLQSSDFHSVSKLRVLILCHNRIQQLDLKTFEFNKELRYLDLSNNRLKSVTWYLLAGLRYLDLSFNDFDTMPICEEAGNMSHLEILGLSGAKIQKSDFQKIAHLHLNTVFLGFRTLPHYEEGSLPILNTTKLHIVLPMDTNFWVLLRDGIKTSKILEMTNIDGKSQFVSYEMQRNLSLENAKTSVLLLNKVDLLWDDLFLILQFVWHTSVEHFQIRNVTFGGKAYLDHNSFDYSNTVMRTIKLEHVHFRVFYIQQDKIYLLLTKMDIENLTISNAQMPHMLFPNYPTKFQYLNFANNILTDELFKRTIQLPHLKTLILNGNKLETLSLVSCFANNTPLEHLDLSQNLLQHKNDENCSWPETVVNMNLSYNKLSDSVFRCLPKSIQILDLNNNQIQTVPKETIHLMALRELNIAFNFLTDLPGCSHFSRLSVLNIEMNFILSPSLDFVQSCQEVKTLNAGRNPFRCTCELKNFIQLETYSEVMMVGWSDSYTCEYPLNLRGTRLKDVHLHELSCNTALLIVTIVVIMLVLGLAVAFCCLHFDLPWYLRMLGQCTQTWHRVRKTTQEQLKRNVRFHAFISYSEHDSLWVKNELIPNLEKEDGSILICLYESYFDPGKSISENIVSFIEKSYKSIFVLSPNFVQNEWCHYEFYFAHHNLFHENSDHIILILLEPIPFYCIPTRYHKLKALLEKKAYLEWPKDRRKCGLFWANLRAAINVNVLATREMYELQTFTELNEESRGSTISLMRTDCL

SEQ ID NO: 89156 - protein, 811 aa, Homo sapiens; identical to SEQ ID NO: 89155
  Payload ID: 17848
  Gene Name: toll-like receptor 10
  Uniprot ID: Q9BXR5
  ENSP ID: ENSP00000354459

SEQ ID NO: 89157 - protein, 811 aa, Homo sapiens; identical to SEQ ID NO: 89155
  Payload ID: 17848
  Gene Name: toll-like receptor 10
  Uniprot ID: Q9BXR5
  ENSP ID: ENSP00000421483

SEQ ID NO: 89158 - protein, 811 aa, Homo sapiens; identical to SEQ ID NO: 89155
  Payload ID: 17848
  Gene Name: toll-like receptor 10
  Uniprot ID: Q9BXR5
  ENSP ID: ENSP00000424923

SEQ ID NO: 89159 - protein, 94 aa, Homo sapiens
  Payload ID: 17848
  Gene Name: toll-like receptor 10
  ENSP ID: ENSP00000427606
MTAEGDAPELPEERELMTNCSNMSLRKVPADLTPATTTLDLSYNLLFQLQSSDFHSVSKLRVLILCHNRIQQLDLKTFEFNKELRYLDLSNNRL

SEQ ID NO: 89160 - protein, 811 aa, Homo sapiens; identical to SEQ ID NO: 89155
  Payload ID: 17848
  Gene Name: toll-like receptor 10
  Uniprot ID: Q9BXR5
  ENSP ID: ENSP00000478206

SEQ ID NO: 89161 - protein, 811 aa, Homo sapiens; identical to SEQ ID NO: 89155
  Payload ID: 17848
  Gene Name: toll-like receptor 10
  Uniprot ID: Q9BXR5
  ENSP ID: ENSP00000478985

SEQ ID NO: 89162 - protein, 784 aa, Homo sapiens
  Payload ID: 17849
  Gene Name: toll-like receptor 2
  Uniprot ID: O60603
  ENSP ID: ENSP00000260010
MPHTLWMVWVLGVIISLSKEESSNQASLSCDRNGICKGSSGSLNSIPSGLTEAVKSLDLSNNRITYISNSDLQRCVNLQALVLTSNGINTIEEDSFSSLGSLEHLDLSYNYLSNLSSSWFKPLSSLTFLNLLGNPYKTLGETSLFSHLTKLQILRVGNMDTFTKIQRKDFAGLTFLEELEIDASDLQSYEPKSLKSIQNVSHLILHMKQHILLLEIFVDVTSSVECLELRDTDLDTFHFSELSTGETNSLIKKFTFRNVKITDESLFQVMKLLNQISGLLELEFDDCTLNGVGNFRASDNDRVIDPGKVETLTIRRLHIPRFYLFYDLSTLYSLTERVKRITVENSKVFLVPCLLSQHLKSLEYLDLSENLMVEEYLKNSACEDAWPSLQTLILRQNHLASLEKTGETLLTLKNLTNIDISKNSFHSMPETCQWPEKMKYLNLSSTRIHSVTGCIPKTLEILDVSNNNLNLFSLNLPQLKELYISRNKLMTLPDASLLPMLLVLKISRNAITTFSKEQLDSFHTLKTLEAGGNNFICSCEFLSFTQEQQALAKVLIDWPANYLCDSPSHVRGQQVQDVRLSVSECHRTALVSGMCCALFLLILLTGVLCHRFHGLWYMKMMWAWLQAKRKPRKAPSRNICYDAFVSYSERDAYWVENLMVQELENFNPPFKLCLHKRDFIPGKWIIDNIIDSIEKSHKTVFVLSENFVKSEWCKYELDFSHFRLFDENNDAAILILLEPIEKKAIPQRFCKLRKIMNTKTYLEWPMDEAQREGFWVNLRAAIKS

SEQ ID NO: 89163 - protein, 904 aa, Homo sapiens
  Payload ID: 17850
  Gene Name: toll-like receptor 3
  Uniprot ID: O15455
  ENSP ID: ENSP00000296795
MRQTLPCIYFWGGLLPFGMLCASSTTKCTVSHEVADCSHLKLTQVPDDLPTNITVLNLTHNQLRRLPAANFTRYSQLTSLDVGFNTISKLEPELCQKLPMLKVLNLQHNELSQLSDKTFAFCTNLTELHLMSNSIQKIKNNPFVKQKNLITLDLSHNGLSSTKLGTQVQLENLQELLLSNNKIQALKSEELDIFANSSLKKLELSSNQIKEFSPGCFHAIGRLFGLFLNNVQLGPSLTEKLCLELANTSIRNLSLSNSQLSTTSNTTFLGLKWTNLTMLDLSYNNLNVVGNDSFAWLPQLEYFFLEYNNIQHLFSHSLHGLFNVRYLNLKRSFTKQSISLASLPKIDDFSFQWLKCLEHLNMEDNDIPGIKSNMFTGLINLKYLSLSNSFTSLRTLTNETFVSLAHSPLHILNLTKNKISKIESDAFSWLGHLEVLDLGLNEIGQELTGQEWRGLENIFEIYLSYNKYLQLTRNSFALVPSLQRLMLRRVALKNVDSSPSPFQPLRNLTILDLSNNNIANINDDMLEGLEKLEILDLQHNNLARLWKHANPGGPIYFLKGLSHLHILNLESNGFDEIPVEVFKDLFELKIIDLGLNNLNTLPASVFNNQVSLKSLNLQKNLITSVEKKVFGPAFRNLTELDMRFNPFDCTCESIAWFVNWINETHTNIPELSSHYLCNTPPHYHGFPVRLFDTSSCKDSAPFELFFMINTSILLIFIFIVLLIHFEGWRISFYWNVSVHRVLGFKEIDRQTEQFEYAAYIIHAYKDKDWVWEHFSSMEKEDQSLKFCLEERDFEAGVFELEAIVNSIKRSRKIIFVITHHLLKDPLCKRFKVHHAVQQAIEQNLDSIILVFLEEIPDYKLNHALCLRRGMFKSHCILNWPVQKERIGAFRHKLQVALGSKNSVH

SEQ ID NO: 89164 - protein, 351 aa, Homo sapiens
  Payload ID: 17850
  Gene Name: toll-like receptor 3
  ENSP ID: ENSP00000423386
MRQTLPCIYFWGGLLPFGMLCASSTTKCTVSHEVADCSHLKLTQVPDDLPTNITVLNLTHNQLRRLPAANFTRYSQLTSLDVGFNTISKLEPELCQKLPMLKVLNLQHNELSQLSDKTFAFCTNLTELHLMSNSIQKIKNNPFVKQKNLITLDLSHNGLSSTKLGTQVQLENLQELLLSNNKIQALKSEELDIFANSSLKKLELSSNQIKEFSPGCFHAIGRLFGLFLNNVQLGPSLTEKLCLELANTSIRNLSLSNSQLSTTSNTTFLGLKWTNLTMLDLSYNNLNVWLKCLEHLNMEDNDIPGIKSNMFTGLINLKYLSLSNSFTSLRTLTNETFVSLAHSPLHILNLT

SEQ ID NO: 89165 - protein, 627 aa, Homo sapiens
  Payload ID: 17850
  Gene Name: toll-like receptor 3
  Uniprot ID: O15455
  ENSP ID: ENSP00000423684
MLDLSYNNLNVVGNDSFAWLPQLEYFFLEYNNIQHLFSHSLHGLFNVRYLNLKRSFTKQSISLASLPKIDDFSFQWLKCLEHLNMEDNDIPGIKSNMFTGLINLKYLSLSNSFTSLRTLTNETFVSLAHSPLHILNLTKNKISKIESDAFSWLGHLEVLDLGLNEIGQELTGQEWRGLENIFEIYLSYNKYLQLTRNSFALVPSLQRLMLRRVALKNVDSSPSPFQPLRNLTILDLSNNNIANINDDMLEGLEKLEILDLQHNNLARLWKHANPGGPIYFLKGLSHLHILNLESNGFDEIPVEVFKDLFELKIIDLGLNNLNTLPASVFNNQVSLKSLNLQKNLITSVEKKVFGPAFRNLTELDMRFNPFDCTCESIAWFVNWINETHTNIPELSSHYLCNTPPHYHGFPVRLFDTSSCKDSAPFELFFMINTSILLIFIFIVLLIHFEGWRISFYWNVSVHRVLGFKEIDRQTEQFEYAAYIIHAYKDKDWVWEHFSSMEKEDQSLKFCLEERDFEAGVFELEAIVNSIKRSRKIIFVITHHLLKDPLCKRFKVHHAVQQAIEQNLDSIILVFLEEIPDYKLNHALCLRRGMFKSHCILNWPVQKERIGAFRHKLQVALGSKNSVH

SEQ ID NO: 89166 - protein, 839 aa, Homo sapiens
  Payload ID: 17851
  Gene Name: toll-like receptor 4
  Uniprot ID: O00206
  ENSP ID: ENSP00000363089
MMSASRLAGTLIPAMAFLSCVRPESWEPCVEVVPNITYQCMELNFYKIPDNLPFSTKNLDLSFNPLRHLGSYSFFSFPELQVLDLSRCEIQTIEDGAYQSLSHLSTLILTGNPIQSLALGAFSGLSSLQKLVAVETNLASLENFPIGHLKTLKELNVAHNLIQSFKLPEYFSNLTNLEHLDLSSNKIQSIYCTDLRVLHQMPLLNLSLDLSLNPMNFIQPGAFKEIRLHKLTLRNNFDSLNVMKTCIQGLAGLEVHRLVLGEFRNEGNLEKFDKSALEGLCNLTIEEFRLAYLDYYLDDIIDLFNCLTNVSSFSLVSVTIERVKDFSYNFGWQHLELVNCKFGQFPTLKLKSLKRLTFTSNKGGNAFSEVDLPSLEFLDLSRNGLSFKGCCSQSDFGTTSLKYLDLSFNGVITMSSNFLGLEQLEHLDFQHSNLKQMSEFSVFLSLRNLIYLDISHTHTRVAFNGIFNGLSSLEVLKMAGNSFQENFLPDIFTELRNLTFLDLSQCQLEQLSPTAFNSLSSLQVLNMSHNNFFSLDTFPYKCLNSLQVLDYSLNHIMTSKKQELQHFPSSLAFLNLTQNDFACTCEHQSFLQWIKDQRQLLVEVERMECATPSDKQGMPVLSLNITCQMNKTIIGVSVLSVLVVSVVAVLVYKFYFHLMLLAGCIKYGRGENIYDAFVIYSSQDEDWVRNELVKNLEEGVPPFQLCLHYRDFIPGVAIAANIIHEGFHKSRKVIVVVSQHFIQSRWCIFEYEIAQTWQFLSSRAGIIFIVLQKVEKTLLRQQVELYRLLSRNTYLEWEDSVLGRHIFWRRLRKALLDGKSWNPEGTVGTGCNWQEATSI

SEQ ID NO: 89167 - protein, 799 aa, Homo sapiens
  Payload ID: 17851
  Gene Name: toll-like receptor 4
  Uniprot ID: O00206
  ENSP ID: ENSP00000377997
MELNFYKIPDNLPFSTKNLDLSFNPLRHLGSYSFFSFPELQVLDLSRCEIQTIEDGAYQSLSHLSTLILTGNPIQSLALGAFSGLSSLQKLVAVETNLASLENFPIGHLKTLKELNVAHNLIQSFKLPEYFSNLTNLEHLDLSSNKIQSIYCTDLRVLHQMPLLNLSLDLSLNPMNFIQPGAFKEIRLHKLTLRNNFDSLNVMKTCIQGLAGLEVHRLVLGEFRNEGNLEKFDKSALEGLCNLTIEEFRLAYLDYYLDDIIDLFNCLTNVSSFSLVSVTIERVKDFSYNFGWQHLELVNCKFGQFPTLKLKSLKRLTFTSNKGGNAFSEVDLPSLEFLDLSRNGLSFKGCCSQSDFGTTSLKYLDLSFNGVITMSSNFLGLEQLEHLDFQHSNLKQMSEFSVFLSLRNLIYLDISHTHTRVAFNGIFNGLSSLEVLKMAGNSFQENFLPDIFTELRNLTFLDLSQCQLEQLSPTAFNSLSSLQVLNMSHNNFFSLDTFPYKCLNSLQVLDYSLNHIMTSKKQELQHFPSSLAFLNLTQNDFACTCEHQSFLQWIKDQRQLLVEVERMECATPSDKQGMPVLSLNITCQMNKTIIGVSVLSVLVVSVVAVLVYKFYFHLMLLAGCIKYGRGENIYDAFVIYSSQDEDWVRNELVKNLEEGVPPFQLCLHYRDFIPGVAIAANIIHEGFHKSRKVIVVVSQHFIQSRWCIFEYEIAQTWQFLSSRAGIIFIVLQKVEKTLLRQQVELYRLLSRNTYLEWEDSVLGRHIFWRRLRKALLDGKSWNPEGTVGTGCNWQEATSI

SEQ ID NO: 89168 - protein, 858 aa, Homo sapiens
  Payload ID: 17852
  Gene Name: toll-like receptor 5
  Uniprot ID: O60602
  ENSP ID: ENSP00000355846
MGDHLDLLLGVVLMAGPVFGIPSCSFDGRIAFYRFCNLTQVPQVLNTTERLLLSFNYIRTVTASSFPFLEQLQLLELGSQYTPLTIDKEAFRNLPNLRILDLGSSKIYFLHPDAFQGLFHLFELRLYFCGLSDAVLKDGYFRNLKALTRLDLSKNQIRSLYLHPSFGKLNSLKSIDFSSNQIFLVCEHELEPLQGKTLSFFSLAANSLYSRVSVDWGKCMNPFRNMVLEILDVSGNGWTVDITGNFSNAISKSQAFSLILAHHIMGAGFGFHNIKDPDQNTFAGLARSSVRHLDLSHGFVFSLNSRVFETLKDLKVLNLAYNKINKIADEAFYGLDNLQVLNLSYNLLGELYSSNFYGLPKVAYIDLQKNHIAIIQDQTFKFLEKLQTLDLRDNALTTIHFIPSIPDIFLSGNKLVTLPKINLTANLIHLSENRLENLDILYFLLRVPHLQILILNQNRFSSCSGDQTPSENPSLEQLFLGENMLQLAWETELCWDVFEGLSHLQVLYLNHNYLNSLPPGVFSHLTALRGLSLNSNRLTVLSHNDLPANLEILDISRNQLLAPNPDVFVSLSVLDITHNKFICECELSTFINWLNHTNVTIAGPPADIYCVYPDSFSGVSLFSLSTEGCDEEEVLKSLKFSLFIVCTVTLTLFLMTILTVTKFRGFCFICYKTAQRLVFKDHPQGTEPDMYKYDAYLCFSSKDFTWVQNALLKHLDTQYSDQNRFNLCFEERDFVPGENRIANIQDAIWNSRKIVCLVSRHFLRDGWCLEAFSYAQGRCLSDLNSALIMVVVGSLSQYQLMKHQSIRGFVQKQQYLRWPEDLQDVGWFLHKLSQQILKKEKEKKKDNNIPLQTVATIS

SEQ ID NO: 89169 - protein, 21 aa, Homo sapiens
  Payload ID: 17852
  Gene Name: toll-like receptor 5
  ENSP ID: ENSP00000385458
MGDHLDLLLGVVLMAGPVFGI

SEQ ID NO: 89170 - protein, 858 aa, Homo sapiens; identical to SEQ ID NO: 89168
  Payload ID: 17852
  Gene Name: toll-like receptor 5
  Uniprot ID: O60602
  ENSP ID: ENSP00000440643

SEQ ID NO: 89171 - protein, 796 aa, Homo sapiens
  Payload ID: 17853
  Gene Name: toll-like receptor 6
  Uniprot ID: Q9Y2C9
  ENSP ID: ENSP00000371376
MTKDKEPIVKSFHFVCLMIIIVGTRIQFSDGNEFAVDKSKRGLIHVPKDLPLKTKVLDMSQNYIAELQVSDMSFLSELTVLRLSHNRIQLLDLSVFKFNQDLEYLDLSHNQLQKISCHPIVSFRHLDLSFNDFKALPICKEFGNLSQLNFLGLSAMKLQKLDLLPIAHLHLSYILLDLRNYYIKENETESLQILNAKTLHLVFHPTSLFAIQVNISVNTLGCLQLTNIKLNDDNCQVFIKFLSELTRGSTLLNFTLNHIETTWKCLVRVFQFLWPKPVEYLNIYNLTIIESIREEDFTYSKTTLKALTIEHITNQVFLFSQTALYTVFSEMNIMMLTISDTPFIHMLCPHAPSTFKFLNFTQNVFTDSIFEKCSTLVKLETLILQKNGLKDLFKVGLMTKDMPSLEILDVSWNSLESGRHKENCTWVESIVVLNLSSNMLTDSVFRCLPPRIKVLDLHSNKIKSVPKQVVKLEALQELNVAFNSLTDLPGCGSFSSLSVLIIDHNSVSHPSADFFQSCQKMRSIKAGDNPFQCTCELREFVKNIDQVSSEVLEGWPDSYKCDYPESYRGSPLKDFHMSELSCNITLLIVTIGATMLVLAVTVTSLCIYLDLPWYLRMVCQWTQTRRRARNIPLEELQRNLQFHAFISYSEHDSAWVKSELVPYLEKEDIQICLHERNFVPGKSIVENIINCIEKSYKSIFVLSPNFVQSEWCHYELYFAHHNLFHEGSNNLILILLEPIPQNSIPNKYHKLKALMTQRTYLQWPKEKSKRGLFWANIRAAFNMKLTLVTENNDVKS

SEQ ID NO: 89172 - protein, 796 aa, Homo sapiens; identical to SEQ ID NO: 89171
  Payload ID: 17853
  Gene Name: toll-like receptor 6
  Uniprot ID: Q9Y2C9
  ENSP ID: ENSP00000389600

SEQ ID NO: 89173 - protein, 91 aa, Homo sapiens
  Payload ID: 17853
  Gene Name: toll-like receptor 6
  ENSP ID: ENSP00000423326
MTKDKEPIVKSFHFVCLMIIIVGTRIQFSDGNEFAVDKSKRGLIHVPKDLPLKTKVLDMSQNYIAELQVSDMSFLSELTVLRLSHNRIQLL

SEQ ID NO: 89174 - protein, 150 aa, Homo sapiens
  Payload ID: 17853
  Gene Name: toll-like receptor 6
  ENSP ID: ENSP00000424718
MTKDKEPIVKSFHFVCLMIIIVGTRIQFSDGNEFAVDKSKRGLIHVPKDLPLKTKVLDMSQNYIAELQVSDMSFLSELTVLRLSHNRIQLLDLSVFKFNQDLEYLDLSHNQLQKISCHPIVSFRHLDLSFNDFKALPICKEFGNLSQLNF

SEQ ID NO: 89175 - protein, 480 aa, Homo sapiens
  Payload ID: 17853
  Gene Name: toll-like receptor 6
  Uniprot ID: Q9Y2C9
  ENSP ID: ENSP00000480266
MTKDKEPIVKSFHFVCLMIIIVGTRIQFSDGNEFAVDKSKRGLIHVPKDLPLKTKVLDMSQNYIAELQVSDMSFLSELTVLRLSHNRIQLLDLSVFKFNQDLEYLDLSHNQLQKISCHPIVSFRHLDLSFNDFKALPICKEFGNLSQLNFLGLSAMKLQKLDLLPIAHLHLSYILLDLRNYYIKENETESLQILNAKTLHLVFHPTSLFAIQVNISVNTLGCLQLTNIKLNDDNCQVFIKFLSELTRGSTLLNFTLNHIETTWKCLVRVFQFLWPKPVEYLNIYNLTIIESIREEDFTYSKTTLKALTIEHITNQVFLFSQTALYTVFSEMNIMMLTISDTPFIHMLCPHAPSTFKFLNFTQNVFTDSIFEKCSTLVKLETLIFVLSPNFVQSEWCHYELYFAHHNLFHEGSNNLILILLEPIPQNSIPNKYHKLKALMTQRTYLQWPKEKSKRGLFWANIRAAFNMKLTLVTENNDVKS

SEQ ID NO: 89176 - protein, 1049 aa, Homo sapiens
  Payload ID: 17854
  Gene Name: toll-like receptor 7
  Uniprot ID: Q9NYK1
  ENSP ID: ENSP00000370034
MVFPMWTLKRQILILFNIILISKLLGARWFPKTLPCDVTLDVPKNHVIVDCTDKHLTEIPGGIPTNTTNLTLTINHIPDISPASFHRLDHLVEIDFRCNCVPIPLGSKNNMCIKRLQIKPRSFSGLTYLKSLYLDGNQLLEIPQGLPPSLQLLSLEANNIFSIRKENLTELANIEILYLGQNCYYRNPCYVSYSIEKDAFLNLTKLKVLSLKDNNVTAVPTVLPSTLTELYLYNNMIAKIQEDDFNNLNQLQILDLSGNCPRCYNAPFPCAPCKNNSPLQIPVNAFDALTELKVLRLHSNSLQHVPPRWFKNINKLQELDLSQNFLAKEIGDAKFLHFLPSLIQLDLSFNFELQVYRASMNLSQAFSSLKSLKILRIRGYVFKELKSFNLSPLHNLQNLEVLDLGTNFIKIANLSMFKQFKRLKVIDLSVNKISPSGDSSEVGFCSNARTSVESYEPQVLEQLHYFRYDKYARSCRFKNKEASFMSVNESCYKYGQTLDLSKNSIFFVKSSDFQHLSFLKCLNLSGNLISQTLNGSEFQPLAELRYLDFSNNRLDLLHSTAFEELHKLEVLDISSNSHYFQSEGITHMLNFTKNLKVLQKLMMNDNDISSSTSRTMESESLRTLEFRGNHLDVLWREGDNRYLQLFKNLLKLEELDISKNSLSFLPSGVFDGMPPNLKNLSLAKNGLKSFSWKKLQCLKNLETLDLSHNQLTTVPERLSNCSRSLKNLILKNNQIRSLTKYFLQDAFQLRYLDLSSNKIQMIQKTSFPENVLNNLKMLLLHHNRFLCTCDAVWFVWWVNHTEVTIPYLATDVTCVGPGAHKGQSVISLDLYTCELDLTNLILFSLSISVSLFLMVMMTASHLYFWDVWYIYHFCKAKIKGYQRLISPDCCYDAFIVYDTKDPAVTEWVLAELVAKLEDPREKHFNLCLEERDWLPGQPVLENLSQSIQLSKKTVFVMTDKYAKTENFKIAFYLSHQRLMDEKVDVIILIFLEKPFQKSKFLQLRKRLCGSSVLEWPTNPQAHPYFWQCLKNALATDNHVAYSQVFKETV

SEQ ID NO: 89177 - protein, 1041 aa, Homo sapiens
  Payload ID: 17855
  Gene Name: toll-like receptor 8
  Uniprot ID: Q9NR97
  ENSP ID: ENSP00000218032
MENMFLQSSMLTCIFLLISGSCELCAEENFSRSYPCDEKKQNDSVIAECSNRRLQEVPQTVGKYVTELDLSDNFITHITNESFQGLQNLTKINLNHNPNVQHQNGNPGIQSNGLNITDGAFLNLKNLRELLLEDNQLPQIPSGLPESLTELSLIQNNIYNITKEGISRLINLKNLYLAWNCYFNKVCEKTNIEDGVFETLTNLELLSLSFNSLSHVPPKLPSSLRKLFLSNTQIKYISEEDFKGLINLTLLDLSGNCPRCFNAPFPCVPCDGGASINIDRFAFQNLTQLRYLNLSSTSLRKINAAWFKNMPHLKVLDLEFNYLVGEIASGAFLTMLPRLEILDLSFNYIKGSYPQHINISRNFSKLLSLRALHLRGYVFQELREDDFQPLMQLPNLSTINLGINFIKQIDFKLFQNFSNLEIIYLSENRISPLVKDTRQSYANSSSFQRHIRKRRSTDFEFDPHSNFYHFTRPLIKPQCAAYGKALDLSLNSIFFIGPNQFENLPDIACLNLSANSNAQVLSGTEFSAIPHVKYLDLTNNRLDFDNASALTELSDLEVLDLSYNSHYFRIAGVTHHLEFIQNFTNLKVLNLSHNNIYTLTDKYNLESKSLVELVFSGNRLDILWNDDDNRYISIFKGLKNLTRLDLSLNRLKHIPNEAFLNLPASLTELHINDNMLKFFNWTLLQQFPRLELLDLRGNKLLFLTDSLSDFTSSLRTLLLSHNRISHLPSGFLSEVSSLKHLDLSSNLLKTINKSALETKTTTKLSMLELHGNPFECTCDIGDFRRWMDEHLNVKIPRLVDVICASPGDQRGKSIVSLELTTCVSDVTAVILFFFTFFITTMVMLAALAHHLFYWDVWFIYNVCLAKVKGYRSLSTSQTFYDAYISYDTKDASVTDWVINELRYHLEESRDKNVLLCLEERDWDPGLAIIDNLMQSINQSKKTVFVLTKKYAKSWNFKTAFYLALQRLMDENMDVIIFILLEPVLQHSQYLRLRQRICKSSILQWPDNPKAEGLFWQTLRNVVLTENDSRYNNMYVDSIKQY

SEQ ID NO: 89178 - protein, 1059 aa, Homo sapiens
  Payload ID: 17855
  Gene Name: toll-like receptor 8
  Uniprot ID: Q9NR97
  ENSP ID: ENSP00000312082
MKESSLQNSSCSLGKETKKENMFLQSSMLTCIFLLISGSCELCAEENFSRSYPCDEKKQNDSVIAECSNRRLQEVPQTVGKYVTELDLSDNFITHITNESFQGLQNLTKINLNHNPNVQHQNGNPGIQSNGLNITDGAFLNLKNLRELLLEDNQLPQIPSGLPESLTELSLIQNNIYNITKEGISRLINLKNLYLAWNCYFNKVCEKTNIEDGVFETLTNLELLSLSFNSLSHVPPKLPSSLRKLFLSNTQIKYISEEDFKGLINLTLLDLSGNCPRCFNAPFPCVPCDGGASINIDRFAFQNLTQLRYLNLSSTSLRKINAAWFKNMPHLKVLDLEFNYLVGEIASGAFLTMLPRLEILDLSFNYIKGSYPQHINISRNFSKLLSLRALHLRGYVFQELREDDFQPLMQLPNLSTINLGINFIKQIDFKLFQNFSNLEIIYLSENRISPLVKDTRQSYANSSSFQRHIRKRRSTDFEFDPHSNFYHFTRPLIKPQCAAYGKALDLSLNSIFFIGPNQFENLPDIACLNLSANSNAQVLSGTEFSAIPHVKYLDLTNNRLDFDNASALTELSDLEVLDLSYNSHYFRIAGVTHHLEFIQNFTNLKVLNLSHNNIYTLTDKYNLESKSLVELVFSGNRLDILWNDDDNRYISIFKGLKNLTRLDLSLNRLKHIPNEAFLNLPASLTELHINDNMLKFFNWTLLQQFPRLELLDLRGNKLLFLTDSLSDFTSSLRTLLLSHNRISHLPSGFLSEVSSLKHLDLSSNLLKTINKSALETKTTTKLSMLELHGNPFECTCDIGDFRRWMDEHLNVKIPRLVDVICASPGDQRGKSIVSLELTTCVSDVTAVILFFFTFFITTMVMLAALAHHLFYWDVWFIYNVCLAKVKGYRSLSTSQTFYDAYISYDTKDASVTDWVINELRYHLEESRDKNVLLCLEERDWDPGLAIIDNLMQSINQSKKTVFVLTKKYAKSWNFKTAFYLALQRLMDENMDVIIFILLEPVLQHSQYLRLRQRICKSSILQWPDNPKAEGLFWQTLRNVVLTENDSRYNNMYVDSIKQY

SEQ ID NO: 89179 - protein, 1032 aa, Homo sapiens
  Payload ID: 17856
  Gene Name: toll-like receptor 9
  Uniprot ID: Q9NR96
  ENSP ID: ENSP00000353874
MGFCRSALHPLSLLVQAIMLAMTLALGTLPAFLPCELQPHGLVNCNWLFLKSVPHFSMAAPRGNVTSLSLSSNRIHHLHDSDFAHLPSLRHLNLKWNCPPVGLSPMHFPCHMTIEPSTFLAVPTLEELNLSYNNIMTVPALPKSLISLSLSHTNILMLDSASLAGLHALRFLFMDGNCYYKNPCRQALEVAPGALLGLGNLTHLSLKYNNLTVVPRNLPSSLEYLLLSYNRIVKLAPEDLANLTALRVLDVGGNCRRCDHAPNPCMECPRHFPQLHPDTFSHLSRLEGLVLKDSSLSWLNASWFRGLGNLRVLDLSENFLYKCITKTKAFQGLTQLRKLNLSFNYQKRVSFAHLSLAPSFGSLVALKELDMHGIFFRSLDETTLRPLARLPMLQTLRLQMNFINQAQLGIFRAFPGLRYVDLSDNRISGASELTATMGEADGGEKVWLQPGDLAPAPVDTPSSEDFRPNCSTLNFTLDLSRNNLVTVQPEMFAQLSHLQCLRLSHNCISQAVNGSQFLPLTGLQVLDLSHNKLDLYHEHSFTELPRLEALDLSYNSQPFGMQGVGHNFSFVAHLRTLRHLSLAHNNIHSQVSQQLCSTSLRALDFSGNALGHMWAEGDLYLHFFQGLSGLIWLDLSQNRLHTLLPQTLRNLPKSLQVLRLRDNYLAFFKWWSLHFLPKLEVLDLAGNQLKALTNGSLPAGTRLRRLDVSCNSISFVAPGFFSKAKELRELNLSANALKTVDHSWFGPLASALQILDVSANPLHCACGAAFMDFLLEVQAAVPGLPSRVKCGSPGQLQGLSIFAQDLRLCLDEALSWDCFALSLLAVALGLGVPMLHHLCGWDLWYCFHLCLAWLPWRGRQSGRDEDALPYDAFVVFDKTQSAVADWVYNELRGQLEECRGRWALRLCLEERDWLPGKTLFENLWASVYGSRKTLFVLAHTDRVSGLLRASFLLAQQRLLEDRKDVVVLVILSPDGRRSRYVRLRQRLCRQSVLLWPHQPSGQRSFWAQLGMALTRDNHHFYNRNFCQGPTAE

SEQ ID NO: 89180 - protein, 712 aa, Homo sapiens
  Payload ID: 17857
  Gene Name: toll-like receptor adaptor molecule 1
  Uniprot ID: Q8IUC6
  ENSP ID: ENSP00000248244
MACTGPSLPSAFDILGAAGQDKLLYLKHKLKTPRPGCQGQDLLHAMVLLKLGQETEARISLEALKADAVARLVARQWAGVDSTEDPEEPPDVSWAVARLYHLLAEEKLCPASLRDVAYQEAVRTLSSRDDHRLGELQDEARNRCGWDIAGDPGSIRTLQSNLGCLPPSSALPSGTRSLPRPIDGVSDWSQGCSLRSTGSPASLASNLEISQSPTMPFLSLHRSPHGPSKLCDDPQASLVPEPVPGGCQEPEEMSWPPSGEIASPPELPSSPPPGLPEVAPDATSTGLPDTPAAPETSTNYPVECTEGSAGPQSLPLPILEPVKNPCSVKDQTPLQLSVEDTTSPNTKPCPPTPTTPETSPPPPPPPPSSTPCSAHLTPSSLFPSSLESSSEQKFYNFVILHARADEHIALRVREKLEALGVPDGATFCEDFQVPGRGELSCLQDAIDHSAFIILLLTSNFDCRLSLHQVNQAMMSNLTRQGSPDCVIPFLPLESSPAQLSSDTASLLSGLVRLDEHSQIFARKVANTFKPHRLQARKAMWRKEQDTRALREQSQHLDGERMQAAALNAAYSAYLQSYLSYQAQMEQLQVAFGSHMSFGTGAPYGARMPFGGQVPLGAPPPFPTWPGCPQPPPLHAWQAGTPPPPSPQPAAFPQSLPFPQSPAFPTASPAPPQSPGLQPLIIHHAQMVQLGLNNHMWNQRGSQAPEDKTQEAE

SEQ ID NO: 89181 - protein, 546 aa, Homo sapiens [sequence omitted]

SEQ ID NO: 89182 - protein, 235 aa, Homo sapiens
  Payload ID: 17858
  Gene Name: toll-like receptor adaptor molecule 2
  Uniprot ID: Q86XR7
  ENSP ID: ENSP00000415139
MGIGKSKINSCPLSLSWGKRHSVDTSPGYHESDSKKSEDLSLCNVAEHSNTTEGPTGKQEGAQSVEEMFEEEAEEEVFLKFVILHAEDDTDEALRVQNLLQDDFGIKPGIIFAEMPCGRQHLQNLDDAVNGSAWTILLLTENFLRDTWCNFQFYTSLMNSVNRQHKYNSVIPMRPLNNPLPRERTPFALQTINALEEESRGFPTQVERIFQESVYKTQQTIWKETRNMVQRQFIA

SEQ ID NO: 89183 - protein, 1013 aa, Homo sapiens
  Payload ID: 17859
  Gene Name: tolloid-like 1
  Uniprot ID: O43897
  ENSP ID: ENSP00000061240
MGLGTLSPRMLVWLVASGIVFYGELWVCAGLDYDYTFDGNEEDKTETIDYKDPCKAAVFWGDIALDDEDLNIFQIDRTIDLTQNPFGNLGHTTGGLGDHAMSKKRGALYQLIDRIRRIGFGLEQNNTVKGKVPLQFSGQNEKNRVPRAATSRTERIWPGGVIPYVIGGNFTGSQRAMFKQAMRHWEKHTCVTFIERSDEESYIVFTYRPCGCCSYVGRRGNGPQAISIGKNCDKFGIVVHELGHVIGFWHEHTRPDRDNHVTIIRENIQPGQEYNFLKMEPGEVNSLGERYDFDSIMHYARNTFSRGMFLDTILPSRDDNGIRPAIGQRTRLSKGDIAQARKLYRCPACGETLQESNGNLSSPGFPNGYPSYTHCIWRVSVTPGEKIVLNFTTMDLYKSSLCWYDYIEVRDGYWRKSPLLGRFCGDKLPEVLTSTDSRMWIEFRSSSNWVGKGFAAVYEAICGGEIRKNEGQIQSPNYPDDYRPMKECVWKITVSESYHVGLTFQSFEIERHDNCAYDYLEVRDGTSENSPLIGRFCGYDKPEDIRSTSNTLWMKFVSDGTVNKAGFAANFFKEEDECAKPDRGGCEQRCLNTLGSYQCACEPGYELGPDRRSCEAACGGLLTKLNGTITTPGWPKEYPPNKNCVWQVVAPTQYRISVKFEFFELEGNEVCKYDYVEIWSGLSSESKLHGKFCGAEVPEVITSQFNNMRIEFKSDNTVSKKGFKAHFFSDKDECSKDNGGCQHECVNTMGSYMCQCRNGFVLHDNKHDCKEAECEQKIHSPSGLITSPNWPDKYPSRKECTWEISATPGHRIKLAFSEFEIEQHQECAYDHLEVFDGETEKSPILGRLCGNKIPDPLVATGNKMFVRFVSDASVQRKGFQATHSTECGGRLKAESKPRDLYSHAQFGDNNYPGQVDCEWLLVSERGSRLELSFQTFEVEEEADCGYDYVELFDGLDSTAVGLGRFCGSGPPEEIYSIGDSVLIHFHTDDTINKKGFHIRYKSIRYPDTTHTKK

SEQ ID NO: 89184 - protein, 57 aa, Homo sapiens
  Payload ID: 17859
  Gene Name: tolloid-like 1
  ENSP ID: ENSP00000421732
MGLGTLSPRMLVWLVASGIVFYGELWVCAGLDYDYTFDGNEEDKTETIDYKDPCKAD

SEQ ID NO: 89185 - protein, 130 aa, Homo sapiens
  Payload ID: 17859
  Gene Name: tolloid-like 1
  ENSP ID: ENSP00000422692
MGLGTLSPRMLVWLVASGIVFYGELWVCAGLDYDYTFDGNEEDKTETIDYKDPCKAAVFWGDIALDDEDLNIFQIDRTIDLTQNPFGNLGHTTGGLGDHAMSKKRGALYQLIDRIRRIGFGISMFKVADA

SEQ ID NO: 89186 - protein, 392 aa, Homo sapiens
  Payload ID: 17859
  Gene Name: tolloid-like 1
  Uniprot ID: O43897
  ENSP ID: ENSP00000422937
MGLGTLSPRMLVWLVASGIVFYGELWVCAGLDYDYTFDGNEEDKTETIDYKDPCKAAVFWGDIALDDEDLNIFQIDRTIDLTQNPFGNLGHTTGGLGDHAMSKKRGALYQLIDRIRRIGFGLEQNNTVKGKVPLQFSGQNEKNRVPRAATSRTERIWPGGVIPYVIGGNFTGSQRAMFKQAMRHWEKHTCVTFIERSDEESYIVFTYRPCGCCSYVGRRGNGPQAISIGKNCDKFGIVVHELGHVIGFWHEHTRPDRDNHVTIIRENIQPGQEYNFLKMEPGEVNSLGERYDFDSIMHYARNTFSRGMFLDTILPSRDDNGIRPAIGQRTRLSKGDIAQARKLYRCPACGETLQESNGNLSSPGFPNGYPSYTHCIWRVSVTPGEKVVFSLC

SEQ ID NO: 89187 - protein, 110 aa, Homo sapiens
  Payload ID: 17859
  Gene Name: tolloid-like 1
  ENSP ID: ENSP00000423748
MSKKRGALYQLIDRIRRIGFGLEQNNTVKGKVPLQFSGQNEKNRVPRAATSRTERIWPGGVIPYVIGGNFTGSQRAMFKQAMRHWEKHTCVTFIERSDEESYIVFTYRPC

SEQ ID NO: 89188 - protein, 1036 aa, Homo sapiens
  Payload ID: 17859
  Gene Name: tolloid-like 1
  ENSP ID: ENSP00000426082
MGLGTLSPRMLVWLVASGIVFYGELWVCAGLDYDYTFDGNEEDKTETIDYKDPCKAAVFWGDIALDDEDLNIFQIDRTIDLTQNPFGNLGHTTGGLGDHAMSKKRGALYQLIDRIRRIGFGLEQNNTVKGKVPLQFSGQNEKNRVPRAATSRTERIWPGGVIPYVIGGNFTGSQRAMFKQAMRHWEKHTCVTFIERSDEESYIVFTYRPCGCCSYVGRRGNGPQAISIGKNCDKFGIVVHELGHVIGFWHEHTRPDRDNHVTIIRENIQPGQEYNFLKMEPGEVNSLGERYDFDSIMHYARNTFSRGMFLDTILPSRDDNGIRPAIGQRTRLSKGDIAQARKLYRCPACGETLQESNGNLSSPGFPNGYPSYTHCIWRVSVTPGEKIVLNFTTMDLYKSSLCWYDYIEVRDGYWRKSPLLGRFCGDKLPEVLTSTDSRMWIEFRSSSNWVGKGFAAVYEAICGGEIRKNEGQIQSPNYPDDYRPMKECVWKITVSESYHVGLTFQSFEQEHQENPGIASKARESLILIWKPIERHDNCAYDYLEVRDGTSENSPLIGRFCGYDKPEDIRSTSNTLWMKFVSDGTVNKAGFAANFFKEEDECAKPDRGGCEQRCLNTLGSYQCACEPGYELGPDRRSCEAACGGLLTKLNGTITTPGWPKEYPPNKNCVWQVVAPTQYRISVKFEFFELEGNEVCKYDYVEIWSGLSSESKLHGKFCGAEVPEVITSQFNNMRIEFKSDNTVSKKGFKAHFFSDKDECSKDNGGCQHECVNTMGSYMCQCRNGFVLHDNKHDCKEAECEQKIHSPSGLITSPNWPDKYPSRKECTWEISATPGHRIKLAFSEFEIEQHQECAYDHLEVFDGETEKSPILGRLCGNKIPDPLVATGNKMFVRFVSDASVQRKGFQATHSTECGGRLKAESKPRDLYSHAQFGDNNYPGQVDCEWLLVSERGSRLELSFQTFEVEEEADCGYDYVELFDGLDSTAVGLGRFCGSGPPEEIYSIGDSVLIHFHTDDTINKKGFHIRYKSIRYPDTTHTKK

SEQ ID NO: 89189 - protein, 1015 aa, Homo sapiens
  Payload ID: 17860
  Gene Name: tolloid-like 2
  Uniprot ID: Q9Y6L7
  ENSP ID: ENSP00000350630
MPRATALGALVSLLLLLPLPRGAGGLGERPDATADYSELDGEEGTEQQLEHYHDPCKAAVFWGDIALDEDDLKLFHIDKARDWTKQTVGATGHSTGGLEEQASESSPDTTAMDTGTKEAGKDGRENTTLLHSPGTLHAAAKTFSPRVRRATTSRTERIWPGGVIPYVIGGNFTGSQRAIFKQAMRHWEKHTCVTFIERTDEESFIVFSYRTCGCCSYVGRRGGGPQAISIGKNCDKFGIVAHELGHVVGFWHEHTRPDRDQHVTIIRENIQPGQEYNFLKMEAGEVSSLGETYDFDSIMHYARNTFSRGVFLDTILPRQDDNGVRPTIGQRVRLSQGDIAQARKLYKCPACGETLQDTTGNFSAPGFPNGYPSYSHCVWRISVTPGEKIVLNFTSMDLFKSRLCWYDYVEVRDGYWRKAPLLGRFCGDKIPEPLVSTDSRLWVEFRSSSNILGKGFFAAYEATCGGDMNKDAGQIQSPNYPDDYRPSKECVWRITVSEGFHVGLTFQAFEIERHDSCAYDYLEVRDGPTEESALIGHFCGYEKPEDVKSSSNRLWMKFVSDGSINKAGFAANFFKEVDECSWPDHGGCEHRCVNTLGSYKCACDPGYELAADKKMCEVACGGFITKLNGTITSPGWPKEYPTNKNCVWQVVAPAQYRISLQFEVFELEGNDVCKYDFVEVRSGLSPDAKLHGRFCGSETPEVITSQSNNMRVEFKSDNTVSKRGFRAHFFSDKDECAKDNGGCQHECVNTFGSYLCRCRNGYWLHENGHDCKEAGCAHKISSVEGTLASPNWPDKYPSRRECTWNISSTAGHRVKLTFNEFEIEQHQECAYDHLEMYDGPDSLAPILGRFCGSKKPDPTVASGSSMFLRFYSDASVQRKGFQAVHSTECGGRLKAEVQTKELYSHAQFGDNNYPSEARCDWVIVAEDGYGVELTFRTFEVEEEADCGYDYMEAYDGYDSSAPRLGRFCGSGPLEEIYSAGDSLMIRFRTDDTINKKGFHARYTSTKFQDALHMKK

SEQ ID NO: 89190 - protein, 1378 aa, Homo sapiens
  Payload ID: 17861
  Gene Name: tonsoku-like, DNA repair protein
  Uniprot ID: Q96HA7
  ENSP ID: ENSP00000386239
MSLERELRQLSKAKAKAQRAGQRREEAALCHQLGELLAGHGRYAEALEQHWQELQLRERADDPLGCAVAHRKIGERLAEMEDYPAALQHQHQYLELAHSLRNHTELQRAWATIGRTHLDIYDHCQSRDALLQAQAAFEKSLAIVDEELEGTLAQGELNEMRTRLYLNLGLTFESLQQTALCNDYFRKSIFLAEQNHLYEDLFRARYNLGTIHWRAGQHSQAMRCLEGARECAHTMRKRFMESECCVVIAQVLQDLGDFLAAKRALKKAYRLGSQKPVQRAAICQNLQHVLAVVRLQQQLEEAEGRDPQGAMVICEQLGDLFSKAGDFPRAAEAYQKQLRFAELLDRPGAERAIIHVSLATTLGDMKDHHGAVRHYEEELRLRSGNVLEEAKTWLNIALSREEAGDAYELLAPCFQKALSCAQQAQRPQLQRQVLQHLHTVQLRLQPQEAPETETRLRELSVAEDEDEEEEAEEAAATAESEALEAGEVELSEGEDDTDGLTPQLEEDEELQGHLGRRKGSKWNRRNDMGETLLHRACIEGQLRRVQDLVRQGHPLNPRDYCGWTPLHEACNYGHLEIVRFLLDHGAAVDDPGGQGCEGITPLHDALNCGHFEVAELLLERGASVTLRTRKGLSPLETLQQWVKLYRRDLDLETRQKARAMEMLLQAAASGQDPHSSQAFHTPSSLLFDPETSPPLSPCPEPPSNSTRLPEASQAHVRVSPGQAAPAMARPRRSRHGPASSSSSSEGEDSAGPARPSQKRPRCSATAQRVAAWTPGPASNREAATASTSRAAYQAAIRGVGSAQSRLGPGPPRGHSKALAPQAALIPEEECLAGDWLELDMPLTRSRRPRPRGTGDNRRPSSTSGSDSEESRPRARAKQVRLTCMQSCSAPVNAGPSSLASEPPGSPSTPRVSEPSGDSSAAGQPLGPAPPPPIRVRVQVQDHLFLIPVPHSSDTHSVAWLAEQAAQRYYQTCGLLPRLTLRKEGALLAPQDLIPDVLQSNDEVLAEVTSWDLPPLTDRYRRACQSLGQGEHQQVLQAVELQGLGLSFSACSLALDQAQLTPLLRALKLHTALRELRLAGNRLGDKCVAELVAALGTMPSLALLDLSSNHLGPEGLRQLAMGLPGQATLQSLEELDLSMNPLGDGCGQSLASLLHACPLLSTLRLQACGFGPSFFLSHQTALGSAFQDAEHLKTLSLSYNALGAPALARTLQSLPAGTLLHLELSSVAAGKGDSDLMEPVFRYLAKEGCALAHLTLSANHLGDKAVRDLCRCLSLCPSLISLDLSANPEISCASLEELLSTLQKRPQGLSFLGLSGCAVQGPLGLGLWDKIAAQLRELQLCSRRLCAEDRDALRQLQPSRPGPGECTLDHGSKLFFRRL

SEQ ID NO: 89191 - protein, 477 aa, Homo sapiens [sequence omitted]

SEQ ID NO: 89192 - protein, 1910 aa, Homo sapiens
  Payload ID: 17862
  Gene Name: TOPBP1-interacting checkpoint and replication regulator
  Uniprot ID: Q7Z2Z1
  ENSP ID: ENSP00000268138
MACCHKVMLLLDTAGGAARHSRVRRAALRLLTYLSCRFGLARVHWAFKFFDSQGARSRPSRVSDFRELGSRSWEDFEEELEARLEDRAHLPGPAPRATHTHGALMETLLDYQWDRPEITSPTKPILRSSGRRLLDVESEAKEAEAALGGLVNAVFLLAPCPHSQRELLQFVSGCEAQAQRLPPTPKQVMEKLLPKRVREVMVARKITFYWVDTTEWSKLWESPDHLGYWTVCELLHHGGGTVLPSESFSWDFAQAGEMLLRSGIKLSSEPHLSPWISMLPTDATLNRLLYNSPEYEASFPRMEGMLFLPVEAGKEIQETWTVTLEPLAMHQRHFQKPVRIFLKGSVAQWSLPTSSTLGTDSWMLGSPEESTATQRLLFQQLVSRLTAEELHLVADVDPGEGRPPITGVISPLSASAMILTVCRTKEAEFQRHVLQTAVADSPRDTASLFSDVVDSILNQTHDSLADTASAASPVPEWAQQELGHTTPWSPAVVEKWFPFCNISGASSDLMESFGLLQAASANKEESSKTEGELIHCLAELYQRKSREESTIAHQEDSKKKRGVPRTPVRQKMNTMCRSLKMLNVARLNVKAQKLHPDGSPDVAGEKGIQKIPSGRTVDKLEDRGRTLRSSKPKDFKTEEELLSYIRENYQKTVATGEIMLYACARNMISTVKMFLKSKGTKELEVNCLNQVKSSLLKTSKSLRQNLGKKLDKEDKVRECQLQVFLRLEMCLQCPSINESTDDMEQVVEEVTDLLRMVCLTEDSAYLAEFLEEILRLYIDSIPKTLGNLYNSLGFVIPQKLAGVLPTDFFSDDSMTQENKSPLLSVPFLSSARRSVSGSPESDELQELRTRSAKKRRKNALIRHKSIAEVSQNLRQIEIPKVSKRATKKENSHPAPQQPSQPVKDTVQEVTKVRRNLFNQELLSPSKRSLKRGLPRSHSVSAVDGLEDKLDNFKKNKGYHKLLTKSVAETPVHKQISKRLLHRQIKGRSSDPGPDIGVVEESPEKGDEISLRRSPRIKQLSFSRTHSASFYSVSQPKSRSVQRVHSFQQDKSDQRENSPVQSIRSPKSLLFGAMSEMISPSEKGSARMKKRSRNTLDSEVPAAYQTPKKSHQKSLSFSKTTPRRISHTPQTPLYTPERLQKSPAKMTPTKQAAFKESLKDSSSPGHDSPLDSKITPQKRHTQAGEGTSLETKTPRTPKRQGTQPPGFLPNCTWPHSVNSSPESPSCPAPPTSSTAQPRRECLTPIRDPLRTPPRAAAFMGTPQNQTHQQPHVLRAARAEEPAQKLKDKAIKTPKRPGNSTVTSSPPVTPKKLFTSPLCDVSKKSPFRKSKIECPSPGELDQKEPQMSPSVAASLSCPVPSTPPELSQRATLDTVPPPPPSKVGKRCRKTSDPRRSIVECQPDASATPGVGTADSPAAPTDSRDDQKGLSLSPQSPPERRGYPGPGLRSDWHASSPLLITSDTEHVTLLSEAEHHGIGDLKSNVLSVEEGEGLRTADAEKSSLSHPGIPPSPPSCGPGSPLMPSRDVHCTTDGRQCQASAQLDNLPASAWHSTDSASPQTYEVELEMQASGLPKLRIKKIDPSSSLEAEPLSKEESSLGEESFLPALSMPRASRSLSKPEPTYVSPPCPRLSHSTPGKSRGQTYICQACTPTHGPSSTPSPFQTDGVPWTPSPKHSGKTTPDIIKDWPRRKRAVGCGAGSSSGRGEVGADLPGSLSLLESEGKDHGLELSIHRTPILEDFELEGVCQLPDQSPPRNSMPKAEEASSWGQFGLSSRKRVLLAKEEADRGAKRICDLREDSEVSKSKEGSPSWSAWQLPSTGDEEVFVSGSTPPPSCAVRSCLSASALQALTQSPLLFQGKTPSSQSKDPRDEDVDVLPSTVEDSPFSRAFSRRRPISRTYTRKKLMGTWLEDL

SEQ ID NO: 89193 - protein, 1909 aa, Homo sapiens
  Payload ID: 17862
  Gene Name: TOPBP1-interacting checkpoint and replication regulator
  Uniprot ID: Q7Z2Z1
  ENSP ID: ENSP00000453306
MACCHKVMLLLDTAGGAARHSRVRRAALRLLTYLSCRFGLARVHWAFKFFDSQGARSRPSRVSDFRELGSRSWEDFEEELEARLEDRAHLPGPAPRATHTHGALMETLLDYQWDRPEITSPTKPILRSSGRRLLDVESEAKEAEAALGGLVNAVFLLAPCPHSQRELLQFVSGCEAQAQRLPPTPKQVMEKLLPKRVREVMVARKITFYWVDTTEWSKLWESPDHLGYWTVCELLHHGGGTVLPSESFSWDFAQAGEMLLRSGIKLSSEPHLSPWISMLPTDATLNRLLYNSPEYEASFPRMEGMLFLPVEGKEIQETWTVTLEPLAMHQRHFQKPVRIFLKGSVAQWSLPTSSTLGTDSWMLGSPEESTATQRLLFQQLVSRLTAEELHLVADVDPGEGRPPITGVISPLSASAMILTVCRTKEAEFQRHVLQTAVADSPRDTASLFSDVVDSILNQTHDSLADTASAASPVPEWAQQELGHTTPWSPAVVEKWFPFCNISGASSDLMESFGLLQAASANKEESSKTEGELIHCLAELYQRKSREESTIAHQEDSKKKRGVPRTPVRQKMNTMCRSLKMLNVARLNVKAQKLHPDGSPDVAGEKGIQKIPSGRTVDKLEDRGRTLRSSKPKDFKTEEELLSYIRENYQKTVATGEIMLYACARNMISTVKMFLKSKGTKELEVNCLNQVKSSLLKTSKSLRQNLGKKLDKEDKVRECQLQVFLRLEMCLQCPSINESTDDMEQVVEEVTDLLRMVCLTEDSAYLAEFLEEILRLYIDSIPKTLGNLYNSLGFVIPQKLAGVLPTDFFSDDSMTQENKSPLLSVPFLSSARRSVSGSPESDELQELRTRSAKKRRKNALIRHKSIAEVSQNLRQIEIPKVSKRATKKENSHPAPQQPSQPVKDTVQEVTKVRRNLFNQELLSPSKRSLKRGLPRSHSVSAVDGLEDKLDNFKKNKGYHKLLTKSVAETPVHKQISKRLLHRQIKGRSSDPGPDIGVVEESPEKGDEISLRRSPRIKQLSFSRTHSASFYSVSQPKSRSVQRVHSFQQDKSDQRENSPVQSIRSPKSLLFGAMSEMISPSEKGSARMKKRSRNTLDSEVPAAYQTPKKSHQKSLSFSKTTPRRISHTPQTPLYTPERLQKSPAKMTPTKQAAFKESLKDSSSPGHDSPLDSKITPQKRHTQAGEGTSLETKTPRTPKRQGTQPPGFLPNCTWPHSVNSSPESPSCPAPPTSSTAQPRRECLTPIRDPLRTPPRAAAFMGTPQNQTHQQPHVLRAARAEEPAQKLKDKAIKTPKRPGNSTVTSSPPVTPKKLFTSPLCDVSKKSPFRKSKIECPSPGELDQKEPQMSPSVAASLSCPVPSTPPELSQRATLDTVPPPPPSKVGKRCRKTSDPRRSIVECQPDASATPGVGTADSPAAPTDSRDDQKGLSLSPQSPPERRGYPGPGLRSDWHASSPLLITSDTEHVTLLSEAEHHGIGDLKSNVLSVEEGEGLRTADAEKSSLSHPGIPPSPPSCGPGSPLMPSRDVHCTTDGRQCQASAQLDNLPASAWHSTDSASPQTYEVELEMQASGLPKLRIKKIDPSSSLEAEPLSKEESSLGEESFLPALSMPRASRSLSKPEPTYVSPPCPRLSHSTPGKSRGQTYICQACTPTHGPSSTPSPFQTDGVPWTPSPKHSGKTTPDIIKDWPRRKRAVGCGAGSSSGRGEVGADLPGSLSLLESEGKDHGLELSIHRTPILEDFELEGVCQLPDQSPPRNSMPKAEEASSWGQFGLSSRKRVLLAKEEADRGAKRICDLREDSEVSKSKEGSPSWSAWQLPSTGDEEVFVSGSTPPPSCAVRSCLSASALQALTQSPLLFQGKTPSSQSKDPRDEDVDVLPSTVEDSPFSRAFSRRRPISRTYTRKKLMGTWLEDL

SEQ ID NO: 89194 - protein, 214 aa, Homo sapiens
  Payload ID: 17862
  Gene Name: TOPBP1-interacting checkpoint and replication regulator
  ENSP ID: ENSP00000453922
  MOD_RES (1)..(1): Any amino acid
XSSSGRGEVGADLPGSLSLLESEGKDHGLELSIHRTPILEDFELEGVCQLPDQSPPRNSMPKAEEASSWGQFGLSSRKRVLLAKEEADRGAKRICDLREDSEVSKSKEGSPSWSAWQLPSTGDEEVFVSGSTPPPSCAVRSCLSASALQALTQSPLLFQGKTPSSQSKDPRDEDVDVLPSTVEDSPFSRAFSRRRPISRTYTRKKLMGTWLEDL

SEQ ID NO: 89195 - protein, 765 aa, Homo sapiens
  Payload ID: 17863
  Gene Name: topoisomerase (DNA) I
  Uniprot ID: P11387
  ENSP ID: ENSP00000354522
MSGDHLHNDSQIEADFRLNDSHKHKDKHKDREHRHKEHKKEKDREKSKHSNSEHKDSEKKHKEKEKTKHKDGSSEKHKDKHKDRDKEKRKEEKVRASGDAKIKKEKENGFSSPPQIKDEPEDDGYFVPPKEDIKPLKRPRDEDDADYKPKKIKTEDTKKEKKRKLEEEEDGKLKKPKNKDKDKKVPEPDNKKKKPKKEEEQKWKWWEEERYPEGIKWKFLEHKGPVFAPPYEPLPENVKFYYDGKVMKLSPKAEEVATFFAKMLDHEYTTKEIFRKNFFKDWRKEMTNEEKNIITNLSKCDFTQMSQYFKAQTEARKQMSKEEKLKIKEENEKLLKEYGFCIMDNHKERIANFKIEPPGLFRGRGNHPKMGMLKRRIMPEDIIINCSKDAKVPSPPPGHKWKEVRHDNKVTWLVSWTENIQGSIKYIMLNPSSRIKGEKDWQKYETARRLKKCVDKIRNQYREDWKSKEMKVRQRAVALYFIDKLALRAGNEKEEGETADTVGCCSLRVEHINLHPELDGQEYVVEFDFLGKDSIRYYNKVPVEKRVFKNLQLFMENKQPEDDLFDRLNTGILNKHLQDLMEGLTAKVFRTYNASITLQQQLKELTAPDENIPAKILSYNRANRAVAILCNHQRAPPKTFEKSMMNLQTKIDAKKEQLADARRDLKSAKADAKVMKDAKTKKVVESKKKAVQRLEEQLMKLEVQATDREENKQIALGTSKLNYLDPRITVAWCKKWGVPIEKIYNKTQREKFAWAIDMADEDYEF

SEQ ID NO: 89196 - protein, 601 aa, Homo sapiens
  Payload ID: 17864
  Gene Name: topoisomerase (DNA) I, mitochondrial
  Uniprot ID: Q969P6
  ENSP ID: ENSP00000328835
MRVVRLLRLRAALTLLGEVPRRPASRGVPGSRRTQKGSGARWEKEKHEDGVKWRQLEHKGPYFAPPYEPLPDGVRFFYEGRPVRLSVAAEEVATFYGRMLDHEYTTKEVFRKNFFNDWRKEMAVEEREVIKSLDKCDFTEIHRYFVDKAAARKVLSREEKQKLKEEAEKLQQEFGYCILDGHQEKIGNFKIEPPGLFRGRGDHPKMGMLKRRITPEDVVINCSRDSKIPEPPAGHQWKEVRSDNTVTWLAAWTESVQNSIKYIMLNPCSKLKGETAWQKFETARRLRGFVDEIRSQYRADWKSREMKTRQRAVALYFIDKLALRAGNEKEDGEAADTVGCCSLRVEHVQLHPEADGCQHVVEFDFLGKDCIRYYNRVPVEKPVYKNLQLFMENKDPRDDLFDRLTTTSLNKHLQELMDGLTAKVFRTYNASITLQEQLRALTRAEDSIAAKILSYNRANRVVAILCNHQRATPSTFEKSMQNLQTKIQAKKEQVAEARAELRRARAEHKAQGDGKSRSVLEKKRRLLEKLQEQLAQLSVQATDKEENKQVALGTSKLNYLDPRISIAWCKRFRVPVEKIYSKTQRERFAWALAMAGEDFEF

SEQ ID NO: 89197 - protein, 111 aa, Homo sapiens
  Payload ID: 17864
  Gene Name: topoisomerase (DNA) I, mitochondrial
  ENSP ID: ENSP00000427925
  MOD_RES (1)..(1): Any amino acid
XEQVAEARAELRRARAEHKAQGDGKSRSVLEKKRRLLEKLQEQLAQLSVQATDKEENKQVALGTSKLNYLDPRISIAWCKRFRVPVEKIYSKTQRERFAWALAMAGEDFEF

SEQ ID NO: 89198 - protein, 221 aa, Homo sapiens
  Payload ID: 17864
  Gene Name: topoisomerase (DNA) I, mitochondrial
  ENSP ID: ENSP00000427998
MLDHEYTTKEVFRKNFFNDWRKEMAVEEREVIKSLDKCDFTEIHRYFVDKAAARKVLSREEKQKLKEEAEKLQQEFGYCILDGHQEKIGNFKIEPPGLFRGRGDHPKMGMLKRRITPEDVVINCSRDSKIPEPPAGHQWKEVRSDNTVTWLAAWTESVQNSIKYIMLNPCSKLKGETAWQKFETARRLRGFVDEIRSQYRADWKSREMKTRQRAVALYFID

SEQ ID NO: 89199 - protein, 503 aa, Homo sapiens
  Payload ID: 17864
  Gene Name: topoisomerase (DNA) I, mitochondrial
  Uniprot ID: Q969P6
  ENSP ID: ENSP00000428369
MLDHEYTTKEVFRKNFFNDWRKEMAVEEREVIKSLDKCDFTEIHRYFVDKAAARKVLSREEKQKLKEEAEKLQQEFGYCILDGHQEKIGNFKIEPPGLFRGRGDHPKMGMLKRRITPEDVVINCSRDSKIPEPPAGHQWKEVRSDNTVTWLAAWTESVQNSIKYIMLNPCSKLKGETAWQKFETARRLRGFVDEIRSQYRADWKSREMKTRQRAVALYFIDKLALRAGNEKEDGEAADTVGCCSLRVEHVQLHPEADGCQHVVEFDFLGKDCIRYYNRVPVEKPVYKNLQLFMENKDPRDDLFDRLTTTSLNKHLQELMDGLTAKVFRTYNASITLQEQLRALTRAEDSIAAKILSYNRANRVVAILCNHQRATPSTFEKSMQNLQTKIQAKKEQVAEARAELRRARAEHKAQGDGKSRSVLEKKRRLLEKLQEQLAQLSVQATDKEENKQVALGTSKLNYLDPRISIAWCKRFRVPVEKIYSKTQRERFAWALAMAGEDFEF

SEQ ID NO: 89200 - protein, 376 aa, Homo sapiens
  Payload ID: 17864
  Gene Name: topoisomerase (DNA) I, mitochondrial
  ENSP ID: ENSP00000428451
MLDHEYTTKEVFRKNFFNDWRKEMAVEEREVIKSLDKCDFTEIHRYFVDKAAARKVLSREEKQKLKEEAEKLQQEFGYCILDGHQEKIGNFKIEPPGLFRGRGDHPKMGMLKRRITPEDVVINCSRDSKIPEPPAGHQWKEVRSDNTVTWLAAWTESVQNSIKYIMLNPCSKLKGETAWQKFETARRLRGFVDEIRSQYRADWKSREMKTRQRAVALYFIDKLALRAGNEKEDGEAADTVGCCSLRVEHVQLHPEADGCQHVVEFDFLGKDCIRYYNRVPVEKPVYKNLQLFMENKDPRDDLFDRLTVSWDGPAKPRNYRDHFPPQTTSLNKHLQELMDGLTAKVFRTYNASITLQEQLRALTRAEDSIAAKILSY

SEQ ID NO: 89201 - protein, 164 aa, Homo sapiens
  Payload ID: 17864
  Gene Name: topoisomerase (DNA) I, mitochondrial
  ENSP ID: ENSP00000428723
MKSHPRKKAKNSQKGPFRNVCCTCFPLSDPSETSCCSEDTHPSRPGPPGPQQHYLAGVTCRSPGSGRWEKEKHEDGVKWRQLEHKGPYFAPPYEPLPDGVRFFYEGRPVRLSVAAEEVATFYGRMLDHEYTTKEVFRKNFFNDWRKEMAVEEREVIKSLDKCDF

SEQ ID NO: 89202 - protein, 167 aa, Homo sapiens
  Payload ID: 17864
  Gene Name: topoisomerase (DNA) I, mitochondrial
  ENSP ID: ENSP00000428727
MRVVRLLRLRAALTLLGEVPRRPASRGVPGSRRTQKGSGARWEKEKHEDGVKWRQLEHKGPYFAPPYEPLPDGVRFFYEGRPVRLSVAAEEVATFYGRMLDHEYTTKEVFRKNFFNDWRKEMAVEEREVIKSLDKCDFTEIHRYFVDKAAARKVLSREEKQMVTKKK

SEQ ID NO: 89203 - protein, 164 aa, Homo sapiens
  Payload ID: 17864
  Gene Name: topoisomerase (DNA) I, mitochondrial
  ENSP ID: ENSP00000428931
MRVVRLLRLRAALTLLGEVPRRPASRGVPGSRRTQKGSGARNSQKGPFRNVCCTCFPLSDPSETSCCSEDTHPSRPGPPGPQQHYLAGVTCRSPGSGRWEKEKHEDGVKWRQLEHKGPYFAPPYEPLPDGVRFFYEGRPVRLSVAAEEVATFYGRMLDHEYTTK

SEQ ID NO: 89204 - protein, 503 aa, Homo sapiens; identical to SEQ ID NO: 89199
  Payload ID: 17864
  Gene Name: topoisomerase (DNA) I, mitochondrial
  Uniprot ID: Q969P6
  ENSP ID: ENSP00000429169

SEQ ID NO: 89205 - protein, 201 aa, Homo sapiens
  Payload ID: 17864
  Gene Name: topoisomerase (DNA) I, mitochondrial
  ENSP ID: ENSP00000429177
MLDHEYTTKEVFRKNFFNDWRKEMAVEEREVIKSLDKCDFTEIHRYFVDKAAARKVLSREEKQKLKEEAEKLQQEFGYCILDGHQEKIGNFKIEPPGLFRGRGDHPKMGMLKRRITPEDVVINCSRDSKIPEPPAGHQWKEVRSDNTVTWLAAWTESVQNSIKYIMLNPCSKLKGETAWQKFETARRLRGFVDEIRSQYRA

SEQ ID NO: 89206 - protein, 503 aa, Homo sapiens; identical to SEQ ID NO: 89199
  Payload ID: 17864
  Gene Name: topoisomerase (DNA) I, mitochondrial
  Uniprot ID: Q969P6
  ENSP ID: ENSP00000429181

SEQ ID NO: 89207 - protein, 49 aa, Homo sapiens
  Payload ID: 17864
  Gene Name: topoisomerase (DNA) I, mitochondrial
  ENSP ID: ENSP00000430139
ATFYGRMLDHEYTTKEVFRKNFFNDWRKAPLLDPLLWPDATPLPFTTAL

SEQ ID NO: 89208 - protein, 134 aa, Homo sapiens
  Payload ID: 17864
  Gene Name: topoisomerase (DNA) I, mitochondrial
  ENSP ID: ENSP00000430209
MKSHPRKKAKWEKEKHEDGVKWRQLEHKGPYFAPPYEPLPDGVRFFYEGRPVRLSVAAEEVATFYGRMLDHEYTTKEVFRKNFFNDWRKEMAVEEREVIKSLDKCDFTEIHRYFVDKAAARKVLSREEKQKLKE

SEQ ID NO: 89209 - protein, 33 aa, Homo sapiens
  Payload ID: 17864
  Gene Name: topoisomerase (DNA) I, mitochondrial
  ENSP ID: ENSP00000430635
MLDHEYTTKEVFRKNFFNDWRKEMAVEEREVIK

SEQ ID NO: 89210 - protein, 123 aa, Homo sapiens
  Payload ID: 17864
  Gene Name: topoisomerase (DNA) I, mitochondrial
  ENSP ID: ENSP00000430679
  MOD_RES (1)..(1): Any amino acid
XLRLRAALTLLGEVPRRPASRGVPGSRRTQKGSGARWEKEKHEDGVKWRQLEHKGPYFAPPYEPLPDGVRFFYEGRPVRLSVAAEEVATFYGRMLDHEYTTKEVFRKNFFNDWRKVLCQTHML

SEQ ID NO: 89211 - protein, 1531 aa, Homo sapiens
  Payload ID: 17865
  Gene Name: topoisomerase (DNA) II alpha
  Uniprot ID: P11388
  ENSP ID: ENSP00000411532
MEVSPLQPVNENMQVNKIKKNEDAKKRLSVERIYQKKTQLEHILLRPDTYIGSVELVTQQMWVYDEDVGINYREVTFVPGLYKIFDEILVNAADNKQRDPKMSCIRVTIDPENNLISIWNNGKGIPVVEHKVEKMYVPALIFGQLLTSSNYDDDEKKVTGGRNGYGAKLCNIFSTKFTVETASREYKKMFKQTWMDNMGRAGEMELKPFNGEDYTCITFQPDLSKFKMQSLDKDIVALMVRRAYDIAGSTKDVKVFLNGNKLPVKGFRSYVDMYLKDKLDETGNSLKVIHEQVNHRWEVCLTMSEKGFQQISFVNSIATSKGGRHVDYVADQIVTKLVDVVKKKNKGGVAVKAHQVKNHMWIFVNALIENPTFDSQTKENMTLQPKSFGSTCQLSEKFIKAAIGCGIVESILNWVKFKAQVQLNKKCSAVKHNRIKGIPKLDDANDAGGRNSTECTLILTEGDSAKTLAVSGLGVVGRDKYGVFPLRGKILNVREASHKQIMENAEINNIIKIVGLQYKKNYEDEDSLKTLRYGKIMIMTDQDQDGSHIKGLLINFIHHNWPSLLRHRFLEEFITPIVKVSKNKQEMAFYSLPEFEEWKSSTPNHKKWKVKYYKGLGTSTSKEAKEYFADMKRHRIQFKYSGPEDDAAISLAFSKKQIDDRKEWLTNFMEDRRQRKLLGLPEDYLYGQTTTYLTYNDFINKELILFSNSDNERSIPSMVDGLKPGQRKVLFTCFKRNDKREVKVAQLAGSVAEMSSYHHGEMSLMMTIINLAQNFVGSNNLNLLQPIGQFGTRLHGGKDSASPRYIFTMLSSLARLLFPPKDDHTLKFLYDDNQRVEPEWYIPIIPMVLINGAEGIGTGWSCKIPNFDVREIVNNIRRLMDGEEPLPMLPSYKNFKGTIEELAPNQYVISGEVAILNSTTIEISELPVRTWTQTYKEQVLEPMLNGTEKTPPLITDYREYHTDTTVKFVVKMTEEKLAEAERVGLHKVFKLQTSLTCNSMVLFDHVGCLKKYDTVLDILRDFFELRLKYYGLRKEWLLGMLGAESAKLNNQARFILEKIDGKIIIENKPKKELIKVLIQRGYDSDPVKAWKEAQQKVPDEEENEESDNEKETEKSDSVTDSGPTFNYLLDMPLWYLTKEKKDELCRLRNEKEQELDTLKRKSPSDLWKEDLATFIEELEAVEAKEKQDEQVGLPGKGGKAKGKKTQMAEVLPSPRGQRVIPRITIEMKAEAEKKNKKKIKNENTEGSPQEDGVELEGLKQRLEKKQKREPGTKTKKQTTLAFKPIKKGKKRNPWSDSESDRSSDESNFDVPPRETEPRRAATKTKFTMDLDSDEDFSDFDEKTDDEDFVPSDASPPKTKTSPKLSNKELKPQKSVVSDLEADDVKGSVPLSSSPPATHFPDETEITNPVPKKNVTVKKTAAKSQSSTSTTGAKKRAAPKGTKRDPALNSGVSQKPDPAKTKNRRKRKPSTSDDSDSNFEKIVSKAVTSKKSKGESDDFHMDFDSAVAPRAKSVRAKKPIKYLEESDEDDLF

SEQ ID NO: 89212 - protein, 147 aa, Homo sapiens
  Payload ID: 17865
  Gene Name: topoisomerase (DNA) II alpha
  ENSP ID: ENSP00000462908
MQVNKIKKNEDAKKRLSVERIYQKKTQLEHILLRPDTYIGSVELVTQQMWVYDEDVGINYREVTFVPGLYKIFDEILVNAADNKQRDPKMSCIRVTIDPENNLISIWNNGKGIPVVEHKVEKMYVPALIFGQLLTSSNYDDDEKKVT

SEQ ID NO: 89213 - protein, 27 aa, Homo sapiens
  Payload ID: 17865
  Gene Name: topoisomerase (DNA) II alpha
  ENSP ID: ENSP00000464055
AVAPRAKSVRAKKPIKYLEESDEDDLF

SEQ ID NO: 89214 - protein, 1626 aa, Homo sapiens
  Payload ID: 17866
  Gene Name: topoisomerase (DNA) II beta
  Uniprot ID: Q02880
  ENSP ID: ENSP00000264331
MAKSGGCGAGAGVGGGNGALTWVTLFDQNNAAKKEESETANKNDSSKKLSVERVYQKKTQLEHILLRPDTYIGSVEPLTQFMWVYDEDVGMNCREVTFVPGLYKIFDEILVNAADNKQRDKNMTCIKVSIDPESNIISIWNNGKGIPVVEHKVEKVYVPALIFGQLLTSSNYDDDEKKVTGGRNGYGAKLCNIFSTKFTVETACKEYKHSFKQTWMNNMMKTSEAKIKHFDGEDYTCITFQPDLSKFKMEKLDKDIVALMTRRAYDLAGSCRGVKVMFNGKKLPVNGFRSYVDLYVKDKLDETGVALKVIHELANERWDVCLTLSEKGFQQISFVNSIATTKGGRHVDYVVDQVVGKLIEVVKKKNKAGVSVKPFQVKNHIWVFINCLIENPTFDSQTKENMTLQPKSFGSKCQLSEKFFKAASNCGIVESILNWVKFKAQTQLNKKCSSVKYSKIKGIPKLDDANDAGGKHSLECTLILTEGDSAKSLAVSGLGVIGRDRYGVFPLRGKILNVREASHKQIMENAEINNIIKIVGLQYKKSYDDAESLKTLRYGKIMIMTDQDQDGSHIKGLLINFIHHNWPSLLKHGFLEEFITPIVKASKNKQELSFYSIPEFDEWKKHIENQKAWKIKYYKGLGTSTAKEAKEYFADMERHRILFRYAGPEDDAAITLAFSKKKIDDRKEWLTNFMEDRRQRRLHGLPEQFLYGTATKHLTYNDFINKELILFSNSDNERSIPSLVDGFKPGQRKVLFTCFKRNDKREVKVAQLAGSVAEMSAYHHGEQALMMTIVNLAQNFVGSNNINLLQPIGQFGTRLHGGKDAASPRYIFTMLSTLARLLFPAVDDNLLKFLYDDNQRVEPEWYIPIIPMVLINGAEGIGTGWACKLPNYDAREIVNNVRRMLDGLDPHPMLPNYKNFKGTIQELGQNQYAVSGEIFVVDRNTVEITELPVRTWTQVYKEQVLEPMLNGTDKTPALISDYKEYHTDTTVKFVVKMTEEKLAQAEAAGLHKVFKLQTTLTCNSMVLFDHMGCLKKYETVQDILKEFFDLRLSYYGLRKEWLVGMLGAESTKLNNQARFILEKIQGKITIENRSKKDLIQMLVQRGYESDPVKAWKEAQEKAAEEDETQNQHDDSSSDSGTPSGPDFNYILNMSLWSLTKEKVEELIKQRDAKGREVNDLKRKSPSDLWKEDLAAFVEELDKVESQEREDVLAGMSGKAIKGKVGKPKVKKLQLEETMPSPYGRRIIPEITAMKADASKKLLKKKKGDLDTAAVKVEFDEEFSGAPVEGAGEEALTPSVPINKGPKPKREKKEPGTRVRKTPTSSGKPSAKKVKKRNPWSDDESKSESDLEETEPVVIPRDSLLRRAAAERPKYTFDFSEEEDDDADDDDDDNNDLEELKVKASPITNDGEDEFVPSDGLDKDEYTFSPGKSKATPEKSLHDKKSQDFGNLFSFPSYSQKSEDDSAKFDSNEEDSASVFSPSFGLKQTDKVPSKTVAAKKGKPSSDTVPKPKRAPKQKKVVEAVNSDSDSEFGIPKKTTTPKGKGRGAKKRKASGSENEGDYNPGRKTSKTTSKKPKKTSFDQDSDVDIFPSDFPTEPPSLPRTGRARKEVKYFAESDEEEDDVDFAMFN

SEQ ID NO: 89215 - protein, 70 aa, Homo sapiens
  Payload ID: 17866
  Gene Name: topoisomerase (DNA) II beta
  ENSP ID: ENSP00000388216
VLFDHMGCLKKYETVQDILKEFFDLRLSYYGLRKEWLVGMLGAESTKLNNQARFILEKIQGKITIGSRRG

SEQ ID NO: 89216 - protein, 1150 aa, Homo sapiens
  Payload ID: 17866
  Gene Name: topoisomerase (DNA) II beta
  ENSP ID: ENSP00000391112
MAKSGGCGAGAGVGGGNGALTWVNNAAKKEESETANKNDSSKKLSVERVYQKKTQLEHILLRPDTYIGSVEPLTQFMWVYDEDVGMNCREVTFVPGLYKIFDEILVNAADNKQRDKNMTCIKVSIDPESNIISIWNNGKGIPVVEHKVEKVYVPALIFGQLLTSSNYDDDEKKVTGGRNGYGAKLCNIFSTKFTVETACKEYKHSFKQTWMNNMMKTSEAKIKHFDGEDYTCITFQPDLSKFKMEKLDKDIVALMTRRAYDLAGSCRGVKVMFNGKKLPVNGFRSYVDLYVKDKLDETGVALKVIHELANERWDVCLTLSEKGFQQISFVNSIATTKGGRHVDYVVDQVVGKLIEVVKKKNKAGVSVKPFQVKNHIWVFINCLIENPTFDSQTKENMTLQPKSFGSKCQLSEKFFKAASNCGIVESILNWVKFKAQTQLNKKCSSVKYSKIKGIPKLDDANDAGGKHSLECTLILTEGDSAKSLAVSGLGVIGRDRYGVFPLRGKILNVREASHKQIMENAEINNIIKIVGLQYKKSYDDAESLKTLRYGKIMIMTDQDQDGSHIKGLLINFIHHNWPSLLKHGFLEEFITPIVKASKNKQELSFYSIPEFDEWKKHIENQKAWKIKYYKGLGTSTAKEAKEYFADMERHRILFRYAGPEDDAAITLAFSKKKIDDRKEWLTNFMEDRRQRRLHGLPEQFLYGTATKHLTYNDFINKELILFSNSDNERSIPSLVDGFKPGQRKVLFTCFKRNDKREVKVAQLAGSVAEMSAYHHGEQALMMTIVNLAQNFVGSNNINLLQPIGQFGTRLHGGKDAASPRYIFTMLSTLARLLFPAVDDNLLKFLYDDNQRVEPEWYIPIIPMVLINGAEGIGTGWACKLPNYDAREIVNNVRRMLDGLDPHPMLPNYKNFKGTIQELGQNQYAVSGEIFVVDRNTVEITELPVRTWTQVYKEQVLEPMLNGTDKTPALISDYKEYHTDTTVKFVVKMTEEKLAQAEAAGLHKVFKLQTTLTCNSMVLFDHMGCLKKYETVQDILKEFFDLRLSYYGLRKEWLVGMLGAESTKLNNQARFILEKIQGKITIENRSKKDLIQMLVQRGYESDPVKAWKEAQEKAAEEDETQNQHDDSSSDSGTPSGPDFNYILNMSLWSLT

SEQ ID NO: 89217 - protein, 1621 aa, Homo sapiens
  Payload ID: 17866
  Gene Name: topoisomerase (DNA) II beta
  Uniprot ID: Q02880
  ENSP ID: ENSP00000396704
MAKSGGCGAGAGVGGGNGALTWVNNAAKKEESETANKNDSSKKLSVERVYQKKTQLEHILLRPDTYIGSVEPLTQFMWVYDEDVGMNCREVTFVPGLYKIFDEILVNAADNKQRDKNMTCIKVSIDPESNIISIWNNGKGIPVVEHKVEKVYVPALIFGQLLTSSNYDDDEKKVTGGRNGYGAKLCNIFSTKFTVETACKEYKHSFKQTWMNNMMKTSEAKIKHFDGEDYTCITFQPDLSKFKMEKLDKDIVALMTRRAYDLAGSCRGVKVMFNGKKLPVNGFRSYVDLYVKDKLDETGVALKVIHELANERWDVCLTLSEKGFQQISFVNSIATTKGGRHVDYVVDQVVGKLIEVVKKKNKAGVSVKPFQVKNHIWVFINCLIENPTFDSQTKENMTLQPKSFGSKCQLSEKFFKAASNCGIVESILNWVKFKAQTQLNKKCSSVKYSKIKGIPKLDDANDAGGKHSLECTLILTEGDSAKSLAVSGLGVIGRDRYGVFPLRGKILNVREASHKQIMENAEINNIIKIVGLQYKKSYDDAESLKTLRYGKIMIMTDQDQDGSHIKGLLINFIHHNWPSLLKHGFLEEFITPIVKASKNKQELSFYSIPEFDEWKKHIENQKAWKIKYYKGLGTSTAKEAKEYFADMERHRILFRYAGPEDDAAITLAFSKKKIDDRKEWLTNFMEDRRQRRLHGLPEQFLYGTATKHLTYNDFINKELILFSNSDNERSIPSLVDGFKPGQRKVLFTCFKRNDKREVKVAQLAGSVAEMSAYHHGEQALMMTIVNLAQNFVGSNNINLLQPIGQFGTRLHGGKDAASPRYIFTMLSTLARLLFPAVDDNLLKFLYDDNQRVEPEWYIPIIPMVLINGAEGIGTGWACKLPNYDAREIVNNVRRMLDGLDPHPMLPNYKNFKGTIQELGQNQYAVSGEIFVVDRNTVEITELPVRTWTQVYKEQVLEPMLNGTDKTPALISDYKEYHTDTTVKFVVKMTEEKLAQAEAAGLHKVFKLQTTLTCNSMVLFDHMGCLKKYETVQDILKEFFDLRLSYYGLRKEWLVGMLGAESTKLNNQARFILEKIQGKITIENRSKKDLIQMLVQRGYESDPVKAWKEAQEKAAEEDETQNQHDDSSSDSGTPSGPDFNYILNMSLWSLTKEKVEELIKQRDAKGREVNDLKRKSPSDLWKEDLAAFVEELDKVESQEREDVLAGMSGKAIKGKVGKPKVKKLQLEETMPSPYGRRIIPEITAMKADASKKLLKKKKGDLDTAAVKVEFDEEFSGAPVEGAGEEALTPSVPINKGPKPKREKKEPGTRVRKTPTSSGKPSAKKVKKRNPWSDDESKSESDLEETEPVVIPRDSLLRRAAAERPKYTFDFSEEEDDDADDDDDDNNDLEELKVKASPITNDGEDEFVPSDGLDKDEYTFSPGKSKATPEKSLHDKKSQDFGNLFSFPSYSQKSEDDSAKFDSNEEDSASVFSPSFGLKQTDKVPSKTVAAKKGKPSSDTVPKPKRAPKQKKVVEAVNSDSDSEFGIPKKTTTPKGKGRGAKKRKASGSENEGDYNPGRKTSKTTSKKPKKTSFDQDSDVDIFPSDFPTEPPSLPRTGRARKEVKYFAESDEEEDDVDFAMFN

SEQ ID NO: 89218 - protein, 1522 aa, Homo sapiens
  Payload ID: 17867
  Gene Name: topoisomerase (DNA) II binding protein 1
  Uniprot ID: Q92547
  ENSP ID: ENSP00000260810
MSRNDKEPFFVKFLKSSDNSKCFFKALESIKEFQSEEYLQIITEEEALKIKENDRSLYICDPFSGVVFDHLKKLGCRIVGPQVVIFCMHHQRCVPRAEHPVYNMVMSDVTISCTSLEKEKREEVHKYVQMMGGRVYRDLNVSVTHLIAGEVGSKKYLVAANLKKPILLPSWIKTLWEKSQEKKITRYTDINMEDFKCPIFLGCIICVTGLCGLDRKEVQQLTVKHGGQYMGQLKMNECTHLIVQEPKGQKYECAKRWNVHCVTTQWFFDSIEKGFCQDESIYKTEPRPEAKTMPNSSTPTSQINTIDSRTLSDVSNISNINASCVSESICNSLNSKLEPTLENLENLDVSAFQAPEDLLDGCRIYLCGFSGRKLDKLRRLINSGGGVRFNQLNEDVTHVIVGDYDDELKQFWNKSAHRPHVVGAKWLLECFSKGYMLSEEPYIHANYQPVEIPVSHKPESKAALLKKKNSSFSKKDFAPSEKHEQADEDLLSQYENGSSTVVEAKTSEARPFNDSTHAEPLNDSTHISLQEENQSSVSHCVPDVSTITEEGLFSQKSFLVLGFSNENESNIANIIKENAGKIMSLLSRTVADYAVVPLLGCEVEATVGEVVTNTWLVTCIDYQTLFDPKSNPLFTPVPVMTGMTPLEDCVISFSQCAGAEKESLTFLANLLGASVQEYFVRKSNAKKGMFASTHLILKERGGSKYEAAKKWNLPAVTIAWLLETARTGKRADESHFLIENSTKEERSLETEITNGINLNSDTAEHPGTRLQTHRKTVVTPLDMNRFQSKAFRAVVSQHARQVAASPAVGQPLQKEPSLHLDTPSKFLSKDKLFKPSFDVKDALAALETPGRPSQQKRKPSTPLSEVIVKNLQLALANSSRNAVALSASPQLKEAQSEKEEAPKPLHKVVVCVSKKLSKKQSELNGIAASLGADYRWSFDETVTHFIYQGRPNDTNREYKSVKERGVHIVSEHWLLDCAQECKHLPESLYPHTYNPKMSLDISAVQDGRLCNSRLLSAVSSTKDDEPDPLILEENDVDNMATNNKESAPSNGSGKNDSKGVLTQTLEMRENFQKQLQEIMSATSIVKPQGQRTSLSRSGCNSASSTPDSTRSARSGRSRVLEALRQSRQTVPDVNTEPSQNEQIIWDDPTAREERARLASNLQWPSCPTQYSELQVDIQNLEDSPFQKPLHDSEIAKQAVCDPGNIRVTEAPKHPISEELETPIKDSHLIPTPQAPSIAFPLANPPVAPHPREKIITIEETHEELKKQYIFQLSSLNPQERIDYCHLIEKLGGLVIEKQCFDPTCTHIVVGHPLRNEKYLASVAAGKWVLHRSYLEACRTAGHFVQEEDYEWGSSSILDVLTGINVQQRRLALAAMRWRKKIQQRQESGIVEGAFSGWKVILHVDQSREAGFKRLLQSGGAKVLPGHSVPLFKEATHLFSDLNKLKPDDSGVNIAEAAAQNVYCLRTEYIADYLMQESPPHVENYCLPEAISFIQNNKELGTGLSQKRKAPTEKNKIKRPRVH

SEQ ID NO: 89219 - protein, 206 aa, Homo sapiens
  Payload ID: 17867
  Gene Name: topoisomerase (DNA) II binding protein 1
  ENSP ID: ENSP00000421179
  MOD_RES (1)..(1): Any amino acid
XLVAANLKKPILLPSWIKTLWEKSQEKKITRYTDINMEDFKCPIFLGCIICVTGLCGLDRKEVQQLTVKHGGQYMGQLKMNECTHLIVQEPKGQKYECAKRWNVHCVTTQWFFDSIEKGFCQDESIYKTEPRPEAKTMPNSSTPTSQINTIDNVSNISNINASCVSESICNSLNSKLEPTLENLENLDVSAFQAPEDLLDGCRIYL

SEQ ID NO: 89220 - protein, 50 aa, Homo sapiens
  Payload ID: 17867
  Gene Name: topoisomerase (DNA) II binding protein 1
  ENSP ID: ENSP00000458790
FFDSIEKGFCQDESIYKTEPRPEAKTMPNSSTPTSQINTIDTNWSLHLKI

SEQ ID NO: 89221 - protein, 1001 aa, Homo sapiens
  Payload ID: 17868
  Gene Name: topoisomerase (DNA) III alpha
  Uniprot ID: Q13472
  ENSP ID: ENSP00000321636
MIFPVARYALRWLRRPEDRAFSRAAMEMALRGVRKVLCVAEKNDAAKGIADLLSNGRMRRREGLSKFNKIYEFDYHLYGQNVTMVMTSVSGHLLAHDFQMQFRKWQSCNPLVLFEAEIEKYCPENFVDIKKTLERETRQCQALVIWTDCDREGENIGFEIIHVCKAVKPNLQVLRARFSEITPHAVRTACENLTEPDQRVSDAVDVRQELDLRIGAAFTRFQTLRLQRIFPEVLAEQLISYGSCQFPTLGFVVERFKAIQAFVPEIFHRIKVTHDHKDGIVEFNWKRHRLFNHTACLVLYQLCVEDPMATVVEVRSKPKSKWRPQALDTVELEKLASRKLRINAKETMRIAEKLYTQGYISYPRTETNIFPRDLNLTVLVEQQTPDPRWGAFAQSILERGGPTPRNGNKSDQAHPPIHPTKYTNNLQGDEQRLYEFIVRHFLACCSQDAQGQETTVEIDIAQERFVAHGLMILARNYLDVYPYDHWSDKILPVYEQGSHFQPSTVEMVDGETSPPKLLTEADLIALMEKHGIGTDATHAEHIETIKARMYVGLTPDKRFLPGHLGMGLVEGYDSMGYEMSKPDLRAELEADLKLICDGKKDKFVVLRQQVQKYKQVFIEAVAKAKKLDEALAQYFGNGTELAQQEDIYPAMPEPIRKCPQCNKDMVLKTKKNGGFYLSCMGFPECRSAVWLPDSVLEASRDSSVCPVCQPHPVYRLKLKFKRGSLPPTMPLEFVCCIGGCDDTLREILDLRFSGGPPRASQPSGRLQANQSLNRMDNSQHPQPADSRQTGSSKALAQTLPPPTAAGESNSVTCNCGQEAVLLTVRKEGPNRGRQFFKCNGGSCNFFLWADSPNPGAGGPPALAYRPLGASLGCPPGPGIHLGGFGNPGDGSGSGTSCLCSQPSVTRTVQKDGPNKGRQFHTCAKPREQQCGFFQWVDENTAPGTSGAPSWTGDRGRTLESEARSKRPRASSSDMGSTAKKPRKCSLCHQPGHTRPFCPQNR

SEQ ID NO: 89222 - protein, 1001 aa, Homo sapiens; identical to SEQ ID NO: 89221
  Payload ID: 17868
  Gene Name: topoisomerase (DNA) III alpha
  Uniprot ID: Q13472
  ENSP ID: ENSP00000442336

SEQ ID NO: 89223 - protein, 69 aa, Homo sapiens
  Payload ID: 17868
  Gene Name: topoisomerase (DNA) III alpha
  ENSP ID: ENSP00000462136
MIFPVARYALRWLRRPEDRAFSRAAMEMALRGVRKVLCVAEKNDAAKGIADLLSNGRMRRAELQPSCPL

SEQ ID NO: 89224 - protein, 89 aa, Homo sapiens
  Payload ID: 17868
  Gene Name: topoisomerase (DNA) III alpha
  ENSP ID: ENSP00000462378
MIFPVARYALRWLRRPEDRAFSRAAMEMALRGVRKVLCVAEKNDAAKGIADLLSNGRMRRREGLSKFNKIYEFDYHLYGQAELQPSCPL

SEQ ID NO: 89225 - protein, 976 aa, Homo sapiens
  Payload ID: 17868
  Gene Name: topoisomerase (DNA) III alpha
  Uniprot ID: Q13472
  ENSP ID: ENSP00000462790
MEMALRGVRKVLCVAEKNDAAKGIADLLSNGRMRRREGLSKFNKIYEFDYHLYGQNVTMVMTSVSGHLLAHDFQMQFRKWQSCNPLVLFEAEIEKYCPENFVDIKKTLERETRQCQALVIWTDCDREGENIGFEIIHVCKAVKPNLQVLRARFSEITPHAVRTACENLTEPDQRVSDAVDVRQELDLRIGAAFTRFQTLRLQRIFPEVLAEQLISYGSCQFPTLGFVVERFKAIQAFVPEIFHRIKVTHDHKDGIVEFNWKRHRLFNHTACLVLYQLCVEDPMATVVEVRSKPKSKWRPQALDTVELEKLASRKLRINAKETMRIAEKLYTQGYISYPRTETNIFPRDLNLTVLVEQQTPDPRWGAFAQSILERGGPTPRNGNKSDQAHPPIHPTKYTNNLQGDEQRLYEFIVRHFLACCSQDAQGQETTVEIDIAQERFVAHGLMILARNYLDVYPYDHWSDKILPVYEQGSHFQPSTVEMVDGETSPPKLLTEADLIALMEKHGIGTDATHAEHIETIKARMYVGLTPDKRFLPGHLGMGLVEGYDSMGYEMSKPDLRAELEADLKLICDGKKDKFVVLRQQVQKYKQVFIEAVAKAKKLDEALAQYFGNGTELAQQEDIYPAMPEPIRKCPQCNKDMVLKTKKNGGFYLSCMGFPECRSAVWLPDSVLEASRDSSVCPVCQPHPVYRLKLKFKRGSLPPTMPLEFVCCIGGCDDTLREILDLRFSGGPPRASQPSGRLQANQSLNRMDNSQHPQPADSRQTGSSKALAQTLPPPTAAGESNSVTCNCGQEAVLLTVRKEGPNRGRQFFKCNGGSCNFFLWADSPNPGAGGPPALAYRPLGASLGCPPGPGIHLGGFGNPGDGSGSGTSCLCSQPSVTRTVQKDGPNKGRQFHTCAKPREQQCGFFQWVDENTAPGTSGAPSWTGDRGRTLESEARSKRPRASSSDMGSTAKKPRKCSLCHQPGHTRPFCPQNR

SEQ ID NO: 89226 - protein, 139 aa, Homo sapiens
  Payload ID: 17868
  Gene Name: topoisomerase (DNA) III alpha
  ENSP ID: ENSP00000464338
MIFPVARYALRWLRRPEDRAFSRAAMEMALRGVRKVLCVAEKNDAAKGIADLLSNGRMRRREGLSKFNKIYEFDYHLYGQNVTMVMTSVSGHLLAHDFQMQFRKWSVQFSREGLSDYSRAATLLSSLKQKLKSTAQRIL

SEQ ID NO: 89227 - protein, 95 aa, Homo sapiens
  Payload ID: 17868
  Gene Name: topoisomerase (DNA) III alpha
  ENSP ID: ENSP00000464493
MIFPVARYALRWLRRPEDRAFSRAAMEMALRGVRKVLCVAEKNDAAKGIADLLSNGRMRRREGLSKFNKIYEFDYHLYGQNVTMAGVQWHNLDSL

SEQ ID NO: 89228 - protein, 52 aa, Homo sapiens
  Payload ID: 17868
  Gene Name: topoisomerase (DNA) III alpha
  ENSP ID: ENSP00000465014
  MOD_RES (1)..(1): Any amino acid
XTGDRGRTLESEARSKRPRASSSDMGSTAKKPRKCSLCHQPGHTRPFCPQNR

SEQ ID NO: 89229 - protein, 25 aa, Homo sapiens
  Payload ID: 17868
  Gene Name: topoisomerase (DNA) III alpha
  ENSP ID: ENSP00000465864
  MOD_RES (1)..(1): Any amino acid
XAKKPRKCSLCHQPGHTRPFCPQNR

SEQ ID NO: 89230 - protein, 133 aa, Homo sapiens
  Payload ID: 17868
  Gene Name: topoisomerase (DNA) III alpha
  ENSP ID: ENSP00000466099
FVAHGLMILARNYLDVYPYDHWSDKILPVYEQGSHFQPSTVEMVDGETSPPKLLTEADLIALMEKHGIGQWLLWVRMPLMRSTSRPSKPGCTWASPQTSGSSLGTWAWDLWKVMIPWAMKCLSLTSGLNWKLI

SEQ ID NO: 89231 - protein, 163 aa, Homo sapiens
  Payload ID: 17868
  Gene Name: topoisomerase (DNA) III alpha
  ENSP ID: ENSP00000466641
  MOD_RES (1)..(1): Any amino acid
XSYGSCQFPTLGFVVERFKAIQAFVPEIFHRIKVTHDHKDGIVEFNWKRHRLFNHTACLVLYQLCVEDPMATVVEVRSKPKSKWRPQALDTVELEKLASRKLRINAKETMRIAEKLYTQGEMNSDCTSLLFAISWLAAPRMLRGRRPQWRSTSLRNALWPMAS

SEQ ID NO: 89232 - protein, 862 aa, Homo sapiens
  Payload ID: 17869
  Gene Name: topoisomerase (DNA) III beta
  Uniprot ID: O95985
  ENSP ID: ENSP00000349705
MKTVLMVAEKPSLAQSIAKILSRGSLSSHKGLNGACSVHEYTGTFAGQPVRFKMTSVCGHVMTLDFLGKYNKWDKVDPAELFSQAPTEKKEANPKLNMVKFLQVEGRGCDYIVLWLDCDKEGENICFEVLDAVLPVMNKAHGGEKTVFRARFSSITDTDICNAMACLGEPDHNEALSVDARQELDLRIGCAFTRFQTKYFQGKYGDLDSSLISFGPCQTPTLGFCVERHDKIQSFKPETYWVLQAKVNTDKDRSLLLDWDRVRVFDREIAQMFLNMTKLEKEAQVEATSRKEKAKQRPLALNTVEMLRVASSSLGMGPQHAMQTAERLYTQGYISYPRTETTHYPENFDLKGSLRQQANHPYWADTVKRLLAEGINRPRKGHDAGDHPPITPMKSATEAELGGDAWRLYEYITRHFIATVSHDCKYLQSTISFRIGPELFTCSGKTVLSPGFTEVMPWQSVPLEESLPTCQRGDAFPVGEVKMLEKQTNPPDYLTEAELITLMEKHGIGTDASIPVHINNICQRNYVTVESGRRLKPTNLGIVLVHGYYKIDAELVLPTIRSAVEKQLNLIAQGKADYRQVLGHTLDVFKRKFHYFVDSIAGMDELMEVSFSPLAATGKPLSRCGKCHRFMKYIQAKPSRLHCSHCDETYTLPQNGTIKLYKELRCPLDDFELVLWSSGSRGKSYPLCPYCYNHPPFRDMKKGMGCNECTHPSCQHSLSMLGIGQCVECESGVLVLDPTSGPKWKVACNKCNVVAHCFENAHRVRVSADTCSVCEAALLDVDFNKAKSPLPGDETQHMGCVFCDPVFQELVELKHAASCHPMHRGGPGRRQGRGRGRARRPPGKPNPRRPKDKMSALAAYFV

SEQ ID NO: 89233 - protein, 862 aa, Homo sapiens; identical to SEQ ID NO: 89232
  Payload ID: 17869
  Gene Name: topoisomerase (DNA) III beta
  Uniprot ID: O95985
  ENSP ID: ENSP00000381773

SEQ ID NO: 89234 - protein, 42 aa, Homo sapiens
  Payload ID: 17869
  Gene Name: topoisomerase (DNA) III beta
  ENSP ID: ENSP00000387554
MKTVLMVAEKPSLAQSIAKILSRGSLSSHKGLNGACSVHEYT

SEQ ID NO: 89235 - protein, 46 aa, Homo sapiens
  Payload ID: 17869
  Gene Name: topoisomerase (DNA) III beta
  ENSP ID: ENSP00000390209
MKTVLMVAEKPSLAQSIAKILSRGSLSSHKGLNGACSVHEYTGTFA

SEQ ID NO: 89236 - protein, 21 aa, Homo sapiens
  Payload ID: 17869
  Gene Name: topoisomerase (DNA) III beta
  ENSP ID: ENSP00000390824
MKTVLMVAEKPSLAQSIAKIL

SEQ ID NO: 89237 - protein, 246 aa, Homo sapiens
  Payload ID: 17869
  Gene Name: topoisomerase (DNA) III beta
  ENSP ID: ENSP00000390977
MKTVLMVAEKPSLAQSIAKILSRGSLSSHKGLNGACSVHEYTGTFAGQPVRFKMTSVCGHVMTLDFLGKYNKWDKVDPAELFSQAPTEKKEANPKLNMVKFLQVEGRGCDYIVLWLDCDKEGENICFEVLDAVLPVMNKAHGGEKTVFRARFSSITDTDICNAMACLGEPDHNEALSVDARQELDLRIGCAFTRFQTKYFQGKYGDLDSSLISFGPCQTPTLGFCVERHDKIQSFKPETYWVLQAK

SEQ ID NO: 89238 - protein, 61 aa, Homo sapiens
  Payload ID: 17869
  Gene Name: topoisomerase (DNA) III beta
  ENSP ID: ENSP00000391857
MKTVLMVAEKPSLAQSIAKILSRGSLSSHKGLNGACSVHEYTGTFAGQPVRFKMTSVCGHV

SEQ ID NO: 89239 - protein, 129 aa, Homo sapiens
  Payload ID: 17869
  Gene Name: topoisomerase (DNA) III beta
  ENSP ID: ENSP00000392480
MKTVLMVAEKPSLAQSIAKILSRGSLSSHKGLNGACSVHEYTGTFAGQPVRFKMTSVCGHVMTLDFLGKYNKWDKVDPAELFSQAPTEKKEANPKLNMVKFLQVEGRGCDYIVLWLDCDKEGENICFEK

SEQ ID NO: 89240 - protein, 129 aa, Homo sapiens; identical to SEQ ID NO: 89239
  Payload ID: 17869
  Gene Name: topoisomerase (DNA) III beta
  ENSP ID: ENSP00000397221

SEQ ID NO: 89241 - protein, 122 aa, Homo sapiens
  Payload ID: 17869
  Gene Name: topoisomerase (DNA) III beta
  ENSP ID: ENSP00000402622
MKTVLMVAEKPSLAQSIAKILSRGSLSSHKGLNGACSVHEYTGTFAGQPVRFKMTSVCGHVMTLDFLGKYNKWDKVDPAELFSQAPTEKKEANPKLNMVKFLQVEGRGCDYIVLWLDCDKEG

SEQ ID NO: 89242 - protein, 60 aa, Homo sapiens
  Payload ID: 17869
  Gene Name: topoisomerase (DNA) III beta
  ENSP ID: ENSP00000404600
MKTVLMVAEKPSLAQSIAKILSRGSLSSHKGLNGACSVHEYTGTFAGQPVRFKMTSVCGH

SEQ ID NO: 89243 - protein, 525 aa, Homo sapiens
  Payload ID: 17869
  Gene Name: topoisomerase (DNA) III beta
  ENSP ID: ENSP00000408282
  MOD_RES (1)..(1): Any amino acid
XLDSSLISFGPCQTPTLGFCVERHDKIQSFKPETYWVLQAKVNTDKDRSLLLDWDRVRVFDREIAQMFLNMTKLEKEAQVEATSRKEKAKQRPLALNTVEMLRVASSSLGMGPQHAMQTAERLYTQGYISYPRTETTHYPENFDLKGSLRQQANHPYWADTVKRLLAEGINRPRKGHDAGDHPPITPMKSATEAELGGDAWRLYEYITRHFIATVSHDCKYLQSTISFRIGPELFTCSGKTVLSPGFTEVMPWQSVPLEESLPTCQRGDAFPVGEVKMLEKQTNPPDYLTEAELITLMEKHGIGTDASIPVHINNICQRNYVTVESGRRLKPTNLGIVLVHGYYKIDAELVLPTIRSAVEKQLNLIAQGKADYRQVLGHTLDVFKRKFHYFVDSIAGMDELMEVSFSPLAATGKPLSRCGKCHRFMKYIQAKPSRLHCSHCDETYTLPQNGTIKLYKELRCPLDDFELVLWSSGSRGKSYPLCPYCYNHPPFRDMKKGECSHSLLSTGSCSLFSVPTPALHQAGL

SEQ ID NO: 89244 - protein, 121 aa, Homo sapiens
  Payload ID: 17869
  Gene Name: topoisomerase (DNA) III beta
  ENSP ID: ENSP00000414538
MKTVLMVAEKPSLAQSIAKILSRGSLSSHKGLNGACSVHEYTGTFAGQPVRFKMTSVCGHVMTLDFLGKYNKWDKVDPAELFSQAPTEKKEANPKLNMVKFLQVEGRGCDYIVLWLDCDKE

SEQ ID NO: 89245 - protein, 168 aa, Homo sapiens
  Payload ID: 17869
  Gene Name: topoisomerase (DNA) III beta
  ENSP ID: ENSP00000416451
IAQMFLNMTKLEKEAQVEATSRKEKAKQRPLALNTVEMLRVASSSLGMGPQHAMQTAERLYTQGYISYPRTETTHYPENFDLKGSLRQQANHPYWADTVKRLLAEGINRPRKGHDAGDHPPITPMKSATEAELGFAVCPAQRLCKQELAARARVLGAPHGQSPQLAPN

SEQ ID NO: 89246 - protein, 1045 aa, Homo sapiens
  Payload ID: 17870
  Gene Name: topoisomerase I binding, arginine/serine-rich, E3 ubiquitin protein ligase
  Uniprot ID: Q9NS56
  ENSP ID: ENSP00000353735
MGSQPPLGSPLSREEGEAPPPAPASEGRRRSRRVRLRGSCRHRPSFLGCRELAASAPARPAPASSEIMASAAKEFKMDNFSPKAGTSKLQQTVPADASPDSKCPICLDRFDNVSYLDRCLHKFCFRCVQEWSKNKAECPLCKQPFDSIFHSVRAEDDFKEYVLRPSYNGSFVTPDRRFRYRTTLTRERNASVYSPSGPVNRRTTTPPDSGVLFEGLGISTRPRDVEIPQFMRQIAVRRPTTADERSLRKIQEQDIINFRRTLYRAGARVRNIEDGGRYRDISAEFFRRNPACLHRLVPWLKRELTVLFGAHGSLVNIVQHIIMSNVTRYDLESQAFVSDLRPFLLNRTEHFIHEFISFARSPFNMAAFDQHANYDCPAPSYEEGSHSDSSVITISPDEAETQELDINVATVSQAPWDDETPGPSYSSSEQVHVTMSSLLNTSDSSDEELVTGGATSQIQGVQTNDDLNNDSDDSSDNCVIVGFVKPLAERTPELVELSSDSEDLGSYEKMETVKTQEQEQSYSSGDSDVSRCSSPHSVLGKDEQINKGHCDSSTRIKSKKEEKRSTSLSSPRNLNSSVRGDRVYSPYNHRHRKRGRSRSSDSRSQSRSGHDQKNHRKHHGKKRMKSKRSRSRESSRPRGRRDKKRSRTRDSSWSRRSQTLSLSSESTSRSRSRSSDHGKRRSRSRNRDRYYLRNNYGSRYKWEYTYYSRNKDRDGYESSYRRRTLSRAHYSRQSSSPEFRVQSFSERTNARKKNNHSERKYYYYERHRSRSLSSNRSRTASTGTDRVRNEKPGGKRKYKTRHLEGTNEVAQPSREFASKAKDSHYQKSSSKLDGNYKNESDTFSDSRSSDRETKHKRRKRKTRSLSVEIVYEGKATDTTKHHKKKKKKHKKKHKKHHGDNASRSPVVITIDSDSDKDSEVKEDTECDNSGPQDPLQNEFLAPSLEPFETKDVVTIEAEFGVLDKECDIATLSNNLNNANKTVDNIPPLAASVEQTLDVREESTFVSDLENQPSNIVSLQTEPSRQLPSPRTSLMSVCLGRDCDMS

SEQ ID NO: 89247 - protein, 980 aa, Homo sapiens
  Payload ID: 17870
  Gene Name: topoisomerase I binding, arginine/serine-rich, E3 ubiquitin protein ligase
  Uniprot ID: Q9NS56
  ENSP ID: ENSP00000369187
MIMASAAKEFKMDNFSPKAGTSKLQQTVPADASPDSKCPICLDRFDNVSYLDRCLHKFCFRCVQEWSKNKAECPLCKQPFDSIFHSVRAEDDFKEYVLRPSYNGSFVTPDRRFRYRTTLTRERNASVYSPSGPVNRRTTTPPDSGVLFEGLGISTRPRDVEIPQFMRQIAVRRPTTADERSLRKIQEQDIINFRRTLYRAGARVRNIEDGGRYRDISAEFFRRNPACLHRLVPWLKRELTVLFGAHGSLVNIVQHIIMSNVTRYDLESQAFVSDLRPFLLNRTEHFIHEFISFARSPFNMAAFDQHANYDCPAPSYEEGSHSDSSVITISPDEAETQELDINVATVSQAPWDDETPGPSYSSSEQVHVTMSSLLNTSDSSDEELVTGGATSQIQGVQTNDDLNNDSDDSSDNCVIVGFVKPLAERTPELVELSSDSEDLGSYEKMETVKTQEQEQSYSSGDSDVSRCSSPHSVLGKDEQINKGHCDSSTRIKSKKEEKRSTSLSSPRNLNSSVRGDRVYSPYNHRHRKRGRSRSSDSRSQSRSGHDQKNHRKHHGKKRMKSKRSRSRESSRPRGRRDKKRSRTRDSSWSRRSQTLSLSSESTSRSRSRSSDHGKRRSRSRNRDRYYLRNNYGSRYKWEYTYYSRNKDRDGYESSYRRRTLSRAHYSRQSSSPEFRVQSFSERTNARKKNNHSERKYYYYERHRSRSLSSNRSRTASTGTDRVRNEKPGGKRKYKTRHLEGTNEVAQPSREFASKAKDSHYQKSSSKLDGNYKNESDTFSDSRSSDRETKHKRRKRKTRSLSVEIVYEGKATDTTKHHKKKKKKHKKKHKKHHGDNASRSPVVITIDSDSDKDSEVKEDTECDNSGPQDPLQNEFLAPSLEPFETKDVVTIEAEFGVLDKECDIATLSNNLNNANKTVDNIPPLAASVEQTLDVREESTFVSDLENQPSNIVSLQTEPSRQLPSPRTSLMSVCLGRDCDMS

SEQ ID NO: 89248 - protein, 178 aa, Homo sapiens
  Payload ID: 17871
  Gene Name: TOR signaling pathway regulator
  Uniprot ID: O75663
  ENSP ID: ENSP00000356804
MMIHGFQSSHRDFCFGPWKLTASKTHIMKSADVEKLADELHMPSLPEMMFGDNVLRIQHGSGFGIEFNATDALRCVNNYQGMLKVACAEEWQESRTEGEHSKEVIKPYDWTYTTDYKGTLLGESLKLKVVPTTDHIDTEKLKAREQIKFFEEVLLFEDELHDHGVSSLSVKIPGGGHL

SEQ ID NO: 89249 - protein, 272 aa, Homo sapiens
  Payload ID: 17871
  Gene Name: TOR signaling pathway regulator
  Uniprot ID: O75663
  ENSP ID: ENSP00000356807
MMIHGFQSSHRDFCFGPWKLTASKTHIMKSADVEKLADELHMPSLPEMMFGDNVLRIQHGSGFGIEFNATDALRCVNNYQGMLKVACAEEWQESRTEGEHSKEVIKPYDWTYTTDYKGTLLGESLKLKVVPTTDHIDTEKLKAREQIKFFEEVLLFEDELHDHGVSSLSVKIRVMPSSFFLLLRFFLRIDGVLIRMNDTRLYHEADKTYMLREYTSRESKISSLMHVPPSLFTEPNEISQYLPIKEAVCEKLIFPERIDPNPADSQKSTQVE

SEQ ID NO: 89250 - protein, 599 aa, Homo sapiens
  Payload ID: 17872
  Gene Name: torsin A interacting protein 1
  ENSP ID: ENSP00000271583
MAGDGRRAEAVREGWGVYVTPRAPIREGRGRLAPQNGGSSDAPAYRTPPSRQGRREVRFSDEPPEVYGDFEPLVAKERSPVGKRTRLEEFRSDSAKEEVRESAYYLRSRQRRQPRPQETEEMKTRRTTRLQQQHSEQPPLQPSPVMTRRGLRDSHSSEEDEASSQTDLSQTISKKTVRSIQEAPAVSEDLVIRLRRPPLRYPRYEATSVQQKVNFSEEGETEEDDQDSSHSSVTTVKARSRDSDESGDKTTRSSSQYIESFWQSSQSQNFTAHDKQPSVLSSGYQKTPQEWAPQTARIRTRMQTSSPGKSSIYGSFSDDDSILKSELGNQSPSTSSRQVTGQPQNASFVKRNRWWLLPLIAALASGSFWFFSTPEVETTAVQEFQNQMNQLKNKYQGQDEKLWKRSQTFLEKHLNSSHPRSQPAILLLTAARDAEEALRCLSEQIADAYSSFRSVRAIRIDGTDKATQDSDTVKLEVDQELSNGFKNGQNAAVVHRFESFPAGSTLIFYKYCDHENAAFKDVALVLTVLLEEETLGTSLGLKEVEEKVRDFLKVKFTNSNTPNSYNHMDPDKLNGLWSRISHLVLPVQPENALKRGICL

SEQ ID NO: 89251 - protein, 462 aa, Homo sapiens
  Payload ID: 17872
  Gene Name: torsin A interacting protein 1
  ENSP ID: ENSP00000393292
MKTRRTTRLQQQHSEQPPLQPSPVMTRRGLRDSHSSEEDEASSQTDLSQTISKKTVRSIQEAPVSEDLVIRLRRPPLRYPRYEATSVQQKVNFSEEGETEEDDQDSSHSSVTTVKARSRDSDESGDKTTRSSSQYIESFWQSSQSQNFTAHDKQPSVLSSGYQKTPQEWAPQTARIRTRMQNDSILKSELGNQSPSTSSRQVTGQPQNASFVKRNRWWLLPLIAALASGSFWFFSTPEVETTAVQEFQNQMNQLKNKYQGQDEKLWKRSQTFLEKHLNSSHPRSQPAILLLTAARDAEEALRCLSEQIADAYSSFRSVRAIRIDGTDKATQDSDTVKLEVDQELSNGFKNGQNAAVVHRFESFPAGSTLIFYKYCDHENAAFKDVALVLTVLLEEETLGTSLGLKEVEEKVRDFLKVKFTNSNTPNSYNHMDPDKLNGLWSRISHLVLPVQPENALKRGICL

SEQ ID NO: 89252 - protein, 296 aa, Homo sapiens
  Payload ID: 17872
  Gene Name: torsin A interacting protein 1
  ENSP ID: ENSP00000393613
  MOD_RES (1)..(1): Any amino acid
XKTTRSSSQYIESFWQSSQSQNFTAHDKQPSVLSSGYQKTPQEWAPQTARIRTRMQKVTGQPQNASFVKRNRWWLLPLIAALASGSFWFFSTPEVETTAVQEFQNQMNQLKNKYQGQDEKLWKRSQTFLEKHLNSSHPRSQPAILLLTAARDAEEALRCLSEQIADAYSSFRSVRAIRIDGTDKATQDSDTVKLEVDQELSNGFKNGQNAAVVHRFESFPAGSTLIFYKYCDHENAAFKDVALVLTVLLEEETLGTSLGLKEVEEKVRDFLKVKFTNSNTPNSYNHMDPDKLNGLW

SEQ ID NO: 89253 - protein, 198 aa, Homo sapiens
  Payload ID: 17872
  Gene Name: torsin A interacting protein 1
  ENSP ID: ENSP00000432717
  MOD_RES (1)..(1): Any amino acid
XLQQQHSEQPPLQPSPVMTRRGLRDSHSSEGEDRGEDEASSQTDLSQTISKKTVRSIQEAPVSEDLVIRLRRPPLRYPRYEATSVQQKVNFSEEGETEEDDQDSSHSSVTTVKARSRDSDESGDKTTRSSSQYIESFWQSSQSQNFTAHDKQPSVLSSGYQKTPQEWAPQTARIRTRMQNDSILKSELGNQSPSTSSR

SEQ ID NO: 89254 - protein, 63 aa, Homo sapiens
  Payload ID: 17872
  Gene Name: torsin A interacting protein 1
  ENSP ID: ENSP00000433759
  MOD_RES (1)..(1): Any amino acid
XSSEGEDRGGNSPSREPGNARGRARASVELMPAWCGGPCQKSATLVAVTVTSSSLANQTDKVT

SEQ ID NO: 89255 - protein, 193 aa, Homo sapiens
  Payload ID: 17872
  Gene Name: torsin A interacting protein 1
  ENSP ID: ENSP00000434316
EVRESAYYLRSRQRRQPRPQETEEMKTRRTTRLQQQHSEQPPLQPSPVMTRRGLRDSHSSEEDEASSQTDLSQTISKKTVRSIQEAPVSEDLVIRLRRPPLRYPRYGETEEDDQDSSHSSVTTVKARSRDSDESGDKTTRSSSQYIESFWQSSQSQNFTAHDKQPSVLSSGYQKTPQEWAPQTARIRTRMQND

SEQ ID NO: 89256 - protein, 584 aa, Homo sapiens
  Payload ID: 17872
  Gene Name: torsin A interacting protein 1
  Uniprot ID: Q5JTV8
  ENSP ID: ENSP00000435365
MAGDGRRAEAVREGWGVYVTPRAPIREGRGRLAPQNGGSSDAPAYRTPPSRQGRREVRFSDEPPEVYGDFEPLVAKERSPVGKRTRLEEFRSDSAKEEVRESAYYLRSRQRRQPRPQETEEMKTRRTTRLQQQHSEQPPLQPSPVMTRRGLRDSHSSEEDEASSQTDLSQTISKKTVRSIQEAPAVSEDLVIRLRRPPLRYPRYEATSVQQKVNFSEEGETEEDDQDSSHSSVTTVKARSRDSDESGDKTTRSSSQYIESFWQSSQSQNFTAHDKQPSVLSSGYQKTPQEWAPQTARIRTRMQNDSILKSELGNQSPSTSSRQVTGQPQNASFVKRNRWWLLPLIAALASGSFWFFSTPEVETTAVQEFQNQMNQLKNKYQGQDEKLWKRSQTFLEKHLNSSHPRSQPAILLLTAARDAEEALRCLSEQIADAYSSFRSVRAIRIDGTDKATQDSDTVKLEVDQELSNGFKNGQNAAVVHRFESFPAGSTLIFYKYCDHENAAFKDVALVLTVLLEEETLGTSLGLKEVEEKVRDFLKVKFTNSNTPNSYNHMDPDKLNGLWSRISHLVLPVQPENALKRGICL

SEQ ID NO: 89257 - protein, 583 aa, Homo sapiens
  Payload ID: 17872
  Gene Name: torsin A interacting protein 1
  Uniprot ID: Q5JTV8
  ENSP ID: ENSP00000476687
MAGDGRRAEAVREGWGVYVTPRAPIREGRGRLAPQNGGSSDAPAYRTPPSRQGRREVRFSDEPPEVYGDFEPLVAKERSPVGKRTRLEEFRSDSAKEEVRESAYYLRSRQRRQPRPQETEEMKTRRTTRLQQQHSEQPPLQPSPVMTRRGLRDSHSSEEDEASSQTDLSQTISKKTVRSIQEAPVSEDLVIRLRRPPLRYPRYEATSVQQKVNFSEEGETEEDDQDSSHSSVTTVKARSRDSDESGDKTTRSSSQYIESFWQSSQSQNFTAHDKQPSVLSSGYQKTPQEWAPQTARIRTRMQNDSILKSELGNQSPSTSSRQVTGQPQNASFVKRNRWWLLPLIAALASGSFWFFSTPEVETTAVQEFQNQMNQLKNKYQGQDEKLWKRSQTFLEKHLNSSHPRSQPAILLLTAARDAEEALRCLSEQIADAYSSFRSVRAIRIDGTDKATQDSDTVKLEVDQELSNGFKNGQNAAVVHRFESFPAGSTLIFYKYCDHENAAFKDVALVLTVLLEEETLGTSLGLKEVEEKVRDFLKVKFTNSNTPNSYNHMDPDKLNGLWSRISHLVLPVQPENALKRGICL

SEQ ID NO: 89258 - protein, 470 aa, Homo sapiens
  Payload ID: 17873
  Gene Name: torsin A interacting protein 2
  Uniprot ID: Q8NFQ8
  ENSP ID: ENSP00000356584
MADSGLREPQEDSQKDLENDPSVNSQAQETTIIASNAEEAEILHSACGLSKDHQEVETEGPESADTGDKSESPDEANVGKHPKDKTEDENKQSFLDGGKGHHLPSENLGKEPLDPDPSHSPSDKVGRADAHLGSSSVALPKEASDGTGASQEPPTTDSQEAQSPGHSSAGQEGEDTLRRRLLAPEAGSHPQQTQKLEEIKENAQDTMRQINKKGFWSYGPVILVVLVVAVVASSVNSYYSSPAQQVPKNPALEAFLAQFSQLEDKFPGQSSFLWQRGRKFLQKHLNASNPTEPATIIFTAAREGRETLKCLSHHVADAYTSSQKVSPIQIDGAGRTWQDSDTVKLLVDLELSYGFENGQKAAVVHHFESFPAGSTLIFYKYCDHENAAFKDVALVLTVLLEEETLEASVGPRETEEKVRDLLWAKFTNSDTPTSFNHMDSDKLSGLWSRISHLVLPVQPVSSIEEQGCLF

SEQ ID NO: 89259 - protein, 470 aa, Homo sapiens; identical to SEQ ID NO: 89258
  Payload ID: 17873
  Gene Name: torsin A interacting protein 2
  Uniprot ID: Q8NFQ8
  ENSP ID: ENSP00000477486

SEQ ID NO: 89260 - protein, 37 aa, Homo sapiens
  Payload ID: 17873
  Gene Name: torsin A interacting protein 2
  ENSP ID: ENSP00000485107
MFSDNSHCPDCGQQWFPSLELGHWLYQTELVENECYQ

SEQ ID NO: 89261 - protein, 131 aa, Homo sapiens
  Payload ID: 17873
  Gene Name: torsin A interacting protein 2
  Uniprot ID: Q9H496
  ENSP ID: ENSP00000485355
MFSDNSHCPDCGQQWFPSLELGHWLYQTELVENECYQVFLDRINRADYCPECYPDNPANRSLVLPWSFPLEWAPQNLTRWTFEKACHPFLLGPPLVRKRIHDSRVAGFNPALQLILTRTDKTLNKKLGQNK

SEQ ID NO: 89262 - protein, 332 aa, Homo sapiens
  Payload ID: 17874
  Gene Name: torsin family 1, member A (torsin A)
  Uniprot ID: O14656
  ENSP ID: ENSP00000345719
MKLGRAVLGLLLLAPSVVQAVEPISLGLALAGVLTGYIYPRLYCLFAECCGQKRSLSREALQKDLDDNLFGQHLAKKIILNAVFGFINNPKPKKPLTLSLHGWTGTGKNFVSKIIAENIYEGGLNSDYVHLFVATLHFPHASNITLYKDQLQLWIRGNVSACARSIFIFDEMDKMHAGLIDAIKPFLDYYDLVDGVSYQKAMFIFLSNAGAERITDVALDFWRSGKQREDIKLKDIEHALSVSVFNNKNSGFWHSSLIDRNLIDYFVPFLPLEYKHLKMCIRVEMQSRGYEIDEDIVSRVAEEMTFFPKEERVFSDKGCKTVFTKLDYYYDD

SEQ ID NO: 89263 - protein, 336 aa, Homo sapiens
  Payload ID: 17875
  Gene Name: torsin family 1, member B (torsin B)
  Uniprot ID: O14657
  ENSP ID: ENSP00000259339
MLRAGWLRGAAALALLLAARVVAAFEPITVGLAIGAASAITGYLSYNDIYCRFAECCREERPLNASALKLDLEEKLFGQHLATEVIFKALTGFRNNKNPKKPLTLSLHGWAGTGKNFVSQIVAENLHPKGLKSNFVHLFVSTLHFPHEQKIKLYQDQLQKWIRGNVSACANSVFIFDEMDKLHPGIIDAIKPFLDYYEQVDGVSYRKAIFIFLSNAGGDLITKTALDFWRAGRKREDIQLKDLEPVLSVGVFNNKHSGLWHSGLIDKNLIDYFIPFLPLEYRHVKMCVRAEMRARGSAIDEDIVTRVAEEMTFFPRDEKIYSDKGCKTVQSRLDFH

SEQ ID NO: 89264 - protein, 141 aa, Homo sapiens
  Payload ID: 17875
  Gene Name: torsin family 1, member B (torsin B)
  ENSP ID: ENSP00000411912
  MOD_RES (1)..(1): Any amino acid
XRVVAAFEPITVGLAIGAASAITGYLSYNDIYCRFAECCREERPLNASALKLDLEEKLFGQHLATEVIFKALTGFRNNKNPKKPLTLSLHGWAGTGKNFVSQIVAENLHPKGLKSNFVHLFVSTLHFPHEQKIKLYQSSLT

SEQ ID NO: 89265 - protein, 242 aa, Homo sapiens
  Payload ID: 17876
  Gene Name: torsin family 2, member A
  Uniprot ID: Q8N2E6
  ENSP ID: ENSP00000338317
MAAATRGCRPWGSLLGLLGLVSAAAAAWDLASLRCTLGAFCECDFRPDLPGLECDLAQHLAGQHLAKALVVKALKAFVRDPAPTKPLVLSLHGWTGTGKSYVSSLLAHYLFQGGLRSPRVHHFSPVLHFPHPSHIERYKKDLKSWVQGNLTACGRSLFLFDEMDKMPPGLMEVLRPFLGSSWVVYGTNYRKAIFIFIRWLLKLGHHGRAPPRRSGALPPAPAAPRPALRAQRAGPAGPGAKG

SEQ ID NO: 89266 - protein, 253 aa, Homo sapiens
  Payload ID: 17876
  Gene Name: torsin family 2, member A
  Uniprot ID: Q5JU69
  ENSP ID: ENSP00000362378
MAAATRGCRPWGSLLGLLGLVSAAAAAWDLASLRCTLGAFCECDFRPDLPGLECDLAQHLAGQHLAKALVVKALKAFVRDPAPTKPLVLSLHGWTGTGKSYVSSLLAHYLFQGGLRSPRVHHFSPVLHFPHPSHIERYKKDLKSWVQGNLTACGRSLFLFDEMDKMPPGLMEVLRPFLGSSWVVYGTNYRKAIFIFIRWGPALQWAQWGGHFSEVQLYSLSLCSQQNPVPHGLSWAFPVPSATLRDDIVIPPG

SEQ ID NO: 89267 - protein, 321 aa, Homo sapiens
  Payload ID: 17876
  Gene Name: torsin family 2, member A
  Uniprot ID: Q5JU69
  ENSP ID: ENSP00000362381
MAAATRGCRPWGSLLGLLGLVSAAAAAWDLASLRCTLGAFCECDFRPDLPGLECDLAQHLAGQHLAKALVVKALKAFVRDPAPTKPLVLSLHGWTGTGKSYVSSLLAHYLFQGGLRSPRVHHFSPVLHFPHPSHIERYKKDLKSWVQGNLTACGRSLFLFDEMDKMPPGLMEVLRPFLGSSWVVYGTNYRKAIFIFISNTGGKQINQVALEAWRSRRDREEILLQELEPVISRAVLDNPHHGFSNSGIMEERLLDAVVPFLPLQRHHVRHCVLNELAQLGLEPRDEVVQAVLDSTTFFPEDEQLFSSNGCKTVASRIAFFL

SEQ ID NO: 89268 - protein, 72 aa, Homo sapiens
  Payload ID: 17876
  Gene Name: torsin family 2, member A
  Uniprot ID: Q5JU69
  ENSP ID: ENSP00000485268
MAAATRGCRPWGSLLGLLGLVSAAAAAWDLASLRCTLGAFCECDFRPDLPEGSEELGPREPHCLWPLPLPLR

SEQ ID NO: 89269 - protein, 72 aa, Homo sapiens; identical to SEQ ID NO: 89268
  Payload ID: 17876
  Gene Name: torsin family 2, member A
  Uniprot ID: Q5JU69
  ENSP ID: ENSP00000485360

SEQ ID NO: 89270 - protein, 72 aa, Homo sapiens; identical to SEQ ID NO: 89268
  Payload ID: 17876
  Gene Name: torsin family 2, member A
  Uniprot ID: Q5JU69
  ENSP ID: ENSP00000485544

SEQ ID NO: 89271 - protein, 72 aa, Homo sapiens; identical to SEQ ID NO: 89268
  Payload ID: 17876
  Gene Name: torsin family 2, member A
  Uniprot ID: Q5JU69
  ENSP ID: ENSP00000485648

SEQ ID NO: 89272 - protein, 336 aa, Homo sapiens
  Payload ID: 17877
  Gene Name: torsin family 3, member A
  Uniprot ID: Q9H497
  ENSP ID: ENSP00000335351
MLRGPWRQLWLFFLLLLPGAPEPRGASRPWEGTDEPGSAWAWPGFQRLQEQLRAAGALSKRYWTLFSCQVWPDDCDEDEEAATGPLGWRLPLLGQRYLDLLTTWYCSFKDCCPRGDCRISNNFTGLEWDLNVRLHGQHLVQQLVLRTVRGYLETPQPEKALALSFHGWSGTGKNFVARMLVENLYRDGLMSDCVRMFIATFHFPHPKYVDLYKEQLMSQIRETQQLCHQTLFIFDEAEKLHPGLLEVLGPHLERRAPEGHRAESPWTIFLFLSNLRGDIINEVVLKLLKAGWSREEITMEHLEPHLQAEIVETIGFSFLTTRWPHLDLPTSSVAPT

SEQ ID NO: 89273 - protein, 153 aa, Homo sapiens
  Payload ID: 17877
  Gene Name: torsin family 3, member A
  ENSP ID: ENSP00000356597
MLRGPWRQLWLFFLLLLPGAPEPRGASRPWEGTDEPGSAWAWPGFQRLQEQLRAAGALSKRYWTLFSCQVWPDDCDEDEEAATGPLGWRLPLLGQRYLDLLTTWYCSFKDCCPRGDCRISNNFTGKNFVARMLVENLYRDGLMSDCVRMFIAT

SEQ ID NO: 89274 - protein, 397 aa, Homo sapiens
  Payload ID: 17877
  Gene Name: torsin family 3, member A
  Uniprot ID: Q9H497
  ENSP ID: ENSP00000356599
MLRGPWRQLWLFFLLLLPGAPEPRGASRPWEGTDEPGSAWAWPGFQRLQEQLRAAGALSKRYWTLFSCQVWPDDCDEDEEAATGPLGWRLPLLGQRYLDLLTTWYCSFKDCCPRGDCRISNNFTGLEWDLNVRLHGQHLVQQLVLRTVRGYLETPQPEKALALSFHGWSGTGKNFVARMLVENLYRDGLMSDCVRMFIATFHFPHPKYVDLYKEQLMSQIRETQQLCHQTLFIFDEAEKLHPGLLEVLGPHLERRAPEGHRAESPWTIFLFLSNLRGDIINEVVLKLLKAGWSREEITMEHLEPHLQAEIVETIDNGFGHSRLVKENLIDYFIPFLPLEYRHVRLCARDAFLSQELLYKEETLDEIAQMMVYVPKEEQLFSSQGCKSISQRINYFLS

SEQ ID NO: 89275 - protein, 174 aa, Homo sapiens
  Payload ID: 17877
  Gene Name: torsin family 3, member A
  ENSP ID: ENSP00000410195
MGLCVPFAVTTSFLSLGLEWDLNVRLHGQHLVQQLVLRTVRGYLETPQPEKALALSFHGWSGTGKNFVARMLVENLYRDGLMSDCVRMFIATFHFPHPKYVDLYKEQLMSQIRETQQLCHQTLFIFDEAEKLHPGLLEVLGPHLERRAPEGHRAESPWTIFLFLSNLRGDIINE

SEQ ID NO: 89276 - protein, 97 aa, Homo sapiens
  Payload ID: 17877
  Gene Name: torsin family 3, member A
  ENSP ID: ENSP00000435744
MLRGPWRQLWLFFLLLLPGAPEPRGASRPWEGTDEPGSAWAWPGFQRLQEQLRAAGALSKRYWTLFSCQVWPDDCDEDEEAATGPLALGNVRCGHAW

SEQ ID NO: 89277 - protein, 423 aa, Homo sapiens
  Payload ID: 17878
  Gene Name: torsin family 4, member A
  Uniprot ID: Q9NXH8
  ENSP ID: ENSP00000350102
MDRGQPSLEPAAAAPRASGRCVIAPVRAVLRLRRRVCVLRKRRLLQPGGGPDVGTGAPRPGCSPRAPRADLDQPKFFTFDSPAELPSRTPRKKRRRSRLVLYPETSRKYRPRVEHRSRAQRCLLLLVAIVGFQVLNAIENLDDNAQRYDLDGLEKALQRAVFGQPAAVSRIVALMRDYLATHVHSRPLLLALHGPSGVGKSHVGRLLARHFRSVLEDSALVLQYHARHHCPEARAAQDCREELARRVADVVARAEAEEKTPLLVLDDVELMPRPLLDELHGFLQPQRSHHFHNAIYVLLSGAGGAEVTRFVLQNASRALPLRPDGFRSAEAAAAQAEEDLRASLLAVLSREHPLWQAAAIVPFLLLDKRDVVSCFRDEMAGEGFFPDQARAENLAAQLSFYRVAGREFAVTGCKQVVATVNLL

SEQ ID NO: 89278 - protein, 116 aa, Homo sapiens
  Payload ID: 17879
  Gene Name: tousled-like kinase 1
  ENSP ID: ENSP00000352810
MSVQSSSGSLEGPPSWSQLSTSPTPGSAAAARSLLNHTPPSGRPREGAMDELHSLDPRRQELLEARFTGVASGSTGSTGSCSVGAKASTNNESSNHSFGSLGSLSDKESEKQLAGS

SEQ ID NO: 89279 - protein, 787 aa, Homo sapiens
  Payload ID: 17879
  Gene Name: tousled-like kinase 1
  Uniprot ID: Q9UKI8
  ENSP ID: ENSP00000354089
MSVQSSSGSLEGPPSWSQLSTSPTPGSAAAARSLLNHTPPSGRPREGAMDELHSLDPRRQELLEARFTGVASGSTGSTGSCSVGAKASTNNESSNHSFGSLGSLSDKESETPEKKQSESSRGRKRKAENQNESSQGFPNLPVFQSLAYWEMGRTAGGKSIGGRGHKISDYFEYQGGNGSSPVRGIPPAIRSPQNSHSHSTPSSSVRPNSPSPTALAFGDHPIVQPKQLSFKIIQTDLTMLKLAALESNKIQDLEKKEGRIDDLLRANCDLRRQIDEQQKLLEKYKERLNKCISMSKKLLIEKSTQEKLSSREKSMQDRLRLGHFTTVRHGASFTEQWTDGFAFQNLVKQQEWVNQQREDIERQRKLLAKRKPPTANNSQAPSTNSEPKQRKNKAVNGAENDPFVRPNLPQLLTLAEYHEQEEIFKLRLGHLKKEEAEIQAELERLERVRNLHIRELKRINNEDNSQFKDHPTLNERYLLLHLLGRGGFSEVYKAFDLYEQRYAAVKIHQLNKSWRDEKKENYHKHACREYRIHKELDHPRIVKLYDYFSLDTDTFCTVLEYCEGNDLDFYLKQHKLMSEKEARSIVMQIVNALRYLNEIKPPIIHYDLKPGNILLVDGTACGEIKITDFGLSKIMDDDSYGVDGMDLTSQGAGTYWYLPPECFVVGKEPPKISNKVDVWSVGVIFFQCLYGRKPFGHNQSQQDILQENTILKATEVQFPVKPVVSSEAKAFIRRCLAYRKEDRFDVHQLANDPYLLPHMRRSNSSGNLHMAGLTASPTPPSSSIITY

SEQ ID NO: 89280 - protein, 413 aa, Homo sapiens
  Payload ID: 17879
  Gene Name: tousled-like kinase 1
  ENSP ID: ENSP00000387313
MSVQSSSGSLEGPPSWSQLSTSPTPGSAAAARSLLNHTPPSGRPREGAMDELHSLDPRRQELLEARFTGVASGSTGSTGSCSVGAKASTNNESSNHSFGSLGSLSDKESETPEKKQSESSRGRKRKAENQNESSQGKSIGGRGHKISDYFEYQGGNGSSPVRGIPPAIRSPQNSHSHSTPSSSVRPNSPSPTALAFGDHPIVQPKQLSFKIIQTDLTMLKLAALESNKIQDLEKKEGRIDDLLRANCDLRRQIDEQQKLLEKYKERLNKCISMSKKLLIEKSTQEKLSSREKSMQDRLRLGHFTTVRHGASFTEQWTDGFAFQNLVKQQEWVNQQREDIERQRKLLAKRKPPTANNSQAPSTNSEPKQRKNKAVNGAENDPFVRPNLPQLLTLAEYHEQEEIFKLRLGHLKKR

SEQ ID NO: 89281 - protein, 162 aa, Homo sapiens
  Payload ID: 17879
  Gene Name: tousled-like kinase 1
  ENSP ID: ENSP00000393165
MAVLFLYDLKTTGKTPEKKQSESSRGRKRKAENQNESSQGFPNLPVFQSLAYWEMGRTAGGKSIGGRGHKISDYFEYQGGNGSSPVRGIPPAIRSPQNSHSHSTPSSSVRPNSPSPTALAFGDHPIVQPKQLSFKIIQTDLTMLKLAALESNKIQDLEKKEG

SEQ ID NO: 89282 - protein, 670 aa, Homo sapiens
  Payload ID: 17879
  Gene Name: tousled-like kinase 1
  Uniprot ID: Q9UKI8
  ENSP ID: ENSP00000409222
MAVLFLYDLKTTGKTPEKKQSESSRGRKRKAENQNESSQGKSIGGRGHKISDYFEYQGGNGSSPVRGIPPAIRSPQNSHSHSTPSSSVRPNSPSPTALAFGDHPIVQPKQLSFKIIQTDLTMLKLAALESNKIQDLEKKEGRIDDLLRANCDLRRQIDEQQKLLEKYKERLNKCISMSKKLLIEKSTQEKLSSREKSMQDRLRLGHFTTVRHGASFTEQWTDGFAFQNLVKQQEWVNQQREDIERQRKLLAKRKPPTANNSQAPSTNSEPKQRKNKAVNGAENDPFVRPNLPQLLTLAEYHEQEEIFKLRLGHLKKEEAEIQAELERLERVRNLHIRELKRINNEDNSQFKDHPTLNERYLLLHLLGRGGFSEVYKAFDLYEQRYAAVKIHQLNKSWRDEKKENYHKHACREYRIHKELDHPRIVKLYDYFSLDTDTFCTVLEYCEGNDLDFYLKQHKLMSEKEARSIVMQIVNALRYLNEIKPPIIHYDLKPGNILLVDGTACGEIKITDFGLSKIMDDDSYGVDGMDLTSQGAGTYWYLPPECFVVGKEPPKISNKVDVWSVGVIFFQCLYGRKPFGHNQSQQDILQENTILKATEVQFPVKPVVSSEAKAFIRRCLAYRKEDRFDVHQLANDPYLLPHMRRSNSSGNLHMAGLTASPTPPSSSIITY

SEQ ID NO: 89283 - protein, 766 aa, Homo sapiens
  Payload ID: 17879
  Gene Name: tousled-like kinase 1
  Uniprot ID: Q9UKI8
  ENSP ID: ENSP00000411099
MSVQSSSGSLEGPPSWSQLSTSPTPGSAAAARSLLNHTPPSGRPREGAMDELHSLDPRRQELLEARFTGVASGSTGSTGSCSVGAKASTNNESSNHSFGSLGSLSDKESETPEKKQSESSRGRKRKAENQNESSQGKSIGGRGHKISDYFEYQGGNGSSPVRGIPPAIRSPQNSHSHSTPSSSVRPNSPSPTALAFGDHPIVQPKQLSFKIIQTDLTMLKLAALESNKIQDLEKKEGRIDDLLRANCDLRRQIDEQQKLLEKYKERLNKCISMSKKLLIEKSTQEKLSSREKSMQDRLRLGHFTTVRHGASFTEQWTDGFAFQNLVKQQEWVNQQREDIERQRKLLAKRKPPTANNSQAPSTNSEPKQRKNKAVNGAENDPFVRPNLPQLLTLAEYHEQEEIFKLRLGHLKKEEAEIQAELERLERVRNLHIRELKRINNEDNSQFKDHPTLNERYLLLHLLGRGGFSEVYKAFDLYEQRYAAVKIHQLNKSWRDEKKENYHKHACREYRIHKELDHPRIVKLYDYFSLDTDTFCTVLEYCEGNDLDFYLKQHKLMSEKEARSIVMQIVNALRYLNEIKPPIIHYDLKPGNILLVDGTACGEIKITDFGLSKIMDDDSYGVDGMDLTSQGAGTYWYLPPECFVVGKEPPKISNKVDVWSVGVIFFQCLYGRKPFGHNQSQQDILQENTILKATEVQFPVKPVVSSEAKAFIRRCLAYRKEDRFDVHQLANDPYLLPHMRRSNSSGNLHMAGLTASPTPPSSSIITY

SEQ ID NO: 89284 - protein, 718 aa, Homo sapiens
  Payload ID: 17879
  Gene Name: tousled-like kinase 1
  Uniprot ID: Q9UKI8
  ENSP ID: ENSP00000428113
MDELHSLDPRRQELLEARFTGVASGSTGSTGSCSVGAKASTNNESSNHSFGSLGSLSDKESETPEKKQSESSRGRKRKAENQNESSQGKSIGGRGHKISDYFEYQGGNGSSPVRGIPPAIRSPQNSHSHSTPSSSVRPNSPSPTALAFGDHPIVQPKQLSFKIIQTDLTMLKLAALESNKIQDLEKKEGRIDDLLRANCDLRRQIDEQQKLLEKYKERLNKCISMSKKLLIEKSTQEKLSSREKSMQDRLRLGHFTTVRHGASFTEQWTDGFAFQNLVKQQEWVNQQREDIERQRKLLAKRKPPTANNSQAPSTNSEPKQRKNKAVNGAENDPFVRPNLPQLLTLAEYHEQEEIFKLRLGHLKKEEAEIQAELERLERVRNLHIRELKRINNEDNSQFKDHPTLNERYLLLHLLGRGGFSEVYKAFDLYEQRYAAVKIHQLNKSWRDEKKENYHKHACREYRIHKELDHPRIVKLYDYFSLDTDTFCTVLEYCEGNDLDFYLKQHKLMSEKEARSIVMQIVNALRYLNEIKPPIIHYDLKPGNILLVDGTACGEIKITDFGLSKIMDDDSYGVDGMDLTSQGAGTYWYLPPECFVVGKEPPKISNKVDVWSVGVIFFQCLYGRKPFGHNQSQQDILQENTILKATEVQFPVKPVVSSEAKAFIRRCLAYRKEDRFDVHQLANDPYLLPHMRRSNSSGNLHMAGLTASPTPPSSSIITY

SEQ ID NO: 89285 - protein, 750 aa, Homo sapiens
  Payload ID: 17880
  Gene Name: tousled-like kinase 2
  Uniprot ID: Q86UE8
  ENSP ID: ENSP00000275780
MMEELHSLDPRRQELLEARFTGVGVSKGPLNSESSNQSLCSVGSLSDKEVETPEKKQNDQRNRKRKAEPYETSQGKGTPRGHKISDYFEFAGGSAPGTSPGRSVPPVARSSPQHSLSNPLPRRVEQPLYGLDGSAAKEATEEQSALPTLMSVMLAKPRLDTEQLAQRGAGLCFTFVSAQQNSPSSTGSGNTEHSCSSQKQISIQHRQTQSDLTIEKISALENSKNSDLEKKEGRIDDLLRANCDLRRQIDEQQKMLEKYKERLNRCVTMSKKLLIEKSKQEKMACRDKSMQDRLRLGHFTTVRHGASFTEQWTDGYAFQNLIKQQERINSQREEIERQRKMLAKRKPPAMGQAPPATNEQKQRKSKTNGAENETLTLAEYHEQEEIFKLRLGHLKKEEAEIQAELERLERVRNLHIRELKRIHNEDNSQFKDHPTLNDRYLLLHLLGRGGFSEVYKAFDLTEQRYVAVKIHQLNKNWRDEKKENYHKHACREYRIHKELDHPRIVKLYDYFSLDTDSFCTVLEYCEGNDLDFYLKQHKLMSEKEARSIIMQIVNALKYLNEIKPPIIHYDLKPGNILLVNGTACGEIKITDFGLSKIMDDDSYNSVDGMELTSQGAGTYWYLPPECFVVGKEPPKISNKVDVWSVGVIFYQCLYGRKPFGHNQSQQDILQENTILKATEVQFPPKPVVTPEAKAFIRRCLAYRKEDRIDVQQLACDPYLLPHIRKSVSTSSPAGAAIASTSGASNNSSSN

SEQ ID NO: 89286 - protein, 772 aa, Homo sapiens
  Payload ID: 17880
  Gene Name: tousled-like kinase 2
  Uniprot ID: Q86UE8
  ENSP ID: ENSP00000316512
MMEELHSLDPRRQELLEARFTGVGVSKGPLNSESSNQSLCSVGSLSDKEVETPEKKQNDQRNRKRKAEPYETSQGKGTPRGHKISDYFEFAGGSAPGTSPGRSVPPVARSSPQHSLSNPLPRRVEQPLYGLDGSAAKEATEEQSALPTLMSVMLAKPRLDTEQLAQRGAGLCFTFVSAQQNSPSSTGSGNTEHSCSSQKQISIQHRQTQSDLTIEKISALENSKNSDLEKKEGRIDDLLRANCDLRRQIDEQQKMLEKYKERLNRCVTMSKKLLIEKSKQEKMACRDKSMQDRLRLGHFTTVRHGASFTEQWTDGYAFQNLIKQQERINSQREEIERQRKMLAKRKPPAMGQAPPATNEQKQRKSKTNGAENETPSSGNTELKDTAPALGAHSLLRLTLAEYHEQEEIFKLRLGHLKKEEAEIQAELERLERVRNLHIRELKRIHNEDNSQFKDHPTLNDRYLLLHLLGRGGFSEVYKAFDLTEQRYVAVKIHQLNKNWRDEKKENYHKHACREYRIHKELDHPRIVKLYDYFSLDTDSFCTVLEYCEGNDLDFYLKQHKLMSEKEARSIIMQIVNALKYLNEIKPPIIHYDLKPGNILLVNGTACGEIKITDFGLSKIMDDDSYNSVDGMELTSQGAGTYWYLPPECFVVGKEPPKISNKVDVWSVGVIFYQCLYGRKPFGHNQSQQDILQENTILKATEVQFPPKPVVTPEAKAFIRRCLAYRKEDRIDVQQLACDPYLLPHIRKSVSTSSPAGAAIASTSGASNNSSSN

SEQ ID NO: 89287 - protein, 718 aa, Homo sapiens
  Payload ID: 17880
  Gene Name: tousled-like kinase 2
  Uniprot ID: Q86UE8
  ENSP ID: ENSP00000340800
MMEELHSLDPRRQELLEARFTGVGVSKGPLNSESSNQSLCSVGSLSDKEVETPEKKQNDQRNRKRKAEPYETSQGKGTPRGHKISDYFERRVEQPLYGLDGSAAKEATEEQSALPTLMSVMLAKPRLDTEQLAQRGAGLCFTFVSAQQNSPSSTGSGNTEHSCSSQKQISIQHRQTQSDLTIEKISALENSKNSDLEKKEGRIDDLLRANCDLRRQIDEQQKMLEKYKERLNRCVTMSKKLLIEKSKQEKMACRDKSMQDRLRLGHFTTVRHGASFTEQWTDGYAFQNLIKQQERINSQREEIERQRKMLAKRKPPAMGQAPPATNEQKQRKSKTNGAENETLTLAEYHEQEEIFKLRLGHLKKEEAEIQAELERLERVRNLHIRELKRIHNEDNSQFKDHPTLNDRYLLLHLLGRGGFSEVYKAFDLTEQRYVAVKIHQLNKNWRDEKKENYHKHACREYRIHKELDHPRIVKLYDYFSLDTDSFCTVLEYCEGNDLDFYLKQHKLMSEKEARSIIMQIVNALKYLNEIKPPIIHYDLKPGNILLVNGTACGEIKITDFGLSKIMDDDSYNSVDGMELTSQGAGTYWYLPPECFVVGKEPPKISNKVDVWSVGVIFYQCLYGRKPFGHNQSQQDILQENTILKATEVQFPPKPVVTPEAKAFIRRCLAYRKEDRIDVQQLACDPYLLPHIRKSVSTSSPAGAAIASTSGASNNSSSN

SEQ ID NO: 89288 - protein, 593 aa, Homo sapiens
  Payload ID: 17880
  Gene Name: tousled-like kinase 2
  ENSP ID: ENSP00000462036
MMEELHSLDPRRQELLEARFTGVGVSKGPLNSESSNQSLCSVGSLSDKEVETPEKKQNDQRNRKRKAEPYETSQGKGTPRGHKISDYFERRVEQPLYGLDGSAAKEATEEQSALPTLMSVMLAKPRLDTEQLAQRGAGLCFTFVSSDLTIEKISALENSKNSDLEKKEGRIDDLLRANCDLRRQIDEQQKMLEKYKERLNRCVTMSKKLLIEKSKQEKMACRDKSMQDRLRLGHFTTVRHGASFTEQWTDGYAFQNLIKQQERINSQREEIERQRKMLAKRKPPAMGQAPPATNEQKQRKSKTNGAENETLTLAEYHEQEEIFKLRLGHLKKEEAEIQAELERLERVRNLHIRELKRIHNEDNSQFKDHPTLNDRYLLLHLLGRGGFSEVYKAFDLTEQRYVAVKIHQLNKNWRDEKKENYHKHACREYRIHKELDHPRIVKLYDYFSLDTDSFCTVLEYCEGNDLDFYLKQHKLMSEKEARSIIMQIVNALKYLNEIKPPIIHYDLKPGNILLVNGTACGEIKITDFGLSKIMDDDSYNSVDGMELTSQGAGTYWYLPPECFVVGKEPPKISNKVDVWSVGVIFYQCLYGRK

SEQ ID NO: 89289 - protein, 89 aa, Homo sapiens
  Payload ID: 17880
  Gene Name: tousled-like kinase 2
  ENSP ID: ENSP00000462637
MMEELHSLDPRRQELLEARFTGVGVSKGPLNSESSNQSLCSVGSLSDKEVETPEKKQNDQRNRKRKAEPYETSQGKGTPRGHKISDYFE

SEQ ID NO: 89290 - protein, 176 aa, Homo sapiens
  Payload ID: 17880
  Gene Name: tousled-like kinase 2
  ENSP ID: ENSP00000462851
QQNSPSSTGSGNTEHSCSSQKQISIQHRQTQANCDLRRQIDEQQKMLEKYKERLNRCVTMSKKLLIEKSKQEKMACRDKSMQDRLRLGHFTTVRHGASFTEQWTDGYAFQNLIKQQERINSQREEIERQRKMLAKRKPPAMGQAPPATNEQKQRKSKTNGAENETLTLAEYHEQEE

SEQ ID NO: 89291 - protein, 601 aa, Homo sapiens
  Payload ID: 17880
  Gene Name: tousled-like kinase 2
  ENSP ID: ENSP00000463595
MSVMLAKPRLDTEQLAQRGAGLCFTFVSAQQNSPSSTGSGNTEHSCSSQKQISIQHRQTQSDLTIEKISALENSKNSDLEKKEGRIDDLLRANCDLRRQIDEQQKMLEKYKERLNRCVTMSKKLLIEKSKQEKMACRDKSMQDRLRLGHFTTVRHGASFTEQWTDGYAFQNLIKQQERINSQREEIERQRKMLAKRKPPAMGQAPPATNEQKQRKSKTNGAENETLTLAEYHEQEEIFKLRLGHLKKEEAEIQAELERLERVRNLHIRELKRIHNEDNSQFKDHPTLNDRYLLLHLLGRGGFSEVYKAFDLTEQRYVAVKIHQLNKNWRDEKKENYHKHACREYRIHKELDHPRIVKLYDYFSLDTDSFCTVLEYCEGNDLDFYLKQHKLMSEKEARSIIMQIVNALKYLNEIKPPIIHYDLKPGNILLVNGTACGEIKITDFGLSKIMDDDSYNSVDGMELTSQGAGTYWYLPPECFVVGKEPPKISNKVDVWSVGVIFYQCLYGRKPFGHNQSQQDILQENTILKATEVQFPPKPVVTPEAKAFIRRCLAYRKEDRIDVQQLACDPYLLPHIRKSVSTSSPAGAAIASTSGASNNSSSN

SEQ ID NO: 89292 - protein, 40 aa, Homo sapiens
  Payload ID: 17880
  Gene Name: tousled-like kinase 2
  ENSP ID: ENSP00000463814
MSVMLAKPRLDTEQLAQRGAGLCFTFVSAQQNSPSSTGSG

SEQ ID NO: 89293 - protein, 51 aa, Homo sapiens
  Payload ID: 17880
  Gene Name: tousled-like kinase 2
  ENSP ID: ENSP00000463986
MEELHSLDPRRQELLEARFTGVGVSKECCKVSGSQTILMAILTLVWYEKEN

SEQ ID NO: 89294 - protein, 176 aa, Homo sapiens
  Payload ID: 17880
  Gene Name: tousled-like kinase 2
  ENSP ID: ENSP00000464516
MMEELHSLDPRRQELLEARFTGVGVSKGPLNSESSNQSLCSVGSLSDKEVERRVEQPLYGLDGSAAKEATEEQSALPTLMSVMLAKPRLDTEQLAQRGAGLCFTFVSAQQNSPSSTGSGNTEHSCSSQKQISIQHRQTQSDLTIEKISALENSKNSDLEKKEGRIDDLLRANCDLR

SEQ ID NO: 89295 - protein, 72 aa, Homo sapiens
  Payload ID: 17880
  Gene Name: tousled-like kinase 2
  ENSP ID: ENSP00000464557
MMEELHSLDPRRQELLEARFTGVGVSKGPLNSESSNQSLCSVGSLSDKEVETPEKKQNDQRNRKRKAEPYET

SEQ ID NO: 89296 - protein, 506 aa, Homo sapiens
  Payload ID: 17881
  Gene Name: TOX high mobility group box family member 2
  Uniprot ID: Q96NM4
  ENSP ID: ENSP00000344724
MDVRLYPSAPAVGARPGAEPAGLAHLDYYHGGKFDGDSAYVGMSDGNPELLSTSQTYNGQSENNEDYEIPPITPPNLPEPSLLHLGDHEASYHSLCHGLTPNGLLPAYSYQAMDLPAIMVSNMLAQDSHLLSGQLPTIQEMVHSEVAAYDSGRPGPLLGRPAMLASHMSALSQSQLISQMGIRSSIAHSSPSPPGSKSATPSPSSSTQEEESEVHFKISGEKRPSADPGKKAKNPKKKKKKDPNEPQKPVSAYALFFRDTQAAIKGQNPSATFGDVSKIVASMWDSLGEEQKQAYKRKTEAAKKEYLKALAAYRASLVSKSSPDQGETKSTQANPPAKMLPPKQPMYAMPGLASFLTPSDLQAFRSGASPASLARTLGSKSLLPGLSASPPPPPSFPLSPTLHQQLSLPPHAQGALLSPPVSMSPAPQPPVLPTPMALQVQLAMSPSPPGPQDFPHISEFPSSSGSCSPGPSNPTSSGDWDSSYPSGECGISTCSLLPRDKSLYLT

SEQ ID NO: 89297 - protein, 488 aa, Homo sapiens
  Payload ID: 17881
  Gene Name: TOX high mobility group box family member 2
  Uniprot ID: Q96NM4
  ENSP ID: ENSP00000350849
MQQTRTEAVAGAFSRCLGFCGMRLGLLLLARHWCIAGVFPQKFDGDSAYVGMSDGNPELLSTSQTYNGQSENNEDYEIPPITPPNLPEPSLLHLGDHEASYHSLCHGLTPNGLLPAYSYQAMDLPAIMVSNMLAQDSHLLSGQLPTIQEMVHSEVAAYDSGRPGPLLGRPAMLASHMSALSQSQLISQMGIRSSIAHSSPSPPGSKSATPSPSSSTQEEESEVHFKISGEKRPSADPGKKAKNPKKKKKKDPNEPQKPVSAYALFFRDTQAAIKGQNPSATFGDVSKIVASMWDSLGEEQKQSSPDQGETKSTQANPPAKMLPPKQPMYAMPGLASFLTPSDLQAFRSGASPASLARTLGSKSLLPGLSASPPPPPSFPLSPTLHQQLSLPPHAQGALLSPPVSMSPAPQPPVLPTPMALQVQLAMSPSPPGPQDFPHISEFPSSSGSCSPGPSNPTSSGDWDSSYPSGECGISTCSLLPRDKSLYLT

SEQ ID NO: 89298 - protein, 464 aa, Homo sapiens
  Payload ID: 17881
  Gene Name: TOX high mobility group box family member 2
  Uniprot ID: Q96NM4
  ENSP ID: ENSP00000362090
MSDGNPELLSTSQTYNGQSENNEDYEIPPITPPNLPEPSLLHLGDHEASYHSLCHGLTPNGLLPAYSYQAMDLPAIMVSNMLAQDSHLLSGQLPTIQEMVHSEVAAYDSGRPGPLLGRPAMLASHMSALSQSQLISQMGIRSSIAHSSPSPPGSKSATPSPSSSTQEEESEVHFKISGEKRPSADPGKKAKNPKKKKKKDPNEPQKPVSAYALFFRDTQAAIKGQNPSATFGDVSKIVASMWDSLGEEQKQAYKRKTEAAKKEYLKALAAYRASLVSKSSPDQGETKSTQANPPAKMLPPKQPMYAMPGLASFLTPSDLQAFRSGASPASLARTLGSKSLLPGLSASPPPPPSFPLSPTLHQQLSLPPHAQGALLSPPVSMSPAPQPPVLPTPMALQVQLAMSPSPPGPQDFPHISEFPSSSGSCSPGPSNPTSSGDWDSSYPSGECGISTCSLLPRDKSLYLT

SEQ ID NO: 89299 - protein, 464 aa, Homo sapiens; identical to SEQ ID NO: 89298
  Payload ID: 17881
  Gene Name: TOX high mobility group box family member 2
  Uniprot ID: Q96NM4
  ENSP ID: ENSP00000390278

SEQ ID NO: 89300 - protein, 196 aa, Homo sapiens
  Payload ID: 17881
  Gene Name: TOX high mobility group box family member 2
  ENSP ID: ENSP00000390876
RRRRKRRTPMSRRSLCRPTHSSSETLRPPSRVRTPVPLSVTCPKSWPPCGTAWERNRSRTSRTSLSSPAARDPAHLAHPTPPAAGTGTAATPVGSVASAPAACSPGTNRSTSPNPASLPSLRLAGRHCSEPEGLTAEKRPWPEAGWPIGESSDTPIARGLSLFLNLPPDSAEAAHCPPPAQRTCRNLPPADLLAPG

SEQ ID NO: 89301 - protein, 576 aa, Homo sapiens
  Payload ID: 17882
  Gene Name: TOX high mobility group box family member 3
  Uniprot ID: O15405
  ENSP ID: ENSP00000219746
MDVRFYPAAAGDPASLDFAQCLGYYGYSKFGNNNNYMNMAEANNAFFAASEQTFHTPSLGDEEFEIPPITPPPESDPALGMPDVLLPFQALSDPLPSQGSEFTPQFPPQSLDLPSITISRNLVEQDGVLHSSGLHMDQSHTQVSQYRQDPSLIMRSIVHMTDAARSGVMPPAQLTTINQSQLSAQLGLNLGGASMPHTSPSPPASKSATPSPSSSINEEDADEANRAIGEKRAAPDSGKKPKTPKKKKKKDPNEPQKPVSAYALFFRDTQAAIKGQNPNATFGEVSKIVASMWDSLGEEQKQVYKRKTEAAKKEYLKALAAYRASLVSKAAAESAEAQTIRSVQQTLASTNLTSSLLLNTPLSQHGTVSASPQTLQQSLPRSIAPKPLTMRLPMNQIVTSVTIAANMPSNIGAPLISSMGTTMVGSAPSTQVSPSVQTQQHQMQLQQQQQQQQQQMQQMQQQQLQQHQMHQQIQQQMQQQHFQHHMQQHLQQQQQHLQQQINQQQLQQQLQQRLQLQQLQHMQHQSQPSPRQHSPVASQITSPIPAIGSPQPASQQHQSQIQSQTQTQVLSQVSIF

SEQ ID NO: 89302 - protein, 571 aa, Homo sapiens
  Payload ID: 17882
  Gene Name: TOX high mobility group box family member 3
  Uniprot ID: O15405
  ENSP ID: ENSP00000385705
MKCQPRSGARRIEERLHYLITTYLKFGNNNNYMNMAEANNAFFAASETFHTPSLGDEEFEIPPITPPPESDPALGMPDVLLPFQALSDPLPSQGSEFTPQFPPQSLDLPSITISRNLVEQDGVLHSSGLHMDQSHTQVSQYRQDPSLIMRSIVHMTDAARSGVMPPAQLTTINQSQLSAQLGLNLGGASMPHTSPSPPASKSATPSPSSSINEEDADEANRAIGEKRAAPDSGKKPKTPKKKKKKDPNEPQKPVSAYALFFRDTQAAIKGQNPNATFGEVSKIVASMWDSLGEEQKQVYKRKTEAAKKEYLKALAAYRASLVSKAAAESAEAQTIRSVQQTLASTNLTSSLLLNTPLSQHGTVSASPQTLQQSLPRSIAPKPLTMRLPMNQIVTSVTIAANMPSNIGAPLISSMGTTMVGSAPSTQVSPSVQTQQHQMQLQQQQQQQQQQMQQMQQQQLQQHQMHQQIQQQMQQQHFQHHMQQHLQQQQQHLQQQINQQQLQQQLQQRLQLQQLQHMQHQSQPSPRQHSPVASQITSPIPAIGSPQPASQQHQSQIQSQTQTQVLSQVSIF

SEQ ID NO: 89303 - protein, 166 aa, Homo sapiens
  Payload ID: 17882
  Gene Name: TOX high mobility group box family member 3
  ENSP ID: ENSP00000457401
MNMAEANNAFFAASEQTFHTPSLGDEEFEIPPITPPPESDPALGMPDVLLPFQALSDPLPSQGSEFTPQFPPQSLDLPSITISRNLVEQDGVLHSSGLHMDQSHTQVSQYRQDPSLIMRSIVHMTDAARSGVMPPAQLTTINQSQLSAQLGLNLGGASMPHTSPSP

SEQ ID NO: 89304 - protein, 60 aa, Homo sapiens
  Payload ID: 17882
  Gene Name: TOX high mobility group box family member 3
  ENSP ID: ENSP00000463843
MDVRFYPAAAGDPASLDFAQCLGYYGYSKHFACRLESVLFIAVCAQPRKAPIPSTQPPST

SEQ ID NO: 89305 - protein, 42 aa, Homo sapiens
  Payload ID: 17883
  Gene Name: TOX high mobility group box family member 4
  ENSP ID: ENSP00000389333
MEFPGGNDNYLTITGPSHPFLSGAEVSQSCRRRGDIPYTKLG

SEQ ID NO: 89306 - protein, 81 aa, Homo sapiens
  Payload ID: 17883
  Gene Name: TOX high mobility group box family member 4
  ENSP ID: ENSP00000392234
MEFPGGNDNYLTITGPSHPFLSGAETFHTPSLGDEEFEIPPISLDSDPSLAVSDVVGHFDDLADPSSSQDGSFSAQTWTTL

SEQ ID NO: 89307 - protein, 43 aa, Homo sapiens
  Payload ID: 17883
  Gene Name: TOX high mobility group box family member 4
  ENSP ID: ENSP00000392482
MEFPGGNDNYLTITGPSHPFLSGAEPLLQKGPGIEQRRKGKLS

SEQ ID NO: 89308 - protein, 621 aa, Homo sapiens
  Payload ID: 17883
  Gene Name: TOX high mobility group box family member 4
  Uniprot ID: O94842
  ENSP ID: ENSP00000393080
MEFPGGNDNYLTITGPSHPFLSGAETFHTPSLGDEEFEIPPISLDSDPSLAVSDVVGHFDDLADPSSSQDGSFSAQYGVQTLDMPVGMTHGLMEQGGGLLSGGLTMDLDHSIGTQYSANPPVTIDVPMTDMTSGLMGHSQLTTIDQSELSSQLGLSLGGGTILPPAQSPEDRLSTTPSPTSSLHEDGVEDFRRQLPSQKTVVVEAGKKQKAPKKRKKKDPNEPQKPVSAYALFFRDTQAAIKGQNPNATFGEVSKIVASMWDSLGEEQKQVYKRKTEAAKKEYLKALAAYKDNQECQATVETVELDPAPPSQTPSPPPMATVDPASPAPASIEPPALSPSIVVNSTLSSYVANQASSGAGGQPNITKLIITKQMLPSSITMSQGGMVTVIPATVVTSRGLQLGQTSTATIQPSQQAQIVTRSVLQAAAAAAAAASMQLPPPRLQPPPLQQMPQPPTQQQVTILQQPPPLQAMQQPPPQKVRINLQQQPPPLQIKSVPLPTLKMQTTLVPPTVESSPERPMNNSPEAHTVEAPSPETICEMITDVVPEVESPSQMDVELVSGSPVALSPQPRCVRSGCENPPIVSKDWDNEYCSNECVVKHCRDVFLAWVASRNSNTVVFVK

SEQ ID NO: 89309 - protein, 222 aa, Homo sapiens
  Payload ID: 17883
  Gene Name: TOX high mobility group box family member 4
  ENSP ID: ENSP00000402195
MDFPDQRRGAPEPRPRPPRTAPPVSNRPAHKFPGGNDNYLTITGPSHPFLSGAETFHTPSLGDEEFEIPPISLDSDPSLAVSDVVGHFDDLADPSSSQDGSFSAQYGVQTLDMPVGMTHGLMEQGGGLLSGGLTMDLDHSIGTQYSANPPVTIDVPMTDMTSGLMGHSQLTTIDQSELSSQLGLSLGGGTILPPAQSPEDRLSTTPSPTSSLHEDGVEDFRR

SEQ ID NO: 89310 - protein, 170 aa, Homo sapiens
  Payload ID: 17883
  Gene Name: TOX high mobility group box family member 4
  ENSP ID: ENSP00000406196
METFHTPSLGDEEFEIPPISLDSDPSLAVSDVVGHFDDLADPSSSQDGSFSAQYGVQTLDMPVGMTHGLMEQGGGLLSGGLTMDLDHSIGTQYSANPPVTIDVPMTDMTSGLMGHSQLTTIDQSELSSQLGLSLGGGTILPPAQSPEDRLSTTPSPTSSLHEDGVEDFRR

SEQ ID NO: 89311 - protein, 621 aa, Homo sapiens; identical to SEQ ID NO: 89308
  Payload ID: 17883
  Gene Name: TOX high mobility group box family member 4
  Uniprot ID: O94842
  ENSP ID: ENSP00000477868

SEQ ID NO: 89312 - protein, 270 aa, Homo sapiens
  Payload ID: 17884
  Gene Name: TP53 induced glycolysis regulatory phosphatase
  Uniprot ID: Q9NQ88
  ENSP ID: ENSP00000179259
MARFALTVVRHGETRFNKEKIIQGQGVDEPLSETGFKQAAAAGIFLNNVKFTHAFSSDLMRTKQTMHGILERSKFCKDMTVKYDSRLRERKYGVVEGKALSELRAMAKAAREECPVFTPPGGETLDQVKMRGIDFFEFLCQLILKEADQKEQFSQGSPSNCLETSLAEIFPLGKNHSSKVNSDSGIPGLAASVLVVSHGAYMRSLFDYFLTDLKCSLPATLSRSELMSVTPNTGMSLFIINFEEGREVKPTVQCICMNLQDHLNGLTETR

SEQ ID NO: 89313 - protein, 211 aa, Homo sapiens
  Payload ID: 17884
  Gene Name: TP53 induced glycolysis regulatory phosphatase
  ENSP ID: ENSP00000488928
MRTKQTMHGILERSKFCKDMTVKYDSRLRERKYGVVEGKALSELRAMAKAAREECPVFTPPGGETLDQVKMRGIDFFEFLCQLILKEADQKEQFSQGSPSNCLETSLAEIFPLGKNHSSKVNSDSGIPGLAASVLVVSHGAYMRSLFDYFLTDLKCSLPATLSRSELMSVTPNTGMSLFIINFEEGREVKPTVQCICMNLQDHLNGLTETR

SEQ ID NO: 89314 - protein, 76 aa, Homo sapiens
  Payload ID: 17885
  Gene Name: TP53 regulated inhibitor of apoptosis 1
  Uniprot ID: O43715
  ENSP ID: ENSP00000449795
MNSVGEACTDMKREYDQCFNRWFAEKFLKGDSSGDPCTDLFKRYQQCVQKAIKEKEIPIEGLEFMGHGKEKPENSS

SEQ ID NO: 89315 - protein, 121 aa, Homo sapiens
  Payload ID: 17886
  Gene Name: TP53 regulating kinase
  ENSP ID: ENSP00000361174
MAAARATTPADGEEPAPEAEALAAARERSSRFLSGLELVKQGAEARVFRGRFQGRAAVIKHRFPKGYRHPALEARLGRRRTVQEARALLRCRRAGKEYLPQLSFLWTMLPTAYIWKKLKAQ

SEQ ID NO: 89316 - protein, 253 aa, Homo sapiens
  Payload ID: 17886
  Gene Name: TP53 regulating kinase
  Uniprot ID: Q96S44
  ENSP ID: ENSP00000361186
MAAARATTPADGEEPAPEAEALAAARERSSRFLSGLELVKQGAEARVFRGRFQGRAAVIKHRFPKGYRHPALEARLGRRRTVQEARALLRCRRAGISAPVVFFVDYASNCLYMEEIEGSVTVRDYIQSTMETEKTPQGLSNLAKTIGQVLARMHDEDLIHGDLTTSNMLLKPPLEQLNIVLIDFGLSFISALPEDKGVDLYVLEKAFLSTHPNTETVFEAFLKSYSTSSKKARPVLKKLDEVRLRGRKRSMVG

SEQ ID NO: 89317 - protein, 124 aa, Homo sapiens; identical to SEQ ID NO: 1166
  Payload ID: 17887
  Gene Name: TP53 target 3
  Uniprot ID: Q9ULZ0
  ENSP ID: ENSP00000381672

SEQ ID NO: 89318 - protein, 132 aa, Homo sapiens
  Payload ID: 17887
  Gene Name: TP53 target 3
  Uniprot ID: Q9ULZ0
  ENSP ID: ENSP00000455448
MRASPCISQPAASWHPRPSALRPTAGSGPDTRTPGTVEDGSAPCPAFRSPAVSPCGEEPCCFQISPAEETLELGRLVSPGNCDTLSPRAAGFYACHVRSLIPCRSTKGRWPLTASAAGLSRHAQCGPSLGLG

SEQ ID NO: 89319 - protein, 102 aa, Homo sapiens; identical to SEQ ID NO: 1162
  Payload ID: 17887
  Gene Name: TP53 target 3
  Uniprot ID: Q9ULZ0
  ENSP ID: ENSP00000457452

SEQ ID NO: 89320 - protein, 142 aa, Homo sapiens
  Payload ID: 17887
  Gene Name: TP53 target 3
  ENSP ID: ENSP00000459299
GSGPDTRTPGTVEDGSAPCPAFRSPAVSPCGEEPCCFQISPAEETLELGRLVSPGNCDTLSPRAAGFYACHVRSLIPCRSTKGRWPLTASAAGLSRLSQILCTPGAPLGPPGSLRGPYLGRASHGDFPTSVIKRRKRHSGRA

SEQ ID NO: 89321 - protein, 102 aa, Homo sapiens; identical to SEQ ID NO: 1162
  Payload ID: 17888
  Gene Name: TP53 target 3 family member E
  ENSP ID: ENSP00000482283

SEQ ID NO: 89322 - protein, 124 aa, Homo sapiens; identical to SEQ ID NO: 1166
  Payload ID: 17888
  Gene Name: TP53 target 3 family member E
  ENSP ID: ENSP00000485467

SEQ ID NO: 89323 - protein, 102 aa, Homo sapiens; identical to SEQ ID NO: 1162
  Payload ID: 17889
  Gene Name: TP53 target 3 family member F
  ENSP ID: ENSP00000481405

SEQ ID NO: 89324 - protein, 124 aa, Homo sapiens; identical to SEQ ID NO: 1166
  Payload ID: 17889
  Gene Name: TP53 target 3 family member F
  ENSP ID: ENSP00000485635

SEQ ID NO: 89325 - protein, 124 aa, Homo sapiens; identical to SEQ ID NO: 1166
  Payload ID: 17890
  Gene Name: TP53 target 3B
  Uniprot ID: Q9ULZ0
  ENSP ID: ENSP00000339405

SEQ ID NO: 89326 - protein, 102 aa, Homo sapiens; identical to SEQ ID NO: 1162
  Payload ID: 17890
  Gene Name: TP53 target 3B
  Uniprot ID: Q9ULZ0
  ENSP ID: ENSP00000456831

SEQ ID NO: 89327 - protein, 132 aa, Homo sapiens; identical to SEQ ID NO: 89318
  Payload ID: 17890
  Gene Name: TP53 target 3B
  Uniprot ID: Q9ULZ0
  ENSP ID: ENSP00000457303

SEQ ID NO: 89328 - protein, 7 aa, Homo sapiens
  Payload ID: 17890
  Gene Name: TP53 target 3B
  ENSP ID: ENSP00000458724
  MOD_RES (1)..(1): Any amino acid
XPSLGLG

SEQ ID NO: 89329 - protein, 102 aa, Homo sapiens; identical to SEQ ID NO: 1162
  Payload ID: 17891
  Gene Name: TP53 target 3C
  Uniprot ID: Q9ULZ0
  ENSP ID: ENSP00000353397

SEQ ID NO: 89330 - protein, 102 aa, Homo sapiens; identical to SEQ ID NO: 1162
  Payload ID: 17891
  Gene Name: TP53 target 3C
  Uniprot ID: Q9ULZ0
  ENSP ID: ENSP00000381659

SEQ ID NO: 89331 - protein, 102 aa, Homo sapiens; identical to SEQ ID NO: 1162
  Payload ID: 17891
  Gene Name: TP53 target 3C
  Uniprot ID: Q9ULZ0
  ENSP ID: ENSP00000454442

SEQ ID NO: 89332 - protein, 124 aa, Homo sapiens; identical to SEQ ID NO: 1166
  Payload ID: 17891
  Gene Name: TP53 target 3C
  Uniprot ID: Q9ULZ0
  ENSP ID: ENSP00000455132

SEQ ID NO: 89333 - protein, 132 aa, Homo sapiens; identical to SEQ ID NO: 89318
  Payload ID: 17891
  Gene Name: TP53 target 3C
  Uniprot ID: Q9ULZ0
  ENSP ID: ENSP00000457790

SEQ ID NO: 89334 - protein, 132 aa, Homo sapiens; identical to SEQ ID NO: 89318
  Payload ID: 17892
  Gene Name: TP53 target 3D
  Uniprot ID: Q9ULZ0
  ENSP ID: ENSP00000454398

SEQ ID NO: 89335 - protein, 124 aa, Homo sapiens; identical to SEQ ID NO: 1166
  Payload ID: 17892
  Gene Name: TP53 target 3D
  Uniprot ID: Q9ULZ0
  ENSP ID: ENSP00000455596

SEQ ID NO: 89336 - protein, 102 aa, Homo sapiens
  Payload ID: 17892
  Gene Name: TP53 target 3D
  ENSP ID: ENSP00000457079
MRASPCISQPAASWHPRPSALRPTAGSGPDTRTPGTVEDGSAPCPAFRSPAVSPCGEEPCCFQISPAEETLELGRLVSPGCHKFSAPQECRLDPRARCVVHI

SEQ ID NO: 89337 - protein, 102 aa, Homo sapiens; identical to SEQ ID NO: 89336
  Payload ID: 17892
  Gene Name: TP53 target 3D
  ENSP ID: ENSP00000458008

SEQ ID NO: 89338 - protein, 7 aa, Homo sapiens
  Payload ID: 17892
  Gene Name: TP53 target 3D
  ENSP ID: ENSP00000458552
  MOD_RES (1)..(1): Any amino acid
XPSLGLG

SEQ ID NO: 89339 - protein, 290 aa, Homo sapiens [sequence omitted]

SEQ ID NO: 89340 - protein, 175 aa, Homo sapiens
  Payload ID: 17894
  Gene Name: TP53RK binding protein
  Uniprot ID: Q9Y3C4
  ENSP ID: ENSP00000272424
MQLTHQLDLFPECRVTLLLFKDVKNAGDLRRKAMEGTIDGSLINPTVIVDPFQILVAANKAVHLYKLGKMKTRTLSTEIIFNLSPNNNISEALKKFGISANDTSILIVYIEEGEKQINQEYLISQVEGHQVSLKNLPEIMNITEVKKIYKLSSQEESIGTLLDAIICRMSTKDVL

SEQ ID NO: 89341 - protein, 214 aa, Homo sapiens
  Payload ID: 17894
  Gene Name: TP53RK binding protein
  Uniprot ID: Q9Y3C4
  ENSP ID: ENSP00000325398
MQLTHQLDLFPECRVTLLLFKDVKNAGDLRRKAMEGTIDGSLINPTVFHSCCPGWSAMARSWLTATSASRVQAIVLPQPPELLGLQIVDPFQILVAANKAVHLYKLGKMKTRTLSTEIIFNLSPNNNISEALKKFGISANDTSILIVYIEEGEKQINQEYLISQVEGHQVSLKNLPEIMNITEVKKIYKLSSQEESIGTLLDAIICRMSTKDVL

SEQ ID NO: 89342 - protein, 214 aa, Homo sapiens; identical to SEQ ID NO: 89341
  Payload ID: 17894
  Gene Name: TP53RK binding protein
  Uniprot ID: Q9Y3C4
  ENSP ID: ENSP00000386936

SEQ ID NO: 89343 - protein, 747 aa, Homo sapiens
  Payload ID: 17895
  Gene Name: TPX2, microtubule-associated
  Uniprot ID: Q9ULW0
  ENSP ID: ENSP00000300403
MSQVKSSYSYDAPSDFINFSSLDDEGDTQNIDSWFEEKANLENKLLGKNGTGGLFQGKTPLRKANLQQAIVTPLKPVDNTYYKEAEKENLVEQSIPSNACSSLEVEAAISRKTPAQPQRRSLRLSAQKDLEQKEKHHVKMKAKRCATPVIIDEILPSKKMKVSNNKKKPEEEGSAHQDTAEKNASSPEKAKGRHTVPCMPPAKQKFLKSTEEQELEKSMKMQQEVVEMRKKNEEFKKLALAGIGQPVKKSVSQVTKSVDFHFRTDERIKQHPKNQEEYKEVNFTSELRKHPSSPARVTKGCTIVKPFNLSQGKKRTFDETVSTYVPLAQQVEDFHKRTPNRYHLRSKKDDINLLPSKSSVTKICRDPQTPVLQTKHRARAVTCKSTAELEAEELEKLQQYKFKARELDPRILEGGPILPKKPPVKPPTEPIGFDLEIEKRIQERESKKKTEDEHFEFHSRPCPTKILEDVVGVPEKKVLPITVPKSPAFALKNRIRMPTKEDEEEDEPVVIKAQPVPHYGVPFKPQIPEARTVEICPFSFDSRDKERQLQKEKKIKELQKGEVPKFKALPLPHFDTINLPEKKVKNVTQIEPFCLETDRRGALKAQTWKHQLEEELRQQKEAACFKARPNTVISQEPFVPKKEKKSVAEGLSGSLVQEPFQLATEKRAKERQELEKRMAEVEAQKAQQLEEARLQEEEQKKEELARLRRELVHKANPIRKYQGLEIKSSDQPLTVPVSPKFSTRFHC

SEQ ID NO: 89344 - protein, 783 aa, Homo sapiens
  Payload ID: 17895
  Gene Name: TPX2, microtubule-associated
  Uniprot ID: Q9ULW0
  ENSP ID: ENSP00000341145
MSQVKSSYSYDAPSDFINFSSLDDEGDTQNIDSWFEEKANLENKLLGKNGTGGLFQGKTPLRKANLQQAIVTPLKPVDNTYYKEAEKENLVEQSIPSNACSSLEVEAAISRKTPAQPQRRSLRLSAQKDLEQKEKHHVKMKAKRCATPVIIDEILPSKKMKVSNNKKKPEEEGSAHQDTAEKNASSPEKAKGRHTVPCMPPAKQKFLKSTEEQELEKSMKMQQEVVEMRKKNEEFKKLALAGIGQPVKKSVSQVTKSVDFHFRTDERIKQHPKNQEEYKEVNFTSELRKHPSSPARVTKGCTIVKPFNLSQGKKRTFDETVSTYVPLAQQVEDFHKRTPNRYHLRSKKDDIKTGSCSVTQAGVQWRDHGSLQCPTPGLKQSSCLSLPNLLPSKSSVTKICRDPQTPVLQTKHRARAVTCKSTAELEAEELEKLQQYKFKARELDPRILEGGPILPKKPPVKPPTEPIGFDLEIEKRIQERESKKKTEDEHFEFHSRPCPTKILEDVVGVPEKKVLPITVPKSPAFALKNRIRMPTKEDEEEDEPVVIKAQPVPHYGVPFKPQIPEARTVEICPFSFDSRDKERQLQKEKKIKELQKGEVPKFKALPLPHFDTINLPEKKVKNVTQIEPFCLETDRRGALKAQTWKHQLEEELRQQKEAACFKARPNTVISQEPFVPKKEKKSVAEGLSGSLVQEPFQLATEKRAKERQELEKRMAEVEAQKAQQLEEARLQEEEQKKEELARLRRELVHKANPIRKYQGLEIKSSDQPLTVPVSPKFSTRFHC

SEQ ID NO: 89345 - protein, 376 aa, Homo sapiens
  Payload ID: 17896
  Gene Name: TraB domain containing
  Uniprot ID: Q9H4I3
  ENSP ID: ENSP00000305664
MDGEEQQPPHEANVEPVVPSEASEPVPRVLSGDPQNLSDVDAFNLLLEMKLKRRRQRPNLPRTVTQLVAEDGSRVYVVGTAHFSDDSKRDVVKTIREVQPDVVVVELCQYRVSMLKMDESTLLREAQELSLEKLQQAVRQNGLMSGLMQMLLLKVSAHITEQLGMAPGGEFREAFKEASKVPFCKFHLGDRPIPVTFKRAIAALSFWQKVRLAWGLCFLSDPISKDDVERCKQKDLLEQMMAEMIGEFPDLHRTIVSERDVYLTYMLRQAARRLELPRASDAEPRKCVPSVVVGVVGMGHVPGIEKNWSTDLNIQEIMTVPPPSVSGRVSRLAVKAAFFGLLGYSLYWMGRRTASLVLSLPAAQYCLQRVTEARHK

SEQ ID NO: 89346 - protein, 376 aa, Homo sapiens; identical to SEQ ID NO: 89345
  Payload ID: 17896
  Gene Name: TraB domain containing
  Uniprot ID: Q9H4I3
  ENSP ID: ENSP00000370295

SEQ ID NO: 89347 - protein, 376 aa, Homo sapiens; identical to SEQ ID NO: 89345
  Payload ID: 17896
  Gene Name: TraB domain containing
  Uniprot ID: Q9H4I3
  ENSP ID: ENSP00000379171

SEQ ID NO: 89348 - protein, 379 aa, Homo sapiens
  Payload ID: 17896
  Gene Name: TraB domain containing
  ENSP ID: ENSP00000379173
MDGEEQQPPHEANVEPVVPSEASEPVPRVLSGDPQNLSDVDAFNLLLEMKLKRRRQRPNLPRTVTQLVAEDGSRVYVVGTAHFSDDSKRDVVKTIREVQPDVVVVELCQYRVSMLKMDESTLLREAQELSLEKLQQAVRQNGLMSGLMQMLLLKVSAHITEQLGMAPGGEFREAFKEASKVPFCKFHLGDRPIPVTFKRAIAALSFWQKVRLAWGLCFLSDPISKDDVERCKQKDLLEQMMAEMIGEFPDLHRTIVSERDVYLTYMLRQAARRLELPRASDAEPRKCVPSVVVGVVGMGHVPGIEKNWSTDLNIQEIMTVPPPSVSGRVSRLAVKAAFFGLLGYSLYWMGRRTASLVLSLPAAQYCLQRVTEARHKEKN

SEQ ID NO: 89349 - protein, 456 aa, Homo sapiens
  Payload ID: 17897
  Gene Name: TraB domain containing 2A
  Uniprot ID: Q86V40
  ENSP ID: ENSP00000335004
MSPWSWFLLQTLCLLPTGAASRRGAPGTANCELKPQQSELNSFLWTIKRDPPSYFFGTIHVPYTRVWDFIPDNSKEAFLQSSIVYFELDLTDPYTISALTSCQMLPQGENLQDVLPRDIYCRLKRHLEYVKLMMPLWMTPDQRGKGLYADYLFNAIAGNWERKRPVWVMLMVNSLTEVDIKSRGVPVLDLFLAQEAERLRKQTGAVEKVEEQCHPLNGLNFSQVPNFINATLPPQERITAQEIDSYLRRELIYKRNERIGKRVKALLEEFPDKGFFFAFGAGHFMGNNTVLDVLRREGYEVEHAPAGRPIHKGKSKKTSTRPTLSTIFAPKVPTLEVPAPEAVSSGHSTLPPLVSRPGSADTPSEAEQRFRKKRRRSQRRPRLRQFSDLWVRLEESDIVPQLQVPVLDRHISTELRLPRRGHSHHSQMVASSACLSLWTPVFWVLVLAFQTETPLL

SEQ ID NO: 89350 - protein, 505 aa, Homo sapiens
  Payload ID: 17897
  Gene Name: TraB domain containing 2A
  Uniprot ID: Q86V40
  ENSP ID: ENSP00000387075
MSPWSWFLLQTLCLLPTGAASRRGAPGTANCELKPQQSELNSFLWTIKRDPPSYFFGTIHVPYTRVWDFIPDNSKEAFLQSSIVYFELDLTDPYTISALTSCQMLPQGENLQDVLPRDIYCRLKRHLEYVKLMMPLWMTPDQRGKGLYADYLFNAIAGNWERKRPVWVMLMVNSLTEVDIKSRGVPVLDLFLAQEAERLRKQTGAVEKVEEQCHPLNGLNFSQVIFALNQTLLQQESLRAGSLQIPYTTEDLIKHYNCGDLSSVILSHDSSQVPNFINATLPPQERITAQEIDSYLRRELIYKRNERIGKRVKALLEEFPDKGFFFAFGAGHFMGNNTVLDVLRREGYEVEHAPAGRPIHKGKSKKTSTRPTLSTIFAPKVPTLEVPAPEAVSSGHSTLPPLVSRPGSADTPSEAEQRFRKKRRRSQRRPRLRQFSDLWVRLEESDIVPQLQVPVLDRHISTELRLPRRGHSHHSQMVASSACLSLWTPVFWVLVLAFQTETPLL

SEQ ID NO: 89351 - protein, 333 aa, Homo sapiens
  Payload ID: 17897
  Gene Name: TraB domain containing 2A
  ENSP ID: ENSP00000387183
MSPWSWFLLQTLCLLPTGAASRRGAPGTANCELKPQQSELNSFLWTIKRDPPSYFFGTIHVPYTRVWDFIPDNSKEAFLQSSIVYFELDLTDPYTISALTSCQMLPQGENLQDVLPRDIYCRLKRHLEYVKLMMPLWMTPDQRGKGLYADYLFNAIAGNWERKRPVWVMLMVNSLTEVDIKSRGVPVLDLFLAQEAERLRKQTGAVEKVEEQCHPLNGLNFSQVIFALNQTLLQQESLRAGSLQIPYTTEDLIKHYNCGDLSSVILSHDSSQVPNFINATLPPQERITAQEIDSYLRRELIYKRNERIGKRVKALLEEFPDKGFFFAFGAASQ

SEQ ID NO: 89352 - protein, 517 aa, Homo sapiens
  Payload ID: 17898
  Gene Name: TraB domain containing 2B
  Uniprot ID: A6NFA1
  ENSP ID: ENSP00000476820
MHAALAGPLLAALLATARARPQPPDGGQCRPPGSQRDLNSFLWTIRRDPPAYLFGTIHVPYTRVWDFIPDNSKAAFQASTRVYFELDLTDPYTISALASCQLLPHGENLQDVLPHELYWRLKRHLDYVKLMMPSWMTPAQRGKGLYADYLFNAIAGNWERKRPVWVMLMVNSLTERDVRFRGVPVLDLYLAQQAEKMKKTTGAVEQVEEQCHPLNNGLNFSQVLFALNQTLLQQESVRAGSLQASYTTEDLIKHYNCGDLSAVIFNHDTSQLPNFINTTLPPHEQVTAQEIDSYFRQELIYKRNERMGKRVMALLRENEDKICFFAFGAGHFLGNNTVIDILRQAGLEVDHTPAGQAIHSPAPQSPAPSPEGTSTSPAPVTPAAAVPEAPSVTPTAPPEDEDPALSPHLLLPDSLSQLEEFGRQRKWHKRQSTHQRPRQFNDLWVRIEDSTTASPPPLPLQPTHSSGTAKPPFQLSDQLQQQDPPGPASSSAPTLGLLPAIATTIAVCFLLHSLGPS

SEQ ID NO: 89353 - protein, 339 aa, Homo sapiens
  Payload ID: 17899
  Gene Name: trace amine associated receptor 1
  Uniprot ID: Q96RJ0
  ENSP ID: ENSP00000275216
MMPFCHNIINISCVKNNWSNDVRASLYSLMVLIILTTLVGNLIVIVSISHFKQLHTPTNWLIHSMATVDFLLGCLVMPYSMVRSAEHCWYFGEVFCKIHTSTDIMLSSASIFHLSFISIDRYYAVCDPLRYKAKMNILVICVMIFISWSVPAVFAFGMIFLELNFKGAEEIYYKHVHCRGGCSVFFSKISGVLTFMTSFYIPGSIMLCVYYRIYLIAKEQARLISDANQKLQIGLEMKNGISQSKERKAVKTLGIVMGVFLICWCPFFICTVMDPFLHYIIPPTLNDVLIWFGYLNSTFNPMVYAFFYPWFRKALKMMLFGKIFQKDSSRCKLFLELSS

SEQ ID NO: 89354 - protein, 306 aa, Homo sapiens
  Payload ID: 17900
  Gene Name: trace amine associated receptor 2
  Uniprot ID: Q9P1P5
  ENSP ID: ENSP00000275191
MYSFMAGSIFITIFGNLAMIISISYFKQLHTPTNFLILSMAITDFLLGFTIMPYSMIRSVENCWYFGLTFCKIYYSFDLMLSITSIFHLCSVAIDRFYAICYPLLYSTKITIPVIKRLLLLCWSVPGAFAFGVVFSEAYADGIEGYDILVACSSSCPVMFNKLWGTTLFMAGFFTPGSMMVGIYGKIFAVSRKHAHAINNLRENQNNQVKKDKKAAKTLGIVIGVFLLCWFPCFFTILLDPFLNFSTPVVLFDALTWFGYFNSTCNPLIYGFFYPWFRRALKYILLGKIFSSCFHNTILCMQKESE

SEQ ID NO: 89355 - protein, 351 aa, Homo sapiens
  Payload ID: 17900
  Gene Name: trace amine associated receptor 2
  Uniprot ID: Q9P1P5
  ENSP ID: ENSP00000356908
MAVSSEQHELSHFKRTQTKKEKFNCSEYGNRSCPENERSLGVRVAMYSFMAGSIFITIFGNLAMIISISYFKQLHTPTNFLILSMAITDFLLGFTIMPYSMIRSVENCWYFGLTFCKIYYSFDLMLSITSIFHLCSVAIDRFYAICYPLLYSTKITIPVIKRLLLLCWSVPGAFAFGVVFSEAYADGIEGYDILVACSSSCPVMFNKLWGTTLFMAGFFTPGSMMVGIYGKIFAVSRKHAHAINNLRENQNNQVKKDKKAAKTLGIVIGVFLLCWFPCFFTILLDPFLNFSTPVVLFDALTWFGYFNSTCNPLIYGFFYPWFRRALKYILLGKIFSSCFHNTILCMQKESE

SEQ ID NO: 89356 - protein, 337 aa, Homo sapiens
  Payload ID: 17901
  Gene Name: trace amine associated receptor 5
  Uniprot ID: O14804
  ENSP ID: ENSP00000258034
MRAVFIQGAEEHPAAFCYQVNGSCPRTVHTLGIQLVIYLACAAGMLIIVLGNVFVAFAVSYFKALHTPTNFLLLSLALADMFLGLLVLPLSTIRSVESCWFFGDFLCRLHTYLDTLFCLTSIFHLCFISIDRHCAICDPLLYPSKFTVRVALRYILAGWGVPAAYTSLFLYTDVVETRLSQWLEEMPCVGSCQLLLNKFWGWLNFPLFFVPCLIMISLYVKIFVVATRQAQQITTLSKSLAGAAKHERKAAKTLGIAVGIYLLCWLPFTIDTMVDSLLHFITPPLVFDIFIWFAYFNSACNPIIYVFSYQWFRKALKLTLSQKVFSPQTRTVDLYQE

SEQ ID NO: 89357 - protein, 345 aa, Homo sapiens
  Payload ID: 17902
  Gene Name: trace amine associated receptor 6
  Uniprot ID: Q96RI8
  ENSP ID: ENSP00000275198
MSSNSSLLVAVQLCYANVNGSCVKIPFSPGSRVILYIVFGFGAVLAVFGNLLVMISILHFKQLHSPTNFLVASLACADFLVGVTVMPFSMVRTVESCWYFGRSFCTFHTCCDVAFCYSSLFHLCFISIDRYIAVTDPLVYPTKFTVSVSGICISVSWILPLMYSGAVFYTGVYDDGLEELSDALNCIGGCQTVVNQNWVLTDFLSFFIPTFIMIILYGNIFLVARRQAKKIENTGSKTESSSESYKARVARRERKAAKTLGVTVVAFMISWLPYSIDSLIDAFMGFITPACIYEICCWCAYYNSAMNPLIYALFYPWFRKAIKVIVTGQVLKNSSATMNLFSEHI

SEQ ID NO: 89358 - protein, 342 aa, Homo sapiens
  Payload ID: 17903
  Gene Name: trace amine associated receptor 8
  Uniprot ID: Q969N4
  ENSP ID: ENSP00000275200
MTSNFSQPVVQLCYEDVNGSCIETPYSPGSRVILYTAFSFGSLLAVFGNLLVMTSVLHFKQLHSPTNFLIASLACADFLVGVTVMLFSMVRTVESCWYFGAKFCTLHSCCDVAFCYSSVLHLCFICIDRYIVVTDPLVYATKFTVSVSGICISVSWILPLTYSGAVFYTGVNDDGLEELVSALNCVGGCQIIVSQGWVLIDFLLFFIPTLVMIILYSKIFLIAKQQAIKIETTSSKVESSSESYKIRVAKRERKAAKTLGVTVLAFVISWLPYTVDILIDAFMGFLTPAYIYEICCWSAYYNSAMNPLIYALFYPWFRKAIKLILSGDVLKASSSTISLFLE

SEQ ID NO: 89359 - protein, 348 aa, Homo sapiens
  Payload ID: 17904
  Gene Name: trace amine associated receptor 9 (gene/pseudogene)
  Uniprot ID: Q96RI9
  ENSP ID: ENSP00000424607
MVNNFSQAEAVELCYKNVNESCIKTPYSPGPRSILYAVLGFGAVLAAFGNLLVMIAILHFKQLHTPTNFLIASLACADFLVGVTVMPFSTVRSVESCWYFGDSYCKFHTCFDTSFCFASLFHLCCISVDRYIAVTDPLTYPTKFTVSVSGICIVLSWFFSVTYSFSIFYTGANEEGIEELVVALTCVGGCQAPLNQNWVLLCFLLFFIPNVAMVFIYSKIFLVAKHQARKIESTASQAQSSSESYKERVAKRERKAAKTLGIAMAAFLVSWLPYLVDAVIDAYMNFITPPYVYEILVWCVYYNSAMNPLIYAFFYQWFGKAIKLIVSGKVLRTDSSTTNLFSEEVETD

SEQ ID NO: 89360 - protein, 425 aa, Homo sapiens
  Payload ID: 17905
  Gene Name: TRAF family member-associated NFKB activator
  Uniprot ID: Q92844
  ENSP ID: ENSP00000259075
MDKNIGEQLNKAYEAFRQACMDRDSAVKELQQKTENYEQRIREQQEQLSLQQTIIDKLKSQLLLVNSTQDNNYGCVPLLEDSETRKNNLTLDQPQDKVISGIAREKLPKVRRQEVSSPRKETSARSLGSPLLHERGNIEKTFWDLKEEFHKICMLAKAQKDHLSKLNIPDTATETQCSVPIQCTDKTDKQEALFKPQAKDDINRGAPSITSVTPRGLCRDEEDTSFESLSKFNVKFPPMDNDSTFLHSTPERPGILSPATSEAVCQEKFNMEFRDNPGNFVKTEETLFEIQGIDPIASAIQNLKTTDKTKPSNLVNTCIRTTLDRAACLPPGDHNALYVNSFPLLDPSDAPFPSLDSPGKAIRGPQQPIWKPFPNQDSDSVVLSGTDSELHIPRVCEFCQAVFPPSITSRGDFLRHLNSHFNGET

SEQ ID NO: 89361 - protein, 425 aa, Homo sapiens; identical to SEQ ID NO: 89360
  Payload ID: 17905
  Gene Name: TRAF family member-associated NFKB activator
  Uniprot ID: Q92844
  ENSP ID: ENSP00000376505

SEQ ID NO: 89362 - protein, 239 aa, Homo sapiens
  Payload ID: 17905
  Gene Name: TRAF family member-associated NFKB activator
  ENSP ID: ENSP00000384235
MLLTSYNKGEMVVKEVKKRREIEGKENDLPSYRGWNTHPNERPVIYSILYSDATGRRGMDKNIGEQLNKAYEAFRQACMDRDSAVKELQQKQTENYEQRIREQQEQLSLQQTIIDKLKSQLLLVNSTQDNNYGCVPLLEDSETRKNNLTLDQPQDKVISGIAREKLPKVRRQEVSSPRKETSARSLGSPLLHERGNIEKTFWDLKEEFHKICMLAKAQKDHLSKLNIPDTATAHLEALS

SEQ ID NO: 89363 - protein, 238 aa, Homo sapiens
  Payload ID: 17905
  Gene Name: TRAF family member-associated NFKB activator
  ENSP ID: ENSP00000384492
MLLTSYNKGEMVVKEVKKRREIEGKENDLPSYRGWNTHPNERPVIYSILYSDATGRRGMDKNIGEQLNKAYEAFRQACMDRDSAVKELQQKTENYEQRIREQQEQLSLQQTIIDKLKSQLLLVNSTQDNNYGCVPLLEDSETRKNNLTLDQPQDKVISGIAREKLPKVRRQEVSSPRKETSARSLGSPLLHERGNIEKTFWDLKEEFHKICMLAKAQKDHLSKLNIPDTATAHLEALS

SEQ ID NO: 89364 - protein, 408 aa, Homo sapiens
  Payload ID: 17905
  Gene Name: TRAF family member-associated NFKB activator
  ENSP ID: ENSP00000385487
MDKNIGEQLNKAYEAFRQACMDRDSAVKELQQKTENYEQRIREQQEQLSLQQTIIDKLKSQLLLVNSTQDNNYGCVPLLEDSETRKNNLTLDQPQDKVISGIAREKLPKVRRQEVSSPRKETSARSLGSPLLHERGNIEKTFWDLKEEFHKICMLAKAQKDHLSKLNIPDTATETQCSVPIQCTDKTDKQEALFKPQAKDDINRGAPSITSVTPRGLCRDEEDTSFESLSKFNVKFPPMDNDSTFLHSTPERPGILSPATSEAVCQEKFNMEFRDNPGNFVKTEETLFEIQGIDPIASAIQNLKTTDKTKPSNLVNTCIRTTLDRAACLPPGDHNALYVNSFPLLDPSDAPFPSLDSPGKAIRGPQQSVHSCFSRWHPALYICFLYYSKGNSCPFGSPFLIKTVTRWY

SEQ ID NO: 89365 - protein, 119 aa, Homo sapiens
  Payload ID: 17905
  Gene Name: TRAF family member-associated NFKB activator
  Uniprot ID: Q92844
  ENSP ID: ENSP00000385983
MDKNIGEQLNKAYEAFRQACMDRDSAVKELQQKTENYEQRIREQQEQLSLQQTIIDKLKSQLLLVNSTQDNNYGCVPLLEDSETRKNNLTLDQPQDKVISGIAREKLPKVDIASAESSI

SEQ ID NO: 89366 - protein, 198 aa, Homo sapiens
  Payload ID: 17905
  Gene Name: TRAF family member-associated NFKB activator
  ENSP ID: ENSP00000387439
LHSTPERPGILSPATSEAVCQEKFNMEFRDNPGNFVKTEETLFEIQGIDPIASAIQNLKTTDKTKPSNLVNTCIRTTLDRAACLPPGDHNALYVNSFPLLDPSDAPFPSLDSPGKAIRGPQQMAPCIVHLLSILQQGKQLPIWKPFPNQDSDSVVLSGTDSELHIPRVCEFCQAVFPPSITSRGDFLRHLNSHFNGET

SEQ ID NO: 89367 - protein, 128 aa, Homo sapiens
  Payload ID: 17905
  Gene Name: TRAF family member-associated NFKB activator
  ENSP ID: ENSP00000388930
MDKNIGEQLNKAYEAFRQACMDRDSAVKELQQKTENYEQRIREQQEQLSLQQTIIDKLKSQLLLVNSTQDNNYGCVPLLEDSETRKNNLTLDQPQDKVISGIAREKLPKLYPVLDFTITSFVSVYVDW

SEQ ID NO: 89368 - protein, 165 aa, Homo sapiens
  Payload ID: 17905
  Gene Name: TRAF family member-associated NFKB activator
  ENSP ID: ENSP00000392776
MGVEGPAVSRPVIYSILYSDATGRRGMDKNIGEQLNKAYEAFRQACMDRDSAVKELQQKTENYEQRIREQQEQLSLQQTIIDKLKSQLLLVNSTQDNNYGCVPLLEDSETRKNNLTLDQPQDKVISGIAREKLPKVRRQEVSSPRKETSARSLGSPLLHERGNIE

SEQ ID NO: 89369 - protein, 138 aa, Homo sapiens
  Payload ID: 17905
  Gene Name: TRAF family member-associated NFKB activator
  ENSP ID: ENSP00000398157
MDKNIGEQLNKAYEAFRQACMDRDSAVKELQQKQTENYEQRIREQQEQLSLQQTIIDKLKSQLLLVNSTQDNNYGCVPLLEDSETRKNNLTLDQPQDKVISGIAREKLPKVRRQEVSSPRKETSARSLGSPLLHERGN

SEQ ID NO: 89370 - protein, 105 aa, Homo sapiens
  Payload ID: 17905
  Gene Name: TRAF family member-associated NFKB activator
  ENSP ID: ENSP00000399934
MDKNIGEQLNKAYEAFRQACMDRDSAVKELQQKTENYEQRIREQQEQLSLQQTIIDKLKSQLLLVNSTQDNNYGCVPLLEDSETRKNNLTLDQPQDKVISGIARE

SEQ ID NO: 89371 - protein, 36 aa, Homo sapiens
  Payload ID: 17905
  Gene Name: TRAF family member-associated NFKB activator
  ENSP ID: ENSP00000410259
MDKNIGEQLNKAYEAFRQACMDRDSAVKELQQKSLQ

SEQ ID NO: 89372 - protein, 190 aa, Homo sapiens
  Payload ID: 17905
  Gene Name: TRAF family member-associated NFKB activator
  ENSP ID: ENSP00000411041
MDKNIGEQLNKAYEAFRQACMDRDSAVKELQQKQTENYEQRIREQQEQLSLQQTIIDKLKSQLLLVNSTQDNNYGCVPLLEDSETRKNNLTLDQPQDKVISGIAREKLPKVRRQEVSSPRKETSARSLGSPLLHERGNIEKTFWDLKEEFHKICMLAKAQKDHLSKLNIPDTATETQCSVPIQCTDKTDK

SEQ ID NO: 89373 - protein, 275 aa, Homo sapiens
  Payload ID: 17905
  Gene Name: TRAF family member-associated NFKB activator
  ENSP ID: ENSP00000412556
VRRQEVSSPRKETSARSLGSPLLHERGNIEKTFWDLKEEFHKICMLAKAQKDHLSKLNIPDTATETQCSVPIQCTDKTDKQEALFKPQAKDDINRGAPSITSVTPRGLCRDEEDTSFESLSKFNVKFPPMDNDSTFLHSTPERPGILSPATSEAVCQEKFNMEFRDNPGNFVKTEETLFEIQGIDPIASAIQNLKTTDKTKPSNLVNTCIRTTLDRAACLPPGDHNALYVNSFPLLDPSDAPFPSLDSPGKAIRGPQQQGKQLVCDYNLMEKYSA

SEQ ID NO: 89374 - protein, 125 aa, Homo sapiens
  Payload ID: 17905
  Gene Name: TRAF family member-associated NFKB activator
  ENSP ID: ENSP00000412622
MDKNIGEQLNKAYEAFRQACMDRDSAVKELQQKTENYEQRIREQQEQLSLQQTIIDKLKSQLLLVNSTQDNNYGCVPLLEDSETRKNNLTLDQPQDKVISGIAREKLPKPETPHFCPQLLLLILS

SEQ ID NO: 89375 - protein, 469 aa, Homo sapiens
  Payload ID: 17906
  Gene Name: TRAF interacting protein
  Uniprot ID: Q9BWF2
  ENSP ID: ENSP00000328203
MPIRALCTICSDFFDHSRDVAAIHCGHTFHLQCLIQWFETAPSRTCPQCRIQVGKRTIINKLFFDLAQEEENVLDAEFLKNELDNVRAQLSQKDKEKRDSQVIIDTLRDTLEERNATVVSLQQALGKAEMLCSTLKKQMKYLEQQQDETKQAQEEARRLRSKMKTMEQIELLLQSQRPEVEEMIRDMGVGQSAVEQLAVYCVSLKKEYENLKEARKASGEVADKLRKDLFSSRSKLQTVYSELDQAKLELKSAQKDLQSADKEIMSLKKKLTMLQETLNLPPVASETVDRLVLESPAPVEVNLKLRRPSFRDDIDLNATFDVDTPPARPSSSQHGYYEKLCLEKSHSPIQDVPKKICKGPRKESQLSLGGQSCAGEPDEELVGAFPIFVRNAILGQKQPKRPRSESSCSKDVVRTGFDGLGGRTKFIQPTDTVMIRPLPVKPKTKVKQRVRVKTVPSLFQAKLDTFLWS

SEQ ID NO: 89376 - protein, 266 aa, Homo sapiens
  Payload ID: 17906
  Gene Name: TRAF interacting protein
  ENSP ID: ENSP00000418544
MPIRALCTICSDFFDHSRDVAAIHCGHTFHLQCLIQWFETAPSRTCPQCRIQEEENVLDAEFLKNELDNVRAQLSQKDKEKRDSQVIIDTLRDTLEERNATVVSLQQALGKAEMLCSTLKKQMKYLEQQQDETKQAQEEARRLRSKMKTMEQIELLLQSQRPEVEEMIRDMGVGQSAVEQLAVYCVSLKKEYENLKEARKASGEVADKLRKDLFSSRSKLQTVYSELDQAKLELKSAQKDLQSADKEIMSLKKKLTMLQETLNLPP

SEQ ID NO: 89377 - protein, 155 aa, Homo sapiens
  Payload ID: 17906
  Gene Name: TRAF interacting protein
  ENSP ID: ENSP00000419350
MPIRALCTICSDFFDHSRDVAAIHCGHTFHLQCLIQWFETAPSRTCPQCRIQVRVGKRTIINKLFFDLAQEEENVLDAEFLKNELDNVRAQLSQKDKEKRDSQVIIDTLRDTLEERNATVVSLQQALGKAEMLCSTLKKQMKYLEQQQDETKQAQ

SEQ ID NO: 89378 - protein, 99 aa, Homo sapiens
  Payload ID: 17906
  Gene Name: TRAF interacting protein
  ENSP ID: ENSP00000419556
MPIRALCTICSDFFDHSRDVAAIHCGHTFHLQCLIQWFETAPSRTCPQCRIQVGKRTIINKLFFDLAQEEENVLDAEFLKNELDNVRAQLSQKVADSLL

SEQ ID NO: 89379 - protein, 284 aa, Homo sapiens
  Payload ID: 17906
  Gene Name: TRAF interacting protein
  ENSP ID: ENSP00000420085
MPIRALCTICSDFFDHSRDVAAIHCGHTFHLQCLIQWFETAPSRTCPQCRIQVGKRTIINKLFFDLAQEEENVLDAEFLKLQTVYSELDQAKLELKSAQKDLQSADKEIMSLKKKLTMLQETLNLPPVASETVDRLVLESPAPVEVNLKLRRPSFRDDIDLNATFDVDTPPARPSSSQHGYYEKLCLEKSHSPIQDVPKKICKGPRKESQLSLGGQSCAGEPDEELVGAFPIFVRNAILGQKQPKRPRSESSCSKDVVRTGFDGLGGRTKFIQPVSFSCDVELS

SEQ ID NO: 89380 - protein, 1352 aa, Homo sapiens
  Payload ID: 17907
  Gene Name: TRAF2 and NCK interacting kinase
  Uniprot ID: Q9UKE5
  ENSP ID: ENSP00000284483
MASDSPARSLDEIDLSALRDPAGIFELVELVGNGTYGQVYKGRHVKTGQLAAIKVMDVTGDEEEEIKQEINMLKKYSHHRNIATYYGAFIKKNPPGMDDQLWLVMEFCGAGSVTDLIKNTKGNTLKEEWIAYICREILRGLSHLHQHKVIHRDIKGQNVLLTENAEVKLVDFGVSAQLDRTVGRRNTFIGTPYWMAPEVIACDENPDATYDFKSDLWSLGITAIEMAEGAPPLCDMHPMRALFLIPRNPAPRLKSKKWSKKFQSFIESCLVKNHSQRPATEQLMKHPFIRDQPNERQVRIQLKDHIDRTKKKRGEKDETEYEYSGSEEEEEENDSGEPSSILNLPGESTLRRDFLRLQLANKERSEALRRQQLEQQQRENEEHKRQLLAERQKRIEEQKEQRRRLEEQQRREKELRKQQEREQRRHYEEQMRREEERRRAEHEQEYIRRQLEEEQRQLEILQQQLLHEQALLLEYKRKQLEEQRQAERLQRQLKQERDYLVSLQHQRQEQRPVEKKPLYHYKEGMSPSEKPAWAKEVEERSRLNRQSSPAMPHKVANRISDPNLPPRSESFSISGVQPARTPPMLRPVDPQIPHLVAVKSQGPALTASQSVHEQPTKGLSGFQEALNVTSHRVEMPRQNSDPTSENPPLPTRIEKFDRSSWLRQEEDIPPKVPQRTTSISPALARKNSPGNGSALGPRLGSQPIRASNPDLRRTEPILESPLQRTSSGSSSSSSTPSSQPSSQGGSQPGSQAGSSERTRVRANSKSEGSPVLPHEPAKVKPEESRDITRPSRPADLTALAKELRELRIEETNRPMKKVTDYSSSSEESESSEEEEEDGESETHDGTVAVSDIPRLIPTGAPGSNEQYNVGMVGTHGLETSHADSFSGSISREGTLMIRETSGEKKRSGHSDSNGFAGHINLPDLVQQSHSPAGTPTEGLGRVSTHSQEMDSGTEYGMGSSTKASFTPFVDPRVYQTSPTDEDEEDEESSAAALFTSELLRQEQAKLNEARKISVVNVNPTNIRPHSDTPEIRKYKKRFNSEILCAALWGVNLLVGTENGLMLLDRSGQGKVYNLINRRRFQQMDVLEGLNVLVTISGKKNKLRVYYLSWLRNRILHNDPEVEKKQGWITVGDLEGCIHYKVVKYERIKFLVIALKNAVEIYAWAPKPYHKFMAFKSFADLQHKPLLVDLTVEEGQRLKVIFGSHTGFHVIDVDSGNSYDIYIPSHIQGNITPHAIVILPKTDGMEMLVCYEDEGVYVNTYGRITKDVVLQWGEMPTSVAYIHSNQIMGWGEKAIEIRSVETGHLDGVFMHKRAQRLKFLCERNDKVFFASVRSGGSSQVFFMTLNRNSMMNW

SEQ ID NO: 89381 - protein, 1276 aa, Homo sapiens
  Payload ID: 17907
  Gene Name: TRAF2 and NCK interacting kinase
  Uniprot ID: Q9UKE5
  ENSP ID: ENSP00000345352
MASDSPARSLDEIDLSALRDPAGIFELVELVGNGTYGQVYKGRHVKTGQLAAIKVMDVTGDEEEEIKQEINMLKKYSHHRNIATYYGAFIKKNPPGMDDQLWLVMEFCGAGSVTDLIKNTKGNTLKEEWIAYICREILRGLSHLHQHKVIHRDIKGQNVLLTENAEVKLVDFGVSAQLDRTVGRRNTFIGTPYWMAPEVIACDENPDATYDFKSDLWSLGITAIEMAEGAPPLCDMHPMRALFLIPRNPAPRLKSKKWSKKFQSFIESCLVKNHSQRPATEQLMKHPFIRDQPNERQVRIQLKDHIDRTKKKRGEKDETEYEYSGSEEEEEENDSGEPSSILNLPGESTLRRDFLRLQLANKERSEALRRQQLEQQQRENEEHKRQLLAERQKRIEEQKEQRRRLEEQQRREKELRKQQEREQRRHYEEQMRREEERRRAEHEQEYKRKQLEEQRQAERLQRQLKQERDYLVSLQHQRQEQRPVEKKPLYHYKEGMSPSEKPAWAKEIPHLVAVKSQGPALTASQSVHEQPTKGLSGFQEALNVTSHRVEMPRQNSDPTSENPPLPTRIEKFDRSSWLRQEEDIPPKVPQRTTSISPALARKNSPGNGSALGPRLGSQPIRASNPDLRRTEPILESPLQRTSSGSSSSSSTPSSQPSSQGGSQPGSQAGSSERTRVRANSKSEGSPVLPHEPAKVKPEESRDITRPSRPASYKKAIDEDLTALAKELRELRIEETNRPMKKVTDYSSSSEESESSEEEEEDGESETHDGTVAVSDIPRLIPTGAPGSNEQYNVGMVGTHGLETSHADSFSGSISREGTLMIRETSGEKKRSGHSDSNGFAGHINLPDLVQQSHSPAGTPTEGLGRVSTHSQEMDSGTEYGMGSSTKASFTPFVDPRVYQTSPTDEDEEDEESSAAALFTSELLRQEQAKLNEARKISVVNVNPTNIRPHSDTPEIRKYKKRFNSEILCAALWGVNLLVGTENGLMLLDRSGQGKVYNLINRRRFQQMDVLEGLNVLVTISGKKNKLRVYYLSWLRNRILHNDPEVEKKQGWITVGDLEGCIHYKVVKYERIKFLVIALKNAVEIYAWAPKPYHKFMAFKSFADLQHKPLLVDLTVEEGQRLKVIFGSHTGFHVIDVDSGNSYDIYIPSHIQGNITPHAIVILPKTDGMEMLVCYEDEGVYVNTYGRITKDVVLQWGEMPTSVAYIHSNQIMGWGEKAIEIRSVETGHLDGVFMHKRAQRLKFLCERNDKVFFASVRSGGSSQVFFMTLNRNSMMNW

SEQ ID NO: 89382 - protein, 1331 aa, Homo sapiens
  Payload ID: 17907
  Gene Name: TRAF2 and NCK interacting kinase
  Uniprot ID: Q9UKE5
  ENSP ID: ENSP00000349880
MASDSPARSLDEIDLSALRDPAGIFELVELVGNGTYGQVYKGRHVKTGQLAAIKVMDVTGDEEEEIKQEINMLKKYSHHRNIATYYGAFIKKNPPGMDDQLWLVMEFCGAGSVTDLIKNTKGNTLKEEWIAYICREILRGLSHLHQHKVIHRDIKGQNVLLTENAEVKLVDFGVSAQLDRTVGRRNTFIGTPYWMAPEVIACDENPDATYDFKSDLWSLGITAIEMAEGAPPLCDMHPMRALFLIPRNPAPRLKSKKWSKKFQSFIESCLVKNHSQRPATEQLMKHPFIRDQPNERQVRIQLKDHIDRTKKKRGEKDETEYEYSGSEEEEEENDSGEPSSILNLPGESTLRRDFLRLQLANKERSEALRRQQLEQQQRENEEHKRQLLAERQKRIEEQKEQRRRLEEQQRREKELRKQQEREQRRHYEEQMRREEERRRAEHEQEYKRKQLEEQRQAERLQRQLKQERDYLVSLQHQRQEQRPVEKKPLYHYKEGMSPSEKPAWAKEVEERSRLNRQSSPAMPHKVANRISDPNLPPRSESFSISGVQPARTPPMLRPVDPQIPHLVAVKSQGPALTASQSVHEQPTKGLSGFQEALNVTSHRVEMPRQNSDPTSENPPLPTRIEKFDRSSWLRQEEDIPPKVPQRTTSISPALARKNSPGNGSALGPRLGSQPIRASNPDLRRTEPILESPLQRTSSGSSSSSSTPSSQPSSQGGSQPGSQAGSSERTRVRANSKSEGSPVLPHEPAKVKPEESRDITRPSRPASYKKAIDEDLTALAKELRELRIEETNRPMKKVTDYSSSSEESESSEEEEEDGESETHDGTVAVSDIPRLIPTGAPGSNEQYNVGMVGTHGLETSHADSFSGSISREGTLMIRETSGEKKRSGHSDSNGFAGHINLPDLVQQSHSPAGTPTEGLGRVSTHSQEMDSGTEYGMGSSTKASFTPFVDPRVYQTSPTDEDEEDEESSAAALFTSELLRQEQAKLNEARKISVVNVNPTNIRPHSDTPEIRKYKKRFNSEILCAALWGVNLLVGTENGLMLLDRSGQGKVYNLINRRRFQQMDVLEGLNVLVTISGKKNKLRVYYLSWLRNRILHNDPEVEKKQGWITVGDLEGCIHYKVVKYERIKFLVIALKNAVEIYAWAPKPYHKFMAFKSFADLQHKPLLVDLTVEEGQRLKVIFGSHTGFHVIDVDSGNSYDIYIPSHIQGNITPHAIVILPKTDGMEMLVCYEDEGVYVNTYGRITKDVVLQWGEMPTSVAYIHSNQIMGWGEKAIEIRSVETGHLDGVFMHKRAQRLKFLCERNDKVFFASVRSGGSSQVFFMTLNRNSMMNW

SEQ ID NO: 89383 - protein, 1360 aa, Homo sapiens
  Payload ID: 17907
  Gene Name: TRAF2 and NCK interacting kinase
  Uniprot ID: Q9UKE5
  ENSP ID: ENSP00000399511
MASDSPARSLDEIDLSALRDPAGIFELVELVGNGTYGQVYKGRHVKTGQLAAIKVMDVTGDEEEEIKQEINMLKKYSHHRNIATYYGAFIKKNPPGMDDQLWLVMEFCGAGSVTDLIKNTKGNTLKEEWIAYICREILRGLSHLHQHKVIHRDIKGQNVLLTENAEVKLVDFGVSAQLDRTVGRRNTFIGTPYWMAPEVIACDENPDATYDFKSDLWSLGITAIEMAEGAPPLCDMHPMRALFLIPRNPAPRLKSKKWSKKFQSFIESCLVKNHSQRPATEQLMKHPFIRDQPNERQVRIQLKDHIDRTKKKRGEKDETEYEYSGSEEEEEENDSGEPSSILNLPGESTLRRDFLRLQLANKERSEALRRQQLEQQQRENEEHKRQLLAERQKRIEEQKEQRRRLEEQQRREKELRKQQEREQRRHYEEQMRREEERRRAEHEQEYIRRQLEEEQRQLEILQQQLLHEQALLLEYKRKQLEEQRQAERLQRQLKQERDYLVSLQHQRQEQRPVEKKPLYHYKEGMSPSEKPAWAKEVEERSRLNRQSSPAMPHKVANRISDPNLPPRSESFSISGVQPARTPPMLRPVDPQIPHLVAVKSQGPALTASQSVHEQPTKGLSGFQEALNVTSHRVEMPRQNSDPTSENPPLPTRIEKFDRSSWLRQEEDIPPKVPQRTTSISPALARKNSPGNGSALGPRLGSQPIRASNPDLRRTEPILESPLQRTSSGSSSSSSTPSSQPSSQGGSQPGSQAGSSERTRVRANSKSEGSPVLPHEPAKVKPEESRDITRPSRPASYKKAIDEDLTALAKELRELRIEETNRPMKKVTDYSSSSEESESSEEEEEDGESETHDGTVAVSDIPRLIPTGAPGSNEQYNVGMVGTHGLETSHADSFSGSISREGTLMIRETSGEKKRSGHSDSNGFAGHINLPDLVQQSHSPAGTPTEGLGRVSTHSQEMDSGTEYGMGSSTKASFTPFVDPRVYQTSPTDEDEEDEESSAAALFTSELLRQEQAKLNEARKISVVNVNPTNIRPHSDTPEIRKYKKRFNSEILCAALWGVNLLVGTENGLMLLDRSGQGKVYNLINRRRFQQMDVLEGLNVLVTISGKKNKLRVYYLSWLRNRILHNDPEVEKKQGWITVGDLEGCIHYKVVKYERIKFLVIALKNAVEIYAWAPKPYHKFMAFKSFADLQHKPLLVDLTVEEGQRLKVIFGSHTGFHVIDVDSGNSYDIYIPSHIQGNITPHAIVILPKTDGMEMLVCYEDEGVYVNTYGRITKDVVLQWGEMPTSVAYIHSNQIMGWGEKAIEIRSVETGHLDGVFMHKRAQRLKFLCERNDKVFFASVRSGGSSQVFFMTLNRNSMMNW

SEQ ID NO: 89384 - protein, 350 aa, Homo sapiens
  Payload ID: 17907
  Gene Name: TRAF2 and NCK interacting kinase
  ENSP ID: ENSP00000417338
MSVSLSKLGFIKHLSSTEDDLRDCLLSSSKEGTEDEEEEIKQEINMLKKYSHHRNIATYYGAFIKKNPPGMDDQLWLVMEFCGAGSVTDLIKNTKGNTLKEEWIAYICREILRGLSHLHQHKVIHRDIKGQNVLLTENAEVKLVDFGVSAQLDRTVGRRNTFIGTPYWMAPEVIACDENPDATYDFKSDLWSLGITAIEMAEGAPPLCDMHPMRALFLIPRNPAPRLKSKKWSKKFQSFIESCLVKNHSQRPATEQLMKHPFIRDQPNERQVRIQLKDHIDRTKKKRGEKDETEYEYSGSEEEEEENDSGEPSSILNLPGESTLRRDFLRLQLANKERSEALRRQQLEQQ

SEQ ID NO: 89385 - protein, 1268 aa, Homo sapiens
  Payload ID: 17907
  Gene Name: TRAF2 and NCK interacting kinase
  Uniprot ID: Q9UKE5
  ENSP ID: ENSP00000418156
MASDSPARSLDEIDLSALRDPAGIFELVELVGNGTYGQVYKGRHVKTGQLAAIKVMDVTGDEEEEIKQEINMLKKYSHHRNIATYYGAFIKKNPPGMDDQLWLVMEFCGAGSVTDLIKNTKGNTLKEEWIAYICREILRGLSHLHQHKVIHRDIKGQNVLLTENAEVKLVDFGVSAQLDRTVGRRNTFIGTPYWMAPEVIACDENPDATYDFKSDLWSLGITAIEMAEGAPPLCDMHPMRALFLIPRNPAPRLKSKKWSKKFQSFIESCLVKNHSQRPATEQLMKHPFIRDQPNERQVRIQLKDHIDRTKKKRGEKDETEYEYSGSEEEEEENDSGEPSSILNLPGESTLRRDFLRLQLANKERSEALRRQQLEQQQRENEEHKRQLLAERQKRIEEQKEQRRRLEEQQRREKELRKQQEREQRRHYEEQMRREEERRRAEHEQEYKRKQLEEQRQAERLQRQLKQERDYLVSLQHQRQEQRPVEKKPLYHYKEGMSPSEKPAWAKEIPHLVAVKSQGPALTASQSVHEQPTKGLSGFQEALNVTSHRVEMPRQNSDPTSENPPLPTRIEKFDRSSWLRQEEDIPPKVPQRTTSISPALARKNSPGNGSALGPRLGSQPIRASNPDLRRTEPILESPLQRTSSGSSSSSSTPSSQPSSQGGSQPGSQAGSSERTRVRANSKSEGSPVLPHEPAKVKPEESRDITRPSRPADLTALAKELRELRIEETNRPMKKVTDYSSSSEESESSEEEEEDGESETHDGTVAVSDIPRLIPTGAPGSNEQYNVGMVGTHGLETSHADSFSGSISREGTLMIRETSGEKKRSGHSDSNGFAGHINLPDLVQQSHSPAGTPTEGLGRVSTHSQEMDSGTEYGMGSSTKASFTPFVDPRVYQTSPTDEDEEDEESSAAALFTSELLRQEQAKLNEARKISVVNVNPTNIRPHSDTPEIRKYKKRFNSEILCAALWGVNLLVGTENGLMLLDRSGQGKVYNLINRRRFQQMDVLEGLNVLVTISGKKNKLRVYYLSWLRNRILHNDPEVEKKQGWITVGDLEGCIHYKVVKYERIKFLVIALKNAVEIYAWAPKPYHKFMAFKSFADLQHKPLLVDLTVEEGQRLKVIFGSHTGFHVIDVDSGNSYDIYIPSHIQGNITPHAIVILPKTDGMEMLVCYEDEGVYVNTYGRITKDVVLQWGEMPTSVAYIHSNQIMGWGEKAIEIRSVETGHLDGVFMHKRAQRLKFLCERNDKVFFASVRSGGSSQVFFMTLNRNSMMNW

SEQ ID NO: 89386 - protein, 1305 aa, Homo sapiens
  Payload ID: 17907
  Gene Name: TRAF2 and NCK interacting kinase
  Uniprot ID: Q9UKE5
  ENSP ID: ENSP00000418378
MASDSPARSLDEIDLSALRDPAGIFELVELVGNGTYGQVYKGRHVKTGQLAAIKVMDVTGDEEEEIKQEINMLKKYSHHRNIATYYGAFIKKNPPGMDDQLWLVMEFCGAGSVTDLIKNTKGNTLKEEWIAYICREILRGLSHLHQHKVIHRDIKGQNVLLTENAEVKLVDFGVSAQLDRTVGRRNTFIGTPYWMAPEVIACDENPDATYDFKSDLWSLGITAIEMAEGAPPLCDMHPMRALFLIPRNPAPRLKSKKWSKKFQSFIESCLVKNHSQRPATEQLMKHPFIRDQPNERQVRIQLKDHIDRTKKKRGEKDETEYEYSGSEEEEEENDSGEPSSILNLPGESTLRRDFLRLQLANKERSEALRRQQLEQQQRENEEHKRQLLAERQKRIEEQKEQRRRLEEQQRREKELRKQQEREQRRHYEEQMRREEERRRAEHEQEYIRRQLEEEQRQLEILQQQLLHEQALLLEYKRKQLEEQRQAERLQRQLKQERDYLVSLQHQRQEQRPVEKKPLYHYKEGMSPSEKPAWAKEIPHLVAVKSQGPALTASQSVHEQPTKGLSGFQEALNVTSHRVEMPRQNSDPTSENPPLPTRIEKFDRSSWLRQEEDIPPKVPQRTTSISPALARKNSPGNGSALGPRLGSQPIRASNPDLRRTEPILESPLQRTSSGSSSSSSTPSSQPSSQGGSQPGSQAGSSERTRVRANSKSEGSPVLPHEPAKVKPEESRDITRPSRPASYKKAIDEDLTALAKELRELRIEETNRPMKKVTDYSSSSEESESSEEEEEDGESETHDGTVAVSDIPRLIPTGAPGSNEQYNVGMVGTHGLETSHADSFSGSISREGTLMIRETSGEKKRSGHSDSNGFAGHINLPDLVQQSHSPAGTPTEGLGRVSTHSQEMDSGTEYGMGSSTKASFTPFVDPRVYQTSPTDEDEEDEESSAAALFTSELLRQEQAKLNEARKISVVNVNPTNIRPHSDTPEIRKYKKRFNSEILCAALWGVNLLVGTENGLMLLDRSGQGKVYNLINRRRFQQMDVLEGLNVLVTISGKKNKLRVYYLSWLRNRILHNDPEVEKKQGWITVGDLEGCIHYKVVKYERIKFLVIALKNAVEIYAWAPKPYHKFMAFKSFADLQHKPLLVDLTVEEGQRLKVIFGSHTGFHVIDVDSGNSYDIYIPSHIQGNITPHAIVILPKTDGMEMLVCYEDEGVYVNTYGRITKDVVLQWGEMPTSVAYIHSNQIMGWGEKAIEIRSVETGHLDGVFMHKRAQRLKFLCERNDKVFFASVRSGGSSQVFFMTLNRNSMMNW

SEQ ID NO: 89387 - protein, 1297 aa, Homo sapiens
  Payload ID: 17907
  Gene Name: TRAF2 and NCK interacting kinase
  Uniprot ID: Q9UKE5
  ENSP ID: ENSP00000418916
MASDSPARSLDEIDLSALRDPAGIFELVELVGNGTYGQVYKGRHVKTGQLAAIKVMDVTGDEEEEIKQEINMLKKYSHHRNIATYYGAFIKKNPPGMDDQLWLVMEFCGAGSVTDLIKNTKGNTLKEEWIAYICREILRGLSHLHQHKVIHRDIKGQNVLLTENAEVKLVDFGVSAQLDRTVGRRNTFIGTPYWMAPEVIACDENPDATYDFKSDLWSLGITAIEMAEGAPPLCDMHPMRALFLIPRNPAPRLKSKKWSKKFQSFIESCLVKNHSQRPATEQLMKHPFIRDQPNERQVRIQLKDHIDRTKKKRGEKDETEYEYSGSEEEEEENDSGEPSSILNLPGESTLRRDFLRLQLANKERSEALRRQQLEQQQRENEEHKRQLLAERQKRIEEQKEQRRRLEEQQRREKELRKQQEREQRRHYEEQMRREEERRRAEHEQEYIRRQLEEEQRQLEILQQQLLHEQALLLEYKRKQLEEQRQAERLQRQLKQERDYLVSLQHQRQEQRPVEKKPLYHYKEGMSPSEKPAWAKEIPHLVAVKSQGPALTASQSVHEQPTKGLSGFQEALNVTSHRVEMPRQNSDPTSENPPLPTRIEKFDRSSWLRQEEDIPPKVPQRTTSISPALARKNSPGNGSALGPRLGSQPIRASNPDLRRTEPILESPLQRTSSGSSSSSSTPSSQPSSQGGSQPGSQAGSSERTRVRANSKSEGSPVLPHEPAKVKPEESRDITRPSRPADLTALAKELRELRIEETNRPMKKVTDYSSSSEESESSEEEEEDGESETHDGTVAVSDIPRLIPTGAPGSNEQYNVGMVGTHGLETSHADSFSGSISREGTLMIRETSGEKKRSGHSDSNGFAGHINLPDLVQQSHSPAGTPTEGLGRVSTHSQEMDSGTEYGMGSSTKASFTPFVDPRVYQTSPTDEDEEDEESSAAALFTSELLRQEQAKLNEARKISVVNVNPTNIRPHSDTPEIRKYKKRFNSEILCAALWGVNLLVGTENGLMLLDRSGQGKVYNLINRRRFQQMDVLEGLNVLVTISGKKNKLRVYYLSWLRNRILHNDPEVEKKQGWITVGDLEGCIHYKVVKYERIKFLVIALKNAVEIYAWAPKPYHKFMAFKSFADLQHKPLLVDLTVEEGQRLKVIFGSHTGFHVIDVDSGNSYDIYIPSHIQGNITPHAIVILPKTDGMEMLVCYEDEGVYVNTYGRITKDVVLQWGEMPTSVAYIHSNQIMGWGEKAIEIRSVETGHLDGVFMHKRAQRLKFLCERNDKVFFASVRSGGSSQVFFMTLNRNSMMNW

SEQ ID NO: 89388 - protein, 45 aa, Homo sapiens
  Payload ID: 17907
  Gene Name: TRAF2 and NCK interacting kinase
  ENSP ID: ENSP00000419308
MASDSPARSLDEIDLSALRDPAGIFELVELVGNGTYGQVYKQMNQ

SEQ ID NO: 89389 - protein, 1323 aa, Homo sapiens
  Payload ID: 17907
  Gene Name: TRAF2 and NCK interacting kinase
  Uniprot ID: Q9UKE5
  ENSP ID: ENSP00000419990
MASDSPARSLDEIDLSALRDPAGIFELVELVGNGTYGQVYKGRHVKTGQLAAIKVMDVTGDEEEEIKQEINMLKKYSHHRNIATYYGAFIKKNPPGMDDQLWLVMEFCGAGSVTDLIKNTKGNTLKEEWIAYICREILRGLSHLHQHKVIHRDIKGQNVLLTENAEVKLVDFGVSAQLDRTVGRRNTFIGTPYWMAPEVIACDENPDATYDFKSDLWSLGITAIEMAEGAPPLCDMHPMRALFLIPRNPAPRLKSKKWSKKFQSFIESCLVKNHSQRPATEQLMKHPFIRDQPNERQVRIQLKDHIDRTKKKRGEKDETEYEYSGSEEEEEENDSGEPSSILNLPGESTLRRDFLRLQLANKERSEALRRQQLEQQQRENEEHKRQLLAERQKRIEEQKEQRRRLEEQQRREKELRKQQEREQRRHYEEQMRREEERRRAEHEQEYKRKQLEEQRQAERLQRQLKQERDYLVSLQHQRQEQRPVEKKPLYHYKEGMSPSEKPAWAKEVEERSRLNRQSSPAMPHKVANRISDPNLPPRSESFSISGVQPARTPPMLRPVDPQIPHLVAVKSQGPALTASQSVHEQPTKGLSGFQEALNVTSHRVEMPRQNSDPTSENPPLPTRIEKFDRSSWLRQEEDIPPKVPQRTTSISPALARKNSPGNGSALGPRLGSQPIRASNPDLRRTEPILESPLQRTSSGSSSSSSTPSSQPSSQGGSQPGSQAGSSERTRVRANSKSEGSPVLPHEPAKVKPEESRDITRPSRPADLTALAKELRELRIEETNRPMKKVTDYSSSSEESESSEEEEEDGESETHDGTVAVSDIPRLIPTGAPGSNEQYNVGMVGTHGLETSHADSFSGSISREGTLMIRETSGEKKRSGHSDSNGFAGHINLPDLVQQSHSPAGTPTEGLGRVSTHSQEMDSGTEYGMGSSTKASFTPFVDPRVYQTSPTDEDEEDEESSAAALFTSELLRQEQAKLNEARKISVVNVNPTNIRPHSDTPEIRKYKKRFNSEILCAALWGVNLLVGTENGLMLLDRSGQGKVYNLINRRRFQQMDVLEGLNVLVTISGKKNKLRVYYLSWLRNRILHNDPEVEKKQGWITVGDLEGCIHYKVVKYERIKFLVIALKNAVEIYAWAPKPYHKFMAFKSFADLQHKPLLVDLTVEEGQRLKVIFGSHTGFHVIDVDSGNSYDIYIPSHIQGNITPHAIVILPKTDGMEMLVCYEDEGVYVNTYGRITKDVVLQWGEMPTSVAYIHSNQIMGWGEKAIEIRSVETGHLDGVFMHKRAQRLKFLCERNDKVFFASVRSGGSSQVFFMTLNRNSMMNW

SEQ ID NO: 89390 - protein, 574 aa, Homo sapiens
  Payload ID: 17908
  Gene Name: TRAF3 interacting protein 2
  Uniprot ID: O43734
  ENSP ID: ENSP00000345984
MPPQLQETRMNRSIPVEVDESEPYPSQLLKPIPEYSPEEESEPPAPNIRNMAPNSLSAPTMLHNSSGDFSQAHSTLKLANHQRPVSRQVTCLRTQVLEDSEDSFCRRHPGLGKAFPSGCSAVSEPASESVVGALPAEHQFSFMEKRNQWLVSQLSAASPDTGHDSDKSDQSLPNASADSLGGSQEMVQRPQPHRNRAGLDLPTIDTGYDSQPQDVLGIRQLERPLPLTSVCYPQDLPRPLRSREFPQFEPQRYPACAQMLPPNLSPHAPWNYHYHCPGSPDHQVPYGHDYPRAAYQQVIQPALPGQPLPGASVRGLHPVQKVILNYPSPWDHEERPAQRDCSFPGLPRHQDQPHHQPPNRAGAPGESLECPAELRPQVPQPPSPAAVPRPPSNPPARGTLKTSNLPEELRKVFITYSMDTAMEVVKFVNFLLVNGFQTAIDIFEDRIRGIDIIKWMERYLRDKTVMIIVAISPKYKQDVEGAESQLDEDEHGLHTKYIHRMMQIEFIKQGSMNFRFIPVLFPNAKKEHVPTWLQNTHVYSWPKNKKNILLRLLREEEYVAPPRGPLPTLQVVPL

SEQ ID NO: 89391 - protein, 564 aa, Homo sapiens
  Payload ID: 17908
  Gene Name: TRAF3 interacting protein 2
  Uniprot ID: O43734
  ENSP ID: ENSP00000352889
MNRSIPVEVDESEPYPSQLLKPIPEYSPEEESEPPAPNIRNMAPNSLSAPTMLHNSSGDFSQAHSTLKLANHQRPVSRQVTCLRTQVLEDSEDSFCRRHPGLGKAFPSGCSAVSEPASESVVGALPAEHQFSFMEKRNQWLVSQLSAASPDTGHDSDKSDQSLPNASADSLGGSQEMVQRPQPHRNRAGLDLPTIDTGYDSQPQDVLGIRQLERPLPLTSVCYPQDLPRPLRSREFPQFEPQRYPACAQMLPPNLSPHAPWNYHYHCPGSPDHQVPYGHDYPRAAYQQVIQPALPGQPLPGASVRGLHPVQKVILNYPSPWDHEERPAQRDCSFPGLPRHQDQPHHQPPNRAGAPGESLECPAELRPQVPQPPSPAAVPRPPSNPPARGTLKTSNLPEELRKVFITYSMDTAMEVVKFVNFLLVNGFQTAIDIFEDRIRGIDIIKWMERYLRDTVMIIVAISPKYKQDVEGAESQLDEDEHGLHTKYIHRMMQIEFIKQGSMNFRFIPVLFPNAKKEHVPTWLQNTHVYSWPKNKKNILLRLLREEEYVAPPRGPLPTLQVVPL

SEQ ID NO: 89392 - protein, 109 aa, Homo sapiens
  Payload ID: 17908
  Gene Name: TRAF3 interacting protein 2
  Uniprot ID: O43734
  ENSP ID: ENSP00000357724
MIIVAISPKYKQDVEGAESQLDEDEHGLHTKYIHRMMQIEFIKQGSMNFRFIPVLFPNAKKEHVPTWLQNTHVYSWPKNKKNILLRLLREEEYVAPPRGPLPTLQVVPL

SEQ ID NO: 89393 - protein, 565 aa, Homo sapiens
  Payload ID: 17908
  Gene Name: TRAF3 interacting protein 2
  Uniprot ID: O43734
  ENSP ID: ENSP00000357750
MNRSIPVEVDESEPYPSQLLKPIPEYSPEEESEPPAPNIRNMAPNSLSAPTMLHNSSGDFSQAHSTLKLANHQRPVSRQVTCLRTQVLEDSEDSFCRRHPGLGKAFPSGCSAVSEPASESVVGALPAEHQFSFMEKRNQWLVSQLSAASPDTGHDSDKSDQSLPNASADSLGGSQEMVQRPQPHRNRAGLDLPTIDTGYDSQPQDVLGIRQLERPLPLTSVCYPQDLPRPLRSREFPQFEPQRYPACAQMLPPNLSPHAPWNYHYHCPGSPDHQVPYGHDYPRAAYQQVIQPALPGQPLPGASVRGLHPVQKVILNYPSPWDHEERPAQRDCSFPGLPRHQDQPHHQPPNRAGAPGESLECPAELRPQVPQPPSPAAVPRPPSNPPARGTLKTSNLPEELRKVFITYSMDTAMEVVKFVNFLLVNGFQTAIDIFEDRIRGIDIIKWMERYLRDKTVMIIVAISPKYKQDVEGAESQLDEDEHGLHTKYIHRMMQIEFIKQGSMNFRFIPVLFPNAKKEHVPTWLQNTHVYSWPKNKKNILLRLLREEEYVAPPRGPLPTLQVVPL

SEQ ID NO: 89394 - protein, 574 aa, Homo sapiens; identical to SEQ ID NO: 89390
  Payload ID: 17908
  Gene Name: TRAF3 interacting protein 2
  Uniprot ID: O43734
  ENSP ID: ENSP00000376339

SEQ ID NO: 89395 - protein, 182 aa, Homo sapiens
  Payload ID: 17909
  Gene Name: TRAF3 interacting protein 3
  ENSP ID: ENSP00000355990
MKKVLLEMEDQKNSYEQKAKESLQKVLEEKMNAEQQLQSTQRSLALAEQKCEEWRSQYEALKEDWRTLGTQHRELESQLHVLQSKLQGADSRDLQMNQALRFLENEHQQLQAKIECLQGDRDLCSLDTQDLQDQLKRSEAEKLTLVTRVQQLQGLLQNQSLQLQEQEKLLTKKGQQIYYHKF

SEQ ID NO: 89396 - protein, 551 aa, Homo sapiens
  Payload ID: 17909
  Gene Name: TRAF3 interacting protein 3
  Uniprot ID: Q9Y228
  ENSP ID: ENSP00000355991
MISPDPRPSPGLARWAESYEAKCERRQEIRESRRCRPNVTTCRQVGKTLRIQQREQLQRARLQQFFRRRNLELEEKGKAQHPQAREQGPSRRPGQVTVLKEPLSCARRISSPREQVTGTSSEVFPAQHPPPSGICRDLSDHLSSQAGGLPPQDTPIKKPPKHHRGTQTKAEGPTIKNDASQQTNYGVAVLDKEIIQLSDYLKEALQRELVLKQKMVILQDLLSTLIQASDSSWKGQLNEDKLKGKLRSLENQLYTCTQKYSPWGMKKVLLEMEDQKNSYEQKAKESLQKVLEEKMNAEQQLQSTQRSLALAEQKCEEWRSQYEALKEDWRTLGTQHRELESQLHVLQSKLQGADSRDLQMNQALRFLENEHQQLQAKIECLQGDRDLCSLDTQDLQDQLKRSEAEKLTLVTRVQQLQGLLQNQSLQLQEQEKLLTKKDQALPVWSPKSFPNEVEPEGTGKEKDWDLRDQLQKKTLQLQAKEKECRELHSELDNLSDEYLSCLRKLQHCREELNQSQQLPPRRQCGRWLPVLMVVIAAALAVFLANKDNLMI

SEQ ID NO: 89397 - protein, 551 aa, Homo sapiens; identical to SEQ ID NO: 89396
  Payload ID: 17909
  Gene Name: TRAF3 interacting protein 3
  Uniprot ID: Q9Y228
  ENSP ID: ENSP00000355992

SEQ ID NO: 89398 - protein, 531 aa, Homo sapiens
  Payload ID: 17909
  Gene Name: TRAF3 interacting protein 3
  Uniprot ID: Q9Y228
  ENSP ID: ENSP00000355993
MISPDPRPSPGLARWAESYEAKCERRQEIRESRRCRPNVTTCRQVGKTLRIQQREQLQRARLQQFFRRRNLELEEKGKAQHPQAREQGPSRRPGQVTGTSSEVFPAQHPPPSGICRDLSDHLSSQAGGLPPQDTPIKKPPKHHRGTQTKAEGPTIKNDASQQTNYGVAVLDKEIIQLSDYLKEALQRELVLKQKMVILQDLLSTLIQASDSSWKGQLNEDKLKGKLRSLENQLYTCTQKYSPWGMKKVLLEMEDQKNSYEQKAKESLQKVLEEKMNAEQQLQSTQRSLALAEQKCEEWRSQYEALKEDWRTLGTQHRELESQLHVLQSKLQGADSRDLQMNQALRFLENEHQQLQAKIECLQGDRDLCSLDTQDLQDQLKRSEAEKLTLVTRVQQLQGLLQNQSLQLQEQEKLLTKKDQALPVWSPKSFPNEVEPEGTGKEKDWDLRDQLQKKTLQLQAKEKECRELHSELDNLSDEYLSCLRKLQHCREELNQSQQLPPRRQCGRWLPVLMVVIAAALAVFLANKDNLMI

SEQ ID NO: 89399 - protein, 404 aa, Homo sapiens
  Payload ID: 17909
  Gene Name: TRAF3 interacting protein 3
  ENSP ID: ENSP00000383743
MISPDPRPSPGLARWAESYEAKCERRQEIRESRRCRPNVTTCRQVGKTLRIQQREQLQRARLQQFFRRRNLELEEKGKAQHPQAREQGPSRRPGQVTGTSSEVFPAQHPPPSGICRDLSDHLSSQAGGLPPQDTPIKKPPKHHRGTQTKAEGPTIKNDASQQTNYGVAVLDKEIIQLSDYLKEALQRELVLKQKMVILQDLLSTLIQASDSSWKGQLNEDKLKGKLRSLENQLYTCTQKYSPWGMKKVLLEMEDQKNSYEQKAKESLQKVLEEKMNAEQQLQSTQRSLALAEQKCEEWRSQYEALKEDWRTLGTQHRELESQLHVLQSKLQGADSRDLQMNQALRFLENEHQQLQAKIECLQGDRDLCSLDTQDLQDQLKRSEAEKLTLVTRVQQLQEAAGWTT

SEQ ID NO: 89400 - protein, 156 aa, Homo sapiens
  Payload ID: 17909
  Gene Name: TRAF3 interacting protein 3
  ENSP ID: ENSP00000417417
MKKVLLEMEDQKNSYEQKAKESLQKVLEEKMNAEQQLQSTQRSLALAEQKCEEWRSQYEALKEDWRTLGTQHRELESQLHVLQSKLQGADSRDLQMNQALRFLENEHQQLQAKIECLQGDRDLCSLDTQDLQEAMWAMAPSADGGDCCSTGSVPGQ

SEQ ID NO: 89401 - protein, 353 aa, Homo sapiens
  Payload ID: 17909
  Gene Name: TRAF3 interacting protein 3
  Uniprot ID: Q9Y228
  ENSP ID: ENSP00000417665
MISPDPRPSPGLARWAESYEAKCERRQEIRESRRCRPNVTTCRQVGKTLRIQQREQLQRARLQQFFRRRNLELEEKGKAQHPQAREQGPSRRPGQVTVLKEPLSCARRISSPREQVTGTSSEVFPAQHPPPSGICRDLSDHLSSQAGGLPPQDTPIKKPPKHHRGTQTKAEGPTIKNDASQQTNYGVAVLDKEIIQLSDYLKEALQRELVLKQKMVILQDLLSTLIQASDSSWKGQLNEDKLKGKLRSLENQLYTCTQKYSPWGMKKVLLEMEDQKNSYEQKAKESLQKVLEEKMNAEQQLQSTQRSLALAEQKCEEWRSQYEALKEDWRTLGTQHRELESQLHVLQSKLQIN

SEQ ID NO: 89402 - protein, 98 aa, Homo sapiens
  Payload ID: 17909
  Gene Name: TRAF3 interacting protein 3
  ENSP ID: ENSP00000418906
MKKVLLEMEDQKNSYEQKAKESLQKVLEEKMNAEQQLQSTQRSLALAEQKCEEWRSQYEALKEDWRTLGTQHRELESQLHVLQSKLQGADSRDLQMNQ

SEQ ID NO: 89403 - protein, 26 aa, Homo sapiens
  Payload ID: 17909
  Gene Name: TRAF3 interacting protein 3
  ENSP ID: ENSP00000419180
MISPDPRPSPGLARWAESYEAKCERR

SEQ ID NO: 89404 - protein, 69 aa, Homo sapiens
  Payload ID: 17909
  Gene Name: TRAF3 interacting protein 3
  ENSP ID: ENSP00000436982
LQGDRDLCSLDTQDLQDQLKRSEAEKLTLVTRVQQLQGLLQNQSLQLQEQEKLLTKKVQRTAFRIRQPQ

SEQ ID NO: 89405 - protein, 145 aa, Homo sapiens
  Payload ID: 17910
  Gene Name: trafficking protein particle complex 1
  Uniprot ID: Q9Y5R8
  ENSP ID: ENSP00000302783
MTVHNLYLFDRNGVCLHYSEWHRKKQAGIPKEEEYKLMYGMLFSIRSFVSKMSPLDMKDGFLAFQTSRYKLHYYETPTGIKVVMNTDLGVGPIRDVLHHIYSALYVELVVKNPLCPLGQTVQSELFRSRLDSYVRSLPFFSARAG

SEQ ID NO: 89406 - protein, 145 aa, Homo sapiens; identical to SEQ ID NO: 89405
  Payload ID: 17910
  Gene Name: trafficking protein particle complex 1
  Uniprot ID: Q9Y5R8
  ENSP ID: ENSP00000441130

SEQ ID NO: 89407 - protein, 42 aa, Homo sapiens
  Payload ID: 17910
  Gene Name: trafficking protein particle complex 1
  ENSP ID: ENSP00000459045
MTVHNLYLFDRNGVCLHYSEWHRKKQAGIPKEEEGWLPGLPN

SEQ ID NO: 89408 - protein, 95 aa, Homo sapiens
  Payload ID: 17910
  Gene Name: trafficking protein particle complex 1
  ENSP ID: ENSP00000460674
MTVHNLYLFDRNGVCLHYSEWHRKKQAGIPKEEEYKLMYGMLFSIRSFVSKMSPLDMKDGFLAFQTSRYKLHYYETPTGIKVVMNTDLGVGPIRD

SEQ ID NO: 89409 - protein, 42 aa, Homo sapiens; identical to SEQ ID NO: 89407
  Payload ID: 17910
  Gene Name: trafficking protein particle complex 1
  ENSP ID: ENSP00000460702

SEQ ID NO: 89410 - protein, 75 aa, Homo sapiens
  Payload ID: 17910
  Gene Name: trafficking protein particle complex 1
  ENSP ID: ENSP00000460761
MTVHNLYLFDRNGVCLHYSEWHRKKQAGIPKEEEYKLMYGMLFSIRSFVSKMSPLDMKDGFLAFQTSRYKLHYYE

SEQ ID NO: 89411 - protein, 1259 aa, Homo sapiens
  Payload ID: 17911
  Gene Name: trafficking protein particle complex 10
  Uniprot ID: P48553
  ENSP ID: ENSP00000291574
MDASEEPLPPVIYTMENKPIVTCAGDQNLFTSVYPTLSQQLPREPMEWRRSYGRAPKMIHLESNFVQFKEELLPKEGNKALLTFPFLHIYWTECCDTEVYKATVKDDLTKWQNVLKAHSSVDWLIVIVENDAKKKNKTNILPRTSIVDKIRNDFCNKQSDRCVVLSDPLKDSSRTQESWNAFLTKLRTLLLMSFTKNLGKFEDDMRTLREKRTEPGWSFCEYFMVQEELAFVFEMLQQFEDALVQYDELDALFSQYVVNFGAGDGANWLTFFCQPVKSWNGLILRKPIDMEKRESIQRREATLLDLRSYLFSRQCTLLLFLQRPWEVAQRALELLHNCVQELKLLEVSVPPGALDCWVFLSCLEVLQRIEGCCDRAQIDSNIAHTVGLWSYATEKLKSLGYLCGLVSEKGPNSEDLNRTVDLLAGLGAERPETANTAQSPYKKLKEALSSVEAFEKHYLDLSHATIEMYTSIGRIRSAKFVGKDLAEFYMRKKAPQKAEIYLQGALKNYLAEGWALPITHTRKQLAECQKHLGQIENYLQTSSLLASDHHLTEEERKHFCQEILDFASQPSDSPGHKIVLPMHSFAQLRDLHFDPSNAVVHVGGVLCVEITMYSQMPVPVHVEQIVVNVHFSIEKNSYRKTAEWLTKHKTSNGIINFPPETAPFPVSQNSLPALELYEMFERSPSDNSLNTTGIICRNVHMLLRRQESSSSLEMPSGVALEEGAHVLRCSHVTLEPGANQITFRTQAKEPGTYTLRQLCASVGSVWFVLPHIYPIVQYDVYSQEPQLHVEPLADSLLAGIPQRVKFTVTTGHYTIKNGDSLQLSNAEAMLILCQAESRAVVYSNTREQSSEAALRIQSSDKVTSISLPVAPAYHVIEFELEVLSLPSAPALGGESDMLGMAEPHRKHKDKQRTGRCMVTTDHKVSIDCPWSIYSTVIALTFSVPFRTTHSLLSSGTRKYVQVCVQNLSELDFQLSDSYLVDTGDSTDLQLVPLNTQSQQPIYSKQSVFFVWELKWTEEPPPSLHCRFSVGFSPASEEQLSISLKPYTYEFKVENFFTLYNVKAEIFPPSGMEYCRTGSLCSLEVLITRLSDLLEVDKDEALTESDEHFSTKLMYEVVDNSSNWAVCGKSCGVISMPVAARATHRVHMEVMPLFAGYLPLPDVRLFKYLPHHSAHSSQLDADSWIENDSLSVDKHGDDQPDSSSLKSRGSVHSACSSEHKGLPMPRLQALPAGQVFNSSSGTQVLVIPSQDDHVLEVSVT

SEQ ID NO: 89412 - protein, 276 aa, Homo sapiens
  Payload ID: 17911
  Gene Name: trafficking protein particle complex 10
  Uniprot ID: P48553
  ENSP ID: ENSP00000369570
MDASEEPLPPVIYTMENKPIVTCAGDQNLFTSVYPTLSQQLPREPMEWRRSYGRAPKMIHLESNFVQFKEELLPKEGNKALLTFPFLHIYWTECCDTEVYKATVKDDLTKWQNVLKAHSSVDWLIVIVENDAKKKNKTNILPRTSIVDKIRNDFCNKQSDRCVVLSDPLKDSSRTQESWNAFLTKLRTLLLMSFTKNLGKFEDDMRTLREKRTEPGWSFCEYFMVQEELAFVFEMLQQFEDALVQYDELDALFSQYVVNFGAGGIKCPFHNSVACW

SEQ ID NO: 89413 - protein, 265 aa, Homo sapiens
  Payload ID: 17911
  Gene Name: trafficking protein particle complex 10
  ENSP ID: ENSP00000402221
MDASEEPLPPVIYTMENKPIVTCAGDQNLFTSVYPTLSQQLPREPMEWRRSYGRAPKMIHLESNFVQFKEELLPKEGNKALLTFPFLHIYWTECCDTEVYKATVKDDLTKWQNVLKAHSSVDWLIVIVENDAKKKNKTNILPRTSIVDKIRNDFCNKQSDRCVVLSDPLKDSSRTQESWNAFLTKLRTLLLMSFTKNLGKFEDDMRTLREKRTEPGWSFCEYFMVQEELAFVFEMLQQFEDALVQYDELDALFSQYVVNFGAGGA

SEQ ID NO: 89414 - protein, 1133 aa, Homo sapiens
  Payload ID: 17912
  Gene Name: trafficking protein particle complex 11
  Uniprot ID: Q7Z392
  ENSP ID: ENSP00000335371
MSPTQWDFPVELCCRPMAFVTLTGLDVVYNAVHRAVWDAFCANRRADRVPISFKVLPGDHEYPKCRPKRTSYEWYIPKGILKTGWMNKHLNLVPALVVVFYELDWDEPQWKEKQSECATRVEIVRQSLQGRNTKVAVVLIQKKTPLPPGEDVIASERAAALCNACELSGKSLFVLPHTDHLVGYIIRLENAFYEHAQTYYYTEIRRVKSHKEFLNKTTHQLLFVRHQFKIAFFSELKQDTQNALKNYRTAYNLVHELRAHETNILEIKTMAGFINYKICRLCFQHNTPLDAIAQFRKHIDLCKKKIGSAELSFEHDAWMSKQFQAFGDLFDEAIKLGLTAIQTQNPGFYYQQAAYYAQERKQLAKTLCNHEASVMYPNPDPLETQTGVLDFYGQRSWRQGILSFDLSDPEKEKVGILAIQLKERNVVHSEIIITLLSNAVAQFKKYKCPRMKSHLMVQMGEEYYYAKDYTKALKLLDYVMCDYRSEGWWTLLTSVLTTALKCSYLMAQLKDYITYSLELLGRASTLKDDQKSRIEKNLINVLMNESPDPEPDCDILAVKTAQKLWADRISLAGSNIFTIGVQDFVPFVQCKAKFHAPSFHVDVPVQFDIYLKADCPHPIRFSKLCVSFNNQEYNQFCVIEEASKANEVLENLTQGKMCLVPGKTRKLLFKFVAKTEDVGKKIEITSVDLALGNETGRCVVLNWQGGGGDAASSQEALQAARSFKRRPKLPDNEVHWDSIIIQASTMIISRVPNISVHLLHEPPALTNEMYCLVVTVQSHEKTQIRDVKLTAGLKPGQDANLTQKTHVTLHGTELCDESYPALLTDIPVGDLHPGEQLEKMLYVRCGTVGSRMFLVYVSYLINTTVEEKEIVCKCHKDETVTIETVFPFDVAVKFVSTKFEHLERVYADIPFLLMTDLLSASPWALTIVSSELQLAPSMTTVDQLESQVDNVILQTGESASECFCLQCPSLGNIEGGVATGHYIISWKRTSAMENIPIITTVITLPHVIVENIPLHVNADLPSFGRVRESLPVKYHLQNKTDLVQDVEISVEPSDAFMFSGLKQIRLRILPGTEQEMLYNFYPLMAGYQQLPSLNINLLRFPNFTNQLLRRFIPTSIFVKPQGRLMDDTSIAAA

SEQ ID NO: 89415 - protein, 1086 aa, Homo sapiens
  Payload ID: 17912
  Gene Name: trafficking protein particle complex 11
  Uniprot ID: Q7Z392
  ENSP ID: ENSP00000349738
MSPTQWDFPVELCCRPMAFVTLTGLDVVYNAVHRAVWDAFCANRRADRVPISFKVLPGDHEYPKCRPKRTSYEWYIPKGILKTGWMNKHLNLVPALVVVFYELDWDEPQWKEKQSECATRVEIVRQSLQGRNTKVAVVLIQKKTPLPPGEDVIASERAAALCNACELSGKSLFVLPHTDHLVGYIIRLENAFYEHAQTYYYTEIRRVKSHKEFLNKTTHQLLFVRHQFKIAFFSELKQDTQNALKNYRTAYNLVHELRAHETNILEIKTMAGFINYKICRLCFQHNTPLDAIAQFRKHIDLCKKKIGSAELSFEHDAWMSKQFQAFGDLFDEAIKLGLTAIQTQNPGFYYQQAAYYAQERKQLAKTLCNHEASVMYPNPDPLETQTGVLDFYGQRSWRQGILSFDLSDPEKEKVGILAIQLKERNVVHSEIIITLLSNAVAQFKKYKCPRMKSHLMVQMGEEYYYAKDYTKALKLLDYVMCDYRSEGWWTLLTSVLTTALKCSYLMAQLKDYITYSLELLGRASTLKDDQKSRIEKNLINVLMNESPDPEPDCDILAVKTAQKLWADRISLAGSNIFTIGVQDFVPFVQCKAKFHAPSFHVDVPVQFDIYLKADCPHPIRFSKLCVSFNNQEYNQFCVIEEASKANEVLENLTQGKMCLVPGKTRKLLFKFVAKTEDVGKKIEITSVDLALGNETGRCVVLNWQGGGGDAASSQEALQAARSFKRRPKLPDNEVHWDSIIIQASTMIISRVPNISVHLLHEPPALTNEMYCLVVTVQSHEKTQIRDVKLTAGLKPGQDANLTQKTHVTLHGTELCDESYPALLTDIPVGDLHPGEQLEKMLYVRCGTVGSRMFLVYVSYLINTTVEEKEIVCKCHKDETVTIETVFPFDVAVKFVSTKFEHLERVYADIPFLLMTDLLSASPWALTIVSSELQLAPSMTTVDQLESQVDNVILQTGESASECFCLQCPSLGNIEGGVATGHYIISWKRTSAMENIPIITTVITLPHVIVENIPLHVNADLPSFGRVRESLPVKYHLQNKTDLVQDVEISVEPSDAFMFSGLKQIRLPAQAFYTYQYFCQATGSTHG

SEQ ID NO: 89416 - protein, 739 aa, Homo sapiens
  Payload ID: 17912
  Gene Name: trafficking protein particle complex 11
  ENSP ID: ENSP00000421004
MSCVSSYAGFDLSDPEKEKVGILAIQLKERNVVHSEIIITLLSNAVAQFKKYKCPRMKSHLMVQMGEEYYYAKDYTKALKLLDYVMCDYRSEGWWTLLTSVLTTALKCSYLMAQLKDYITYSLELLGRASTLKDDQKSRIEKNLINVLMNESPDPEPDCDILAVKTAQKLWADRISLAGSNIFTIGVQDFVPFVQCKAKFHAPSFHVDVPVQFDIYLKADCPHPIRFSKLCVSFNNQEYNQFCVIEEASKANEVLENLTQGKMCLVPGKTRKLLFKFVAKTEDVGKKIEITSVDLALGNETGRCVVLNWQGGGGDAASSQEALQAARSFKRRPKLPDNEVHWDSIIIQASTMIISRVPNISVHLLHEPPALTNEMYCLVVTVQSHEKTQIRDVKLTAGLKPGQDANLTQKTHVTLHGTELCDESYPALLTDIPVGDLHPGEQLEKMLYVRCGTVGSRMFLVYVSYLINTTVEEKEIVCKCHKDETVTIETVFPFDVAVKFVSTKFEHLERVYADIPFLLMTDLLSASPWALTIVSSELQLAPSMTTVDQLESQVDNVILQTGESASECFCLQCPSLGNIEGGVATGHYIISWKRTSAMENIPIITTVITLPHVIVENIPLHVNADLPSFGRVRESLPVKYHLQNKTDLVQDVEISVEPSDAFMFSGLKQIRLRILPGTEQEMLYNFYPLMAGYQQLPSLNINLLRFPNFTNQLLRRFIPTSIFVKPQGRLMDDTSIAAA

SEQ ID NO: 89417 - protein, 124 aa, Homo sapiens
  Payload ID: 17912
  Gene Name: trafficking protein particle complex 11
  ENSP ID: ENSP00000422915
MSPTQWDFPVELCCRPMAFVTLTGLDVVYNAVHRAVWDAFCANRRADRVPISFKQAAYYAQERKQLAKTLCNHEASVMYPNPDPLETQTGVLDFYGQRSWRQGILSFDLSDPEKEKVFQALCQL

SEQ ID NO: 89418 - protein, 735 aa, Homo sapiens
  Payload ID: 17913
  Gene Name: trafficking protein particle complex 12
  Uniprot ID: Q8WVT3
  ENSP ID: ENSP00000324318
MEDAGGGEETPAPEAPHPPQLAPPEEQGLLFQEETIDLGGDEFGSEENETASEGSSPLADKLNEHMMESVLISDSPNSEGDAGDLGRVRDEAEPGGEGDPGPEPAGTPSPSGEADGDCAPEDAAPSSGGAPRQDAAREVPGSEAARPEQEPPVAEPVPVCTIFSQRAPPASGDGFEPQMVKSPSFGGASEASARTPPQVVQPSPSLSTFFGDTAASHSLASDFFDSFTTSAFISVSNPGAGSPAPASPPPLAVPGTEGRPEPVAMRGPQAAAPPASPEPFAHIQAVFAGSDDPFATALSMSEMDRRNDAWLPGEATRGVLRAVATQQRGAVFVDKENLTMPGLRFDNIQGDAVKDLMLRFLGEKAAAKRQVLNADSVEQSFVGLKQLISCRNWRAAVDLCGRLLTAHGQGYGKSGLLTSHTTDSLQLWFVRLALLVKLGLFQNAEMEFEPFGNLDQPDLYYEYYPHVYPGRRGSMVPFSMRILHAELQQYLGNPQESLDRLHKVKTVCSKILANLEQGLAEDGGMSSVTQEGRQASIRLWRSRLGRVMYSMANCLLLMKDYVLAVEAYHSVIKYYPEQEPQLLSGIGRISLQIGDIKTAEKYFQDVEKVTQKLDGLQGKIMVLMNSAFLHLGQNNFAEAHRFFTEILRMDPRNAVANNNAAVCLLYLGKLKDSLRQLEAMVQQDPRHYLHESVLFNLTTMYELESSRSMQKKQALLEAVAGKEGDSFNTQCLKLA

SEQ ID NO: 89419 - protein, 735 aa, Homo sapiens; identical to SEQ ID NO: 89418
  Payload ID: 17913
  Gene Name: trafficking protein particle complex 12
  Uniprot ID: Q8WVT3
  ENSP ID: ENSP00000371544

SEQ ID NO: 89420 - protein, 122 aa, Homo sapiens
  Payload ID: 17913
  Gene Name: trafficking protein particle complex 12
  ENSP ID: ENSP00000395420
  MOD_RES (1)..(1): Any amino acid
XHRPDFPAGTCARAFLHLGQNNFAEAHRFFTEILRMDPRNAVANNNAAVCLLYLGKLKDSLRQLEAMVQQDPRHYLHESVLFNLTTMYELESSRSMQKKQALLEAVAGKEGDSFNTQCLKLA

SEQ ID NO: 89421 - protein, 109 aa, Homo sapiens
  Payload ID: 17913
  Gene Name: trafficking protein particle complex 12
  ENSP ID: ENSP00000396407
  MOD_RES (1)..(1): Any amino acid
XEKYFQDVEKVTQKLDGLQGKIMVLMNSAFLHLGQNNFAEAHRFFTEILRMDPRNAVQMLSASHPTGKEPSPKDAEEHPEGHRDSAEPGPARPMVPQRAPPGPALCAQP

SEQ ID NO: 89422 - protein, 234 aa, Homo sapiens
  Payload ID: 17913
  Gene Name: trafficking protein particle complex 12
  ENSP ID: ENSP00000396592
KVKTVCSKILANLEQGLAEDGGMSSVTQEGRQASIRLWRSRLGRVMYSMANCLLLMKDYVLAVEAYHSVIKYYPEQEPQLLSGIGRISLQQIGDIKTAEKYFQDVEKVTQKLDGLQGKIMVLMNSAFLHLGQNNFAEAHRFFTEILRMDPRNAVANNNAAVCLLYLGKLKDSLRQLEAMVQQDPRHYLHESVLFNLTTMYELESSRSMQKKQALLEAVAGKEGDSFNTQCLKLA

SEQ ID NO: 89423 - protein, 63 aa, Homo sapiens
  Payload ID: 17913
  Gene Name: trafficking protein particle complex 12
  ENSP ID: ENSP00000399010
  MOD_RES (1)..(1): Any amino acid
XLYYEYYPHVYPGRRGSMVPFSMRILHAELQQYLGNPQESLDRLHKVKTVCSKQHGYSWRPLS

SEQ ID NO: 89424 - protein, 212 aa, Homo sapiens
  Payload ID: 17913
  Gene Name: trafficking protein particle complex 12
  ENSP ID: ENSP00000399909
  MOD_RES (1)..(1): Any amino acid
XCRNWRAAVDLCGRLLTAHGQGYGKSGLLTSHTTDSLQLWFVRLALLVKLGLFQNAEMEFEPFGNLDQPDLYYEYYPHVYPGRRGSMVPFSMRILHAELQQYLGNPQESLDRLHKVKTVCSKILANLEQGLAEDGGMSSVTQEGRQASIRLWRSRLGRVMYSMANCLLLMKDYVLAVEAYHSVIKYYPEQEPQLLSGIGRISLQRVPSPRAE

SEQ ID NO: 89425 - protein, 36 aa, Homo sapiens
  Payload ID: 17913
  Gene Name: trafficking protein particle complex 12
  ENSP ID: ENSP00000401013
MEFEPFGNLDQPDLYYEYYPHVYPGRRGSMVPFSMR

SEQ ID NO: 89426 - protein, 222 aa, Homo sapiens
  Payload ID: 17913
  Gene Name: trafficking protein particle complex 12
  ENSP ID: ENSP00000405626
  MOD_RES (1)..(1): Any amino acid
XPASGDGFEPQMVKSPSFGGASEASARTPPQVVQPSPSLSTFFGDTAASHSLASDFFDSFTTSAFISVSNPGAGSPAPASPPPLAVPGTEGRPEPVAMRGPQAAAPPASPEPFAHIQAVFAGSDDPFATALSMSEMDRRNDAWLPGEATRGVLRAVATQQRGAVFVDKENLTMPGLRFDNIQGDAVKDLMLRFLGEKAAAKRQVLNADSVEQSFVGLKQLIR

SEQ ID NO: 89427 - protein, 55 aa, Homo sapiens
  Payload ID: 17913
  Gene Name: trafficking protein particle complex 12
  ENSP ID: ENSP00000406497
MYSMANCLLLMKLASMHIRTRRGSAHDGKEHAAASATFRLAEIRLQKSLLVAEWL

SEQ ID NO: 89428 - protein, 192 aa, Homo sapiens
  Payload ID: 17913
  Gene Name: trafficking protein particle complex 12
  ENSP ID: ENSP00000409960
MLRFLGEKAAAKRQVLNADSVEQSFVGLKQLISCRNWRAAVDLCGRLLTAHGQGYGKSGLLTSHTTDSLQLWFVRLALLVKLGLFQNAEMEFEPFGNLDQPDLYYEYYPHVYPGRRGSMVPFSMRILHAELQQYLGNPQESLDRLHKVKTVCSKILANLEQGLAEDGGMSSVTQEGRQASIRLWRSRLGRVM

SEQ ID NO: 89429 - protein, 386 aa, Homo sapiens
  Payload ID: 17913
  Gene Name: trafficking protein particle complex 12
  ENSP ID: ENSP00000481735
GDAVKDLMLRFLGEKAAAKRQVLNADSVEQSFVGLKQLISCRNWRAAVDLCGRLLTAHGQGYGKSGLLTSHTTDSLQLWFVRLALLVKLGLFQNAEMEFEPFGNLDQPDLYYEYYPHVYPGRRGSMVPFSMRILHAELQQYLGNPQESLDRLHKVKTVCSKILANLEQGLAEDGGMSSVTQEGRQASIRLWRSRLGRVMYSMANCLLLMKDYVLAVEAYHSVIKYYPEQEPQLLSGIGRISLQIGDIKTAEKYFQDVEKVTQKLDGLQGKIMVLMNSAFLHLGQNNFAEAHRFFTEILRMDPRNAVANNNAAVCLLYLGKLKDSLRQLEAMVQQDPRHYLHESVLFNLTTMYELESSRSMQKKQALLEAVAGKEGDSFNTQCLKLA

SEQ ID NO: 89430 - protein, 364 aa, Homo sapiens
  Payload ID: 17913
  Gene Name: trafficking protein particle complex 12
  ENSP ID: ENSP00000486221
GDAVKDLMLRFLGEKAAAKRQVLNADSVEQSFVGLKQLISCRNWRAAVDLCGRLLTAHGQGYGKSGLLTSHTTDSLQLWFVRLALLVKLGLFQNAEMEFEPFGNLDQPDLYYEYYPHVYPGRRGSMVPFSMRILHAELQQYLGNPQESLDRLHKVKTVCSKILANLEQGLAEDGGMSSVTQEGRQGCSYLVASIRLWRSRLGRVMYSMANCLLLMKDYVLAVEAYHSVIKYYPEQEPQLLSGIGRISLQIGDIKTAEKYFQDVEKVTQKLDGLQGKIMVLMNSAFLHLGQNNFAEAHRFFTEILRMDPRNAVQMLSASHPTGKEPSPKDAEEHPEGHRDSAEPGPARPMVPQRAPPGPALCAQP

SEQ ID NO: 89431 - protein, 379 aa, Homo sapiens
  Payload ID: 17913
  Gene Name: trafficking protein particle complex 12
  ENSP ID: ENSP00000488507
MLRFLGEKAAAKRQVLNADSVEQSFVGLKQLISCRNWRAAVDLCGRLLTAHGQGYGKSGLLTSHTTDSLQLWFVRLALLVKLGLFQNAEMEFEPFGNLDQPDLYYEYYPHVYPGRRGSMVPFSMRILHAELQQYLGNPQESLDRLHKVKTVCSKILANLEQGLAEDGGMSSVTQEGRQASIRLWRSRLGRVMYSMANCLLLMKDYVLAVEAYHSVIKYYPEQEPQLLSGIGRISLQIGDIKTAEKYFQDVEKVTQKLDGLQGKIMVLMNSAFLHLGQNNFAEAHRFFTEILRMDPRNAVANNNAAVCLLYLGKLKDSLRQLEAMVQQDPRHYLHESVLFNLTTMYELESSRSMQKKQALLEAVAGKEGDSFNTQCLKLA

SEQ ID NO: 89432 - protein, 411 aa, Homo sapiens
  Payload ID: 17914
  Gene Name: trafficking protein particle complex 13
  Uniprot ID: A5PLN9
  ENSP ID: ENSP00000231526
MEVNPPKQEHLLALKVMRLTKPTLFTNIPVTCEEKDLPGDLFNQLMRDDPSTVNGAEVLMLGEMLTLPQNFGNIFLGETFSSYISVHNDSNQVVKDILVKADLQTSSQRLNLSASNAAVAELKPDCCIDDVIHHEVKEIGTHILVCAVSYTTQAGEKMYFRKFFKFQVLKPLDVKTKFYNAETDEVFLEAQIQNMTTSPMFMEKVSLEPSIMYNVTELNSVSQAGECVSTFGSRAYLQPMDTRQYLYCLKPKNEFAEKAGIIKGVTVIGKLDIVWKTNLGERGRLQTSQLQRMAPGYGDVRLSLEAIPDTVNLEEPFHITCKITNCSERTMDLVLEMCNTNSIHWCGISGRQLGKLHPSSSLCLALTLLSSVQGLQSISGLRLTDTFLKRTYEYDDIAQVCVVSSAIKVES

SEQ ID NO: 89433 - protein, 417 aa, Homo sapiens
  Payload ID: 17914
  Gene Name: trafficking protein particle complex 13
  Uniprot ID: A5PLN9
  ENSP ID: ENSP00000382367
MEVNPPKQEHLLALKVMRLTKPTLFTNIPVTCEEKDLPGDLFNQLMRDDPSTVNGAEVLMLGEMLTLPQNFGNIFLGETFSSYISVHNDSNQVVKDILVKADLQTSSQRLNLSASNAAVAELKPDCCIDDVIHHEVKEIGTHILVCAVSYTTQAGEKMYFRKFFKFQVLKPLDVKTKFYNAESDLSSVTDEVFLEAQIQNMTTSPMFMEKVSLEPSIMYNVTELNSVSQAGECVSTFGSRAYLQPMDTRQYLYCLKPKNEFAEKAGIIKGVTVIGKLDIVWKTNLGERGRLQTSQLQRMAPGYGDVRLSLEAIPDTVNLEEPFHITCKITNCSERTMDLVLEMCNTNSIHWCGISGRQLGKLHPSSSLCLALTLLSSVQGLQSISGLRLTDTFLKRTYEYDDIAQVCVVSSAIKVES

SEQ ID NO: 89434 - protein, 418 aa, Homo sapiens
  Payload ID: 17914
  Gene Name: trafficking protein particle complex 13
  Uniprot ID: A5PLN9
  ENSP ID: ENSP00000409231
MEVNPPKQEHLLALKVMRLTKPTLFTNIPVTCEEKDLPGDLFNQLMRDDPSTVNGAEVLMLGEMLTLPQNFGNIFLGETFSSYISVHNDSNQVVKDILVKADLQTSSQRLNLSASNAAVAELKPDCCIDDVIHHEVKEIGTHILVCAVSYTTQAGEKMYFRKFFKFQVLKPLDVKTKFYNAESDLSSVTDEVFLEAQIQNMTTSPMFMEKVSLEPSIMYNVTELNSVSQAGECVSTFGSRAYLQPMDTRQYLYCLKPKNEFAEKAGIIKGVTVIGKLDIVWKTNLGERGRLQTSQLQRMAPGYGDVRLSLEAIPDTVNLEEPFHITCKITNCSSERTMDLVLEMCNTNSIHWCGISGRQLGKLHPSSSLCLALTLLSSVQGLQSISGLRLTDTFLKRTYEYDDIAQVCVVSSAIKVES

SEQ ID NO: 89435 - protein, 412 aa, Homo sapiens
  Payload ID: 17914
  Gene Name: trafficking protein particle complex 13
  Uniprot ID: A5PLN9
  ENSP ID: ENSP00000423405
MEVNPPKQEHLLALKVMRLTKPTLFTNIPVTCEEKDLPGDLFNQLMRDDPSTVNGAEVLMLGEMLTLPQNFGNIFLGETFSSYISVHNDSNQVVKDILVKADLQTSSQRLNLSASNAAVAELKPDCCIDDVIHHEVKEIGTHILVCAVSYTTQAGEKMYFRKFFKFQVLKPLDVKTKFYNAETDEVFLEAQIQNMTTSPMFMEKVSLEPSIMYNVTELNSVSQAGECVSTFGSRAYLQPMDTRQYLYCLKPKNEFAEKAGIIKGVTVIGKLDIVWKTNLGERGRLQTSQLQRMAPGYGDVRLSLEAIPDTVNLEEPFHITCKITNCSSERTMDLVLEMCNTNSIHWCGISGRQLGKLHPSSSLCLALTLLSSVQGLQSISGLRLTDTFLKRTYEYDDIAQVCVVSSAIKVES

SEQ ID NO: 89436 - protein, 81 aa, Homo sapiens
  Payload ID: 17914
  Gene Name: trafficking protein particle complex 13
  ENSP ID: ENSP00000424343
MEVNPPKQEHLLALKVMRLTKPTLFTNIPVTCEEKDLPGDLFNQLMRDDPSTVNGAEVLMLGEMLTLPQNFGLIFRQVLSV

SEQ ID NO: 89437 - protein, 53 aa, Homo sapiens
  Payload ID: 17914
  Gene Name: trafficking protein particle complex 13
  ENSP ID: ENSP00000429396
  MOD_RES (1)..(1): Any amino acid
XVTCEEKDLPGDLFNQLMRDDPSTVNGAEVLMLGEMLTLPQNFGLIFRQVLSV

SEQ ID NO: 89438 - protein, 140 aa, Homo sapiens [sequence omitted]

SEQ ID NO: 89439 - protein, 140 aa, Homo sapiens [sequence omitted]

SEQ ID NO: 89440 - protein, 174 aa, Homo sapiens
  Payload ID: 17915
  Gene Name: trafficking protein particle complex 2
  Uniprot ID: P0DI81
  ENSP ID: ENSP00000392495
MSSWKQDRSGLRSTELNVLEYQPLCAVRSHILKTMSGSFYFVIVGHHDNPVFEMEFLPAGKAESKDDHRHLNQFIAHAALDLVDENMWLSNNMYLKTVDKFNEWFVSAFVTAGHMRFIMLHDIRQEDGIKNFFTDVYDLYIKFSMNPFYEPNSPIRSSAFDRKVQFLGKKHLLS

SEQ ID NO: 89441 - protein, 74 aa, Homo sapiens
  Payload ID: 17915
  Gene Name: trafficking protein particle complex 2
  ENSP ID: ENSP00000428900
MSGSFYFVIVGHHDNPVFEMEFLPAGKAESKDDHRHLNQFIAHAALDLVDENMWLSNNMYLKTVDKFNEWFVSA

SEQ ID NO: 89442 - protein, 113 aa, Homo sapiens
  Payload ID: 17915
  Gene Name: trafficking protein particle complex 2
  ENSP ID: ENSP00000430725
MSGSFYFVIVGHHDNPVFEMEFLPAGKAESKDDHRHLNQFIAHAALDLVDENMWLSNNMYLKTVDKFNEWFVSAFVTAGHMRFIMLHDIRQEDGIKNFFTDVYDLYIKVWYVL

SEQ ID NO: 89443 - protein, 140 aa, Homo sapiens
  Payload ID: 17916
  Gene Name: trafficking protein particle complex 2-like
  Uniprot ID: Q9UL33
  ENSP ID: ENSP00000301021
MAVCIAVIAKENYPLYIRSTPTENELKFHYMVHTSLDVVDEKISAMGKALVDQRELYLGLLYPTEDYKVYGYVTNSKVKFVMVVDSSNTALRDNEIRSMFRKLHNSYTDVMCNPFYNPGDRIQSSRAFDNMVTSMMIQVC

SEQ ID NO: 89444 - protein, 75 aa, Homo sapiens
  Payload ID: 17916
  Gene Name: trafficking protein particle complex 2-like
  ENSP ID: ENSP00000454927
MAVCIAVIAKENYPLYIRSTPTENELKFHYMVHTSLDVVDEKISAMGKALVDQRELYLGLLYPTEDYKLTFRARH

SEQ ID NO: 89445 - protein, 241 aa, Homo sapiens
  Payload ID: 17916
  Gene Name: trafficking protein particle complex 2-like
  ENSP ID: ENSP00000455100
MAVCIAVIAKENYPLYIRSTPTENELKFHYMVHTSLDVVDEKISAMGKALVDQRELYLGLLYPTEDYKVYGYVTNSKVKFVMVVDSSNTALRDNEIRSMFRKLHNSYTDVMCNPFYNPGDRIQSRWALLSVSCHLLSVGHALPFWLPKCNHLENKGGKIFLSYEHHPPRAEVLKPQSPVSPHQLLHRSPAHKVDRVCVVWGVELAHLASQVCPVGTWGTCRTQGQAHGQWLSGITRPFVAT

SEQ ID NO: 89446 - protein, 109 aa, Homo sapiens
  Payload ID: 17916
  Gene Name: trafficking protein particle complex 2-like
  ENSP ID: ENSP00000455235
MAVCIAVIAKENYPLYIRSTPTENELKFHYMVHTSLDVVDEKISAMGKALVDQRELYLGLLYPTEDYKMFRKLHNSYTDVMCNPFYNPGDRIQSRAFDNMVTSMMIQVC

SEQ ID NO: 89447 - protein, 37 aa, Homo sapiens
  Payload ID: 17916
  Gene Name: trafficking protein particle complex 2-like
  ENSP ID: ENSP00000455273
MAVCIAVIAKEVRTRGVGRPGSHHPRLSAFFLLLPWA

SEQ ID NO: 89448 - protein, 75 aa, Homo sapiens; identical to SEQ ID NO: 89444
  Payload ID: 17916
  Gene Name: trafficking protein particle complex 2-like
  ENSP ID: ENSP00000455392

SEQ ID NO: 89449 - protein, 59 aa, Homo sapiens
  Payload ID: 17916
  Gene Name: trafficking protein particle complex 2-like
  ENSP ID: ENSP00000455447
MVVDSSNTALRDNEIRSMFRKLHNSYTDVMCNPFYNPGDRIQSSRAFDNMVTSMMIQVC

SEQ ID NO: 89450 - protein, 129 aa, Homo sapiens
  Payload ID: 17916
  Gene Name: trafficking protein particle complex 2-like
  ENSP ID: ENSP00000455892
MRRSPQWGRPWSTRGSCTWACSTPRRTTRLPHFSKVRAHRGPSTGSPCVTSAFPNQLCRYGYVTNSKVKFVMVVDSSNTALRDNEIRSMFRKLHNSYTDVMCNPFYNPGDRIQSRAFDNMVTSMMIQVC

SEQ ID NO: 89451 - protein, 109 aa, Homo sapiens
  Payload ID: 17916
  Gene Name: trafficking protein particle complex 2-like
  ENSP ID: ENSP00000457684
MVHTSLDVVDEKISAMGKALVDQRELYLGLLYPTEDYKVYGYVTNSKVKFVMVVDSSNTALRDNEIRSMFRKLHNSYTDVMCNPFYNPGDRIQSRAFDNMVTSMMIQVC

SEQ ID NO: 89452 - protein, 146 aa, Homo sapiens
  Payload ID: 17916
  Gene Name: trafficking protein particle complex 2-like
  ENSP ID: ENSP00000457728
MAVCIAVIAKENYPLYIRSTPTENELKFHYMVHTSLDVVDEKISAMGKALVDQRELYLGLLYPTEDYKVYGYVTNSKVKFVMVVDSSNTALRDNEIRSMFRKLHNSYTDVMCNPFYNPGDRIQSSGSVSLSRAFDNMVTSMMIQVC

SEQ ID NO: 89453 - protein, 75 aa, Homo sapiens; identical to SEQ ID NO: 89444
  Payload ID: 17916
  Gene Name: trafficking protein particle complex 2-like
  ENSP ID: ENSP00000487584

SEQ ID NO: 89454 - protein, 118 aa, Homo sapiens
  Payload ID: 17917
  Gene Name: trafficking protein particle complex 3
  ENSP ID: ENSP00000362253
MSRQANRGTESKKMSSELFTLTYGALVTQLCKDYENDEDVNKQLDKMGFNIGVRLIEDFLARSNVGRCHDFRETADVIAKERKMFLGKQNKTKRQAKLYDAVKERGAASCTDASPLLS

SEQ ID NO: 89455 - protein, 134 aa, Homo sapiens
  Payload ID: 17917
  Gene Name: trafficking protein particle complex 3
  Uniprot ID: O43617
  ENSP ID: ENSP00000362256
MGFNIGVRLIEDFLARSNVGRCHDFRETADVIAKVAFKMYLGITPSITNWSPAGDEFSLILENNPLVDFVELPDNHSSLIYSNLLCGVLRGALEMVQMAVEAKFVQDTLKGDGVTEIRMRFIRRIEDNLPAGEE

SEQ ID NO: 89456 - protein, 134 aa, Homo sapiens; identical to SEQ ID NO: 89455
  Payload ID: 17917
  Gene Name: trafficking protein particle complex 3
  Uniprot ID: O43617
  ENSP ID: ENSP00000362257

SEQ ID NO: 89457 - protein, 180 aa, Homo sapiens
  Payload ID: 17917
  Gene Name: trafficking protein particle complex 3
  Uniprot ID: O43617
  ENSP ID: ENSP00000362261
MSRQANRGTESKKMSSELFTLTYGALVTQLCKDYENDEDVNKQLDKMGFNIGVRLIEDFLARSNVGRCHDFRETADVIAKVAFKMYLGITPSITNWSPAGDEFSLILENNPLVDFVELPDNHSSLIYSNLLCGVLRGALEMVQMAVEAKFVQDTLKGDGVTEIRMRFIRRIEDNLPAGEE

SEQ ID NO: 89458 - protein, 188 aa, Homo sapiens
  Payload ID: 17917
  Gene Name: trafficking protein particle complex 3
  ENSP ID: ENSP00000480332
MSRQANRGTESKKMSSELFTLTYGALVTQLCKDYENDEDVNKQLDKILFSNFLPRGFNIGVRLIEDFLARSNVGRCHDFRETADVIAKVAFKMYLGITPSITNWSPAGDEFSLILENNPLVDFVELPDNHSSLIYSNLLCGVLRGALEMVQMAVEAKFVQDTLKGDGVTEIRMRFIRRIEDNLPAGEE

SEQ ID NO: 89459 - protein, 134 aa, Homo sapiens; identical to SEQ ID NO: 89455
  Payload ID: 17917
  Gene Name: trafficking protein particle complex 3
  Uniprot ID: O43617
  ENSP ID: ENSP00000480648

SEQ ID NO: 89460 - protein, 114 aa, Homo sapiens
  Payload ID: 17917
  Gene Name: trafficking protein particle complex 3
  ENSP ID: ENSP00000482052
MSRQANRGTESKKMVAFKMYLGITPSITNWSPAGDEFSLILENNPLVDFVELPDNHSSLIYSNLLCGVLRGALEMVQMAVEAKFVQDTLKGDGVTEIRMRFIRRIEDNLPAGEE

SEQ ID NO: 89461 - protein, 97 aa, Homo sapiens
  Payload ID: 17918
  Gene Name: trafficking protein particle complex 3-like
  Uniprot ID: Q5T215
  ENSP ID: ENSP00000348445
MYLGITPSVTCNNSSKNEFSLILEKNPLVEFVEELPAGRSSLCYCNLLCGIIRGALEMVHLAADVTFLQDRLKGDSVTEIGITFLKKRDEKKYRGKK

SEQ ID NO: 89462 - protein, 181 aa, Homo sapiens
  Payload ID: 17918
  Gene Name: trafficking protein particle complex 3-like
  Uniprot ID: Q5T215
  ENSP ID: ENSP00000357591
MSRPAHRRPEYHKINKDLFVLTYGALVAQLCKDYEKDEDVNQYLDKMGYGIGTRLVEDFLARSCVGRCHSYSEIIDIIAQVAFKMYLGITPSVTCNNSSKNEFSLILEKNPLVEFVEELPAGRSSLCYCNLLCGIIRGALEMVHLAADVTFLQDRLKGDSVTEIGITFLKKRDEKKYRGKK

SEQ ID NO: 89463 - protein, 167 aa, Homo sapiens
  Payload ID: 17918
  Gene Name: trafficking protein particle complex 3-like
  ENSP ID: ENSP00000395769
NKDLFVLTYGALVAQLCKDYEKDEDVNQYLDKMGYGIGTRLVEDFLARSCVGRCHSYSEIIDIIAQVAFKMYLGITPSVTCNNSSKNEFSLILEKNPLVEFVEELPAGRSSLCYCNLLCGIIRGALEMVHLAADVTFLQDRLKGDSVTEIGITFLKKRDEKKYRGKK

SEQ ID NO: 89464 - protein, 181 aa, Homo sapiens
  Payload ID: 17919
  Gene Name: trafficking protein particle complex 4
  ENSP ID: ENSP00000351896
MAIFSVYVVNKAGGLIYQLDSYAPRAEAEKTFSYPLDLLLKLHDERVLVAFGQRDGIRVGHAVLAINGMDVNGRYTADGKEVLEYLGNPANYPVSIRFGRPRLTSNEKLMLASMFHSLFAIGSQLSPEQGSSGIEMLETDTFKLHCYQTLTEMPIRCELFDQNLKLALEVAEKAGTFGPGS

SEQ ID NO: 89465 - protein, 165 aa, Homo sapiens
  Payload ID: 17919
  Gene Name: trafficking protein particle complex 4
  Uniprot ID: Q9Y296
  ENSP ID: ENSP00000405033
MAIFSVYVVNKAGGLIYQLDSYAPRAEAEKTFSYPLDLLLKLHDERVLVAFGQRDGIRVGHAVLAINGMDVNGRYTADGKEMLETDTFKLHCYQTLTGIKFVVLADPRQAGIDSLLRKIYEIYSDFALKNPFYSLEMPIRCELFDQNLKLALEVAEKAGTFGPGS

SEQ ID NO: 89466 - protein, 257 aa, Homo sapiens
  Payload ID: 17919
  Gene Name: trafficking protein particle complex 4
  ENSP ID: ENSP00000432920
MAIFSVYVVNKAGGLIYQLDSYAPRAEAEKTFSYPLDLLLKLHDERVLVAFGQRDGIRVGHAVLAINGMDVNGRYTADGKEVLEYLGNPANYPVSIRFGRPRLTSNEKLMLASMFHSLFAIGSQLSPEQGSSGIEMLETDTFKLHCYQTLTGIKFVVLADPRQAGIDSLLRKIYEIYSDFALKNPFYSLEMPIRACRGKATVGWCSGTWTLFTQPSWTLGPSWCGCFVGGRRQPCWPHKSLQPPRRLCSNCSAWQWC

SEQ ID NO: 89467 - protein, 117 aa, Homo sapiens
  Payload ID: 17919
  Gene Name: trafficking protein particle complex 4
  ENSP ID: ENSP00000433658
MAIFSVYVVNKAGGLIYQLDSYAPRAEAEKTFSYPLDLLLKLHDERVLVAFGQRDGIRVGHAVLAINGMDVNGRYTADGKEVLEYLGNPANYPVSIRFGRPRLTSNEKLMLASMFHS

SEQ ID NO: 89468 - protein, 126 aa, Homo sapiens
  Payload ID: 17919
  Gene Name: trafficking protein particle complex 4
  ENSP ID: ENSP00000435339
MAIFSVYVVNKAGGLIYQLDSYAPRAEAEKTFSYPLDLLLKLHDERVLVAFGQRDGIRGIKFVVLADPRQAGIDSLLRKIYEIYSDFALKNPFYSLEMPIRCELFDQNLKLALEVAEKAGTFGPGS

SEQ ID NO: 89469 - protein, 219 aa, Homo sapiens
  Payload ID: 17919
  Gene Name: trafficking protein particle complex 4
  Uniprot ID: Q9Y296
  ENSP ID: ENSP00000436005
MAIFSVYVVNKAGGLIYQLDSYAPRAEAEKTFSYPLDLLLKLHDERVLVAFGQRDGIRVGHAVLAINGMDVNGRYTADGKEVLEYLGNPANYPVSIRFGRPRLTSNEKLMLASMFHSLFAIGSQLSPEQGSSGIEMLETDTFKLHCYQTLTGIKFVVLADPRQAGIDSLLRKIYEIYSDFALKNPFYSLEMPIRCELFDQNLKLALEVAEKAGTFGPGS

SEQ ID NO: 89470 - protein, 126 aa, Homo sapiens
  Payload ID: 17919
  Gene Name: trafficking protein particle complex 4
  ENSP ID: ENSP00000436281
MAIFSVYVVNKAGGLIYQLDSYAPRAEAEKTFSYPLDLLLKLHDERVLVAFGQRDGIRVGHAVLAINGMDVNGRYTADGKEVLEYLGNPANYPVSIRFGRPRLTSNEKLMLASMFHSDQVCGSSRS

SEQ ID NO: 89471 - protein, 176 aa, Homo sapiens
  Payload ID: 17919
  Gene Name: trafficking protein particle complex 4
  ENSP ID: ENSP00000436827
MAIFSVYVVNKAGGLIYQLDSYAPRAEAEKTFSYPLDLLLKLHDERVLVAFGQRDGIRVGHAVLAINGMDVNGRLFAIGSQLSPEQGSSGIEMLETDTFKLHCYQTLTGIKFVVLADPRQAGIDSLLRKIYEIYSDFALKNPFYSLEMPIRCELFDQNLKLALEVAEKAGTFGPGS

SEQ ID NO: 89472 - protein, 181 aa, Homo sapiens; identical to SEQ ID NO: 89464
  Payload ID: 17919
  Gene Name: trafficking protein particle complex 4
  ENSP ID: ENSP00000485724

SEQ ID NO: 89473 - protein, 257 aa, Homo sapiens; identical to SEQ ID NO: 89466
  Payload ID: 17919
  Gene Name: trafficking protein particle complex 4
  ENSP ID: ENSP00000485730

SEQ ID NO: 89474 - protein, 126 aa, Homo sapiens; identical to SEQ ID NO: 89468
  Payload ID: 17919
  Gene Name: trafficking protein particle complex 4
  ENSP ID: ENSP00000486097

SEQ ID NO: 89475 - protein, 117 aa, Homo sapiens; identical to SEQ ID NO: 89467
  Payload ID: 17919
  Gene Name: trafficking protein particle complex 4
  ENSP ID: ENSP00000486303

SEQ ID NO: 89476 - protein, 165 aa, Homo sapiens; identical to SEQ ID NO: 89465
  Payload ID: 17919
  Gene Name: trafficking protein particle complex 4
  Uniprot ID: Q9Y296
  ENSP ID: ENSP00000486496

SEQ ID NO: 89477 - protein, 176 aa, Homo sapiens; identical to SEQ ID NO: 89471
  Payload ID: 17919
  Gene Name: trafficking protein particle complex 4
  ENSP ID: ENSP00000486853

SEQ ID NO: 89478 - protein, 219 aa, Homo sapiens; identical to SEQ ID NO: 89469
  Payload ID: 17919
  Gene Name: trafficking protein particle complex 4
  Uniprot ID: Q9Y296
  ENSP ID: ENSP00000487467

SEQ ID NO: 89479 - protein, 126 aa, Homo sapiens; identical to SEQ ID NO: 89470
  Payload ID: 17919
  Gene Name: trafficking protein particle complex 4
  ENSP ID: ENSP00000487585

SEQ ID NO: 89480 - protein, 188 aa, Homo sapiens
  Payload ID: 17920
  Gene Name: trafficking protein particle complex 5
  Uniprot ID: Q8IUR0
  ENSP ID: ENSP00000316990
MEARFTRGKSALLERALARPRTEVSLSAFALLFSELVQHCQSRVFSVAELQSRLAALGRQVGARVLDALVAREKGARRETKVLGALLFVKGAVWKALFGKEADKLEQANDDARTFYIIEREPLINTYISVPKENSTLNCASFTAGIVEAVLTHSGFPAKVTAHWHKGTTLMIKFEEAVIARDRALEGR

SEQ ID NO: 89481 - protein, 188 aa, Homo sapiens; identical to SEQ ID NO: 89480
  Payload ID: 17920
  Gene Name: trafficking protein particle complex 5
  Uniprot ID: Q8IUR0
  ENSP ID: ENSP00000399025

SEQ ID NO: 89482 - protein, 188 aa, Homo sapiens; identical to SEQ ID NO: 89480
  Payload ID: 17920
  Gene Name: trafficking protein particle complex 5
  Uniprot ID: Q8IUR0
  ENSP ID: ENSP00000470262

SEQ ID NO: 89483 - protein, 121 aa, Homo sapiens
  Payload ID: 17920
  Gene Name: trafficking protein particle complex 5
  ENSP ID: ENSP00000470703
MEARFTRGKSALLERALARPRTEGAVWKALFGKEADKLEQANDDARTFYIIEREPLINTYISVPKENSTLNCASFTAGIVEAVLTHSGFPAKVTAHWHKGTTLMIKFEEAVIARDRALEGR

SEQ ID NO: 89484 - protein, 173 aa, Homo sapiens
  Payload ID: 17921
  Gene Name: trafficking protein particle complex 6A
  Uniprot ID: O75865
  ENSP ID: ENSP00000006275
MADTVLFEFLHTEMVAELWAHDPDPGPGVSAGLRGEEAGATKGQKMSLSVLEGMGFRVGQALGERLPRETLAFREELDVLKFLCKDLWVAVFQKQMDSLRTNHQGTYVLQDNSFPLLLPMASGLQYLEEAPKFLAFTCGLLRGALYTLGIESVVTASVAALPVCKFQVVIPKS

SEQ ID NO: 89485 - protein, 127 aa, Homo sapiens
  Payload ID: 17921
  Gene Name: trafficking protein particle complex 6A
  Uniprot ID: O75865
  ENSP ID: ENSP00000468182
MADTVLFEFLHTEMVAELWAHDPDPGPGVSAGLRGEEAGATKAAPGDAGLQGGAGCPQVLVQRPVGGGVPEADGQPAHQSPGDLRPARQQLPPPPPDGLWPAVSGGSTQVPGLHLRPPARRPLYPGH

SEQ ID NO: 89486 - protein, 113 aa, Homo sapiens
  Payload ID: 17921
  Gene Name: trafficking protein particle complex 6A
  Uniprot ID: O75865
  ENSP ID: ENSP00000468363
MADTVLFEFLHTEMVAELWAHDPDPGPGAAPGDAGLQGGAGCPQVLVQRPVGGGVPEADGQPAHQSPGDLRPARQQLPPPPPDGLWPAVSGGSTQVPGLHLRPPARRPLYPGH

SEQ ID NO: 89487 - protein, 159 aa, Homo sapiens
  Payload ID: 17921
  Gene Name: trafficking protein particle complex 6A
  Uniprot ID: O75865
  ENSP ID: ENSP00000468612
MADTVLFEFLHTEMVAELWAHDPDPGPGGQKMSLSVLEGMGFRVGQALGERLPRETLAFREELDVLKFLCKDLWVAVFQKQMDSLRTNHQGTYVLQDNSFPLLLPMASGLQYLEEAPKFLAFTCGLLRGALYTLGIESVVTASVAALPVCKFQVVIPKS

SEQ ID NO: 89488 - protein, 158 aa, Homo sapiens
  Payload ID: 17922
  Gene Name: trafficking protein particle complex 6B
  Uniprot ID: Q86SZ2
  ENSP ID: ENSP00000330289
MADEALFLLLHNEMVSGVYKSAEQGEVENGRCITKLENMGFRVGQGLIERFTKDTARFKDELDIMKFICKDFWTTVFKKQIDNLRTNHQGIYVLQDNKFRLLTQMSAGKQYLEHASKYLAFTCGLIRGGLSNLGIKSIVTAEVSSMPACKFQVMIQKL

SEQ ID NO: 89489 - protein, 130 aa, Homo sapiens
  Payload ID: 17922
  Gene Name: trafficking protein particle complex 6B
  Uniprot ID: Q86SZ2
  ENSP ID: ENSP00000335171
MADEALFLLLHNEMVSGVYKSAEQGEVENGRCITKLENMGFRVGQGLIERFTKDTARFKDELDIMKFICKDFWTTVFKKQIDNLRTNHQYLAFTCGLIRGGLSNLGIKSIVTAEVSSMPACKFQVMIQKL

SEQ ID NO: 89490 - protein, 102 aa, Homo sapiens
  Payload ID: 17922
  Gene Name: trafficking protein particle complex 6B
  ENSP ID: ENSP00000450670
MADEALFLLLHNEMVSGVYKSAEQGEENGRCITKLENMGFRVGQGLIERFTKDTARFKDELDIMKFICKDFWTTVFKKQIDNLRTNHQYLAFTCGLIRGGLS

SEQ ID NO: 89491 - protein, 50 aa, Homo sapiens
  Payload ID: 17922
  Gene Name: trafficking protein particle complex 6B
  ENSP ID: ENSP00000451711
MADEALFLLLHNEMVSGVYKSAEQGEVENGRCITKLENMGFRVGQGLIER

SEQ ID NO: 89492 - protein, 50 aa, Homo sapiens; identical to SEQ ID NO: 89491
  Payload ID: 17922
  Gene Name: trafficking protein particle complex 6B
  ENSP ID: ENSP00000452236

SEQ ID NO: 89493 - protein, 1435 aa, Homo sapiens
  Payload ID: 17923
  Gene Name: trafficking protein particle complex 8
  Uniprot ID: Q9Y2L5
  ENSP ID: ENSP00000283351
MAQCVQSVQELIPDSFVPCVAALCSDEAERLTRLNHLSFAELLKPFSRLTSEVHMRDPNNQLHVIKNLKIAVSNIVTQPPQPGAIRKLLNDVVSGSQPAEGLVANVITAGDYDLNISATTPWFESYRETFLQSMPALDHEFLNHYLACMLVASSSEAEPVEQFSKLSQEQHRIQHNSDYSYPKWFIPNTLKYYVLLHDVSAGDEQRAESIYEEMKQKYGTQGCYLLKINSRTSNRASDEQIPDPWSQYLQKNSIQNQESYEDGPCTITSNKNSDNNLLSLDGLDNEVKDGLPNNFRAHPLQLEQSSDPSNSIDGPDHLRSASSLHETKKGNTGIIHGACLTLTDHDRIRQFIQEFTFRGLLPHIEKTIRQLNDQLISRKGLSRSLFSATKKWFSGSKVPEKSINDLKNTSGLLYPPEAPELQIRKMADLCFLVQHYDLAYSCYHTAKKDFLNDQAMLYAAGALEMAAVSAFLQPGAPRPYPAHYMDTAIQTYRDICKNMVLAERCVLLSAELLKSQSKYSEAAALLIRLTSEDSDLRSALLLEQAAHCFINMKSPMVRKYAFHMILAGHRFSKAGQKKHALRCYCQAMQVYKGKGWSLAEDHINFTIGRQSYTLRQLDNAVSAFRHILINESKQSAAQQGAFLREYLYVYKNVSQLSPDGPLPQLPLPYINSSATRVFFGHDRRPADGEKQAATHVSLDQEYDSESSQQWRELEEQVVSVVNKGVIPSNFHPTQYCLNSYSDNSRFPLAVVEEPITVEVAFRNPLKVLLLLTDLSLLWKFHPKDFSGKDNEEVKQLVTSEPEMIGAEVISEFLINGEESKVARLKLFPHHIGELHILGVVYNLGTIQGSMTVDGIGALPGCHTGKYSLSMSVRGKQDLEIQGPRLNNTKEEKTSVKYGPDRRLDPIITEEMPLLEVFFIHFPTGLLCGEIRKAYVEFVNVSKCPLTGLKVVSKRPEFFTFGGNTAVLTPLSPSASENCSAYKTVVTDATSVCTALISSASSVDFGIGTGSQPEVIPVPLPDTVLLPGASVQLPMWLRGPDEEGVHEINFLFYYESVKKQPKIRHRILRHTAIICTSRSLNVRATVCRSNSLENEEGRGGNMLVFVDVENTNTSEAGVKEFHIVQVSSSSKHWKLQKSVNLSENKDTKLASREKGKFCFKAIRCEKEEAATQSSEKYTFADIIFGNEQIISSASPCADFFYRSLSSELKKPQAHLPVHTEKQSTEDAVRLIQKCSEVDLNIVILWKAYVVEDSKQLILEGQHHVILRTIGKEAFSYPQKQEPPEMELLKFFRPENITVSSRPSVEQLSSLIKTSLHYPESFNHPFHQKSLCLVPVTLLLSNCSKADVDVIVDLRHKTTSPEALEIHGSFTWLGQTQYKLQLKSQEIHSLQLKACFVHTGVYNLGTPRVFAKLSDQVTVFETSQQNSMPALIIISNV

SEQ ID NO: 89494 - protein, 926 aa, Homo sapiens
  Payload ID: 17923
  Gene Name: trafficking protein particle complex 8
  ENSP ID: ENSP00000462550
MAQCVQSVQELIPDSFVPCVAALCSDEAERLTRLNHLSFAELLKPFSRLTSEVHMRDPNNQLHVIKNLKIAVSNIVTQPPQPGAIRKLLNDVVSGSQPAEGLVANVITAGDYDLNISATTPWFESYRETFLQSMPALDHEFLNHYLACMLVASSSEAEPVEQFSKLSQEQHRIQHNSDYSYPKWFIPNTLKYYVLLHDVSAGDEQRAESIYEEMKQKYGTQGCYLLKINSRTSNRASDEQIPDPWSQYLQKNSIQNQESYEDGPCTITSNKNSDNNLLSLDGLDNEVKDGLPNNFRAHPLQLEQSSDPSNSIDGPDHLRSASSLHETKKGNTGIIHGACLTLTDHDRIRQFIQEFTFRGLLPHIEKTIRQLNDQLISRKGLSRSLFSATKKWFSGSKVPEKSINDLKNTSGLLYPPEAPELQIRKMADLCFLVQHYDLAYSCYHTAKKDFLNDQAMLYAAGALEMAAVSAFLQPGAPRPYPAHYMDTAIQTYRDICKNMVLAERCVLLSAELLKSQSKYSEAAALLIRLTSEDSDLRSALLLEQAAHCFINMKSPMVRKYAFHMILAGHRFSKAGQKKHALRCYCQAMQVYKGKGWSLAEDHINFTIGRQSYTLRQLDNAVSAFRHILINESKQSAAQQGAFLREYLYVYKNVSQLSPDGPLPQLPLPYINSSATRVFFGHDRRPADGEKQAATHVSLDQEYDSESSQQWRELEEQVVSVVNKGVIPSNFHPTQYCLNSYSDNSRFPLAVVEEPITVEVAFRNPLKVLLLLTDLSLLWKFHPKDFSGKDNEEVKQLVTSEPEMIGAEVISEFLINGEESKVARLKLFPHHIGELHILGVVYNLGTIQGSMTVDGIGALPGCHTGKYSLSMSVRGKQDLEIQGPRLNNTKEEKTSVKYGPDRRLDPIITEEMPLLETLALAQEVNQR

SEQ ID NO: 89495 - protein, 1381 aa, Homo sapiens
  Payload ID: 17923
  Gene Name: trafficking protein particle complex 8
  ENSP ID: ENSP00000463764
MRDPNNQLHVIKNLKIAVSNIVTQPPQPGAIRKLLNDVVSGSQPAEGLVANVITAGDYDLNISATTPWFESYRETFLQSMPALDHEFLNHYLACMLVASSSEAEPVEQFSKLSQEQHRIQHNSDYSYPKWFIPNTLKYYVLLHDVSAGDEQRAESIYEEMKQKYGTQGCYLLKINSRTSNRASDEQIPDPWSQYLQKNSIQNQESYEDGPCTITSNKNSDNNLLSLDGLDNEVKDGLPNNFRAHPLQLEQSSDPSNSIDGPDHLRSASSLHETKKGNTGIIHGACLTLTDHDRIRQFIQEFTFRGLLPHIEKTIRQLNDQLISRKGLSRSLFSATKKWFSGSKVPEKSINDLKNTSGLLYPPEAPELQIRKMADLCFLVQHYDLAYSCYHTAKKDFLNDQAMLYAAGALEMAAVSAFLQPGAPRPYPAHYMDTAIQTYRDICKNMVLAERCVLLSAELLKSQSKYSEAAALLIRLTSEDSDLRSALLLEQAAHCFINMKSPMVRKYAFHMILAGHRFSKAGQKKHALRCYCQAMQVYKGKGWSLAEDHINFTIGRQSYTLRQLDNAVSAFRHILINESKQSAAQQGAFLREYLYVYKNVSQLSPDGPLPQLPLPYINSSATRVFFGHDRRPADGEKQAATHVSLDQEYDSESSQQWRELEEQVVSVVNKGVIPSNFHPTQYCLNSYSDNSRFPLAVVEEPITVEVAFRNPLKVLLLLTDLSLLWKFHPKDFSGKDNEEVKQLVTSEPEMIGAEVISEFLINGEESKVARLKLFPHHIGELHILGVVYNLGTIQGSMTVDGIGALPGCHTGKYSLSMSVRGKQDLEIQGPRLNNTKEEKTSVKYGPDRRLDPIITEEMPLLEVFFIHFPTGLLCGEIRKAYVEFVNVSKCPLTGLKVVSKRPEFFTFGGNTAVLTPLSPSASENCSAYKTVVTDATSVCTALISSASSVDFGIGTGSQPEVIPVPLPDTVLLPGASVQLPMWLRGPDEEGVHEINFLFYYESVKKQPKIRHRILRHTAIICTSRSLNVRATVCRSNSLENEEGRGGNMLVFVDVENTNTSEAGVKEFHIVQVSSSSKHWKLQKSVNLSENKDTKLASREKGKFCFKAIRCEKEEAATQSSEKYTFADIIFGNEQIISSASPCADFFYRSLSSELKKPQAHLPVHTEKQSTEDAVRLIQKCSEVDLNIVILWKAYVVEDSKQLILEGQHHVILRTIGKEAFSYPQKQEPPEMELLKFFRPENITVSSRPSVEQLSSLIKTSLHYPESFNHPFHQKSLCLVPVTLLLSNCSKADVDVIVDLRHKTTSPEALEIHGSFTWLGQTQYKLQLKSQEIHSLQLKACFVHTGVYNLGTPRVFAKLSDQVTVFETSQQNSMPALIIISNV

SEQ ID NO: 89496 - protein, 95 aa, Homo sapiens
  Payload ID: 17923
  Gene Name: trafficking protein particle complex 8
  ENSP ID: ENSP00000463876
EPPEMELLKFFRPENITVSSRPSVEQLSSLIKTSLHYPESFNHPFHQKSLCLVPVTLLLSNCSKADVDVIVDLRHKTTRSTGNPWIIHMAWTNTV

SEQ ID NO: 89497 - protein, 187 aa, Homo sapiens
  Payload ID: 17923
  Gene Name: trafficking protein particle complex 8
  ENSP ID: ENSP00000463973
RVVRGCLDKGRTLNSRKGICDFMSNGKFHMRDPNNQLHVIKNLKIAVSNIVTQPPQPGAIRKLLNDVVSGSQPAEGLVANVITAGDYDLNISATTPWFESYRETFLQSMPALDHEFLNHYLACMLVASSSEAEPVEQFSKLSQEQHRIQHNSDYSYPKWFIPNTLKYYVLLHDVSAGDEQRAESIYE

SEQ ID NO: 89498 - protein, 666 aa, Homo sapiens
  Payload ID: 17923
  Gene Name: trafficking protein particle complex 8
  ENSP ID: ENSP00000464591
MAQCVQSVQELIPDSFVPCVAALCSDEAERLTRLNHLSFAELLKPFSRLTSEVHMRDPNNQLHVIKNLKIAVSNIVTQPPQPGAIRKLLNDVVSGSQPAEGLVANVITAGDYDLNISATTPWFESYRETFLQSMPALDHEFLNHYLACMLVASSSEAEPVEQFSKLSQEQHRIQHNSDYSYPKWFIPNTLKYYVLLHDVSAGDEQRAESIYEEMKQKYGTQGCYLLKINSRTSNRASDEQIPDPWSQYLQKNSIQNQESYEDGPCTITSNKNSDNNLLSLDGLDNEVKDGLPNNFRAHPLQLEQSSDPSNSIDGPDHLRSASSLHETKKGNTGIIHGACLTLTDHDRIRQFIQEFTFRGLLPHIEKTIRQLNDQLISRKGLSRSLFSATKKWFSGSKVPEKSINDLKNTSGLLYPPEAPELQIRKMADLCFLVQHYDLAYSCYHTAKKDFLNDQAMLYAAGALEMAAVSAFLQPGAPRPYPAHYMDTAIQTYRDICKNMVLAERCVLLSAELLKSQSKYSEAAALLIRLTSEDSDLRSALLLEQAAHCFINMKSPMVRKYAFHMILAGHRFSKAGQKKHALRCYCQAMQVYKGKGWSLAEDHINFTIGRQSYTLRQLDNAVSAFRHILINESKQSAAQQGAFLREYLYVYKVTAYFHSGIDIKTVF

SEQ ID NO: 89499 - protein, 1246 aa, Homo sapiens
  Payload ID: 17924
  Gene Name: trafficking protein particle complex 9
  Uniprot ID: Q96Q05
  ENSP ID: ENSP00000373979
MVPAGDQDRAPHRGKPAQAGARTSRASRALRSWRRSQAARATVTHPRGGHDRGSHGGYREGHRGCRRDPQWASAGPPPLSFTEEVKFELRALKDWDFKMSVPDYMQCAEDHQTLLVVVQPVGIVSEENFFRIYKRICSVSQISVRDSQRVLYIRYRHHYPPENNEWGDFQTHRKVVGLITITDCFSAKDWPQTFEKFHVQKEIYGSTLYDSRLFVFGLQGEIVEQPRTDVAFYPNYEDCQTVEKRIEDFIESLFIVLESKRLDRATDKSGDKIPLLCVPFEKKDFVGLDTDSRHYKKRCQGRMRKHVGDLCLQAGMLQDSLVHYHMSVELLRSVNDFLWLGAALEGLCSASVIYHYPGGTGGKSGARRFQGSTLPAEAANRHRPGAQEVLIDPGALTTNGINPDTSTEIGRAKNCLSPEDIIDKYKEAISYYSKYKNAGVIELEACIKAVRVLAIQKRSMEASEFLQNAVYINLRQLSEEEKIQRYSILSELYELIGFHRKSAFFKRVAAMQCVAPSIAEPGWRACYKLLLETLPGYSLSLDPKDFSRGTHRGWAAVQMRLLHELVYASRRMGNPALSVRHLSFLLQTMLDFLSDQEKKDVAQSLENYTSKCPGTMEPIALPGGLTLPPVPFTKLPIVRHVKLLNLPASLRPHKMKSLLGQNVSTKSPFIYSPIIAHNRGEERNKKIDFQWVQGDVCEVQLMVYNPMPFELRVENMGLLTSGVEFESLPAALSLPAESGLYPVTLVGVPQTTGTITVNGYHTTVFGVFSDCLLDNLPGIKTSGSTVEVIPALPRLQISTSLPRSAHSLQPSSGDEISTNVSVQLYNGESQQLIIKLENIGMEPLEKLEVTSKVLTTKEKLYGDFLSWKLEETLAQFPLQPGKVATFTINIKVKLDFSCQENLLQDLSDDGISVSGFPLSSPFRQVVRPRVEGKPVNPPESNKAGDYSHVKTLEAVLNFKYSGGPGHTEGYYRNLSLGLHVEVEPSVFFTRVSTLPATSTRQCHLLLDVFNSTEHELTVSTRSSEALILHAGECQRMAIQVDKFNFESFPESPGEKGQFANPKQLEEERREARGLEIHSKLGICWRIPSLKRSGEASVEGLLNQLVLEHLQLAPLQWDVLVDGQPCDREAVAACQVGDPVRLEVRLTNRSPRSVGPFALTVVPFQDHQNGVHNYDLHDTVSFVGSSTFYLDAVQPSGQSACLGALLFLYTGDFFLHIRFHEDSTSKELPPSWFCLPSVHVCALEAQA

SEQ ID NO: 89500 - protein, 1148 aa, Homo sapiens
  Payload ID: 17924
  Gene Name: trafficking protein particle complex 9
  Uniprot ID: Q96Q05
  ENSP ID: ENSP00000405060
MSVPDYMQCAEDHQTLLVVVQPVGIVSEENFFRIYKRICSVSQISVRDSQRVLYIRYRHHYPPENNEWGDFQTHRKVVGLITITDCFSAKDWPQTFEKFHVQKEIYGSTLYDSRLFVFGLQGEIVEQPRTDVAFYPNYEDCQTVEKRIEDFIESLFIVLESKRLDRATDKSGDKIPLLCVPFEKKDFVGLDTDSRHYKKRCQGRMRKHVGDLCLQAGMLQDSLVHYHMSVELLRSVNDFLWLGAALEGLCSASVIYHYPGGTGGKSGARRFQGSTLPAEAANRHRPGAQEVLIDPGALTTNGINPDTSTEIGRAKNCLSPEDIIDKYKEAISYYSKYKNAGVIELEACIKAVRVLAIQKRSMEASEFLQNAVYINLRQLSEEEKIQRYSILSELYELIGFHRKSAFFKRVAAMQCVAPSIAEPGWRACYKLLLETLPGYSLSLDPKDFSRGTHRGWAAVQMRLLHELVYASRRMGNPALSVRHLSFLLQTMLDFLSDQEKKDVAQSLENYTSKCPGTMEPIALPGGLTLPPVPFTKLPIVRHVKLLNLPASLRPHKMKSLLGQNVSTKSPFIYSPIIAHNRGEERNKKIDFQWVQGDVCEVQLMVYNPMPFELRVENMGLLTSGVEFESLPAALSLPAESGLYPVTLVGVPQTTGTITVNGYHTTVFGVFSDCLLDNLPGIKTSGSTVEVIPALPRLQISTSLPRSAHSLQPSSGDEISTNVSVQLYNGESQQLIIKLENIGMEPLEKLEVTSKVLTTKEKLYGDFLSWKLEETLAQFPLQPGKVATFTINIKVKLDFSCQENLLQDLSDDGISVSGFPLSSPFRQVVRPRVEGKPVNPPESNKAGDYSHVKTLEAVLNFKYSGGPGHTEGYYRNLSLGLHVEVEPSVFFTRVSTLPATSTRQCHLLLDVFNSTEHELTVSTRSSEALILHAGECQRMAIQVDKFNFESFPESPGEKGQFANPKQLEEERREARGLEIHSKLGICWRIPSLKRSGEASVEGLLNQLVLEHLQLAPLQWDVLVDGQPCDREAVAACQVGDPVRLEVRLTNRSPRSVGPFALTVVPFQDHQNGVHNYDLHDTVSFVGSSTFYLDAVQPSGQSACLGALLFLYTGDFFLHIRFHEDSTSKELPPSWFCLPSVHVCALEAQA

SEQ ID NO: 89501 - protein, 992 aa, Homo sapiens
  Payload ID: 17924
  Gene Name: trafficking protein particle complex 9
  ENSP ID: ENSP00000430116
  MOD_RES (1)..(1): Any amino acid
XEDFIESLFIVLESKRLDRATDKSGDKIPLLCVPFEKKDFVGLDTDSRHYKKRCQGRMRKHVGDLCLQAGMLQDSLVHYHMSVELLRSVNDFLWLGAALEGLCSASVIYHYPGGTGGKSGARRFQGSTLPAEAANRHRPGALTTNGINPDTSTEIGRAKNCLSPEDIIDKYKEAISYYSKYKNAGVIELEACIKAVRVLAIQKRSMEASEFLQNAVYINLRQLSEEEKIQRYSILSELYELIGFHRKSAFFKRVAAMQCVAPSIAEPGWRACYKLLLETLPGYSLSLDPKDFSRGTHRGWAAVQMRLLHELVYASRRMGNPALSVRHLSFLLQTMLDFLSDQEKKDVAQSLENYTSKCPGTMEPIALPGGLTLPPVPFTKLPIVRHVKLLNLPASLRPHKMKSLLGQNVSTKSPFIYSPIIAHNRGEERNKKIDFQWVQGDVCEVQLMVYNPMPFELRVENMGLLTSGVEFESLPAALSLPAESGLYPVTLVGVPQTTGTITVNGYHTTVFGVFSDCLLDNLPGIKTSGSTVEVIPALPRLQISTSLPRSAHSLQPSSGDEISTNVSVQLYNGESQQLIIKLENIGMEPLEKLEVTSKVLTTKEKLYGDFLSWKLEETLAQFPLQPGKVATFTINIKVKLDFSCQENLLQDLSDDGISVSGFPLSSPFRQVVRPRVEGKPVNPPESNKAGDYSHVKTLEAVLNFKYSGGPGHTEGYYRNLSLGLHVEVEPSVFFTRVSTLPATSTRQCHLLLDVFNSTEHELTVSTRSSEALILHAGECQRMAIQVDKFNFESFPESPGEKGQFANPKQLEEERREARGLEIHSKLGICWRIPSLKRSGEASVEGLLNQLVLEHLQLAPLQWDVLVDGQPCDREAVAACQVGDPVRLEVRLTNRSPRSVGPFALTVVPFQDHQNGVHNYDLHDTVSFVGSSTFYLDAVQPSGQSACLGALLFLYTGDFFLHIRFHEDSTSKELPPSWFCLPSVHVCALEAQA

SEQ ID NO: 89502 - protein, 91 aa, Homo sapiens
  Payload ID: 17924
  Gene Name: trafficking protein particle complex 9
  ENSP ID: ENSP00000488007
  MOD_RES (1)..(1): Any amino acid
XGESQQLIIKLENIGMEPLEKLEVTSKVLTTKEKLYGDFLSWKLEETLAQFPLQPGKVATFTINIKVKLDFSCQENLLQDLSDGKRFPNFN

SEQ ID NO: 89503 - protein, 140 aa, Homo sapiens [sequence omitted]

SEQ ID NO: 89504 - protein, 140 aa, Homo sapiens [sequence omitted]

SEQ ID NO: 89505 - protein, 953 aa, Homo sapiens
  Payload ID: 17926
  Gene Name: trafficking protein, kinesin binding 1
  Uniprot ID: Q9UPV9
  ENSP ID: ENSP00000328998
MALVFQFGQPVRAQPLPGLCHGKLIRTNACDVCNSTDLPEVEIISLLEEQLPHYKLRADTIYGYDHDDWLHTPLISPDANIDLTTEQIEETLKYFLLCAERVGQMTKTYNDIDAVTRLLEEKERDLELAARIGQSLLKKNKTLTERNELLEEQVEHIREEVSQLRHELSMKDELLQFYTSAAEESEPESVCSTPLKRNESSSSVQNYFHLDSLQKKLKDLEEENVVLRSEASQLKTETITYEEKEQQLVNDCVKELRDANVQIASISEELAKKTEDAARQQEEITHLLSQIVDLQKKAKACAVENEELVQHLGAAKDAQRQLTAELRELEDKYAECMEMLHEAQEELKNLRNKTMPNTTSRRYHSLGLFPMDSLAAEIEGTMRKELQLEEAESPDITHQKRVFETVRNINQVVKQRSLTPSPMNIPGSNQSSAMNSLLSSCVSTPRSSFYGSDIGNVVLDNKTNSIILETEAADLGNDERSKKPGTPGTPGSHDLETALRRLSLRRENYLSERRFFEEEQERKLQELAEKGELRSGSLTPTESIMSLGTHSRFSEFTGFSGMSFSSRSYLPEKLQIVKPLEGSATLHHWQQLAQPHLGGILDPRPGVVTKGFRTLDVDLDEVYCLNDFEEDDTGDHISLPRLATSTPVQHPETSAHHPGKCMSQTNSTFTFTTCRILHPSDELTRVTPSLNSAPTPACGSTSHLKSTPVATPCTPRRLSLAESFTNTRESTTTMSTSLGLVWLLKERGISAAVYDPQSWDRAGRGSLLHSYTPKMAVIPSTPPNSPMQTPTSSPPSFEFKCTSPPYDNFLASKPASSILREVREKNVRSSESQTDVSVSNLNLVDKVRRFGVAKVVNSGRAHVPTLTEEQGPLLCGPPGPAPALVPRGLVPEGLPLRCPTVTSAIGGLQLNSGIRRNRSFPTMVGSSMQMKAPVTLTSGILMGAKLSKQTSLR

SEQ ID NO: 89506 - protein, 686 aa, Homo sapiens
  Payload ID: 17926
  Gene Name: trafficking protein, kinesin binding 1
  Uniprot ID: Q9UPV9
  ENSP ID: ENSP00000340702
MSLRDKGGEEECFEYDCQDEERKPTHRQHDTQDLLEEVLCAERVGQMTKTYNDIDAVTRLLEEKERDLELAARIGQSLLKKNKTLTERNELLEEQVEHIREEVSQLRHELSMKDELLQFYTSAAEESEPESVCSTPLKRNESSSSVQNYFHLDSLQKKLKDLEEENVVLRSEASQLKTETITYEEKEQQLVNDCVKELRDANVQIASISEELAKKTEDAARQQEEITHLLSQIVDLQKKAKACAVENEELVQHLGAAKDAQRQLTAELRELEDKYAECMEMLHEAQEELKNLRNKTMPNTTSRRYHSLGLFPMDSLAAEIEGTMRKELQLEEAESPDITHQKRVFETVRNINQVVKQRSLTPSPMNIPGSNQSSAMNSLLSSCVSTPRSSFYGSDIGNVVLDNKTNSIILETEAADLGNDERSKKPGTPGTPGSHDLETALRRLSLRRENYLSERRFFEEEQERKLQELAEKGELRSGSLTPTESIMSLGTHSRFSEFTGFSGMSFSSRSYLPEKLQIVKPLEGSATLHHWQQLAQPHLGGILDPRPGVVTKGFRTLDVDLDEVYCLNDFEEDDTGDHISLPRLATSTPVQHPETSGERSQARVTVSGSRSYPSRPQASPEEMQEPPAATEEEEEEEEEEGSGEGTTISPVNLAPFPEAEFWAILTSVPGTIRSGSLSVASARLCG

SEQ ID NO: 89507 - protein, 895 aa, Homo sapiens
  Payload ID: 17926
  Gene Name: trafficking protein, kinesin binding 1
  ENSP ID: ENSP00000379478
MSLRDKGGEEECFEYDCQDEERKPTHRQHDTQDLLEEVLCAERVGQMTKTYNDIDAVTRLLEEKERDLELAARIGQSLLKKNKTLTERNELLEEQVEHIREEVSQLRHELSMKDELLQFYTSAAEESEPESVCSTPLKRNESSSSVQNYFHLDSLQKKLKDLEEENVVLRSEASQLKTETITYEEKEQQLVNDCVKELRDANVQIASISEELAKKTEDAARQQEEITHLLSQIVDLQKKAKACAVENEELVQHLGAAKDAQRQLTAELRELEDKYAECMEMLHEAQEELKNLRNKTMPNTTSRRYHSLGLFPMDSLAAEIEGTMRKELQLEEAESPDITHQKRVFETVRNINQVVKQRSLTPSPMNIPGSNQSSAMNSLLSSCVSTPRSSFYGSDIGNVVLDNKTNSIILETEAADLGNDERSKKPGTPGTPGSHDLETALRRLSLRRENYLSERRFFEEEQERKLQELAEKGELRSGSLTPTESIMSLGTHSRFSEFTGFSGMSFSSRSYLPEKLQIVKPLEGSATLHHWQQLAQPHLGGILDPRPGVVTKGFRTLDVDLDEVYCLNDFEEDDTGDHISLPRLATSTPVQHPETSAHHPGKCMSQTNSTFTFTTCRILHPSDELTRVTPSLNSAPTPACGSTSHLKSTPVATPCTPRRLSLAESFTNTRESTTTMSTSLGLVWLLKERGISAAVYDPQSWDRAGRGSLLHSYTPKMAVIPSTPPNSPMQTPTSSPPSFEFKCTSPPYDNFLASKPASSILREVREKNVRSSESQTDVSVSNLNLVDKVRRFGVAKVVNSGRAHVPTLTEEQGPLLCGPPGPAPALVPRGLVPEGLPLRCPTVTSAIGGLQLNSGIRRNRSFPTMVGSSMQMKAPVTLTSGILMGAKLSKQTSLR

SEQ ID NO: 89508 - protein, 44 aa, Homo sapiens
  Payload ID: 17926
  Gene Name: trafficking protein, kinesin binding 1
  ENSP ID: ENSP00000409940
MQKFIEADYYELDWYYEECSDALPQLSLLALRDPDLSSSKSKGK

SEQ ID NO: 89509 - protein, 556 aa, Homo sapiens
  Payload ID: 17926
  Gene Name: trafficking protein, kinesin binding 1
  Uniprot ID: Q9UPV9
  ENSP ID: ENSP00000410717
MQKFIEADYYELDWYYEECSDVLCAERVGQMTKTYNDIDAVTRLLEEKERDLELAARIGQSLLKKNKTLTERNELLEEQVEHIREEVSQLRHELSMKDELLQFYTSAAEESEPESVCSTPLKRNESSSSVQNYFHLDSLQKKLKDLEEENVVLRSEASQLKTETITYEEKEQQLVNDCVKELRDANVQIASISEELAKKTEDAARQQEEITHLLSQIVDLQKKAKACAVENEELVQHLGAAKDAQRQLTAELRELEDKYAECMEMLHEAQEELKNLRNKTMPNTTSRRYHSLGLFPMDSLAAEIEGTMRKELQLEEAESPDITHQKRVFETVRNINQVVKQRSLTPSPMNIPGSNQSSAMNSLLSSCVSTPRSSFYGSDIGNVVLDNKTNSIILETEAADLGNDERSKKPGTPGTPGSHDLETALRRLSLRRENYLSERRFFEEEQERKLQELAEKGELRSGSLTPTESIMSLGTHSRFSEFTGFSGMSFSSRSYLPEKLQIVKPLEGDHAGPRPLSVLLGDSLWSLIHLRKAGHLCHAYSFFFRDSHPRCWFEFL

SEQ ID NO: 89510 - protein, 300 aa, Homo sapiens
  Payload ID: 17926
  Gene Name: trafficking protein, kinesin binding 1
  ENSP ID: ENSP00000413729
DANVQIASISEELAKKTEDAARQQEEITHLLSQIVDLQKKAKALRELEDKYAECMEMLHEAQEELKNLRNKTMPNTTSRRYHSLGLFPMDSLAAEIEGTMRKELQLEEAESPDITHQKRVFETVRNINQVVKQRSLTPSPMNIPGSNQSSAMNSLLSSCVSTPRSSFYGSDIGNVVLDNKTNSIILETEAADLGNDERSKKPGTPGTPGSHDLETALRRLSLRRENYLSERRFFEEEQERKLQELAEKGELRSGSLTPTESIMSLGTHSRFSEFTGFSGMSFSSRSYLPEKLQIVKPLEG

SEQ ID NO: 89511 - protein, 670 aa, Homo sapiens
  Payload ID: 17926
  Gene Name: trafficking protein, kinesin binding 1
  ENSP ID: ENSP00000483516
MQKFIEADYYELDWYYEECSDVLCAERVGQMTKTYNDIDAVTRLLEEKERDLELAARIGQSLLKKNKTLTERNELLEEQVEHIREEVSQLRHELSMKDELLQFYTSAAEESEPESVCSTPLKRNESSSSVQNYFHLDSLQKKLKDLEEENVVLRSEASQLKTETITYEEKEQQLVNDCVKELRDANVQIASISEELAKKTEDAARQQEEITHLLSQIVDLQKKAKACAVENEELVQHLGAAKDAQRQLTAELRELEDKYAECMEMLHEAQEELKNLRNKTMPNTTSRRYHSLGLFPMDSLAAEIEGTMRKELQLEEAESPDITHQKRVFETVRNINQVVKQRSLTPSPMNIPGSNQSSAMNSLLSSCVSTPRSSFYGSDIGNVVLDNKTNSIILETEAADLGNDERSKKPGTPGTPGSHDLETALRRLSLRRENYLSERRFFEEEQERKLQELAEKGELRSGSLTPTESIMSLGTHSRFSEFTGFSGMSFSSRSYLPEKLQIVKPLEGSATLHHWQQLAQPHLGGILDPRPGVVTKGFRTLDVDLDEVYCLNDFEEDDTGDHISLPRLATSTPVQHPETSGERSQARVTVSGSRSYPSRPQASPEEMQEPPAATEEEEEEEEEEGSGEGTTISPVNLAPFPEAEFWAILTSVPGTIRSGSLSVASARLCG

SEQ ID NO: 89512 - protein, 849 aa, Homo sapiens
  Payload ID: 17926
  Gene Name: trafficking protein, kinesin binding 1
  ENSP ID: ENSP00000486713
MTKTYNDIDAVTRLLEEKERDLELAARIGQSLLKKNKTLTERNELLEEQVEHIREEVSQLRHELSMKDELLQFYTSAAEESEPESVCSTPLKRNESSSSVQNYFHLDSLQKKLKDLEEENVVLRSEASQLKTETITYEEKEQQLVNDCVKELRDANVQIASISEELAKKTEDAARQQEEITHLLSQIVDLQKKAKACAVENEELVQHLGAAKDAQRQLTAELRELEDKYAECMEMLHEAQEELKNLRNKTMPNTTSRRYHSLGLFPMDSLAAEIEGTMRKELQLEEAESPDITHQKRVFETVRNINQVVKQRSLTPSPMNIPGSNQSSAMNSLLSSCVSTPRSSFYGSDIGNVVLDNKTNSIILETEAADLGNDERSKKPGTPGTPGSHDLETALRRLSLRRENYLSERRFFEEEQERKLQELAEKGELRSGSLTPTESIMSLGTHSRFSEFTGFSGMSFSSRSYLPEKLQIVKPLEGSATLHHWQQLAQPHLGGILDPRPGVVTKGFRTLDVDLDEVYCLNDFEEDDTGDHISLPRLATSTPVQHPETSAHHPGKCMSQTNSTFTFTTCRILHPSDELTRVTPSLNSAPTPACGSTSHLKSTPVATPCTPRRLSLAESFTNTRESTTTMSTSLGLVWLLKERGISAAVYDPQSWDRAGRGSLLHSYTPKMAVIPSTPPNSPMQTPTSSPPSFEFKCTSPPYDNFLASKPASSILREVREKNVRSSESQTDVSVSNLNLVDKVRRFGVAKVVNSGRAHVPTLTEEQGPLLCGPPGPAPALVPRGLVPEGLPLRCPTVTSAIGGLQLNSGIRRNRSFPTMVGSSMQMKAPVTLTSGILMGAKLSKQTSLR

SEQ ID NO: 89513 - protein, 526 aa, Homo sapiens
  Payload ID: 17926
  Gene Name: trafficking protein, kinesin binding 1
  ENSP ID: ENSP00000487488
MTKTYNDIDAVTRLLEEKERDLELAARIGQSLLKKNKTLTERNELLEEQVEHIREEVSQLRHELSMKDELLQFYTSAAEESEPESVCSTPLKRNESSSSVQNYFHLDSLQKKLKDLEEENVVLRSEASQLKTETITYEEKEQQLVNDCVKELRDANVQIASISEELAKKTEDAARQQEEITHLLSQIVDLQKKAKACAVENEELVQHLGAAKDAQRQLTAELRELEDKYAECMEMLHEAQEELKNLRNKTMPNTTSRRYHSLGLFPMDSLAAEIEGTMRKELQLEEAESPDITHQKRVFETVRNINQVVKQRSLTPSPMNIPGSNQSSAMNSLLSSCVSTPRSSFYGSDIGNVVLDNKTNSIILETEAADLGNDERSKKPGTPGTPGSHDLETALRRLSLRRENYLSERRFFEEEQERKLQELAEKGELRSGSLTPTESIMSLGTHSRFSEFTGFSGMSFSSRSYLPEKLQIVKPLEGDHAGPRPLSVLLGDSLWSLIHLRKAGHLCHAYSFFFRDSHPRCWFEFL

SEQ ID NO: 89514 - protein, 914 aa, Homo sapiens
  Payload ID: 17927
  Gene Name: trafficking protein, kinesin binding 2
  Uniprot ID: O60296
  ENSP ID: ENSP00000328875
MSQSQNAIFTSPTGEENLMNSNHRDSESITDVCSNEDLPEVELVSLLEEQLPQYRLKVDTLFLYENQDWTQSPHQRQHASDALSPVLAEETFRYMILGTDRVEQMTKTYNDIDMVTHLLAERDRDLELAARIGQALLKRNHVLSEQNESLEEQLGQAFDQVNQLQHELCKKDELLRIVSIASEESETDSSCSTPLRFNESFSLSQGLLQLEMLQEKLKELEEENMALRSKACHIKTETVTYEEKEQQLVSDCVKELRETNAQMSRMTEELSGKSDELIRYQEELSSLLSQIVDLQHKLKEHVIEKEELKLHLQASKDAQRQLTMELHELQDRNMECLGMLHESQEEIKELRSRSGPTAHLYFSQSYGAFTGESLAAEIEGTMRKKLSLDEESSLFKQKAQQKRVFDTVRIANDTRGRSISFPALLPIPGSNRSSVIMTAKPFESGLQQTEDKSLLNQGSSSEEVAGSSQKMGQPGPSGDSDLATALHRLSLRRQNYLSEKQFFAEEWQRKIQVLADQKEGVSGCVTPTESLASLCTTQSEITDLSSASCLRGFMPEKLQIVKPLEGSQTLYHWQQLAQPNLGTILDPRPGVITKGFTQLPGDAIYHISDLEEDEEEGITFQVQQPLEVEEKLSTSKPVTGIFLPPITSAGGPVTVATANPGKCLSCTNSTFTFTTCRILHPSDITQVTPSSGFPSLSCGSSGSSSSNTAVNSPALSYRLSIGESITNRRDSTTTFSSTMSLAKLLQERGISAKVYHSPISENPLQPLPKSLAIPSTPPNSPSHSPCPSPLPFEPRVHLSENFLASRPAETFLQEMYGLRPSRNPPDVGQLKMNLVDRLKRLGIARVVKNPGAQENGRCQEAEIGPQKPDSAVYLNSGSSLLGGLRRNQSLPVIMGSFAAPVCTSSPKMGVLKED

SEQ ID NO: 89515 - protein, 30 aa, Homo sapiens
  Payload ID: 17927
  Gene Name: trafficking protein, kinesin binding 2
  ENSP ID: ENSP00000388254
MSQSQNAIFTSPTGEENLMNSNHRDSESIT

SEQ ID NO: 89516 - protein, 311 aa, Homo sapiens
  Payload ID: 17927
  Gene Name: trafficking protein, kinesin binding 2
  Uniprot ID: O60296
  ENSP ID: ENSP00000409333
MSQSQNAIFTSPTGEENLMNSNHRDSESITDVCSNEDLPEVELVSLLEEQLPQYRLKVDTLFLYENQDWTQSPHQRQHASDALSPVLAEETFRYMILGTDRVEQMTKTYNDIDMVTHLLAERDRDLELAARIGQALLKRNHVLSEQNESLEEQLGQAFDQVNQLQHELCKKDELLRIVSIASEESETDSSCSTPLRFNESFSLSQGLLQLEMLQEKLKELEEENMALRSKACHIKTETVTYEEKEQQLVSDCVKELRETNAQMSRMTEELSGKSDELIRYQEELSSLLSQIVDLQHKLKEVGLFIHSTDIC

SEQ ID NO: 89517 - protein, 779 aa, Homo sapiens
  Payload ID: 17927
  Gene Name: trafficking protein, kinesin binding 2
  ENSP ID: ENSP00000482435
MILGTDRVEQMTKTYNDIDMVTHLLAERDRDLELAARIGQALLKRNHVLSEQNESLEEQLGQAFDQVNQLQHELCKKDELLRIVSIASEESETDSSCSTPLRFNESFSLSQGLLQLEMLQEKLKELEEENMALRSKACHIKTETVTYEEKEQQLVSDCVKELRETNAQMSRMTEELSGKSDELIRYQEELSSLLSQIVDLQHKLKEHVIEKEELKLHLQASKDAQRQLTMELHELQDRNMECLGMLHESQEEIKELRSRSGPTAHLYFSQSYGAFTGESLAAEIEGTMRKKLSLDEESSLFKQKAQQKRVFDTVRIANDTRGRSISFPALLPIPGSNRSSVIMTAKPFESGLQQTEDKSLLNQGSSSEEVAGSSQKMGQPGPSGDSDLATALHRLSLRRQNYLSEKQFFAEEWQRKIQVLADQKEGVSGCVTPTESLASLCTTQSEITDLSSASCLRGFMPEKLQIVKPLEGSQTLYHWQQLAQPNLGTILDPRPGVITKGFTQLPGDAIYHISDLEEDEEEGITFQVQQPLEVEEKLSTSKPVTGIFLPPITSAGGPVTVATANPGKCLSCTNSTFTFTTCRILHPSDITQVTPSSGFPSLSCGSSGSSSSNTAVNSPALSYRLSIGESITNRRDSTTTFSSTMSLAKLLQERGISAKVYHSPISENPLQPLPKSLAIPSTPPNSPSHSPCPSPLPFEPRVHLSENFLASRPAETFLQEMYGLRPSRNPPDVGQLKMNLVDRLKRLGIARVVKNPVPKRMEDARRQKLVLKNQILLFI

SEQ ID NO: 89518 - protein, 184 aa, Homo sapiens
  Payload ID: 17928
  Gene Name: TRAF-interacting protein with forkhead-associated domain
  Uniprot ID: Q96CG3
  ENSP ID: ENSP00000354911
MTSFEDADTEETVTCLQMTVYHPGQLQCGIFQSISFNREKLPSSEVVKFGRNSNICHYTFQDKQVSRVQFSLQLFKKFNSSVLSFEIKNMSKKTNLIVDSRELGYLNKMDLPYRCMVRFGEYQFLMEKEDGESLEFFETQFILSPRSLLQENNWPPHRPIPEYGTYSLCSSQSSSPTEMDENES

SEQ ID NO: 89519 - protein, 184 aa, Homo sapiens; identical to SEQ ID NO: 89518
  Payload ID: 17928
  Gene Name: TRAF-interacting protein with forkhead-associated domain
  Uniprot ID: Q96CG3
  ENSP ID: ENSP00000424231

SEQ ID NO: 89520 - protein, 161 aa, Homo sapiens
  Payload ID: 17929
  Gene Name: TRAF-interacting protein with forkhead-associated domain, family member B
  Uniprot ID: Q6ZNK6
  ENSP ID: ENSP00000440509
MEKPLTVLRVSLYHPTLGPSAFANVPPRLQHDTSPLLLGRGQDAHLQLQLPRLSRRHLSLEPYLEKGSALLAFCLKALSRKGCVWVNGLTLRYLEQVPLSTVNRVSFSGIQMLVRVEEGTSLEAFVCYFHVSPSPLIYRPEAEETDEWEGISQGQPPPGSG

SEQ ID NO: 89521 - protein, 582 aa, Homo sapiens
  Payload ID: 17930
  Gene Name: TRAF-type zinc finger domain containing 1
  Uniprot ID: O14545
  ENSP ID: ENSP00000257604
MAEFLDDQETRLCDNCKKEIPVFNFTIHEIHCQRNIGMCPTCKEPFPKSDMETHMAAEHCQVTCKCNKKLEKRLLKKHEETECPLRLAVCQHCDLELSILKLKEHEDYCGARTELCGNCGRNVLVKDLKTHPEVCGREGEEKRNEVAIPPNAYDESWGQDGIWIASQLLRQIEALDPPMRLPRRPLRAFESDVFHNRTTNQRNITAQVSIQNNLFEEQERQERNRGQQPPKEGGEESANLDFMLALSLQNEGQASSVAEQDFWRAVCEADQSHGGPRSLSDIKGAADEIMLPCEFCEELYPEELLIDHQTSCNPSRALPSLNTGSSSPRGVEEPDVIFQNFLQQAASNQLDSLMGLSNSHPVEESIIIPCEFCGVQLEEEVLFHHQDQCDQRPATATNHVTEGIPRLDSQPQETSPELPRRRVRHQGDLSSGYLDDTKQETANGPTSCLPPSRPINNMTATYNQLSRSTSGPRPGCQPSSPCVPKLSNSDSQDIQGRNRDSQNGAIAPGHVSVIRPPQNLYPENIVPSFSPGPSGRYGASGRSEGGRNSRVTPAAANYRSRTAKAKPSKQQGAGDAEEEEEE

SEQ ID NO: 89522 - protein, 582 aa, Homo sapiens; identical to SEQ ID NO: 89521
  Payload ID: 17930
  Gene Name: TRAF-type zinc finger domain containing 1
  Uniprot ID: O14545
  ENSP ID: ENSP00000396526

SEQ ID NO: 89523 - protein, 164 aa, Homo sapiens
  Payload ID: 17930
  Gene Name: TRAF-type zinc finger domain containing 1
  Uniprot ID: O14545
  ENSP ID: ENSP00000447340
MAEFLDDQETRLCDNCKKEIPVFNFTIHEIHCQRNIGMCPTCKEPFPKSDMETHMAAEHCQVTCKCNKKLEKRLLKKHEETECPLRLAVCQHCDLELSILKLKEHEDYCGARTELCGNCGRNVLVKDLKTHPELKNKRGRKGIEANSPPKRVVKRVQTWTSCWP

SEQ ID NO: 89524 - protein, 94 aa, Homo sapiens
  Payload ID: 17930
  Gene Name: TRAF-type zinc finger domain containing 1
  ENSP ID: ENSP00000449297
MAEFLDDQETRLCDNCKKEIPVFNFTIHEIHCQRNIGMCPTCKEPFPKSDMETHMAAEHCQVTCKCNKKLEKRLLKKHEVLKTELEAGRGGSSL

SEQ ID NO: 89525 - protein, 135 aa, Homo sapiens
  Payload ID: 17930
  Gene Name: TRAF-type zinc finger domain containing 1
  ENSP ID: ENSP00000449319
MAEFLDDQETRLCDNCKKEIPVFNFTIHEIHCQRNIGMCPTCKEPFPKSDMETHMAAEHCQVTCKCNKKLEKRLLKKHEETECPLRLAVCQHCDLELSILKLKEHEDYCGARTELCGNCGRNVLVKDLKTHPEVC

SEQ ID NO: 89526 - protein, 283 aa, Homo sapiens
  Payload ID: 17930
  Gene Name: TRAF-type zinc finger domain containing 1
  ENSP ID: ENSP00000450357
MAEFLDDQETRLCDNCKKEIPVFNFTIHEIHCQRNIGMCPTCKEPFPKSDMETHMAAEHCQVTCKCNKKLEKRLLKKHEETECPLRLAVCQHCDLELSILKLKEHEDYCGARTELCGNCGRNVLVKDLKTHPEVCGREGEEKRNEVAIPPNAYDESWGQDGIWIASQLLRQIEALDPPMRLPRRPLRAFESDVFHNRTTNQRNITAQVSIQNNLFEEQERQERNRGQQPPKEGGEESANLDFMLALSLQNEGQASSVAEQDFWRAVCEADQSHGGPRSLSDIK

SEQ ID NO: 89527 - protein, 72 aa, Homo sapiens
  Payload ID: 17930
  Gene Name: TRAF-type zinc finger domain containing 1
  ENSP ID: ENSP00000473800
MCPTCKEPFPKSDMETHMAAEHCQVTCKCNKKLEKRLLKKHEETECPLRLAVCQHCDLELSILKLKEHEDYC

SEQ ID NO: 89528 - protein, 308 aa, Homo sapiens [sequence omitted]

SEQ ID NO: 89529 - protein, 131 aa, Homo sapiens
  Payload ID: 17931
  Gene Name: trans-2,3-enoyl-CoA reductase
  ENSP ID: ENSP00000469263
MGHNAAGGDSGRKDKGEAVFLGQELTSLRLCFPQVEPHATIAEIKNLFTKTHPQWYPARQSLRLDPKGKSLKDEDVLQKLPVGTTATLYFRDLGAQISWVTVFLTEYAGPLFIYLLFYFRVPFIYGHKYDF

SEQ ID NO: 89530 - protein, 43 aa, Homo sapiens
  Payload ID: 17931
  Gene Name: trans-2,3-enoyl-CoA reductase
  ENSP ID: ENSP00000469343
MPLRNIFKNCTYYWGFAAWMAYYINHPLYTPPTYGAQQVKLAL

SEQ ID NO: 89531 - protein, 47 aa, Homo sapiens
  Payload ID: 17931
  Gene Name: trans-2,3-enoyl-CoA reductase
  ENSP ID: ENSP00000471341
MPLRNIFKNCTYYWGFAAWMAYYINHPLYTPPTYGAQQVKLALAIFV

SEQ ID NO: 89532 - protein, 153 aa, Homo sapiens
  Payload ID: 17931
  Gene Name: trans-2,3-enoyl-CoA reductase
  ENSP ID: ENSP00000472114
MPLRNIFKNCTYYWGFAAWMAYYINHPLYTPPTYGAQQVKLALAIFVICQLGNFSIHMALRDLRPAGSKTRKIPYPTKNPFTWLFLLVSCPNYTYEVGSWIGFAIMTQCLPVALFSLVGFTQMTIWAKGKHRSYLKEFRDYPPLRMPIIPFLL

SEQ ID NO: 89533 - protein, 59 aa, Homo sapiens
  Payload ID: 17931
  Gene Name: trans-2,3-enoyl-CoA reductase
  ENSP ID: ENSP00000472504
MKHYEQRDDSSRNQSSLWHSSDSSLLKGGDSGRKDKGEAVFLGQGGAPRHHCGDQEPLH

SEQ ID NO: 89534 - protein, 153 aa, Homo sapiens; identical to SEQ ID NO: 89532
  Payload ID: 17931
  Gene Name: trans-2,3-enoyl-CoA reductase
  ENSP ID: ENSP00000472697

SEQ ID NO: 89535 - protein, 150 aa, Homo sapiens
  Payload ID: 17931
  Gene Name: trans-2,3-enoyl-CoA reductase
  ENSP ID: ENSP00000472957
RRSSCTASPMALCLCATSSRTAPTTGASPRGWPITSITLSTLPLICQLGNFSIHMALRDLRPAGSKTRKIPYPTKNPFTWLFLLVSCPNYTYEVGSWIGFAIMTQCLPVALFSLVGFTQMTIWAKGKHRSYLKEFRDYPPLRMPIIPFLL

SEQ ID NO: 89536 - protein, 38 aa, Homo sapiens
  Payload ID: 17931
  Gene Name: trans-2,3-enoyl-CoA reductase
  ENSP ID: ENSP00000473033
MGHNAAGGDSGRKDKGEAVFLGQGGAPRHHCGDQEPLH

SEQ ID NO: 89537 - protein, 105 aa, Homo sapiens
  Payload ID: 17931
  Gene Name: trans-2,3-enoyl-CoA reductase
  ENSP ID: ENSP00000473129
MKHYEVEILDAKTREKLCFLDKVEPHATIAEIKNLFTKTHPQWYPARQSLRLDPKAARGHHGHTVLPGPGGPDQLGDGLPNRVRGAPFHLPALLLPSALHLWPQI

SEQ ID NO: 89538 - protein, 363 aa, Homo sapiens
  Payload ID: 17932
  Gene Name: trans-2,3-enoyl-CoA reductase-like
  Uniprot ID: Q5HYJ1
  ENSP ID: ENSP00000370607
MFKRHKSLASERKRALLSQRATRFILKDDMRNFHFLSKLVLSAGPLRPTPAVKHSKTTHFEIEIFDAQTRKQICILDKVTQSSTIHDVKQKFHKACPKWYPSRVGLQLECGGPFLKDYITIQSIAASSIVTLYATDLGQQVSWTTVFLAEYTGPLLIYLLFYLRIPCIYDGKESARRLRHPVVHLACFCHCIHYIRYLLETLFVHKVSAGHTPLKNLIMSCAFYWGFTSWIAYYINHPLYTPPSFGNRQITVSAINFLICEAGNHFINVMLSHPNHTGNNACFPSPNYNPFTWMFFLVSCPNYTYEIGSWISFTVMTQTLPVGIFTLLMSIQMSLWAQKKHKIYLRKFNSYIHRKSAMIPFIL

SEQ ID NO: 89539 - protein, 145 aa, Homo sapiens
  Payload ID: 17932
  Gene Name: trans-2,3-enoyl-CoA reductase-like
  ENSP ID: ENSP00000422497
MFKRHKSLASERKRALLSQRATRFILKDDMRNFHFLSKLVLSAGPLRPTPAVKHSKTTHFEIEIFDAQTRKQICILDKVTQSSTIHDVKQKFHKACPKWYPSRVGLQLECGGPFLKDYITIQSIAASSIVTLYATDLGQQVSWTT

SEQ ID NO: 89540 - protein, 27 aa, Homo sapiens
  Payload ID: 17932
  Gene Name: trans-2,3-enoyl-CoA reductase-like
  ENSP ID: ENSP00000423975
PNYNPFTWMFFLVSCPNYTYELEFLHF

SEQ ID NO: 89541 - protein, 326 aa, Homo sapiens
  Payload ID: 17932
  Gene Name: trans-2,3-enoyl-CoA reductase-like
  ENSP ID: ENSP00000426043
MFKRHKSLASERKRALLSQRATRFILKDDMRNFHFLSKLVLSAGPLRPTPAVKHSKTTHFEIEIFDAQTRKQICILDKVTQSSTIHDVKQKFHKACPKWYPSRVGLQLECGGPFLKDYITIQSIAASSIVTLYATDLGQQVSWTTVFLAEYTGPLLIYLLFYLRIPCIYDGKESARRLRHPVVHLACFCHCIHYIRYLLETLFVHKVSAGHTPLKNLIMSCAFYWGFTSWIAYYINHPLYTPPSFGNRQITVSAINFLICEAGNHFINVMLSHPNHTGNNACFPSPNYNPFTWMFFLVSCPNYTYEIGSWISFTVMTQTLPGGLTA

SEQ ID NO: 89542 - protein, 337 aa, Homo sapiens
  Payload ID: 17933
  Gene Name: transaldolase 1
  Uniprot ID: P37837
  ENSP ID: ENSP00000321259
MSSSPVKRQRMESALDQLKQFTTVVADTGDFHAIDEYKPQDATTNPSLILAAAQMPAYQELVEEAIAYGRKLGGSQEDQIKNAIDKLFVLFGAEILKKIPGRVSTEVDARLSFDKDAMVARARRLIELYKEAGISKDRILIKLSSTWEGIQAGKELEEQHGIHCNMTLLFSFAQAVACAEAGVTLISPFVGRILDWHVANTDKKSYEPLEDPGVKSVTKIYNYYKKFSYKTIVMGASFRNTGEIKALAGCDFLTISPKLLGELLQDNAKLVPVLSAKAAQASDLEKIHLDEKSFRWLHNEDQMAVEKLSDGIRKFAADAVKLERMLTERMFNAENGK

SEQ ID NO: 89543 - protein, 93 aa, Homo sapiens
  Payload ID: 17933
  Gene Name: transaldolase 1
  ENSP ID: ENSP00000433501
MSSSPVKRQRMESALDQLKQFTTVVADTGDFHAIDEYKPQDATTNPSLILAAAQMPAYQELVEEAIAYGRKLGGNTKEDSGPSIHRSRRKALL

SEQ ID NO: 89544 - protein, 50 aa, Homo sapiens
  Payload ID: 17933
  Gene Name: transaldolase 1
  ENSP ID: ENSP00000435042
MSSSPVKRQRMESALDQLKQFTTVVADTGDFHVEMGFHRVSQDGLDLLTS

SEQ ID NO: 89545 - protein, 318 aa, Homo sapiens
  Payload ID: 17933
  Gene Name: transaldolase 1
  ENSP ID: ENSP00000437098
MSSSPVKRQRMESALDQLKQFTTVVADTGDFHAIDEYKPQDATTNPSLILAAAQMPAYQELVEEAIAYGRKLGGSQEDQIKNAIDKLFVLFGAEILKKIPGRVSTEVDARLSFDKDAMVARARRLIELYKEAGISKDRILIKLSSTWEGIQAGKELEEQHGIHCNMTLLFSFAQAVACAEAGVTLISPFVGRILDWHVANTDKKSYEPLEDPGVKSVTKIYNYYKKFSYKTIVMGASFRNTGEIKALAGCDFLTISPKLLGELLQDNAKLVPVLSAKPKPVTWKKSTWMRSLSVGCTTRTRWLWRSSLTGSASLPLMQ

SEQ ID NO: 89546 - protein, 433 aa, Homo sapiens
  Payload ID: 17934
  Gene Name: transcobalamin I (vitamin B12 binding protein, R binder family)
  Uniprot ID: P20061
  ENSP ID: ENSP00000257264
MRQSHQLPLVGLLLFSFIPSQLCEICEVSEENYIRLKPLLNTMIQSNYNRGTSAVNVVLSLKLVGIQIQTLMQKMIQQIKYNVKSRLSDVSSGELALIILALGVCRNAEENLIYDYHLIDKLENKFQAEIENMEAHNGTPLTNYYQLSLDVLALCLFNGNYSTAEVVNHFTPENKNYYFGSQFSVDTGAMAVLALTCVKKSLINGQIKADEGSLKNISIYTKSLVEKILSEKKENGLIGNTFSTGEAMQALFVSSDYYNENDWNCQQTLNTVLTEISQGAFSNPNAAAQVLPALMGKTFLDINKDSSCVSASGNFNISADEPITVTPPDSQSYISVNYSVRINETYFTNVTVLNGSVFLSVMEKAQKMNDTIFGFTMEERSWGPYITCIQGLCANNNDRTYWELLSGGEPLSQGAGSYVVRNGENLEVRWSKY

SEQ ID NO: 89547 - protein, 427 aa, Homo sapiens
  Payload ID: 17935
  Gene Name: transcobalamin II
  Uniprot ID: P20062
  ENSP ID: ENSP00000215838
MRHLGAFLFLLGVLGALTEMCEIPEMDSHLVEKLGQHLLPWMDRLSLEHLNPSIYVGLRLSSLQAGTKEDLYLHSLKLGYQQCLLGSAFSEDDGDCQGKPSMGQLALYLLALRANCEFVRGHKGDRLVSQLKWFLEDEKRAIGHDHKGHPHTSYYQYGLGILALCLHQKRVHDSVVDKLLYAVEPFHQGHHSVDTAAMAGLAFTCLKRSNFNPGRRQRITMAIRTVREEILKAQTPEGHFGNVYSTPLALQFLMTSPMRGAELGTACLKARVALLASLQDGAFQNALMISQLLPVLNHKTYIDLIFPDCLAPRVMLEPAAETIPQTQEIISVTLQVLSLLPPYRQSISVLAGSTVEDVLKKAHELGGFTYETQASLSGPYLTSVMGKAAGEREFWQLLRDPNTPLLQGIADYRPKDGETIELRLVSW

SEQ ID NO: 89548 - protein, 400 aa, Homo sapiens
  Payload ID: 17935
  Gene Name: transcobalamin II
  Uniprot ID: P20062
  ENSP ID: ENSP00000384914
MRHLGAFLFLLGVLGALTEMCEIPEMDSHLVEKLGQHLLPWMDRLSLEHLNPSIYVGLRLSSLQAGTKEDLYLHSLKLGYQQCLLGSAFSEDDGDCQGKPSMGQLALYLLALRANWHDHKGHPHTSYYQYGLGILALCLHQKRVHDSVVDKLLYAVEPFHQGHHSVDTAAMAGLAFTCLKRSNFNPGRRQRITMAIRTVREEILKAQTPEGHFGNVYSTPLALQFLMTSPMRGAELGTACLKARVALLASLQDGAFQNALMISQLLPVLNHKTYIDLIFPDCLAPRVMLEPAAETIPQTQEIISVTLQVLSLLPPYRQSISVLAGSTVEDVLKKAHELGGFTYETQASLSGPYLTSVMGKAAGEREFWQLLRDPNTPLLQGIADYRPKDGETIELRLVSW

SEQ ID NO: 89549 - protein, 423 aa, Homo sapiens
  Payload ID: 17935
  Gene Name: transcobalamin II
  ENSP ID: ENSP00000385914
MRHLGAFLFLLGVLGALTEMCEIPEMDSHLVEKLGQHLLPWMDRLSLEHLNPSIYVGLRLSSLQAGTKEDLYLHSLKLGYQQCLLGEDDGDCQGKPSMGQLALYLLALRANCEFVRGHKGDRLVSQLKWFLEDEKRAIGHDHKGHPHTSYYQYGLGILALCLHQKRVHDSVVDKLLYAVEPFHQGHHSVDTAAMAGLAFTCLKRSNFNPGRRQRITMAIRTVREEILKAQTPEGHFGNVYSTPLALQFLMTSPMRGAELGTACLKARVALLASLQDGAFQNALMISQLLPVLNHKTYIDLIFPDCLAPRVMLEPAAETIPQTQEIISVTLQVLSLLPPYRQSISVLAGSTVEDVLKKAHELGGFTYETQASLSGPYLTSVMGKAAGEREFWQLLRDPNTPLLQGIADYRPKDGETIELRLVSW

SEQ ID NO: 89550 - protein, 402 aa, Homo sapiens
  Payload ID: 17935
  Gene Name: transcobalamin II
  ENSP ID: ENSP00000394184
MDSHLVEKLGQHLLPWMDRLSLEHLNPSIYVGLRLSSLQAGTKEDLYLHSLKLGYQQCLLGSAFSEDDGDCQGKPSMGQLALYLLALRANCEFVRGHKGDRLVSQLKWFLEDEKRAIGHDHKGHPHTSYYQYGLGILALCLHQKRVHDSVVDKLLYAVEPFHQGHHSVDTAAMAGLAFTCLKRSNFNPGRRQRITMAIRTVREEILKAQTPEGHFGNVYSTPLALQFLMTSPMRGAELGTACLKARVALLASLQDGAFQNALMISQLLPVLNHKTYIDLIFPDCLAPRVMLEPAAETIPQTQEIISVTLQVLSLLPPYRQSISVLAGSTVEDVLKKAHELGGFTYETQASLSGPYLTSVMGKAAGEREFWQLLRDPNTPLLQGIADYRPKDGETIELRLVSW

SEQ ID NO: 89551 - protein, 351 aa, Homo sapiens
  Payload ID: 17936
  Gene Name: transcription elongation factor A (SII) N-terminal and central domain containing
  Uniprot ID: Q8N8B7
  ENSP ID: ENSP00000369974
MSDKNQIAARASLIEQLMSKRNFEDLGNHLTELETIYVTKEHLQETDVVRAVYRVLKNCPSVALKKKAKCLLSKWKAVYKQTHSKARNSPKLFPVRGNKEENSGPSHDPSQNETLGICSSNSLSSQDVAKLSEMIVPENRAIQLKPKEEHFGDGDPESTGKRSSELLDPTTPMRTKCIELLYAALTSSSTDQPKADLWQNFAREIEEHVFTLYSKNIKKYKTCIRSKVANLKNPRNSHLQQNLLSGTTSPREFAEMTVMEMANKELKQLRASYTESCIQEHYLPQVIDGTQTNKIKCRRCEKYNCKVTVIDRGTLFLPSWVRNSNPDEQMMTYVICNECGEQWYHSKWVCW

SEQ ID NO: 89552 - protein, 272 aa, Homo sapiens
  Payload ID: 17936
  Gene Name: transcription elongation factor A (SII) N-terminal and central domain containing
  ENSP ID: ENSP00000437074
  MOD_RES (1)..(1): Any amino acid
XKQTHSKARNSPKLFPVRGNKEENSGPSHDPSQNETLGICSSNSLSSQDVAKLSEMIVPENRAIQLKPKEEHFGDGDPESTGKRSSELLDPTTPMRTKCIELLYAALTSSSTDQPKADLWQNFAREIEEHVFTLYSKNIKKYKTCIRSKVANLKNPRNSHLQQNLLSGTTSPREFAEMTVMEMANKELKQLRASYTESCIQEHYLPQVIDGTQTNKIKCRRCEKYNCKVTVIDRGTLFLPSWVRNSNPDEQMMTYVICNECGEQWYHSKWVC

SEQ ID NO: 89553 - protein, 381 aa, Homo sapiens
  Payload ID: 17936
  Gene Name: transcription elongation factor A (SII) N-terminal and central domain containing
  Uniprot ID: Q8N8B7
  ENSP ID: ENSP00000440038
MISAHRKLCLPGSSNSPASAFRVAGTTAVKMSDKNQIAARASLIEQLMSKRNFEDLGNHLTELETIYVTKEHLQETDVVRAVYRVLKNCPSVALKKKAKCLLSKWKAVYKQTHSKARNSPKLFPVRGNKEENSGPSHDPSQNETLGICSSNSLSSQDVAKLSEMIVPENRAIQLKPKEEHFGDGDPESTGKRSSELLDPTTPMRTKCIELLYAALTSSSTDQPKADLWQNFAREIEEHVFTLYSKNIKKYKTCIRSKVANLKNPRNSHLQQNLLSGTTSPREFAEMTVMEMANKELKQLRASYTESCIQEHYLPQVIDGTQTNKIKCRRCEKYNCKVTVIDRGTLFLPSWVRNSNPDEQMMTYVICNECGEQWYHSKWVCW

SEQ ID NO: 89554 - protein, 208 aa, Homo sapiens
  Payload ID: 17937
  Gene Name: transcription elongation factor A (SII) N-terminal and central domain containing 2
  Uniprot ID: Q96MN5
  ENSP ID: ENSP00000234827
MDKFVIRTPRIQNSPQKKDSGGKVYKQATIESLKRVVVVEDIKRWKTMLELPDQTKENLVEALQELKKKIPSREVLKSTRIGHTVNKMRKHSDSEVASLAREVYTEWKTFTEKHSNRPSIEVRSDPKTESLRKNAQKLLSEALELKMDHLLVENIERETFHLCSRLINGPYRRTVRALVFTLKHRAEIRAQVKSGSLPVGTFVQTHKK

SEQ ID NO: 89555 - protein, 238 aa, Homo sapiens
  Payload ID: 17937
  Gene Name: transcription elongation factor A (SII) N-terminal and central domain containing 2
  ENSP ID: ENSP00000360382
MAVFSGVLESALFLDQNTLQARQGSRSPLTMDKFVIRTPRIQNSPQKKDSGGKVYKQATIESLKRVVVVEDIKRWKTMLELPDQTKENLVEALQELKKKIPSREVLKSTRIGHTVNKMRKHSDSEVASLAREVYTEWKTFTEKHSNRPSIEVRSDPKTESLRKNAQKLLSEALELKMDHLLVENIERETFHLCSRLINGPYRRTVRALVFTLKHRAEIRAQVKSGSLPVGTFVQTHKK

SEQ ID NO: 89556 - protein, 130 aa, Homo sapiens
  Payload ID: 17937
  Gene Name: transcription elongation factor A (SII) N-terminal and central domain containing 2
  ENSP ID: ENSP00000486433
MEGREVYLWYSVDSRGDFLVFLCPIFFSFSFSEVESLSPRLECSGTISAHCNLCLLGSSYSPASASRVTGITGMCHHAQLIFVFLVEMEFRHVGQTSFELLASSSPPASASQSAGITGVSHCAWPLAQYL

SEQ ID NO: 89557 - protein, 280 aa, Homo sapiens
  Payload ID: 17938
  Gene Name: transcription elongation factor A (SII), 1
  Uniprot ID: P23193
  ENSP ID: ENSP00000395483
MEDEVVRFAKKMDKMVQKKNASTRIGMSVNAIRKQSTDEEVTSLAKSLIKSWKKLLDGPSTEKDLDEKKKEPAITSQNSPEAREESTSSGNVSNRKDETNARDTYVSSFPRAPSTSDSVRLKCREMLAAALRTGDDYIAIGADEEELGSQIEEAIYQEIRNTDMKYKNRVRSRISNLKDAKNPNLRKNVLCGNIPPDLFARMTAEEMASDELKEMRKNLTKEAIREHQMAKTGGTQTDLFTCGKCKKKNCTYTQVQTRSADEPMTTFVVCNECGNRWKFC

SEQ ID NO: 89558 - protein, 111 aa, Homo sapiens
  Payload ID: 17938
  Gene Name: transcription elongation factor A (SII), 1
  ENSP ID: ENSP00000428370
MEDEVVRFAKKMDKMVQKKNAAGALDLLKELKNIPMTLELLQSTRIGMSVNAIRKQSTDEEVTSLAKSLIKSWKKLLDGPSTEKDLDEKKKEPAITSQNSPEAREERYFTV

SEQ ID NO: 89559 - protein, 301 aa, Homo sapiens
  Payload ID: 17938
  Gene Name: transcription elongation factor A (SII), 1
  Uniprot ID: P23193
  ENSP ID: ENSP00000428426
MEDEVVRFAKKMDKMVQKKNAAGALDLLKELKNIPMTLELLQSTRIGMSVNAIRKQSTDEEVTSLAKSLIKSWKKLLDGPSTEKDLDEKKKEPAITSQNSPEAREESTSSGNVSNRKDETNARDTYVSSFPRAPSTSDSVRLKCREMLAAALRTGDDYIAIGADEEELGSQIEEAIYQEIRNTDMKYKNRVRSRISNLKDAKNPNLRKNVLCGNIPPDLFARMTAEEMASDELKEMRKNLTKEAIREHQMAKTGGTQTDLFTCGKCKKKNCTYTQVQTRSADEPMTTFVVCNECGNRWKFC

SEQ ID NO: 89560 - protein, 47 aa, Homo sapiens
  Payload ID: 17938
  Gene Name: transcription elongation factor A (SII), 1
  ENSP ID: ENSP00000428868
MEDEVVRFAKKMDKMVQKKNAAGALDLLKELKNIPMTLELLQCAADP

SEQ ID NO: 89561 - protein, 90 aa, Homo sapiens
  Payload ID: 17938
  Gene Name: transcription elongation factor A (SII), 1
  ENSP ID: ENSP00000429182
MEDEVVRFAKKMDKMVQKKNAAGALDLLKELKNIPMTLELLQSTRIGMSVNAIRKQSTDEEVTSLAKSLIKSWKKLLGIIDLPLHIFMML

SEQ ID NO: 89562 - protein, 117 aa, Homo sapiens
  Payload ID: 17938
  Gene Name: transcription elongation factor A (SII), 1
  ENSP ID: ENSP00000429192
MEDEVVRFAKKMDKMVQKKNAAGALDLLKELKNIPMTLELLQEMASDELKEMRKNLTKEAIREHQMAKTGGTQTDLFTCGKCKKKNCTYTQVQTRSADEPMTTFVVCNECGNRWKFC

SEQ ID NO: 89563 - protein, 45 aa, Homo sapiens
  Payload ID: 17938
  Gene Name: transcription elongation factor A (SII), 1
  ENSP ID: ENSP00000430450
MEDEVVRFAKKMDKMVQKKNAAGALDLLKELKNIPMTLELLQWLP

SEQ ID NO: 89564 - protein, 246 aa, Homo sapiens
  Payload ID: 17939
  Gene Name: transcription elongation factor A (SII), 2
  ENSP ID: ENSP00000339432
MDLLRELKAMPITLHLLQSTRVGMSVNALRKQSSDEEVIALAKSLIKSWKKLLDASDAKARERGRGMPLPTSSRDASEAPDPSRKRPELPRAPSTPRITTFPPVPVTCDAVRNKCREMLTAALQTDHDHVAIGADCERLSAQIEECIFRDVGNTDMKYKNRVRSRISNLKDAKNPDLRRNVLCGAITPQQIAVMTSEEMASDELKEIRKAMTKEAIREHQMARTGGTQTDLFTCGKCRKKNCTYTQ

SEQ ID NO: 89565 - protein, 299 aa, Homo sapiens
  Payload ID: 17939
  Gene Name: transcription elongation factor A (SII), 2
  Uniprot ID: Q15560
  ENSP ID: ENSP00000343515
MMGKEEEIARIARRLDKMVTKKSAEGAMDLLRELKAMPITLHLLQSTRVGMSVNALRKQSSDEEVIALAKSLIKSWKKLLDASDAKARERGRGMPLPTSSRDASEAPDPSRKRPELPRAPSTPRITTFPPVPVTCDAVRNKCREMLTAALQTDHDHVAIGADCERLSAQIEECIFRDVGNTDMKYKNRVRSRISNLKDAKNPDLRRNVLCGAITPQQIAVMTSEEMASDELKEIRKAMTKEAIREHQMARTGGTQTDLFTCGKCRKKNCTYTQVQTRSSDEPMTTFVVCNECGNRWKFC

SEQ ID NO: 89566 - protein, 272 aa, Homo sapiens
  Payload ID: 17939
  Gene Name: transcription elongation factor A (SII), 2
  Uniprot ID: Q15560
  ENSP ID: ENSP00000354552
MDLLRELKAMPITLHLLQSTRVGMSVNALRKQSSDEEVIALAKSLIKSWKKLLDASDAKARERGRGMPLPTSSRDASEAPDPSRKRPELPRAPSTPRITTFPPVPVTCDAVRNKCREMLTAALQTDHDHVAIGADCERLSAQIEECIFRDVGNTDMKYKNRVRSRISNLKDAKNPDLRRNVLCGAITPQQIAVMTSEEMASDELKEIRKAMTKEAIREHQMARTGGTQTDLFTCGKCRKKNCTYTQVQTRSSDEPMTTFVVCNECGNRWKFC

SEQ ID NO: 89567 - protein, 242 aa, Homo sapiens
  Payload ID: 17939
  Gene Name: transcription elongation factor A (SII), 2
  ENSP ID: ENSP00000378493
MMGKEEEIARIARRLDKMVTKKSAEGAMDLLRELKAMPITLHLLQSTRVGMSVNALRKQSSDEEVIALAKSLIKSWKKLLDASDAKARERGRGMPLPTSSRDASEAPDPSRKRPELPRAPSTPRITTFPPVPVTCDAVRNKCREMLTAALQTDHDHVAIGADCERLSAQIEEYILWVGAVGLGFWWSQEAAWPGALWWLLDATAQLSRGHLPGWSPAWVVRLSHLRRAPGPAEGLILSACGA

SEQ ID NO: 89568 - protein, 82 aa, Homo sapiens
  Payload ID: 17939
  Gene Name: transcription elongation factor A (SII), 2
  ENSP ID: ENSP00000391807
MDLLRELKAMPITLHLLQSTRVGMSVNALRKQSSDEEVIALAKSLIKSWKKLLDASDAKARERGRGMPLPTSSRDASEAPDP

SEQ ID NO: 89569 - protein, 246 aa, Homo sapiens; identical to SEQ ID NO: 89564
  Payload ID: 17939
  Gene Name: transcription elongation factor A (SII), 2
  ENSP ID: ENSP00000407085

SEQ ID NO: 89570 - protein, 270 aa, Homo sapiens
  Payload ID: 17939
  Gene Name: transcription elongation factor A (SII), 2
  ENSP ID: ENSP00000416026
MDLLRELKAMPITLHLLQSTRVGMSVNALRKQSSDEEVIALAKSLIKSWKKLLDASDAKARERGRGMPLPTSSRDASEAPDPSRKRPELPRAPSTPRITTFPPVPVTCDAVRNKCREMLTAALQTDHDHVAIGADCERLSAQIEECIFRDVGNTDMKYKNRVRSRISNLKDAKNPDLRRNVLCGAITPQQIAVMTSEEMASDELKEIRKAMTKEAIREHQMARTGGTQTDLFTCGKCRKKNCTYTQVQTRSSDEPMTTFVVCNECGNRWK

SEQ ID NO: 89571 - protein, 154 aa, Homo sapiens
  Payload ID: 17940
  Gene Name: transcription elongation factor A (SII), 3
  Uniprot ID: O75764
  ENSP ID: ENSP00000363729
MGQEEELLRIAKKLEKMVARKNTEGALDLLKKLHSCQMSIQLLQTTRIGVAVNGVRKHCSDKEVVSLAKVLIKNWKRLLDSPGPPKGEKGEEREKAKKKEKGLECSDWKPEAGLSPPRKKREDPKTRRDSVDSKSSASSSPKRPSVERACSLMQ

SEQ ID NO: 89572 - protein, 348 aa, Homo sapiens
  Payload ID: 17940
  Gene Name: transcription elongation factor A (SII), 3
  Uniprot ID: O75764
  ENSP ID: ENSP00000406293
MGQEEELLRIAKKLEKMVARKNTEGALDLLKKLHSCQMSIQLLQTTRIGVAVNGVRKHCSDKEVVSLAKVLIKNWKRLLDSPGPPKGEKGEEREKAKKKEKGLECSDWKPEAGLSPPRKKREDPKTRRDSVDSKSSASSSPKRPSVERSNSSKSKAESPKTPSSPLTPTFASSMCLLAPCYLTGDSVRDKCVEMLSAALKADDDYKDYGVNCDKMASEIEDHIYQELKSTDMKYRNRVRSRISNLKDPRNPGLRRNVLSGAISAGLIAKMTAEEMASDELRELRNAMTQEAIREHQMAKTGGTTTDLFQCSKCKKKNCTYNQVQTRSADEPMTTFVLCNECGNRWKFC

SEQ ID NO: 89573 - protein, 78 aa, Homo sapiens
  Payload ID: 17940
  Gene Name: transcription elongation factor A (SII), 3
  ENSP ID: ENSP00000474530
EMASDELRELRNAMTQEAIREHQMAKTGGTTTDLFQCSKCKKKNCTYNQVQTRSADEPMTTFVLCNECGNRWKMESAS

SEQ ID NO: 89574 - protein, 117 aa, Homo sapiens
  Payload ID: 17940
  Gene Name: transcription elongation factor A (SII), 3
  ENSP ID: ENSP00000474977
MSIQLLQTTRIGVAVNGVRKHCSDKEVVSLAKVLIKNWKRLLDSPGPPKGEKGEEREKAKKKEKGLECSDWKPEAGLSPPRKKREDPKTRRDSVDSKSSASSSPKRPSVERACSLMQ

SEQ ID NO: 89575 - protein, 154 aa, Homo sapiens; identical to SEQ ID NO: 89571
  Payload ID: 17940
  Gene Name: Transcription elongation factor A (SII), 3
  ENSP ID: ENSP00000488968

SEQ ID NO: 89576 - protein, 78 aa, Homo sapiens; identical to SEQ ID NO: 89573
  Payload ID: 17940
  Gene Name: Transcription elongation factor A (SII), 3
  ENSP ID: ENSP00000488976

SEQ ID NO: 89577 - protein, 117 aa, Homo sapiens; identical to SEQ ID NO: 89574
  Payload ID: 17940
  Gene Name: Transcription elongation factor A (SII), 3
  ENSP ID: ENSP00000489390

SEQ ID NO: 89578 - protein, 348 aa, Homo sapiens; identical to SEQ ID NO: 89572
  Payload ID: 17940
  Gene Name: Transcription elongation factor A (SII), 3
  ENSP ID: ENSP00000489592

SEQ ID NO: 89579 - protein, 159 aa, Homo sapiens
  Payload ID: 17941
  Gene Name: transcription elongation factor A (SII)-like 1
  Uniprot ID: Q15170
  ENSP ID: ENSP00000361707
MDKPRKENEEEPQSAPKTDEERPPVEHSPEKQSPEEQSSEEQSSEEEFFPEELLPELLPEMLLSEERPPQEGLSRKDLFEGRPPMEQPPCGVGKHKLEEGSFKERLARSRPQFRGDIHGRNLSNEEMIQAADELEEMKRVRNKLMIMHWKAKRSRPYPI

SEQ ID NO: 89580 - protein, 159 aa, Homo sapiens; identical to SEQ ID NO: 89579
  Payload ID: 17941
  Gene Name: transcription elongation factor A (SII)-like 1
  Uniprot ID: Q15170
  ENSP ID: ENSP00000361708

SEQ ID NO: 89581 - protein, 159 aa, Homo sapiens; identical to SEQ ID NO: 89579
  Payload ID: 17941
  Gene Name: transcription elongation factor A (SII)-like 1
  Uniprot ID: Q15170
  ENSP ID: ENSP00000361709

SEQ ID NO: 89582 - protein, 227 aa, Homo sapiens
  Payload ID: 17942
  Gene Name: transcription elongation factor A (SII)-like 2
  Uniprot ID: Q9H3H9
  ENSP ID: ENSP00000332359
MEKLFNENEGMPSNQGKIDNEEQPPHEGKPEVACILEDKKLENEGNTENTGKRVEEPLKDKEKPESAGKAKGEGKSERKGKSEMQGGSKTEGKPERGGRAEGEGEPDSEREPESEGEPESETRAAGKRPAEDDIPRKAKRKTNKGLAQYLKQYKEAIHDMNFSNEDMIREFDNMARVEDKRRKSKQKLGAFLWMQRNLQDPFYPRGPREFRGGCRAPRRDTEDIPYV

SEQ ID NO: 89583 - protein, 227 aa, Homo sapiens; identical to SEQ ID NO: 89582
  Payload ID: 17942
  Gene Name: transcription elongation factor A (SII)-like 2
  Uniprot ID: Q9H3H9
  ENSP ID: ENSP00000361866

SEQ ID NO: 89584 - protein, 200 aa, Homo sapiens
  Payload ID: 17943
  Gene Name: transcription elongation factor A (SII)-like 3
  Uniprot ID: Q969E4
  ENSP ID: ENSP00000243286
MEKPYNKNEGNLENEGKPEDEVEPDDEGKSDEEEKPDVEGKTECEGKREDEGEPGDEGQLEDEGSQEKQGRSEGEGKPQGEGKPASQAKPESQPRAAEKRPAEDYVPRKAKRKTDRGTDDSPKDSQEDLQERHLSSEEMMRECGDVSRAQEELRKKQKMGGFHWMQRDVQDPFAPRGQRGVRGVRGGGRGQRGLHDIPYL

SEQ ID NO: 89585 - protein, 200 aa, Homo sapiens; identical to SEQ ID NO: 89584
  Payload ID: 17943
  Gene Name: transcription elongation factor A (SII)-like 3
  Uniprot ID: Q969E4
  ENSP ID: ENSP00000361710

SEQ ID NO: 89586 - protein, 200 aa, Homo sapiens; identical to SEQ ID NO: 89584
  Payload ID: 17943
  Gene Name: transcription elongation factor A (SII)-like 3
  Uniprot ID: Q969E4
  ENSP ID: ENSP00000361711

SEQ ID NO: 89587 - protein, 358 aa, Homo sapiens
  Payload ID: 17944
  Gene Name: transcription elongation factor A (SII)-like 4
  Uniprot ID: Q96EI5
  ENSP ID: ENSP00000361712
MPAGGQAPQLTPVIPAFWEARGLPNSKGRDKVHICQCEEWKGHISYVERDITTSEIKSLPQVSVRAFHAASGTLEWRKGNGYGRGKGWGWGRVESREAGPSVDRDGGLRVCCSQRSAKPEKEEQPVQNPRRSVKDRKRRGNLDMEKLYSENEGMASNQGKMENEEQPQDERKPEVTCTLEDKKLENEGKTENKGKTGDEEMLKDKGKPESEGEAKEGKSEREGESEMEGGSEREGKPEIEGKPESEGEPGSETRAAGKRPAEDDVPRKAKRKTNKGLAHYLKEYKEAIHDMNFSNEDMIREFDNMAKVQDEKRKSKQKLGAFLWMQRNLQDPFYPRGPREFRGGCRAPRRDIEDIPYV

SEQ ID NO: 89588 - protein, 58 aa, Homo sapiens
  Payload ID: 17944
  Gene Name: transcription elongation factor A (SII)-like 4
  ENSP ID: ENSP00000394029
MEKLYSENEGMASNQGKMENEEQPQDERKPEVTCTLEDKKLENEGKTENKGKTGDEEM

SEQ ID NO: 89589 - protein, 50 aa, Homo sapiens
  Payload ID: 17944
  Gene Name: transcription elongation factor A (SII)-like 4
  ENSP ID: ENSP00000411320
MEKLYSENEGMASNQGKMENEEQPQDERKPEVTCTLEDKKLENEGKTENK

SEQ ID NO: 89590 - protein, 215 aa, Homo sapiens
  Payload ID: 17944
  Gene Name: transcription elongation factor A (SII)-like 4
  Uniprot ID: Q96EI5
  ENSP ID: ENSP00000415564
MEKLYSENEGMASNQGKMENEEQPQDERKPEVTCTLEDKKLENEGKTENKGKTGDEEMLKDKGKPESEGEAKEGKSEREGESEMEGGSEREGKPEIEGKPESEGEPGSETRAAGKRPAEDDVPRKAKRKTNKGLAHYLKEYKEAIHDMNFSNEDMIREFDNMAKVQDEKRKSKQKLGAFLWMQRNLQDPFYPRGPREFRGGCRAPRRDIEDIPYV

SEQ ID NO: 89591 - protein, 215 aa, Homo sapiens; identical to SEQ ID NO: 89590
  Payload ID: 17944
  Gene Name: transcription elongation factor A (SII)-like 4
  Uniprot ID: Q96EI5
  ENSP ID: ENSP00000421156

SEQ ID NO: 89592 - protein, 215 aa, Homo sapiens; identical to SEQ ID NO: 89590
  Payload ID: 17944
  Gene Name: transcription elongation factor A (SII)-like 4
  Uniprot ID: Q96EI5
  ENSP ID: ENSP00000421857

SEQ ID NO: 89593 - protein, 91 aa, Homo sapiens
  Payload ID: 17944
  Gene Name: transcription elongation factor A (SII)-like 4
  ENSP ID: ENSP00000423723
MEKLYSENEGMASNQGKMENEEQPQDERKPEVTCTLEDKKLENEGKTENKGKTGDEEMLKDKGKPESEGEAKEGKSEREGESEMEGGSERE

SEQ ID NO: 89594 - protein, 215 aa, Homo sapiens; identical to SEQ ID NO: 89590
  Payload ID: 17944
  Gene Name: transcription elongation factor A (SII)-like 4
  Uniprot ID: Q96EI5
  ENSP ID: ENSP00000424314

SEQ ID NO: 89595 - protein, 76 aa, Homo sapiens
  Payload ID: 17944
  Gene Name: transcription elongation factor A (SII)-like 4
  ENSP ID: ENSP00000425883
MEKLYSENEGMASNQGKMENEEQPQDERKPEVTCTLEDKKLENEGKTENKGKTGDEEMLKDKGKPESEGEAKEGKS

SEQ ID NO: 89596 - protein, 129 aa, Homo sapiens
  Payload ID: 17944
  Gene Name: transcription elongation factor A (SII)-like 4
  ENSP ID: ENSP00000427053
MEKLYSENEGMASNQGKMENEEQPQDERKPEVTCTLEDKKLENEGKTENKGKTGDEEMLKDKGKPESEGEAKEGKSEREGESEMEGGSEREGKPEIEGKPESEGEPGSETRAAGKRPAEDDVPRKAKRK

SEQ ID NO: 89597 - protein, 215 aa, Homo sapiens; identical to SEQ ID NO: 89590
  Payload ID: 17944
  Gene Name: transcription elongation factor A (SII)-like 4
  Uniprot ID: Q96EI5
  ENSP ID: ENSP00000427494

SEQ ID NO: 89598 - protein, 186 aa, Homo sapiens
  Payload ID: 17944
  Gene Name: transcription elongation factor A (SII)-like 4
  ENSP ID: ENSP00000480202
MEKLYSENEGMASNQGKMENEEQPQDERKPEVTCTLEDKKLENEGKTENKGKTGDEEMLKDKGKPEIEGKPESEGEPGSETRAAGKRPAEDDVPRKAKRKTNKGLAHYLKEYKEAIHDMNFSNEDMIREFDNMAKVQDEKRKSKQKLGAFLWMQRNLQDPFYPRGPREFRGGCRAPRRDIEDIPYV

SEQ ID NO: 89599 - protein, 206 aa, Homo sapiens
  Payload ID: 17945
  Gene Name: transcription elongation factor A (SII)-like 5
  Uniprot ID: Q5H9L2
  ENSP ID: ENSP00000361765
MEKLYKENEGKPENERNLESEGKPEDEGSTEDEGKSDEEEKPDMEGKTECEGKREDEGEPGDEGQLEDEGNQEKQGKSEGEDKPQSEGKPASQAKPESQPRAAEKRPAEDYVPRKAKRKTDRGTDDSPKDSQEDLQERHLSSEEMMRECGDVSRAQEELRKKQKMGGFHWMQRDVQDPFAPRGQRGVRGVRGGGRGQKDLEDVPYV

SEQ ID NO: 89600 - protein, 183 aa, Homo sapiens
  Payload ID: 17946
  Gene Name: transcription elongation factor A (SII)-like 6
  Uniprot ID: Q6IPX3
  ENSP ID: ENSP00000361859
MEKPYNKNEGNLENEGKPEDEVEPDDEGKSDEEEKPDAEGKTECEGKRKAEGEPGDEGQLEDKGSQEKQGKSEGEGKPQGEGKPASQAKPEGQPRAAEKRPAGDYVPRKAKRKTDRGTDDSPKDSQEDLQERHLSSEEMMRECGDVSRAQEELRKKQKMGGFHWMQRDVQDPFAQGDNGVSGE

SEQ ID NO: 89601 - protein, 183 aa, Homo sapiens; identical to SEQ ID NO: 89600
  Payload ID: 17946
  Gene Name: transcription elongation factor A (SII)-like 6
  Uniprot ID: Q6IPX3
  ENSP ID: ENSP00000361860

SEQ ID NO: 89602 - protein, 199 aa, Homo sapiens
  Payload ID: 17946
  Gene Name: transcription elongation factor A (SII)-like 6
  ENSP ID: ENSP00000482574
MEKPYNKNEGNLENEGKPEDEVEPDDEGKSDEEEKPDAEGKTECEGKRKAEGEPGDEGQLEDKGSQEKQGKSEGEGKPQGEGKPASQAKPEGQPRAAEKRPAGDYVPRKAKRKTDRGTDDSPKDSQEDLQERHLSSEEMMRECGDVSRAQEELRKKQKMGGFHWMQRDVQDPFAQGQRGVRGVRGGGRGQRGLHDIPYL

SEQ ID NO: 89603 - protein, 100 aa, Homo sapiens
  Payload ID: 17947
  Gene Name: transcription elongation factor A (SII)-like 7
  Uniprot ID: Q9BRU2
  ENSP ID: ENSP00000329794
MQKPCKENEGKPKCSVPKREEKRPYGEFERQQTEGNFRQRLLQSLEEFKEDIDYRHFKDEEMTREGDEMERCLEEIRGLRKKFRALHSNHRHSRDRPYPI

SEQ ID NO: 89604 - protein, 100 aa, Homo sapiens; identical to SEQ ID NO: 89603
  Payload ID: 17947
  Gene Name: transcription elongation factor A (SII)-like 7
  Uniprot ID: Q9BRU2
  ENSP ID: ENSP00000361751

SEQ ID NO: 89605 - protein, 117 aa, Homo sapiens
  Payload ID: 17948
  Gene Name: transcription elongation factor A (SII)-like 8
  Uniprot ID: Q8IYN2
  ENSP ID: ENSP00000353093
MQKSCEENEGKPQNMPKAEEDRPLEDVPQEAEGNPQPSEEGVSQEAEGNPRGGPNQPGQGFKEDTPVRHLDPEEMIRGVDELERLREEIRRVRNKFVMMHWKQRHSRSRPYPVCFRP

SEQ ID NO: 89606 - protein, 117 aa, Homo sapiens; identical to SEQ ID NO: 89605
  Payload ID: 17948
  Gene Name: transcription elongation factor A (SII)-like 8
  Uniprot ID: Q8IYN2
  ENSP ID: ENSP00000361770

SEQ ID NO: 89607 - protein, 74 aa, Homo sapiens
  Payload ID: 17948
  Gene Name: transcription elongation factor A (SII)-like 8
  ENSP ID: ENSP00000390880
MQKSCEENEGKPQNMPKAEEDRPLEDVPQEDTPVRHLDPEEMIRGVDELERLREEIRRVRNKFVMMHWKQRHSR

SEQ ID NO: 89608 - protein, 112 aa, Homo sapiens
  Payload ID: 17949
  Gene Name: transcription elongation factor B (SIII), polypeptide 1 (15kDa, elongin C)
  Uniprot ID: Q15369
  ENSP ID: ENSP00000284811
MDGEEKTYGGCEGPDAMYVKLISSDGHEFIVKREHALTSGTIKAMLSGPGQFAENETNEVNFREIPSHVLSKVCMYFTYKVRYTNSSTEIPEFPIAPEIALELLMAANFLDC

SEQ ID NO: 89609 - protein, 112 aa, Homo sapiens; identical to SEQ ID NO: 89608
  Payload ID: 17949
  Gene Name: transcription elongation factor B (SIII), polypeptide 1 (15kDa, elongin C)
  Uniprot ID: Q15369
  ENSP ID: ENSP00000428074

SEQ ID NO: 89610 - protein, 112 aa, Homo sapiens; identical to SEQ ID NO: 89608
  Payload ID: 17949
  Gene Name: transcription elongation factor B (SIII), polypeptide 1 (15kDa, elongin C)
  Uniprot ID: Q15369
  ENSP ID: ENSP00000428171

SEQ ID NO: 89611 - protein, 112 aa, Homo sapiens; identical to SEQ ID NO: 89608
  Payload ID: 17949
  Gene Name: transcription elongation factor B (SIII), polypeptide 1 (15kDa, elongin C)
  Uniprot ID: Q15369
  ENSP ID: ENSP00000428334

SEQ ID NO: 89612 - protein, 112 aa, Homo sapiens; identical to SEQ ID NO: 89608
  Payload ID: 17949
  Gene Name: transcription elongation factor B (SIII), polypeptide 1 (15kDa, elongin C)
  Uniprot ID: Q15369
  ENSP ID: ENSP00000429596

SEQ ID NO: 89613 - protein, 89 aa, Homo sapiens
  Payload ID: 17949
  Gene Name: transcription elongation factor B (SIII), polypeptide 1 (15kDa, elongin C)
  ENSP ID: ENSP00000429789
MDGEEKTYGGCEGPDAMYVKLISSDGHEFIVKREHALTSGTIKAMLSGPGQFAENETNEVNFREIPSHVLSKVCMYFTYKVRYTNSSTE

SEQ ID NO: 89614 - protein, 112 aa, Homo sapiens; identical to SEQ ID NO: 89608
  Payload ID: 17949
  Gene Name: transcription elongation factor B (SIII), polypeptide 1 (15kDa, elongin C)
  Uniprot ID: Q15369
  ENSP ID: ENSP00000429906

SEQ ID NO: 89615 - protein, 96 aa, Homo sapiens
  Payload ID: 17949
  Gene Name: transcription elongation factor B (SIII), polypeptide 1 (15kDa, elongin C)
  Uniprot ID: Q15369
  ENSP ID: ENSP00000430224
MYVKLISSDGHEFIVKREHALTSGTIKAMLSGPGQFAENETNEVNFREIPSHVLSKVCMYFTYKVRYTNSSTEIPEFPIAPEIALELLMAANFLDC

SEQ ID NO: 89616 - protein, 65 aa, Homo sapiens
  Payload ID: 17949
  Gene Name: transcription elongation factor B (SIII), polypeptide 1 (15kDa, elongin C)
  ENSP ID: ENSP00000473408
MDGEEKTYGGCEGPDAMYVKLISSDGHEFIVKREHALTSGTIKAMLSGPDMVSTMLPRLKCSGCS

SEQ ID NO: 89617 - protein, 112 aa, Homo sapiens; identical to SEQ ID NO: 89608
  Payload ID: 17949
  Gene Name: transcription elongation factor B (SIII), polypeptide 1 (15kDa, elongin C)
  Uniprot ID: Q15369
  ENSP ID: ENSP00000478121

SEQ ID NO: 89618 - protein, 161 aa, Homo sapiens
  Payload ID: 17950
  Gene Name: transcription elongation factor B (SIII), polypeptide 2 (18kDa, elongin B)
  Uniprot ID: Q15370
  ENSP ID: ENSP00000262306
MDVFLMIRRHKTTIFTDAKESSTVFELKRIVEGILKRPPDEQRLYKDDQLLDDGKTLGECGFTSQTARPQAPATVGLAFRADDTFEALCIEPFSSPPELPDVMKPQDSGSSANEQAVHLHVHSQTMAKSRNTSWSQCPGLTACSTREPQDGPTQVHPRWGL

SEQ ID NO: 89619 - protein, 118 aa, Homo sapiens
  Payload ID: 17950
  Gene Name: transcription elongation factor B (SIII), polypeptide 2 (18kDa, elongin B)
  Uniprot ID: Q15370
  ENSP ID: ENSP00000386652
MDVFLMIRRHKTTIFTDAKESSTVFELKRIVEGILKRPPDEQRLYKDDQLLDDGKTLGECGFTSQTARPQAPATVGLAFRADDTFEALCIEPFSSPPELPDVMKPQDSGSSANEQAVQ

SEQ ID NO: 89620 - protein, 113 aa, Homo sapiens
  Payload ID: 17950
  Gene Name: transcription elongation factor B (SIII), polypeptide 2 (18kDa, elongin B)
  ENSP ID: ENSP00000387189
MIRRHKTTIFTDAKESSTVFELKRIVEGILKRPPDEQRLYKDDQLLDDGKTLGECGFTSQTARPQAPATVGLAFRADDTFEALCIEPFSSPPELPDVMKPQDSGSSANEQAVQ

SEQ ID NO: 89621 - protein, 140 aa, Homo sapiens
  Payload ID: 17950
  Gene Name: transcription elongation factor B (SIII), polypeptide 2 (18kDa, elongin B)
  ENSP ID: ENSP00000458213
DVFLMIRRHKTTIFTDAKESSTVFELKRIVEGILKRPPDEQRLYKLLVRSLWDLPHVGPLPRSCFSPQDDQLLDDGKTLGECGFTSQTARPQAPATVGLAFRADDTFEALCIEPFSSPPELPDVMKPQDSGSSANEQAVQ

SEQ ID NO: 89622 - protein, 66 aa, Homo sapiens
  Payload ID: 17950
  Gene Name: transcription elongation factor B (SIII), polypeptide 2 (18kDa, elongin B)
  ENSP ID: ENSP00000458443
MDVFLMIRRHKTTIFTDAKESSTVFELKRIVEGILKRPPDEQRLYKMTPLRPCASSRFPARQSCPM

SEQ ID NO: 89623 - protein, 798 aa, Homo sapiens
  Payload ID: 17951
  Gene Name: transcription elongation factor B (SIII), polypeptide 3 (110kDa, elongin A)
  Uniprot ID: Q14241
  ENSP ID: ENSP00000395574
MHGGRSCGPRTRREPSSGEEAAPVTAMAAESALQVVEKLQARLAANPDPKKLLKYLKKLSTLPITVDILAETGVGKTVNSLRKHEHVGSFARDLVAQWKKLVPVERNAEPDEQDFEKSNSRKRPRDALQKEEEMEGDYQETWKATGSRSYSPDHRQKKHRKLSELERPHKVSHGHERRDERKRCHRMSPTYSSDPESSDYGHVQSPPSCTSPHQMYVDHYRSLEEDQEPIVSHQKPGKGHSNAFQDRLGASQERHLGEPHGKGVVSQNKEHKSSHKDKRPVDAKSDEKASVVSREKSHKALSKEENRRPPSGDNAREKPPSSGVKKEKDREGSSLKKKCLPPSEAASDNHLKKPKHRDPEKAKLDKSKQGLDSFDTGKGAGDLLPKVKEKGSNNLKTPEGKVKTNLDRKSLGSLPKVEETDMEDEFEQPTMSFESYLSYDQPRKKKKKIVKTSATALGDKGLKKNDSKSTGKNLDSVQKLPKVNKTKSEKPAGADLAKLRKVPDVLPVLPDLPLPAIQANYRPLPSLELISSFQPKRKAFSSPQEEEEAGFTGRRMNSKMQVYSGSKCAYLPKMMTLHQQCIRVLKNNIDSIFEVGGVPYSVLEPVLERCTPDQLYRIEEYNHVLIEETDQLWKVHCHRDFKEERPEEYESWREMYLRLQDAREQRLRVLTKNIQFAHANKPKGRQAKMAFVNSVAKPPRDVRRRQEKFGTGGAAVPEKIKIKPAPYPMGSSHASASSISFNPSPEEPAYDGPSTSSAHLAPVVSSTVSYDPRKPTVKKIAPMMAKTIKAFKNRFSRR

SEQ ID NO: 89624 - protein, 772 aa, Homo sapiens
  Payload ID: 17951
  Gene Name: transcription elongation factor B (SIII), polypeptide 3 (110kDa, elongin A)
  ENSP ID: ENSP00000476781
MAAESALQVVEKLQARLAANPDPKKLLKYLKKLSTLPITVDILAETGVGKTVNSLRKHEHVGSFARDLVAQWKKLVPVERNAEPDEQDFEKSNSRKRPRDALQKEEEMEGDYQETWKATGSRSYSPDHRQKKHRKLSELERPHKVSHGHERRDERKRCHRMSPTYSSDPESSDYGHVQSPPSCTSPHQMYVDHYRSLEEDQEPIVSHQKPGKGHSNAFQDRLGASQERHLGEPHGKGVVSQNKEHKSSHKDKRPVDAKSDEKASVVSREKSHKALSKEENRRPPSGDNAREKPPSSGVKKEKDREGSSLKKKCLPPSEAASDNHLKKPKHRDPEKAKLDKSKQGLDSFDTGKGAGDLLPKVKEKGSNNLKTPEGKVKTNLDRKSLGSLPKVEETDMEDEFEQPTMSFESYLSYDQPRKKKKKIVKTSATALGDKGLKKNDSKSTGKNLDSVQKLPKVNKTKSEKPAGADLAKLRKVPDVLPVLPDLPLPAIQANYRPLPSLELISSFQPKRKAFSSPQEEEEAGFTGRRMNSKMQVYSGSKCAYLPKMMTLHQQCIRVLKNNIDSIFEVGGVPYSVLEPVLERCTPDQLYRIEEYNHVLIEETDQLWKVHCHRDFKEERPEEYESWREMYLRLQDAREQRLRVLTKNIQFAHANKPKGRQAKMAFVNSVAKPPRDVRRRQEKFGTGGAAVPEKIKIKPAPYPMGSSHASASSISFNPSPEEPAYDGPSTSSAHLAPVVSSTVSYDPRKPTVKKIAPMMAKTIKAFKNRFSRR

SEQ ID NO: 89625 - protein, 798 aa, Homo sapiens; identical to SEQ ID NO: 89623
  Payload ID: 17951
  Gene Name: transcription elongation factor B (SIII), polypeptide 3 (110kDa, elongin A)
  Uniprot ID: Q14241
  ENSP ID: ENSP00000484196

SEQ ID NO: 89626 - protein, 753 aa, Homo sapiens
  Payload ID: 17952
  Gene Name: transcription elongation factor B polypeptide 3B (elongin A2)
  Uniprot ID: Q8IYF1
  ENSP ID: ENSP00000331302
MAAGSTTLHAVEKLQVRLATKTEPKKLEKYLQKLSALPMTADILAETGIRKTVKRLRKHQHVGDFARDLAARWKKLVLVDRNTRPGPQDPEESASRQRFGEALQDQEKAWGFPENATAPRSPSHSPEHRRTARRTPPGQQRPHPRSHSREPRAERKCPRIAPADSGRYRASPTRTAPLRMPEGPEPAAPGKQPGRGHTHAAQGGPLLCPGCQGQPQGKAVVSHSKGHKSSRQEKRPLCAQGDWHSPTLIREKSCGACLREETPRMPSWASARDRQPSDFKTDKEGGQAGSGQRVPALEEAPDSHQKRPQHSHSNKKRPSLDGRDPGNGTHGLSPEEKEQLSNDRETQEGKPPTAHLDRTSVSSLSEVEEVDMAEEFEQPTLSCEKYLTYDQLRKQKKKTGKSATTALGDKQRKANESKGTRESWDSAKKLPPVQESQSERLQAAGADSAGPKTVPSHVFSELWDLSEAWMQANYDPLSDSDSMTSQAKPEALSSPKFREEAAFPGRRVNAKMPVYSGSRPACQLQVPTLRQQCAQVLRNNPDALSDVGEVPYWVLEPVLEGWRPDQLYRRKKDNHALVRETDELRRNHCFQDFKEEKPQENKTWREQYLRLPDAPEQRLRVMTTNIRSARGNNPNGREAKMICFKSVAKTPYDTSRRQEKSAGDADPENGEIKPASKPAGSSHTPSSQSSSGGGRDSSSSILRWLPEKRANPCLSSSNEHAAPAAKTRKQAAKKVAPLMAKAIRDYKRRFSRR

SEQ ID NO: 89627 - protein, 546 aa, Homo sapiens
  Payload ID: 17952
  Gene Name: transcription elongation factor B polypeptide 3B (elongin A2)
  ENSP ID: ENSP00000479491
MAAGSTTLHAVEKLQVRLATKTEPKKLEKYLQKLSALPMTADILAETGIRKTVKRLRKHQHVGDFARDLAARWKKLVLVDRNTRPGPQDPEESASRQRFGEALQDQEKAWGFPENATAPRSPSHSPEHRRTARRTPPGQQRPHPRSHSREPRAERKCPRIAPADSGRYRASPTRTAPLRMPEGPEPAAPGKQPGRGHTHAAQGGPLLCPGCQGQPQGKAVVSHSKGHKSSRQDSAKKLPPVQESQSERLQAAGADSAGPKTVPSHVFSELWDLSEAWMQANYDPLSDSDSMTSQAKPEALSSPKFREEAAFPGRRVNAKMPVYSGSRPACQLQVPTLRQQCAQVLRNNPDALSDVGEVPYWVLEPVLEGWRPDQLYRRKKDNHALVRETDELRRNHCFQDFKEEKPQENKTWREQYLRLPDAPEQRLRVMTTNIRSARGNNPNGREAKMICFKSVAKTPYDTSRRQEKSAGDADPENGEIKPASKPAGSSHTPSSQSSSGGGRDSSSSSSNEHAAPAAKTRKQAAKKVAPLMAKAIRDYKRRFSRR

SEQ ID NO: 89628 - protein, 546 aa, Homo sapiens
  Payload ID: 17953
  Gene Name: transcription elongation factor B polypeptide 3C (elongin A3)
  Uniprot ID: Q8NG57
  ENSP ID: ENSP00000328232
MAAGSTTLRAVGKLQVRLATKTEPKKLEKYLQKLSALPMTADILAETGIRKTVKRLRKHQHVGDFARDLAARWKKLVLVDRNTGPDPQDPEESASRQRFGEALQEREKAWGFPENATAPRSPSHSPEHRRTARRTPPGQQRPHPRSPSREPRAERKRPRMAPADSGPHRDPPTRTAPLPMPEGPEPAVPGEQPGRGHAHAAQGGPLLGQGCQGQPQGEAVGSHSKGHKSSRGASAQKSPPVQESQSERLQAAGADSAGPKTVPSHVFSELWDPSEAWMQANYDLLSAFEAMTSQANPEALSAPALQEEAAFPGRRVNAKMPVYSGSRPACQLQVPTLRQQCLRVPRNNPDALGDVEGVPYSVLEPVLEGWTPDQLYRTEKDNAALARETDELWRIHCLQDFKEEKPQEHESWRELYLRLRDAREQRLRVVTTKIRSARENKPSGRQTKMICFNSVAKTPYDASRRQEKSAGAADPGNGEMEPAPKPAGSSQAPSGLGDGDGGSVSGGGSSNRHAAPADKTRKQAAKKVAPLMAKAIRDYKGRFSRR

SEQ ID NO: 89629 - protein, 546 aa, Homo sapiens
  Payload ID: 17954
  Gene Name: transcription elongation factor B polypeptide 3C-like
  Uniprot ID: Q3SY89
  ENSP ID: ENSP00000479206
MAAGSTTLRAVGKLQVRLATKTEPKKLEKYLQKLSALPMTADILAETGIRKTVKRLRKHQHVGDFARDLAARWKKLVLVDRNTGPDPQDPEESASRQRFGEALQEREKAWGFPENATAPRSPSHSPEHRRTARRTPPGQQRPHPRSPSREPRAERKRPRMAPADSGPHRDPPTRTAPLPMPEGPEPAVPGEQPGRGHAHAAQGGPLLGQGCQGQPQGEAVGSHSKGHKSSRGASAQKSPPVQESQSERLQAAGADSAGPKTVPSHVFSELWDPSEAWMQANYDLLSAFEAMTSQANPEALSAPTLQEEAAFPGRRVNAKMPVYSGSRPACQLQVPTLRQQCLRVPRNNPDALGDVEGVPYSVLEPVLEGWTPDQPYRTEKDNAALARETDELWRIHCLQDFKEEKPQEHESWRELYLRLRDAREQRLRVVTTKIRSARENKPSGRQTKMICFNSVAKTPYDASRRQEKSAGAADPGNGEMEPAPKPAGSSQAPSGLGDGDGGSVSGGGSSNRHAAPADKTRKQAAKKVAPLMAKAIRDYKGRFSRR

SEQ ID NO: 89630 - protein, 405 aa, Homo sapiens
  Payload ID: 17954
  Gene Name: transcription elongation factor B polypeptide 3C-like
  ENSP ID: ENSP00000480799
PHPRSPSREPRAERKRPRMAPADSGPHRDPPTRTAPLPMPEGPEPAVPGEQPGRGHAHAAQGGPLLGQGCQGQPQGEAVGSHSKGHKSSRGASAQKSPPVQESQSERLQAAGADSAGPKTVPSHVFSELWDPSEAWMQANYDLLSAFEAMTSQANPEALSAPTLQEEAAFPGRRVNAKMPVYSGSRPACQLQVPTLRQQCLRVPRNNPDALGDVEGVPYSVLEPVLEGWTPDQPYRTEKDNAALARETDELWRIHCLQDFKEEKPQEHESWRELYLRLRDAREQRLRVVTTKIRSARENKPSGRQTKMICFNSVAKTPYDASRRQEKSAGAADPGNGEMEPAPKPAGSSQAPSGLGDGDGGSVSGGGSSNRHAAPADKTRKQAAKKVAPLMAKAIRDYKGRFSRR

SEQ ID NO: 89631 - protein, 546 aa, Homo sapiens
  Payload ID: 17955
  Gene Name: transcription elongation factor B polypeptide 3C-like 2
  Uniprot ID: A6NLF2
  ENSP ID: ENSP00000483981
MAAGSTTLRAVGKLQVRLATKTEPKKLEKYLQKLSALPMTADILAETGIRKTVKRLRKHQHVGDFARDLAARWKKLVLVDRNTGPDPQDPEESASRQRFGEALQEREKAWGFPENATAPRSPSHSPEHRRTARRTPPGQQRPHPRSPSREPRAERKRPRMAPADSGPHRDPPTRTAPLPMPEGPEPAVPGEQPGRGHAHAAQGGPLLGQGCQGQPQGEAVGSHSKGHKSSRGASAQKSPPVQESQSERLQAAVADSAGPKTVPSHVFSELWDPSEAWMQANYDLLSAFEAMTSQANPEALSAPTLQEEAAFPGRRVNAKMPVYSGSRPACQLQVPTLRQQCLRVPRNNPDALGDVEGVPYSALEPVLEGWTPDQPYRTEKDNAALARETDELWRIHCLQDFKEEKPQEHESWRELYLRLRDAREQRLRVVTTKIRSARENKPSGRQTKMICFNSVAKTPYDASRRQEKSAGAADPGNGEMEPAPKPAGSSQAPSGLGDGDGGSVSGGGSSNRHAAPADKTRKQAAKKVAPLMAKAIRDYKGRFSRR

SEQ ID NO: 89632 - protein, 171 aa, Homo sapiens
  Payload ID: 17956
  Gene Name: transcription elongation factor, mitochondrial
  Uniprot ID: Q96QE5
  ENSP ID: ENSP00000306574
MSGSVLFTAGERWRCFLTPSRSSLYWALHNFCCRKKSTTPKKITPNVTFCDENAKEPENALDKLFSSEQQASILHVLNTASTKELEAFRLLRGRRSINIVEHRENFGPFQNLESLMNVPLFKYKSTVQVCNSILCPKTGREKRKSPENRFLRKLLKPDIERERLKNCLGSP

SEQ ID NO: 89633 - protein, 360 aa, Homo sapiens
  Payload ID: 17956
  Gene Name: transcription elongation factor, mitochondrial
  Uniprot ID: Q96QE5
  ENSP ID: ENSP00000462963
MSGSVLFTAGERWRCFLTPSRSSLYWALHNFCCRKKSTTPKKITPNVTFCDENAKEPENALDKLFSSEQQASILHVLNTASTKELEAFRLLRGRRSINIVEHRENFGPFQNLESLMNVPLFKYKSTVQVCNSILCPKTGREKRKSPENRFLRKLLKPDIERERLKAVNSIISIVFGTRRIAWAHLDRKLTVLDWQQSDRWSLMRGIYSSSVYLEEISSIISKMPKADFYVLEKTGLSIQNSSLFPILLHFHIMEAMLYALLNKTFAQDGQHQVLSMNRNAVGKHFELMIGDSRTSGKELVKQFLFDSILKADPRVFFPSDKIVHYRQMFLSTELQRVEELYDSLLQAIAFYELAVFDSQP

SEQ ID NO: 89634 - protein, 226 aa, Homo sapiens
  Payload ID: 17956
  Gene Name: transcription elongation factor, mitochondrial
  ENSP ID: ENSP00000462973
MSGSVLFTAGERWRCFLTPSRSSLYWALHNFCCRKKSTTPKKITPNVTFCDENAKEPENALDKLFSSEQQASILHVLNTASTKELEAFRLLRGRRSINIVEHRENFGPFQNLESLMNVPLFKYKSTVQVCNSILCPKTGREKRKSPENRFLRKLLKPDIERERLKAVNSIISIVFGTRRIAWAHLDRKLTVLDWQQSDRWSLMRGIYSSSVYLEEVRQLHLQIPTC

SEQ ID NO: 89635 - protein, 1098 aa, Homo sapiens
  Payload ID: 17957
  Gene Name: transcription elongation regulator 1
  Uniprot ID: O14776
  ENSP ID: ENSP00000296702
MAERGGDGGESERFNPGELRMAQQQALRFRGPAPPPNAVMRGPPPLMRPPPPFGMMRGPPPPPRPPFGRPPFDPNMPPMPPPGGIPPPMGPPHLQRPPFMPPPMSSMPPPPGMMFPPGMPPVTAPGTPALPPTEEIWVENKTPDGKVYYYNARTRESAWTKPDGVKVIQQSELTPMLAAQAQVQAQAQAQAQAQAQAQAQAQAQAQAQAQAQAQAQAQAQAQAQAQAQAQAQAQAQAQAQAQVQAQVQAQVQAQAVGASTPTTSSPAPAVSTSTSSSTPSSTTSTTTTATSVAQTVSTPTTQDQTPSSAVSVATPTVSVSTPAPTATPVQTVPQPHPQTLPPAVPHSVPQPTTAIPAFPPVMVPPFRVPLPGMPIPLPGVAMMQIVSCPYVKTVATTKTGVLPGMAPPIVPMIHPQVAIAASPATLAGATAVSEWTEYKTADGKTYYYNNRTLESTWEKPQELKEKEKLEEKIKEPIKEPSEEPLPMETEEEDPKEEPIKEIKEEPKEEEMTEEEKAAQKAKPVATAPIPGTPWCVVWTGDERVFFYNPTTRLSMWDRPDDLIGRADVDKIIQEPPHKKGMEELKKLRHPTPTMLSIQKWQFSMSAIKEEQELMEEINEDEPVKAKKRKRDDNKDIDSEKEAAMEAEIKAARERAIVPLEARMKQFKDMLLERGVSAFSTWEKELHKIVFDPRYLLLNPKERKQVFDQYVKTRAEEERREKKNKIMQAKEDFKKMMEEAKFNPRATFSEFAAKHAKDSRFKAIEKMKDREALFNEFVAAARKKEKEDSKTRGEKIKSDFFELLSNHHLDSQSRWSKVKDKVESDPRYKAVDSSSMREDLFKQYIEKIAKNLDSEKEKELERQARIEASLREREREVQKARSEQTKEIDREREQHKREEAIQNFKALLSDMVRSSDVSWSDTRRTLRKDHRWESGSLLEREEKEKLFNEHIEALTKKKREHFRQLLDETSAITLTSTWKEVKKIIKEDPRCIKFSSSDRKKQREFEEYIRDKYITAKADFRTLLKETKFITYRSKKLIQESDQHLKDVEKILQNDKRYLVLDCVPEERRKLIVAYVDDLDRRGPPPPPTASEPTRRSTK

SEQ ID NO: 89636 - protein, 1077 aa, Homo sapiens
  Payload ID: 17957
  Gene Name: transcription elongation regulator 1
  Uniprot ID: O14776
  ENSP ID: ENSP00000377943
MAERGGDGGESERFNPGELRMAQQQALRFRGPAPPPNAVMRGPPPLMRPPPPFGMMRGPPPPPRPPFGRPPFDPNMPPMPPPGGIPPPMGPPHLQRPPFMPPPMSSMPPPPGMMFPPGMPPVTAPGTPALPPTEEIWVENKTPDGKVYYYNARTRESAWTKPDGVKVIQQSELTPMLAAQAQVQAQAQAQAQAQAQAQAQAQAQAQAQAQAQAQAQAQAQAQAQAQAQAQAQAQAQAQAQAQVQAQVQAQVQAQAVGASTPTTSSPAPAVSTSTSSSTPSSTTSTTTTATSVAQTVSTPTTQDQTPSSAVSVATPTVSVSTPAPTATPVQTVPQPHPQTLPPAVPHSVPQPTTAIPAFPPVMVPPFRVPLPGMPIPLPGVLPGMAPPIVPMIHPQVAIAASPATLAGATAVSEWTEYKTADGKTYYYNNRTLESTWEKPQELKEKEKLEEKIKEPIKEPSEEPLPMETEEEDPKEEPIKEIKEEPKEEEMTEEEKAAQKAKPVATAPIPGTPWCVVWTGDERVFFYNPTTRLSMWDRPDDLIGRADVDKIIQEPPHKKGMEELKKLRHPTPTMLSIQKWQFSMSAIKEEQELMEEINEDEPVKAKKRKRDDNKDIDSEKEAAMEAEIKAARERAIVPLEARMKQFKDMLLERGVSAFSTWEKELHKIVFDPRYLLLNPKERKQVFDQYVKTRAEEERREKKNKIMQAKEDFKKMMEEAKFNPRATFSEFAAKHAKDSRFKAIEKMKDREALFNEFVAAARKKEKEDSKTRGEKIKSDFFELLSNHHLDSQSRWSKVKDKVESDPRYKAVDSSSMREDLFKQYIEKIAKNLDSEKEKELERQARIEASLREREREVQKARSEQTKEIDREREQHKREEAIQNFKALLSDMVRSSDVSWSDTRRTLRKDHRWESGSLLEREEKEKLFNEHIEALTKKKREHFRQLLDETSAITLTSTWKEVKKIIKEDPRCIKFSSSDRKKQREFEEYIRDKYITAKADFRTLLKETKFITYRSKKLIQESDQHLKDVEKILQNDKRYLVLDCVPEERRKLIVAYVDDLDRRGPPPPPTASEPTRRSTK

SEQ ID NO: 89637 - protein, 1032 aa, Homo sapiens
  Payload ID: 17957
  Gene Name: transcription elongation regulator 1
  ENSP ID: ENSP00000450414
MAERGGDGGESERFNPGELRMAQQQALRFRGPAPPPNAVMRGPPPLMRPPPPFGMMRGPPPPPRPPFGRPPFDPNMPPMPPPGGIPPPMGPPHLQRPPFMPPPMSSMPPPPGMMFPPGMPPVTAPGTPALPPTEEIWVENKTPDGKVYYYNARTRESAWTKPDGVKVIQQSELTPMLAAQAQVQAQAQAQAQAQAQAQAQAQAQAQAQAQAQAQAQAQAQAQAQAQAQAQAQAQAQAQAQAQVQAQVQAQVQAQAVGASTPTTSSPAPAVSTSTSSSTPSSTTSTTTTATSVAQTVSTPTTQDQTPSSAVSVATPTVSVSTPAPTATPVQTVPQPHPQTLPPAVPHSVPQPTTAIPAFPPVMVPPFRVPLPGMPIPLPGVAMMQIVSCPYVKTVATTKTGVLPGMAPPIVPMIHPQVAIAASPATLAGATAVSEWTEYKTADGKTYYYNNRTLESTWEKPQELKEKEKLEEKIKEPIKEPSEEPLPMETEEEDPKEEPIKEIKEEPKEEEMTEEEKAAQKAKPVATAPIPGTPWCVVWTGDERVFFYNPTTRLSMWDRPDDLIGRADVDKIIQEPPHKKGMEELKKLRHPTPTMLSIQKWQFSMSAIKEEQELMEEINEDEPVKAKKRKRDDNKDIDSEKEAAMEAEIKAARERAIVPLEARMKQFKDMLLERGVSAFSTWEKELHKIVFDPRYLLLNPKERKQVFDQYVKTRAEEERREKKNKIMQAKEDFKKMMEEAKFNPRATFSEFAAKHAKDSRFKAIEKMKDREALFNEFVAAARKKEKEDSKTRGEKIKSDFFELLSNHHLDSQSRWSKVKDKVESDPRYKAVDSSSMREDLFKQYIEKIAKNLDSEKEKELERQARIEASLREREREVQKARSEQTKEIDREREQHKREEAIQNFKALLSDMVRSSDVSWSDTRRTLRKDHRWESGSLLEREEKEKLFNEHIEALTKKKREHFRQLLDETSAITLTSTWKEVKKIIKEDPRCIKFSSSDRKKQREFEEYIRDKYITAKADFRTLLKETKFITYS

SEQ ID NO: 89638 - protein, 586 aa, Homo sapiens
  Payload ID: 17958
  Gene Name: transcription elongation regulator 1-like
  Uniprot ID: Q5VWI1
  ENSP ID: ENSP00000357631
MQAGARFQRRRRQLQQQQPRRRQPLLWPMDAEPPPPPPWVWMVPGSAGLLRLSAGVVVPPVLLASAPPPAAPLLPGLPGWPAPSEPVLPLLPLPSAPDSAAAAAAHPFPALHGQWLFGGHSPSLGLPPSSTVELVPVFPHLCPSALATPIGKSWIDKRIPNCKIFFNNSFALDSTWIHPEESRFFHGHEKPRLLANQVAVSLSRPAPASRPLPTVVLAPQPIPGGCHNSLKVTSSPAIAIATAAAAAMVSVDPENLRGPSPSSVQPRHFLTLAPIKIPLRTSPVSDTRTERGRVARPPALMLRAQKSRDGDKEDKEPPPMLGGGEDSTARGNRPVASTPVPGSPWCVVWTGDDRVFFFNPTMHLSVWEKPMDLKDRGDLNRIIEDPPHKRKLEAPATDNSDGSSSEDNREDQDVKTKRNRTEGCGSPKPEEAKREDKGTRTPPPQILLPLEERVTHFRDMLLERGVSAFSTWEKELHKIVFDPRYLLLNSEERKQIFEQFVKTRIKEEYKEKKSKLLLAKEEFKKLLEESKVSPRTTFKEFAEKYGRDQRFRLVQKRKDQEHFFNQFILILKKRDKENRLRLRKMR

SEQ ID NO: 89639 - protein, 682 aa, Homo sapiens
  Payload ID: 17959
  Gene Name: transcription factor 12
  Uniprot ID: Q99081
  ENSP ID: ENSP00000267811
MNPQQQRMAAIGTDKELSDLLDFSAMFSPPVNSGKTRPTTLGSSQFSGSGIDERGGTTSWGTSGQPSPSYDSSRGFTDSPHYSDHLNDSRLGAHEGLSPTPFMNSNLMGKTSERGSFSLYSRDTGLPGCQSSLLRQDLGLGSPAQLSSSGKPGTAYYSFSATSSRRRPLHDSAALDPLQAKKVRKVPPGLPSSVYAPSPNSDDFNRESPSYPSPKPPTSMFASTFFMQDGTHNSSDLWSSSNGMSQPGFGGILGTSTSHMSQSSSYGNLHSHDRLSYPPHSVSPTDINTSLPPMSSFHRGSTSSSPYVAASHTPPINGSDSILGTRGNAAGSSQTGDALGKALASIYSPDHTSSSFPSNPSTPVGSPSPLTGTSQWPRPGGQAPSSPSYENSLHSLQSRMEDRLDRLDDAIHVLRNHAVGPSTSLPAGHSDIHSLLGPSHNAPIGSLNSNYGGSSLVASSRSASMVGTHREDSVSLNGNHSVLSSTVTTSSTDLNHKTQENYRGGLQSQSGTVVTTEIKTENKEKDENLHEPPSSDDMKSDDESSQKDIKVSSRGRTSSTNEDEDLNPEQKIEREKERRMANNARERLRVRDINEAFKELGRMCQLHLKSEKPQTKLLILHQAVAVILSLEQQVRERNLNPKAACLKRREEEKVSAVSAEPPTTLPGTHPGLSETTNPMGHM

SEQ ID NO: 89640 - protein, 706 aa, Homo sapiens
  Payload ID: 17959
  Gene Name: transcription factor 12
  Uniprot ID: Q99081
  ENSP ID: ENSP00000331057
MNPQQQRMAAIGTDKELSDLLDFSAMFSPPVNSGKTRPTTLGSSQFSGSGIDERGGTTSWGTSGQPSPSYDSSRGFTDSPHYSDHLNDSRLGAHEGLSPTPFMNSNLMGKTSERGSFSLYSRDTGLPGCQSSLLRQDLGLGSPAQLSSSGKPGTAYYSFSATSSRRRPLHDSAALDPLQAKKVRKVPPGLPSSVYAPSPNSDDFNRESPSYPSPKPPTSMFASTFFMQDGTHNSSDLWSSSNGMSQPGFGGILGTSTSHMSQSSSYGNLHSHDRLSYPPHSVSPTDINTSLPPMSSFHRGSTSSSPYVAASHTPPINGSDSILGTRGNAAGSSQTGDALGKALASIYSPDHTSSSFPSNPSTPVGSPSPLTGTSQWPRPGGQAPSSPSYENSLHSLKNRVEQQLHEHLQDAMSFLKDVCEQSRMEDRLDRLDDAIHVLRNHAVGPSTSLPAGHSDIHSLLGPSHNAPIGSLNSNYGGSSLVASSRSASMVGTHREDSVSLNGNHSVLSSTVTTSSTDLNHKTQENYRGGLQSQSGTVVTTEIKTENKEKDENLHEPPSSDDMKSDDESSQKDIKVSSRGRTSSTNEDEDLNPEQKIEREKERRMANNARERLRVRDINEAFKELGRMCQLHLKSEKPQTKLLILHQAVAVILSLEQQVRERNLNPKAACLKRREEEKVSAVSAEPPTTLPGTHPGLSETTNPMGHM

SEQ ID NO: 89641 - protein, 512 aa, Homo sapiens
  Payload ID: 17959
  Gene Name: transcription factor 12
  Uniprot ID: Q99081
  ENSP ID: ENSP00000342459
MYCAYPVPGMGSNSLMYYYNGKTVYAPSPNSDDFNRESPSYPSPKPPTSMFASTFFMQDGTHNSSDLWSSSNGMSQPGFGGILGTSTSHMSQSSSYGNLHSHDRLSYPPHSVSPTDINTSLPPMSSFHRGSTSSSPYVAASHTPPINGSDSILGTRGNAAGSSQTGDALGKALASIYSPDHTSSSFPSNPSTPVGSPSPLTGTSQWPRPGGQAPSSPSYENSLHSLQSRMEDRLDRLDDAIHVLRNHAVGPSTSLPAGHSDIHSLLGPSHNAPIGSLNSNYGGSSLVASSRSASMVGTHREDSVSLNGNHSVLSSTVTTSSTDLNHKTQENYRGGLQSQSGTVVTTEIKTENKEKDENLHEPPSSDDMKSDDESSQKDIKVSSRGRTSSTNEDEDLNPEQKIEREKERRMANNARERLRVRDINEAFKELGRMCQLHLKSEKPQTKLLILHQAVAVILSLEQQVRERNLNPKAACLKRREEEKVSAVSAEPPTTLPGTHPGLSETTNPMGHM

SEQ ID NO: 89642 - protein, 706 aa, Homo sapiens; identical to SEQ ID NO: 89640
  Payload ID: 17959
  Gene Name: transcription factor 12
  Uniprot ID: Q99081
  ENSP ID: ENSP00000388940

SEQ ID NO: 89643 - protein, 536 aa, Homo sapiens
  Payload ID: 17959
  Gene Name: transcription factor 12
  ENSP ID: ENSP00000440017
MYCAYPVPGMGSNSLMYYYNGKTVYAPSPNSDDFNRESPSYPSPKPPTSMFASTFFMQDGTHNSSDLWSSSNGMSQPGFGGILGTSTSHMSQSSSYGNLHSHDRLSYPPHSVSPTDINTSLPPMSSFHRGSTSSSPYVAASHTPPINGSDSILGTRGNAAGSSQTGDALGKALASIYSPDHTSSSFPSNPSTPVGSPSPLTGTSQWPRPGGQAPSSPSYENSLHSLKNRVEQQLHEHLQDAMSFLKDVCEQSRMEDRLDRLDDAIHVLRNHAVGPSTSLPAGHSDIHSLLGPSHNAPIGSLNSNYGGSSLVASSRSASMVGTHREDSVSLNGNHSVLSSTVTTSSTDLNHKTQENYRGGLQSQSGTVVTTEIKTENKEKDENLHEPPSSDDMKSDDESSQKDIKVSSRGRTSSTNEDEDLNPEQKIEREKERRMANNARERLRVRDINEAFKELGRMCQLHLKSEKPQTKLLILHQAVAVILSLEQQVRERNLNPKAACLKRREEEKVSAVSAEPPTTLPGTHPGLSETTNPMGHM

SEQ ID NO: 89644 - protein, 446 aa, Homo sapiens
  Payload ID: 17959
  Gene Name: transcription factor 12
  Uniprot ID: Q99081
  ENSP ID: ENSP00000444696
MGKRYMHHPQIQMISTVNLLVIHLLSHQPVCSLALSLCKSYPPHSVSPTDINTSLPPMSSFHRGSTSSSPYVAASHTPPINGSDSILGTRGNAAGSSQTGDALGKALASIYSPDHTSSSFPSNPSTPVGSPSPLTGTSQWPRPGGQAPSSPSYENSLHSLQSRMEDRLDRLDDAIHVLRNHAVGPSTSLPAGHSDIHSLLGPSHNAPIGSLNSNYGGSSLVASSRSASMVGTHREDSVSLNGNHSVLSSTVTTSSTDLNHKTQENYRGGLQSQSGTVVTTEIKTENKEKDENLHEPPSSDDMKSDDESSQKDIKVSSRGRTSSTNEDEDLNPEQKIEREKERRMANNARERLRVRDINEAFKELGRMCQLHLKSEKPQTKLLILHQAVAVILSLEQQVRERNLNPKAACLKRREEEKVSAVSAEPPTTLPGTHPGLSETTNPMGHM

SEQ ID NO: 89645 - protein, 316 aa, Homo sapiens
  Payload ID: 17959
  Gene Name: transcription factor 12
  ENSP ID: ENSP00000453264
MSSNSSTSQWPRPGGQAPSSPSYENSLHSLQSRMEDRLDRLDDAIHVLRNHAVGPSTSLPAGHSDIHSLLGPSHNAPIGSLNSNYGGSSLVASSRSASMVGTHREDSVSLNGNHSVLSSTVTTSSTDLNHKTQENYRGGLQSQSGTVVTTEIKTENKEKDENLHEPPSSDDMKSDDESSQKDIKVSSRGRTSSTNEDEDLNPEQKIEREKERRMANNARERLRVRDINEAFKELGRMCQLHLKSEKPQTKLLILHQAVAVILSLEQQVRERNLNPKAACLKRREEEKVSAVSAEPPTTLPGTHPGLSETTNPMGHM

SEQ ID NO: 89646 - protein, 58 aa, Homo sapiens
  Payload ID: 17959
  Gene Name: transcription factor 12
  ENSP ID: ENSP00000453653
MNPQQQRMAAIGTDKELSDLLDFSAMFSPPVNSGKTRPTTLGSSQFSGSGFYRQPSLQ

SEQ ID NO: 89647 - protein, 682 aa, Homo sapiens; identical to SEQ ID NO: 89639
  Payload ID: 17959
  Gene Name: transcription factor 12
  Uniprot ID: Q99081
  ENSP ID: ENSP00000453737

SEQ ID NO: 89648 - protein, 666 aa, Homo sapiens
  Payload ID: 17959
  Gene Name: transcription factor 12
  ENSP ID: ENSP00000453876
MNPQQQRMAAIGTDKELSDLLDFSAMFSPPVNSGKTRPTTLGSSQFSGSGTIHEMKQLNSKARQKGQRIKGFTDSPHYSDHLNDSRLGAHEGLSPTPFMNSNLMGKTSERGSFSLYSRDTGLPGCQSSLLRQDLGLGSPAQLSSSGKPGTAYYSFSATSSRRRPLHDSAALDPLQAKKVRKVPPGLPSSVYAPSPNSDDFNRESPSYPSPKPPTSMFASTFFMQDGTHNSSDLWSSSNGMSQPGFGGILGTSTSHMSQSSSYGNLHSHDRLSYPPHSVSPTDINTSLPPMSSFHRGSTSSSPYVAASHTPPINGSDSILGTRGNAAGSSQTGDALGKALASIYSPDHTSSSFPSNPSTPVGSPSPLTGTSQWPRPGGQAPSSPSYENSLHSLKNRVEQQLHEHLQDAMSFLKDVCEQSRMEDRLDRLDDAIHVLRNHAVGPSTSLPAGHSDIHSLLGPSHNAPIGSLNSNYGGSSLVASSRSASMVGTHREDSVSLNGNHSVLSSTVTTSSTDLNHKTQENYRGGLQSQSGTVVTTEIKTENKEKDENLHEPPSSDDMKSDDESSQKDIKVSSRGRTSSTNEDEDLNPEQKIEREKERRMANNARERLRVRDINEAFKELGRMCQLHLKSEKPQTKLLILHQAVAVILSLEQQVRERNLNPKAACL

SEQ ID NO: 89649 - protein, 339 aa, Homo sapiens
  Payload ID: 17959
  Gene Name: transcription factor 12
  ENSP ID: ENSP00000454102
MSSNSSTSQWPRPGGQAPSSPSYENSLHSLKNRVEQQLHEHLQDAMSFLKDVCEQSRMEDRLDRLDDAIHVLRNHAVGPSTSLPAGHSDIHSLLGPSHNAPIGSLNSNYGGSSLVASSRSASMVGTHREDSVSLNGNHSVLSSTVTTSSTDLNHKTQENYRGGLQSQSGTVVTTEIKTENKEKDENLHEPPSSDDMKSDDESSQKDIKVSSRGRTSTNEDEDLNPEQKIEREKERRMANNARERLRVRDINEAFKELGRMCQLHLKSEKPQTKLLILHQAVAVILSLEQQVRERNLNPKAACLKRREEEKVSAVSAEPPTTLPGTHPGLSETTNPMGHM

SEQ ID NO: 89650 - protein, 157 aa, Homo sapiens
  Payload ID: 17959
  Gene Name: transcription factor 12
  ENSP ID: ENSP00000454109
MNPQQQRMAAIGTDKELSDLLDFSAMFSPPVNSGKTRPTTLGSSQFSGSGIDERGGTTSWGTSGQPSPSYDSSRGFTDSPHYSDHLNDSRLGAHEGLSPTPFMNSNLMGKTSERGSFSLYSRDTGLPGCQSSLLRQDLGLGSPAQLSSSGKPGTAYY

SEQ ID NO: 89651 - protein, 48 aa, Homo sapiens
  Payload ID: 17959
  Gene Name: transcription factor 12
  ENSP ID: ENSP00000454823
  MOD_RES (1)..(1): Any amino acid
XERNLNPKAACLKRREEEKVSAVSAEPPTTLPGTHPGLSETTNPMGHM

SEQ ID NO: 89652 - protein, 44 aa, Homo sapiens
  Payload ID: 17959
  Gene Name: transcription factor 12
  ENSP ID: ENSP00000456280
  MOD_RES (1)..(1): Any amino acid
XNPKAACLKRREEEKVSAVSAEPPTTLPGTHPGLSETTNPMGHM

SEQ ID NO: 89653 - protein, 199 aa, Homo sapiens
  Payload ID: 17960
  Gene Name: transcription factor 15 (basic helix-loop-helix)
  Uniprot ID: Q12870
  ENSP ID: ENSP00000246080
MAFALLRPVGAHVLYPDVRLLSEDEENRSESDASDQSFGCCEGPEAARRGPGPGGGRRAGGGGGAGPVVVVRQRQAANARERDRTQSVNTAFTALRTLIPTEPVDRKLSKIETVRLASSYIAHLANVLLLGDSADDGQPCFRAAGSAKGAVPAAADGGRQPRSICTFCLSNQRKGGGRRDLGGSCLKVRGVAPLRGPRR

SEQ ID NO: 89654 - protein, 198 aa, Homo sapiens
  Payload ID: 17960
  Gene Name: transcription factor 15 (basic helix-loop-helix)
  ENSP ID: ENSP00000483116
MAFALLRPVGAHVLYPDVRLLSEDEENRSESDASDQSFGCCEGPEAARRGPGPGGGRRAGGGGGAGPVVVVRQRQAANARERDRTQSVNTAFTALRTLIPTEPVDRKLSKIETVRLASSYIAHLANVLLLGDSADDGQPCFRAAGSAKGAVPAAPTGRQPRSICTFCLSNQRKGGGRRDLGGSCLKVRGVAPLRGPRR

SEQ ID NO: 89655 - protein, 345 aa, Homo sapiens
  Payload ID: 17961
  Gene Name: transcription factor 19
  Uniprot ID: Q9Y242
  ENSP ID: ENSP00000365431
MLPCFQLLRIGGGRGGDLYTFHPPAGAGCTYRLGHRADLCDVALRPQQEPGLISGIHAELHAEPRGDDWRVSLEDHSSQGTLVNNVRLPRGHRLELSDGDLLTFGPEGPPGTSPSEFYFMFQQVRVKPQDFAAITIPRSRGEARVGAGFRPMLPSQGAPQRPLSTFSPAPKATLILNSIGSLSKLRPQPLTFSPSWGGPKSLPVPAPPGEMGTTPSAPPQRNRRKSVHRVLAELDDESEPPENPPPVLMEPRKKLRVDKAPLTPTGNRRGRPRKYPVSAPMAPPAVGGGEPCAAPCCCLPQEETVAWVQCDGCDVWFHVACVGCSIQAAREADFRCPGCRAGIQT

SEQ ID NO: 89656 - protein, 345 aa, Homo sapiens; identical to SEQ ID NO: 89655
  Payload ID: 17961
  Gene Name: transcription factor 19
  Uniprot ID: Q9Y242
  ENSP ID: ENSP00000365433

SEQ ID NO: 89657 - protein, 345 aa, Homo sapiens
  Payload ID: 17961
  Gene Name: transcription factor 19
  ENSP ID: ENSP00000373018
MLPCFQLLRIGGGRGGDLYTFHPPAGAGCTYRLGHRADLCDVALRPQQEPGLISGIHAELHAEPRGDDWRVSLEDHSSQGTLVNNVRLPRGHRLELSDGDLLTFGPEGPPGTSPSEFYFMFQQVRVKPQDFAAITIPRSRGEARVGAGFRPMLPSQGAPQRPLSTFSPAPKATLILNSIGSLSKLRPQPLTFSPSWGGPKSLPVPAPPGEVGTTPSAPPQRNRRKSVHRVLAELDDESEPPENPPPVLMEPRKKLRVDKAPLTPTGNRRGRPRKYPVSAPMAPPAVGGGEPCAAPCCCLPQEETVAWVQCDGCDVWFHVACVGCSIQAAREADFRCPGCRAGIQT

SEQ ID NO: 89658 - protein, 345 aa, Homo sapiens; identical to SEQ ID NO: 89657
  Payload ID: 17961
  Gene Name: transcription factor 19
  ENSP ID: ENSP00000383252

SEQ ID NO: 89659 - protein, 345 aa, Homo sapiens; identical to SEQ ID NO: 89657
  Payload ID: 17961
  Gene Name: transcription factor 19
  ENSP ID: ENSP00000393007

SEQ ID NO: 89660 - protein, 345 aa, Homo sapiens; identical to SEQ ID NO: 89657
  Payload ID: 17961
  Gene Name: transcription factor 19
  ENSP ID: ENSP00000393300

SEQ ID NO: 89661 - protein, 345 aa, Homo sapiens
  Payload ID: 17961
  Gene Name: transcription factor 19
  ENSP ID: ENSP00000393875
MLPCFQLLRIGGGRGGDLYTFHPPAGAGCTYRLGHRADLCDVALRPQQEPGLISGIHAELHAEPRGDDWRVSLEDHSSQGTLVNNVRLPRGHRLELSDGDLLTFGPEGSPGTSPSEFYFMFQQVRVKPQDFAAITIPRSRGEARVGAGFRPMLPSQGAPQRPLSTFSPAPKATLILNSIGSLSKLRPQPLTFSPSWGGPKSLPVPAPPGEVGTTPSAPPQRNRRKSVHRVLAELDDESEPPENPPPVLMEPRKKLRVDKAPLTPTGNRRGRPRKYPVSAPMAPPAVGGGEPCAAPCCCLPQEETVAWVQCDGCDVWFHVACVGCSIQAAREADFRCPGCRAGIQT

SEQ ID NO: 89662 - protein, 345 aa, Homo sapiens; identical to SEQ ID NO: 89657
  Payload ID: 17961
  Gene Name: transcription factor 19
  ENSP ID: ENSP00000397160

SEQ ID NO: 89663 - protein, 345 aa, Homo sapiens; identical to SEQ ID NO: 89661
  Payload ID: 17961
  Gene Name: transcription factor 19
  ENSP ID: ENSP00000399189

SEQ ID NO: 89664 - protein, 345 aa, Homo sapiens; identical to SEQ ID NO: 89657
  Payload ID: 17961
  Gene Name: transcription factor 19
  ENSP ID: ENSP00000399388

SEQ ID NO: 89665 - protein, 345 aa, Homo sapiens; identical to SEQ ID NO: 89657
  Payload ID: 17961
  Gene Name: transcription factor 19
  ENSP ID: ENSP00000401548

SEQ ID NO: 89666 - protein, 345 aa, Homo sapiens; identical to SEQ ID NO: 89657
  Payload ID: 17961
  Gene Name: transcription factor 19
  ENSP ID: ENSP00000414076

SEQ ID NO: 89667 - protein, 345 aa, Homo sapiens; identical to SEQ ID NO: 89657
  Payload ID: 17961
  Gene Name: transcription factor 19
  ENSP ID: ENSP00000414466

SEQ ID NO: 89668 - protein, 345 aa, Homo sapiens; identical to SEQ ID NO: 89657
  Payload ID: 17961
  Gene Name: transcription factor 19
  ENSP ID: ENSP00000414980

SEQ ID NO: 89669 - protein, 217 aa, Homo sapiens
  Payload ID: 17961
  Gene Name: transcription factor 19
  ENSP ID: ENSP00000439397
TLVNNVRLPRGHRLELSDGDLLTFGPEGPPGTSPSEFYFMFQQVRVKPQDFAAITIPRSRGEARVGAGFRPMLPSQGAPQRPLSTFSPAPKATLILNSIGSLSKLRPQPLTFSPSWGGPKSLPVPAPPGEMGTTPSAPPQRNRRKSVHRVLAELDDESEPPENPPPVLMEPRKKLRVDKAPLTPTGNWHIQGMQSIVKGQKERPWPREHLSGYEEAS

SEQ ID NO: 89670 - protein, 1938 aa, Homo sapiens
  Payload ID: 17962
  Gene Name: transcription factor 20 (AR1)
  Uniprot ID: Q9UGU0
  ENSP ID: ENSP00000335561
MQSFREQSSYHGNQQSYPQEVHGSSRLEEFSPRQAQMFQNFGGTGGSSGSSGSGSGGGRRGAAAAAAAMASETSGHQGYQGFRKEAGDFYYMAGNKDPVTTGTPQPPQRRPSGPVQSYGPPQGSSFGNQYGSEGHVGQFQAQHSGLGGVSHYQQDYTGPFSPGSAQYQQQASSQQQQQQVQQLRQQLYQSHQPLPQATGQPASSSSHLQPMQRPSTLPSSAAGYQLRVGQFGQHYQSSASSSSSSSFPSPQRFSQSGQSYDGSYNVNAGSQYEGHNVGSNAQAYGTQSNYSYQPQSMKNFEQAKIPQGTQQGQQQQQPQQQQHPSQHVMQYTNAATKLPLQSQVGQYNQPEVPVRSPMQFHQNFSPISNPSPAASVVQSPSCSSTPSPLMQTGENLQCGQGSVPMGSRNRILQLMPQLSPTPSMMPSPNSHAAGFKGFGLEGVPEKRLTDPGLSSLSALSTQVANLPNTVQHMLLSDALTPQKKTSKRPSSSKKADSCTNSEGSSQPEEQLKSPMAESLDGGCSSSSEDQGERVRQLSGQSTSSDTTYKGGASEKAGSSPAQGAQNEPPRLNASPAAREEATSPGAKDMPLSSDGNPKVNEKTVGVIVSREAMTGRVEKPGGQDKGSQEDDPAATQRPPSNGGAKETSHASLPQPEPPGGGGSKGNKNGDNNSNHNGEGNGQSGHSAAGPGFTSRTEPSKSPGSLRYSYKDSFGSAVPRNVSGFPQYPTGQEKGDFTGHGERKGRNEKFPSLLQEVLQGYHHHPDRRYSRSTQEHQGMAGSLEGTTRPNVLVSQTNELASRGLLNKSIGSLLENPHWGPWERKSSSTAPEMKQINLTDYPIPRKFEIEPQSSAHEPGGSLSERRSVICDISPLRQIVRDPGAHSLGHMSADTRIGRNDRLNPTLSQSVILPGGLVSMETKLKSQSGQIKEEDFEQSKSQASFNNKKSGDHCHPPSIKHESYRGNASPGAATHDSLSDYGPQDSRPTPMRRVPGRVGGREGMRGRSPSQYHDFAEKLKMSPGRSRGPGGDPHHMNPHMTFSERANRSSLHTPFSPNSETLASAYHANTRAHAYGDPNAGLNSQLHYKRQMYQQQPEEYKDWSSGSAQGVIAAAQHRQEGPRKSPRQQQFLDRVRSPLKNDKDGMMYGPPVGTYHDPSAQEAGRCLMSSDGLPNKGMELKHGSQKLQESCWDLSRQTSPAKSSGPPGMSSQKRYGPPHETDGHGLAEATQSSKPGSVMLRLPGQEDHSSQNPLIMRRRVRSFISPIPSKRQSQDVKNSSTEDKGRLLHSSKEGADKAFNSYAHLSHSQDIKSIPKRDSSKDLPSPDSRNCPAVTLTSPAKTKILPPRKGRGLKLEAIVQKITSPNIRRSASSNSAEAGGDTVTLDDILSLKSGPPEGGSVAVQDADIEKRKGEVASDLVSPANQELHVEKPLPRSSEEWRGSVDDKVKTETHAETVTAGKEPPGAMTSTTSQKPGSNQGRPDGSLGGTAPLIFPDSKNVPPVGILAPEANPKAEEKENDTVTISPKQEGFPPKGYFPSGKKKGRPIGSVNKQKKQQQPPPPPPQPPQIPEGSADGEPKPKKQRQRRERRKPGAQPRKRKTKQAVPIVEPQEPEIKLKYATQPLDKTDAKNKSFYPYIHVVNKCELGAVCTIINAEEEEQTKLVRGRKGQRSLTPPPSSTESKALPASSFMLQGPVVTESSVMGHLVCCLCGKWASYRNMGDLFGPFYPQDYAATLPKNPPPKRATEMQSKVKVRHKSASNGSKTDTEEEEEQQQQQKEQRSLAAHPRFKRRHRSEDCGGGPRSLSRGLPCKKAATEGSSEKTVLDSKPSVPTTSEGGPELELQIPELPLDSNEFWVHEGCILWANGIYLVCGRLYGLQEALEIAREMKCSHCQEAGATLGCYNKGCSFRYHYPCAIDADCLLHEENFSVRCPKHKVRLWR

SEQ ID NO: 89671 - protein, 1960 aa, Homo sapiens [sequence omitted]

SEQ ID NO: 89672 - protein, 250 aa, Homo sapiens
  Payload ID: 17962
  Gene Name: transcription factor 20 (AR1)
  ENSP ID: ENSP00000385531
MGHLVCCLCGKWASYRNMGDLFGPFYPQDYAATLPKNPPPKRATEMQSKVKVRHKSASNGSKTDTEEEEEQQQQQKEQRSLAAHPRFKRRHRSEDCGGGPRSLSRGLPCKKAATEGSSEKTVLDSKPSVPTTSEGGPELELQIPELPLDSNEFWVHEGCILWANGIYLVCGRLYGLQEALEIAREMKCSHCQEAGATLGCYNKGCSFRYHYPCAIDADCLLHEENFSVRCPKHKNKTAKGSLSTEQSERG

SEQ ID NO: 89673 - protein, 153 aa, Homo sapiens
  Payload ID: 17962
  Gene Name: transcription factor 20 (AR1)
  ENSP ID: ENSP00000458948
MQSFREQSSYHGNQQSYPQEVHGSSRLEEFSPRQAQMFQNFGGTGGSSGSSGSGSGGGRRGAAAAAAAMASETSGHQGYQGFRKEAGDFYYMAGNKDPVTTGTPQPPQRRPSGPVQSYGPPQGSSFGNQYGSEGHVGQFQAQHSGLGGVSHYQ

SEQ ID NO: 89674 - protein, 250 aa, Homo sapiens; identical to SEQ ID NO: 89672
  Payload ID: 17962
  Gene Name: transcription factor 20 (AR1)
  ENSP ID: ENSP00000459947

SEQ ID NO: 89675 - protein, 1960 aa, Homo sapiens [sequence omitted]

SEQ ID NO: 89676 - protein, 1938 aa, Homo sapiens; identical to SEQ ID NO: 89670
  Payload ID: 17962
  Gene Name: transcription factor 20 (AR1)
  Uniprot ID: Q9UGU0
  ENSP ID: ENSP00000460587

SEQ ID NO: 89677 - protein, 153 aa, Homo sapiens; identical to SEQ ID NO: 89673
  Payload ID: 17962
  Gene Name: transcription factor 20 (AR1)
  ENSP ID: ENSP00000475040

SEQ ID NO: 89678 - protein, 1938 aa, Homo sapiens; identical to SEQ ID NO: 89670
  Payload ID: 17962
  Gene Name: transcription factor 20 (AR1)
  Uniprot ID: Q9UGU0
  ENSP ID: ENSP00000478503

SEQ ID NO: 89679 - protein, 1960 aa, Homo sapiens [sequence omitted]

SEQ ID NO: 89680 - protein, 250 aa, Homo sapiens; identical to SEQ ID NO: 89672
  Payload ID: 17962
  Gene Name: transcription factor 20 (AR1)
  ENSP ID: ENSP00000485846

SEQ ID NO: 89681 - protein, 153 aa, Homo sapiens; identical to SEQ ID NO: 89673
  Payload ID: 17962
  Gene Name: transcription factor 20 (AR1)
  ENSP ID: ENSP00000486508

SEQ ID NO: 89682 - protein, 1938 aa, Homo sapiens; identical to SEQ ID NO: 89670
  Payload ID: 17962
  Gene Name: transcription factor 20 (AR1)
  Uniprot ID: Q9UGU0
  ENSP ID: ENSP00000486940

SEQ ID NO: 89683 - protein, 250 aa, Homo sapiens; identical to SEQ ID NO: 89672
  Payload ID: 17962
  Gene Name: transcription factor 20 (AR1)
  ENSP ID: ENSP00000487152

SEQ ID NO: 89684 - protein, 153 aa, Homo sapiens; identical to SEQ ID NO: 89673
  Payload ID: 17962
  Gene Name: transcription factor 20 (AR1)
  ENSP ID: ENSP00000487254

SEQ ID NO: 89685 - protein, 153 aa, Homo sapiens; identical to SEQ ID NO: 89673
  Payload ID: 17962
  Gene Name: transcription factor 20 (AR1)
  ENSP ID: ENSP00000487259

SEQ ID NO: 89686 - protein, 1960 aa, Homo sapiens [sequence omitted]

SEQ ID NO: 89687 - protein, 1960 aa, Homo sapiens [sequence omitted]

SEQ ID NO: 89688 - protein, 1938 aa, Homo sapiens; identical to SEQ ID NO: 89670
  Payload ID: 17962
  Gene Name: transcription factor 20 (AR1)
  Uniprot ID: Q9UGU0
  ENSP ID: ENSP00000487465

SEQ ID NO: 89689 - protein, 250 aa, Homo sapiens; identical to SEQ ID NO: 89672
  Payload ID: 17962
  Gene Name: transcription factor 20 (AR1)
  ENSP ID: ENSP00000487576

SEQ ID NO: 89690 - protein, 153 aa, Homo sapiens; identical to SEQ ID NO: 89673
  Payload ID: 17962
  Gene Name: transcription factor 20 (AR1)
  ENSP ID: ENSP00000488932

SEQ ID NO: 89691 - protein, 250 aa, Homo sapiens; identical to SEQ ID NO: 89672
  Payload ID: 17962
  Gene Name: transcription factor 20 (AR1)
  ENSP ID: ENSP00000488943

SEQ ID NO: 89692 - protein, 1938 aa, Homo sapiens; identical to SEQ ID NO: 89670
  Payload ID: 17962
  Gene Name: transcription factor 20 (AR1)
  ENSP ID: ENSP00000489006

SEQ ID NO: 89693 - protein, 1938 aa, Homo sapiens; identical to SEQ ID NO: 89670
  Payload ID: 17962
  Gene Name: transcription factor 20 (AR1)
  ENSP ID: ENSP00000489099

SEQ ID NO: 89694 - protein, 1960 aa, Homo sapiens [sequence omitted]

SEQ ID NO: 89695 - protein, 250 aa, Homo sapiens; identical to SEQ ID NO: 89672
  Payload ID: 17962
  Gene Name: transcription factor 20 (AR1)
  ENSP ID: ENSP00000489383

SEQ ID NO: 89696 - protein, 153 aa, Homo sapiens; identical to SEQ ID NO: 89673
  Payload ID: 17962
  Gene Name: transcription factor 20 (AR1)
  ENSP ID: ENSP00000489477

SEQ ID NO: 89697 - protein, 1960 aa, Homo sapiens [sequence omitted]

SEQ ID NO: 89698 - protein, 179 aa, Homo sapiens
  Payload ID: 17963
  Gene Name: transcription factor 21
  Uniprot ID: O43680
  ENSP ID: ENSP00000237316
MSTGSLSDVEDLQEVEMLECDGLKMDSNKEFVTSNESTEESSNCENGSPQKGRGGLGKRRKAPTKKSPLSGVSQEGKQVQRNAANARERARMRVLSKAFSRLKTTLPWVPPDTKLSKLDTLRLASSYIAHLRQILANDKYENGYIHPVNLTWPFMVAGKPESDLKEVVTASRLCGTTAS

SEQ ID NO: 89699 - protein, 179 aa, Homo sapiens; identical to SEQ ID NO: 89698
  Payload ID: 17963
  Gene Name: transcription factor 21
  Uniprot ID: O43680
  ENSP ID: ENSP00000356857

SEQ ID NO: 89700 - protein, 214 aa, Homo sapiens
  Payload ID: 17964
  Gene Name: transcription factor 23
  Uniprot ID: Q7RTU1
  ENSP ID: ENSP00000296096
MSQRKARGPPAMPGVGHSQTQAKARLLPGADRKRSRLSRTRQDPWEERSWSNQRWSRATPGPRGTRAGGLALGRSEASPENAARERSRVRTLRQAFLALQAALPAVPPDTKLSKLDVLVLAASYIAHLTRTLGHELPGPAWPPFLRGLRYLHPLKKWPMRSRLYAGGLGYSDLDSTTASTPSQRTRDAEVGSQVPGEADALLSTTPLSPALGDK

SEQ ID NO: 89701 - protein, 167 aa, Homo sapiens
  Payload ID: 17965
  Gene Name: transcription factor 24
  Uniprot ID: Q7RTU0
  ENSP ID: ENSP00000455444
MDRGRPAGSPLSASAEPAPLAAAIRDSRPGRTGPGPAGPGGGSRSGSGRPAAANAARERSRVQTLRHAFLELQRTLPSVPPDTKLSKLDVLLLATTYIAHLTRSLQDDAEAPADAGLGALRGDGYLHPVKKWPMRSRLYIGATGQFLKHSVSGEKTNHDNTPTDSQP

SEQ ID NO: 89702 - protein, 676 aa, Homo sapiens
  Payload ID: 17966
  Gene Name: transcription factor 25 (basic helix-loop-helix)
  Uniprot ID: Q9BQ70
  ENSP ID: ENSP00000263346
MSRRALRRLRGEQRGQEPLGPGALHFDLRDDDDAEEEGPKRELGVRRPGGAGKEGVRVNNRFELINIDDLEDDPVVNGERSGCALTDAVAPGNKGRGQRGNTESKTDGDDTETVPSEQSHASGKLRKKKKKQKNKKSSTGEASENGLEDIDRILERIEDSTGLNRPGPAPLSSRKHVLYVEHRHLNPDTELKRYFGARAILGEQRPRQRQRVYPKCTWLTTPKSTWPRYSKPGLSMRLLESKKGLSFFAFEHSEEYQQAQHKFLVAVESMEPNNIVVLLQTSPYHVDSLLQLSDACRFQEDQEMARDLVERALYSMECAFHPLFSLTSGACRLDYRRPENRSFYLALYKQMSFLEKRGCPRTALEYCKLILSLEPDEDPLCMLLLIDHLALRARNYEYLIRLFQEWEAHRNLSQLPNFAFSVPLAYFLLSQQTDLPECEQSSARQKASLLIQQALTMFPGVLLPLLESCSVRPDASVSSHRFFGPNAEISQPPALSQLVNLYLGRSHFLWKEPATMSWLEENVHEVLQAVDAGDPAVEACENRRKVLYQRAPRNIHRHVILSEIKEAVAALPPDVTTQSVMGFDPLPPSDTIYSYVRPERLSPISHGNTIALFFRSLLPNYTMEGERPEEGVAGGLNRNQGLNRLMLAVRDMMANFHLNDLEAPHEDDAEGEGEWD

SEQ ID NO: 89703 - protein, 473 aa, Homo sapiens
  Payload ID: 17966
  Gene Name: transcription factor 25 (basic helix-loop-helix)
  ENSP ID: ENSP00000263347
MRLLESKKGLSFFAFEHSEEYQQAQHKFLVAVESMEPNNIVVLLQTSPYHVDSLLQLSDACRFQEDQEMARDLVERALYSMECAFHPLFSLTSGACRLDYRRPENRSFYLALYKQMSFLEKRGCPRTALEYCKLILSLEPDEDPLCMLLLIDHLALRARNYEYLIRLFQEWEAHRNLSQLPNFAFSVPLAYFLLSQQTDLPECEQSSARQKASLLIQQALTMFPGVLLPLLESCSVRPDASVSSHRFFGPNAEISQPPALSQLVNLYLGRSHFLWKEPATMSWLEENVHEVLQAVDAGDPAVEACENRRKVLYQRAPRNIHRHVILSEIKEAVAALPPDVTTQSVMGFDPLPPSDTIYSYVRPERKGEEERNSVIWGSQLCVCRPRSFPSPPNVQALACRPLWQAKSYQPWKHHCSLLPVTVAKLYHGGGEARGRSGWGSEPQPGPEQADAGCARHDGQLPPQRPGGAARGRR

SEQ ID NO: 89704 - protein, 210 aa, Homo sapiens
  Payload ID: 17966
  Gene Name: transcription factor 25 (basic helix-loop-helix)
  ENSP ID: ENSP00000454414
MSRRALRRLRGEQRGQEPLGPGALHFDLRDDDDAEEEGPKRELGVRRPGGAGKEGVRVNNRFELINIDDLEDDPVVNGERSGCALTDAVAPGNKGRGQRGNTESKTDGDDTETVPSEQSHASGKLRKKKKKQKNKKSSTGEASENGLEDIDRILERIEDSTGLNRPGPAPLSSRKHVLYVEHRPRQRQRVYPKCTWLTTPKSTWPRYSKP

SEQ ID NO: 89705 - protein, 117 aa, Homo sapiens
  Payload ID: 17966
  Gene Name: transcription factor 25 (basic helix-loop-helix)
  ENSP ID: ENSP00000455471
  MOD_RES (1)..(1): Any amino acid
XKGEEERNSVIWGSQLCVCRPRSFPSPPNVQALACRPLWQVRVTQWKQAKSYQPWKHHCSLLPVTVAKLYHGGGEARGRSGWGSEPQPGPEQADAGCARHDGQLPPQRPGGAARGRR

SEQ ID NO: 89706 - protein, 570 aa, Homo sapiens
  Payload ID: 17966
  Gene Name: transcription factor 25 (basic helix-loop-helix)
  ENSP ID: ENSP00000455611
  MOD_RES (1)..(1): Any amino acid
XGEASENGLEDIDRILERIEDSTGLNRPGPAPLSSRKHVLYVEHRHLNPDTELKRYFGARAILGEQRPRQRQRVYPKCTWLTTPKSTWPRYSKPGLSMRLLESKKGLSFFAFEHSEEYQQAQHKFLVAVESMEPNNIVVLLQTSPYHVDSLLQLSDACRFQEDQEMARDLVERALYSMECAFHPLFSLTSGACRLDYRRPENRSFYLALYKQMSFLEKRGCPRTALEYCKLILSLEPDEDPLCMLLLIDHLALRARNYEYLIRLFQEWEAHRNLSQLPNFAFSVPLAYFLLSQQTDLPECEQSSARQKASLLIQQALTMFPGVLLPLLESCSVRPDASVSSHRFFGPNAEISQPPALSQLVNLYLGRSHFLWKEPATMSWLEENVHEVLQAVDAGDPAVEACENRRKVLYQRAPRNIHRHVILSEIKEAVAALPPDVTTQSVMGFDPLPPSDTIYSYVRPERKGEEERNSVIWGSQLCVCRPRSFPSPPNVQALACRPLWQAKSYQPWKHHCSLLPVTVAKLYHGGGEARGRSGWGSEPQPGPEQADAGCARHDGQLPPQRPGGAARGRR

SEQ ID NO: 89707 - protein, 76 aa, Homo sapiens
  Payload ID: 17966
  Gene Name: transcription factor 25 (basic helix-loop-helix)
  ENSP ID: ENSP00000456080
MSRRALRRLRGEQRGQEPLGPGALHFDLRDDDDAEEEGPKRELGVRRPGGAGKEGVRVNNRFELEKWTFSSPPKKR

SEQ ID NO: 89708 - protein, 209 aa, Homo sapiens
  Payload ID: 17966
  Gene Name: transcription factor 25 (basic helix-loop-helix)
  ENSP ID: ENSP00000456344
  MOD_RES (1)..(1): Any amino acid
XRGCPRTALEYCKLILSLEPDEDPLCMLLLIDHLALRARNYEYLIRLFQEWEAHRNLSQLPNFAFSVPLAYFLLSQQTDLPECEQSSARQKASLLIQQALTMFPGVLLPLLESCSVRPDASVSSHRFFGPNAEIRLTAHTCVPQPHALRPAAQGPPFTPGHRALPGPPVCPSMGLCQPRGRLWSEEGFCSEPLLSPSQPPALSQLVNLY

SEQ ID NO: 89709 - protein, 146 aa, Homo sapiens
  Payload ID: 17966
  Gene Name: transcription factor 25 (basic helix-loop-helix)
  ENSP ID: ENSP00000456592
  MOD_RES (1)..(1): Any amino acid
XRSGCALTDAVAPGNKGRGQRGNTESKTDGDDTETVPSEQSHASGKLRKKKKKQKNKKSSTGEASENGLEDIDRILERIEDSTGLNRPGPAPLSSRKHVLYVEHRCGPRPSLRLPFSAAALLCGCPSLRLPFSVAATETSWEEKVL

SEQ ID NO: 89710 - protein, 233 aa, Homo sapiens
  Payload ID: 17966
  Gene Name: transcription factor 25 (basic helix-loop-helix)
  ENSP ID: ENSP00000456803
MSRRALRRLRGEQRGQEPLGPGALHFDLRDDDDAEEEGPKRELGVRRPGGAGKEGVRVNNRFELINIDDLEDDPVVNGERSGCALTDAVAPGNKGRGQRGNTESKTDGDDTETVPSEQSHASGKLRKKKKKQKNKKSSTGEASENGLEDIDRILERIEDSTGLNRPGPAPLSSRKHVLYVEHRHLNPDTELKRPRQRQRVYPKCTWLTTPKSTWPRYSKPGLSMRLLESKKGL

SEQ ID NO: 89711 - protein, 286 aa, Homo sapiens
  Payload ID: 17966
  Gene Name: transcription factor 25 (basic helix-loop-helix)
  ENSP ID: ENSP00000456840
  MOD_RES (1)..(1): Any amino acid
XRHLNPDTELKRYFGARAILGEQRPRQRQRVYPKCTWLTTPKSTWPRYSKPGLSMRLLESKKGLSFFAFEHSEEYQQAQHKFLVAVESMEPNNIVLSDACRFQEDQEMARDLVERALYSMECAFHPLFSLTSGACRLDYRRPENRSFYLALYKQMSFLEKRGCPRTALEYCKLILSLEPDEDPLCMLLLIDHLALRARNYEYLIRLFQEWEAHRNLSQLPNFAFSVPLAYFLLSQQTDLPECEQSSARQKASLLIQQALTMFPGVLLPLLESCSVRPDASVSSHRF

SEQ ID NO: 89712 - protein, 265 aa, Homo sapiens
  Payload ID: 17966
  Gene Name: transcription factor 25 (basic helix-loop-helix)
  ENSP ID: ENSP00000457329
MSRRALRRLRGEQRGQEPLGPGALHFDLRDDDDAEEEGPKRELGVRRPGGAGKEGVRVNNRFELINIDDLEDDPVVNGERSGCALTDAVAPGNKGRGQRGNTESKTDGDDTETVPSEQSHASGKLRKKKKKQKNKKSSTGEASENGLEDIDRILERIEDSTGLNRPGPAPLSSRKHVLYVEHRHLNPDTELKSEEYQQAQHKFLVAVESMEPNNIVLSDACRFQEDQEMARDLVERALYSMECAFHPLFSLTSGACRLDYRRPEN

SEQ ID NO: 89713 - protein, 216 aa, Homo sapiens
  Payload ID: 17966
  Gene Name: transcription factor 25 (basic helix-loop-helix)
  ENSP ID: ENSP00000484773
MSRRALRRLRGEQRGQEPLGPGALHFDLRDDDDAEEEGPKRELGVRRPGGAGKEGVRVNNRFELINIDDLEDDPVVNGERSGCALTDAVAPGNKGRGQRGNTESKTDGDDTETVPSEQSHASGKLRKKKKKQKNKKSSTGEASENGLEDIDRILERIEDSTGLNRPGPAPLSSRKHVLYVEHRHLNPDTELKRYFGARAILGEQRDRVLLGCPVWF

SEQ ID NO: 89714 - protein, 654 aa, Homo sapiens
  Payload ID: 17967
  Gene Name: transcription factor 3
  Uniprot ID: P15923
  ENSP ID: ENSP00000262965
MNQPQRMAPVGTDKELSDLLDFSMMFPLPVTNGKGRPASLAGAQFGGSGLEDRPSSGSWGSGDQSSSSFDPSRTFSEGTHFTESHSSLSSSTFLGPGLGGKSGERGAYASFGRDAGVGGLTQAGFLSGELALNSPGPLSPSGMKGTSQYYPSYSGSSRRRAADGSLDTQPKKVRKVPPGLPSSVYPPSSGEDYGRDATAYPSAKTPSSTYPAPFYVADGSLHPSAELWSPPGQAGFGPMLGGGSSPLPLPPGSGPVGSSGSSSTFGGLHQHERMGYQLHGAEVNGGLPSASSFSSAPGATYGGVSSHTPPVSGADSLLGSRGTTAGSSGDALGKALASIYSPDHSSNNFSSSPSTPVGSPQGLAGTSQWPRAGAPGALSPSYDGGLHGLQSKIEDHLDEAIHVLRSHAVGTAGDMHTLLPGHGALASGFTGPMSLGGRHAGLVGGSHPEDGLAGSTSLMHNHAALPSQPGTLPDLSRPPDSYSGLGRAGATAAASEIKREEKEDEENTSAADHSEEEKKELKAPRARTSPDEDEDDLLPPEQKAEREKERRVANNARERLRVRDINEAFKELGRMCQLHLNSEKPQTKLLILHQAVSVILNLEQQVRERNLNPKAACLKRREEEKVSGVVGDPQMVLSAPHPGLSEAHNPAGHM

SEQ ID NO: 89715 - protein, 600 aa, Homo sapiens
  Payload ID: 17967
  Gene Name: transcription factor 3
  ENSP ID: ENSP00000344375
MNQPQRMAPVGTDKELSDLLDFSMMFPLPVTNGKGRPASLAGAQFGGSGKSGERGAYASFGRDAGVGGLTQAGFLSGELALNSPGPLSPSGMKGTSQYYPSYSGSSRRRAADGSLDTQPKKVRKVPPGLPSSVYPPSSGEDYGRDATAYPSAKTPSSTYPAPFYVADGSLHPSAELWSPPGQAGFGPMLGGGSSPLPLPPGSGPVGSSGSSSTFGGLHQHERMGYQLHGAEVNGGLPSASSFSSAPGATYGGVSSHTPPVSGADSLLGSRGTTAGSSGDALGKALASIYSPDHSSNNFSSSPSTPVGSPQGLAGTSQWPRAGAPGALSPSYDGGLHGLQSKIEDHLDEAIHVLRSHAVGTAGDMHTLLPGHGALASGFTGPMSLGGRHAGLVGGSHPEDGLAGSTSLMHNHAALPSQPGTLPDLSRPPDSYSGLGRAGATAAASEIKREEKEDEENTSAADHSEEEKKELKAPRARTSSTDEVLSLEEKDLRDRERRMANNARERVRVRDINEAFRELGRMCQMHLKSDKAQTKLLILQQAVQVILGLEQQVRERNLNPKAACLKRREEEKVSGVVGDPQMVLSAPHPGLSEAHNPAGHM

SEQ ID NO: 89716 - protein, 658 aa, Homo sapiens
  Payload ID: 17967
  Gene Name: transcription factor 3
  Uniprot ID: P15923
  ENSP ID: ENSP00000378813
MNQPQRMAPVGTDKELSDLLDFSMMFPLPVTNGKGRPASLAGAQFGGSGKSGERGAYASFGRDAGVGGLTQAGFLSGELALNSPGPLSPSGMKGTSQYYPSYSGSSRRRAADGSLDTQPKKVRKVPPGLPSSVYPPSSGEDYGRDATAYPSAKTPSSTYPAPFYVADGSLHPSAELWSPPGQAGFGPMLGGGSSPLPLPPGSGPVGSSGSSSTFGGLHQHERMGYQLHGAEVNGGLPSASSFSSAPGATYGGVSSHTPPVSGADSLLGSRGTTAGSSGDALGKALASIYSPDHSSNNFSSSPSTPVGSPQGLAGTSQWPRAGAPGALSPSYDGGLHGLQSKIEDHLDEAIHVLRSHAVGTAGDMHTLLPGHGALASGFTGPMSLGGRHAGLVGGSHPEDGLAGSTSLMHNHAALPSQPGTLPDLSRPPDSYSGLGRAGATAAASEIKREEKEDEENTSAADHSEEEKKELKAPRARTRCQPTPRHSPPSPHQDAHVHRPHAHRTHTGRPSAGPTLFPQPHCLPLAPSRRPPHSPDEDEDDLLPPEQKAEREKERRVANNARERLRVRDINEAFKELGRMCQLHLNSEKPQTKLLILHQAVSVILNLEQQVRERNLNPKAACLKRREEEKVSGVVGDPQMVLSAPHPGLSEAHNPAGHM

SEQ ID NO: 89717 - protein, 679 aa, Homo sapiens
  Payload ID: 17967
  Gene Name: transcription factor 3
  ENSP ID: ENSP00000396363
MNQPQRMAPVGTDKELSDLLDFSMMFPLPVTNGKGRPASLAGAQFGGSGLEDRPSSGSWGSGDQSSSSFDPSRTFSEGTHFTESHSSLSSSTFLGPGLGGECLAWCGPSAVHRCADVGLGMVSARTAPGKSGERGAYASFGRDAGVGGLTQAGFLSGELALNSPGPLSPSGMKGTSQYYPSYSGSSRRRAADGSLDTQPKKVRKVPPGLPSSVYPPSSGEDYGRDATAYPSAKTPSSTYPAPFYVADGSLHPSAELWSPPGQAGFGPMLGGGSSPLPLPPGSGPVGSSGSSSTFGGLHQHERMGYQLHGAEVNGGLPSASSFSSAPGATYGGVSSHTPPVSGADSLLGSRGTTAGSSGDALGKALASIYSPDHSSNNFSSSPSTPVGSPQGLAGTSQWPRAGAPGALSPSYDGGLHGLQSKIEDHLDEAIHVLRSHAVGTAGDMHTLLPGHGALASGFTGPMSLGGRHAGLVGGSHPEDGLAGSTSLMHNHAALPSQPGTLPDLSRPPDSYSGLGRAGATAAASEIKREEKEDEENTSAADHSEEEKKELKAPRARTSTDEVLSLEEKDLRDRERRMANNARERVRVRDINEAFRELGRMCQMHLKSDKAQTKLLILQQAVQVILGLEQQVRERNLNPKAACLKRREEEKVSGVVGDPQMVLSAPHPGLSEAHNPAGHM

SEQ ID NO: 89718 - protein, 51 aa, Homo sapiens
  Payload ID: 17967
  Gene Name: transcription factor 3
  ENSP ID: ENSP00000465251
AAASEIKREEKEDEENTSAADHSEEEKKELKAPRARTRAEGRAGEGAPGGQ

SEQ ID NO: 89719 - protein, 82 aa, Homo sapiens
  Payload ID: 17967
  Gene Name: transcription factor 3
  ENSP ID: ENSP00000465481
TLPDLSRPPDSYSGLGRAGATAAASEIKREEKEDEENTSAADHSEEEKKELKAPRARTRRGRGRPSPPRAEGRAGEGAPGGQ

SEQ ID NO: 89720 - protein, 159 aa, Homo sapiens
  Payload ID: 17967
  Gene Name: transcription factor 3
  ENSP ID: ENSP00000465510
AAASEIKREEKEDEENTSAADHSEEEKKELKAPRARTSTDEVLSLEEKDLRDRERRMANNARERVRVRDINEAFRELGRMCQMHLKSDKAQTKLLILQQAVQVILGLEQQVRERNLNPKAACLKRREEEKVSGVVGDPQMVLSAPHPGLSEAHNPAGHM

SEQ ID NO: 89721 - protein, 179 aa, Homo sapiens
  Payload ID: 17967
  Gene Name: transcription factor 3
  ENSP ID: ENSP00000465549
SRPPDSYSGLGRAGATAAASEIKREEKEDEENTSAADHSEEEKKELKAPRARTSPDEDEDDLLPPEQKAEREKERRVANNARERLRVRDINEAFKELGRMCQLHLNSEKPQTKLLILHQAVSVILNLEQQVRERNLNPKAACLKRREEEKVSGVVGDPQMVLSAPHPGLSEAHNPAGHM

SEQ ID NO: 89722 - protein, 213 aa, Homo sapiens
  Payload ID: 17967
  Gene Name: transcription factor 3
  ENSP ID: ENSP00000466052
MNQPQRMAPVGTDKELSDLLDFSMMFPLPVTNGKGRPASLAGAQFGGSGLEDRPSSGSWGSGDQSSSSFDPSRTFSEGTHFTESHSSLSSSTFLGPGLGGKSGERGAYASFGRDAGVGGLTQAGFLSGELALNSPGPLSPSGMKGTSQYYPSYSGSSRRRAADGSLDTQPKKVRKVPPGLPSSVYPPSSGEDYGRDATAYPSAKTPSSTYPAP

SEQ ID NO: 89723 - protein, 220 aa, Homo sapiens
  Payload ID: 17967
  Gene Name: transcription factor 3
  ENSP ID: ENSP00000466565
  MOD_RES (1)..(1): Any amino acid
XMSLGGRHAGLVGGSHPEDGLAGSTSLMHNHAALPSQPGTLPDLSRPPDSYSGLGRAGATAAASEIKREEKEDEENTSAADHSEEEKKELKAPRARTSSTDEVLSLEEKDLRDRERRMANNARERVRVRDINEAFRELGRMCQMHLKSDKAQTKLLILQQAVQVILGLEQQVRERNLNPKAACLKRREEEKVSGVVGDPQMVLSAPHPGLSEAHNPAGHM

SEQ ID NO: 89724 - protein, 314 aa, Homo sapiens
  Payload ID: 17967
  Gene Name: transcription factor 3
  ENSP ID: ENSP00000466952
  MOD_RES (1)..(1): Any amino acid
XTSQWPRAGAPGALSPSYDGGLHGLQSKIEDHLDEAIHVLRSHAVGTAGDMHTLLPGHGALASGFTGPMSLGGRHAGLVSAGRGWSWAVGGDPAPPDAPVSPRLQVGGSHPEDGLAGSTSLMHNHAALPSQPGTLPDLSRPPDSYSGLGRAGATAAASEIKREEKEDEENTSAADHSEEEKKELKAPRARTSSTDEVLSLEEKDLRDRERRMANNARERVRVRDINEAFRELGRMCQMHLKSDKAQTKLLILQQAVQVILGLEQQVRERNLNPKAACLKRREEEKVSGVVGDPQMVLSAPHPGLSEAHNPAGHM

SEQ ID NO: 89725 - protein, 95 aa, Homo sapiens
  Payload ID: 17967
  Gene Name: transcription factor 3
  ENSP ID: ENSP00000466954
MNQPQRMAPVGTDKELSDLLDFSMMFPLPVTNGKGRPASLAGAQFGGSGLEDRPSSGSWGSGDQSSSSFDPSRTFSEGTHFTESHSSLSSSTFLG

SEQ ID NO: 89726 - protein, 96 aa, Homo sapiens
  Payload ID: 17967
  Gene Name: transcription factor 3
  ENSP ID: ENSP00000467388
IYSPDHSSNNFSSSPSTPVGSPQGLAGTSQWPRAGAPGALSPSYDGGLHGLVGGSHPEDGLAGSTSLMHNHAALPSQPGTLPDLSRPPDSYSGLGR

SEQ ID NO: 89727 - protein, 165 aa, Homo sapiens
  Payload ID: 17967
  Gene Name: transcription factor 3
  ENSP ID: ENSP00000467508
ATAAASEIKREEKEDEENTSAADHSEEEKKELKAPRARTSPDEDEDDLLPPEQKAEREKERRVANNARERLRVRDINEAFKELGRMCQLHLNSEKPQTKLLILHQAVSVILNLEQQVRERNLNPKAACLKRREEEKVSGVVGDPQMVLSAPHPGLSEAHNPAGHM

SEQ ID NO: 89728 - protein, 51 aa, Homo sapiens; identical to SEQ ID NO: 89718
  Payload ID: 17967
  Gene Name: transcription factor 3
  ENSP ID: ENSP00000467972

SEQ ID NO: 89729 - protein, 204 aa, Homo sapiens
  Payload ID: 17967
  Gene Name: transcription factor 3
  ENSP ID: ENSP00000468481
  MOD_RES (1)..(1): Any amino acid
XLAGSTSLMHNHAALPSQPGTLPDLSRPPDSYSGLGRAGATAAASEIKREEKEDEENTSAADHSEEEKKELKAPRARTSPDEDEDDLLPPEQKAEREKERRVANNARERLRVRDINEAFKELGRMCQLHLNSEKPQTKLLILHQAVSVILNLEQQVRERNLNPKAACLKRREEEKVSGVVGDPQMVLSAPHPGLSEAHNPAGHM

SEQ ID NO: 89730 - protein, 651 aa, Homo sapiens
  Payload ID: 17967
  Gene Name: transcription factor 3
  Uniprot ID: P15923
  ENSP ID: ENSP00000468487
MNQPQRMAPVGTDKELSDLLDFSMMFPLPVTNGKGRPASLAGAQFGGSGLEDRPSSGSWGSGDQSSSSFDPSRTFSEGTHFTESHSSLSSSTFLGPGLGGKSGERGAYASFGRDAGVGGLTQAGFLSGELALNSPGPLSPSGMKGTSQYYPSYSGSSRRRAADGSLDTQPKKVRKVPPGLPSSVYPPSSGEDYGRDATAYPSAKTPSSTYPAPFYVADGSLHPSAELWSPPGQAGFGPMLGGGSSPLPLPPGSGPVGSSGSSSTFGGLHQHERMGYQLHGAEVNGGLPSASSFSSAPGATYGGVSSHTPPVSGADSLLGSRGTTAGSSGDALGKALASIYSPDHSSNNFSSSPSTPVGSPQGLAGTSQWPRAGAPGALSPSYDGGLHGLQSKIEDHLDEAIHVLRSHAVGTAGDMHTLLPGHGALASGFTGPMSLGGRHAGLVGGSHPEDGLAGSTSLMHNHAALPSQPGTLPDLSRPPDSYSGLGRAGATAAASEIKREEKEDEENTSAADHSEEEKKELKAPRARTSSTDEVLSLEEKDLRDRERRMANNARERVRVRDINEAFRELGRMCQMHLKSDKAQTKLLILQQAVQVILGLEQQVRERNLNPKAACLKRREEEKVSGVVGDPQMVLSAPHPGLSEAHNPAGHM

SEQ ID NO: 89731 - protein, 654 aa, Homo sapiens; identical to SEQ ID NO: 89714
  Payload ID: 17967
  Gene Name: transcription factor 3
  Uniprot ID: P15923
  ENSP ID: ENSP00000480564

SEQ ID NO: 89732 - protein, 671 aa, Homo sapiens
  Payload ID: 17968
  Gene Name: transcription factor 4
  Uniprot ID: P15884
  ENSP ID: ENSP00000346440
MHHQQRMAALGTDKELSDLLDFSAMFSPPVSSGKNGPTSLASGHFTGSNVEDRSSSGSWGNGGHPSPSRNYGDGTPYDHMTSRDLGSHDNLSPPFVNSRIQSKTERGSYSSYGRESNLQGCHQQSLLGGDMDMGNPGTLSPTKPGSQYYQYSSNNPRRRPLHSSAMEVQTKKVRKVPPGLPSSVYAPSASTADYNRDSPGYPSSKPATSTFPSSFFMQDGHHSSDPWSSSSGMNQPGYAGMLGNSSHIPQSSSYCSLHPHERLSYPSHSSADINSSLPPMSTFHRSGTNHYSTSSCTPPANGTDSIMANRGSGAAGSSQTGDALGKALASIYSPDHTNNSFSSNPSTPVGSPPSLSAGTAVWSRNGGQASSSPNYEGPLHSLQSRIEDRLERLDDAIHVLRNHAVGPSTAMPGGHGDMHGIIGPSHNGAMGGLGSGYGTGLLSANRHSLMVGTHREDGVALRGSHSLLPNQVPVPQLPVQSATSPDLNPPQDPYRGMPPGLQGQSVSSGSSEIKSDDEGDENLQDTKSSEDKKLDDDKKDIKSITRSRSSNNDDEDLTPEQKAEREKERRMANNARERLRVRDINEAFKELGRMVQLHLKSDKPQTKLLILHQAVAVILSLEQQVRERNLNPKAACLKRREEEKVSSEPPPLSLAGPHPGMGDASNHMGQM

SEQ ID NO: 89733 - protein, 667 aa, Homo sapiens
  Payload ID: 17968
  Gene Name: transcription factor 4
  Uniprot ID: P15884
  ENSP ID: ENSP00000348374
MHHQQRMAALGTDKELSDLLDFSAMFSPPVSSGKNGPTSLASGHFTGSNVEDRSSSGSWGNGGHPSPSRNYGDGTPYDHMTSRDLGSHDNLSPPFVNSRIQSKTERGSYSSYGRESNLQGCHQQSLLGGDMDMGNPGTLSPTKPGSQYYQYSSNNPRRRPLHSSAMEVQTKKVRKVPPGLPSSVYAPSASTADYNRDSPGYPSSKPATSTFPSSFFMQDGHHSSDPWSSSSGMNQPGYAGMLGNSSHIPQSSSYCSLHPHERLSYPSHSSADINSSLPPMSTFHRSGTNHYSTSSCTPPANGTDSIMANRGSGAAGSSQTGDALGKALASIYSPDHTNNSFSSNPSTPVGSPPSLSAGTAVWSRNGGQASSSPNYEGPLHSLQSRIEDRLERLDDAIHVLRNHAVGPSTAMPGGHGDMHGIIGPSHNGAMGGLGSGYGTGLLSANRHSLMVGTHREDGVALRGSHSLLPNQVPVPQLPVQSATSPDLNPPQDPYRGMPPGLQGQSVSSGSSEIKSDDEGDENLQDTKSSEDKKLDDDKKDIKSITSNNDDEDLTPEQKAEREKERRMANNARERLRVRDINEAFKELGRMVQLHLKSDKPQTKLLILHQAVAVILSLEQQVRERNLNPKAACLKRREEEKVSSEPPPLSLAGPHPGMGDASNHMGQM

SEQ ID NO: 89734 - protein, 773 aa, Homo sapiens
  Payload ID: 17968
  Gene Name: transcription factor 4
  ENSP ID: ENSP00000381382
MFSKRLEKIPQVPLLFPFIFIILTNYSKMEGAVESQPSFFKTSQDIVTCTWVENCYSSFSRRPLEQMFCKHQSKNIISWTGMVAHTCNPSTLGGQGLCDFAKMHHQQRMAALGTDKELSDLLDFSAMFSPPVSSGKNGPTSLASGHFTGSNVEDRSSSGSWGNGGHPSPSRNYGDGTPYDHMTSRDLGSHDNLSPPFVNSRIQSKTERGSYSSYGRESNLQGCHQQSLLGGDMDMGNPGTLSPTKPGSQYYQYSSNNPRRRPLHSSAMEVQTKKVRKVPPGLPSSVYAPSASTADYNRDSPGYPSSKPATSTFPSSFFMQDGHHSSDPWSSSSGMNQPGYAGMLGNSSHIPQSSSYCSLHPHERLSYPSHSSADINSSLPPMSTFHRSGTNHYSTSSCTPPANGTDSIMANRGSGAAGSSQTGDALGKALASIYSPDHTNNSFSSNPSTPVGSPPSLSAGTAVWSRNGGQASSSPNYEGPLHSLQSRIEDRLERLDDAIHVLRNHAVGPSTAMPGGHGDMHGIIGPSHNGAMGGLGSGYGTGLLSANRHSLMVGTHREDGVALRGSHSLLPNQVPVPQLPVQSATSPDLNPPQDPYRGMPPGLQGQSVSSGSSEIKSDDEGDENLQDTKSSEDKKLDDDKKDIKSITRSRSSNNDDEDLTPEQKAEREKERRMANNARERLRVRDINEAFKELGRMVQLHLKSDKPQTKLLILHQAVAVILSLEQQVRERNLNPKAACLKRREEEKVSSEPPPLSLAGPHPGMGDASNHMGQM

SEQ ID NO: 89735 - protein, 511 aa, Homo sapiens
  Payload ID: 17968
  Gene Name: transcription factor 4
  Uniprot ID: P15884
  ENSP ID: ENSP00000409447
MYCAYTIPGMGGNSLMYYYNGKAVYAPSASTADYNRDSPGYPSSKPATSTFPSSFFMQDGHHSSDPWSSSSGMNQPGYAGMLGNSSHIPQSSSYCSLHPHERLSYPSHSSADINSSLPPMSTFHRSGTNHYSTSSCTPPANGTDSIMANRGSGAAGSSQTGDALGKALASIYSPDHTNNSFSSNPSTPVGSPPSLSAGTAVWSRNGGQASSSPNYEGPLHSLQSRIEDRLERLDDAIHVLRNHAVGPSTAMPGGHGDMHGIIGPSHNGAMGGLGSGYGTGLLSANRHSLMVGTHREDGVALRGSHSLLPNQVPVPQLPVQSATSPDLNPPQDPYRGMPPGLQGQSVSSGSSEIKSDDEGDENLQDTKSSEDKKLDDDKKDIKSITRSRSSNNDDEDLTPEQKAEREKERRMANNARERLRVRDINEAFKELGRMVQLHLKSDKPQTKLLILHQAVAVILSLEQQVRERNLNPKAACLKRREEEKVSSEPPPLSLAGPHPGMGDASNHMGQM

SEQ ID NO: 89736 - protein, 625 aa, Homo sapiens
  Payload ID: 17968
  Gene Name: transcription factor 4
  Uniprot ID: P15884
  ENSP ID: ENSP00000439656
MEEDSRDVEDRSSSGSWGNGGHPSPSRNYGDGTPYDHMTSRDLGSHDNLSPPFVNSRIQSKTERGSYSSYGRESNLQGCHQQSLLGGDMDMGNPGTLSPTKPGSQYYQYSSNNPRRRPLHSSAMEVQTKKVRKVPPGLPSSVYAPSASTADYNRDSPGYPSSKPATSTFPSSFFMQDGHHSSDPWSSSSGMNQPGYAGMLGNSSHIPQSSSYCSLHPHERLSYPSHSSADINSSLPPMSTFHRSGTNHYSTSSCTPPANGTDSIMANRGSGAAGSSQTGDALGKALASIYSPDHTNNSFSSNPSTPVGSPPSLSAGTAVWSRNGGQASSSPNYEGPLHSLQSRIEDRLERLDDAIHVLRNHAVGPSTAMPGGHGDMHGIIGPSHNGAMGGLGSGYGTGLLSANRHSLMVGTHREDGVALRGSHSLLPNQVPVPQLPVQSATSPDLNPPQDPYRGMPPGLQGQSVSSGSSEIKSDDEGDENLQDTKSSEDKKLDDDKKDIKSITSNNDDEDLTPEQKAEREKERRMANNARERLRVRDINEAFKELGRMVQLHLKSDKPQTKLLILHQAVAVILSLEQQVRERNLNPKAACLKRREEEKVSSEPPPLSLAGPHPGMGDASNHMGQM

SEQ ID NO: 89737 - protein, 537 aa, Homo sapiens
  Payload ID: 17968
  Gene Name: transcription factor 4
  Uniprot ID: P15884
  ENSP ID: ENSP00000439827
MDMGNPGTLSPTKPGSQYYQYSSNNPRRRPLHSSAMEVQTKKVRKVPPGLPSSVYAPSASTADYNRDSPGYPSSKPATSTFPSSFFMQDGHHSSDPWSSSSGMNQPGYAGMLGNSSHIPQSSSYCSLHPHERLSYPSHSSADINSSLPPMSTFHRSGTNHYSTSSCTPPANGTDSIMANRGSGAAGSSQTGDALGKALASIYSPDHTNNSFSSNPSTPVGSPPSLSAGTAVWSRNGGQASSSPNYEGPLHSLQSRIEDRLERLDDAIHVLRNHAVGPSTAMPGGHGDMHGIIGPSHNGAMGGLGSGYGTGLLSANRHSLMVGTHREDGVALRGSHSLLPNQVPVPQLPVQSATSPDLNPPQDPYRGMPPGLQGQSVSSGSSEIKSDDEGDENLQDTKSSEDKKLDDDKKDIKSITSNNDDEDLTPEQKAEREKERRMANNARERLRVRDINEAFKELGRMVQLHLKSDKPQTKLLILHQAVAVILSLEQQVRERNLNPKAACLKRREEEKVSSEPPPLSLAGPHPGMGDASNHMGQM

SEQ ID NO: 89738 - protein, 647 aa, Homo sapiens
  Payload ID: 17968
  Gene Name: transcription factor 4
  Uniprot ID: P15884
  ENSP ID: ENSP00000440731
MFSPPVSSGKNGPTSLASGHFTGSNVEDRSSSGSWGNGGHPSPSRNYGDGTPYDHMTSRDLGSHDNLSPPFVNSRIQSKTERGSYSSYGRESNLQGCHQQSLLGGDMDMGNPGTLSPTKPGSQYYQYSSNNPRRRPLHSSAMEVQTKKVRKVPPGLPSSVYAPSASTADYNRDSPGYPSSKPATSTFPSSFFMQDGHHSSDPWSSSSGMNQPGYAGMLGNSSHIPQSSSYCSLHPHERLSYPSHSSADINSSLPPMSTFHRSGTNHYSTSSCTPPANGTDSIMANRGSGAAGSSQTGDALGKALASIYSPDHTNNSFSSNPSTPVGSPPSLSAGTAVWSRNGGQASSSPNYEGPLHSLQSRIEDRLERLDDAIHVLRNHAVGPSTAMPGGHGDMHGIIGPSHNGAMGGLGSGYGTGLLSANRHSLMVGTHREDGVALRGSHSLLPNQVPVPQLPVQSATSPDLNPPQDPYRGMPPGLQGQSVSSGSSEIKSDDEGDENLQDTKSSEDKKLDDDKKDIKSITRSRSSNNDDEDLTPEQKAEREKERRMANNARERLRVRDINEAFKELGRMVQLHLKSDKPQTKLLILHQAVAVILSLEQQVRERNLNPKAACLKRREEEKVSSEPPPLSLAGPHPGMGDASNHMGQM

SEQ ID NO: 89739 - protein, 600 aa, Homo sapiens
  Payload ID: 17968
  Gene Name: transcription factor 4
  Uniprot ID: P15884
  ENSP ID: ENSP00000441562
MKDIFFQFIIARVRKCYSLSCLHTLPVVPTLRKTERGSYSSYGRESNLQGCHQSLLGGDMDMGNPGTLSPTKPGSQYYQYSSNNPRRRPLHSSAMEVQTKKVRKVPPGLPSSVYAPSASTADYNRDSPGYPSSKPATSTFPSSFFMQDGHHSSDPWSSSSGMNQPGYAGMLGNSSHIPQSSSYCSLHPHERLSYPSHSSADINSSLPPMSTFHRSGTNHYSTSSCTPPANGTDSIMANRGSGAAGSSQTGDALGKALASIYSPDHTNNSFSSNPSTPVGSPPSLSAGTAVWSRNGGQASSSPNYEGPLHSLQSRIEDRLERLDDAIHVLRNHAVGPSTAMPGGHGDMHGIIGPSHNGAMGGLGSGYGTGLLSANRHSLMVGTHREDGVALRGSHSLLPNQVPVPQLPVQSATSPDLNPPQDPYRGMPPGLQGQSVSSGSSEIKSDDEGDENLQDTKSSEDKKLDDDKKDIKSITRSRSSNNDDEDLTPEQKAEREKERRMANNARERLRVRDINEAFKELGRMVQLHLKSDKPQTKLLILHQAVAVILSLEQQVRERNLNPKAACLKRREEEKVSSEPPPLSLAGPHPGMGDASNHMGQM

SEQ ID NO: 89740 - protein, 643 aa, Homo sapiens
  Payload ID: 17968
  Gene Name: transcription factor 4
  Uniprot ID: P15884
  ENSP ID: ENSP00000445202
MFSPPVSSGKNGPTSLASGHFTGSNVEDRSSSGSWGNGGHPSPSRNYGDGTPYDHMTSRDLGSHDNLSPPFVNSRIQSKTERGSYSSYGRESNLQGCHQQSLLGGDMDMGNPGTLSPTKPGSQYYQYSSNNPRRRPLHSSAMEVQTKKVRKVPPGLPSSVYAPSASTADYNRDSPGYPSSKPATSTFPSSFFMQDGHHSSDPWSSSSGMNQPGYAGMLGNSSHIPQSSSYCSLHPHERLSYPSHSSADINSSLPPMSTFHRSGTNHYSTSSCTPPANGTDSIMANRGSGAAGSSQTGDALGKALASIYSPDHTNNSFSSNPSTPVGSPPSLSAGTAVWSRNGGQASSSPNYEGPLHSLQSRIEDRLERLDDAIHVLRNHAVGPSTAMPGGHGDMHGIIGPSHNGAMGGLGSGYGTGLLSANRHSLMVGTHREDGVALRGSHSLLPNQVPVPQLPVQSATSPDLNPPQDPYRGMPPGLQGQSVSSGSSEIKSDDEGDENLQDTKSSEDKKLDDDKKDIKSITSNNDDEDLTPEQKAEREKERRMANNARERLRVRDINEAFKELGRMVQLHLKSDKPQTKLLILHQAVAVILSLEQQVRERNLNPKAACLKRREEEKVSSEPPPLSLAGPHPGMGDASNHMGQM

SEQ ID NO: 89741 - protein, 135 aa, Homo sapiens
  Payload ID: 17968
  Gene Name: transcription factor 4
  ENSP ID: ENSP00000454328
MFSPPVSSGKNGPTSLASGHFTGSNVEDRSSSGSWGNGGHPSPSRNYGDGTPYDHMTSRDLGSHDNLSPPFVNSRIQSKTERGSYSSYGRESNLQGCHQQSLLGGDMDMGNPGTLSPTKPGSQYYQYSSNNPRRR

SEQ ID NO: 89742 - protein, 124 aa, Homo sapiens
  Payload ID: 17968
  Gene Name: transcription factor 4
  ENSP ID: ENSP00000454352
  MOD_RES (1)..(1): Any amino acid
XSKRLEKIPQVPLLFPFIFIILTNYSKMEGAVESQPSFFKTSQDIVTCTWVENCYSSFSRRPLEQMFCKHQSKNIISWTGMVAHTCNPSTLGGQDVFTSCEQWEKWTNFFGKWTFYWLKCRRQK

SEQ ID NO: 89743 - protein, 607 aa, Homo sapiens
  Payload ID: 17968
  Gene Name: transcription factor 4
  Uniprot ID: P15884
  ENSP ID: ENSP00000454366
MHHQQRMAALGTDKELSDLLDFSAMFSPPVSSGKNGPTSLASGHFTGSNVEDRSSSGSWGNGGHPSPSRNYGDGTPYDHMTSRDLGSHDNLSPPFVNSRIQSKTERGSYSSYGRESNLQGCHQVYAPSASTADYNRDSPGYPSSKPATSTFPSSFFMQDGHHSSDPWSSSSGMNQPGYAGMLGNSSHIPQSSSYCSLHPHERLSYPSHSSADINSSLPPMSTFHRSGTNHYSTSSCTPPANGTDSIMANRGSGAAGSSQTGDALGKALASIYSPDHTNNSFSSNPSTPVGSPPSLSAGTAVWSRNGGQASSSPNYEGPLHSLQSRIEDRLERLDDAIHVLRNHAVGPSTAMPGGHGDMHGIIGPSHNGAMGGLGSGYGTGLLSANRHSLMVGTHREDGVALRGSHSLLPNQVPVPQLPVQSATSPDLNPPQDPYRGMPPGLQGQSVSSGSSEIKSDDEGDENLQDTKSSEDKKLDDDKKDIKSITSNNDDEDLTPEQKAEREKERRMANNARERLRVRDINEAFKELGRMVQLHLKSDKPQTKLLILHQAVAVILSLEQQVRERNLNPKAACLKRREEEKVSSEPPPLSLAGPHPGMGDASNHMGQM

SEQ ID NO: 89744 - protein, 61 aa, Homo sapiens
  Payload ID: 17968
  Gene Name: transcription factor 4
  ENSP ID: ENSP00000454441
  MOD_RES (1)..(1): Any amino acid
XNIISWTGMVAHTCNPSTLGGQDGVSFCHPDRSAVAPSQLTATSTSQVQAILLPQPPEYPG

SEQ ID NO: 89745 - protein, 209 aa, Homo sapiens
  Payload ID: 17968
  Gene Name: transcription factor 4
  ENSP ID: ENSP00000454584
MFSPPVSSGKNGPTSLASGHFTGSNVEDRSSSGSWGNGGHPSPSRNYGDGTPYDHMTSRDLGSHDNLSPPFVNSRIQSKTERGSYSSYGRESNLQGCHQQSLLGGDMDMGNPGTLSPTKPGSQYYQYSSNNPRRRPLHSSAMEVQTKKVRKVPPGLPSSVYAPSASTADYNRDSPGYPSSKPATSTFPSSFFMQDGHHSSDPWSSSSGM

SEQ ID NO: 89746 - protein, 537 aa, Homo sapiens; identical to SEQ ID NO: 89737
  Payload ID: 17968
  Gene Name: transcription factor 4
  Uniprot ID: P15884
  ENSP ID: ENSP00000454647

SEQ ID NO: 89747 - protein, 56 aa, Homo sapiens
  Payload ID: 17968
  Gene Name: transcription factor 4
  ENSP ID: ENSP00000454866
MTSRDLGSHDNLSPPFVNSRIQSKTERGSYSSYGRESNLQGCHQQSLLGGDMDMGN

SEQ ID NO: 89748 - protein, 163 aa, Homo sapiens
  Payload ID: 17968
  Gene Name: transcription factor 4
  ENSP ID: ENSP00000455071
MDMGNPGTLSPTKPGSQYYQYSSNNPRRRPLHSSAMEVQTKKVRKVPPGLPSSVYAPSASTADYNRDSPGYPSSKPATSTFPSSFFMQDGHHSSDPWSSSSGMNQPGYAGMLGNSSHIPQSSSYCSLHPHERLSYPSHSSADINSSLPPMSTFHRSGTNHYST

SEQ ID NO: 89749 - protein, 647 aa, Homo sapiens; identical to SEQ ID NO: 89738
  Payload ID: 17968
  Gene Name: transcription factor 4
  Uniprot ID: P15884
  ENSP ID: ENSP00000455135

SEQ ID NO: 89750 - protein, 165 aa, Homo sapiens
  Payload ID: 17968
  Gene Name: transcription factor 4
  ENSP ID: ENSP00000455163
MLEREGVKERVRMFSPPVSSGKNGPTSLASGHFTGSNVEDRSSSGSWGNGGHPSPSRNYGDGTPYDHMTSRDLGSHDNLSPPFVNSRIQSKTERGSYSSYGRESNLQGCHQQSLLGGDMDMGNPGTLSPTKPGSQYYQYSSNNPRRRPLHSSAMEVQTKKVRKVP

SEQ ID NO: 89751 - protein, 537 aa, Homo sapiens; identical to SEQ ID NO: 89737
  Payload ID: 17968
  Gene Name: transcription factor 4
  Uniprot ID: P15884
  ENSP ID: ENSP00000455179

SEQ ID NO: 89752 - protein, 596 aa, Homo sapiens
  Payload ID: 17968
  Gene Name: transcription factor 4
  Uniprot ID: P15884
  ENSP ID: ENSP00000455261
MKDIFFQFIIARVRKCYSLSCLHTLPVVPTLRKTERGSYSSYGRESNLQGCHQSLLGGDMDMGNPGTLSPTKPGSQYYQYSSNNPRRRPLHSSAMEVQTKKVRKVPPGLPSSVYAPSASTADYNRDSPGYPSSKPATSTFPSSFFMQDGHHSSDPWSSSSGMNQPGYAGMLGNSSHIPQSSSYCSLHPHERLSYPSHSSADINSSLPPMSTFHRSGTNHYSTSSCTPPANGTDSIMANRGSGAAGSSQTGDALGKALASIYSPDHTNNSFSSNPSTPVGSPPSLSAGTAVWSRNGGQASSSPNYEGPLHSLQSRIEDRLERLDDAIHVLRNHAVGPSTAMPGGHGDMHGIIGPSHNGAMGGLGSGYGTGLLSANRHSLMVGTHREDGVALRGSHSLLPNQVPVPQLPVQSATSPDLNPPQDPYRGMPPGLQGQSVSSGSSEIKSDDEGDENLQDTKSSEDKKLDDDKKDIKSITSNNDDEDLTPEQKAEREKERRMANNARERLRVRDINEAFKELGRMVQLHLKSDKPQTKLLILHQAVAVILSLEQQVRERNLNPKAACLKRREEEKVSSEPPPLSLAGPHPGMGDASNHMGQM

SEQ ID NO: 89753 - protein, 162 aa, Homo sapiens
  Payload ID: 17968
  Gene Name: transcription factor 4
  ENSP ID: ENSP00000455304
MDMGNPGTLSPTKPGSQYYQYSSNNPRRRPLHSSAMEVQTKKVRKVPPGLPSSVYAPSASTADYNRDSPGYPSSKPATSTFPSSFFMQDGHHSSDPWSSSSGMNQPGYAGMLGNSSHIPQSSSYCSLHPHERLSYPSHSSADINSSLPPMSTFHRSGTNHYS

SEQ ID NO: 89754 - protein, 642 aa, Homo sapiens
  Payload ID: 17968
  Gene Name: transcription factor 4
  ENSP ID: ENSP00000455346
MFSPPVSSGKNGPTSLASGHFTGSNVEDRSSSGSWGNGGHPSPSRNYGDGTPYDHMTSRDLGSHDNLSPPFVNSRIQSKTERGSYSSYGRESNLQGCHQSLLGGDMDMGNPGTLSPTKPGSQYYQYSSNNPRRRPLHSSAMEVQTKKVRKVPPGLPSSVYAPSASTADYNRDSPGYPSSKPATSTFPSSFFMQDGHHSSDPWSSSSGMNQPGYAGMLGNSSHIPQSSSYCSLHPHERLSYPSHSSADINSSLPPMSTFHRSGTNHYSTSSCTPPANGTDSIMANRGSGAAGSSQTGDALGKALASIYSPDHTNNSFSSNPSTPVGSPPSLSAGTAVWSRNGGQASSSPNYEGPLHSLQSRIEDRLERLDDAIHVLRNHAVGPSTAMPGGHGDMHGIIGPSHNGAMGGLGSGYGTGLLSANRHSLMVGTHREDGVALRGSHSLLPNQVPVPQLPVQSATSPDLNPPQDPYRGMPPGLQGQSVSSGSSEIKSDDEGDENLQDTKSSEDKKLDDDKKDIKSITSNNDDEDLTPEQKAEREKERRMANNARERLRVRDINEAFKELGRMVQLHLKSDKPQTKLLILHQAVAVILSLEQQVRERNLNPKAACLKRREEEKVSSEPPPLSLAGPHPGMGDASNHMGQM

SEQ ID NO: 89755 - protein, 664 aa, Homo sapiens
  Payload ID: 17968
  Gene Name: transcription factor 4
  Uniprot ID: P15884
  ENSP ID: ENSP00000455418
MQRAKTELFRLQIVTDDLRKNEMFSPPVSSGKNGPTSLASGHFTGSNVEDRSSSGSWGNGGHPSPSRNYGDGTPYDHMTSRDLGSHDNLSPPFVNSRIQSKTERGSYSSYGRESNLQGCHQQSLLGGDMDMGNPGTLSPTKPGSQYYQYSSNNPRRRPLHSSAMEVQTKKVRKVPPGLPSSVYAPSASTADYNRDSPGYPSSKPATSTFPSSFFMQDGHHSSDPWSSSSGMNQPGYAGMLGNSSHIPQSSSYCSLHPHERLSYPSHSSADINSSLPPMSTFHRSGTNHYSTSSCTPPANGTDSIMANRGSGAAGSSQTGDALGKALASIYSPDHTNNSFSSNPSTPVGSPPSLSGTAVWSRNGGQASSSPNYEGPLHSLQSRIEDRLERLDDAIHVLRNHAVGPSTAMPGGHGDMHGIIGPSHNGAMGGLGSGYGTGLLSANRHSLMVGTHREDGVALRGSHSLLPNQVPVPQLPVQSATSPDLNPPQDPYRGMPPGLQGQSVSSGSSEIKSDDEGDENLQDTKSSEDKKLDDDKKDIKSITSNNDDEDLTPEQKAEREKERRMANNARERLRVRDINEAFKELGRMVQLHLKSDKPQTKLLILHQAVAVILSLEQQVRERNLNPKAACLKRREEEKVSSEPPPLSLAGPHPGMGDASNHMGQM

SEQ ID NO: 89756 - protein, 139 aa, Homo sapiens
  Payload ID: 17968
  Gene Name: transcription factor 4
  ENSP ID: ENSP00000455450
MHHQQRMAALGTDKELSDLLDFSAMFSPPVSSGKNGPTSLASGHFTGSNVEDRSSSGSWGNGGHPSPSRNYGDGTPYDHMTSRDLGSHDNLSPPFVNSRIQSKTERGSYSSYGRESNLQGCHQQSLLGGDMDMGNPGTL

SEQ ID NO: 89757 - protein, 507 aa, Homo sapiens
  Payload ID: 17968
  Gene Name: transcription factor 4
  Uniprot ID: P15884
  ENSP ID: ENSP00000455763
MYCAYTIPGMGGNSLMYYYNGKAVYAPSASTADYNRDSPGYPSSKPATSTFPSSFFMQDGHHSSDPWSSSSGMNQPGYAGMLGNSSHIPQSSSYCSLHPHERLSYPSHSSADINSSLPPMSTFHRSGTNHYSTSSCTPPANGTDSIMANRGSGAAGSSQTGDALGKALASIYSPDHTNNSFSSNPSTPVGSPPSLSAGTAVWSRNGGQASSSPNYEGPLHSLQSRIEDRLERLDDAIHVLRNHAVGPSTAMPGGHGDMHGIIGPSHNGAMGGLGSGYGTGLLSANRHSLMVGTHREDGVALRGSHSLLPNQVPVPQLPVQSATSPDLNPPQDPYRGMPPGLQGQSVSSGSSEIKSDDEGDENLQDTKSSEDKKLDDDKKDIKSITSNNDDEDLTPEQKAEREKERRMANNARERLRVRDINEAFKELGRMVQLHLKSDKPQTKLLILHQAVAVILSLEQQVRERNLNPKAACLKRREEEKVSSEPPPLSLAGPHPGMGDASNHMGQM

SEQ ID NO: 89758 - protein, 583 aa, Homo sapiens
  Payload ID: 17968
  Gene Name: transcription factor 4
  Uniprot ID: P15884
  ENSP ID: ENSP00000455984
MFSPPVSSGKNGPTSLASGHFTGSNVEDRSSSGSWGNGGHPSPSRNYGDGTPYDHMTSRDLGSHDNLSPPFVNSRIQSKTERGSYSSYGRESNLQGCHQVYAPSASTADYNRDSPGYPSSKPATSTFPSSFFMQDGHHSSDPWSSSSGMNQPGYAGMLGNSSHIPQSSSYCSLHPHERLSYPSHSSADINSSLPPMSTFHRSGTNHYSTSSCTPPANGTDSIMANRGSGAAGSSQTGDALGKALASIYSPDHTNNSFSSNPSTPVGSPPSLSAGTAVWSRNGGQASSSPNYEGPLHSLQSRIEDRLERLDDAIHVLRNHAVGPSTAMPGGHGDMHGIIGPSHNGAMGGLGSGYGTGLLSANRHSLMVGTHREDGVALRGSHSLLPNQVPVPQLPVQSATSPDLNPPQDPYRGMPPGLQGQSVSSGSSEIKSDDEGDENLQDTKSSEDKKLDDDKKDIKSITSNNDDEDLTPEQKAEREKERRMANNARERLRVRDINEAFKELGRMVQLHLKSDKPQTKLLILHQAVAVILSLEQQVRERNLNPKAACLKRREEEKVSSEPPPLSLAGPHPGMGDASNHMGQM

SEQ ID NO: 89759 - protein, 611 aa, Homo sapiens
  Payload ID: 17968
  Gene Name: transcription factor 4
  Uniprot ID: P15884
  ENSP ID: ENSP00000456125
MHHQQRMAALGTDKELSDLLDFSAMFSPPVSSGKNGPTSLASGHFTGSNVEDRSSSGSWGNGGHPSPSRNYGDGTPYDHMTSRDLGSHDNLSPPFVNSRIQSKTERGSYSSYGRESNLQGCHQVYAPSASTADYNRDSPGYPSSKPATSTFPSSFFMQDGHHSSDPWSSSSGMNQPGYAGMLGNSSHIPQSSSYCSLHPHERLSYPSHSSADINSSLPPMSTFHRSGTNHYSTSSCTPPANGTDSIMANRGSGAAGSSQTGDALGKALASIYSPDHTNNSFSSNPSTPVGSPPSLSAGTAVWSRNGGQASSSPNYEGPLHSLQSRIEDRLERLDDAIHVLRNHAVGPSTAMPGGHGDMHGIIGPSHNGAMGGLGSGYGTGLLSANRHSLMVGTHREDGVALRGSHSLLPNQVPVPQLPVQSATSPDLNPPQDPYRGMPPGLQGQSVSSGSSEIKSDDEGDENLQDTKSSEDKKLDDDKKDIKSITRSRSSNNDDEDLTPEQKAEREKERRMANNARERLRVRDINEAFKELGRMVQLHLKSDKPQTKLLILHQAVAVILSLEQQVRERNLNPKAACLKRREEEKVSSEPPPLSLAGPHPGMGDASNHMGQM

SEQ ID NO: 89760 - protein, 179 aa, Homo sapiens
  Payload ID: 17968
  Gene Name: transcription factor 4
  ENSP ID: ENSP00000456220
MDMGNPGTLSPTKPGSQYYQYSSNNPRRRPLHSSAMEVQTKKVRKVPPGLPSSVYAPSASTADYNRDSPGYPSSKPATSTFPSSFFMQDGHHSSDPWSSSSGMNQPGYAGMLGNSSHIPQSSSYCSLHPHERLSYPSHSSADINSSLPPMSTFHRSGTNHYSTSSCTPPANGTDSIMAN

SEQ ID NO: 89761 - protein, 118 aa, Homo sapiens
  Payload ID: 17968
  Gene Name: transcription factor 4
  ENSP ID: ENSP00000456802
MDMGNPGTLSPTKPGSQYYQYSSNNPRRRPLHSSAMEVQTKKVRKVPPGLPSSVYAPSASTADYNRDSPGYPSSKPATSTFPSSFFMQDGHHSSDPWSSSSGMNQPGYAGMLGNSSHI

SEQ ID NO: 89762 - protein, 287 aa, Homo sapiens
  Payload ID: 17968
  Gene Name: transcription factor 4
  ENSP ID: ENSP00000456983
MEMDIATFMAKMFSPPVSSGKNGPTSLASGHFTGSNVEDRSSSGSWGNGGHPSPSRNYGDGTPYDHMTSRDLGSHDNLSPPFVNSRIQSKTERGSYSSYGRESNLQGCHQQSLLGGDMDMGNPGTLSPTKPGSQYYQYSSNNPRRRPLHSSAMEVQTKKVRKVPPGLPSSVYAPSASTADYNRDSPGYPSSKPATSTFPSSFFMQDGHHSSDPWSSSSGMNQPGYAGMLGNSSHIPQSSSYCSLHPHERLSYPSHSSADINSSLPPMSTFHRSGTNHYSTSSCTPPA

SEQ ID NO: 89763 - protein, 168 aa, Homo sapiens
  Payload ID: 17968
  Gene Name: transcription factor 4
  ENSP ID: ENSP00000457082
MFSKRLEKIPQVPLLFPFIFIILTNYSKMEGAVESQPSFFKTSQDIVTCTWVENCYSSFSRRPLEMESHSVIQTGVQWHHLSSLQPPPPRFKLSSCLSLLSTRDRRLCDFAKMHHQQRMAALGTDKELSDLLDFSAMFSPPVSSGKNGPTSLASGHFTGSNVEDRSSS

SEQ ID NO: 89764 - protein, 158 aa, Homo sapiens
  Payload ID: 17968
  Gene Name: transcription factor 4
  ENSP ID: ENSP00000457113
MFSPPVSSGKNGPTSLASGHFTGSNVEDRSSSGSWGNGGHPSPSRNYGDGTPYDHMTSRDLGSHDNLSPPFVNSRIQSKTERGSYSSYGRESNLQGCHQQSLLGGDMDMGNPGTLSPTKPGSQYYQYSSNNPRRRPLHSSAMEVQTKKVRKVPPGLPS

SEQ ID NO: 89765 - protein, 134 aa, Homo sapiens
  Payload ID: 17968
  Gene Name: transcription factor 4
  ENSP ID: ENSP00000457245
MDMGNPGTLSPTKPGSQYYQYSSNNPRRRPLHSSAMEVQTKKVRKVPPGLPSSVYAPSASTADYNRDSPGYPSSKPATSTFPSSFFMQDGHHSSDPWSSSSGMNQPGYAGMLGNSSHIPQSSSYCSLHPHERLS

SEQ ID NO: 89766 - protein, 677 aa, Homo sapiens
  Payload ID: 17968
  Gene Name: transcription factor 4
  ENSP ID: ENSP00000457263
MHHQQRMAALGTDKELSDLLDFSAMFSPPVSSGKNGPTSLASGHFTGSNVEDRSSSGSWGNGGHPSPSRNYGDGTPYDHMTSRDLGSHDNLSPPFVNSRIQSKTERGSYSSYGRESNLQGCHQQSLLGGDMDMGNPGTLSPTKPGSQYYQYSSNNPRRRPLHSSAMEVQTKKVRKVPPGLPSSLVLSPQVYAPSASTADYNRDSPGYPSSKPATSTFPSSFFMQDGHHSSDPWSSSSGMNQPGYAGMLGNSSHIPQSSSYCSLHPHERLSYPSHSSADINSSLPPMSTFHRSGTNHYSTSSCTPPANGTDSIMANRGSGAAGSSQTGDALGKALASIYSPDHTNNSFSSNPSTPVGSPPSLSAGTAVWSRNGGQASSSPNYEGPLHSLQSRIEDRLERLDDAIHVLRNHAVGPSTAMPGGHGDMHGIIGPSHNGAMGGLGSGYGTGLLSANRHSLMVGTHREDGVALRGSHSLLPNQVPVPQLPVQSATSPDLNPPQDPYRGMPPGLQGQSVSSGSSEIKSDDEGDENLQDTKSSEDKKLDDDKKDIKSITRSRSSNNDDEDLTPEQKAEREKERRMANNARERLRVRDINEAFKELGRMVQLHLKSDKPQTKLLILHQAVAVILSLEQQVRERNLNPKAACLKRREEEKVSSEPPPLSLAGPHPGMGDASNHMGQM

SEQ ID NO: 89767 - protein, 280 aa, Homo sapiens
  Payload ID: 17968
  Gene Name: transcription factor 4
  ENSP ID: ENSP00000457392
MRASKGSEGCQHAVTSQLVTGAGGDQTEMFSPPVSSGKNGPTSLASGHFTGSNVEDRSSSGSWGNGGHPSPSRNYGDGTPYDHMTSRDLGSHDNLSPPFVNSRIQSKTERGSYSSYGRESNLQGCHQQSLLGGDMDMGNPGTLSPTKPGSQYYQYSSNNPRRRPLHSSAMEVQTKKVRKVPPGLPSSVYAPSASTADYNRDSPGYPSSKPATSTFPSSFFMQDGHHSSDPWSSSSGMNQPGYAGMLGNSSHIPQSSSYCSLHPHERLSYPSHSSADINSS

SEQ ID NO: 89768 - protein, 667 aa, Homo sapiens; identical to SEQ ID NO: 89733
  Payload ID: 17968
  Gene Name: transcription factor 4
  Uniprot ID: P15884
  ENSP ID: ENSP00000457649

SEQ ID NO: 89769 - protein, 146 aa, Homo sapiens
  Payload ID: 17968
  Gene Name: transcription factor 4
  ENSP ID: ENSP00000457747
MFSPPVSSGKNGPTSLASGHFTGSNVEDRSSSGSWGNGGHPSPSRNYGDGTPYDHMTSRDLGSHDNLSPPFVNSRIQSKTERGSYSSYGRESNLQGCHQSLLGGDMDMGNPGTLSPTKPGSQYYQYSSNNPRRRPLHSSAMEVQTK

SEQ ID NO: 89770 - protein, 507 aa, Homo sapiens
  Payload ID: 17968
  Gene Name: transcription factor 4
  Uniprot ID: P15884
  ENSP ID: ENSP00000457765
MKFKQCRCSDTGLCCLDHEGKAEVYAPSASTADYNRDSPGYPSSKPATSTFPSSFFMQDGHHSSDPWSSSSGMNQPGYAGMLGNSSHIPQSSSYCSLHPHERLSYPSHSSADINSSLPPMSTFHRSGTNHYSTSSCTPPANGTDSIMANRGSGAAGSSQTGDALGKALASIYSPDHTNNSFSSNPSTPVGSPPSLSAGTAVWSRNGGQASSSPNYEGPLHSLQSRIEDRLERLDDAIHVLRNHAVGPSTAMPGGHGDMHGIIGPSHNGAMGGLGSGYGTGLLSANRHSLMVGTHREDGVALRGSHSLLPNQVPVPQLPVQSATSPDLNPPQDPYRGMPPGLQGQSVSSGSSEIKSDDEGDENLQDTKSSEDKKLDDDKKDIKSITSNNDDEDLTPEQKAEREKERRMANNARERLRVRDINEAFKELGRMVQLHLKSDKPQTKLLILHQAVAVILSLEQQVRERNLNPKAACLKRREEEKVSSEPPPLSLAGPHPGMGDASNHMGQM

SEQ ID NO: 89771 - protein, 119 aa, Homo sapiens
  Payload ID: 17968
  Gene Name: transcription factor 4
  ENSP ID: ENSP00000458122
MDMGNPGTLSPTKPGSQYYQYSSNNPRRRPLHSSAMEVQTKKVRKVPPGLPSSVYAPSASTADYNRDSPGYPSSKPATSTFPSSFFMQDGHHSSDPWSSSSGMNQPGYAGMLGNSSHIP

SEQ ID NO: 89772 - protein, 65 aa, Homo sapiens
  Payload ID: 17968
  Gene Name: transcription factor 4
  ENSP ID: ENSP00000468277
MVMAEQSLLGGDMDMGNPGTLSPTKPGSQYYQYSSNNPRRRPLHSSAMEVQTKKVRKVPPGLPSS

SEQ ID NO: 89773 - protein, 166 aa, Homo sapiens
  Payload ID: 17968
  Gene Name: transcription factor 4
  ENSP ID: ENSP00000468729
  MOD_RES (1)..(1): Any amino acid
XHIPQSSSYCSLHPHERLSYPSHSSADINSSLPPMSTFHRSGTNHYSTSSCTPPANGTDSIMANRGSGAAGSSQTGDALGKALASIYSPDHTNNSFSSNPSTPVGSPPSLSGSVFQIPFHHITVYKNDSPLVLPDFVGGNSLPPKSQSFNIPITDKYKGWERQITR

SEQ ID NO: 89774 - protein, 583 aa, Homo sapiens; identical to SEQ ID NO: 89758
  Payload ID: 17968
  Gene Name: transcription factor 4
  Uniprot ID: P15884
  ENSP ID: ENSP00000478549

SEQ ID NO: 89775 - protein, 224 aa, Homo sapiens
  Payload ID: 17968
  Gene Name: transcription factor 4
  ENSP ID: ENSP00000485755
MDMGNPGTLSPTKPGSQYYQYSSNNPRRRPLHSSAMEVQTKKVRKVPPGLPSSVYAPSASTADYNRDSPGYPSSKPATSTFPSSFFMQDGHHSSDPWSSSSGMNQPGYAGMLGNSSHIPQSSSYCSLHPHERLSYPSHSSADINSSLPPMSTFHRSGTNHYSTSSCTPPANGTDSIMANRGSGAAGSSQTGDALGKALASIYSPDHTNNSFSSNPSTPVGSPPS

SEQ ID NO: 89776 - protein, 451 aa, Homo sapiens
  Payload ID: 17968
  Gene Name: transcription factor 4
  Uniprot ID: P15884
  ENSP ID: ENSP00000486072
MQDGHHSSDPWSSSSGMNQPGYAGMLGNSSHIPQSSSYCSLHPHERLSYPSHSSADINSSLPPMSTFHRSGTNHYSTSSCTPPANGTDSIMANRGSGAAGSSQTGDALGKALASIYSPDHTNNSFSSNPSTPVGSPPSLSAGTAVWSRNGGQASSSPNYEGPLHSLQSRIEDRLERLDDAIHVLRNHAVGPSTAMPGGHGDMHGIIGPSHNGAMGGLGSGYGTGLLSANRHSLMVGTHREDGVALRGSHSLLPNQVPVPQLPVQSATSPDLNPPQDPYRGMPPGLQGQSVSSGSSEIKSDDEGDENLQDTKSSEDKKLDDDKKDIKSITSNNDDEDLTPEQKAEREKERRMANNARERLRVRDINEAFKELGRMVQLHLKSDKPQTKLLILHQAVAVILSLEQQVRERNLNPKAACLKRREEEKVSSEPPPLSLAGPHPGMGDASNHMGQM

SEQ ID NO: 89777 - protein, 179 aa, Homo sapiens
  Payload ID: 17968
  Gene Name: transcription factor 4
  ENSP ID: ENSP00000486111
MFSPPVSSGKNGPTSLASGHFTGSNVEDRSSSGSWGNGGHPSPSRNYGDGTPYDHMTSRDLGSHDNLSPPFVNSRIQSKTERGSYSSYGRESNLQGCHQSLLGGDMDMGNPGTLSPTKPGSQYYQYSSNNPRRRPLHSSAMEVQTKKVRKVPPGLPSSVYAPSASTADYNRDSPGYPSS

SEQ ID NO: 89778 - protein, 236 aa, Homo sapiens
  Payload ID: 17968
  Gene Name: transcription factor 4
  ENSP ID: ENSP00000486148
MDMGNPGTLSPTKPGSQYYQYSSNNPRRRPLHSSAMEVQTKKVRKVPPGLPSSVYAPSASTADYNRDSPGYPSSKPATSTFPSSFFMQDGHHSSDPWSSSSGMNQPGYAGMLGNSSHIPQSSSYCSLHPHERLSYPSHSSADINSSLPPMSTFHRSGTNHYSTSSCTPPANGTDSIMANRGSGAAGSSQTGDALGKALASIYSPDHTNNSFSSNPSTPVGSPPSLSAGTAVWSRNG

SEQ ID NO: 89779 - protein, 202 aa, Homo sapiens
  Payload ID: 17968
  Gene Name: transcription factor 4
  ENSP ID: ENSP00000486215
MFSPPVSSGKNGPTSLASGHFTGSSKTERGSYSSYGRESNLQGCHQQSLLGGDMDMGNPGTLSPTKPGSQYYQYSSNNPRRRPLHSSAMEVQTKKVRKVPPGLPSSVYAPSASTADYNRDSPGYPSSKPATSTFPSSFFMQDGHHSSDPWSSSSGMNQPGYAGMLGNSSHIPQSSSYCSLHPHERLSYPSHSSADINSSLPP

SEQ ID NO: 89780 - protein, 155 aa, Homo sapiens
  Payload ID: 17968
  Gene Name: transcription factor 4
  ENSP ID: ENSP00000486405
MDMGNPGTLSPTKPGSQYYQYSSNNPRRRPLHSSAMEVQTKKVRKVPPGLPSSVYAPSASTADYNRDSPGYPSSKPATSTFPSSFFMQDGHHSSDPWSSSSGMNQPGYAGMLGNSSHIPQSSSYCSLHPHERLSYPSHSSADINSSLPPMSTFHR

SEQ ID NO: 89781 - protein, 671 aa, Homo sapiens; identical to SEQ ID NO: 89732
  Payload ID: 17968
  Gene Name: transcription factor 4
  Uniprot ID: P15884
  ENSP ID: ENSP00000486670

SEQ ID NO: 89782 - protein, 207 aa, Homo sapiens
  Payload ID: 17968
  Gene Name: transcription factor 4
  ENSP ID: ENSP00000486909
MDMGNPGTLSPTKPGSQYYQYSSNNPRRRPLHSSAMEVQTKKVRKVPPGLPSSVYAPSASTADYNRDSPGYPSSKPATSTFPSSFFMQDGHHSSDPWSSSSGMNQPGYAGMLGNSSHIPQSSSYCSLHPHERLSYPSHSSADINSSLPPMSTFHRSGTNHYSTSSCTPPANGTDSIMANRGSGAAGSSQTGDALGKALASIYSPDHT

SEQ ID NO: 89783 - protein, 228 aa, Homo sapiens
  Payload ID: 17968
  Gene Name: transcription factor 4
  ENSP ID: ENSP00000486974
MKDIFFQFIIARVRKCYSLSCLHTLPVVPTLRKTERGSYSSYGRESNLQGCHQQSLLGGDMDMGNPGTLSPTKPGSQYYQYSSNNPRRRPLHSSAMEVQTKKVRKVPPGLPSSVYAPSASTADYNRDSPGYPSSKPATSTFPSSFFMQDGHHSSDPWSSSSGMNQPGYAGMLGNSSHIPQSSSYCSLHPHERLSYPSHSSADINSSLPPMSTFHRSGTNHYSTSSCTP

SEQ ID NO: 89784 - protein, 80 aa, Homo sapiens
  Payload ID: 17968
  Gene Name: transcription factor 4
  ENSP ID: ENSP00000487010
MYCAYTIPGMGGNSLMYYYNGKAVYAPSASTADYNRDSPGYPSSKPATSTFPSSFFMQELSITLLSRHQFQSSSDVHFPS

SEQ ID NO: 89785 - protein, 81 aa, Homo sapiens
  Payload ID: 17968
  Gene Name: transcription factor 4
  ENSP ID: ENSP00000487134
MFSKRLEKIPQVPLLFPFIFIILTNYSKMEGAVESQPSFFKTSQDIVTCTWVENCYSSFSRRPLEVCVILLKCITNSEWLP

SEQ ID NO: 89786 - protein, 156 aa, Homo sapiens
  Payload ID: 17968
  Gene Name: transcription factor 4
  ENSP ID: ENSP00000487150
MHHQQRMAALGTDKELSDLLDFSAMFSPPVSSGKNGPTSLASGHFTGSNVEDRSSSGSWGNGGHPSPSRNYGDGTPYDHMTSRDLGSHDNLSPPFVNSRIQSKTERGSYSSYGRESNLQGCHQSLLGGDMDMGNPGTLSPTKPGSQYYQYSSNNPR

SEQ ID NO: 89787 - protein, 204 aa, Homo sapiens
  Payload ID: 17968
  Gene Name: transcription factor 4
  ENSP ID: ENSP00000487171
MFSPPVSSGKNGPTSLASGHFTGSNVEDRSSSGSWGNGGHPSPSRNYGDGTPYDHMTSRDLGSHDNLSPPFVNSRIQSKTERGSYSSYGRESNLQGCHQQSLLGGDMDMGNPGTLSPTKPGSQYYQYSSNNPRRRPLHSSAMEVQTKKVRKVPPGLPSSVYAPSASTADYNRDSPGYPSSKPATSTFPSSFFMQDGHHSSDPWS

SEQ ID NO: 89788 - protein, 315 aa, Homo sapiens
  Payload ID: 17968
  Gene Name: transcription factor 4
  ENSP ID: ENSP00000487218
MYCAYTIPGMGGNSLMYYYNGKAVYAPSASTADYNRDSPGYPSSKPATSTFPSSFFMQDGHHSSDPWSSSSGMNQPGYAGMLGNSSHIPQSSSYCSLHPHERLSYPSHSSADINSSLPPMSTFHRSGTNHYSTSSCTPPANGTDSIMANRGSGAAGSSQTGDALGKALASIYSPDHTNNSFSSNPSTPVGSPPSLSGTAVWSRNGGQASSSPNYEGPLHSLQSRIEDRLERLDDAIHVLRNHAVGPSTAMPGGHGDMHGIIGPSHNGAMGGLGSGYGTGLLSANRHSLMVGTHREDGVALRGSHSLLPNQVPVPQ

SEQ ID NO: 89789 - protein, 135 aa, Homo sapiens
  Payload ID: 17968
  Gene Name: transcription factor 4
  ENSP ID: ENSP00000487413
MDMGNPGTLSPTKPGSQYYQYSSNNPRRRPLHSSAMEVQTKKVRKVPPGLPSSVYAPSASTADYNRDSPGYPSSKPATSTFPSSFFMQDGHHSSDPWSSSSGMNQPGYAGMLGNSSHIPQSSSYCSLHPHERLSY

SEQ ID NO: 89790 - protein, 221 aa, Homo sapiens
  Payload ID: 17968
  Gene Name: transcription factor 4
  ENSP ID: ENSP00000487415
MHHQQRMAALGTDKELSDLLDFSAMFSPPVSSGKNGPTSLASGHFTGSNVEDRSSSGSWGNGGHPSPSRNYGDGTPYDHMTSRDLGSHDNLSPPFVNSRIQSKTERGSYSSYGRESNLQGCHQQSLLGGDMDMGNPGTLSPTKPGSQYYQYSSNNPRRRPLHSSAMEVQTKKVRKVPPGLPSSVYAPSASTADYNRDSPGYPSSKPATSTFPSSFFMQDGH

SEQ ID NO: 89791 - protein, 128 aa, Homo sapiens
  Payload ID: 17968
  Gene Name: transcription factor 4
  ENSP ID: ENSP00000487419
MDMGNPGTLSPTKPGSQYYQYSSNNPRRRPLHSSAMEVQTKKVRKVPPGLPSSVYAPSASTADYNRDSPGYPSSKPATSTFPSSFFMQDGHHSSDPWSSSSGMNQPGYAGMLGNSSHIPQSSSYCSLH

SEQ ID NO: 89792 - protein, 81 aa, Homo sapiens
  Payload ID: 17968
  Gene Name: transcription factor 4
  ENSP ID: ENSP00000487505
LGRMVQLHLKSDKPQTKLLILHQAVAVILSLEQQVRERNLNPKAACLKRREEEKVSSEPPPLSLAGPHPGMGDASNHMGQM

SEQ ID NO: 89793 - protein, 134 aa, Homo sapiens
  Payload ID: 17968
  Gene Name: transcription factor 4
  ENSP ID: ENSP00000487557
MFSKRLEKIPQVPLLFPFIFIILTNYSKMEGAVESQPSFFKTSQDIVTCTWVENCYSSFSRRPLEQMFCKHQSKNIISWTGMVAHTCNPSTLGGQDGVSFCHPDRSAVAPSQLTATSTSQVQAILLPQPPEYPG

SEQ ID NO: 89794 - protein, 384 aa, Homo sapiens
  Payload ID: 17969
  Gene Name: transcription factor 7 (T-cell specific, HMG-box)
  Uniprot ID: P36402
  ENSP ID: ENSP00000340347
MPQLDSGGGGAGGGDDLGAPDELLAFQDEGEEQDDKSRDSAAGPERDLAELKSSLVNESEGAAGGAGIPGVPGAGAGARGEAEALGREHAAQRLFPDKLPEPLEDGLKAPECTSGMYKETVYSAFNLLMHYPPPSGAGQHPQPQPPLHKANQPPHGVPQLSLYEHFNSPHPTPAPADISQKQVHRPLQTPDLSGFYSLTSGSMGQLPHTVSWFTHPSLMLGSGVPGHPAAIPHPAIVPPSGKQELQPFDRNLKTQAESKAEKEAKKPTIKKPLNAFMLYMKEMRAKVIAECTLKESAAINQILGRRWHALSREEQAKYYELARKERQLHMQLYPGWSARDNYGKKKRRSREKHQESTTGGKRNAFGTYPEKAAAPAPFLPMTVL

SEQ ID NO: 89795 - protein, 268 aa, Homo sapiens
  Payload ID: 17969
  Gene Name: transcription factor 7 (T-cell specific, HMG-box)
  Uniprot ID: P36402
  ENSP ID: ENSP00000367822
MYKETVYSAFNLLMHYPPPSGAGQHPQPQPPLHKANQPPHGVPQLSLYEHFNSPHPTPAPADISQKQVHRPLQTPDLSGFYSLTSGSMGQLPHTVSWFTHPSLMLGSGVPGHPAAIPHPAIVPPSGKQELQPFDRNLKTQAESKAEKEAKKPTIKKPLNAFMLYMKEMRAKVIAECTLKESAAINQILGRRWHALSREEQAKYYELARKERQLHMQLYPGWSARDNYGKKKRRSREKHQESTTDPGSPKKCRARFGLNQQTDWCGPCR

SEQ ID NO: 89796 - protein, 269 aa, Homo sapiens
  Payload ID: 17969
  Gene Name: transcription factor 7 (T-cell specific, HMG-box)
  Uniprot ID: P36402
  ENSP ID: ENSP00000378469
MYKETVYSAFNLLMHYPPPSGAGQHPQPQPPLHKANQPPHGVPQLSLYEHFNSPHPTPAPADISQKQVHRPLQTPDLSGFYSLTSGSMGQLPHTVSWFTHPSLMLGSGVPGHPAAIPHPAIVPPSGKQELQPFDRNLKTQAESKAEKEAKKPTIKKPLNAFMLYMKEMRAKVIAECTLKESAAINQILGRRWHALSREEQAKYYELARKERQLHMQLYPGWSARDNYGKKKRRSREKHQESTTGGKRNAFGTYPEKAAAPAPFLPMTVL

SEQ ID NO: 89797 - protein, 481 aa, Homo sapiens
  Payload ID: 17969
  Gene Name: transcription factor 7 (T-cell specific, HMG-box)
  ENSP ID: ENSP00000378472
MPQLDSGGGGAGGGDDLGAPDELLAFQDEGEEQDDKSRDSAAGPERDLAELKSSLVNESEGAAGGAGIPGVPGAGAGARGEAEALGREHAAQRLFPDKLPEPLEDGLKAPECTSGMYKETVYSAFNLLMHYPPPSGAGQHPQPQPPLHKANQPPHGVPQLSLYEHFNSPHPTPAPADISQKQVHRPLQTPDLSGFYSLTSGSMGQLPHTVSWFTHPSLMLGSGVPGHPAAIPHPAIVPPSGKQELQPFDRNLKTQAESKAEKEAKKPTIKKPLNAFMLYMKEMRAKVIAECTLKESAAINQILGRRWHALSREEQAKYYELARKERQLHMQLYPGWSARDNYGKKKRRSREKHQESTTDPGSPKKCRARFGLNQQTDWCGPCRRKKKCIRYLPGEGRCPSPVPSDDSALGCPGSPAPQDSPSYHLLPRFPTELLTSPAEPAPTSPGLSTALSLPTPGPPQAPRSTLQSTQVQQQESQRQVA

SEQ ID NO: 89798 - protein, 100 aa, Homo sapiens
  Payload ID: 17969
  Gene Name: transcription factor 7 (T-cell specific, HMG-box)
  ENSP ID: ENSP00000427758
MYKETVYSAFNLLMHYPPPSGAGQHPQPQPPLVSGPRSQCRPVLAASLTSTRPISPPTVSPNSLSTNISTAHIPPLHLRTSARSKFTGLCRPLTSLASTP

SEQ ID NO: 89799 - protein, 147 aa, Homo sapiens
  Payload ID: 17969
  Gene Name: transcription factor 7 (T-cell specific, HMG-box)
  ENSP ID: ENSP00000427782
MYKETVYSAFNLLMHYPPPSGAGQHPQPQPPLHKANQPPHGVPQLSLYEHFNSPHPTPAPADISQKQVHRPLQTPDLSGFYSLTSGSMGQLPHTVSWFTHPSLMLGSGVPGHPAAIPHPAIVPPSGKQELQPFDRNLKTQAESKAEK

SEQ ID NO: 89800 - protein, 153 aa, Homo sapiens
  Payload ID: 17969
  Gene Name: transcription factor 7 (T-cell specific, HMG-box)
  ENSP ID: ENSP00000427870
MYKETVYSAFNLLMHYPPPSGAGQHPQPQPPLHKANQPPHGVPQLSLYEHFNSPHPTPAPADISQKQVHRPLQTPDLSGFYSLTSGSMGQLPHTVSWPSPPLYPLSPSCGYRQHFPAPTAAPGAPYPRFTHPSLMLGSGVPGHPAAIPHPAIV

SEQ ID NO: 89801 - protein, 147 aa, Homo sapiens
  Payload ID: 17969
  Gene Name: transcription factor 7 (T-cell specific, HMG-box)
  ENSP ID: ENSP00000427968
GVPGHPAAIPHPAIVPPSGKQELQPFDRNLKTQAESKAEKEAKKPTIKKPLNAFMLYMKEMRAKVIAECTLKESAAINQILGRRWHALSREEQAKYYELARKERQLHMQLYPGWSARDNYGKKKRRSREKHQESTTDGIPACTILSP

SEQ ID NO: 89802 - protein, 204 aa, Homo sapiens
  Payload ID: 17969
  Gene Name: transcription factor 7 (T-cell specific, HMG-box)
  ENSP ID: ENSP00000429178
  MOD_RES (1)..(1): Any amino acid
XFTHPSLMLGSGVPGHPAAIPHPAIVPPSGKQELQPFDRNLKTQAESKAEKEAKKPTIKKPLNAFMLYMKEMRAKVIAECTLKESAAINQILGRRWHALSREEQAKYYELARKERQLHMQLYPGWSARDNYGKKKRRSREKHQESTTGGKRNAFELLTSPAEPAPTSPGLSTALSLPTPGPPQAPRSTLQSTQVQQQESQRQVA

SEQ ID NO: 89803 - protein, 269 aa, Homo sapiens; identical to SEQ ID NO: 89796
  Payload ID: 17969
  Gene Name: transcription factor 7 (T-cell specific, HMG-box)
  Uniprot ID: P36402
  ENSP ID: ENSP00000429547

SEQ ID NO: 89804 - protein, 143 aa, Homo sapiens
  Payload ID: 17969
  Gene Name: transcription factor 7 (T-cell specific, HMG-box)
  ENSP ID: ENSP00000429696
MQHVGIMHKANQPPHGVPQLSLYEHFNSPHPTPAPADISQKQVHRPLQTPDLSGFYSLTSGSMGQLPHTVSWFTHPSLMLGSGVPGHPAAIPHPAIVPPSGKQELQPFDRNLKTQAESKAEKEAKKPTIKKPLNAFMLYMKEM

SEQ ID NO: 89805 - protein, 71 aa, Homo sapiens
  Payload ID: 17969
  Gene Name: transcription factor 7 (T-cell specific, HMG-box)
  ENSP ID: ENSP00000429817
YSAFNLLMHYPPPSGAGQHPQPQPPLHKANQPPHGVPQLSLYEHFNSPHPTPAPADISQKQGTSLGWGGAQ

SEQ ID NO: 89806 - protein, 105 aa, Homo sapiens
  Payload ID: 17969
  Gene Name: transcription factor 7 (T-cell specific, HMG-box)
  ENSP ID: ENSP00000429935
  MOD_RES (1)..(1): Any amino acid
XMLYMKEMRAKVIAECTLKESAAINQILGRRWHALSREEQAKYYELARKERQLHMQLYPGWSARDNYGKKKRRSREKHQESTTENLKLTDIRRSQELQMWKQTLL

SEQ ID NO: 89807 - protein, 167 aa, Homo sapiens
  Payload ID: 17969
  Gene Name: transcription factor 7 (T-cell specific, HMG-box)
  ENSP ID: ENSP00000429946
MYKETVYSAFNLLMHYPPPSGAGQHPQPQPPLHKANQPPHGVPQLSLYEHFNSPHPTPAPADISQKQVHRPLQTPDLSGFYSLTSGSMGQLPHTVSWPSPPLYPLSPSCGYRQHFPAPTAAPGAPYPRFTHPSLMLGSGVPGHPAAIPHPAIVPPSGKQELQPFDRN

SEQ ID NO: 89808 - protein, 269 aa, Homo sapiens
  Payload ID: 17969
  Gene Name: transcription factor 7 (T-cell specific, HMG-box)
  Uniprot ID: P36402
  ENSP ID: ENSP00000430179
MYKETVYSAFNLLMHYPPPSGAGQHPQPQPPLHKANQPPHGVPQLSLYEHFNSPHPTPAPADISQKQVHRPLQTPDLSGFYSLTSGSMGQLPHTVSWFTHPSLMLGSGVPGHPAAIPHPAIVPPSGKQELQPFDRNLKTQAESKAEKEAKKPTIKKPLNAFMLYMKEMRAKVIAECTLKESAAINQILGRRWHALSREEQAKYYELARKERQLHMQLYPGWSARDNYGKKKRRSREKHQESTTETNWPRELKDGNGQESLSMSSSSSPA

SEQ ID NO: 89809 - protein, 122 aa, Homo sapiens
  Payload ID: 17969
  Gene Name: transcription factor 7 (T-cell specific, HMG-box)
  ENSP ID: ENSP00000430617
MYKETVYSAFNLLMHYPPPSGAGQHPQPQPPLHKANQPPHGVPQLSLYEHFNSPHPTPAPADISQKQVHRPLQTPDLSGFYSLTSGSMGQLPHTVSWFTHPSLMLGSGVPGHPAAIPHPAIV

SEQ ID NO: 89810 - protein, 100 aa, Homo sapiens; identical to SEQ ID NO: 89798
  Payload ID: 17969
  Gene Name: transcription factor 7 (T-cell specific, HMG-box)
  ENSP ID: ENSP00000431095

SEQ ID NO: 89811 - protein, 588 aa, Homo sapiens
  Payload ID: 17970
  Gene Name: transcription factor 7-like 1 (T-cell specific, HMG -box)
  Uniprot ID: Q9HCS4
  ENSP ID: ENSP00000282111
MPQLGGGGGGGGGGSGGGGGSSAGAAGGGDDLGANDELIPFQDEGGEEQEPSSDSASAQRDLDEVKSSLVNESENQSSSSDSEAERRPQPVRDTFQKPRDYFAEVRRPQDSAFFKGPPYPGYPFLMIPDLSSPYLSNGPLSPGGARTYLQMKWPLLDVPSSATVKDTRSPSPAHLSNKVPVVQHPHHMHPLTPLITYSNDHFSPGSPPTHLSPEIDPKTGIPRPPHPSELSPYYPLSPGAVGQIPHPLGWLVPQQGQPMYSLPPGGFRHPYPALAMNASMSSLVSSRFSPHMVAPAHPGLPTSGIPHPAIVSPIVKQEPAPPSLSPAVSVKSPVTVKKEEEKKPHVKKPLNAFMLYMKEMRAKVVAECTLKESAAINQILGRKWHNLSREEQAKYYELARKERQLHSQLYPTWSARDNYGKKKKRKREKQLSQTQSQQQVQEAEGALASKSKKPCVQYLPPEKPCDSPASSHGSMLDSPATPSAALASPAAPAATHSEQAQPLSLTTKPETRAQLALHSAAFLSAKAAASSSGQMGSQPPLLSRPLPLGSMPTALLASPPSFPATLHAHQALPVLQAQPLSLVTKSAH

SEQ ID NO: 89812 - protein, 28 aa, Homo sapiens
  Payload ID: 17970
  Gene Name: transcription factor 7-like 1 (T-cell specific, HMG-box)
  ENSP ID: ENSP00000388984
MKWPLLDVPSSATVKDTRSPSPAHLSNK

SEQ ID NO: 89813 - protein, 206 aa, Homo sapiens
  Payload ID: 17971
  Gene Name: transcription factor 7-like 2 (T-cell specific, HMG-box)
  ENSP ID: ENSP00000277945
LTVNASMSRFPPHMVPPHHTLHTTGIPHPAIVTPTVKQESSQSDVGSLHSSKHQDSKKEEEKKKPHIKKPLNAFMLYMKEMRAKVVAECTLKESAAINQILGRRWHALSREEQAKYYELARKERQLHMQLYPGWSARDNYGKKKKRKRDKQPGETNDLSAPKKCRARFGLDQQNNWCGPCRRKKKCVRYIQGEGSCLSPPSSDGSL

SEQ ID NO: 89814 - protein, 288 aa, Homo sapiens
  Payload ID: 17971
  Gene Name: transcription factor 7-like 2 (T-cell specific, HMG-box)
  ENSP ID: ENSP00000298692
MPQLNGGGGDDLGANDELISFKDEGEQEEKSSENSSAERDLADVKSSLVNESETNQNSSSDSEAERRPPPRSESFRDKSRESLEEAAKRQDGGLFKGPPYPGYPFIMIPDLTSPYLPNGSLSPTARTLHFQSGSTHYSAYKTIEHQIAVQYLQMKWPLLDVQAGSLQSRQALKDARSPSPAHIVSNKVPVVQHPHHVHPLTPLITYSNEHFTPGNPPPHLPADVDPKTGIPRPPHPPDISPYYPLSPGTVGQIPHPLGWQGQPVYPITTGGFRHPYPTALTVNASMSR

SEQ ID NO: 89815 - protein, 459 aa, Homo sapiens
  Payload ID: 17971
  Gene Name: transcription factor 7-like 2 (T-cell specific, HMG-box)
  Uniprot ID: Q9NQB0
  ENSP ID: ENSP00000344823
MPQLNGGGGDDLGANDELISFKDEGEQEEKSSENSSAERDLADVKSSLVNESETNQNSSSDSEAERRPPPRSESFRDKSRESLEEAAKRQDGGLFKGPPYPGYPFIMIPDLTSPYLPNGSLSPTARTYLQMKWPLLDVQAGSLQSRQALKDARSPSPAHIVSNKVPVVQHPHHVHPLTPLITYSNEHFTPGNPPPHLPADVDPKTGIPRPPHPPDISPYYPLSPGTVGQIPHPLGWLVPQQGQPVYPITTGGFRHPYPTALTVNASMSRFPPHMVPPHHTLHTTGIPHPAIVTPTVKQESSQSDVGSLHSSKHQDSKKEEEKKKPHIKKPLNAFMLYMKEMRAKVVAECTLKESAAINQILGRRWHALSREEQAKYYELARKERQLHMQLYPGWSARDNYGKKKKRKRDKQPGETNEHSECFLNPCLSLPPITDLSAPKKCRARFGLDQQNNWCGPCSL

SEQ ID NO: 89816 - protein, 222 aa, Homo sapiens
  Payload ID: 17971
  Gene Name: transcription factor 7-like 2 (T-cell specific, HMG-box)
  ENSP ID: ENSP00000345640
TNQNSSSDSEAERRPPPRSESFRDKSRESLEEAAKRQDGGLFKGPPYPGYPFIMIPDLTSPYLPNGSLSPTARTLHFQSGSTHYSAYKTIEHQIAVQYLQMKWPLLDVQAGSLQSRQALKDARSPSPAHIVSPLPCCTQGHDCQHFYPPSDFTVSTQVFRDMKRSHSLQKVGEPWCIESNKVPVVQHPHHVHPLTPLITYSNEHFTPGNPPPHLPADVDPKT

SEQ ID NO: 89817 - protein, 489 aa, Homo sapiens
  Payload ID: 17971
  Gene Name: transcription factor 7-like 2 (T-cell specific, HMG-box)
  Uniprot ID: Q9NQB0
  ENSP ID: ENSP00000347949
MPQLNGGGGDDLGANDELISFKDEGEQEEKSSENSSAERDLADVKSSLVNESETNQNSSSDSEAERRPPPRSESFRDKSRESLEEAAKRQDGGLFKGPPYPGYPFIMIPDLTSPYLPNGSLSPTARTYLQMKWPLLDVQAGSLQSRQALKDARSPSPAHIVSPLPCCTQGHDCQHFYPPSDFTVSTQVFRDMKRSHSLQKVGEPWCIESNKVPVVQHPHHVHPLTPLITYSNEHFTPGNPPPHLPADVDPKTGIPRPPHPPDISPYYPLSPGTVGQIPHPLGWLVPQQGQPVYPITTGGFRHPYPTALTVNASMSRFPPHMVPPHHTLHTTGIPHPAIVTPTVKQESSQSDVGSLHSSKHQDSKKEEEKKKPHIKKPLNAFMLYMKEMRAKVVAECTLKESAAINQILGRRWHALSREEQAKYYELARKERQLHMQLYPGWSARDNYGKKKKRKRDKQPGETNGEKKSAFATYKVKAAASAHPLQMEAY

SEQ ID NO: 89818 - protein, 619 aa, Homo sapiens
  Payload ID: 17971
  Gene Name: transcription factor 7-like 2 (T-cell specific, HMG-box)
  Uniprot ID: Q9NQB0
  ENSP ID: ENSP00000348274
MPQLNGGGGDDLGANDELISFKDEGEQEEKSSENSSAERDLADVKSSLVNESETNQNSSSDSEAERRPPPRSESFRDKSRESLEEAAKRQDGGLFKGPPYPGYPFIMIPDLTSPYLPNGSLSPTARTLHFQSGSTHYSAYKTIEHQIAVQYLQMKWPLLDVQAGSLQSRQALKDARSPSPAHIVSNKVPVVQHPHHVHPLTPLITYSNEHFTPGNPPPHLPADVDPKTGIPRPPHPPDISPYYPLSPGTVGQIPHPLGWLVPQQGQPVYPITTGGFRHPYPTALTVNASMSRFPPHMVPPHHTLHTTGIPHPAIVTPTVKQESSQSDVGSLHSSKHQDSKKEEEKKKPHIKKPLNAFMLYMKEMRAKVVAECTLKESAAINQILGRRWHALSREEQAKYYELARKERQLHMQLYPGWSARDNYGKKKKRKRDKQPGETNEHSECFLNPCLSLPPITDLSAPKKCRARFGLDQQNNWCGPCRRKKKCVRYIQGEGSCLSPPSSDGSLLDSPPPSPNLLGSPPRDAKSQTEQTQPLSLSLKPDPLAHLSMMPPPPALLLAEATHKASALCPNGALDLPPAALQPAAPSSSIAQPSTSSLHSHSSLAGTQPQPLSLVTKSLE

SEQ ID NO: 89819 - protein, 120 aa, Homo sapiens
  Payload ID: 17971
  Gene Name: transcription factor 7-like 2 (T-cell specific, HMG-box)
  ENSP ID: ENSP00000358393
MLYMKEMRAKVVAECTLKESAAINQILGRRWHALSREEQAKYYELARKERQLHMQLYPGWSARDNYGKKKKRKRDKQPGETNDLSAPKKCRARFGLDQQNNWCGPCRCKYSKEVSGTVRA

SEQ ID NO: 89820 - protein, 176 aa, Homo sapiens
  Payload ID: 17971
  Gene Name: transcription factor 7-like 2 (T-cell specific, HMG-box)
  ENSP ID: ENSP00000358396
MSRFPPHMVPPHHTLHTTGIPHPAIVTPTVKQESSQSDVGSLHSSKHQDSKKEEEKKKPHIKKPLNAFMLYMKEMRAKVVAECTLKESAAINQILGRRWHALSREEQAKYYELARKERQLHMQLYPGWSARDNYGKKKKRKRDKQPGETNGEKKSAFATYKVKAAASAHPLQMEAY

SEQ ID NO: 89821 - protein, 317 aa, Homo sapiens
  Payload ID: 17971
  Gene Name: transcription factor 7-like 2 (T-cell specific, HMG-box)
  ENSP ID: ENSP00000358402
MPQLNGGGGDDLGANDELISFKDEGEQEEKSSENSSAERDLADVKSSLVNESETNQNSSSDSEAERRPPPRSESFRDKSRESLEEAAKRQDGGLFKGPPYPGYPFIMIPDLTSPYLPNGSLSPTARTYLQMKWPLLDVQAGSLQSRQALKDARSPSPAHIVQSPLPCCTQGHDCQHFYPPSDFTVSTQVFRDMKRSHSLQKVGEPWCIESNKVPVVQHPHHVHPLTPLITYSNEHFTPGNPPPHLPADVDPKTGIPRPPHPPDISPYYPLSPGTVGQIPHPLGWLVPQQGQPVYPITTGGFRHPYPTALTVNASMSR

SEQ ID NO: 89822 - protein, 596 aa, Homo sapiens
  Payload ID: 17971
  Gene Name: transcription factor 7-like 2 (T-cell specific, HMG-box)
  Uniprot ID: Q9NQB0
  ENSP ID: ENSP00000358404
MPQLNGGGGDDLGANDELISFKDEGEQEEKSSENSSAERDLADVKSSLVNESETNQNSSSDSEAERRPPPRSESFRDKSRESLEEAAKRQDGGLFKGPPYPGYPFIMIPDLTSPYLPNGSLSPTARTYLQMKWPLLDVQAGSLQSRQALKDARSPSPAHIVSNKVPVVQHPHHVHPLTPLITYSNEHFTPGNPPPHLPADVDPKTGIPRPPHPPDISPYYPLSPGTVGQIPHPLGWLVPQQGQPVYPITTGGFRHPYPTALTVNASMSRFPPHMVPPHHTLHTTGIPHPAIVTPTVKQESSQSDVGSLHSSKHQDSKKEEEKKKPHIKKPLNAFMLYMKEMRAKVVAECTLKESAAINQILGRRWHALSREEQAKYYELARKERQLHMQLYPGWSARDNYGKKKKRKRDKQPGETNEHSECFLNPCLSLPPITDLSAPKKCRARFGLDQQNNWCGPCRRKKKCVRYIQGEGSCLSPPSSDGSLLDSPPPSPNLLGSPPRDAKSQTEQTQPLSLSLKPDPLAHLSMMPPPPALLLAEATHKASALCPNGALDLPPAALQPAAPSSSIAQPSTSSLHSHSSLAGTQPQPLSLVTKSLE

SEQ ID NO: 89823 - protein, 108 aa, Homo sapiens
  Payload ID: 17971
  Gene Name: transcription factor 7-like 2 (T-cell specific, HMG-box)
  ENSP ID: ENSP00000435694
AECTLKESAAINQILGRRWHALSREEQAKYYELARKERQLHMQLYPGWSARDNYGKKKKRKRDKQPGETNDLSAPKKCRARFGLDQQNNWCGPCRCKYSKEVSGTVRA

SEQ ID NO: 89824 - protein, 476 aa, Homo sapiens
  Payload ID: 17971
  Gene Name: transcription factor 7-like 2 (T-cell specific, HMG-box)
  ENSP ID: ENSP00000440547
MPQLNGGGGDDLGANDELISFKDEGEQEEKSSENSSAERDLADVKSSLVNESETNQNSSSDSEAERRPPPRSESFRDKSRESLEEAAKRQDGGLFKGPPYPGYPFIMIPDLTSPYLPNGSLSPTARTYLQMKWPLLDVQAGSLQSRQALKDARSPSPAHIVSNKVPVVQHPHHVHPLTPLITYSNEHFTPGNPPPHLPADVDPKTGIPRPPHPPDISPYYPLSPGTVGQIPHPLGWLVPQQGQPVYPITTGGFRHPYPTALTVNASMSSFLSSRFPPHMVPPHHTLHTTGIPHPAIVTPTVKQESSQSDVGSLHSSKHQDSKKEEEKKKPHIKKPLNAFMLYMKEMRAKVVAECTLKESAAINQILGRRWHALSREEQAKYYELARKERQLHMQLYPGWSARDNYGKKKKRKRDKQPGETNEHSECFLNPCLSLPPITDLSAPKKCRARFGLDQQNNWCGPCRCKYSKEVSGTVRA

SEQ ID NO: 89825 - protein, 408 aa, Homo sapiens
  Payload ID: 17971
  Gene Name: transcription factor 7-like 2 (T-cell specific, HMG-box)
  ENSP ID: ENSP00000443626
MPQLNGGGGDDLGANDELISFKDEGEQEEKSSENSSAERDLADVKSSLVNESETNQNSSSDSEAERRPPPRSESFRDKSRESLEEAAKRQDGGLFKGPPYPGYPFIMIPDLTSPYLPNGSLSPTARTSNKVPVVQHPHHVHPLTPLITYSNEHFTPGNPPPHLPADVDPKTGIPRPPHPPDISPYYPLSPGTVGQIPHPLGWLVPQQGQPVYPITTGGFRHPYPTALTVNASMSRFPPHMVPPHHTLHTTGIPHPAIVTPTVKQESSQSDVGSLHSSKHQDSKKEEEKKKPHIKKPLNAFMLYMKEMRAKVVAECTLKESAAINQILGRRWHALSREEQAKYYELARKERQLHMQLYPGWSARDNYGKKKKRKRDKQPGETNGEKKSAFATYKVKAAASAHPLQMEAY

SEQ ID NO: 89826 - protein, 534 aa, Homo sapiens
  Payload ID: 17971
  Gene Name: transcription factor 7-like 2 (T-cell specific, HMG-box)
  ENSP ID: ENSP00000443883
MIPDLTSPYLPNGSLSPTARTYLQMKWPLLDVQAGSLQSRQALKDARSPSPAHIVQSPLPCCTQGHDCQHFYPPSDFTVSTQVFRDMKRSHSLQKVGEPWCIESNKVPVVQHPHHVHPLTPLITYSNEHFTPGNPPPHLPADVDPKTGIPRPPHPPDISPYYPLSPGTVGQIPHPLGWQGQPVYPITTGGFRHPYPTALTVNASMSRFPPHMVPPHHTLHTTGIPHPAIVTPTVKQESSQSDVGSLHSSKHQDSKKEEEKKKPHIKKPLNAFMLYMKEMRAKVVAECTLKESAAINQILGRRWHALSREEQAKYYELARKERQLHMQLYPGWSARDNYGKKKKRKRDKQPGETNEHSECFLNPCLSLPPITDANTPKKCRALFGLDRQTLWCKPCRRKKKCVRYIQGEGSCLSPPSSDGSLLDSPPPSPNLLGSPPRDAKSQTEQTQPLSLSLKPDPLAHLSMMPPPPALLLAEATHKASALCPNGALDLPPAALQPAAPSSSIAQPSTSSLHSHSSLAGTQPQPLSLVTKSLE

SEQ ID NO: 89827 - protein, 607 aa, Homo sapiens
  Payload ID: 17971
  Gene Name: transcription factor 7-like 2 (T-cell specific, HMG-box)
  ENSP ID: ENSP00000444972
MPQLNGGGGDDLGANDELISFKDEGEQEEKSSENSSAERDLADVKSSLVNESETNQNSSSDSEAERRPPPRSESFRDKSRESLEEAAKRQDGGLFKGPPYPGYPFIMIPDLTSPYLPNGSLSPTARTLHFQSGSTHYSAYKTIEHQIAVQYLQMKWPLLDVQAGSLQSRQALKDARSPSPAHIVSNKVPVVQHPHHVHPLTPLITYSNEHFTPGNPPPHLPADVDPKTGIPRPPHPPDISPYYPLSPGTVGQIPHPLGWLVPQQGQPVYPITTGGFRHPYPTALTVNASMSSFLSSRFPPHMVPPHHTLHTTGIPHPAIVTPTVKQESSQSDVGSLHSSKHQDSKKEEEKKKPHIKKPLNAFMLYMKEMRAKVVAECTLKESAAINQILGRRWHALSREEQAKYYELARKERQLHMQLYPGWSARDNYGKKKKRKRDKQPGETNDANTPKKCRALFGLDRQTLWCKPCRRKKKCVRYIQGEGSCLSPPSSDGSLLDSPPPSPNLLGSPPRDAKSQTEQTQPLSLSLKPDPLAHLSMMPPPPALLLAEATHKASALCPNGALDLPPAALQPAAPSSSIAQPSTSSLHSHSSLAGTQPQPLSLVTKSLE

SEQ ID NO: 89828 - protein, 482 aa, Homo sapiens
  Payload ID: 17971
  Gene Name: transcription factor 7-like 2 (T-cell specific, HMG-box)
  Uniprot ID: Q9NQB0
  ENSP ID: ENSP00000446172
MPQLNGGGGDDLGANDELISFKDEGEQEEKSSENSSAERDLADVKSSLVNESETNQNSSSDSEAERRPPPRSESFRDKSRESLEEAAKRQDGGLFKGPPYPGYPFIMIPDLTSPYLPNGSLSPTARTLHFQSGSTHYSAYKTIEHQIAVQYLQMKWPLLDVQAGSLQSRQALKDARSPSPAHIVSNKVPVVQHPHHVHPLTPLITYSNEHFTPGNPPPHLPADVDPKTGIPRPPHPPDISPYYPLSPGTVGQIPHPLGWLVPQQGQPVYPITTGGFRHPYPTALTVNASMSRFPPHMVPPHHTLHTTGIPHPAIVTPTVKQESSQSDVGSLHSSKHQDSKKEEEKKKPHIKKPLNAFMLYMKEMRAKVVAECTLKESAAINQILGRRWHALSREEQAKYYELARKERQLHMQLYPGWSARDNYGKKKKRKRDKQPGETNEHSECFLNPCLSLPPITGEKKSAFATYKVKAAASAHPLQMEAY

SEQ ID NO: 89829 - protein, 579 aa, Homo sapiens
  Payload ID: 17971
  Gene Name: transcription factor 7-like 2 (T-cell specific, HMG-box)
  ENSP ID: ENSP00000446238
MPQLNGGGGDDLGANDELISFKDEGEQEEKSSENSSAERDLADVKSSLVNESETNQNSSSDSEAERRPPPRSESFRDKSRESLEEAAKRQDGGLFKGPPYPGYPFIMIPDLTSPYLPNGSLSPTARTYLQMKWPLLDVQAGSLQSRQALKDARSPSPAHIVSNKVPVVQHPHHVHPLTPLITYSNEHFTPGNPPPHLPADVDPKTGIPRPPHPPDISPYYPLSPGTVGQIPHPLGWLVPQQGQPVYPITTGGFRHPYPTALTVNASMSRFPPHMVPPHHTLHTTGIPHPAIVTPTVKQESSQSDVGSLHSSKHQDSKKEEEKKKPHIKKPLNAFMLYMKEMRAKVVAECTLKESAAINQILGRRWHALSREEQAKYYELARKERQLHMQLYPGWSARDNYGKKKKRKRDKQPGETNDLSAPKKCRARFGLDQQNNWCGPCRRKKKCVRYIQGEGSCLSPPSSDGSLLDSPPPSPNLLGSPPRDAKSQTEQTQPLSLSLKPDPLAHLSMMPPPPALLLAEATHKASALCPNGALDLPPAALQPAAPSSSIAQPSTSSLHSHSSLAGTQPQPLSLVTKSLE

SEQ ID NO: 89830 - protein, 602 aa, Homo sapiens
  Payload ID: 17971
  Gene Name: transcription factor 7-like 2 (T-cell specific, HMG-box)
  Uniprot ID: Q9NQB0
  ENSP ID: ENSP00000486891
MPQLNGGGGDDLGANDELISFKDEGEQEEKSSENSSAERDLADVKSSLVNESETNQNSSSDSEAERRPPPRSESFRDKSRESLEEAAKRQDGGLFKGPPYPGYPFIMIPDLTSPYLPNGSLSPTARTLHFQSGSTHYSAYKTIEHQIAVQYLQMKWPLLDVQAGSLQSRQALKDARSPSPAHIVSNKVPVVQHPHHVHPLTPLITYSNEHFTPGNPPPHLPADVDPKTGIPRPPHPPDISPYYPLSPGTVGQIPHPLGWLVPQQGQPVYPITTGGFRHPYPTALTVNASMSRFPPHMVPPHHTLHTTGIPHPAIVTPTVKQESSQSDVGSLHSSKHQDSKKEEEKKKPHIKKPLNAFMLYMKEMRAKVVAECTLKESAAINQILGRRWHALSREEQAKYYELARKERQLHMQLYPGWSARDNYGKKKKRKRDKQPGETNDANTPKKCRALFGLDRQTLWCKPCRRKKKCVRYIQGEGSCLSPPSSDGSLLDSPPPSPNLLGSPPRDAKSQTEQTQPLSLSLKPDPLAHLSMMPPPPALLLAEATHKASALCPNGALDLPPAALQPAAPSSSIAQPSTSSLHSHSSLAGTQPQPLSLVTKSLE

SEQ ID NO: 89831 - protein, 584 aa, Homo sapiens
  Payload ID: 17971
  Gene Name: transcription factor 7-like 2 (T-cell specific, HMG-box)
  ENSP ID: ENSP00000487507
MPQLNGGGGDDLGANDELISFKDEGEQEEKSSENSSAERDLADVKSSLVNESETNQNSSSDSEAERRPPPRSESFRDKSRESLEEAAKRQDGGLFKGPPYPGYPFIMIPDLTSPYLPNGSLSPTARTYLQMKWPLLDVQAGSLQSRQALKDARSPSPAHIVSNKVPVVQHPHHVHPLTPLITYSNEHFTPGNPPPHLPADVDPKTGIPRPPHPPDISPYYPLSPGTVGQIPHPLGWLVPQQGQPVYPITTGGFRHPYPTALTVNASMSSFLSSRFPPHMVPPHHTLHTTGIPHPAIVTPTVKQESSQSDVGSLHSSKHQDSKKEEEKKKPHIKKPLNAFMLYMKEMRAKVVAECTLKESAAINQILGRRWHALSREEQAKYYELARKERQLHMQLYPGWSARDNYGKKKKRKRDKQPGETNDANTPKKCRALFGLDRQTLWCKPCRRKKKCVRYIQGEGSCLSPPSSDGSLLDSPPPSPNLLGSPPRDAKSQTEQTQPLSLSLKPDPLAHLSMMPPPPALLLAEATHKASALCPNGALDLPPAALQPAAPSSSIAQPSTSSLHSHSSLAGTQPQPLSLVTKSLE

SEQ ID NO: 89832 - protein, 214 aa, Homo sapiens
  Payload ID: 17972
  Gene Name: transcription factor A, mitochondrial
  Uniprot ID: Q00059
  ENSP ID: ENSP00000363002
MAFLRSMWGVLSALGRSGAELCTGCGSRLRSPFSFVYLPRWFSSVLASCPKKPVSSYLRFSKEQLPIFKAQNPDAKTTELIRRIAQRWRELPDSKKKIYQDAYRAEWQVYKEEISRFKEQLTPSQIMSLEKEIMDKHLKRKAMTKKKEKLKTVKENWKNLSDSEKELYIQHAKEDETRYHNEMKSWEEQMIEVGRKDLLRRTIKKQRKYGAEEC

SEQ ID NO: 89833 - protein, 219 aa, Homo sapiens
  Payload ID: 17972
  Gene Name: transcription factor A, mitochondrial
  ENSP ID: ENSP00000378776
  MOD_RES (1)..(1): Any amino acid
XELCTGCGSRLRSPFSFVYLPRWFSSVLASCPKKPVSSYLRFSKEQLPIFKAQNPDAKTTELIRRIAQRWRELPDSKKKIYQDAYRAEWQVYKEEISRFKEQLTPSQIMSLEKEIMDKHLKRKAMTKKKELTLLGKPKRPRSAYNVYVAERFQEAKGDSPQEKLKTVKENWKNLSDSEKEVSITVVSLKCLLRISVRECIRARLDSCEDNLVLLIIQVF

SEQ ID NO: 89834 - protein, 246 aa, Homo sapiens
  Payload ID: 17972
  Gene Name: transcription factor A, mitochondrial
  Uniprot ID: Q00059
  ENSP ID: ENSP00000420588
MAFLRSMWGVLSALGRSGAELCTGCGSRLRSPFSFVYLPRWFSSVLASCPKKPVSSYLRFSKEQLPIFKAQNPDAKTTELIRRIAQRWRELPDSKKKIYQDAYRAEWQVYKEEISRFKEQLTPSQIMSLEKEIMDKHLKRKAMTKKKELTLLGKPKRPRSAYNVYVAERFQEAKGDSPQEKLKTVKENWKNLSDSEKELYIQHAKEDETRYHNEMKSWEEQMIEVGRKDLLRRTIKKQRKYGAEEC

SEQ ID NO: 89835 - protein, 433 aa, Homo sapiens
  Payload ID: 17973
  Gene Name: transcription factor AP-2 alpha (activating enhancer binding protein 2 alpha)
  Uniprot ID: P05549
  ENSP ID: ENSP00000316516
MSILAKMGDWQDRHDGTSNGTARLPQLGTVGQSPYTSAPPLSHTPNADFQPPYFPPPYQPIYPQSQDPYSHVNDPYSLNPLHAQPQPQHPGWPGQRQSQESGLLHTHRGLPHQLSGLDPRRDYRRHEDLLHGPHALSSGLGDLSIHSLPHAIEEVPHVEDPGINIPDQTVIKKGPVSLSKSNSNAVSAIPINKDNLFGGVVNPNEVFCSVPGRLSLLSSTSKYKVTVAEVQRRLSPPECLNASLLGGVLRRAKSKNGGRSLREKLDKIGLNLPAGRRKAANVTLLTSLVEGEAVHLARDFGYVCETEFPAKAVAEFLNRQHSDPNEQVTRKNMLLATKQICKEFTDLLAQDRSPLGNSRPNPILEPGIQSCLTHFNLISHGFGSPAVCAAVTALQNYLTEALKAMDKMYLSNNPNSHTDNNAKSSDKEEKHRK

SEQ ID NO: 89836 - protein, 431 aa, Homo sapiens
  Payload ID: 17973
  Gene Name: transcription factor AP-2 alpha (activating enhancer binding protein 2 alpha)
  Uniprot ID: P05549
  ENSP ID: ENSP00000368928
MLVHSFSAMDRHDGTSNGTARLPQLGTVGQSPYTSAPPLSHTPNADFQPPYFPPPYQPIYPQSQDPYSHVNDPYSLNPLHAQPQPQHPGWPGQRQSQESGLLHTHRGLPHQLSGLDPRRDYRRHEDLLHGPHALSSGLGDLSIHSLPHAIEEVPHVEDPGINIPDQTVIKKGPVSLSKSNSNAVSAIPINKDNLFGGVVNPNEVFCSVPGRLSLLSSTSKYKVTVAEVQRRLSPPECLNASLLGGVLRRAKSKNGGRSLREKLDKIGLNLPAGRRKAANVTLLTSLVEGEAVHLARDFGYVCETEFPAKAVAEFLNRQHSDPNEQVTRKNMLLATKQICKEFTDLLAQDRSPLGNSRPNPILEPGIQSCLTHFNLISHGFGSPAVCAAVTALQNYLTEALKAMDKMYLSNNPNSHTDNNAKSSDKEEKHRK

SEQ ID NO: 89837 - protein, 439 aa, Homo sapiens
  Payload ID: 17973
  Gene Name: transcription factor AP-2 alpha (activating enhancer binding protein 2 alpha)
  ENSP ID: ENSP00000368933
MKMLWKLTDNIKYEDCEDRHDGTSNGTARLPQLGTVGQSPYTSAPPLSHTPNADFQPPYFPPPYQPIYPQSQDPYSHVNDPYSLNPLHAQPQPQHPGWPGQRQSQESGLLHTHRGLPHQLSGLDPRRDYRRHEDLLHGPHALSSGLGDLSIHSLPHAIEEVPHVEDPGINIPDQTVIKKGPVSLSKSNSNAVSAIPINKDNLFGGVVNPNEVFCSVPGRLSLLSSTSKYKVTVAEVQRRLSPPECLNASLLGGVLRRAKSKNGGRSLREKLDKIGLNLPAGRRKAANVTLLTSLVEGEAVHLARDFGYVCETEFPAKAVAEFLNRQHSDPNEQVTRKNMLLATKQICKEFTDLLAQDRSPLGNSRPNPILEPGIQSCLTHFNLISHGFGSPAVCAAVTALQNYLTEALKAMDKMYLSNNPNSHTDNNAKSSDKEEKHRK

SEQ ID NO: 89838 - protein, 328 aa, Homo sapiens
  Payload ID: 17973
  Gene Name: transcription factor AP-2 alpha (activating enhancer binding protein 2 alpha)
  ENSP ID: ENSP00000417495
MLWKLTDNIKYEDCEDRHDGTSNGTARLPQLGTVGQSPYTSAPPLSHTPNADFQPPYFPPPYQPIYPQSQDPYSHVNDPYSLNPLHAQPQPQHPGWPGQRQSQESGLLHTHRGLPHQLSGLDPRRDYRRHEDLLHGPHALSSGLGDLSIHSLPHAIEEVPHVEDPGINIPDQTVIKKGPVSLSKSNSNAVSAIPINKDNLFGGVVNPNEVFCSVPGRLSLLSSTSKYKVTVAEVQRRLSPPECLNASLLGGVLRRAKSKNGGRSLREKLDKIGLNLPAGRRKAANVTLLTSLVEDRYAKSSPTCWLRTDLPWGTHGPTPSWSPASRAA

SEQ ID NO: 89839 - protein, 81 aa, Homo sapiens
  Payload ID: 17973
  Gene Name: transcription factor AP-2 alpha (activating enhancer binding protein 2 alpha)
  ENSP ID: ENSP00000417735
  MOD_RES (1)..(1): Any amino acid
XYKVTVAEVQRRLSPPECLNASLLGGVLRRAKSKNGGRSLREKLDKIGLNLPAGRRKAANVTLLTSLVEGAEMAAVLRQEY

SEQ ID NO: 89840 - protein, 173 aa, Homo sapiens
  Payload ID: 17973
  Gene Name: transcription factor AP-2 alpha (activating enhancer binding protein 2 alpha)
  ENSP ID: ENSP00000418391
MEEPRSSGQPSPESQTRLRSGGARGQTGPGSACRAESPTSARTRSQAAPTRYARPPLHPEDRHDGTSNGTARLPQLGTVGQSPYTSAPPLSHTPNADFQPPYFPPPYQPIYPQSQDPYSHVNDPYSLNPLHAQPQPQHPGWPGQRQSQESGLLHTHRGLPHQLSGLDPRRDYR

SEQ ID NO: 89841 - protein, 437 aa, Homo sapiens
  Payload ID: 17973
  Gene Name: transcription factor AP-2 alpha (activating enhancer binding protein 2 alpha)
  Uniprot ID: P05549
  ENSP ID: ENSP00000418541
MLWKLTDNIKYEDCEDRHDGTSNGTARLPQLGTVGQSPYTSAPPLSHTPNADFQPPYFPPPYQPIYPQSQDPYSHVNDPYSLNPLHAQPQPQHPGWPGQRQSQESGLLHTHRGLPHQLSGLDPRRDYRRHEDLLHGPHALSSGLGDLSIHSLPHAIEEVPHVEDPGINIPDQTVIKKGPVSLSKSNSNAVSAIPINKDNLFGGVVNPNEVFCSVPGRLSLLSSTSKYKVTVAEVQRRLSPPECLNASLLGGVLRRAKSKNGGRSLREKLDKIGLNLPAGRRKAANVTLLTSLVEGEAVHLARDFGYVCETEFPAKAVAEFLNRQHSDPNEQVTRKNMLLATKQICKEFTDLLAQDRSPLGNSRPNPILEPGIQSCLTHFNLISHGFGSPAVCAAVTALQNYLTEALKAMDKMYLSNNPNSHTDNNAKSSDKEEKHRK

SEQ ID NO: 89842 - protein, 218 aa, Homo sapiens
  Payload ID: 17973
  Gene Name: transcription factor AP-2 alpha (activating enhancer binding protein 2 alpha)
  ENSP ID: ENSP00000419696
  MOD_RES (1)..(1): Any amino acid
XPGQRQSQESGLLHTHRGLPHQLSGLDPRRDYRRHEDLLHGPHALSSGLGDLSIHSLPHAIEEVPHVEDPGINIPDQTVIKKGPVSLSKSNSNAVSAIPINKDNLFGGVVNPNEVFCSVPGRLSLLSSTSKYKVTVAEVQRRLSPPECLNASLLGGVLRRAKSKNGGRSLREKLDKIGLNLPAGRRKAANVTLLTSLVEGEVVIFPDKCIHQILQRRK

SEQ ID NO: 89843 - protein, 121 aa, Homo sapiens
  Payload ID: 17973
  Gene Name: transcription factor AP-2 alpha (activating enhancer binding protein 2 alpha)
  ENSP ID: ENSP00000419823
MKMLWKLTDNIKYEDCEDRHDGTSNGTARLPQLGTPEPPARPAAAAAPRLARPEAEPGVWAPAHAPGAASPAVGPGSSQGLQAARGPPARPTRAQLRTRRPLDPLLTSRHRGGPACRRPGY

SEQ ID NO: 89844 - protein, 136 aa, Homo sapiens
  Payload ID: 17973
  Gene Name: transcription factor AP-2 alpha (activating enhancer binding protein 2 alpha)
  ENSP ID: ENSP00000419961
MKMLWKLTDNIKYEDCEHVEDPGINIPDQTVIKKGPVSLSKSNSNAVSAIPINKDNLFGGVVNPNEVFCSVPGRLSLLSSTSKYKVTVAEVQRRLSPPECLNASLLGGVLRRAKSKNGGRSLREKLDKIGLNLPAG

SEQ ID NO: 89845 - protein, 113 aa, Homo sapiens
  Payload ID: 17973
  Gene Name: transcription factor AP-2 alpha (activating enhancer binding protein 2 alpha)
  ENSP ID: ENSP00000420568
MLVHSFSAMDRHDGTSNGTARLPQLGTPEPPARPAAAAAPRLARPEAEPGVWAPAHAPGAASPAVGPGSSQGLQAARGPPARPTRAQLRTRRPLDPLLTSRHRGGPACRRPGY

SEQ ID NO: 89846 - protein, 198 aa, Homo sapiens
  Payload ID: 17974
  Gene Name: transcription factor AP-2 beta (activating enhancer binding protein 2 beta)
  ENSP ID: ENSP00000342252
MLWKLVENVKYEDIYEMLVHTYSSMDRHDGVPSHSSRLSQLGSVSQGPYSSAPPLSHTPSSDFQPPYFPPPYQPLPYHQSQDPYSHVNDPYSLNPLHQPQQHPWGQRQRQEVGSEAGSLLPQPRAALPQLSGLDPRRDYHSVRRPDVLLHSAHHGLDAGMGDSLSLHGLGHPGMEDVQSVEDANNSGMNLLDQSVIKK

SEQ ID NO: 89847 - protein, 460 aa, Homo sapiens
  Payload ID: 17974
  Gene Name: transcription factor AP-2 beta (activating enhancer binding protein 2 beta)
  Uniprot ID: Q92481
  ENSP ID: ENSP00000377265
MHSPPRDQAAIMLWKLVENVKYEDIYEDRHDGVPSHSSRLSQLGSVSQGPYSSAPPLSHTPSSDFQPPYFPPPYQPLPYHQSQDPYSHVNDPYSLNPLHQPQQHPWGQRQRQEVGSEAGSLLPQPRAALPQLSGLDPRRDYHSVRRPDVLLHSAHHGLDAGMGDSLSLHGLGHPGMEDVQSVEDANNSGMNLLDQSVIKKVPVPPKSVTSLMMNKDGFLGGMSVNTGEVFCSVPGRLSLLSSTSKYKVTVGEVQRRLSPPECLNASLLGGVLRRAKSKNGGRSLRERLEKIGLNLPAGRRKAANVTLLTSLVEGEAVHLARDFGYICETEFPAKAVSEYLNRQHTDPSDLHSRKNMLLATKQLCKEFTDLLAQDRTPIGNSRPSPILEPGIQSCLTHFSLITHGFGAPAICAALTALQNYLTEALKGMDKMFLNNTTTNRHTSGEGPGSKTGDKEEKHRK

SEQ ID NO: 89848 - protein, 452 aa, Homo sapiens
  Payload ID: 17975
  Gene Name: transcription factor AP-2 delta (activating enhancer binding protein 2 delta)
  Uniprot ID: Q7Z6R9
  ENSP ID: ENSP00000008391
MSTTFPGLVHDAEIRHDGSNSYRLMQLGCLESVANSTVAYSSSSPLTYSTTGTEFASPYFSTNHQYTPLHHQSFHYEFQHSHPAVTPDAYSLNSLHHSQQYYQQIHHGEPTDFINLHNARALKSSCLDEQRRELGCLDAYRRHDLSLMSHGSQYGMHPDQRLLPGPSLGLAAAGADDLQGSVEAQCGLVLNGQGGVIRRGGTCVVNPTDLFCSVPGRLSLLSSTSKYKVTIAEVKRRLSPPECLNASLLGGILRRAKSKNGGRCLREKLDRLGLNLPAGRRKAANVTLLTSLVEGEALHLARDFGYTCETEFPAKAVGEHLARQHMEQKEQTARKKMILATKQICKEFQDLLSQDRSPLGSSRPTPILDLDIQRHLTHFSLITHGFGTPAICAALSTFQTVLSEMLNYLEKHTTHKNGGAADSGQGHANSEKAPLRKTSEAAVKEGKTEKTD

SEQ ID NO: 89849 - protein, 442 aa, Homo sapiens
  Payload ID: 17976
  Gene Name: transcription factor AP-2 epsilon (activating enhancer binding protein 2 epsilon)
  Uniprot ID: Q6VUC0
  ENSP ID: ENSP00000362332
MLVHTYSAMERPDGLGAAAGGARLSSLPQAAYGPAPPLCHTPAATAAAEFQPPYFPPPYPQPPLPYGQAPDAAAAFPHLAGDPYGGLAPLAQPQPPQAAWAAPRAAARAHEEPPGLLAPPARALGLDPRRDYATAVPRLLHGLADGAHGLADAPLGLPGLAAAPGLEDLQAMDEPGMSLLDQSVIKKVPIPSKASSLSALSLAKDSLVGGITNPGEVFCSVPGRLSLLSSTSKYKVTVGEVQRRLSPPECLNASLLGGVLRRAKSKNGGRCLRERLEKIGLNLPAGRRKAANVTLLTSLVEGEAVHLARDFGYVCETEFPAKAAAEYLCRQHADPGELHSRKSMLLAAKQICKEFADLMAQDRSPLGNSRPALILEPGVQSCLTHFSLITHGFGGPAICAALTAFQNYLLESLKGLDKMFLSSVGSGHGETKASEKDAKHRK

SEQ ID NO: 89850 - protein, 450 aa, Homo sapiens
  Payload ID: 17977
  Gene Name: transcription factor AP-2 gamma (activating enhancer binding protein 2 gamma)
  Uniprot ID: Q92754
  ENSP ID: ENSP00000201031
MLWKITDNVKYEEDCEDRHDGSSNGNPRVPHLSSAGQHLYSPAPPLSHTGVAEYQPPPYFPPPYQQLAYSQSADPYSHLGEAYAAAINPLHQPAPTGSQQQAWPGRQSQEGAGLPSHHGRPAGLLPHLSGLEAGAVSARRDAYRRSDLLLPHAHALDAAGLAENLGLHDMPHQMDEVQNVDDQHLLLHDQTVIRKGPISMTKNPLNLPCQKELVGAVMNPTEVFCSVPGRLSLLSSTSKYKVTVAEVQRRLSPPECLNASLLGGVLRRAKSKNGGRSLREKLDKIGLNLPAGRRKAAHVTLLTSLVEGEAVHLARDFAYVCEAEFPSKPVAEYLTRPHLGGRNEMAARKNMLLAAQQLCKEFTELLSQDRTPHGTSRLAPVLETNIQNCLSHFSLITHGFGSQAICAAVSALQNYIKEALIVIDKSYMNPGDQSPADSNKTLEKMEKHRK

SEQ ID NO: 89851 - protein, 118 aa, Homo sapiens
  Payload ID: 17977
  Gene Name: transcription factor AP-2 gamma (activating enhancer binding protein 2 gamma)
  ENSP ID: ENSP00000390857
MFLQDRHDGSSNGNPRVPHLSSAGQHLYSPAPPLSHTGVAEYQPPPYFPPPYQQLAYSQSADPYSHLGEAYAAAINPLHQPAPTGSQQQAWPGRQSQEGAGLPSHHGRPAGLLPHLSG

SEQ ID NO: 89852 - protein, 338 aa, Homo sapiens
  Payload ID: 17978
  Gene Name: transcription factor AP-4 (activating enhancer binding protein 4)
  Uniprot ID: Q01664
  ENSP ID: ENSP00000204517
MEYFMVPTQKVPSLQHFRKTEKEVIGGLCSLANIPLTPETQRDQERRIRREIANSNERRRMQSINAGFQSLKTLIPHTDGEKLSKAAILQQTAEYIFSLEQEKTRLLQQNTQLKRFIQELSGSSPKRRRAEDKDEGIGSPDIWEDEKAEDLRREMIELRQQLDKERSVRMMLEEQVRSLEAHMYPEKLKVIAQQVQLQQQQEQVRLLHQEKLEREQQQLRTQLLPPPAPTHHPTVIVPAPPPPPSHHINVVTMGPSSVINSVSTSRQNLDTIVQAIQHIEGTQEKQELEEEQRRAVIVKPVRSCPEAPTSDTASDSEASDSDAMDQSREEPSGDGELP

SEQ ID NO: 89853 - protein, 115 aa, Homo sapiens
  Payload ID: 17978
  Gene Name: transcription factor AP-4 (activating enhancer binding protein 4)
  ENSP ID: ENSP00000459390
MQSINAGFQSLKTLIPHTDGEKLSKAAILQQTAEYIFSLEQEKTRLLQQNTQLKRFIQELSGSSPKRRRAEDKDEGIGSPDIWEDEKAEDLRREMIELRQQLDKERSVRMMLEEQ

SEQ ID NO: 89854 - protein, 167 aa, Homo sapiens
  Payload ID: 17978
  Gene Name: transcription factor AP-4 (activating enhancer binding protein 4)
  ENSP ID: ENSP00000460067
MEYFMVPTQKVPSLQHFRKTEKEVIGGLCRRRKPRLGVAQLPCQHSTNPRDSAGPGAADSAGDRQQQRAETHAEHQRGIPVPQDPHPPHRRREAQQGSHSPADSRVHLLPGAGEDQALAAEHTAQALHPGAERLVPQATAGRGQGRRHRLPGHLGGREGGGPAAGDD

SEQ ID NO: 89855 - protein, 44 aa, Homo sapiens
  Payload ID: 17978
  Gene Name: transcription factor AP-4 (activating enhancer binding protein 4)
  ENSP ID: ENSP00000461352
MEYFMVPTQKVPSLQHFRKTEKEVIGGLCRCARWRPTCTRKSSR

SEQ ID NO: 89856 - protein, 346 aa, Homo sapiens
  Payload ID: 17979
  Gene Name: transcription factor B1, mitochondrial
  Uniprot ID: Q8WVM0
  ENSP ID: ENSP00000356134
MAASGKLSTCRLPPLPTIREIIKLLRLQAAKQLSQNFLLDLRLTDKIVRKAGNLTNAYVYEVGPGPGGITRSILNADVAELLVVEKDTRFIPGLQMLSDAAPGKLRIVHGDVLTFKVEKAFSESLKRPWEDDPPNVHIIGNLPFSVSTPLIIKWLENISCRDGPFVYGRTQMTLTFQKEVAERLAANTGSKQRSRLSVMAQYLCNVRHIFTIPGQAFVPKPEVDVGVVHFTPLIQPKIEQPFKLVEKVVQNVFQFRRKYCHRGLRMLFPEAQRLESTGRLLELADIDPTLRPRQLSISHFKSLCDVYRKMCDEDPQLFAYNFREELKRRKSKNEEKEEDDAENYRL

SEQ ID NO: 89857 - protein, 396 aa, Homo sapiens
  Payload ID: 17980
  Gene Name: transcription factor B2, mitochondrial
  Uniprot ID: Q9H5Q4
  ENSP ID: ENSP00000355471
MWIPVVGLPRRLRLSALAGAGRFCILGSEAATRKHLPARNHCGLSDSSPQLWPEPDFRNPPRKASKASLDFKRYVTDRRLAETLAQIYLGKPSRPPHLLLECNPGPGILTQALLEAGAKVVALESDKTFIPHLESLGKNLDGKLRVIHCDFFKLDPRSGGVIKPPAMSSRGLFKNLGIEAVPWTADIPLKVVGMFPSRGEKRALWKLAYDLYSCTSIYKFGRIEVNMFIGEKEFQKLMADPGNPDLYHVLSVIWQLACEIKVLHMEPWSSFDIYTRKGPLENPKRRELLDQLQQKLYLIQMIPRQNLFTKNLTPMNYNIFFHLLKHCFGRRSATVIDHLRSLTPLDARDILMQIGKQEDEKVVNMHPQDFKTLFETIERSKDCAYKWLYDETLEDR

SEQ ID NO: 89858 - protein, 575 aa, Homo sapiens
  Payload ID: 17981
  Gene Name: transcription factor binding to IGHM enhancer 3
  Uniprot ID: P19532
  ENSP ID: ENSP00000314129
MSHAAEPARDGVEASAEGPRAVFVLLEERRPADSAQLLSLNSLLPESGIVADIELENVLDPDSFYELKSQPLPLRSSLPISLQATPATPATLSASSSAGGSRTPAMSSSSSSRVLLRQQLMRAQAQEQERRERREQAAAAPFPSPAPASPAISVVGVSAGGHTLSRPPPAQVPREVLKVQTHLENPTRYHLQQARRQQVKQYLSTTLGPKLASQALTPPPGPASAQPLPAPEAAHTTGPTGSAPNSPMALLTIGSSSEKEIDDVIDEIISLESSYNDEMLSYLPGGTTGLQLPSTLPVSGNLLDVYSSQGVATPAITVSNSCPAELPNIKREISETEAKALLKERQKKDNHNLIERRRRFNINDRIKELGTLIPKSSDPEMRWNKGTILKASVDYIRKLQKEQQRSKDLESRQRSLEQANRSLQLRIQELELQAQIHGLPVPPTPGLLSLATTSASDSLKPEQLDIEEEGRPGAATFHVGGGPAQNAPHQQPPAPPSDALLDLHFPSDHLGDLGDPFHLGLEDILMEEEEGVVGGLSGGALSPLRAASDPLLSSVSPAVSKASSRRSSFSMEEES

SEQ ID NO: 89859 - protein, 109 aa, Homo sapiens
  Payload ID: 17981
  Gene Name: transcription factor binding to IGHM enhancer 3
  Uniprot ID: P19532
  ENSP ID: ENSP00000476976
MSHAAEPARDGVEASAEGPRAVFVLLEERRPADSAQLLSLNSLLPESGIVADIELENVLDPDSFYELKSQPLPLRSRGLQDPCHVVIFFIEGLAAAAANAGPGAGAGEA

SEQ ID NO: 89860 - protein, 502 aa, Homo sapiens
  Payload ID: 17982
  Gene Name: transcription factor CP2
  Uniprot ID: Q12800
  ENSP ID: ENSP00000257915
MAWALKLPLADEVIESGLVQDFDASLSGIGQELGAGAYSMSDVLALPIFKQEESSLPPDNENKILPFQYVLCAATSPAVKLHDETLTYLNQGQSYEIRMLDNRKLGELPEINGKLVKSIFRVVFHDRRLQYTEHQQLEGWRWNRPGDRILDIDIPMSVGIIDPRANPTQLNTVEFLWDPAKRTSVFIQVHCISTEFTMRKHGGEKGVPFRVQIDTFKENENGEYTEHLHSASCQIKVFKPKGADRKQKTDREKMEKRTPHEKEKYQPSYETTILTECSPWPEITYVNNSPSPGFNSSHSSFSLGEGNGSPNHQPEPPPPVTDNLLPTTTPQEAQQWLHRNRFSTFTRLFTNFSGADLLKLTRDDVIQICGPADGIRLFNALKGRMVRPRLTIYVCQESLQLREQQQQQQQQQQKHEDGDSNGTFFVYHAIYLEELTAVELTEKIAQLFSISPCQISQIYKQGPTGIHVLISDEMIQNFQEEACFILDTMKAETNDSYHIILK

SEQ ID NO: 89861 - protein, 450 aa, Homo sapiens
  Payload ID: 17982
  Gene Name: transcription factor CP2
  Uniprot ID: Q12800
  ENSP ID: ENSP00000447991
MAWALKLPLADEVIESGLVQDFDASLSGIGQELGAGAYSMSDVLALPIFKQEESSLPPDNENKILPFQYVLCAATSPAVKLHDETLTYLNQGQSYEIRMLDNRKLGELPEINGKLVKSIFRVVFHDRRLQYTEHQQLEGWRWNRPGDRILDIDIPMSVGIIDPRANPTQLNTVEFLWDPAKRTSVFIQPKGADRKQKTDREKMEKRTPHEKEKYQPSYETTILTECSPWPEITYVNNSPSPGFNSSHSSFSLGEGNGSPNHQPEPPPPVTDNLLPTTTPQEAQQWLHRNRFSTFTRLFTNFSGADLLKLTRDDVIQICGPADGIRLFNALKGRMVRPRLTIYVCQESLQLREQQQQQQQQQQKHEDGDSNGTFFVYHAIYLEELTAVELTEKIAQLFSISPCQISQIYKQGPTGIHVLISDEMIQNFQEEACFILDTMKETNDSYHIILK

SEQ ID NO: 89862 - protein, 381 aa, Homo sapiens
  Payload ID: 17982
  Gene Name: transcription factor CP2
  ENSP ID: ENSP00000449280
MLDNRKLGELPEINGKLVKSIFRVVFHDRRLQYTEHQQLEGWRWNRPGDRILDIDIPMSVGIIDPRANPTQLNTVEFLWDPAKRTSVFIQVHCISTEFTMRKHGGEKGVPFRVQIDTFKENENGEYTEHLHSASCQIKVFKPKGADRKQKTDREKMEKRTPHEKEKYQPSYETTILTECSPWPEITYVNNSPSPGFNSSHSSFSLGEGNGSPNHQPEPPPPVTDNLLPTTTPQEAQQWLHRNRFSTFTRLFTNFSGADLLKLTRDDVIQICGPADGIRLFNALKGRMVRPRLTIYVCQESLQLREQQQQQQQQQQKHEDGDSNGTFFVYHAIYLEELTAVELTEKIAQLFSISPCQISQIYKQGPTGIHVLISDEMIQNFQ

SEQ ID NO: 89863 - protein, 424 aa, Homo sapiens
  Payload ID: 17982
  Gene Name: transcription factor CP2
  ENSP ID: ENSP00000449742
MAWALKLPLADEVIESGLVQDFDASLSGIGQELGAGAYSMSDVLALPIFKQEESSLPPDNENKILPFQYVLCAATSPAVKLHDETLTYLNQGQSYEIRMLDNRKLGELPEINGKLVKSIFRVVFHDRRLQYTEHQQLEGWRWNRPGDRILDIDIPMSVGIIDPRANPTQLNTVEFLWDPAKRTSVFIQVHCISTEFTMRKHGGEKGVPFRVQIDTFKENENGEYTEHLHSASCQIKVFKPKGADRKQKTDREKMEKRTPHEKEKYQPSYETTILTECSPWPEITYVNNSPSPGFNSSHSSFSLGEGMVRPRLTIYVCQESLQLREQQQQQQQQQQKHEDGDSNGTFFVYHAIYLEELTAVELTEKIAQLFSISPCQISQIYKQGPTGIHVLISDEMIQNFQEEACFILDTMKAETNDSYHIILK

SEQ ID NO: 89864 - protein, 479 aa, Homo sapiens
  Payload ID: 17983
  Gene Name: transcription factor CP2-like 1
  Uniprot ID: Q9NZI6
  ENSP ID: ENSP00000263707
MLFWHTQPEHYNQHNSGSYLRDVLALPIFKQEEPQLSPENEARLPPLQYVLCAATSPAVKLHEETLTYLNQGQSYEIRLLENRKLGDFQDLNTKYVKSIIRVVFHDRRLQYTEHQQLEGWRWSRPGDRILDIDIPLSVGILDPRASPTQLNAVEFLWDPAKRASAFIQVHCISTEFTPRKHGGEKGVPFRVQIDTFKQNENGEYTEHLHSASCQIKVFKPKGADRKQKTDREKMEKRTAQEKEKYQPSYETTILTECSPWPDVAYQVNSAPSPSYNGSPNSFGLGEGNASPTHPVEALPVGSDHLLPSASIQDAQQWLHRNRFSQFCRLFASFSGADLLKMSRDDLVQICGPADGIRLFNAIKGRNVRPKMTIYVCQELEQNRVPLQQKRDGSGDSNLSVYHAIFLEELTTLELIEKIANLYSISPQHIHRVYRQGPTGIHVVVSNEMVQNFQDESCFVLSTIKAESNDGYHIILKCGL

SEQ ID NO: 89865 - protein, 405 aa, Homo sapiens
  Payload ID: 17984
  Gene Name: transcription factor Dp family, member 3
  Uniprot ID: Q5H9I0
  ENSP ID: ENSP00000385461
MAKYVSLTEANEELKVLMDENQTSRPVAVHTSTVNPLGKQLLPKTFGQSSVNIDQQVVIGMPQRPAASNIPVVGSPNPPSTHFASQNQHSYSSPPWAGQHNRKGEKNGMGLCRLSMKVWETVQRKGTTSCQEVVGELVAKFRAASNHASPNESAYDVKNIKRRTYDALNVLMAMNIISREKKKIKWIGLTTNSAQNCQNLRVERQKRLERIKQKQSELQQLILQQIAFKNLVLRNQYVEEQVSQRPLPNSVIHVPFIIISSSKKTVINCSISDDKSEYLFKFNSSFEIHDDTEVLMWMGMTFGLESGSCSAEDLKMARNLVPKALEPYVTEMAQGTFGGVFTTAGSRSNGTWLSASDLTNIAIGMLATSSGGSQYSGSRVETPAVEEEEEEDNNDDDLSENDEDD

SEQ ID NO: 89866 - protein, 410 aa, Homo sapiens
  Payload ID: 17985
  Gene Name: transcription factor Dp-1
  Uniprot ID: Q14186
  ENSP ID: ENSP00000364519
MAKDAGLIEANGELKVFIDQNLSPGKGVVSLVAVHPSTVNPLGKQLLPKTFGQSNVNIAQQVVIGTPQRPAASNTLVVGSPHTPSTHFASQNQPSDSSPWSAGKRNRKGEKNGKGLRHFSMKVCEKVQRKGTTSYNEVADELVAEFSAADNHILPNESAYDQKNIRRRVYDALNVLMAMNIISKEKKEIKWIGLPTNSAQECQNLEVERQRRLERIKQKQSQLQELILQQIAFKNLVQRNRHAEQQASRPPPPNSVIHLPFIIVNTSKKTVIDCSISNDKFEYLFNFDNTFEIHDDIEVLKRMGMACGLESGSCSAEDLKMARSLVPKALEPYVTEMAQGTVGGVFITTAGSTSNGTRFSASDLTNGADGMLATSSNGSQYSGSRVETPVSYVGEDDEEDDDFNENDEDD

SEQ ID NO: 89867 - protein, 235 aa, Homo sapiens
  Payload ID: 17985
  Gene Name: transcription factor Dp-1
  ENSP ID: ENSP00000386145
MAKDAGLIEANGELKVFIDQNLSPGKGVVSLVAVHPSTVNPLGKQLLPKTFGQSNVNIAQQVVIGTPQRPAASNTLVVGSPHTPSTHFASQNQPSDSSPWSAGKRNRKGEKNGKGLRHFSMKVCEKVQRKGTTSYNEVADELVAEFSAADNHILPNESAYDQKNIRRRVYDALNVLMAMNIISKEKKEIKWIGLPTNSAQECQNLEVERQRRLERIKQKQSQLQELILQQIAFKN

SEQ ID NO: 89868 - protein, 158 aa, Homo sapiens
  Payload ID: 17985
  Gene Name: transcription factor Dp-1
  ENSP ID: ENSP00000401389
MAKDAGLIEANGELKVFIDQNLSPGKGVVSLVAVHPSTVNPLGKQLLPKTFGQSNVNIAQQVVIGTPQRPAASNTLVVGSPHTPSTHFASQNQPSDSSPWSAGKRNRKGEKNGKGLRHFSMKVCEKVQRKGTTSYNEVADELVAEFSAADNHILPNES

SEQ ID NO: 89869 - protein, 119 aa, Homo sapiens
  Payload ID: 17985
  Gene Name: transcription factor Dp-1
  ENSP ID: ENSP00000438450
MAKDAGLIEANGELKVFIDQNLSPGKGVVSLVAVHPSTVNPLGKQLLPKTFGQSNVNIAQQVEAQQERREEWQGPTAFLHEGLREGAEERDHFLQRSGRRAGCGVQCCRQPHLTKRVSL

SEQ ID NO: 89870 - protein, 46 aa, Homo sapiens
  Payload ID: 17986
  Gene Name: transcription factor Dp-2 (E2F dimerization partner 2)
  ENSP ID: ENSP00000417108
MIISTPQRLTSSGSVLIGSPYTPAPAMVTQTHIAEATGWVPGDRKR

SEQ ID NO: 89871 - protein, 220 aa, Homo sapiens
  Payload ID: 17986
  Gene Name: transcription factor Dp-2 (E2F dimerization partner 2)
  ENSP ID: ENSP00000417220
MIISTPQRLTSSGSVLIGSPYTPAPAMVTQTHIAEATGWVPGDRKRARKFIDSDFSESKRSKKGDKNGKGLRHFSMKVCEKVQRKGTTSYNEVADELVSEFTNSNNHLAADSAYDQKNIRRRVYDALNVLMAMNIISKEKKEIKWIGLPTNSAQECQNLEIEKQRRIERIKQKRAQLQELLLQQIAFKNLVQRNRQNEQQNQGPPALNSTIQLPFIIINT

SEQ ID NO: 89872 - protein, 70 aa, Homo sapiens
  Payload ID: 17986
  Gene Name: transcription factor Dp-2 (E2F dimerization partner 2)
  ENSP ID: ENSP00000417384
MTAKNVGLTSTNAEVRGFIDQNLSPTKGNISFVAFPVSNTNSPTKILPKTLGPINVNVGPQMDATRRHHL

SEQ ID NO: 89873 - protein, 385 aa, Homo sapiens
  Payload ID: 17986
  Gene Name: transcription factor Dp-2 (E2F dimerization partner 2)
  Uniprot ID: Q14188
  ENSP ID: ENSP00000417585
MIISTPQRLTSSGSVLIGSPYTPAPAMVTQTHIAEATGWVPGDRKRARKFIDSDFSESKRSKKGDKNGKGLRHFSMKVCEKVQRKGTTSYNEVADELVSEFTNSNNHLAADSAYDQKNIRRRVYDALNVLMAMNIISKEKKEIKWIGLPTNSAQECQNLEIEKQRRIERIKQKRAQLQELLLQQIAFKNLVQRNRQNEQQNQGPPALNSTIQLPFIIINTSRKTVIDCSISSDKFEYLFNFDNTFEIHDDIEVLKRMGMSFGLESGKCSLEDLKLAKSLVPKALEGYITDISTGPSWLNQGLLLNSTQSVSNLDLTTGATLPQSSVNQGLCLDAEVALATGQFLAPNSHQSSSAASHCSESRGETPCSFNDEDEEDDEEDSSSPE

SEQ ID NO: 89874 - protein, 248 aa, Homo sapiens
  Payload ID: 17986
  Gene Name: transcription factor Dp-2 (E2F dimerization partner 2)
  ENSP ID: ENSP00000417726
MIISTPQRLTSSGSVLIGSPYTPAPAMVTQTHIAEATGWVPGDRKRARKFIDSDFSESKRSKKGDKNGKGLRHFSMKVCEKVQRKGTTSYNEVADELVSEFTNSNNHLAADSQAYDQKNIRRRVYDALNVLMAMNIISKEKKEIKWIGLPTNSAQECQNLEIEKQRRIERIKQKRAQLQELLLQQIAFKNLVQRNRQNEQQNQGPPALNSTIQLPFIIINTSRKTVIDCSISSDKFEYLFNFDNTFEI

SEQ ID NO: 89875 - protein, 206 aa, Homo sapiens
  Payload ID: 17986
  Gene Name: transcription factor Dp-2 (E2F dimerization partner 2)
  ENSP ID: ENSP00000418122
MVTQTHIAEATGWVPGDRKRARKFIDSDFSESKRSKKGDKNGKGLRHFSMKVCEKVQRKGTTSYNEVADELVSEFTNSNNHLAADSQAYDQKNIRRRVYDALNVLMAMNIISKEKKEIKWIGLPTNSAQECQNLEIEKQRRIERIKQKRAQLQELLLQQIAFKNLVQRNRQNEQQNQGPPALNSTIQLPFIIINTSRKTVIDCSIS

SEQ ID NO: 89876 - protein, 386 aa, Homo sapiens
  Payload ID: 17986
  Gene Name: transcription factor Dp-2 (E2F dimerization partner 2)
  Uniprot ID: Q14188
  ENSP ID: ENSP00000418590
MIISTPQRLTSSGSVLIGSPYTPAPAMVTQTHIAEATGWVPGDRKRARKFIDSDFSESKRSKKGDKNGKGLRHFSMKVCEKVQRKGTTSYNEVADELVSEFTNSNNHLAADSQAYDQKNIRRRVYDALNVLMAMNIISKEKKEIKWIGLPTNSAQECQNLEIEKQRRIERIKQKRAQLQELLLQQIAFKNLVQRNRQNEQQNQGPPALNSTIQLPFIIINTSRKTVIDCSISSDKFEYLFNFDNTFEIHDDIEVLKRMGMSFGLESGKCSLEDLKLAKSLVPKALEGYITDISTGPSWLNQGLLLNSTQSVSNLDLTTGATLPQSSVNQGLCLDAEVALATGQFLAPNSHQSSSAASHCSESRGETPCSFNDEDEEDDEEDSSSPE

SEQ ID NO: 89877 - protein, 310 aa, Homo sapiens
  Payload ID: 17986
  Gene Name: transcription factor Dp-2 (E2F dimerization partner 2)
  Uniprot ID: Q14188
  ENSP ID: ENSP00000418971
MKVCEKVQRKGTTSYNEVADELVSEFTNSNNHLAADSAYDQKNIRRRVYDALNVLMAMNIISKEKKEIKWIGLPTNSAQECQNLEIEKQRRIERIKQKRAQLQELLLQQIAFKNLVQRNRQNEQQNQGPPALNSTIQLPFIIINTSRKTVIDCSISSDKFEYLFNFDNTFEIHDDIEVLKRMGMSFGLESGKCSLEDLKLAKSLVPKALEGYITDISTGPSWLNQGLLLNSTQSVSNLDLTTGATLPQSSVNQGLCLDAEVALATGQFLAPNSHQSSSAASHCSESRGETPCSFNDEDEEDDEEDSSSPE

SEQ ID NO: 89878 - protein, 349 aa, Homo sapiens
  Payload ID: 17986
  Gene Name: transcription factor Dp-2 (E2F dimerization partner 2)
  Uniprot ID: Q14188
  ENSP ID: ENSP00000419036
MLDPKCDRKRARKFIDSDFSESKRSKKGDKNGKGLRHFSMKVCEKVQRKGTTSYNEVADELVSEFTNSNNHLAADSAYDQKNIRRRVYDALNVLMAMNIISKEKKEIKWIGLPTNSAQECQNLEIEKQRRIERIKQKRAQLQELLLQQIAFKNLVQRNRQNEQQNQGPPALNSTIQLPFIIINTSRKTVIDCSISSDKFEYLFNFDNTFEIHDDIEVLKRMGMSFGLESGKCSLEDLKLAKSLVPKALEGYITDISTGPSWLNQGLLLNSTQSVSNLDLTTGATLPQSSVNQGLCLDAEVALATGQFLAPNSHQSSSAASHCSESRGETPCSFNDEDEEDDEEDSSSPE

SEQ ID NO: 89879 - protein, 114 aa, Homo sapiens
  Payload ID: 17986
  Gene Name: transcription factor Dp-2 (E2F dimerization partner 2)
  ENSP ID: ENSP00000419507
  MOD_RES (1)..(1): Any amino acid
XDCSISSDKFEYLFNFDNTFEIHDDIEVLKRMGMSFGLESGKCSLEDLKLAKSLVPKALEGYITDISTGPSWLNQGLLLNSTQSVSNLDLTTGATLPQSRYVFFSGLERQTPEP

SEQ ID NO: 89880 - protein, 85 aa, Homo sapiens
  Payload ID: 17986
  Gene Name: transcription factor Dp-2 (E2F dimerization partner 2)
  ENSP ID: ENSP00000419540
MTAKNVGLTSTNAEVRGFIDQNLSPTKGNISFVAFPVSNTNSPTKILPKTLGPINVNVGPQMIISTPQRLTSSGSVLIGSPYTPA

SEQ ID NO: 89881 - protein, 89 aa, Homo sapiens
  Payload ID: 17986
  Gene Name: transcription factor Dp-2 (E2F dimerization partner 2)
  ENSP ID: ENSP00000420456
MIISTPQRLTSSGSVLIGSPYTPAPAMVTQTHIAEATGWVPGDRKRARKFIDSDFSESKRSKKGDKNGKGLRHFSMKVCEKVQRKGTTS

SEQ ID NO: 89882 - protein, 386 aa, Homo sapiens; identical to SEQ ID NO: 89876
  Payload ID: 17986
  Gene Name: transcription factor Dp-2 (E2F dimerization partner 2)
  Uniprot ID: Q14188
  ENSP ID: ENSP00000420599

SEQ ID NO: 89883 - protein, 446 aa, Homo sapiens
  Payload ID: 17986
  Gene Name: transcription factor Dp-2 (E2F dimerization partner 2)
  Uniprot ID: Q14188
  ENSP ID: ENSP00000420616
MTAKNVGLTSTNAEVRGFIDQNLSPTKGNISFVAFPVSNTNSPTKILPKTLGPINVNVGPQMIISTPQRLTSSGSVLIGSPYTPAPAMVTQTHIAEATGWVPGDRKRARKFIDSDFSESKRSKKGDKNGKGLRHFSMKVCEKVQRKGTTSYNEVADELVSEFTNSNNHLAADSAYDQKNIRRRVYDALNVLMAMNIISKEKKEIKWIGLPTNSAQECQNLEIEKQRRIERIKQKRAQLQELLLQQIAFKNLVQRNRQNEQQNQGPPALNSTIQLPFIIINTSRKTVIDCSISSDKFEYLFNFDNTFEIHDDIEVLKRMGMSFGLESGKCSLEDLKLAKSLVPKALEGYITDISTGPSWLNQGLLLNSTQSVSNLDLTTGATLPQSSVNQGLCLDAEVALATGQFLAPNSHQSSSAASHCSESRGETPCSFNDEDEEDDEEDSSSPE

SEQ ID NO: 89884 - protein, 27 aa, Homo sapiens
  Payload ID: 17986
  Gene Name: transcription factor Dp-2 (E2F dimerization partner 2)
  ENSP ID: ENSP00000420657
MIISTPQRLTSSGSVLIGSPYTPAPAM

SEQ ID NO: 89885 - protein, 418 aa, Homo sapiens
  Payload ID: 17986
  Gene Name: transcription factor Dp-2 (E2F dimerization partner 2)
  Uniprot ID: Q14188
  ENSP ID: ENSP00000439782
MQPEGIIFEAENKPSPGTESAGTFILDLSATSRTIISTPQRLTSSGSVLIGSPYTPAPAMVTQTHIAEATGWVPGDRKRARKFIDSDFSESKRSKKGDKNGKGLRHFSMKVCEKVQRKGTTSYNEVADELVSEFTNSNNHLAADSAYDQKNIRRRVYDALNVLMAMNIISKEKKEIKWIGLPTNSAQECQNLEIEKQRRIERIKQKRAQLQELLLQQIAFKNLVQRNRQNEQQNQGPPALNSTIQLPFIIINTSRKTVIDCSISSDKFEYLFNFDNTFEIHDDIEVLKRMGMSFGLESGKCSLEDLKLAKSLVPKALEGYITDISTGPSWLNQGLLLNSTQSVSNLDLTTGATLPQSSVNQGLCLDAEVALATGQFLAPNSHQSSSAASHCSESRGETPCSFNDEDEEDDEEDSSSPE

SEQ ID NO: 89886 - protein, 67 aa, Homo sapiens
  Payload ID: 17986
  Gene Name: transcription factor Dp-2 (E2F dimerization partner 2)
  ENSP ID: ENSP00000473436
  MOD_RES (1)..(1): Any amino acid
XDRKRARKFIDSDFSERAETWRTDPRETTACFSWFKNFSMPQNRFSSYWHLYLWEERETRLAACLSA

SEQ ID NO: 89887 - protein, 476 aa, Homo sapiens
  Payload ID: 17987
  Gene Name: transcription factor EB
  Uniprot ID: P19484
  ENSP ID: ENSP00000230323
MASRIGLRMQLMREQAQQEEQRERMQQQAVMHYMQQQQQQQQQQLGGPPTPAINTPVHFQSPPPVPGEVLKVQSYLENPTSYHLQQSQHQKVREYLSETYGNKFAAHISPAQGSPKPPPAASPGVRAGHVLSSSAGNSAPNSPMAMLHIGSNPERELDDVIDNIMRLDDVLGYINPEMQMPNTLPLSSSHLNVYSSDPQVTASLVGVTSSSCPADLTQKRELTDAESRALAKERQKKDNHNLIERRRRFNINDRIKELGMLIPKANDLDVRWNKGTILKASVDYIRRMQKDLQKSRELENHSRRLEMTNKQLWLRIQELEMQARVHGLPTTSPSGMNMAELAQQVVKQELPSEEGPGEALMLGAEVPDPEPLPALPPQAPLPLPTQPPSPFHHLDFSHSLSFGGREDEGPPGYPEPLAPGHGSPFPSLSKKDLDLMLLDDSLLPLASDPLLSTMSPEASKASSRRSSFSMEEGDVL

SEQ ID NO: 89888 - protein, 562 aa, Homo sapiens
  Payload ID: 17987
  Gene Name: transcription factor EB
  ENSP ID: ENSP00000343948
MSEEDRTFSFGPGTRKLGFMSQLSPACSVTLGKSLPLSGLGVFSSKMDAVPVILASPCQPLCFEEDTCLIYLLPLLIHREPAPAATMASRIGLRMQLMREQAQQEEQRERMQQQAVMHYMQQQQQQQQQQLGGPPTPAINTPVHFQSPPPVPGEVLKVQSYLENPTSYHLQQSQHQKVREYLSETYGNKFAAHISPAQGSPKPPPAASPGVRAGHVLSSSAGNSAPNSPMAMLHIGSNPERELDDVIDNIMRLDDVLGYINPEMQMPNTLPLSSSHLNVYSSDPQVTASLVGVTSSSCPADLTQKRELTDAESRALAKERQKKDNHNLIERRRRFNINDRIKELGMLIPKANDLDVRWNKGTILKASVDYIRRMQKDLQKSRELENHSRRLEMTNKQLWLRIQELEMQARVHGLPTTSPSGMNMAELAQQVVKQELPSEEGPGEALMLGAEVPDPEPLPALPPQAPLPLPTQPPSPFHHLDFSHSLSFGGREDEGPPGYPEPLAPGHGSPFPSLSKKDLDLMLLDDSLLPLASDPLLSTMSPEASKASSRRSSFSMEEGDVL

SEQ ID NO: 89889 - protein, 490 aa, Homo sapiens
  Payload ID: 17987
  Gene Name: transcription factor EB
  ENSP ID: ENSP00000351742
MTASSGWEPAPAATMASRIGLRMQLMREQAQQEEQRERMQQQAVMHYMQQQQQQQQQQLGGPPTPAINTPVHFQSPPPVPGEVLKVQSYLENPTSYHLQQSQHQKVREYLSETYGNKFAAHISPAQGSPKPPPAASPGVRAGHVLSSSAGNSAPNSPMAMLHIGSNPERELDDVIDNIMRLDDVLGYINPEMQMPNTLPLSSSHLNVYSSDPQVTASLVGVTSSSCPADLTQKRELTDAESRALAKERQKKDNHNLIERRRRFNINDRIKELGMLIPKANDLDVRWNKGTILKASVDYIRRMQKDLQKSRELENHSRRLEMTNKQLWLRIQELEMQARVHGLPTTSPSGMNMAELAQQVVKQELPSEEGPGEALMLGAEVPDPEPLPALPPQAPLPLPTQPPSPFHHLDFSHSLSFGGREDEGPPGYPEPLAPGHGSPFPSLSKKDLDLMLLDDSLLPLASDPLLSTMSPEASKASSRRSSFSMEEGDVL

SEQ ID NO: 89890 - protein, 476 aa, Homo sapiens; identical to SEQ ID NO: 89887
  Payload ID: 17987
  Gene Name: transcription factor EB
  Uniprot ID: P19484
  ENSP ID: ENSP00000362124

SEQ ID NO: 89891 - protein, 268 aa, Homo sapiens
  Payload ID: 17987
  Gene Name: transcription factor EB
  ENSP ID: ENSP00000377824
MASRIGLRMQLMREQAQQEEQRERMQQQAVMHYMQQQQQQQQQQLGGPPTPAINTPVHFQSPPPVPGEVLKVQSYLENPTSYHLQQSQHQKVREYLSETYGNKFAAHISPAQGSPKPPPAASPGVRAGHVLSSSAGNSAPNSPMAMLHIGSNPERELDDVIDNIMRLDDVLGYINPEMQMPNTLPLSSSHLNVYSSDPQVTASLVGVTSSSCPADLTQKRELTDAESRALAKERQKKDNHNLIERRRRFNINDRIKELGMLIPKANDL

SEQ ID NO: 89892 - protein, 334 aa, Homo sapiens
  Payload ID: 17987
  Gene Name: transcription factor EB
  ENSP ID: ENSP00000383998
HFQSPPPVPGEVLKLDDVIDNIMRLDDVLGYINPEMQMPNTLPLSSSHLNVYSSDPQVTASLVGVTSSSCPADLTQKRELTDAESRALAKERQKKDNHNLIERRRRFNINDRIKELGMLIPKANDLDVRWNKGTILKASVDYIRRMQKDLQKSRELENHSRRLEMTNKQLWLRIQELEMQARVHGLPTTSPSGMNMAELAQQVVKQELPSEEGPGEALMLGAEVPDPEPLPALPPQAPLPLPTQPPSPFHHLDFSHSLSFGGREDEGPPGYPEPLAPGHGSPFPSLSKKDLDLMLLDDSLLPLASDPLLSTMSPEASKASSRRSSFSMEEGDVL

SEQ ID NO: 89893 - protein, 476 aa, Homo sapiens; identical to SEQ ID NO: 89887
  Payload ID: 17987
  Gene Name: transcription factor EB
  Uniprot ID: P19484
  ENSP ID: ENSP00000384203

SEQ ID NO: 89894 - protein, 71 aa, Homo sapiens
  Payload ID: 17987
  Gene Name: transcription factor EB
  ENSP ID: ENSP00000393874
MASRIGLRMQLMREQAQQEEQRERMQQQAVMHYMQQQQQQQQQQLGGPPTPAINTPVHFQSPPPVPGEVLK

SEQ ID NO: 89895 - protein, 12 aa, Homo sapiens
  Payload ID: 17987
  Gene Name: transcription factor EB
  ENSP ID: ENSP00000395208
MASRIGLRMQLM

SEQ ID NO: 89896 - protein, 79 aa, Homo sapiens
  Payload ID: 17987
  Gene Name: transcription factor EB
  ENSP ID: ENSP00000396168
MASRIGLRMQLMREQAQQEEQRERMQQQAVMHYMQQQQQQQQQQLGGPPTPAINTPVHFQSPPPVPGEVLKVQSYLENP

SEQ ID NO: 89897 - protein, 222 aa, Homo sapiens
  Payload ID: 17987
  Gene Name: transcription factor EB
  ENSP ID: ENSP00000400276
MASRIGLRMQLMREQAQQEEQRERMQQQAVMHYMQQQQQQQQQQLGGPPTPAINTPVHFQSPPPVPGEVLKVQSYLENPTSYHLQQSQHQKVREYLSETYGNKFAAHISPAQGSPKPPPAASPGVRAGHVLSSSAGNSAPNSPMAMLHIGSNPERELDDVIDNIMRLDDVLGYINPEMQMPNTLPLSSSHLNVYSSDPQVTASLVGVTSSSCPADLTQKREL

SEQ ID NO: 89898 - protein, 244 aa, Homo sapiens
  Payload ID: 17987
  Gene Name: transcription factor EB
  ENSP ID: ENSP00000406491
MASRIGLRMQLMREQAQQEEQRERMQQQAVMHYMQQQQQQQQQQLGGPPTPAINTPVHFQSPPPVPGEVLKVQSYLENPTSYHLQQSQHQKVREYLSETYGNKFAAHISPAQGSPKPPPAASPGVRAGHVLSSSAGNSAPNSPMAMLHIGSNPERELDDVIDNIMRLDDVLGYINPEMQMPNTLPLSSSHLNVYSSDPQVTASLVGVTSSSCPADLTQKRELTDAESRALAKERQKKDNHNLIE

SEQ ID NO: 89899 - protein, 267 aa, Homo sapiens
  Payload ID: 17987
  Gene Name: transcription factor EB
  ENSP ID: ENSP00000410391
MASRIGLRMQLMREQAQQEEQRERMQQQAVMHYMQQQQQQQQQQLGGPPTPAINTPVHFQSPPPVPGEVLKVQSYLENPTSYHLQQSQHQKVREYLSETYGNKFAAHISPAQGSPKPPPAASPGVRAGHVLSSSAGNSAPNSPMAMLHIGSNPERELDDVIDNIMRLDDVLGYINPEMQMPNTLPLSSSHLNVYSSDPQVTASLVGVTSSSCPADLTQKRELTDAESRALAKERQKKDNHNLIERRRRFNINDRIKELGMLIPKAND

SEQ ID NO: 89900 - protein, 391 aa, Homo sapiens
  Payload ID: 17987
  Gene Name: transcription factor EB
  Uniprot ID: P19484
  ENSP ID: ENSP00000412551
MASRIGLRMQLMREQAQQEEQRERMQQQAVMHYMQQQQQQQQQQLGGPPTPAINTPVHFQSPPPVPGEVLKLDDVIDNIMRLDDVLGYINPEMQMPNTLPLSSSHLNVYSSDPQVTASLVGVTSSSCPADLTQKRELTDAESRALAKERQKKDNHNLIERRRRFNINDRIKELGMLIPKANDLDVRWNKGTILKASVDYIRRMQKDLQKSRELENHSRRLEMTNKQLWLRIQELEMQARVHGLPTTSPSGMNMAELAQQVVKQELPSEEGPGEALMLGAEVPDPEPLPALPPQAPLPLPTQPPSPFHHLDFSHSLSFGGREDEGPPGYPEPLAPGHGSPFPSLSKKDLDLMLLDDSLLPLASDPLLSTMSPEASKASSRRSSFSMEEGDVL

SEQ ID NO: 89901 - protein, 32 aa, Homo sapiens
  Payload ID: 17987
  Gene Name: transcription factor EB
  ENSP ID: ENSP00000415035
MASRIGLRMQLMREQAQQEEQRERMQQQAVMH

SEQ ID NO: 89902 - protein, 12 aa, Homo sapiens
  Payload ID: 17987
  Gene Name: transcription factor EB
  ENSP ID: ENSP00000415946
MASRIGLRMQLM

SEQ ID NO: 89903 - protein, 347 aa, Homo sapiens
  Payload ID: 17988
  Gene Name: transcription factor EC
  Uniprot ID: O14948
  ENSP ID: ENSP00000265440
MTLDHQIINPTLKWSQPAVPSGGPLVQHAHTTLDSDAGLTENPLTKLLAIGKEDDNAQWHMEDVIEDIIGMESSFKEEGADSPLLMQRTLSGSILDVYSGEQGISPINMGLTSASCPSSLPMKREITETDTRALAKERQKKDNHNLIERRRRYNINYRIKELGTLIPKSNDPDMRWNKGTILKASVEYIKWLQKEQQRARELEHRQKKLEQANRRLLLRIQELEIQARTHGLPTLASLGTVDLGAHVTKQQSHPEQNSVDYCQQLTVSQGPSPELCDQAIAFSDPLSYFTDLSFSAALKEEQRLDGMLLDDTISPFGTDPLLSATSPAVSKESSRRSSFSSDDGDEL

SEQ ID NO: 89904 - protein, 318 aa, Homo sapiens
  Payload ID: 17988
  Gene Name: transcription factor EC
  Uniprot ID: O14948
  ENSP ID: ENSP00000318676
MTLDHQIINPTLKWSQPAVPSGGPLVQHAHTTLDSDAGLTENPLTKLLAIGKEDDNAQWHLSGSILDVYSGEQGISPINMGLTSASCPSSLPMKREITETDTRALAKERQKKDNHNLIERRRRYNINYRIKELGTLIPKSNDPDMRWNKGTILKASVEYIKWLQKEQQRARELEHRQKKLEQANRRLLLRIQELEIQARTHGLPTLASLGTVDLGAHVTKQQSHPEQNSVDYCQQLTVSQGPSPELCDQAIAFSDPLSYFTDLSFSAALKEEQRLDGMLLDDTISPFGTDPLLSATSPAVSKESSRRSSFSSDDGDEL

SEQ ID NO: 89905 - protein, 197 aa, Homo sapiens
  Payload ID: 17988
  Gene Name: transcription factor EC
  Uniprot ID: O14948
  ENSP ID: ENSP00000377125
MTLDHQIINPTLKWSQPAVPSGGPLVQHAHTTLDSDAGLTENPLTKLLAIGKEDDNAQWHLSGSILDVYSGEQGISPINMGLTSASCPSSLPMKREITETDTRALAKERQKKDNHNLIERRRRYNINYRIKELGTLIPKSNDPDMRWNKGTILKASVEYIKWLQKEQQRARELEHRQKKLEQANRRLLLRIQVFIRM

SEQ ID NO: 89906 - protein, 280 aa, Homo sapiens
  Payload ID: 17988
  Gene Name: transcription factor EC
  Uniprot ID: O14948
  ENSP ID: ENSP00000387650
MMKEKEKTIAIVKVIDTSKLKLLSGSILDVYSGEQGISPINMGLTSASCPSSLPMKREITETDTRALAKERQKKDNHNLIERRRRYNINYRIKELGTLIPKSNDPDMRWNKGTILKASVEYIKWLQKEQQRARELEHRQKKLEQANRRLLLRIQELEIQARTHGLPTLASLGTVDLGAHVTKQQSHPEQNSVDYCQQLTVSQGPSPELCDQAIAFSDPLSYFTDLSFSAALKEEQRLDGMLLDDTISPFGTDPLLSATSPAVSKESSRRSSFSSDDGDEL

SEQ ID NO: 89907 - protein, 316 aa, Homo sapiens
  Payload ID: 17988
  Gene Name: transcription factor EC
  ENSP ID: ENSP00000417432
MLQALTGLQFQLKEQLGEKERRLQISQEISAHRTEFHMQFSYKPVLHRLVPARPQIYSSQLPSFTRVPAHLESSARPQLQKAQRQKVNSFMTLDHQIINPTLKWSQPAVPSGGPLVQHAHTTLDSDAGLTENPLTKLLAIGKEDDNAQWHMEDVIEDIIGMESSFKEEGADSPLLMQRTLSGSILDVYSGEQGISPINMGLTSASCPSSLPMKREITETDTRALAKERQKKDNHNLIERRRRYNINYRIKELGTLIPKSNDPDMRWNKGTILKASVEYIKWLQKEQQRARELEHRQKKLEQANRRLLLRIQVFIRM

SEQ ID NO: 89908 - protein, 483 aa, Homo sapiens
  Payload ID: 17989
  Gene Name: transcription factor-like 5 (basic helix-loop-helix)
  ENSP ID: ENSP00000217162
MTEVEYTQLQHILCSHMEAAADGELETRLNSALLAAAGPGAGAGGFAAGGQGGAAPVYPVLCPSALAADAPCLGHIDFQELRMMLLSEAGAAEKTSGGGDGARARADGAAKEGAGAAAAAAGPDGAPEARAKPAVRVRLEDRFNSIPAEPPPAPRGPEPPEPGGALNNLVTLIRHPSELMNVPLQQQNKCTALVKNKTAATTTALQFTYPLFTTNACSTSGNSNLSQTQSSSNSCSVLEAAKHQDIGLPRAFSFCYQQEIESTKQTLGSRNKVLPEQVWIKVGEAALCKQALKRNRSRMRQLDTNVERRALGEIQNVGEGATATQGAWQSSESSQANLGEQAQSGPQGGRSQRRERHNRMERDRRRRIRICCDELNLLVPFCNAETDKATTLQWTTAFLKYIQERHGDSLKKVLSTNSRYVMLWTCFLKMKSAVDGKNPQHAYRTANHKWLCLHEARSFAFEVSIWAHFQLFRVRIPEGFLSI

SEQ ID NO: 89909 - protein, 500 aa, Homo sapiens
  Payload ID: 17989
  Gene Name: transcription factor-like 5 (basic helix-loop-helix)
  Uniprot ID: Q9UL49
  ENSP ID: ENSP00000334294
MSGPGPREPPPEAGAAGGEAAVEGAGGGDAALGEPGLSFTTTDLSLVEMTEVEYTQLQHILCSHMEAAADGELETRLNSALLAAAGPGAGAGGFAAGGQGGAAPVYPVLCPSALAADAPCLGHIDFQELRMMLLSEAGAAEKTSGGGDGARARADGAAKEGAGAAAAAAGPDGAPEARAKPAVRVRLEDRFNSIPAEPPPAPRGPEPPEPGGALNNLVTLIRHPSELMNVPLQQQNKCTALVKNKTAATTTALQFTYPLFTTNACSTSGNSNLSQTQSSSNSCSVLEAAKHQDIGLPRAFSFCYQQEIESTKQTLGSRNKVLPEQVWIKVGEAALCKQALKRNRSRMRQLDTNVERRALGEIQNVGEGATATQGAWQSSESSQANLGEQAQSGPQGGRSQRRERHNRMERDRRRRIRICCDELNLLVPFCNAETDKATTLQWTTAFLKYIQERHGDSLKKEFESVFCGKTGRRLKLTRPDSLVTCPAQGSLQSSPSMEIK

SEQ ID NO: 89910 - protein, 905 aa, Homo sapiens
  Payload ID: 17990
  Gene Name: transcription termination factor, RNA polymerase I
  Uniprot ID: Q15361
  ENSP ID: ENSP00000333920
MEGESSRFEIHTPVSDKKKKKCSIHKERPQKHSHEIFRDSSLVNEQSQITRRKKRKKDFQHLISSPLKKSRICDETANATSTLKKRKKRRYSALEVDEEAGVTVVLVDKENINNTPKHFRKDVDVVCVDMSIEQKLPRKPKTDKFQVLAKSHAHKSEALHSKVREKKNKKHQRKAASWESQRARDTLPQSESHQEESWLSVGPGGEITELPASAHKNKSKKKKKKSSNREYETLAMPEGSQAGREAGTDMQESQPTVGLDDETPQLLGPTHKKKSKKKKKKKSNHQEFEALAMPEGSQVGSEVGADMQESRPAVGLHGETAGIPAPAYKNKSKKKKKKSNHQEFEAVAMPESLESAYPEGSQVGSEVGTVEGSTALKGFKESNSTKKKSKKRKLTSVKRARVSGDDFSVPSKNSESTLFDSVEGDGAMMEEGVKSRPRQKKTQACLASKHVQEAPRLEPANEEHNVETAEDSEIRYLSADSGDADDSDADLGSAVKQLQEFIPNIKDRATSTIKRMYRDDLERFKEFKAQGVAIKFGKFSVKENKQLEKNVEDFLALTGIESADKLLYTDRYPEEKSVITNLKRRYSFRLHIGRNIARPWKLIYYRAKKMFDVNNYKGRYSEGDTEKLKMYHSLLGNDWKTIGEMVARSSLSVALKFSQISSQRNRGAWSKSETRKLIKAVEEVILKKMSPQELKEVDSKLQENPESCLSIVREKLYKGISWVEVEAKVQTRNWMQCKSKWTEILTKRMTNGRRIYYGMNALRAKVSLIERLYEINVEDTNEIDWEDLASAIGDVPPSYVQTKFSRLKAVYVPFWQKKTFPEIIDYLYETTLPLLKEKLEKMMEKKGTKIQTPAAPKQVFPFRDIFYYEDDSEGEDIEKESEGQAPCMAHACNSSTLGGQGRWII

SEQ ID NO: 89911 - protein, 390 aa, Homo sapiens
  Payload ID: 17990
  Gene Name: transcription termination factor, RNA polymerase I
  ENSP ID: ENSP00000481441
MYRDDLERFKEFKAQGVAIKFGKFSVKENKQLEKNVEDFLALTGIESADKLLYTDRYPEEKSVITNLKRRYSFRLHIGRNIARPWKLIYYRAKKMFDVNNYKGRYSEGDTEKLKMYHSLLGNDWKTIGEMVARSSLSVALKFSQISSQRNRGAWSKSETRKLIKAVEEVILKKMSPQELKEVDSKLQENPESCLSIVREKLYKGISWVEVEAKVQTRNWMQCKSKWTEILTKRMTNGRRIYYGMNALRAKVSLIERLYEINVEDTNEIDWEDLASAIGDVPPSYVQTKFSRLKAVYVPFWQKKTFPEIIDYLYETTLPLLKEKLEKMMEKKGTKIQTPAAPKQVFPFRDIFYYEDDSEGEDIEKESEGQAPCMAHACNSSTLGGQGRWII

SEQ ID NO: 89912 - protein, 1162 aa, Homo sapiens
  Payload ID: 17991
  Gene Name: transcription termination factor, RNA polymerase II
  Uniprot ID: Q9UNY4
  ENSP ID: ENSP00000358478
MEEVRCPEHGTFCFLKTGVRDGPNKGKSFYVCRADTCSFVRATDIPVSHCLLHEDFVVELQGLLLPQDKKEYRLFFRCIRSKAEGKRWCGSIPWQDPDSKEHSVSNKSQHASETFHHSSNWLRNPFKVLDKNQEPALWKQLIKGEGEEKKADKKQREKGDQLFDQKKEQKPEMMEKDLSSGLVPKKKQSVVQEKKQEEGAEIQCEAETGGTHKRDFSEIKSQQCQGNELTRPSASSQEKSSGKSQDVQRESEPLREKVTQLLPQNVHSHNSISKPQKGGPLNKEYTNWEAKETKAKDGPSIQATQKSLPQGHFQERPETHSVPAPGGPAAQAAPAAPGLSLGEGREAATSSDDEEEDDVVFVSSKPGSPLLFDSTLDLETKENLQFPDRSVQRKVSPASGVSKKVEPSDPVARRVYLTTQLKQKKSTLASVNIQALPDKGQKLIKQIQELEEVLSGLTLSPEQGTNEKSNSQVPQQSHFTKTTTGPPHLVPPQPLPRRGTQPVGSLELKSACQVTAGGSSQCYRGHTNQDHVHAVWKITSEAIGQLHRSLESCPGETVVAEDPAGLKVPLLLHQKQALAWLLWRESQKPQGGILADDMGLGKTLTMIALILTQKNQEKKEEKEKSTALTWLSKDDSCDFTSHGTLIICPASLIHHWKNEVEKRVNSNKLRVYLYHGPNRDSRARVLSTYDIVITTYSLVAKEIPTNKQEAEIPGANLNVEGTSTPLLRIAWARIILDEAHNVKNPRVQTSIAVCKLQACARWAVTGTPIQNNLLDMYSLLKFLRCSPFDEFNLWRSQVDNGSKKGGERLSILTKSLLLRRTKDQLDSTGRPLVILPQRKFQLHHLKLSEDEETVYNVFFARSRSALQSYLKRHESRGNQSGRSPNNPFSRVALEFGSEEPRHSEAADSPRSSTVHILSQLLRLRQCCCHLSLLKSALDPMELKGEGLVLSLEEQLSALTLSELRDSEPSSTVSLNGTFFKMELFEGMRESTKISSLLAELEAIQRNSASQKSVIVSQWTNMLKVVALHLKKHGLTYATIDGSVNPKQRMDLVEAFNHSRGPQVMLISLLAGGVGLNLTGGNHLFLLDMHWNPSLEDQACDRIYRVGQQKDVVIHRFVCEGTVEEKILQLQEKKKDLAKQVLSGSGESVTKLTLADLRVLFGI

SEQ ID NO: 89913 - protein, 143 aa, Homo sapiens
  Payload ID: 17991
  Gene Name: transcription termination factor, RNA polymerase II
  ENSP ID: ENSP00000408111
NMLKVVALHLKKHGLTYATIDGSVNPKQRMDLVEAFNHSRGPQVMLISLLAGGVGLNLTGGNHLFLLDMHWNPSLEDQACDRIYRVGQQKDVVIHRFVCEGTVEEKILQLQEKKKDLAKQVLSGSGESVTKLTLADLRVLFGI

SEQ ID NO: 89914 - protein, 335 aa, Homo sapiens
  Payload ID: 17992
  Gene Name: transcriptional adaptor 1
  Uniprot ID: Q96BN2
  ENSP ID: ENSP00000356848
MATFVSELEAAKKNLSEALGDNVKQYWANLKLWFKQKISKEEFDLEAHRLLTQDNVHSHNDFLLAILTRCQILVSTPDGAGSLPWPGGSAAKPGKPKGKKKLSSVRQKFDHRFQPQNPLSGAQQFVAKDPQDDDDLKLCSHTMMLPTRGQLEGRMIVTAYEHGLDNVTEEAVSAVVYAVENHLKDILTSVVSRRKAYRLRDGHFKYAFGSNVTPQPYLKNSVVAYNNLIESPPAFTAPCAGQNPASHPPPDDAEQQAALLLACSGDTLPASLPPVNMYDLFEALQVHREVIPTHTVYALNIERIITKLWHPNHEELQQDKVHRQRLAAKEGLLLC

SEQ ID NO: 89915 - protein, 443 aa, Homo sapiens
  Payload ID: 17993
  Gene Name: transcriptional adaptor 2A
  ENSP ID: ENSP00000477709
MDRLGSFSNDPSDKPPCRGCSSYLMEPYIKCAECGPPPFFLCLQCFTRGFEYKKHQSDHTYEIMTSDFPVLDPSWTAQEEMALLEAVMDCGFGNWQDVANQMCTKTKEECEKHYMKHFINNPLFASTLLNLKQAEEAKTADTAIPFHSTDDPPRPTFDSLLSRDMAGYMPARADFIEEFDNYAEWDLRDIDFVEDDSDILHALKMAVVDIYHSRLKERQRRKKIIRDHGLINLRKFQLMERRYPKEVQDLYETMRRFARIVGPVEHDKFIESHALEFELRREIKRLQEYRTAGITNFCSARTYDHLKKTREEERLKRTMLSEVLQYIQDSSACQQWLRRQADIDSGLSPSIPMASNSGRRSAPPLNLTGLPGTEKLNEKEKELCQMVRLVPGAYLEYKSALLNECNKQGGLRLAQARALIKIDVNKTRKIYDFLIREGYITKG

SEQ ID NO: 89916 - protein, 194 aa, Homo sapiens
  Payload ID: 17993
  Gene Name: transcriptional adaptor 2A
  ENSP ID: ENSP00000478162
MALLEAVMDCGFGNWQDVANQMCTKTKEECEKHYMKHFINNPLFASTLLNLKQAEEAKTADTAIPFHSTDDPPRPTFDSLLSRDMAGYMPARADFIEEFDNYAEWDLRDIDFVEDDSDILHALKMAVVDIYHSRLKERQRRKKIIRDHGLINLRKFQLMERRYPKEVQDLYETMRRFARIVGPVEHDKFIESHA

SEQ ID NO: 89917 - protein, 443 aa, Homo sapiens; identical to SEQ ID NO: 89915
  Payload ID: 17993
  Gene Name: transcriptional adaptor 2A
  ENSP ID: ENSP00000478363

SEQ ID NO: 89918 - protein, 133 aa, Homo sapiens
  Payload ID: 17993
  Gene Name: transcriptional adaptor 2A
  ENSP ID: ENSP00000478418
MDRLGSFSNDPSDKPPCRGCSSYLMEPYIKCAECGPPPFFLCLQCFTRGFEYKKHQSDHTYEIMDVANQMCTKTKEECEKHYMKHFINNPLFASTLLNLKQAEEAKTADTAIPFHSTDDPPRPTFDSLLSRDM

SEQ ID NO: 89919 - protein, 305 aa, Homo sapiens
  Payload ID: 17993
  Gene Name: transcriptional adaptor 2A
  ENSP ID: ENSP00000480446
MDRLGSFSNDPSDKPPCRGCSSYLMEPYIKCAECGPPPFFLCLQCFTRGFEYKKHQSDHTYEIMTSDFPVLDPSWTAQEEMALLEAVMDCGFGNWQDVANQMCTKTKEECEKHYMKHFINNPLFASTLLNLKQAEEAKTADTAIPFHSTDDPPRPTFDSLLSRDMAGYMPARADFIEEFDNYAEWDLRDIDFVEDDSDILHALKMAVVDIYHSRLKERQRRKKIIRDHGLINLRKFQLMERRYPKEVQDLYETMRRFARIVGPVEHDKFIESHACRWFLSLEQYLCVYIYINRRDNGVFYVKFYK

SEQ ID NO: 89920 - protein, 443 aa, Homo sapiens; identical to SEQ ID NO: 89915
  Payload ID: 17993
  Gene Name: transcriptional adaptor 2A
  ENSP ID: ENSP00000481091

SEQ ID NO: 89921 - protein, 443 aa, Homo sapiens
  Payload ID: 17993
  Gene Name: transcriptional adaptor 2A
  Uniprot ID: O75478
  ENSP ID: ENSP00000481283
MDRLGPFSNDPSDKPPCRGCSSYLMEPYIKCAECGPPPFFLCLQCFTRGFEYKKHQSDHTYEIMTSDFPVLDPSWTAQEEMALLEAVMDCGFGNWQDVANQMCTKTKEECEKHYMKHFINNPLFASTLLNLKQAEEAKTADTAIPFHSTDDPPRPTFDSLLSRDMAGYMPARADFIEEFDNYAEWDLRDIDFVEDDSDILHALKMAVVDIYHSRLKERQRRKKIIRDHGLINLRKFQLMERRYPKEVQDLYETMRRFARIVGPVEHDKFIESHALEFELRREIKRLQEYRTAGITNFCSARTYDHLKKTREEERLKRTMLSEVLQYIQDSSACQQWLRRQADIDSGLSPSIPMASNSGRRSAPPLNLTGLPGTEKLNEKEKELCQMVRLVPGAYLEYKSALLNECNKQGGLRLAQARALIKIDVNKTRKIYDFLIREGYITKG

SEQ ID NO: 89922 - protein, 84 aa, Homo sapiens
  Payload ID: 17993
  Gene Name: transcriptional adaptor 2A
  ENSP ID: ENSP00000481890
  MOD_RES (1)..(1): Any amino acid
XTSDFPVLDPSWTAQEEMALLEAVMDCGFGNWQDVANQMCTKTKEECEKHYMKHFINNPLFASTLLNLKQAEEAKTADTAIPFH

SEQ ID NO: 89923 - protein, 443 aa, Homo sapiens; identical to SEQ ID NO: 89921
  Payload ID: 17993
  Gene Name: transcriptional adaptor 2A
  Uniprot ID: O75478
  ENSP ID: ENSP00000482484

SEQ ID NO: 89924 - protein, 95 aa, Homo sapiens
  Payload ID: 17993
  Gene Name: transcriptional adaptor 2A
  ENSP ID: ENSP00000482848
MDRLGSFSNDPSDKPPCRGCSSYLMEPYIKCAECGPPPFFLCLQCFTRGFEYKKHQSDHTYEIMTSDFPVLDPSWTAQEEMALLEAVMDCGFGNW

SEQ ID NO: 89925 - protein, 56 aa, Homo sapiens
  Payload ID: 17993
  Gene Name: transcriptional adaptor 2A
  ENSP ID: ENSP00000484884
MTSDFPVLDPSWTAQEEMALLEAVMDCGFGNWQDVANQMCTKTKEECEKHYMKHFI

SEQ ID NO: 89926 - protein, 84 aa, Homo sapiens; identical to SEQ ID NO: 89922
  Payload ID: 17993
  Gene Name: transcriptional adaptor 2A
  ENSP ID: ENSP00000487758
  MOD_RES (1)..(1): Any amino acid

SEQ ID NO: 89927 - protein, 305 aa, Homo sapiens
  Payload ID: 17993
  Gene Name: transcriptional adaptor 2A
  Uniprot ID: O75478
  ENSP ID: ENSP00000487973
MDRLGPFSNDPSDKPPCRGCSSYLMEPYIKCAECGPPPFFLCLQCFTRGFEYKKHQSDHTYEIMTSDFPVLDPSWTAQEEMALLEAVMDCGFGNWQDVANQMCTKTKEECEKHYMKHFINNPLFASTLLNLKQAEEAKTADTAIPFHSTDDPPRPTFDSLLSRDMAGYMPARADFIEEFDNYAEWDLRDIDFVEDDSDILHALKMAVVDIYHSRLKERQRRKKIIRDHGLINLRKFQLMERRYPKEVQDLYETMRRFARIVGPVEHDKFIESHACRWFLSLEQYLCVYIYINRRDNGVFYVKFYK

SEQ ID NO: 89928 - protein, 443 aa, Homo sapiens; identical to SEQ ID NO: 89921
  Payload ID: 17993
  Gene Name: transcriptional adaptor 2A
  Uniprot ID: O75478
  ENSP ID: ENSP00000488016

SEQ ID NO: 89929 - protein, 95 aa, Homo sapiens
  Payload ID: 17993
  Gene Name: transcriptional adaptor 2A
  ENSP ID: ENSP00000488180
MDRLGPFSNDPSDKPPCRGCSSYLMEPYIKCAECGPPPFFLCLQCFTRGFEYKKHQSDHTYEIMTSDFPVLDPSWTAQEEMALLEAVMDCGFGNW

SEQ ID NO: 89930 - protein, 194 aa, Homo sapiens; identical to SEQ ID NO: 89916
  Payload ID: 17993
  Gene Name: transcriptional adaptor 2A
  ENSP ID: ENSP00000488320

SEQ ID NO: 89931 - protein, 133 aa, Homo sapiens
  Payload ID: 17993
  Gene Name: transcriptional adaptor 2A
  ENSP ID: ENSP00000488616
MDRLGPFSNDPSDKPPCRGCSSYLMEPYIKCAECGPPPFFLCLQCFTRGFEYKKHQSDHTYEIMDVANQMCTKTKEECEKHYMKHFINNPLFASTLLNLKQAEEAKTADTAIPFHSTDDPPRPTFDSLLSRDM

SEQ ID NO: 89932 - protein, 56 aa, Homo sapiens; identical to SEQ ID NO: 89925
  Payload ID: 17993
  Gene Name: transcriptional adaptor 2A
  ENSP ID: ENSP00000488649

SEQ ID NO: 89933 - protein, 420 aa, Homo sapiens
  Payload ID: 17994
  Gene Name: transcriptional adaptor 2B
  Uniprot ID: Q86TJ2
  ENSP ID: ENSP00000308022
MAELGKKYCVYCLAEVSPLRFRCTECQDIELCPECFSAGAEIGHHRRYHGYQLVDGGRFTLWGPEAEGGWTSREEQLLLDAIEQFGFGNWEDMAAHVGASRTPQEVMEHYVSMYIHGNLGKACIPDTIPNRVTDHTCPSGGPLSPSLTTPLPPLDISVAEQQQLGYMPLRDDYEIEYDQDAETLISGLSVNYDDDDVEIELKRAHVDMYVRKLKERQRRKNIARDYNLVPAFLGKDKKEKEKALKRKITKEEKELRLKLRPLYQFMSCKEFDDLFENMHKEKMLRAKIRELQRYRRNGITKMEESAEYEAARHKREKRKENKNLAGSKRGKEDGKDSEFAAIENLPGFELLSDREKVLCSSLNLSPARYVTVKTIIIKDHLQKRQGIPSKSRLPSYLDKVLKKRILNFLTESGWISRDAS

SEQ ID NO: 89934 - protein, 121 aa, Homo sapiens
  Payload ID: 17994
  Gene Name: transcriptional adaptor 2B
  ENSP ID: ENSP00000422398
MAAHVGASRTPQEVMEHYVSMYIHGNLGKACIPDTIPNRVTDHTCPSGGPLSPSLTTPLPPLDISVAEQQQLGYMPLRDDYEIEYDQDAETLISGLSVNYDDDDVEIELKRAHVDMYVRKL

SEQ ID NO: 89935 - protein, 328 aa, Homo sapiens
  Payload ID: 17994
  Gene Name: transcriptional adaptor 2B
  Uniprot ID: Q86TJ2
  ENSP ID: ENSP00000423181
MAAHVGASRTPQEVMEHYVSMYIHGNLGKACIPDTIPNRVTDHTCPSGGPLSPSLTTPLPPLDISVAEQQQLGYMPLRDDYEIEYDQDAETLISGLSVNYDDDDVEIELKRAHVDMYVRKLKERQRRKNIARDYNLVPAFLGKDKKEKEKALKRKITKEEKELRLKLRPLYQFMSCKEFDDLFENMHKEKMLRAKIRELQRYRRNGITKMEESAEYEAARHKREKRKENKNLAGSKRGKEDGKDSEFAAIENLPGFELLSDREKVLCSSLNLSPARYVTVKTIIIKDHLQKRQGIPSKSRLPSYLDKVLKKRILNFLTESGWISRDAS

SEQ ID NO: 89936 - protein, 345 aa, Homo sapiens
  Payload ID: 17994
  Gene Name: transcriptional adaptor 2B
  Uniprot ID: Q86TJ2
  ENSP ID: ENSP00000423947
MAELGKKYCVYCLAEEDMAAHVGASRTPQEVMEHYVSMYIHGNLGKACIPDTIPNRVTDHTCPSGGPLSPSLTTPLPPLDISVAEQQQLGYMPLRDDYEIEYDQDAETLISGLSVNYDDDDVEIELKRAHVDMYVRKLKERQRRKNIARDYNLVPAFLGKDKKEKEKALKRKITKEEKELRLKLRPLYQFMSCKEFDDLFENMHKEKMLRAKIRELQRYRRNGITKMEESAEYEAARHKREKRKENKNLAGSKRGKEDGKDSEFAAIENLPGFELLSDREKVLCSSLNLSPARYVTVKTIIIKDHLQKRQGIPSKSRLPSYLDKVLKKRILNFLTESGWISRDAS

SEQ ID NO: 89937 - protein, 129 aa, Homo sapiens
  Payload ID: 17994
  Gene Name: transcriptional adaptor 2B
  ENSP ID: ENSP00000425731
MAAHVGASRTPQEVMEHYVSMYIHGNLGKACIPDTIPNRVTDHTCPSGGPLSPSLTTPLPPLDISVAEQQQLGYMPLRDDYEIEYDQDAETLISGLSVNYDDDDVEIELKRAHVDMYVRKLKERQRRKN

SEQ ID NO: 89938 - protein, 432 aa, Homo sapiens
  Payload ID: 17995
  Gene Name: transcriptional adaptor 3
  Uniprot ID: O75528
  ENSP ID: ENSP00000307684
MSELKDCPLQFHDFKSVDHLKVCPRYTAVLARSEDDGIGIEELDTLQLELETLLSSASRRLRVLEAETQILTDWQDKKGDRRFLKLGRDHELGAPPKHGKPKKQKLEGKAGHGPGPGPGRPKSKNLQPKIQEYEFTDDPIDVPRIPKNDAPNRFWASVEPYCADITSEEVRTLEELLKPPEDEAEHYKIPPLGKHYSQRWAQEDLLEEQKDGARAAAVADKKKGLMGPLTELDTKDVDALLKKSEAQHEQPEDGCPFGALTQRLLQALVEENIISPMEDSPIPDMSGKESGADGASTSPRNQNKPFSVPHTKSLESRIKEELIAQGLLESEDRPAEDSEDEVLAELRKRQAELKALSAHNRTKKHDLLRLAKEEVSRQELRQRVRMADNEVMDAFRKIMAARQKKRTPTKKEKDQAWKTLKERESILKLLDG

SEQ ID NO: 89939 - protein, 369 aa, Homo sapiens
  Payload ID: 17995
  Gene Name: transcriptional adaptor 3
  Uniprot ID: O75528
  ENSP ID: ENSP00000343649
MSELKDCPLQFHDFKSVDHLKVCPRYTAVLARSEDDGIGIEELDTLQLELETLLSSASRRLRVLEAETQILTDWQDKKGDRRFLKLGRDHELGAPPKHGKPKKQKLEGKAGHGPGPGPGRPKSKNLQPKIQEYEFTDDPIDVPRIPKNDAPNRFWASVEPYCADITSEEVRTLEELLKPPEDEAEHYKIPPLGKHYSQRWAQEDLLEEQKDGARAAAVADKKKGLMGPLTELDTKDVDALLKKSEAQHEQPEDGCPFGALTQRLLQALVEENIISPMEDSPIPDMSGKESGADGASTSPRNQNKPFSVPHTKSLESRIKEELIAQGLLESEDRPAEDSEDEVLAELRKRQAELKALSAHNRTKKHDLLR

SEQ ID NO: 89940 - protein, 432 aa, Homo sapiens; identical to SEQ ID NO: 89938
  Payload ID: 17995
  Gene Name: transcriptional adaptor 3
  Uniprot ID: O75528
  ENSP ID: ENSP00000393471

SEQ ID NO: 89941 - protein, 95 aa, Homo sapiens
  Payload ID: 17995
  Gene Name: transcriptional adaptor 3
  ENSP ID: ENSP00000395073
MSELKDCPLQFHDFKSVDHLKVCPRYTAVLARSEDDGIGIEELDTLQLELETLLSSASRRLRVLEAETQILTDWQDKKGDRRFLKLGRDHELGAP

SEQ ID NO: 89942 - protein, 1129 aa, Homo sapiens
  Payload ID: 17996
  Gene Name: transcriptional regulating factor 1
  Uniprot ID: Q96PN7
  ENSP ID: ENSP00000339438
MGDQQLYKTNHVAHGSENLFYQQPPLGVHSGLNHNYGNAVTGGGMDAPQASPISPHFPQDTRDGLGLPVGSKNLGQMDTSRQGGWGSHAGPGNHVQLRGNLANSNMMWGAPAQAEPTDGYQYTYSQASEIRTQKLTSGVLHKLDSFTQVFANQNLRIQVNNMAQVLHTQSAVMDGAPDSALRQLLSQKPMEPPAPAIPSRYQQVPQQPHPGFTGGLSKPALQVGQHPTQGHLYYDYQQPLAQVPVQGGQPLQAPQMLSQHMQQMQQHQYYPPQQQQQAGQQRISMQEIQTQPQQIRPSQPQPPPQQQQPQQLQLQQRQGSMQIPQYYQPQPMMQHLQEQQQQQMHLQPPSYHRDPHQYTPEQAHTVQLIPLGSMSQYYYQEPQQPYSHPLYQQSHLSQHQQREDSQLKTYSSDRQAQAMLSSHGDLGPPDTGMGDPASSDLTRVSSTLPHRPLLSPSGIHLNNMGPQHQQLSPSAMWPQMHLPDGRAQPGSPESSGQPKGAFGEQFDAKNKLTCSICLKEFKNLPALNGHMRSHGGMRASPNLKQEIPRKHQPSVPKAEEPLKTVQEKKKFRHRPEPLFIPPPPSYNPNPAASYSGATLYQSQLRSPRVLGDHLLLDPTHELPPYTPPPMLSPVRQGSGLFSNVLISGHGPGAHPQLPLTPLTPTPRVLLCRSNSIDGSNVTVTPGPGEQTVDVEPRINIGLRFQAEIPELQDISALAQDTHKATLVWKPWPELENHDLQQRVENLLNLCCSSALPGGGTNSEFALHSLFEAKGDVMVALEMLLLRKPVRLKCHPLANYHYAGSDKWTSLERKLFNKALATYSKDFIFVQKMVKSKTVAQCVEYYYTWKKIMRLGRKHRTRLAEIIDDCVTSEEEEELEEEEEEDPEEDRKSTKEEESEVPKSPEPPPVPVLAPTEGPPLQALGQPSGSFICEMPNCGADCRCHVTPFLPQVFSSRQALNGHARIHGGTNQVTKARGAIPSGKQKPGGTQSGYCSVKSSPSHSTTSGETDPTTIFPCKECGKVFFKIKSRNAHMKTHRQQEEQQRQKAQKAAFAAEMAATIERTTGPVGAPGLLPLDQLSLIKPIKDVDILDDDVVQQLGGVMEEAEVVDTDLLLDDQDSVLLQGDAEL

SEQ ID NO: 89943 - protein, 1117 aa, Homo sapiens
  Payload ID: 17996
  Gene Name: transcriptional regulating factor 1
  Uniprot ID: Q96PN7
  ENSP ID: ENSP00000346285
MGDQQLYKTNHVAHGSENLFYQQPPLGVHSGLNHNYGNAVTGGGMDAPQASPISPHFPQDTRDGLGLPVGSKNLGQMDTSRQGGWGSHAGPGNHVQLRGNLANSNMMWGAPAQAEPTDGYQYTYSQASEIRTQKLTSGVLHKLDSFTQVFANQNLRIQVNNMAQVLHTQSAVMDGAPDSALRQLLSQKPMEPPAPAIPSRYQQVPQQPHPGFTGGLSKPALQVGQHPTQGHLYYDYQQPLAQVPVQGGQPLQAPQMLSQHMQQMQQHQYYPPQQQQQAGQQRISMQEIQTQPQQIRPSQPQPPPQQQQPQQLQLQQRQGSMQIPQYYQPQPMMQHLQEQQQQQMHLQPPSYHRDPHQYTPEQAHTVQLIPLGSMSQYYYQEPQQPYSHPLYQQSHLSQHQQREDSQLKTYSSDRQAQAMLSSHGDLGPPDTGMGDPASSDLTRVSSTLPHRPLLSPSGIHLNNMGPQHQQLSPSAMWPQMHLPDGRAQPGSPESSGQPKGAFGEQFDAKNKLTCSICLKEFKNLPALNGHMRSHGGMRASPNLKQEIPRKHQPSVPKAEEPLKTVQEKKKFRHRPEPLFIPPPPSYNPNPAASYSGATLYQSQLRSPRVLGDHLLLDPTHELPPYTPPPMLSPVRQGSGLFSNVLISGHGPGAHPQLPLTPLTPTPRVLLCRSNSIDGSNVTVTPGPGEQTVDVEPRINIGLRFQAEIPELQDISALAQDTHKATLVWKPWPELENHDLQQRVENLLNLCCSSALPGGGTNSEFALHSLFEAKGDVMVALEMLLLRKPVRLKCHPLANYHYAGSDKWTSLERKLFNKALATYSKDFIFVQKMVKSKTVAQCVEYYYTWKKIMRLGRKHRTRLAEIIDDCVTSEEEEELEEEEEEDPEEDRKSTKEEESEVPKSPEPPPVPVLAPTEGPPLQALGQPSGSFICEMPNCGAVFSSRQALNGHARIHGGTNQVTKARGAIPSGKQKPGGTQSGYCSVKSSPSHSTTSGETDPTTIFPCKECGKVFFKIKSRNAHMKTHRQQEEQQRQKAQKAAFAAEMAATIERTTGPVGAPGLLPLDQLSLIKPIKDVDILDDDVVQQLGGVMEEAEVVDTDLLLDDQDSVLLQGDAEL

SEQ ID NO: 89944 - protein, 956 aa, Homo sapiens
  Payload ID: 17996
  Gene Name: transcriptional regulating factor 1
  Uniprot ID: Q96PN7
  ENSP ID: ENSP00000362008
MAQVLHTQSAVMDGAPDSALRQLLSQKPMEPPAPAIPSRYQQVPQQPHPGFTGGLSKPALQVGQHPTQGHLYYDYQQPLAQVPVQGGQPLQAPQMLSQHMQQMQQHQYYPPQQQQQAGQQRISMQEIQTQPQQIRPSQPQPPPQQQQPQQLQLQQRQGSMQIPQYYQPQPMMQHLQEQQQQQMHLQPPSYHRDPHQYTPEQAHTVQLIPLGSMSQYYYQEPQQPYSHPLYQQSHLSQHQQREDSQLKTYSSDRQAQAMLSSHGDLGPPDTGMGDPASSDLTRVSSTLPHRPLLSPSGIHLNNMGPQHQQLSPSAMWPQMHLPDGRAQPGSPESSGQPKGAFGEQFDAKNKLTCSICLKEFKNLPALNGHMRSHGGMRASPNLKQEIPRKHQPSVPKAEEPLKTVQEKKKFRHRPEPLFIPPPPSYNPNPAASYSGATLYQSQLRSPRVLGDHLLLDPTHELPPYTPPPMLSPVRQGSGLFSNVLISGHGPGAHPQLPLTPLTPTPRVLLCRSNSIDGSNVTVTPGPGEQTVDVEPRINIGLRFQAEIPELQDISALAQDTHKATLVWKPWPELENHDLQQRVENLLNLCCSSALPGGGTNSEFALHSLFEAKGDVMVALEMLLLRKPVRLKCHPLANYHYAGSDKWTSLERKLFNKALATYSKDFIFVQKMVKSKTVAQCVEYYYTWKKIMRLGRKHRTRLAEIIDDCVTSEEEEELEEEEEEDPEEDRKSTKEEESEVPKSPEPPPVPVLAPTEGPPLQALGQPSGSFICEMPNCGAVFSSRQALNGHARIHGGTNQVTKARGAIPSGKQKPGGTQSGYCSVKSSPSHSTTSGETDPTTIFPCKECGKVFFKIKSRNAHMKTHRQQEEQQRQKAQKAAFAAEMAATIERTTGPVGAPGLLPLDQLSLIKPIKDVDILDDDVVQQLGGVMEEAEVVDTDLLLDDQDSVLLQGDAEL

SEQ ID NO: 89945 - protein, 1200 aa, Homo sapiens
  Payload ID: 17996
  Gene Name: transcriptional regulating factor 1
  Uniprot ID: Q96PN7
  ENSP ID: ENSP00000362013
MGDQQLYKTNHVAHGSENLFYQQPPLGVHSGLNHNYGNAVTGGGMDAPQASPISPHFPQDTRDGLGLPVGSKNLGQMDTSRQGGWGSHAGPGNHVQLRGNLANSNMMWGAPAQAEPTDGYQYTYSQASEIRTQKLTSGVLHKLDSFTQVFANQNLRIQVNNMAQVLHTQSAVMDGAPDSALRQLLSQKPMEPPAPAIPSRYQQVPQQPHPGFTGGLSKPALQVGQHPTQGHLYYDYQQPLAQVPVQGGQPLQAPQMLSQHMQQMQQHQYYPPQQQQQAGQQRISMQEIQTQPQQIRPSQPQPPPQQQQPQQLQLQQRQGSMQIPQYYQPQPMMQHLQEQQQQQMHLQPPSYHRDPHQYTPEQAHTVQLIPLGSMSQYYYQEPQQPYSHPLYQQSHLSQHQQREDSQLKTYSSDRQAQAMLSSHGDLGPPDTGMGDPASSDLTRVSSTLPHRPLLSPSGIHLNNMGPQHQQLSPSAMWPQMHLPDGRAQPGSPESSGQPKGAFGEQFDAKNKLTCSICLKEFKNLPALNGHMRSHGGMRASPNLKQEEGEKVLPPQPQPPLPPPPPPPPPPQLPPEAESLTPMVMPVSVPVKLLPPKPSSQGFTNSTVAAPSARDKPASSMSDDEMPVLEIPRKHQPSVPKAEEPLKTVQEKKKFRHRPEPLFIPPPPSYNPNPAASYSGATLYQSQLRSPRVLGDHLLLDPTHELPPYTPPPMLSPVRQGSGLFSNVLISGHGPGAHPQLPLTPLTPTPRVLLCRSNSIDGSNVTVTPGPGEQTVDVEPRINIGLRFQAEIPELQDISALAQDTHKATLVWKPWPELENHDLQQRVENLLNLCCSSALPGGGTNSEFALHSLFEAKGDVMVALEMLLLRKPVRLKCHPLANYHYAGSDKWTSLERKLFNKALATYSKDFIFVQKMVKSKTVAQCVEYYYTWKKIMRLGRKHRTRLAEIIDDCVTSEEEEELEEEEEEDPEEDRKSTKEEESEVPKSPEPPPVPVLAPTEGPPLQALGQPSGSFICEMPNCGAVFSSRQALNGHARIHGGTNQVTKARGAIPSGKQKPGGTQSGYCSVKSSPSHSTTSGETDPTTIFPCKECGKVFFKIKSRNAHMKTHRQQEEQQRQKAQKAAFAAEMAATIERTTGPVGAPGLLPLDQLSLIKPIKDVDILDDDVVQQLGGVMEEAEVVDTDLLLDDQDSVLLQGDAEL

SEQ ID NO: 89946 - protein, 1220 aa, Homo sapiens
  Payload ID: 17996
  Gene Name: transcriptional regulating factor 1
  ENSP ID: ENSP00000439689
MGDQQLYKTNHVAHGSENLFYQQPPLGVHSGLNHNYGNAVTGGGMDAPQASPISPHFPQDTRDGLGLPVGSKNLGQMDTSRQGGWGSHAGPGNHVQLRGNLANSNMMWGAPAQAEPTDGYQYTYSQASEIRTQKLTSGVLHKLDSFTQVFANQNLRIQVNNMAQVLHTQSAVMDGAPDSALRQLLSQKPMEPPAPAIPSRYQQVPQQPHPGFTGGLSKPALQVGQHPTQGHLYYDYQQPLAQVPVQGGQPLQAPQMLSQHMQQMQQHQYYPPQQQQQAGQQRISMQEIQTQPQQIRPSQPQPPPQQQQPQQLQLQQRQGSMQIPQYYQPQPMMQHLQEQQQQQMHLQPPSYHRDPHQYTPEQAHTVQLIPLGSMSQYYYQEPQQPYSHPLYQQSHLSQHQQREDSQLKTYSSDRQAQAMLSSHGDLGPPDTGMGDPASSDLTRVSSTLPHRPLLSPSGIHLNNMGPQHQQLSPSAMWPQMHLPDGRAQPGSPESSGQPKGAFGEQFDAKNKLTCSICLKEFKNLPALNGHMRSHGGMRASPNLKQEEGEKVLPPQPQPPLPPPPPPPPPPQLPPEAESLTPMVMPVSVPVKLLPPKPSSQGFTNSTVAAPSARDKPASSMSDDEMPVLVRMTLSPPHSPQGAAPRTPAEIPRKHQPSVPKAEEPLKTVQEKKKFRHRPEPLFIPPPPSYNPNPAASYSGATLYQSQLRSPRVLGDHLLLDPTHELPPYTPPPMLSPVRQGSGLFSNVLISGHGPGAHPQLPLTPLTPTPRVLLCRSNSIDGSNVTVTPGPGEQTVDVEPRINIGLRFQAEIPELQDISALAQDTHKATLVWKPWPELENHDLQQRVENLLNLCCSSALPGGGTNSEFALHSLFEAKGDVMVALEMLLLRKPVRLKCHPLANYHYAGSDKWTSLERKLFNKALATYSKDFIFVQKMVKSKTVAQCVEYYYTWKKIMRLGRKHRTRLAEIIDDCVTSEEEEELEEEEEEDPEEDRKSTKEEESEVPKSPEPPPVPVLAPTEGPPLQALGQPSGSFICEMPNCGAVFSSRQALNGHARIHGGTNQVTKARGAIPSGKQKPGGTQSGYCSVKSSPSHSTTSGETDPTTIFPCKECGKVFFKIKSRNAHMKTHRQQEEQQRQKAQKAAFAAEMAATIERTTGPVGAPGLLPLDQLSLIKPIKDVDILDDDVVQQLGGVMEEAEVVDTDLLLDDQDSVLLQGDAEL

SEQ ID NO: 89947 - protein, 345 aa, Homo sapiens
  Payload ID: 17997
  Gene Name: transducer of ERBB2, 1
  Uniprot ID: P50616
  ENSP ID: ENSP00000268957
MQLEIQVALNFIISYLYNKLPRRRVNIFGEELERLLKKKYEGHWYPEKPYKGSGFRCIHIGEKVDPVIEQASKESGLDIDDVRGNLPQDLSVWIDPFEVSYQIGEKGPVKVLYVDDNNENGCELDKEIKNSFNPEAQVFMPISDPASSVSSSPSPPFGHSAAVSPTFMPRSTQPLTFTTATFAATKFGSTKMKNSGRSNKVARTSPINLGLNVNDLLKQKAISSSMHSLYGLGLGSQQQPQQQQQPAQPPPPPPPPQQQQQQKTSALSPNAKEFIFPNMQGQGSSTNGMFPGDSPLNLSPLQYSNAFDVFAAYGGLNEKSFVDGLNFSLNNMQYSNQQFQPVMAN

SEQ ID NO: 89948 - protein, 345 aa, Homo sapiens; identical to SEQ ID NO: 89947
  Payload ID: 17997
  Gene Name: transducer of ERBB2, 1
  Uniprot ID: P50616
  ENSP ID: ENSP00000427695

SEQ ID NO: 89949 - protein, 344 aa, Homo sapiens
  Payload ID: 17998
  Gene Name: transducer of ERBB2, 2
  Uniprot ID: Q14106
  ENSP ID: ENSP00000331305
MQLEIKVALNFIISYLYNKLPRRRADLFGEELERLLKKKYEGHWYPEKPLKGSGFRCVHIGEMVDPVVELAAKRSGLAVEDVRANVPEELSVWIDPFEVSYQIGEKGAVKVLYLDDSEGCGAPELDKEIKSSFNPDAQVFVPIGSQDSSLSNSPSPSFGQSPSPTFIPRSAQPITFTTASFAATKFGSTKMKKGGGAASGGGVASSGAGGQQPPQQPRMARSPTNSLLKHKSLSLSMHSLNFITANPAPQSQLSPNAKEFVYNGGGSPSLFFDAADGQGSGTPGPFGGSGAGTCNSSSFDMAQVFGGGANSLFLEKTPFVEGLSYNLNTMQYPSQQFQPVVLAN

SEQ ID NO: 89950 - protein, 101 aa, Homo sapiens
  Payload ID: 17998
  Gene Name: transducer of ERBB2, 2
  ENSP ID: ENSP00000388549
MQLEIKVALNFIISYLYNKLPRRRADLFGEELERLLKKKYEGHWYPEKPLKGSGFRCVHIGEMVDPVVELAAKRSGLAVEDVRANVPEELSVWIDPFEVSY

SEQ ID NO: 89951 - protein, 144 aa, Homo sapiens
  Payload ID: 17999
  Gene Name: transducin (beta)-like 1 X-linked receptor 1
  ENSP ID: ENSP00000263964
MSISSDEVNFLVYRYLQESGFSHSAFTFGIESHISQSNINGALVPPAALISIIQKGLQYVEAEVSINEDGTLFDGRPIESLSLIDAVMPDVVQTRQQAYRDKLAQQQAAAAAAAAAAASQQGSAKNGENTANGEENGAHTIANN

SEQ ID NO: 89952 - protein, 72 aa, Homo sapiens
  Payload ID: 17999
  Gene Name: transducin (beta)-like 1 X-linked receptor 1
  ENSP ID: ENSP00000387849
MSISSDEVNFLVYRYLQESGFSHSAFTFGIESHISQSNINGALVPPAALISIIQKGLQYVEAEVSINEDGTL

SEQ ID NO: 89953 - protein, 75 aa, Homo sapiens
  Payload ID: 17999
  Gene Name: transducin (beta)-like 1 X-linked receptor 1
  ENSP ID: ENSP00000391559
MPDVVQTRQQAYRDKLAQQQAAAAAAAAAAASQQGSAKNGENTANGEENGAHTIANNHTDMMEVDGDVEIPPNKA

SEQ ID NO: 89954 - protein, 145 aa, Homo sapiens
  Payload ID: 17999
  Gene Name: transducin (beta)-like 1 X-linked receptor 1
  ENSP ID: ENSP00000392180
MSISSDEVNFLVYRYLQESGFSHSAFTFGIESHISQSNINGALVPPAALISIIQKGLQYVEAEVSINEDGTLFDGRPIESLSLIDAVMPDVVQTRQQAYRDKLAQQQAAAAAAAAAAASQQGSAKNGENTANGEENGAHTIANNH

SEQ ID NO: 89955 - protein, 81 aa, Homo sapiens
  Payload ID: 17999
  Gene Name: transducin (beta)-like 1 X-linked receptor 1
  ENSP ID: ENSP00000396120
MSISSDEVNFLVYRYLQESGFSHSAFTFGIESHISQSNINGALVPPAALISIIQKGLQYVEAEVSINEDGTLFDGRPIESL

SEQ ID NO: 89956 - protein, 96 aa, Homo sapiens
  Payload ID: 17999
  Gene Name: transducin (beta)-like 1 X-linked receptor 1
  ENSP ID: ENSP00000397450
MSISSDEVNFLVYRYLQESGFSHSAFTFGIESHISQSNINGALVPPAALISIIQKGLQYVEAEVSINEDGTLFDGRPIESLSLIDAVMPDVVQTRQ

SEQ ID NO: 89957 - protein, 86 aa, Homo sapiens
  Payload ID: 17999
  Gene Name: transducin (beta)-like 1 X-linked receptor 1
  ENSP ID: ENSP00000398477
MSISSDEVNFLVYRYLQESGFSHSAFTFGIESHISQSNINGALVPPAALISIIQKGLQYVEAEVSINEDGTLFDGRPIESLSLIDA

SEQ ID NO: 89958 - protein, 61 aa, Homo sapiens
  Payload ID: 17999
  Gene Name: transducin (beta)-like 1 X-linked receptor 1
  ENSP ID: ENSP00000401044
MSISSDEVNFLVYRYLQESGFSHSAFTFGIESHISQSNINGALVPPAALISIIQKGLQYVE

SEQ ID NO: 89959 - protein, 55 aa, Homo sapiens
  Payload ID: 17999
  Gene Name: transducin (beta)-like 1 X-linked receptor 1
  ENSP ID: ENSP00000402402
MPDVVQTRQQAYRDKLAQQQAAAAAAAAAAASQQGSAKNGENTANGEENGAHTIA

SEQ ID NO: 89960 - protein, 73 aa, Homo sapiens
  Payload ID: 17999
  Gene Name: transducin (beta)-like 1 X-linked receptor 1
  ENSP ID: ENSP00000404863
MPDVVQTRQQAYRDKLAQQQAAAAAAAAAAASQQGSAKNGENTANGEENGAHTIANNHTDMMEVDGDVEIPPN

SEQ ID NO: 89961 - protein, 514 aa, Homo sapiens
  Payload ID: 17999
  Gene Name: transducin (beta)-like 1 X-linked receptor 1
  Uniprot ID: Q9BZK7
  ENSP ID: ENSP00000405574
MSISSDEVNFLVYRYLQESGFSHSAFTFGIESHISQSNINGALVPPAALISIIQKGLQYVEAEVSINEDGTLFDGRPIESLSLIDAVMPDVVQTRQQAYRDKLAQQQAAAAAAAAAAASQQGSAKNGENTANGEENGAHTIANNHTDMMEVDGDVEIPPNKAVVLRGHESEVFICAWNPVSDLLASGSGDSTARIWNLSENSTSGSTQLVLRHCIREGGQDVPSNKDVTSLDWNSEGTLLATGSYDGFARIWTKDGNLASTLGQHKGPIFALKWNKKGNFILSAGVDKTTIIWDAHTGEAKQQFPFHSAPALDVDWQSNNTFASCSTDMCIHVCKLGQDRPIKTFQGHTNEVNAIKWDPTGNLLASCSDDMTLKIWSMKQDNCVHDLQAHNKEIYTIKWSPTGPGTNNPNANLMLASASFDSTVRLWDVDRGICIHTLTKHQEPVYSVAFSPDGRYLASGSFDKCVHIWNTQTGALVHSYRGTGGIFEVCWNAAGDKVGASASDGSVCVLDLRK

SEQ ID NO: 89962 - protein, 120 aa, Homo sapiens
  Payload ID: 17999
  Gene Name: transducin (beta)-like 1 X-linked receptor 1
  ENSP ID: ENSP00000406297
MSISSDEVNFLVYRYLQESGFSHSAFTFGIESHISQSNINGALVPPAALISIIQKGLQYVEAEVSINEDGTLFDGRPIESLSLIDAVMPDVVQTRQQAYRDKLAQQQAAAAAAAAAAASQ

SEQ ID NO: 89963 - protein, 514 aa, Homo sapiens; identical to SEQ ID NO: 89961
  Payload ID: 17999
  Gene Name: transducin (beta)-like 1 X-linked receptor 1
  Uniprot ID: Q9BZK7
  ENSP ID: ENSP00000413251

SEQ ID NO: 89964 - protein, 33 aa, Homo sapiens
  Payload ID: 17999
  Gene Name: transducin (beta)-like 1 X-linked receptor 1
  ENSP ID: ENSP00000415506
MSISSDEVNFLVYRYLQESGFSHSAFTFGIESH

SEQ ID NO: 89965 - protein, 105 aa, Homo sapiens
  Payload ID: 17999
  Gene Name: transducin (beta)-like 1 X-linked receptor 1
  ENSP ID: ENSP00000486082
MSISSDEVNFLVYRYLQESGFSHSAFTFGIESHISQSNINGALVPPAALISIIQKGLQYVEAEVSINEDGTLFDGRPIESLSLIDAVMPDVVQTRQQAYRDKLAQ

SEQ ID NO: 89966 - protein, 122 aa, Homo sapiens
  Payload ID: 17999
  Gene Name: transducin (beta)-like 1 X-linked receptor 1
  ENSP ID: ENSP00000486235
MRPDICLYGTQQHHIQGFSHSAFTFGIESHISQSNINGALVPPAALISIIQKGLQYVEAEVSINEDGTLFDGRPIESLSLIDAVMPDVVQTRQQAYRDKLAQQQAAAAAAAAAAASQQGSAK

SEQ ID NO: 89967 - protein, 474 aa, Homo sapiens
  Payload ID: 17999
  Gene Name: transducin (beta)-like 1 X-linked receptor 1
  ENSP ID: ENSP00000486324
MSISSDEVNFLVYRYLQESGFSHSAFTFGIESHISQSNINGALVPPAALISIIQKGLQYVEAEVSINEDGTLFDGRPIESLSLIDAVMPDVVQTRQQAYRDKLAQQQAAAAAAAAAAASQQGSAKNGENTANGEENGAHTIANNHTDMMEVDGDVEIPPNKAVVLRGHESEVFICAWNPVSDLLASGSGDSTARIWNLSENSTSGSTQLVLRHCIREGGQDVPSNKDVTSLDWNSEGTLLATGSYDGFARIWTKDGNLASTLGQHKGPIFALKWNKKGNFILSAGVDKTTIIWDAHTGEAKQQFPFHSAPALDVDWQSNNTFASCSTDMCIHVCKLGQDRPIKTFQGHTNEVNAIKWDPTGNLLASCSDDMTLKIWSMKQDNCVHDLQAHNKEIYTIKWSPTGPGTNNPNANLMLASASFDSTVRLWDVDRGICIHTLTKHQEPVYSVAFSPDGRYLASGSFDKCVHIWNTQVL

SEQ ID NO: 89968 - protein, 67 aa, Homo sapiens
  Payload ID: 17999
  Gene Name: transducin (beta)-like 1 X-linked receptor 1
  ENSP ID: ENSP00000486622
  MOD_RES (1)..(1): Any amino acid
XNNPNANLMLASGSFDKCVHIWNTQTGALVHSYRGTGGIFEVCWNAAGDKVGASASDGSVCVLDLRK

SEQ ID NO: 89969 - protein, 112 aa, Homo sapiens
  Payload ID: 17999
  Gene Name: transducin (beta)-like 1 X-linked receptor 1
  ENSP ID: ENSP00000486866
MSISSDEVNFLVYRYLQESGFSHSAFTFGIESHISQSNINGALVPPAALISIIQKGLQYVEAEVSINEDGTLFDGRPIESLSLIDAVMPDVVQTRQQAYRDKLAQQQAAAAA

SEQ ID NO: 89970 - protein, 522 aa, Homo sapiens
  Payload ID: 18000
  Gene Name: transducin (beta)-like 1, Y-linked
  Uniprot ID: Q9BQ87
  ENSP ID: ENSP00000328879
MSITSDEVNFLVYRYLQESGFSHSAFTFGIESHISQSNINGTLVPPSALISILQKGLQYVEAEISINKDGTVFDSRPIESLSLIVAVIPDVVQMRQQAFGEKLTQQQASAAATEASAMAKAATMTPAAISQQNPPKNREATVNGEENGAHEINNHSKPMEIDGDVEIPPNKATVLRGHESEVFICAWNPVSDLLASGSGDSTARIWNLNENSNGGSTQLVLRHCIREGGHDVPSNKDVTSLDWNSDGTLLAMGSYDGFARIWTENGNLASTLGQHKGPIFALKWNKKGNYVLSAGVDKTTIIWDAHTGEAKQQFPFHSAPALDVDWQNNMTFASCSTDMCIHVCRLGCDHPVKTFQGHTNEVNAIKWDPSGMLLASCSDDMTLKIWSMKQDACVHDLQAHSKEIYTIKWSPTGPATSNPNSSIMLASASFDSTVRLWDVEQGVCTHTLMKHQEPVYSVAFSPDGKYLASGSFDKYVHIWNTQSGSLVHSYQGTGGIFEVCWNARGDKVGASASDGSVCVLDL

SEQ ID NO: 89971 - protein, 522 aa, Homo sapiens; identical to SEQ ID NO: 89970
  Payload ID: 18000
  Gene Name: transducin (beta)-like 1, Y-linked
  Uniprot ID: Q9BQ87
  ENSP ID: ENSP00000347289

SEQ ID NO: 89972 - protein, 522 aa, Homo sapiens; identical to SEQ ID NO: 89970
  Payload ID: 18000
  Gene Name: transducin (beta)-like 1, Y-linked
  Uniprot ID: Q9BQ87
  ENSP ID: ENSP00000372499

SEQ ID NO: 89973 - protein, 577 aa, Homo sapiens
  Payload ID: 18001
  Gene Name: transducin (beta)-like 1X-linked
  Uniprot ID: O60907
  ENSP ID: ENSP00000217964
MTELAGASSSCCHRPAGRGAMQSVLHHFQRLRGREGGSHFINTSSPRGEAKMSITSDEVNFLVYRYLQESGFSHSAFTFGIESHISQSNINGTLVPPAALISILQKGLQYVEAEISINEDGTVFDGRPIESLSLIDAVMPDVVQTRQQAFREKLAQQQASAAAAAAAATAAATAATTTSAGVSHQNPSKNREATVNGEENRAHSVNNHAKPMEIDGEVEIPSSKATVLRGHESEVFICAWNPVSDLLASGSGDSTARIWNLNENSNGGSTQLVLRHCIREGGHDVPSNKDVTSLDWNTNGTLLATGSYDGFARIWTEDGNLASTLGQHKGPIFALKWNRKGNYILSAGVDKTTIIWDAHTGEAKQQFPFHSAPALDVDWQNNTTFASCSTDMCIHVCRLGCDRPVKTFQGHTNEVNAIKWDPSGMLLASCSDDMTLKIWSMKQEVCIHDLQAHNKEIYTIKWSPTGPATSNPNSNIMLASASFDSTVRLWDIERGVCTHTLTKHQEPVYSVAFSPDGKYLASGSFDKCVHIWNTQSGNLVHSYRGTGGIFEVCWNARGDKVGASASDGSVCVLDLRK

SEQ ID NO: 89974 - protein, 526 aa, Homo sapiens
  Payload ID: 18001
  Gene Name: transducin (beta)-like 1X-linked
  Uniprot ID: O60907
  ENSP ID: ENSP00000370348
MSITSDEVNFLVYRYLQESGFSHSAFTFGIESHISQSNINGTLVPPAALISILQKGLQYVEAEISINEDGTVFDGRPIESLSLIDAVMPDVVQTRQQAFREKLAQQQASAAAAAAAATAAATAATTTSAGVSHQNPSKNREATVNGEENRAHSVNNHAKPMEIDGEVEIPSSKATVLRGHESEVFICAWNPVSDLLASGSGDSTARIWNLNENSNGGSTQLVLRHCIREGGHDVPSNKDVTSLDWNTNGTLLATGSYDGFARIWTEDGNLASTLGQHKGPIFALKWNRKGNYILSAGVDKTTIIWDAHTGEAKQQFPFHSAPALDVDWQNNTTFASCSTDMCIHVCRLGCDRPVKTFQGHTNEVNAIKWDPSGMLLASCSDDMTLKIWSMKQEVCIHDLQAHNKEIYTIKWSPTGPATSNPNSNIMLASASFDSTVRLWDIERGVCTHTLTKHQEPVYSVAFSPDGKYLASGSFDKCVHIWNTQSGNLVHSYRGTGGIFEVCWNARGDKVGASASDGSVCVLDLRK

SEQ ID NO: 89975 - protein, 577 aa, Homo sapiens; identical to SEQ ID NO: 89973
  Payload ID: 18001
  Gene Name: transducin (beta)-like 1X-linked
  Uniprot ID: O60907
  ENSP ID: ENSP00000385988

SEQ ID NO: 89976 - protein, 526 aa, Homo sapiens; identical to SEQ ID NO: 89974
  Payload ID: 18001
  Gene Name: transducin (beta)-like 1X-linked
  Uniprot ID: O60907
  ENSP ID: ENSP00000394097

SEQ ID NO: 89977 - protein, 79 aa, Homo sapiens
  Payload ID: 18001
  Gene Name: transducin (beta)-like 1X-linked
  ENSP ID: ENSP00000397878
MTELAGASSSCCHRPAGRGAMQSVLHHFQRLRGREGGSHFINTSSPRGEAKMSITSDEVNFLVYRYLQESGFSHSAFTF

SEQ ID NO: 89978 - protein, 59 aa, Homo sapiens
  Payload ID: 18001
  Gene Name: transducin (beta)-like 1X-linked
  ENSP ID: ENSP00000402923
MTELAGASSSCCHRPAGRGAMQSVLHHFQRLRGREGGSHFINTSSPRGEAKMSITSDEV

SEQ ID NO: 89979 - protein, 75 aa, Homo sapiens
  Payload ID: 18001
  Gene Name: transducin (beta)-like 1X-linked
  ENSP ID: ENSP00000407069
MSITSDEVNFLVYRYLQESGFSHSAFTFGIESHISQSNINGTLVPPAALISILQKGLQYVEAEISINEDGTVFDG

SEQ ID NO: 89980 - protein, 44 aa, Homo sapiens
  Payload ID: 18001
  Gene Name: transducin (beta)-like 1X-linked
  ENSP ID: ENSP00000415508
MSITSDEVNFLVYRYLQESGFSHSAFTFGIESHISQSNINGTLV

SEQ ID NO: 89981 - protein, 447 aa, Homo sapiens
  Payload ID: 18002
  Gene Name: transducin (beta)-like 2
  Uniprot ID: Q9Y4P3
  ENSP ID: ENSP00000307260
MELSQMSELMGLSVLLGLLALMATAAVARGWLRAGEERSGRPACQKANGFPPDKSSGSKKQKQYQRIRKEKPQQHNFTHRLLAAALKSHSGNISCMDFSSNGKYLATCADDRTIRIWSTKDFLQREHRSMRANVELDHATLVRFSPDCRAFIVWLANGDTLRVFKMTKREDGGYTFTATPEDFPKKHKAPVIDIGIANTGKFIMTASSDTTVLIWSLKGQVLSTINTNQMNNTHAAVSPCGRFVASCGFTPDVKVWEVCFGKKGEFQEVVRAFELKGHSAAVHSFAFSNDSRRMASVSKDGTWKLWDTDVEYKKKQDPYLLKTGRFEEAAGAAPCRLALSPNAQVLALASGSSIHLYNTRRGEKEECFERVHGECIANLSFDITGRFLASCGDRAVRLFHNTPGHRAMVEEMQGHLKRASNESTRQRLQQQLTQAQETLKSLGALKK

SEQ ID NO: 89982 - protein, 46 aa, Homo sapiens
  Payload ID: 18002
  Gene Name: transducin (beta)-like 2
  ENSP ID: ENSP00000398195
MELSQMSELMGLSVLLGLLALMATAAVARGWLRAGEERSGRPACGQ

SEQ ID NO: 89983 - protein, 39 aa, Homo sapiens
  Payload ID: 18002
  Gene Name: transducin (beta)-like 2
  ENSP ID: ENSP00000400569
MGLSFSSGPRSFFPVGIGEHLQSFTTCQLCDSIKYLLQK

SEQ ID NO: 89984 - protein, 107 aa, Homo sapiens
  Payload ID: 18002
  Gene Name: transducin (beta)-like 2
  ENSP ID: ENSP00000404242
MELSQMSELMGLSVLLGLLALMATAAVARGWLRAGEERSGRPACQKANGFPPDKSSGSKKQKQYQRIRKEKPQQHNFTHRLLAAALKMIAPSASGAPRTSCSESTAA

SEQ ID NO: 89985 - protein, 43 aa, Homo sapiens
  Payload ID: 18002
  Gene Name: transducin (beta)-like 2
  ENSP ID: ENSP00000406418
MELSQMSELMGLSVLLGLLALMATAAVARGWLRAGEERSGRPA

SEQ ID NO: 89986 - protein, 43 aa, Homo sapiens; identical to SEQ ID NO: 89985
  Payload ID: 18002
  Gene Name: transducin (beta)-like 2
  ENSP ID: ENSP00000407503

SEQ ID NO: 89987 - protein, 54 aa, Homo sapiens
  Payload ID: 18002
  Gene Name: transducin (beta)-like 2
  ENSP ID: ENSP00000408255
MELSQMSELMGLSVLLGLLALMATAAVARGWLRAGEERSGRPAWSCSVTQDGMQ

SEQ ID NO: 89988 - protein, 176 aa, Homo sapiens
  Payload ID: 18002
  Gene Name: transducin (beta)-like 2
  ENSP ID: ENSP00000409820
MELSQMSELMGLSVLLGLLALMATAAVARGWLRAGEERSGRPACQKANGFPPDKSSGSKKQKQYQRIRKEKPQQHNFTHRLLAAALKSHSGNISCMDFSSNGKYLATCADDRTIRIWSTKDFLQREHRSMRANVELDHATLSLHRLAGQRGHPPCLQDDQAGGWGLHLHSHPRGLP

SEQ ID NO: 89989 - protein, 75 aa, Homo sapiens
  Payload ID: 18002
  Gene Name: transducin (beta)-like 2
  ENSP ID: ENSP00000410737
MELSQMSELMGLSVLLGLLALMATAAVARGWLRAGEERSGRPAWPRSFFPVGIGEHLQSFTTCQLCDSIKYLLQK

SEQ ID NO: 89990 - protein, 411 aa, Homo sapiens
  Payload ID: 18002
  Gene Name: transducin (beta)-like 2
  ENSP ID: ENSP00000413979
MGLSFSSGQKANGFPPDKSSGSKKQKQYQRIRKEKPQQHNFTHRLLAAALKSHSGNISCMDFSSNGKYLATCADDRTIRIWSTKDFLQREHRSMRANVELDHATLVRFSPDCRAFIVWLANGDTLRVFKMTKREDGGYTFTATPEDFPKKHKAPVIDIGIANTGKFIMTASSDTTVLIWSLKGQVLSTINTNQMNNTHAAVSPCGRFVASCGFTPDVKVWEVCFGKKGEFQEVVRAFELKGHSAAVHSFAFSNDSRRMASVSKDGTWKLWDTDVEYKKKQDPYLLKTGRFEEAAGAAPCRLALSPNAQVLALASGSSIHLYNTRRGEKEECFERVHGECIANLSFDITGRFLASCGDRAVRLFHNTPGHRAMVEEMQGHLKRASNESTRQRLQQQLTQAQETLKSLGALKK

SEQ ID NO: 89991 - protein, 64 aa, Homo sapiens
  Payload ID: 18002
  Gene Name: transducin (beta)-like 2
  ENSP ID: ENSP00000414865
MGLSFSSGNVSFASRDGDPPCRAKKQMDFHLTNLRDPRSRNNISGFGRRSLNNTTSPTASWLQL

SEQ ID NO: 89992 - protein, 96 aa, Homo sapiens
  Payload ID: 18002
  Gene Name: transducin (beta)-like 2
  ENSP ID: ENSP00000480898
MDFSSNGKYLATCADDRTIRIWSTKDFLQREHRSMRANVELDHATLVRFSPDCRAFIVWLANGDTLRVFKMTKREDGGYTFTATPEDFPKKHKAPV

SEQ ID NO: 89993 - protein, 446 aa, Homo sapiens [sequence omitted]

SEQ ID NO: 89994 - protein, 697 aa, Homo sapiens
  Payload ID: 18003
  Gene Name: transducin (beta)-like 3
  ENSP ID: ENSP00000331815
  MOD_RES (1)..(1): Any amino acid
XAWQEGSVTRLWKAIHTAPVATMAFDPTSTLLATGGCDGAVRVWDIVRHYGTHHFRGSPGVVHLVAFHPDPTRLLLFSSATDAAIRVWSLQDRSCLAVLTAHYSAVTSLAFSADGHTMLSSGRDKICIIWDLQSCQATRTVPVFESVEAAVLLPEEPVSQLGVKSPGLYFLTAGDQGTLRVWEAASGQCVYTQAQPPGPGQELTHCTLAHTAGVVLTATADHNLLLYEARSLRLQKQFAGYSEEVLDVRFLGPEDSHVVVASNSPCLKVFELQTSACQILHGHTDIVLALDVFRKGWLFASCAKDQSVRIWRMNKAGQVMLKESFLVTGSQDCTVKLWPLPKALLSKNTAPDNGPILLQAQTTQRCHDKDINSVAIAPNDKLLATGSQDRTAKLWALPQCQLLGVFSGHRRGLWCVQFSPMDQVLATASADGTIKLWALQDFSCLKTFEGHDASVLKVAFVSRGTQLLSSGSDGLVKLWTIKNNECVRTLDAHEDKVWGLHCSRLDDHALTGASDSRVILWKDVTEAEQAEEQARQEEQVVRQQELDNLLHEKRYLRALGLAISLDRPHTVLTVIQAIRRDPEACEKLEATMLRLRRDQKEALLRFCVTWNTNSRHCHEAQAVLGVLLRREAPEELLAYEGVRAALEALLPYTERHFQRLSRTLQAAAFLDFLWHNMKLPVPAAAPTPWETHKGALP

SEQ ID NO: 89995 - protein, 77 aa, Homo sapiens
  Payload ID: 18003
  Gene Name: transducin (beta)-like 3
  ENSP ID: ENSP00000454735
MAETAAGVGRFKTNYAVERKIEPFYKGGKAQTSLSPAGPDWPAPLLRLWHQSQHSGSGLGGRAAESGAGGPGGHHCL

SEQ ID NO: 89996 - protein, 808 aa, Homo sapiens
  Payload ID: 18003
  Gene Name: transducin (beta)-like 3
  Uniprot ID: Q12788
  ENSP ID: ENSP00000454836
MAETAAGVGRFKTNYAVERKIEPFYKGGKAQLDQTGQHLFCVCGTRVNILEVASGAVLRSLEQEDQEDITAFDLSPDNEVLVTASRALLLAQWAWQEGSVTRLWKAIHTAPVATMAFDPTSTLLATGGCDGAVRVWDIVRHYGTHHFRGSPGVVHLVAFHPDPTRLLLFSSATDAAIRVWSLQDRSCLAVLTAHYSAVTSLAFSADGHTMLSSGRDKICIIWDLQSCQATRTVPVFESVEAAVLLPEEPVSQLGVKSPGLYFLTAGDQGTLRVWEAASGQCVYTQAQPPGPGQELTHCTLAHTAGVVLTATADHNLLLYEARSLRLQKQFAGYSEEVLDVRFLGPEDSHVVVASNSPCLKVFELQTSACQILHGHTDIVLALDVFRKGWLFASCAKDQSVRIWRMNKAGQVMCVAQGSGHTHSVGTVCCSRLKESFLVTGSQDCTVKLWPLPKALLSKNTAPDNGPILLQAQTTQRCHDKDINSVAIAPNDKLLATGSQDRTAKLWALPQCQLLGVFSGHRRGLWCVQFSPMDQVLATASADGTIKLWALQDFSCLKTFEGHDASVLKVAFVSRGTQLLSSGSDGLVKLWTIKNNECVRTLDAHEDKVWGLHCSRLDDHALTGASDSRVILWKDVTEAEQAEEQARQEEQVVRQQELDNLLHEKRYLRALGLAISLDRPHTVLTVIQAIRRDPEACEKLEATMLRLRRDQKEALLRFCVTWNTNSRHCHEAQAVLGVLLRREAPEELLAYEGVRAALEALLPYTERHFQRLSRTLQAAAFLDFLWHNMKLPVPAAAPTPWETHKGALP

SEQ ID NO: 89997 - protein, 518 aa, Homo sapiens [sequence omitted]

SEQ ID NO: 89998 - protein, 144 aa, Homo sapiens
  Payload ID: 18004
  Gene Name: transducin-like enhancer of split 1 (E(sp1) homolog, Drosophila)
  ENSP ID: ENSP00000365646
MQRHYVMYYEMSYGLNIEMHKQTEIAKRLNTICAQVIPFLSQEHQQQVAQAVERAKQVTMAELNAIIGQQQLQAQHLSHGHGPPVPLTPHPSGLQPPGIPPLGGSAGLLALSSALSGQSHLAIKDDKKHHDAEHHRGERPGKPD

SEQ ID NO: 89999 - protein, 769 aa, Homo sapiens
  Payload ID: 18004
  Gene Name: transducin-like enhancer of split 1 (E(sp1) homolog, Drosophila)
  ENSP ID: ENSP00000365655
MFPQSRHPTPHQAAGQPFKFTIPESLDRIKEEFQFLQAQYHSLKLECEKLASEKTEMQRHYVMYYEMSYGLNIEMHKQTEIAKRLNTICAQVIPFLSQEHQQQVAQAVERAKQVTMAELNAIIGQQQLQAQHLSHGHGPPVPLTPHPSGLQPPGIPPLGGSAGLLALSSALSGQSHLAIKDDKKHHDAEHHRDREPGTSNSLLVPDSLRGTDKRRNGPEFSNDIKKRKVDDKDSSHYDSDGDKSDDNLVVDVSNEDPSSPRASPAHSPRENGIDKNRLLKKDASSSPASTASSASSTSLKSKEMSLHEKASTPVLKSSTPTPRSDMPTPGTSATPGLRPGLGKPPAIDPLVNQAAAGLRTPLAVPGPYPAPFGMVPHAGMNGELTSPGAAYASLHNMSPQMSAAARGRRGGYGRSPMVGFDPPPHMRVPTIPPNLAGIPGGKPAYSFHVTADGQMQPVPFPPDALIGPGIPRHARQINTLNHGEVVCAVTISNPTRHVYTGGKGCVKVWDISHPGNKSPVSQLDCLNRDNYIRSCKLLPDGCTLIVGGEASTLSIWDLAAPTPRIKAELTSSAPACYALAISPDSKVCFSCCSDGNIAVWDLHNQTLVRQFQGHTDGASCIDISNDGTKLWTGGLDNTVRSWDLREGRQLQQHDFTSQIFSLGYCPTGEWLAVGMESSNVEVLHVNKPDKYQLHLHESCVLSLKFAYCGKWFVSTGKDNLLNAWRTPYGASIFQSKESSSVLSCDISVDDKYIVTGSGDKKATVYEVIY

SEQ ID NO: 90000 - protein, 127 aa, Homo sapiens
  Payload ID: 18004
  Gene Name: transducin-like enhancer of split 1 (E(sp1) homolog, Drosophila)
  ENSP ID: ENSP00000365667
MPTPGTSATPGLRPGLGKPPAIDPLVNQAAAGLRTPLAVPGPYPAPFGMVPHAGMNGELTSPGAAYASLHNMSPQMSAAAAAAAVVAYGRSPMVGFDPPPHMRVPTIPPNLAGIPGGKPSLVPAPAH

SEQ ID NO: 90001 - protein, 770 aa, Homo sapiens
  Payload ID: 18004
  Gene Name: transducin-like enhancer of split 1 (E(sp1) homolog, Drosophila)
  Uniprot ID: Q04724
  ENSP ID: ENSP00000365682
MFPQSRHPTPHQAAGQPFKFTIPESLDRIKEEFQFLQAQYHSLKLECEKLASEKTEMQRHYVMYYEMSYGLNIEMHKQTEIAKRLNTICAQVIPFLSQEHQQQVAQAVERAKQVTMAELNAIIGQQQLQAQHLSHGHGPPVPLTPHPSGLQPPGIPPLGGSAGLLALSSALSGQSHLAIKDDKKHHDAEHHRDREPGTSNSLLVPDSLRGTDKRRNGPEFSNDIKKRKVDDKDSSHYDSDGDKSDDNLVVDVSNEDPSSPRASPAHSPRENGIDKNRLLKKDASSSPASTASSASSTSLKSKEMSLHEKASTPVLKSSTPTPRSDMPTPGTSATPGLRPGLGKPPAIDPLVNQAAAGLRTPLAVPGPYPAPFGMVPHAGMNGELTSPGAAYASLHNMSPQMSAAAAAAAVVAYGRSPMVGFDPPPHMRVPTIPPNLAGIPGGKPAYSFHVTADGQMQPVPFPPDALIGPGIPRHARQINTLNHGEVVCAVTISNPTRHVYTGGKGCVKVWDISHPGNKSPVSQLDCLNRDNYIRSCKLLPDGCTLIVGGEASTLSIWDLAAPTPRIKAELTSSAPACYALAISPDSKVCFSCCSDGNIAVWDLHNQTLVRQFQGHTDGASCIDISNDGTKLWTGGLDNTVRSWDLREGRQLQQHDFTSQIFSLGYCPTGEWLAVGMESSNVEVLHVNKPDKYQLHLHESCVLSLKFAYCGKWFVSTGKDNLLNAWRTPYGASIFQSKESSSVLSCDISVDDKYIVTGSGDKKATVYEVIY

SEQ ID NO: 90002 - protein, 242 aa, Homo sapiens
  Payload ID: 18004
  Gene Name: transducin-like enhancer of split 1 (E(sp1) homolog, Drosophila)
  ENSP ID: ENSP00000391347
MFPQSRHPTPHQAAGQPFKFTIPESLDRIKEEFQFLQAQYHSLKLECEKLASEKTEMQRHYVMYYEMSYGLNIEMHKQTEIAKRLNTICAQVIPFLSQEHQQQVAQAVERAKQVTMAELNAIIGVRGLPGLPPTQQQLQAQHLSHGHGPPVPLTPHPSGLQPPGIPPLGGSAGLLALSSALSGQSHLAIKDDKKHHDAEHHRDREPGTSNSLLVPDSLRGTDKRRNGPEFSNDIKKRKVDDK

SEQ ID NO: 90003 - protein, 743 aa, Homo sapiens
  Payload ID: 18005
  Gene Name: transducin-like enhancer of split 2
  Uniprot ID: Q04725
  ENSP ID: ENSP00000262953
MYPQGRHPTPLQSGQPFKFSILEICDRIKEEFQFLQAQYHSLKLECEKLASEKTEMQRHYVMYYEMSYGLNIEMHKQAEIVKRLSGICAQIIPFLTQEHQQQVLQAVERAKQVTVGELNSLIGQQLQPLSHHAPPVPLTPRPAGLVGGSATGLLALSGALAAQAQLAAAVKEDRAGVEAEGSRVERAPSRSASPSPPESLVEEERPSGPGGGGKQRADEKEPSGPYESDEDKSDYNLVVDEDQPSEPPSPATTPCGKVPICIPARRDLVDSPASLASSLGSPLPRAKELILNDLPASTPASKSCDSSPPQDASTPGPSSASHLCQLAAKPAPSTDSVALRSPLTLSSPFTTSFSLGSHSTLNGDLSVPSSYVSLHLSPQVSSSVVYGRSPVMAFESHPHLRGSSVSSSLPSIPGGKPAYSFHVSADGQMQPVPFPSDALVGAGIPRHARQLHTLAHGEVVCAVTISGSTQHVYTGGKGCVKVWDVGQPGAKTPVAQLDCLNRDNYIRSCKLLPDGRSLIVGGEASTLSIWDLAAPTPRIKAELTSSAPACYALAVSPDAKVCFSCCSDGNIVVWDLQNQTMVRQFQGHTDGASCIDISDYGTRLWTGGLDNTVRCWDLREGRQLQQHDFSSQIFSLGHCPNQDWLAVGMESSNVEILHVRKPEKYQLHLHESCVLSLKFASCGRWFVSTGKDNLLNAWRTPYGASIFQSKESSSVLSCDISRNNKYIVTGSGDKKATVYEVVY

SEQ ID NO: 90004 - protein, 621 aa, Homo sapiens
  Payload ID: 18005
  Gene Name: transducin-like enhancer of split 2
  Uniprot ID: Q04725
  ENSP ID: ENSP00000392427
MQRHYVMYYEMSYGLNIEMHKQAEIVKRLSGICAQIIPFLTQEHQQQVLQAVERAKQVTVGELNSLIGSASPSPPESLVEEERPSGPGGGGKQRADEKEPSGPYESDEDKSDYNLVVDEDQPSEPPSPATTPCGKVPICIPARRDLVDSPASLASSLGSPLPRAKELILNDLPASTPASKSCDSSPPQDASTPGPSSASHLCQLAAKPAPSTDSVALRSPLTLSSPFTTSFSLGSHSTLNGDLSVPSSYVSLHLSPQVSSSVVYGRSPVMAFESHPHLRGSSVSSSLPSIPGGKPAYSFHVSADGQMQPVPFPSDALVGAGIPRHARQLHTLAHGEVVCAVTISGSTQHVYTGGKGCVKVWDVGQPGAKTPVAQLDCLNRDNYIRSCKLLPDGRSLIVGGEASTLSIWDLAAPTPRIKAELTSSAPACYALAVSPDAKVCFSCCSDGNIVVWDLQNQTMVRQFQGHTDGASCIDISDYGTRLWTGGLDNTVRCWDLREGRQLQQHDFSSQIFSLGHCPNQDWLAVGMESSNVEILHVRKPEKYQLHLHESCVLSLKFASCGRWFVSTGKDNLLNAWRTPYGASIFQSKESSSVLSCDISRNNKYIVTGSGDKKATVYEVVY

SEQ ID NO: 90005 - protein, 706 aa, Homo sapiens
  Payload ID: 18005
  Gene Name: transducin-like enhancer of split 2
  Uniprot ID: Q04725
  ENSP ID: ENSP00000392869
MVQSRLTATSASQDSPASGLQTPLQSGQPFKFSILEICDRIKEEFQFLQAQYHSLKLECEKLASEKTEMQRHYVMYYEMSYGLNIEMHKQAEIVKRLSGICAQIIPFLTQEHQQQVLQAVERAKQVTVGELNSLIGQQQLQPLSHHAPPVPLTPRPAGLVGGSATGLLALSGALAAQAQLAAAVKEDRAGVEAEGSRVERAPSRSASPSPPESLVEEERPSGPGGGGKQRADEKEPSGPYESDEDKSDYNLVVDEDQPSEPPSPATTPCGKVPICIPARRDLVDSPASLASSLGSPLPRAKELILNDLPASTPASKSCDSSPPQDASTPGPSSASHLCQLAAKPAPSTDSVALRSPLTLSSPFTTSFSLGSHSTLNGDLSVPSSYVSLHLSPQVSSSVVYGRSPVMAFESHPHLRGSSVSSSLPSIPGGKPAYSFHVSADGQMQPVPFPSDALVGAGIPRHARQLHTLAHGEVVCAVTISGSTQHVYTGGKGCVKVWDVGQPGAKTPVAQLDCLNRDNYIRSCKLLPDGRSLIVGGEASTLSIWDLAAPTPRIKAELTSSAPACYALAVSPDAKVCFSCCSDGNIVVWDLQNQTMVRQFQGHTDGASCIDISDYGTRLWTGGLDNTVRCWDLREGRQLQQHDFSSQIFSLGHCPNQDWLAVGMESSNVEILHVRKPEKYQLHLHESCVLSLKFASCVQGVVLSPEL

SEQ ID NO: 90006 - protein, 621 aa, Homo sapiens; identical to SEQ ID NO: 90004
  Payload ID: 18005
  Gene Name: transducin-like enhancer of split 2
  Uniprot ID: Q04725
  ENSP ID: ENSP00000413107

SEQ ID NO: 90007 - protein, 280 aa, Homo sapiens
  Payload ID: 18005
  Gene Name: transducin-like enhancer of split 2
  ENSP ID: ENSP00000465292
  MOD_RES (1)..(1): Any amino acid
XQEHQQQVLQAVERAKQVTVGELNSLIGVSSSVVYGRSPVMAFESHPHLRGSSVSSSLPSIPGGKPAYSFHVSADGQMQPVPFPSDALVGAGIPRHARQLHTLAHGEVVCAVTISGSTQHVYTGGKGCVKVWDVGQPGAKTPVAQLDCLNRDNYIRSCKLLPDGRSLIVGGEASTLSIWDLAAPTPRIKAELTSSAPACYALAVSPDAKVCFSCCSDGNIVVWDLQNQTMVRQFQGHTDGASCIDISDYGTRLWTGGLDNTVRCWDLREGRQLQQHDFSS

SEQ ID NO: 90008 - protein, 119 aa, Homo sapiens
  Payload ID: 18005
  Gene Name: transducin-like enhancer of split 2
  ENSP ID: ENSP00000465519
MQRHYVMYYEMSYGLNIEMHKQAEIVKRLSGICAQIIPFLTQEHQQQVLQAVERAKQVTVGELNSLIGQQLQPLSHHAPPVPLTPPLPRNRTSHLLSGQRLHTFPCCMWGPMGRGPRWK

SEQ ID NO: 90009 - protein, 744 aa, Homo sapiens
  Payload ID: 18005
  Gene Name: transducin-like enhancer of split 2
  ENSP ID: ENSP00000466542
MYPQGRHPTPLQSGQPFKFSILEICDRIKEEFQFLQAQYHSLKLECEKLASEKTEMQRHYVMYYEMSYGLNIEMHKQAEIVKRLSGICAQIIPFLTQEHQQQVLQAVERAKQVTVGELNSLIGQQQLQPLSHHAPPVPLTPRPAGLVGGSATGLLALSGALAAQAQLAAAVKEDRAGVEAEGSRVERAPSRSASPSPPESLVEEERPSGPGGGGKQRADEKEPSGPYESDEDKSDYNLVVDEDQPSEPPSPATTPCGKVPICIPARRDLVDSPASLASSLGSPLPRAKELILNDLPASTPASKSCDSSPPQDASTPGPSSASHLCQLAAKPAPSTDSVALRSPLTLSSPFTTSFSLGSHSTLNGDLSVPSSYVSLHLSPQVSSSVVYGRSPVMAFESHPHLRGSSVSSSLPSIPGGKPAYSFHVSADGQMQPVPFPSDALVGAGIPRHARQLHTLAHGEVVCAVTISGSTQHVYTGGKGCVKVWDVGQPGAKTPVAQLDCLNRDNYIRSCKLLPDGRSLIVGGEASTLSIWDLAAPTPRIKAELTSSAPACYALAVSPDAKVCFSCCSDGNIVVWDLQNQTMVRQFQGHTDGASCIDISDYGTRLWTGGLDNTVRCWDLREGRQLQQHDFSSQIFSLGHCPNQDWLAVGMESSNVEILHVRKPEKYQLHLHESCVLSLKFASCGRWFVSTGKDNLLNAWRTPYGASIFQSKESSSVLSCDISRNNKYIVTGSGDKKATVYEVVY

SEQ ID NO: 90010 - protein, 131 aa, Homo sapiens
  Payload ID: 18005
  Gene Name: transducin-like enhancer of split 2
  ENSP ID: ENSP00000467337
  MOD_RES (1)..(1): Any amino acid
XQTPLQSGQPFKFSILEICDRIKEEFQFLQAQYHSLKLECEKLASEKTEMQRHYVMYYEMSYGLNIEMHKQSASPSPPESLVEEERPSGPGGGGKQRADEKEPSGPYESDEDKSDYNLVVDEDQPSEPPSP

SEQ ID NO: 90011 - protein, 140 aa, Homo sapiens
  Payload ID: 18005
  Gene Name: transducin-like enhancer of split 2
  ENSP ID: ENSP00000467358
MYPQGRHPTPLQSGQPFKFSILEICDRIKEEFQFLQAQYHSLKLECEKLASEKTEMQRHYVMYYEMSYGLNIEMHKQAEIVKRLSGICAQIIPFLTQESASPSPPESLVEEERPSGPGGGGKQRADEKEPSGPYESDEDK

SEQ ID NO: 90012 - protein, 706 aa, Homo sapiens; identical to SEQ ID NO: 90005
  Payload ID: 18005
  Gene Name: transducin-like enhancer of split 2
  Uniprot ID: Q04725
  ENSP ID: ENSP00000468279

SEQ ID NO: 90013 - protein, 178 aa, Homo sapiens
  Payload ID: 18005
  Gene Name: transducin-like enhancer of split 2
  ENSP ID: ENSP00000468666
MYPQGRHPTPLQSGQPFKFSILEICDRIKEEFQFLQAQYHSLKLECEKLASEKTEMQRHYVMYYEMSYGLNIEMHKQAEIVKRLSGICAQIIPFLTQEHQQQVLQAVERAKQVTVGELNSLIGQQQLQPLSHHAPPVPLTPRPAGLVGGSATGLLALSGALAAQAQLAAAVKEDRAGV

SEQ ID NO: 90014 - protein, 760 aa, Homo sapiens
  Payload ID: 18006
  Gene Name: transducin-like enhancer of split 3
  Uniprot ID: Q04726
  ENSP ID: ENSP00000319233
MYPQGRHPAPHQPGQPGFKFTVAESCDRIKDEFQFLQAQYHSLKVEYDKLANEKTEMQRHYVMYYEMSYGLNIEMHKQTEIAKRLNTILAQIMPFLSQEHQQQVAQAVERAKQVTMTELNAIIGQQQLQAQHLSHATHGPPVQLPPHPSGLQPPGIPPVTGSSSGLLALGALGSQAHLTVKDEKNHHELDHRERESSANNSVSPSESLRASEKHRGSADYSMEAKKRKAEEKDSLSRYDSDGDKSDDLVVDVSNEDPATPRVSPAHSPPENGLDKARSLKKDAPTSPASVASSSSTPSSKTKDLGHNDKSSTPGLKSNTPTPRNDAPTPGTSTTPGLRSMPASALRTPISITSSYAAPFAMMSHHEMNGSLTSPGAYAGLHNIPPQMSAAAAAAAAAYGRSPMVSFGAVGFDPHPPMRATGLPSSLASIPGGKPAYSFHVSADGQMQPVPFPHDALAGPGIPRHARQINTLSHGEVVCAVTISNPTRHVYTGGKGCVKIWDISQPGSKSPISQLDCLNRDNYIRSCKLLPDGRTLIVGGEASTLTIWDLASPTPRIKAELTSSAPACYALAISPDAKVCFSCCSDGNIAVWDLHNQTLVRQFQGHTDGASCIDISHDGTKLWTGGLDNTVRSWDLREGRQLQQHDFTSQIFSLGYCPTGEWLAVGMESSNVEVLHHTKPDKYQLHLHESCVLSLKFAYCGKWFVSTGKDNLLNAWRTPYGASIFQSKESSSVLSCDISADDKYIVTGSGDKKATVYEVIY

SEQ ID NO: 90015 - protein, 769 aa, Homo sapiens
  Payload ID: 18006
  Gene Name: transducin-like enhancer of split 3
  Uniprot ID: Q04726
  ENSP ID: ENSP00000394717
MYPQGRHPAPHQPGQPGFKFTVAESCDRIKDEFQFLQAQYHSLKVEYDKLANEKTEMQRHYVMYYEMSYGLNIEMHKQTEIAKRLNTILAQIMPFLSQEHQQQVAQAVERAKQVTMTELNAIIGQQQLQAQHLSHATHGPPVQLPPHPSGLQPPGIPPVTGSSSGLLALGALGSQAHLTVKDEKNHHELDHRERESSANNSVSPSESLRASEKHRGSADYSMEAKKRKAEEKDSLSRYDSDGDKSDDLVVDVSNEDPATPRVSPAHSPPENGLDKARSLKKDAPTSPASVASSSSTPSSKTKDLGHNDKSSTPGLKSNTPTPRNDAPTPGTSTTPGLRSMPGKPPGMDPIASALRTPISITSSYAAPFAMMSHHEMNGSLTSPGAYAGLHNIPPQMSAAAAAAAAAYGRSPMVSFGAVGFDPHPPMRATGLPSSLASIPGGKPAYSFHVSADGQMQPVPFPHDALAGPGIPRHARQINTLSHGEVVCAVTISNPTRHVYTGGKGCVKIWDISQPGSKSPISQLDCLNRDNYIRSCKLLPDGRTLIVGGEASTLTIWDLASPTPRIKAELTSSAPACYALAISPDAKVCFSCCSDGNIAVWDLHNQTLVRQFQGHTDGASCIDISHDGTKLWTGGLDNTVRSWDLREGRQLQQHDFTSQIFSLGYCPTGEWLAVGMESSNVEVLHHTKPDKYQLHLHESCVLSLKFAYCGKWFVSTGKDNLLNAWRTPYGASIFQSKESSSVLSCDISADDKYIVTGSGDKKATVYEVIY

SEQ ID NO: 90016 - protein, 762 aa, Homo sapiens
  Payload ID: 18006
  Gene Name: transducin-like enhancer of split 3
  Uniprot ID: Q04726
  ENSP ID: ENSP00000415057
MAPHQPGQPGFKFTVAESCDRIKDEFQFLQAQYHSLKVEYDKLANEKTEMQRHYVMYYEMSYGLNIEMHKQTEIAKRLNTILAQIMPFLSQEHQQQVAQAVERAKQVTMTELNAIIGQQQLQAQHLSHATHGPPVQLPPHPSGLQPPGIPPVTGSSSGLLALGALGSQAHLTVKDEKNHHELDHRERESSANNSVSPSESLRASEKHRGSADYSMEAKKRKAEEKDSLSRYDSDGDKSDDLVVDVSNEDPATPRVSPAHSPPENGLDKARSLKKDAPTSPASVASSSSTPSSKTKDLGHNDKSSTPGLKSNTPTPRNDAPTPGTSTTPGLRSMPGKPPGMDPIASALRTPISITSSYAAPFAMMSHHEMNGSLTSPGAYAGLHNIPPQMSAAAAAAAAAYGRSPMVSFGAVGFDPHPPMRATGLPSSLASIPGGKPAYSFHVSADGQMQPVPFPHDALAGPGIPRHARQINTLSHGEVVCAVTISNPTRHVYTGGKGCVKIWDISQPGSKSPISQLDCLNRDNYIRSCKLLPDGRTLIVGGEASTLTIWDLASPTPRIKAELTSSAPACYALAISPDAKVCFSCCSDGNIAVWDLHNQTLVRQFQGHTDGASCIDISHDGTKLWTGGLDNTVRSWDLREGRQLQQHDFTSQIFSLGYCPTGEWLAVGMESSNVEVLHHTKPDKYQLHLHESCVLSLKFAYCGKWFVSTGKDNLLNAWRTPYGASIFQSKESSSVLSCDISADDKYIVTGSGDKKATVYEVIY

SEQ ID NO: 90017 - protein, 699 aa, Homo sapiens
  Payload ID: 18006
  Gene Name: transducin-like enhancer of split 3
  ENSP ID: ENSP00000442594
MSYGLNIEMHKQTEIAKRLNTILAQIMPFLSQEHQQQVAQAVERAKQVTMTELNAIIGVRGLPNLPLTQQQLQAQHLSHATHGPPVQLPPHPSGLQPPGIPPVTGSSSGLLALGALGSQAHLTVKDEKNHHELDHRERESSANNSVSPSESLRASEKHRGSADYSMEAKKRKAEEKDSLSRYDSDGDKSDDLVVDVSNEDPATPRVSPAHSPPENGLDKARSLKKDAPTSPASVASSSSTPSSKTKDLGHNDKSSTPGLKSNTPTPRNDAPTPGTSTTPGLRSMPASALRTPISITSSYAAPFAMMSHHEMNGSLTSPGAYAGLHNIPPQMSAAAAAAAAAYGRSPMVGFDPHPPMRATGLPSSLASIPGGKPAYSFHVSADGQMQPVPFPHDALAGPGIPRHARQINTLSHGEVVCAVTISNPTRHVYTGGKGCVKIWDISQPGSKSPISQLDCLNRDNYIRSCKLLPDGRTLIVGGEASTLTIWDLASPTPRIKAELTSSAPACYALAISPDAKVCFSCCSDGNIAVWDLHNQTLVRQFQGHTDGASCIDISHDGTKLWTGGLDNTVRSWDLREGRQLQQHDFTSQIFSLGYCPTGEWLAVGMESSNVEVLHHTKPDKYQLHLHESCVLSLKFAYCGKWFVSTGKDNLLNAWRTPYGASIFQSKESSSVLSCDISADDKYIVTGSGDKKATVYEVIY

SEQ ID NO: 90018 - protein, 445 aa, Homo sapiens
  Payload ID: 18006
  Gene Name: transducin-like enhancer of split 3
  ENSP ID: ENSP00000452803
MYPQGRHPAPHQPGQPGFKFTVAESCDRIKDEFQFLQAQYHSLKVEYDKLANEKTEMQRHYVMYYEMSYGLNIEMHKQTEIAKRLNTILAQIMPFLSQEHQQQVAQAVERAKQVTMTELNAIIGQQQLQAQHLSHATHGPPVQLPPHPSGLQPPGIPPVTGSSSGLLALGALGSQAHLTVKDEKNHHELDHRERESSANNSVSPSESLRASEKHRGSADYSMEAKKRKAEEKDSLSRYDSDGDKSDDLVVDVSNEDPATPRVSPAHSPPENGLDKARSLKKDAPTSPASVASSSSTPSSKTKDLGHNDKSSTPGLKSNTPTPRNDAPTPGTSTTPGLRSMPGKPPGMDPIASALRTPISITSSYAAPFAMMSHHEMNGSLTSPGAYAGLHNIPPQMSAAAAAAAAAYGRSPMVGFDPHPPMRATGLPSSLASIPGGKPVLIPCEC

SEQ ID NO: 90019 - protein, 154 aa, Homo sapiens
  Payload ID: 18006
  Gene Name: transducin-like enhancer of split 3
  ENSP ID: ENSP00000452809
MRPRAWGAVGAPTPAGGAAWIWGDERQVPTTAQPQGGPERGHNLVLPSPSPASIAGATWRRYYEMSYGLNIEMHKQTEIAKRLNTILAQIMPFLSQEHQQQVAQAVERAKQVTMTELNAIIGQQQLQAQHLSHATHGPPVQLPPHPSGLQPPGI

SEQ ID NO: 90020 - protein, 772 aa, Homo sapiens
  Payload ID: 18006
  Gene Name: transducin-like enhancer of split 3
  Uniprot ID: Q04726
  ENSP ID: ENSP00000452871
MYPQGRHPAPHQPGQPGFKFTVAESCDRIKDEFQFLQAQYHSLKVEYDKLANEKTEMQRHYVMYYEMSYGLNIEMHKQTEIAKRLNTILAQIMPFLSQEHQQQVAQAVERAKQVTMTELNAIIGQQQLQAQHLSHATHGPPVQLPPHPSGLQPPGIPPVTGSSSGLLALGALGSQAHLTVKDEKNHHELDHRERESSANNSVSPSESLRASEKHRGSADYSMEAKKRKAEEKDSLSRYDSDGDKSDDLVVDVSNEDPATPRVSPAHSPPENGLDKARSLKKDAPTSPASVASSSSTPSSKTKDLGHNDKSSTPGLKSNTPTPRNDAPTPGTSTTPGLRSMPGKPPGMDPIGIMASALRTPISITSSYAAPFAMMSHHEMNGSLTSPGAYAGLHNIPPQMSAAAAAAAAAYGRSPMVSFGAVGFDPHPPMRATGLPSSLASIPGGKPAYSFHVSADGQMQPVPFPHDALAGPGIPRHARQINTLSHGEVVCAVTISNPTRHVYTGGKGCVKIWDISQPGSKSPISQLDCLNRDNYIRSCKLLPDGRTLIVGGEASTLTIWDLASPTPRIKAELTSSAPACYALAISPDAKVCFSCCSDGNIAVWDLHNQTLVRQFQGHTDGASCIDISHDGTKLWTGGLDNTVRSWDLREGRQLQQHDFTSQIFSLGYCPTGEWLAVGMESSNVEVLHHTKPDKYQLHLHESCVLSLKFAYCGKWFVSTGKDNLLNAWRTPYGASIFQSKESSSVLSCDISADDKYIVTGSGDKKATVYEVIY

SEQ ID NO: 90021 - protein, 778 aa, Homo sapiens
  Payload ID: 18006
  Gene Name: transducin-like enhancer of split 3
  ENSP ID: ENSP00000452881
MPPPPPLSCLRGLQAPHQPGQPGFKFTVAESCDRIKDEFQFLQAQYHSLKVEYDKLANEKTEMQRHYVMYYEMSYGLNIEMHKQTEIAKRLNTILAQIMPFLSQEHQQQVAQAVERAKQVTMTELNAIIGQQQLQAQHLSHATHGPPVQLPPHPSGLQPPGIPPVTGSSSGLLALGALGSQAHLTVKDEKNHHELDHRERESSANNSVSPSESLRASEKHRGSADYSMEAKKRKAEEKDSLSRYDSDGDKSDDLVVDVSNEDPATPRVSPAHSPPENGLDKARSLKKDAPTSPASVASSSSTPSSKTKDLGHNDKSSTPGLKSNTPTPRNDAPTPGTSTTPGLRSMPGKPPGMDPIGIMASALRTPISITSSYAAPFAMMSHHEMNGSLTSPGAYAGLHNIPPQMSAAAAAAAAAYGRSPMVSFGAVGFDPHPPMRATGLPSSLASIPGGKPAYSFHVSADGQMQPVPFPHDALAGPGIPRHARQINTLSHGEVVCAVTISNPTRHVYTGGKGCVKIWDISQPGSKSPISQLDCLNRDNYIRSCKLLPDGRTLIVGGEASTLTIWDLASPTPRIKAELTSSAPACYALAISPDAKVCFSCCSDGNIAVWDLHNQTLVRQFQGHTDGASCIDISHDGTKLWTGGLDNTVRSWDLREGRQLQQHDFTSQIFSLGYCPTGEWLAVGMESSNVEVLHHTKPDKYQLHLHESCVLSLKFAYCGKWFVSTGKDNLLNAWRTPYGASIFQSKESSSVLSCDISADDKYIVTGSGDKKATVYEVIY

SEQ ID NO: 90022 - protein, 774 aa, Homo sapiens
  Payload ID: 18006
  Gene Name: transducin-like enhancer of split 3
  ENSP ID: ENSP00000452933
MPPPPPLSCLRGLQAPHQPGQPGFKFTVAESCDRIKDEFQFLQAQYHSLKVEYDKLANEKTEMQRHYVMYYEMSYGLNIEMHKQTEIAKRLNTILAQIMPFLSQEHQQQVAQAVERAKQVTMTELNAIIGQQLQAQHLSHATHGPPVQLPPHPSGLQPPGIPPVTGSSSGLLALGALGSQAHLTVKDEKNHHELDHRERESSANNSVSPSESLRASEKHRGSADYSMEAKKRKAEEKDSLSRYDSDGDKSDDLVVDVSNEDPATPRVSPAHSPPENGLDKARSLKKDAPTSPASVASSSSTPSSKTKDLGHNDKSSTPGLKSNTPTPRNDAPTPGTSTTPGLRSMPGKPPGMDPIASALRTPISITSSYAAPFAMMSHHEMNGSLTSPGAYAGLHNIPPQMSAAAAAAAAAYGRSPMVSFGAVGFDPHPPMRATGLPSSLASIPGGKPAYSFHVSADGQMQPVPFPHDALAGPGIPRHARQINTLSHGEVVCAVTISNPTRHVYTGGKGCVKIWDISQPGSKSPISQLDCLNRDNYIRSCKLLPDGRTLIVGGEASTLTIWDLASPTPRIKAELTSSAPACYALAISPDAKVCFSCCSDGNIAVWDLHNQTLVRQFQGHTDGASCIDISHDGTKLWTGGLDNTVRSWDLREGRQLQQHDFTSQIFSLGYCPTGEWLAVGMESSNVEVLHHTKPDKYQLHLHESCVLSLKFAYCGKWFVSTGKDNLLNAWRTPYGASIFQSKESSSVLSCDISADDKYIVTGSGDKKATVYEVIY

SEQ ID NO: 90023 - protein, 782 aa, Homo sapiens
  Payload ID: 18006
  Gene Name: transducin-like enhancer of split 3
  ENSP ID: ENSP00000453081
MYPQGRHPAPHQPGQPGFKFTVAESCDRIKDEFQFLQAQYHSLKVEYDKLANEKTEMQRHYVMYYEMSYGLNIEMHKQTEIAKRLNTILAQIMPFLSQEHQQQVAQAVERAKQVTMTELNAIIGVRGLPNLPLTQQQLQAQHLSHATHGPPVQLPPHPSGLQPPGIPPVTGSSSGLLALGALGSQAHLTVKDEKNHHELDHRERESSANNSVSPSESLRASEKHRGSADYSMEAKKRKAEEKDSLSRYDSDGDKSDDLVVDVSNEDPATPRVSPAHSPPENGLDKARSLKKDAPTSPASVASSSSTPSSKTKDLGHNDKSSTPGLKSNTPTPRNDAPTPGTSTTPGLRSMPGKPPGMDPIGIMASALRTPISITSSYAAPFAMMSHHEMNGSLTSPGAYAGLHNIPPQMSAAAAAAAAAYGRSPMVSFGAVGFDPHPPMRATGLPSSLASIPGGKPAYSFHVSADGQMQPVPFPHDALAGPGIPRHARQINTLSHGEVVCAVTISNPTRHVYTGGKGCVKIWDISQPGSKSPISQLDCLNRDNYIRSCKLLPDGRTLIVGGEASTLTIWDLASPTPRIKAELTSSAPACYALAISPDAKVCFSCCSDGNIAVWDLHNQTLVRQFQGHTDGASCIDISHDGTKLWTGGLDNTVRSWDLREGRQLQQHDFTSQIFSLGYCPTGEWLAVGMESSNVEVLHHTKPDKYQLHLHESCVLSLKFAYCGKWFVSTGKDNLLNAWRTPYGASIFQSKESSSVLSCDISADDKYIVTGSGDKKATVYEVIY

SEQ ID NO: 90024 - protein, 764 aa, Homo sapiens
  Payload ID: 18006
  Gene Name: transducin-like enhancer of split 3
  Uniprot ID: Q04726
  ENSP ID: ENSP00000453083
MYPQGRHPAPHQPGQPGFKFTVAESCDRIKDEFQFLQAQYHSLKVEYDKLANEKTEMQRHYVMYYEMSYGLNIEMHKQTEIAKRLNTILAQIMPFLSQEHQQQVAQAVERAKQVTMTELNAIIGQQQLQAQHLSHATHGPPVQLPPHPSGLQPPGIPPVTGSSSGLLALGALGSQAHLTVKDEKNHHELDHRERESSANNSVSPSESLRASEKHRGSADYSMEAKKRKAEEKDSLSRYDSDGDKSDDLVVDVSNEDPATPRVSPAHSPPENGLDKARSLKKDAPTSPASVASSSSTPSSKTKDLGHNDKSSTPGLKSNTPTPRNDAPTPGTSTTPGLRSMPGKPPGMDPIASALRTPISITSSYAAPFAMMSHHEMNGSLTSPGAYAGLHNIPPQMSAAAAAAAAAYGRSPMVGFDPHPPMRATGLPSSLASIPGGKPAYSFHVSADGQMQPVPFPHDALAGPGIPRHARQINTLSHGEVVCAVTISNPTRHVYTGGKGCVKIWDISQPGSKSPISQLDCLNRDNYIRSCKLLPDGRTLIVGGEASTLTIWDLASPTPRIKAELTSSAPACYALAISPDAKVCFSCCSDGNIAVWDLHNQTLVRQFQGHTDGASCIDISHDGTKLWTGGLDNTVRSWDLREGRQLQQHDFTSQIFSLGYCPTGEWLAVGMESSNVEVLHHTKPDKYQLHLHESCVLSLKFAYCGKWFVSTGKDNLLNAWRTPYGASIFQSKESSSVLSCDISADDKYIVTGSGDKKATVYEVIY

SEQ ID NO: 90025 - protein, 764 aa, Homo sapiens; identical to SEQ ID NO: 90024
  Payload ID: 18006
  Gene Name: transducin-like enhancer of split 3
  Uniprot ID: Q04726
  ENSP ID: ENSP00000453107

SEQ ID NO: 90026 - protein, 611 aa, Homo sapiens
  Payload ID: 18006
  Gene Name: transducin-like enhancer of split 3
  ENSP ID: ENSP00000453219
  MOD_RES (1)..(1): Any amino acid
XPPTTLPPAPRLFVSTWGGRPTLGFRCENELGGPGASSRFPGRPPLGLGSPLPRTSPARALGASTLSESRPLPAMYPQGRHPAPHQPGQPGFKFTVAESCDRIKDEFQFLQAQYHSLKVEYDKLANEKTEMQRHYVMYYEMSYGLNIEMHKQTEIAKRLNTILAQIMPFLSQEHQQQVAQAVERAKQVTMTELNAIIGQQQLQAQHLSHATHGPPVQLPPHPSGLQPPGIPPVTGSSSGLLALGALGSQAHLTVKDEKNHHELDHRERESSANNSVSPSESLRASEKHRGSADYSMEAKKRKAEEKDSLSRYDSDGDKSDDLVVDVSNEDPATPRVSPAHSPPENGLDKARSLKKDAPTSPASVASSSSTPSSKTKDLGHNDKSSTPGLKSNTPTPRNDAPTPGTSTTPGLRSMPGKPPGMDPIASALRTPISITSSYAAPFAMMSHHEMNGSLTSPGAYAGLHNIPPQMSAAAAAAAAAYGRSPMVSFGAVGFDPHPPMRATGLPSSLASIPGGKPAYSFHVSADGQMQPVPFPHDALAGPGIPRHARQINTLSHGEVVCAVTISNPTRHVYTGGKGCVKIWDISQPGSKSPISQLDCLGQLHPLLQAAP

SEQ ID NO: 90027 - protein, 448 aa, Homo sapiens
  Payload ID: 18006
  Gene Name: transducin-like enhancer of split 3
  ENSP ID: ENSP00000453373
MYPQGRHPAPHQPGQPGFKFTVAESCDRIKDEFQFLQAQYHSLKVEYDKLANEKTEMQRHYVMYYEMSYGLNIEMHKQTEIAKRLNTILAQIMPFLSQEHQQQVAQAVERAKQVTMTELNAIIGQQQLQAQHLSHATHGPPVQLPPHPSGLQPPGIPPVTGSSSGLLALGALGSQAHLTVKDEKNHHELDHRERESSANNSVSPSESLRASEKHRGSADYSMEAKKRKAEEKDSLSRYDSDGDKSDDLVVDVSNEDPATPRVSPAHSPPENGLDKARSLKKDAPTSPASVASSSSTPSSKTKDLGHNDKSSTPGLKSNTPTPRNDAPTPGTSTTPGLRSMPGKPPGMDPIGIMASALRTPISITSSYAAPFAMMSHHEMNGSLTSPGAYAGLHNIPPQMSAAAAAAAAAYGRSPMVGFDPHPPMRATGLPSSLASIPGGKPVLIPCEC

SEQ ID NO: 90028 - protein, 767 aa, Homo sapiens
  Payload ID: 18006
  Gene Name: transducin-like enhancer of split 3
  Uniprot ID: Q04726
  ENSP ID: ENSP00000453435
MYPQGRHPAPHQPGQPGFKFTVAESCDRIKDEFQFLQAQYHSLKVEYDKLANEKTEMQRHYVMYYEMSYGLNIEMHKQTEIAKRLNTILAQIMPFLSQEHQQQVAQAVERAKQVTMTELNAIIGQQQLQAQHLSHATHGPPVQLPPHPSGLQPPGIPPVTGSSSGLLALGALGSQAHLTVKDEKNHHELDHRERESSANNSVSPSESLRASEKHRGSADYSMEAKKRKAEEKDSLSRYDSDGDKSDDLVVDVSNEDPATPRVSPAHSPPENGLDKARSLKKDAPTSPASVASSSSTPSSKTKDLGHNDKSSTPGLKSNTPTPRNDAPTPGTSTTPGLRSMPGKPPGMDPIGIMASALRTPISITSSYAAPFAMMSHHEMNGSLTSPGAYAGLHNIPPQMSAAAAAAAAAYGRSPMVGFDPHPPMRATGLPSSLASIPGGKPAYSFHVSADGQMQPVPFPHDALAGPGIPRHARQINTLSHGEVVCAVTISNPTRHVYTGGKGCVKIWDISQPGSKSPISQLDCLNRDNYIRSCKLLPDGRTLIVGGEASTLTIWDLASPTPRIKAELTSSAPACYALAISPDAKVCFSCCSDGNIAVWDLHNQTLVRQFQGHTDGASCIDISHDGTKLWTGGLDNTVRSWDLREGRQLQQHDFTSQIFSLGYCPTGEWLAVGMESSNVEVLHHTKPDKYQLHLHESCVLSLKFAYCGKWFVSTGKDNLLNAWRTPYGASIFQSKESSSVLSCDISADDKYIVTGSGDKKATVYEVIY

SEQ ID NO: 90029 - protein, 772 aa, Homo sapiens
  Payload ID: 18006
  Gene Name: transducin-like enhancer of split 3
  Uniprot ID: Q04726
  ENSP ID: ENSP00000453760
MPPPPPLSCLRGLQAPHQPGQPGFKFTVAESCDRIKDEFQFLQAQYHSLKVEYDKLANEKTEMQRHYVMYYEMSYGLNIEMHKQTEIAKRLNTILAQIMPFLSQEHQQQVAQAVERAKQVTMTELNAIIGQQLQAQHLSHATHGPPVQLPPHPSGLQPPGIPPVTGSSSGLLALGALGSQAHLTVKDEKNHHELDHRERESSANNSVSPSESLRASEKHRGSADYSMEAKKRKAEEKDSLSRYDSDGDKSDDLVVDVSNEDPATPRVSPAHSPPENGLDKARSLKKDAPTSPASVASSSSTPSSKTKDLGHNDKSSTPGLKSNTPTPRNDAPTPGTSTTPGLRSMPGKPPGMDPIGIMASALRTPISITSSYAAPFAMMSHHEMNGSLTSPGAYAGLHNIPPQMSAAAAAAAAAYGRSPMVGFDPHPPMRATGLPSSLASIPGGKPAYSFHVSADGQMQPVPFPHDALAGPGIPRHARQINTLSHGEVVCAVTISNPTRHVYTGGKGCVKIWDISQPGSKSPISQLDCLNRDNYIRSCKLLPDGRTLIVGGEASTLTIWDLASPTPRIKAELTSSAPACYALAISPDAKVCFSCCSDGNIAVWDLHNQTLVRQFQGHTDGASCIDISHDGTKLWTGGLDNTVRSWDLREGRQLQQHDFTSQIFSLGYCPTGEWLAVGMESSNVEVLHHTKPDKYQLHLHESCVLSLKFAYCGKWFVSTGKDNLLNAWRTPYGASIFQSKESSSVLSCDISADDKYIVTGSGDKKATVYEVIY

SEQ ID NO: 90030 - protein, 353 aa, Homo sapiens
  Payload ID: 18006
  Gene Name: transducin-like enhancer of split 3
  ENSP ID: ENSP00000454029
MVGFDPHPPMRATGLPSSLASIPGGKPAYSFHVSADGQMQPVPFPHDALAGPGIPRHARQINTLSHGEVVCAVTISNPTRHVYTGGKGCVKIWDISQPGSKSPISQLDCLNRDNYIRSCKLLPDGRTLIVGGEASTLTIWDLASPTPRIKAELTSSAPACYALAISPDAKVCFSCCSDGNIAVWDLHNQTLVRQFQGHTDGASCIDISHDGTKLWTGGLDNTVRSWDLREGRQLQQHDFTSQIFSLGYCPTGEWLAVGMESSNVEVLHHTKPDKYQLHLHESCVLSLKFAYCGKWFVSTGKDNLLNAWRTPYGASIFQSKESSSVLSCDISADDKYIVTGSGDKKATVYEVIY

SEQ ID NO: 90031 - protein, 716 aa, Homo sapiens
  Payload ID: 18006
  Gene Name: transducin-like enhancer of split 3
  ENSP ID: ENSP00000454141
MQRHYVMYYEMSYGLNIEMHKQTEIAKRLNTILAQIMPFLSQEHQQQVAQAVERAKQVTMTELNAIIGQQQLQAQHLSHATHGPPVQLPPHPSGLQPPGIPPVTGSSSGLLALGALGSQAHLTVKDEKNHHELDHRERESSANNSVSPSESLRASEKHRGSADYSMEAKKRKAEEKDSLSRYDSDGDKSDDLVVDVSNEDPATPRVSPAHSPPENGLDKARSLKKDAPTSPASVASSSSTPSSKTKDLGHNDKSSTPGLKSNTPTPRNDAPTPGTSTTPGLRSMPGKPPGMDPIGIMASALRTPISITSSYAAPFAMMSHHEMNGSLTSPGAYAGLHNIPPQMSAAAAAAAAAYGRSPMVSFGAVGFDPHPPMRATGLPSSLASIPGGKPAYSFHVSADGQMQPVPFPHDALAGPGIPRHARQINTLSHGEVVCAVTISNPTRHVYTGGKGCVKIWDISQPGSKSPISQLDCLNRDNYIRSCKLLPDGRTLIVGGEASTLTIWDLASPTPRIKAELTSSAPACYALAISPDAKVCFSCCSDGNIAVWDLHNQTLVRQFQGHTDGASCIDISHDGTKLWTGGLDNTVRSWDLREGRQLQQHDFTSQIFSLGYCPTGEWLAVGMESSNVEVLHHTKPDKYQLHLHESCVLSLKFAYCGKWFVSTGKDNLLNAWRTPYGASIFQSKESSSVLSCDISADDKYIVTGSGDKKATVYEVIY

SEQ ID NO: 90032 - protein, 39 aa, Homo sapiens
  Payload ID: 18006
  Gene Name: transducin-like enhancer of split 3
  ENSP ID: ENSP00000456178
VAQAVERAKQVTMTELNAIIGIRKFEAPGLEVTCPRPHS

SEQ ID NO: 90033 - protein, 103 aa, Homo sapiens
  Payload ID: 18006
  Gene Name: transducin-like enhancer of split 3
  ENSP ID: ENSP00000457641
MQRHYVMYYEMSYGLNIEMHKQTEIAKRLNTILAQIMPFLSQEHQQQVAQAVERAKQVTMTELNAIIGVRGLPNLPLTQQQLQAQHLSHATHGPPVQLPPHPS

SEQ ID NO: 90034 - protein, 772 aa, Homo sapiens
  Payload ID: 18006
  Gene Name: transducin-like enhancer of split 3
  ENSP ID: ENSP00000485965
MYPQGRHPAPHQPGQPGFKFTVAESCDRIKDEFQFLQAQYHSLKVEYDKLANEKTEMQRHYVMYYEMSYGLNIEMHKQTEIAKRLNTILAQIMPFLSQEHQQQVAQAVERAKQVTMTELNAIIGQQQLQAQHLSHATHGPPVQLPPHPSGLQPPGIPPVTGSSSGLLALGALGSQAHLTVKDEKNHHELDHRGAAGLGNNSVSPSESLRASEKHRGSADYSMEAKKRKAEEKDSLSRYDSDGDKSDDLVVDVSNEDPATPRVSPAHSPPENGLDKARSLKKDAPTSPASVASSSSTPSSKTKDLGHNDKSSTPGLKSNTPTPRNDAPTPGTSTTPGLRSMPGKPPGMDPIGIMASALRTPISITSSYAAPFAMMSHHEMNGSLTSPGAYAGLHNIPPQMSAAAAAAAAAYGRSPMVSFGAVGFDPHPPMRATGLPSSLASIPGGKPAYSFHVSADGQMQPVPFPHDALAGPGIPRHARQINTLSHGEVVCAVTISNPTRHVYTGGKGCVKIWDISQPGSKSPISQLDCLNRDNYIRSCKLLPDGRTLIVGGEASTLTIWDLASPTPRIKAELTSSAPACYALAISPDAKVCFSCCSDGNIAVWDLHNQTLVRQFQGHTDGASCIDISHDGTKLWTGGLDNTVRSWDLREGRQLQQHDFTSQIFSLGYCPTGEWLAVGMESSNVEVLHHTKPDKYQLHLHESCVLSLKFAYCGKWFVSTGKDNLLNAWRTPYGASIFQSKESSSVLSCDISADDKYIVTGSGDKKATVYEVIY

SEQ ID NO: 90035 - protein, 748 aa, Homo sapiens
  Payload ID: 18007
  Gene Name: transducin-like enhancer of split 4
  Uniprot ID: Q04727
  ENSP ID: ENSP00000265284
MIRDLSKMYPQTRHPAPHQPAQPFKFTISESCDRIKEEFQFLQAQYHSLKLECEKLASEKTEMQRHYVMYYEMSYGLNIEMHKQAEIVKRLNAICAQVIPFLSQEQQLQAQHLSHGHGLPVPLTPHPSGLQPPAIPPIGSSAGLLALSSALGGQSHLPIKDEKKHHDNDHQRDRDSIKSSSVSPSASFRGAEKHRNSADYSSESKKQKTEEKEIAARYDSDGEKSDDNLVVDVSNEDPSSPRGSPAHSPRENGLDKTRLLKKDAPISPASIASSSSTPSSKSKELSLNEKSTTPVSKSNTPTPRTDAPTPGSNSTPGLRPVPGKPPGVDPLASSLRTPMAVPCPYPTPFGIVPHAGMNGELTSPGAAYAGLHNISPQMSAAAAAAAAAAAYGRSPVVGFDPHHHMRVPAIPPNLTGIPGGKPAYSFHVSADGQMQPVPFPPDALIGPGIPRHARQINTLNHGEVVCAVTISNPTRHVYTGGKGCVKVWDISHPGNKSPVSQLDCLNRDNYIRSCRLLPDGRTLIVGGEASTLSIWDLAAPTPRIKAELTSSAPACYALAISPDSKVCFSCCSDGNIAVWDLHNQTLVRQFQGHTDGASCIDISNDGTKLWTGGLDNTVRSWDLREGRQLQQHDFTSQIFSLGYCPTGEWLAVGMENSNVEVLHVTKPDKYQLHLHESCVLSLKFAHCGKWFVSTGKDNLLNAWRTPYGASIFQSKESSSVLSCDISVDDKYIVTGSGDKKATVYEVIY

SEQ ID NO: 90036 - protein, 805 aa, Homo sapiens
  Payload ID: 18007
  Gene Name: transducin-like enhancer of split 4
  Uniprot ID: Q04727
  ENSP ID: ENSP00000365720
MIRDLSKMYPQTRHPAPHQPAQPFKFTISESCDRIKEEFQFLQAQYHSLKLECEKLASEKTEMQRHYVMYYEMSYGLNIEMHKQAEIVKRLNAICAQVIPFLSQEHQQQVVQAVERAKQVTMAELNAIIGQQLQAQHLSHGHGLPVPLTPHPSGLQPPAIPPIGSSAGLLALSSALGGQSHLPIKDEKKHHDNDHQRDRDSIKSSSVSPSASFRGAEKHRNSADYSSESKKQKTEEKEIAARYDSDGEKSDDNLVVDVSNEDPSSPRGSPAHSPRENGLDKTRLLKKDAPISPASIASSSSTPSSKSKELSLKRDMGKLSETRLSEDEQCTLGLQRWFCRLWFMNEKSTTPVSKSNTPTPRTDAPTPGSNSTPGLRPVPGKPPGVDPLASSLRTPMAVPCPYPTPFGIVPHAGMNGELTSPGAAYAGLHNISPQMSAAAAAAAAAAAYGRSPVVGFDPHHHMRVPAIPPNLTGIPGGKPAYSFHVSADGQMQPVPFPPDALIGPGIPRHARQINTLNHGEVVCAVTISNPTRHVYTGGKGCVKVWDISHPGNKSPVSQLDCLNRDNYIRSCRLLPDGRTLIVGGEASTLSIWDLAAPTPRIKAELTSSAPACYALAISPDSKVCFSCCSDGNIAVWDLHNQTLVRQFQGHTDGASCIDISNDGTKLWTGGLDNTVRSWDLREGRQLQQHDFTSQIFSLGYCPTGEWLAVGMENSNVEVLHVTKPDKYQLHLHESCVLSLKFAHCGKWFVSTGKDNLLNAWRTPYGASIFQSKESSSVLSCDISVDDKYIVTGSGDKKATVYEVIY

SEQ ID NO: 90037 - protein, 704 aa, Homo sapiens
  Payload ID: 18007
  Gene Name: transducin-like enhancer of split 4
  Uniprot ID: Q04727
  ENSP ID: ENSP00000365727
MIRDLSKMYPQTRHPAPHQPAQPFKFTISESCDRIKEEFQFLQAQYHSLKLECEKLASEKTEMQRHYVMYYEMSYGLNIEMHKQAEIVKRLNAICAQVIPFLSQEHQQQVVQAVERAKQVTMAELNAIIGQQLQAQHLSHGHGLPVPLTPHPSGLQPPAIPPIGSSAGLLALSSALGGQSHLPIKDEKKHHDNDHQRDRDSIKSSSVSPSASFRGAEKHRNSADYSSESKKQKTEEKEIAARYNEKSTTPVSKSNTPTPRTDAPTPGSNSTPGLRPVPGKPPGVDPLASSLRTPMAVPCPYPTPFGIVPHAGMNGELTSPGAAYAGLHNISPQMSAAAAAAAAAAAYGRSPVVGFDPHHHMRVPAIPPNLTGIPGGKPAYSFHVSADGQMQPVPFPPDALIGPGIPRHARQINTLNHGEVVCAVTISNPTRHVYTGGKGCVKVWDISHPGNKSPVSQLDCLNRDNYIRSCRLLPDGRTLIVGGEASTLSIWDLAAPTPRIKAELTSSAPACYALAISPDSKVCFSCCSDGNIAVWDLHNQTLVRQFQGHTDGASCIDISNDGTKLWTGGLDNTVRSWDLREGRQLQQHDFTSQIFSLGYCPTGEWLAVGMENSNVEVLHVTKPDKYQLHLHESCVLSLKFAHCGKWFVSTGKDNLLNAWRTPYGASIFQSKESSSVLSCDISVDDKYIVTGSGDKKATVYEVIY

SEQ ID NO: 90038 - protein, 773 aa, Homo sapiens
  Payload ID: 18007
  Gene Name: transducin-like enhancer of split 4
  Uniprot ID: Q04727
  ENSP ID: ENSP00000365735
MIRDLSKMYPQTRHPAPHQPAQPFKFTISESCDRIKEEFQFLQAQYHSLKLECEKLASEKTEMQRHYVMYYEMSYGLNIEMHKQAEIVKRLNAICAQVIPFLSQEHQQQVVQAVERAKQVTMAELNAIIGQQLQAQHLSHGHGLPVPLTPHPSGLQPPAIPPIGSSAGLLALSSALGGQSHLPIKDEKKHHDNDHQRDRDSIKSSSVSPSASFRGAEKHRNSADYSSESKKQKTEEKEIAARYDSDGEKSDDNLVVDVSNEDPSSPRGSPAHSPRENGLDKTRLLKKDAPISPASIASSSSTPSSKSKELSLNEKSTTPVSKSNTPTPRTDAPTPGSNSTPGLRPVPGKPPGVDPLASSLRTPMAVPCPYPTPFGIVPHAGMNGELTSPGAAYAGLHNISPQMSAAAAAAAAAAAYGRSPVVGFDPHHHMRVPAIPPNLTGIPGGKPAYSFHVSADGQMQPVPFPPDALIGPGIPRHARQINTLNHGEVVCAVTISNPTRHVYTGGKGCVKVWDISHPGNKSPVSQLDCLNRDNYIRSCRLLPDGRTLIVGGEASTLSIWDLAAPTPRIKAELTSSAPACYALAISPDSKVCFSCCSDGNIAVWDLHNQTLVRQFQGHTDGASCIDISNDGTKLWTGGLDNTVRSWDLREGRQLQQHDFTSQIFSLGYCPTGEWLAVGMENSNVEVLHVTKPDKYQLHLHESCVLSLKFAHCGKWFVSTGKDNLLNAWRTPYGASIFQSKESSSVLSCDISVDDKYIVTGSGDKKATVYEVIY

SEQ ID NO: 90039 - protein, 128 aa, Homo sapiens
  Payload ID: 18007
  Gene Name: transducin-like enhancer of split 4
  ENSP ID: ENSP00000397822
MIRDLSKMYPQTRHPAPHQPAQPFKFTISESCDRIKEEFQFLQAQYHSLKLECEKLASEKTEMQRHYVMAEIVKRLNAICAQVIPFLSQEHQQQVVQAVERAKQVTMAELNAIIGQQQLQAQHLSHGH

SEQ ID NO: 90040 - protein, 211 aa, Homo sapiens
  Payload ID: 18007
  Gene Name: transducin-like enhancer of split 4
  ENSP ID: ENSP00000400334
  MOD_RES (1)..(1): Any amino acid
XSPAHSPRENGLDKTRLLKKDAPISPASIASSSSTPSSKSKELSLKRDMGKLSETRLSEDEQCTLGLQRWFCRLWFMNEKSTTPVSKSNTPTPRTDAPTPGSNSTPGLRPVPGKPPGVDPLASSLRTPMAVPCPYPTPFGIVPHAGMNGELTSPGAAYAGLHNISPQMSAAAAAAAAAAAYGRSPVVGFDPHHHMRVPAIPPNLTGIPGGK

SEQ ID NO: 90041 - protein, 322 aa, Homo sapiens
  Payload ID: 18007
  Gene Name: transducin-like enhancer of split 4
  ENSP ID: ENSP00000409313
APHQPAQPFKFTISESCDRIKEEFQFLQAQYHSLKLECEKLASEKTEMQRHYVMYYEMSYGLNIEMHKQAEIVKRLNAICAQVIPFLSQEHQQQVVQAVERAKQVTMAELNAIIGQQLQAQHLSHGHGLPVPLTPHPSGLQPPAIPPIGSSAGLLALSSALGGQSHLPIKDEKKHHDNDHQRDRDSIKSSSVSPSASFRGAEKHRNSADYSSESKKQKTEEKEIAARYDSDGEKSDDNLVVDVSNEKRDMGKLSETRLSEDEQCTLGLQRWFCRLWFMNEKSTTPVSKSNTPTPRTDAPTPGSNSTPGLRPVPGKPPGVDPL

SEQ ID NO: 90042 - protein, 195 aa, Homo sapiens
  Payload ID: 18007
  Gene Name: transducin-like enhancer of split 4
  ENSP ID: ENSP00000412567
MARVPPTGQFRFRAPHQPAQPFKFTISESCDRIKEEFQFLQAQYHSLKLECEKLASEKTEMQRHYVMYYEMSYGLNIEMHKQAEIVKRLNAICAQVIPFLSQEHQQQVVQAVERAKQVTMAELNAIIGQQLQAQHLSHGHGLPVPLTPHPSGLQPPAIPPIGSSAGLLALSSALGGQSHLPIKDEKKHHDNDHQR

SEQ ID NO: 90043 - protein, 224 aa, Homo sapiens
  Payload ID: 18007
  Gene Name: transducin-like enhancer of split 4
  ENSP ID: ENSP00000415423
MIRDLSKMYPQTRHPAPHQPAQPFKFTISESCDRIKEEFQFLQAQYHSLKLECEKLASEKTEMQRHYVMYYEMSYGLNIEMHKQAEIVKRLNAICAQVIPFLSQEHQQQVVQAVERAKQVTMAELNAIIGEKKNKSDTPGSLKQQQLQAQHLSHGHGLPVPLTPHPSGLQPPAIPPIGSSAGLLALSSALGGQSHLPIKDEKKHHDNDHQRGEQRLHQELFSIP

SEQ ID NO: 90044 - protein, 343 aa, Homo sapiens
  Payload ID: 18007
  Gene Name: transducin-like enhancer of split 4
  ENSP ID: ENSP00000417102
  MOD_RES (1)..(1): Any amino acid
XASFRGAEKHRNSADYSSESKKQKTEEKEIAARYDSDGEKSDDNLVVDVSNEDPSSPRGSPAHSPRENGLDKTRLLKKDAPISPASIASSSSTPSSKSKELSLNEKSTTPVSKSNTPTPRTDAPTPGSNSTPGLRPVPGKPPGVDPLASSLRTPMAVPCPYPTPFGIVPHAGMNGELTSPGAAYAGLHNISPQMSAAAAAAAAAAAYGRSPVVGFDPHHHMRVPAIPPNLTGIPGGKPTKCFYHLRAFPGNELEMELPRDTHRAYSFHVSADGQMQPVPFPPDALIGPGIPRHARQINTLNHGEVVCAVTISNPTRHVYTGGKGCVKVWDISHPGNKSPVSQL

SEQ ID NO: 90045 - protein, 90 aa, Homo sapiens
  Payload ID: 18007
  Gene Name: transducin-like enhancer of split 4
  ENSP ID: ENSP00000417245
MIRDLSKMYPQTRHPAPHQPAQPFKFTISESCDRIKEEFQFLQAQYHSLKLECEKLASEKTEMQRHYVMYYEMSYGLNIEMHKQRLFFTN

SEQ ID NO: 90046 - protein, 259 aa, Homo sapiens
  Payload ID: 18007
  Gene Name: transducin-like enhancer of split 4
  ENSP ID: ENSP00000417715
MIRDLSKMYPQTRHPAPHQPAQPFKFTISESCDRIKEEFQFLQAQYHSLKLECEKLASEKTEMQRHYVMYYEMSYGLNIEMHKQAEIVKRLNAICAQVIPFLSQEHQQQVVQAVERAKQVTMAELNAIIGQQLQAQHLSHGHGLPVPLTPHPSGLQPPAIPPIGSSAGLLALSSALGGQSHLPIKDEKKHHDNDHQRDRDSIKQNYLLLIMDEIGDQRGRTFWVPVSLNPDFKRHSPAMLVLCASTELFSIPISQFPRC

SEQ ID NO: 90047 - protein, 239 aa, Homo sapiens
  Payload ID: 18007
  Gene Name: transducin-like enhancer of split 4
  ENSP ID: ENSP00000417844
QQLQAQHLSHGHGLPVPLTPHPSGLQPPAIPPIGSSAGLLALSSALGGQSHLPIKDEKKHHDNDHQRDRDSIKSSSVSPSASFRGAEKHRNSADYSSESKKQKTEEKEIAARYDSDGEKSDDNLVVDVSNENEKSTTPVSKSNTPTPRTDAPTPGSNSTPGLRPVPGKPPGVDPLASSLRTPMAVPCPYPTPFGIVPHAGMNGELTSPGAAYAGLHNISPQMSAAAAAAAAAAAYGRSP

SEQ ID NO: 90048 - protein, 101 aa, Homo sapiens
  Payload ID: 18007
  Gene Name: transducin-like enhancer of split 4
  ENSP ID: ENSP00000417906
MIRDLSKMYPQTRHPAPHQPAQPFKFTISESCDRIKEEFQFLQAQYHSLKLECEKLASEKTEMQRHYVMYYEMSYGLNIEMHKQVSYFFITILNDSNTGTL

SEQ ID NO: 90049 - protein, 165 aa, Homo sapiens
  Payload ID: 18007
  Gene Name: transducin-like enhancer of split 4
  ENSP ID: ENSP00000418409
SSSVSPSASFRGAEKHRNSADYSSESKKQKTEEKEIAARYNEKSTTPVSKSNTPTPRTDAPTPGSNSTPGLRPVPGKPPGVDPLASSLRTPMAVPCPYPTPFGIVPHAGMNGELTSPGAAYAGLHNISPQMSAAAAAAAAAAAYGRSPVVGFDPHHHMRVPAIPP

SEQ ID NO: 90050 - protein, 572 aa, Homo sapiens
  Payload ID: 18008
  Gene Name: transducin-like enhancer of split 6
  Uniprot ID: Q9H808
  ENSP ID: ENSP00000246112
MTSRDQPRPKGPPKSTSPCPGISNSESSPTLNYQGILNRLKQFPRFSPHFAAELESIYYSLHKIQQDVAEHHKQIGNVLQIVESCSQLQGFQSEEVSPAEPASPGTPQQVKDKTLQESSFEDIMATRSSDWLRRPLGEDNQPETQLFWDKEPWFWHDTLTEQLWRIFAGVHDEKAKPRDRQQAPGLGQESKAPGSCDPGTDPCPEDASTPRPPEASSSPPEGSQDRNTSWGVVQEPPGRASRFLQSISWDPEDFEDAWKRPDALPGQSKRLAVPCKLEKMRILAHGELVLATAISSFTRHVFTCGRRGIKVWSLTGQVAEDRFPESHLPIQTPGAFLRTCLLSSNSRSLLTGGYNLASVSVWDLAAPSLHVKEQLPCAGLNCQALDANLDANLAFASFTSGVVRIWDLRDQSVVRDLKGYPDGVKSIVVKGYNIWTGGPDACLRCWDQRTIMKPLEYQFKSQIMSLSHSPQEDWVLLGMANGQQWLQSTSGSQRHMVGQKDSVILSVKFSPFGQWWASVGMDDFLGVYSMPAGTKVFEVPEMSPVTCCDVSSNNRLVVTGSGEHASVYQITY

SEQ ID NO: 90051 - protein, 449 aa, Homo sapiens
  Payload ID: 18008
  Gene Name: transducin-like enhancer of split 6
  Uniprot ID: Q9H808
  ENSP ID: ENSP00000406893
MATRSSDWLRRPLGEDNQPETQLFWDKEPWFWHDTLTEQLWRIFAGVHDEKAKPRDRQQAPGLGQESKAPGSCDPGTDPCPEDASTPRPPEASSSPPEGSQDRNTSWGVVQEPPGRASRFLQSISWDPEDFEDAWKRPDALPGQSKRLAVPCKLEKMRILAHGELVLATAISSFTRHVFTCGRRGIKVWSLTGQVAEDRFPESHLPIQTPGAFLRTCLLSSNSRSLLTGGYNLASVSVWDLAAPSLHVKEQLPCAGLNCQALDANLDANLAFASFTSGVVRIWDLRDQSVVRDLKGYPDGVKSIVVKGYNIWTGGPDACLRCWDQRTIMKPLEYQFKSQIMSLSHSPQEDWVLLGMANGQQWLQSTSGSQRHMVGQKDSVILSVKFSPFGQWWASVGMDDFLGVYSMPAGTKVFEVPEMSPVTCCDVSSNNRLVVTGSGEHASVYQITY

SEQ ID NO: 90052 - protein, 154 aa, Homo sapiens
  Payload ID: 18008
  Gene Name: transducin-like enhancer of split 6
  ENSP ID: ENSP00000411783
MTSRDQPRPKGPPKSTSPCPGISNSESSPTLNYQGILNRLKQFPRFSPHFAAELESIYYSLHKIQQDVAEHHKQIGNVLQIVESCSQLQGFQSEEVSPAEPASPGTPQQVKDKTLQESSFEDIMATRSSDWLRRPLGEDNQPETQLFWDKEPWF

SEQ ID NO: 90053 - protein, 45 aa, Homo sapiens
  Payload ID: 18008
  Gene Name: transducin-like enhancer of split 6
  ENSP ID: ENSP00000467126
MTSRDQPRPKGPPKSTSPCPGISNSESSPTLNYQGILNRLKQFPR

SEQ ID NO: 90054 - protein, 416 aa, Homo sapiens
  Payload ID: 18008
  Gene Name: transducin-like enhancer of split 6
  ENSP ID: ENSP00000483606
MATRSSDWLRRPLGEDNQPETQLFWDKEPWFWHDTLTEQLWRIFAGVHDEKAKPRDRQQAPGLGQESKAPGSCDPGTDPCPEDASTPRPPEASSSPPEGSQDRNTSWGVVQEPPGRASRFLQSISWDPEDFEDAWKRPDALPGQSKRLAVPCKLEKMRILAHGELVLATAISSFTRHVFTCGRRGIKVWSLTGQVAEDRFPESHLPIQTPGAFLRTCLLSSNSRSLLTGGYNLASVSVWDLAAPSLHVKEQLPCAGLNCQALDANLDANLAFASFTSGVVRIWDLRDQSVVRDLKGYPDGVKSIVVKGYNIWTGGPDACLRCWDQRTIMKPLEYQFKSQIMSLSHSPQEDWVLLGMANGQQWLQSTSGSQRHMVGQRQRHPERQVLPLWPVVGKRWNGRLPWRLQHAGGDKSVRGA

SEQ ID NO: 90055 - protein, 698 aa, Homo sapiens
  Payload ID: 18009
  Gene Name: transferrin
  Uniprot ID: P02787
  ENSP ID: ENSP00000385834
MRLAVGALLVCAVLGLCLAVPDKTVRWCAVSEHEATKCQSFRDHMKSVIPSDGPSVACVKKASYLDCIRAIAANEADAVTLDAGLVYDAYLAPNNLKPVVAEFYGSKEDPQTFYYAVAVVKKDSGFQMNQLRGKKSCHTGLGRSAGWNIPIGLLYCDLPEPRKPLEKAVANFFSGSCAPCADGTDFPQLCQLCPGCGCSTLNQYFGYSGAFKCLKDGAGDVAFVKHSTIFENLANKADRDQYELLCLDNTRKPVDEYKDCHLAQVPSHTVVARSMGGKEDLIWELLNQAQEHFGKDKSKEFQLFSSPHGKDLLFKDSAHGFLKVPPRMDAKMYLGYEYVTAIRNLREGTCPEAPTDECKPVKWCALSHHERLKCDEWSVNSVGKIECVSAETTEDCIAKIMNGEADAMSLDGGFVYIAGKCGLVPVLAENYNKSDNCEDTPEAGYFAIAVVKKSASDLTWDNLKGKKSCHTAVGRTAGWNIPMGLLYNKINHCRFDEFFSEGCAPGSKKDSSLCKLCMGSGLNLCEPNNKEGYYGYTGAFRCLVEKGDVAFVKHQTVPQNTGGKNPDPWAKNLNEKDYELLCLDGTRKPVEEYANCHLARAPNHAVVTRKDKEACVHKILRQQQHLFGSNVTDCSGNFCLFRSETKDLLFRDDTVCLAKLHDRNTYEKYLGEEYVKAVGNLRKCSTSSLLEACTFRRP

SEQ ID NO: 90056 - protein, 115 aa, Homo sapiens
  Payload ID: 18009
  Gene Name: transferrin
  ENSP ID: ENSP00000401505
MRLAVGALLVCAVLGLCLAVPDKTVRWCAVSEHEATKCQSFRDHMKSVIPSDGPSVACVKKASYLDCIRAIAVSRCCLKESGRKPYFLCFQSLWNNSLLTGKRSGCCDTGCRFGV

SEQ ID NO: 90057 - protein, 75 aa, Homo sapiens
  Payload ID: 18009
  Gene Name: transferrin
  ENSP ID: ENSP00000417468
MKSVIPSDGPSVACVKKASYLDCIRAIAANEADAVTLDAGLVYDAYLAPNNLKPVVAEFYGSKEDPQTFYYAVAV

SEQ ID NO: 90058 - protein, 120 aa, Homo sapiens
  Payload ID: 18009
  Gene Name: transferrin
  ENSP ID: ENSP00000418396
MRLAVGALLVCAVLGLCLAVPDKTVRWCAVSEHEATKCQSFRDHMKSVIPSDGPSVACVKKASYLDCIRAIAANEADAVTLDAGLVYDAYLAPNNLKPVVAEFYGSKEDFLLCCCCGEEG

SEQ ID NO: 90059 - protein, 102 aa, Homo sapiens
  Payload ID: 18009
  Gene Name: transferrin
  ENSP ID: ENSP00000418716
MRLAVGALLVCAVLGLCLAVPDKTVRWCAVSEHEATKCQSFRDHMKSVIPSDGPFSYRRGPKYGRQGGLDLGASQPGPGTFWQRQIKRIPTIQLSSWEGPAV

SEQ ID NO: 90060 - protein, 134 aa, Homo sapiens
  Payload ID: 18009
  Gene Name: transferrin
  ENSP ID: ENSP00000419338
MNQLRGKKSCHTGLGRSAGWNIPIGLLYCDLPEPRKPLEKAVANFFSGSCAPCADGTDFPQLCQLCPGCGCSTLNQYFGYSGAFKCLKDGAGDVAFVKHSTIFENLANKADRDQYELLCLDNTRKPVDEYKDCH

SEQ ID NO: 90061 - protein, 143 aa, Homo sapiens
  Payload ID: 18009
  Gene Name: transferrin
  ENSP ID: ENSP00000419714
  MOD_RES (1)..(1): Any amino acid
XYFAIAVVKKSASDLTWDNLKGKKSCHTAVGRTAGWNIPMGLLYNKINHCRFDEFFSEGCAPGSKKDSSLCKLCMGSGLNLCEPNNKEGYYGYTGAFRCLVEKGDVAFVKHQTVPQNTGETIQKRRGKGAEMGYRPVSHRKKP

SEQ ID NO: 90062 - protein, 760 aa, Homo sapiens
  Payload ID: 18010
  Gene Name: transferrin receptor
  Uniprot ID: P02786
  ENSP ID: ENSP00000353224
MMDQARSAFSNLFGGEPLSYTRFSLARQVDGDNSHVEMKLAVDEEENADNNTKANVTKPKRCSGSICYGTIAVIVFFLIGFMIGYLGYCKGVEPKTECERLAGTESPVREEPGEDFPAARRLYWDDLKRKLSEKLDSTDFTGTIKLLNENSYVPREAGSQKDENLALYVENQFREFKLSKVWRDQHFVKIQVKDSAQNSVIIVDKNGRLVYLVENPGGYVAYSKAATVTGKLVHANFGTKKDFEDLYTPVNGSIVIVRAGKITFAEKVANAESLNAIGVLIYMDQTKFPIVNAELSFFGHAHLGTGDPYTPGFPSFNHTQFPPSRSSGLPNIPVQTISRAAAEKLFGNMEGDCPSDWKTDSTCRMVTSESKNVKLTVSNVLKEIKILNIFGVIKGFVEPDHYVVVGAQRDAWGPGAAKSGVGTALLLKLAQMFSDMVLKDGFQPSRSIIFASWSAGDFGSVGATEWLEGYLSSLHLKAFTYINLDKAVLGTSNFKVSASPLLYTLIEKTMQNVKHPVTGQFLYQDSNWASKVEKLTLDNAAFPFLAYSGIPAVSFCFCEDTDYPYLGTTMDTYKELIERIPELNKVARAAAEVAGQFVIKLTHDVELNLDYERYNSQLLSFVRDLNQYRADIKEMGLSLQWLYSARGDFFRATSRLTTDFGNAEKTDRFVMKKLNDRVMRVEYHFLSPYVSPKESPFRHVFWGSGSHTLPALLENLKLRKQNNGAFNETLFRNQLALATWTIQGAANALSGDVWDIDNEF

SEQ ID NO: 90063 - protein, 760 aa, Homo sapiens; identical to SEQ ID NO: 90062
  Payload ID: 18010
  Gene Name: transferrin receptor
  Uniprot ID: P02786
  ENSP ID: ENSP00000376197

SEQ ID NO: 90064 - protein, 679 aa, Homo sapiens
  Payload ID: 18010
  Gene Name: transferrin receptor
  ENSP ID: ENSP00000390133
MIGYLGYCKGVEPKTECERLAGTESPVREEPGEDFPAARRLYWDDLKRKLSEKLDSTDFTGTIKLLNENSYVPREAGSQKDENLALYVENQFREFKLSKVWRDQHFVKIQVKDSAQNSVIIVDKNGRLVYLVENPGGYVAYSKAATVTGKLVHANFGTKKDFEDLYTPVNGSIVIVRAGKITFAEKVANAESLNAIGVLIYMDQTKFPIVNAELSFFGHAHLGTGDPYTPGFPSFNHTQFPPSRSSGLPNIPVQTISRAAAEKLFGNMEGDCPSDWKTDSTCRMVTSESKNVKLTVSNVLKEIKILNIFGVIKGFVEPDHYVVVGAQRDAWGPGAAKSGVGTALLLKLAQMFSDMVLKDGFQPSRSIIFASWSAGDFGSVGATEWLEGYLSSLHLKAFTYINLDKAVLGTSNFKVSASPLLYTLIEKTMQNVKHPVTGQFLYQDSNWASKVEKLTLDNAAFPFLAYSGIPAVSFCFCEDTDYPYLGTTMDTYKELIERIPELNKVARAAAEVAGQFVIKLTHDVELNLDYERYNSQLLSFVRDLNQYRADIKEMGLSLQWLYSARGDFFRATSRLTTDFGNAEKTDRFVMKKLNDRVMRVEYHFLSPYVSPKESPFRHVFWGSGSHTLPALLENLKLRKQNNGAFNETLFRNQLALATWTIQGAANALSGDVWDIDNEF

SEQ ID NO: 90065 - protein, 81 aa, Homo sapiens
  Payload ID: 18010
  Gene Name: transferrin receptor
  ENSP ID: ENSP00000402839
MMDQARSAFSNLFGGEPLSYTRFSLARQVDGDNSHVEMKLAVDEEENADNNTKANVTKPKRCSGSICYGTIAVIVFFLIGC

SEQ ID NO: 90066 - protein, 118 aa, Homo sapiens
  Payload ID: 18010
  Gene Name: transferrin receptor
  ENSP ID: ENSP00000414015
AAAEVAGQFVIKLTHDVELNLDYERYNSQLLSFVRDLNQYRADIKEMGLSLQWLYSARGDFFRATSRLTTDFGNAEKTDRFVMKKLNDRVMREGPQMMLLLTDARPSNHFLSPLLSLH

SEQ ID NO: 90067 - protein, 801 aa, Homo sapiens
  Payload ID: 18011
  Gene Name: transferrin receptor 2
  Uniprot ID: Q9UP52
  ENSP ID: ENSP00000223051
MERLWGLFQRAQQLSPRSSQTVYQRVEGPRKGHLEEEEEDGEEGAETLAHFCPMELRGPEPLGSRPRQPNLIPWAAAGRRAAPYLVLTALLIFTGAFLLGYVAFRGSCQACGDSVLVVSEDVNYEPDLDFHQGRLYWSDLQAMFLQFLGEGRLEDTIRQTSLRERVAGSAGMAALTQDIRAALSRQKLDHVWTDTHYVGLQFPDPAHPNTLHWVDEAGKVGEQLPLEDPDVYCPYSAIGNVTGELVYAHYGRPEDLQDLRARGVDPVGRLLLVRVGVISFAQKVTNAQDFGAQGVLIYPEPADFSQDPPKPSLSSQQAVYGHVHLGTGDPYTPGFPSFNQTQFPPVASSGLPSIPAQPISADIASRLLRKLKGPVAPQEWQGSLLGSPYHLGPGPRLRLVVNNHRTSTPINNIFGCIEGRSEPDHYVVIGAQRDAWGPGAAKSAVGTAILLELVRTFSSMVSNGFRPRRSLLFISWDGGDFGSVGSTEWLEGYLSVLHLKAVVYVSLDNAVLGDDKFHAKTSPLLTSLIESVLKQVDSPNHSGQTLYEQVVFTNPSWDAEVIRPLPMDSSAYSFTAFVGVPAVEFSFMEDDQAYPFLHTKEDTYENLHKVLQGRLPAVAQAVAQLAGQLLIRLSHDRLLPLDFGRYGDVVLRHIGNLNEFSGDLKARGLTLQWVYSARGDYIRAAEKLRQEIYSSEERDERLTRMYNVRIMRVEFYFLSQYVSPADSPFRHIFMGRGDHTLGALLDHLRLLRSNSSGTPGATSSTGFQESRFRRQLALLTWTLQGAANALSGDVWNIDNNF

SEQ ID NO: 90068 - protein, 355 aa, Homo sapiens
  Payload ID: 18011
  Gene Name: transferrin receptor 2
  ENSP ID: ENSP00000413905
MERLWGLFQRAQQLSPRSSQTVYQRVEGPRKGHLEEEEEDGEEGAETLAHFCPMELRGPEPLGSRPRQPNLIPWAAAGRRAAPYLVLTALLIFTGAFLLGYVAFRGSCQACGDSVLVVSEDVNYEPDLDFHQGRLYWSDLQAMFLQFLGEGRLEDTIRQTSLRERVAGSAGMAALTQDIRAALSRQKLDHVWTDTHYVGLQFPDPAHPNTLHWVDEAGKVGEQLPLEDPDVYCPYSAIGNVTGELVYAHYGRPEDLQDLRARGVDPVGRLLLVRVGVISFAQKEAQRPCGPPRMAGEPPRLPLSPGPRATTAASGQQSQDLHPHQQHLRLHRRPLRARSLRCHRGPEGCMGPRSS

SEQ ID NO: 90069 - protein, 169 aa, Homo sapiens
  Payload ID: 18011
  Gene Name: transferrin receptor 2
  ENSP ID: ENSP00000418942
  MOD_RES (1)..(1): Any amino acid
XYGRPEDLQDLRARGVDPVGRLLLVRVGVISFAQKVTNAQDFGAQGVLIYPEPADFSQDPPKPSLSSQQAVYGHVHLGTGDPYTPGFPSFNQTQFPPVASSGLPSIPAQPISADIASRLLRLECSGAILAHCNLHLPGSSDSSASDSRVSRITGSSKALWPPKNGRGAS

SEQ ID NO: 90070 - protein, 801 aa, Homo sapiens; identical to SEQ ID NO: 90067
  Payload ID: 18011
  Gene Name: transferrin receptor 2
  Uniprot ID: Q9UP52
  ENSP ID: ENSP00000420525

SEQ ID NO: 90071 - protein, 3830 aa, Homo sapiens
  Payload ID: 18012
  Gene Name: transformation/transcription domain-associated protein
  Uniprot ID: Q9Y4A5
  ENSP ID: ENSP00000347733
MAFVATQGATVVDQTTLMKKYLQFVAALTDVNTPDETKLKMMQEVSENFENVTSSPQYSTFLEHIIPRFLTFLQDGEVQFLQEKPAQQLRKLVLEIIHRIPTNEHLRPHTKNVLSVMFRFLETENEENVLICLRIIIELHKQFRPPITQEIHHFLDFVKQIYKELPKVVNRYFENPQVIPENTVPPPEMVGMITTIAVKVNPEREDSETRTHSIIPRGSLSLKVLAELPIIVVLMYQLYKLNIHNVVAEFVPLIMNTIAIQVSAQARQHKLYNKELYADFIAAQIKTLSFLAYIIRIYQELVTKYSQQMVKGMLQLLSNCPAETAHLRKELLIAAKHILTTELRNQFIPCMDKLFDESILIGSGYTARETLRPLAYSTLADLVHHVRQHLPLSDLSLAVQLFAKNIDDESLPSSIQTMSCKLLLNLVDCIRSKSEQESGNGRDVLMRMLEVFVLKFHTIARYQLSAIFKKCKPQSELGAVEAALPGVPTAPAAPGPAPSPAPVPAPPPPPPPPPPATPVTPAPVPPFEKQGEKDKEDKQTFQVTDCRSLVKTLVCGVKTITWGITSCKAPGEAQFIPNKQLQPKETQIYIKLVKYAMQALDIYQVQIAGNGQTYIRVANCQTVRMKEEKEVLEHFAGVFTMMNPLTFKEIFQTTVPYMVERISKNYALQIVANSFLANPTTSALFATILVEYLLDRLPEMGSNVELSNLYLKLFKLVFGSVSLFAAENEQMLKPHLHKIVNSSMELAQTAKEPYNYFLLLRALFRSIGGGSHDLLYQEFLPLLPNLLQGLNMLQSGLHKQHMKDLFVELCLTVPVRLSSLLPYLPMLMDPLVSALNGSQTLVSQGLRTLELCVDNLQPDFLYDHIQPVRAELMQALWRTLRNPADSISHVAYRVLGKFGGSNRKMLKESQKLHYVVTEVQGPSITVEFSDCKASLQLPMEKAIETALDCLKSANTEPYYRRQAWEVIKCFLVAMMSLEDNKHALYQLLAHPNFTEKTIPNVIISHRYKAQDTPARKTFEQALTGAFMSAVIKDLRPSALPFVASLIRHYTMVAVAQQCGPFLLPCYQVGSQPSTAMFHSEENGSKGMDPLVLIDAIAICMAYEEKELCKIGEVALAVIFDVASIILGSKERACQLPLFSYIVERLCACCYEQAWYAKLGGVVSIKFLMERLPLTWVLQNQQTFLKALLFVMMDLTGEVSNGAVAMAKTTLEQLLMRCATPLKDEERAEEIVAAQEKSFHHVTHDLVREVTSPNSTVRKQAMHSLQVLAQVTGKSVTVIMEPHKEVLQDMVPPKKHLLRHQPANAQIGLMEGNTFCTTLQPRLFTMDLNVVEHKVFYTELLNLCEAEDSALTKLPCYKSLPSLVPLRIAALNALAACNYLPQSREKIIAALFKALNSTNSELQEAGEACMRKFLEGATIEVDQIHTHMRPLLMMLGDYRSLTLNVVNRLTSVTRLFPNSFNDKFCDQMMQHLRKWMEVVVITHKGGQRSDGNEMKICSAIINLFHLIPAAPQTLVKPLLEVVMKTERAMLIEAGSPFREPLIKFLTRHPSQTVELFMMEATLNDPQWSRMFMSFLKHKDARPLRDVLAANPNRFITLLLPGGAQTAVRPGSPSTSTMRLDLQFQAIKIISIIVKNDDSWLASQHSLVSQLRRVWVSENFQERHRKENMAATNWKEPKLLAYCLLNYCKRNYGDIELLFQLLRAFTGRFLCNMTFLKEYMEEEIPKNYSIAQKRALFFRFVDFNDPNFGDELKAKVLQHILNPAFLYSFEKGEGEQLLGPPNPEGDNPESITSVFITKVLDPEKQADMLDSLRIYLLQYATLLVEHAPHHIHDNNKNRNSKLRRLMTFAWPCLLSKACVDPACKYSGHLLLAHIIAKFAIHKKIVLQVFHSLLKAHAMEARAIVRQAMAILTPAVPARMEDGHQMLTHWTRKIIVEEGHTVPQLVHILHLIVQHFKVYYPVRHHLVQHMVSAMQRLGFTPSVTIEQRRLAVDLSEVVIKWELQRIKDQQPDSDMDPNSSGEGVNSVSSSIKRGLSVDSAQEVKRFRTATGAISAVFGRSQSLPGADSLLAKPIDKQHTDTVVNFLIRVACQVNDNTNTAGSPGEVLSRRCVNLLKTALRPDMWPKSELKLQWFDKLLMTVEQPNQVNYGNICTGLEVLSFLLTVLQSPAILSSFKPLQRGIAACMTCGNTKVLRAVHSLLSRLMSIFPTEPSTSSVASKYEELECLYAAVGKVIYEGLTNYEKATNANPSQLFGTLMILKSACSNNPSYIDRLISVFMRSLQKMVREHLNPQAASGSTEATSGTSELVMLSLELVKTRLAVMSMEMRKNFIQAILTSLIEKSPDAKILRAVVKIVEEWVKNNSPMAANQTPTLREKSILLVKMMTYIEKRFPEDLELNAQFLDLVNYVYRDETLSGSELTAKLEPAFLSGLRCAQPLIRAKFFEVFDNSMKRRVYERLLYVTCSQNWEAMGNHFWIKQCIELLLAVCEKSTPIGTSCQGAMLPSITNVINLADSHDRAAFAMVTHVKQEPRERENSESKEEDVEIDIELAPGDQTSTPKTKELSEKDIGNQLHMLTNRHDKFLDTLREVKTGALLSAFVQLCHISTTLAEKTWVQLFPRLWKILSDRQQHALAGEISPFLCSGSHQVQRDCQPSALNCFVEAMSQCVPPIPIRPCVLKYLGKTHNLWFRSTLMLEHQAFEKGLSLQIKPKQTTEFYEQESITPPQQEILDSLAELYSLLQEEDMWAGLWQKRCKYSETATAIAYEQHGFFEQAQESYEKAMDKAKKEHERSNASPAIFPEYQLWEDHWIRCSKELNQWEALTEYGQSKGHINPYLVLECAWRVSNWTAMKEALVQVEVSCPKEMAWKVNMYRGYLAICHPEEQQLSFIERLVEMASSLAIREWRRLPHVVSHVHTPLLQAAQQIIELQEAAQINAGLQPTNLGRNNSLHDMKTVVKTWRNRLPIVSDDLSHWSSIFMWRQHHYQAIVTAYENSSQHDPSSNNAMLGVHASASAIIQYGKIARKQGLVNVALDILSRIHTIPTVPIVDCFQKIRQQVKCYLQLAGVMGKNECMQGLEVIESTNLKYFTKEMTAEFYALKGMFLAQINKSEEANKAFSAAVQMHDVLVKAWAMWGDYLENIFVKERQLHLGVSAITCYLHACRHQNESKSRKYLAKVLWLLSFDDDKNTLADAVDKYCIGVPPIQWLAWIPQLLTCLVGSEGKLLLNLISQVGRVYPQAVYFPIRTLYLTLKIEQRERYKSDPGPIRATAPMWRCSRIMHMQRELHPTLLSSLEGIVDQMVWFRENWHEEVLRQLQQGLAKCYSVAFEKSGAVSDAKITPHTLNFVKKLVSTFGVGLENVSNVSTMFSSAASESLARRAQATAQDPVFQKLKGQFTTDFDFSVPGSMKLHNLISKLKKWIKILEAKTKQLPKFFLIEEKCRFLSNFSAQTAEVEIPGEFLMPKPTHYYIKIARFMPRVEIVQKHNTAARRLYIRGHNGKIYPYLVMNDACLTESRREERVLQLLRLLNPCLEKRKETTKRHLFFTVPRVVAVSPQMRLVEDNPSSLSLVEIYKQRCAKKGIEHDNPISRYYDRLATVQARGTQASHQVLRDILKEVQSNMVPRSMLKEWALHTFPNATDYWTFRKMFTIQLALIGFAEFVLHLNRLNPEMLQIAQDTGKLNVAYFRFDINDATGDLDANRPVPFRLTPNISEFLTTIGVSGPLTASMIAVARCFAQPNFKVDGILKTVLRDEIIAWHKKTQEDTSSPLSAAGQPENMDSQQLVSLVQKAVTAIMTRLHNLAQFEGGESKVNTLVAAANSLDNLCRMDPAWHPWL

SEQ ID NO: 90072 - protein, 3859 aa, Homo sapiens
  Payload ID: 18012
  Gene Name: transformation/transcription domain-associated protein
  Uniprot ID: Q9Y4A5
  ENSP ID: ENSP00000352925
MAFVATQGATVVDQTTLMKKYLQFVAALTDVNTPDETKLKMMQEVSENFENVTSSPQYSTFLEHIIPRFLTFLQDGEVQFLQEKPAQQLRKLVLEIIHRIPTNEHLRPHTKNVLSVMFRFLETENEENVLICLRIIIELHKQFRPPITQEIHHFLDFVKQIYKELPKVVNRYFENPQVIPENTVPPPEMVGMITTIAVKVNPEREDSETRTHSIIPRGSLSLKVLAELPIIVVLMYQLYKLNIHNVVAEFVPLIMNTIAIQVSAQARQHKLYNKELYADFIAAQIKTLSFLAYIIRIYQELVTKYSQQMVKGMLQLLSNCPAETAHLRKELLIAAKHILTTELRNQFIPCMDKLFDESILIGSGYTARETLRPLAYSTLADLVHHVRQHLPLSDLSLAVQLFAKNIDDESLPSSIQTMSCKLLLNLVDCIRSKSEQESGNGRDVLMRMLEVFVLKFHTIARYQLSAIFKKCKPQSELGAVEAALPGVPTAPAAPGPAPSPAPVPAPPPPPPPPPPATPVTPAPVPPFEKQGEKDKEDKQTFQVTDCRSLVKTLVCGVKTITWGITSCKAPGEAQFIPNKQLQPKETQIYIKLVKYAMQALDIYQVQIAGNGQTYIRVANCQTVRMKEEKEVLEHFAGVFTMMNPLTFKEIFQTTVPYMVERISKNYALQIVANSFLANPTTSALFATILVEYLLDRLPEMGSNVELSNLYLKLFKLVFGSVSLFAAENEQMLKPHLHKIVNSSMELAQTAKEPYNYFLLLRALFRSIGGGSHDLLYQEFLPLLPNLLQGLNMLQSGLHKQHMKDLFVELCLTVPVRLSSLLPYLPMLMDPLVSALNGSQTLVSQGLRTLELCVDNLQPDFLYDHIQPVRAELMQALWRTLRNPADSISHVAYRVLGKFGGSNRKMLKESQKLHYVVTEVQGPSITVEFSDCKASLQLPMEKAIETALDCLKSANTEPYYRRQAWEVIKCFLVAMMSLEDNKHALYQLLAHPNFTEKTIPNVIISHRYKAQDTPARKTFEQALTGAFMSAVIKDLRPSALPFVASLIRHYTMVAVAQQCGPFLLPCYQVGSQPSTAMFHSEENGSKGMDPLVLIDAIAICMAYEEKELCKIGEVALAVIFDVASIILGSKERACQLPLFSYIVERLCACCYEQAWYAKLGGVVSIKFLMERLPLTWVLQNQQTFLKALLFVMMDLTGEVSNGAVAMAKTTLEQLLMRCATPLKDEERAEEIVAAQEKSFHHVTHDLVREVTSPNSTVRKQAMHSLQVLAQVTGKSVTVIMEPHKEVLQDMVPPKKHLLRHQPANAQIGLMEGNTFCTTLQPRLFTMDLNVVEHKVFYTELLNLCEAEDSALTKLPCYKSLPSLVPLRIAALNALAACNYLPQSREKIIAALFKALNSTNSELQEAGEACMRKFLEGATIEVDQIHTHMRPLLMMLGDYRSLTLNVVNRLTSVTRLFPNSFNDKFCDQMMQHLRKWMEVVVITHKGGQRSDGNESISECGRCPLSPFCQFEEMKICSAIINLFHLIPAAPQTLVKPLLEVVMKTERAMLIEAGSPFREPLIKFLTRHPSQTVELFMMEATLNDPQWSRMFMSFLKHKDARPLRDVLAANPNRFITLLLPGGAQTAVRPGSPSTSTMRLDLQFQAIKIISIIVKNDDSWLASQHSLVSQLRRVWVSENFQERHRKENMAATNWKEPKLLAYCLLNYCKRNYGDIELLFQLLRAFTGRFLCNMTFLKEYMEEEIPKNYSIAQKRALFFRFVDFNDPNFGDELKAKVLQHILNPAFLYSFEKGEGEQLLGPPNPEGDNPESITSVFITKVLDPEKQADMLDSLRIYLLQYATLLVEHAPHHIHDNNKNRNSKLRRLMTFAWPCLLSKACVDPACKYSGHLLLAHIIAKFAIHKKIVLQVFHSLLKAHAMEARAIVRQAMAILTPAVPARMEDGHQMLTHWTRKIIVEEGHTVPQLVHILHLIVQHFKVYYPVRHHLVQHMVSAMQRLGFTPSVTIEQRRLAVDLSEVVIKWELQRIKDQQPDSDMDPNSSGEGVNSVSSSIKRGLSVDSAQEVKRFRTATGAISAVFGRSQSLPGADSLLAKPIDKQHTDTVVNFLIRVACQVNDNTNTAGSPGEVLSRRCVNLLKTALRPDMWPKSELKLQWFDKLLMTVEQPNQVNYGNICTGLEVLSFLLTVLQSPAILSSFKPLQRGIAACMTCGNTKVLRAVHSLLSRLMSIFPTEPSTSSVASKYEELECLYAAVGKVIYEGLTNYEKATNANPSQLFGTLMILKSACSNNPSYIDRLISVFMRSLQKMVREHLNPQAASGSTEATSGTSELVMLSLELVKTRLAVMSMEMRKNFIQAILTSLIEKSPDAKILRAVVKIVEEWVKNNSPMAANQTPTLREKSILLVKMMTYIEKRFPEDLELNAQFLDLVNYVYRDETLSGSELTAKLEPAFLSGLRCAQPLIRAKFFEVFDNSMKRRVYERLLYVTCSQNWEAMGNHFWIKQCIELLLAVCEKSTPIGTSCQGAMLPSITNVINLADSHDRAAFAMVTHVKQEPRERENSESKEEDVEIDIELAPGDQTSTPKTKELSEKDIGNQLHMLTNRHDKFLDTLREVKTGALLSAFVQLCHISTTLAEKTWVQLFPRLWKILSDRQQHALAGEISPFLCSGSHQVQRDCQPSALNCFVEAMSQCVPPIPIRPCVLKYLGKTHNLWFRSTLMLEHQAFEKGLSLQIKPKQTTEFYEQESITPPQQEILDSLAELYSLLQEEDMWAGLWQKRCKYSETATAIAYEQHGFFEQAQESYEKAMDKAKKEHERSNASPAIFPEYQLWEDHWIRCSKELNQWEALTEYGQSKGHINPYLVLECAWRVSNWTAMKEALVQVEVSCPKEMAWKVNMYRGYLAICHPEEQQLSFIERLVEMASSLAIREWRRLPHVVSHVHTPLLQAAQQIIELQEAAQINAGLQPTNLGRNNSLHDMKTVVKTWRNRLPIVSDDLSHWSSIFMWRQHHYQGKPTWSGMHSSSIVTAYENSSQHDPSSNNAMLGVHASASAIIQYGKIARKQGLVNVALDILSRIHTIPTVPIVDCFQKIRQQVKCYLQLAGVMGKNECMQGLEVIESTNLKYFTKEMTAEFYALKGMFLAQINKSEEANKAFSAAVQMHDVLVKAWAMWGDYLENIFVKERQLHLGVSAITCYLHACRHQNESKSRKYLAKVLWLLSFDDDKNTLADAVDKYCIGVPPIQWLAWIPQLLTCLVGSEGKLLLNLISQVGRVYPQAVYFPIRTLYLTLKIEQRERYKSDPGPIRATAPMWRCSRIMHMQRELHPTLLSSLEGIVDQMVWFRENWHEEVLRQLQQGLAKCYSVAFEKSGAVSDAKITPHTLNFVKKLVSTFGVGLENVSNVSTMFSSAASESLARRAQATAQDPVFQKLKGQFTTDFDFSVPGSMKLHNLISKLKKWIKILEAKTKQLPKFFLIEEKCRFLSNFSAQTAEVEIPGEFLMPKPTHYYIKIARFMPRVEIVQKHNTAARRLYIRGHNGKIYPYLVMNDACLTESRREERVLQLLRLLNPCLEKRKETTKRHLFFTVPRVVAVSPQMRLVEDNPSSLSLVEIYKQRCAKKGIEHDNPISRYYDRLATVQARGTQASHQVLRDILKEVQSNMVPRSMLKEWALHTFPNATDYWTFRKMFTIQLALIGFAEFVLHLNRLNPEMLQIAQDTGKLNVAYFRFDINDATGDLDANRPVPFRLTPNISEFLTTIGVSGPLTASMIAVARCFAQPNFKVDGILKTVLRDEIIAWHKKTQEDTSSPLSAAGQPENMDSQQLVSLVQKAVTAIMTRLHNLAQFEGGESKVNTLVAAANSLDNLCRMDPAWHPWL

SEQ ID NO: 90073 - protein, 3588 aa, Homo sapiens
  Payload ID: 18012
  Gene Name: transformation/transcription domain-associated protein
  ENSP ID: ENSP00000394645
  MOD_RES (1)..(1): Any amino acid
XTLSFLAYIIRIYQELVTKYSQQMVKGMLQLLSNCPAETAHLRKELLIAAKHILTTELRNQFIPCMDKLFDESILIGSGYTARETLRPLAYSTLADLVHHVRQHLPLSDLSLAVQLFAKNIDDESLPSSIQTMSCKLLLNLVDCIRSKSEQESGNGRDVLMRMLEVFVLKFHTIARYQLSAIFKKCKPQSELGAVEAALPGVPTAPAAPGPAPSPAPVPAPPPPPPPPPPATPVTPAPVPPFEKQGEKDKEDKQTFQVTDCRSLVKTLVCGVKTITWGITSCKAPGEAQFIPNKQLQPKETQIYIKLVKYAMQALDIYQVQIAGNGQTYIRVANCQTVRMKEEKEVLEHFAGVFTMMNPLTFKEIFQTTVPYMVERISKNYALQIVANSFLANPTTSALFATILVEYLLDRLPEMGSNVELSNLYLKLFKLVFGSVSLFAAENEQMLKPHLHKIVNSSMELAQTAKEPYNYFLLLRALFRSIGGGSHDLLYQEFLPLLPNLLQGLNMLQSGLHKQHMKDLFVELCLTVPVRLSSLLPYLPMLMDPLVSALNGSQTLVSQGLRTLELCVDNLQPDFLYDHIQPVRAELMQALWRTLRNPADSISHVAYRVLGKFGGSNRKMLKESQKLHYVVTEVQGPSITVEFSDCKASLQLPMEKAIETALDCLKSANTEPYYRRQAWEVIKCFLVAMMSLEDNKHALYQLLAHPNFTEKTIPNVIISHRYKAQDTPARKTFEQALTGAFMSAVIKDLRPSALPFVASLIRHYTMVAVAQQCGPFLLPCYQVGSQPSTAMFHSEENGSKGMDPLVLIDAIAICMAYEEKELCKIGEVALAVIFDVASIILGSKERACQLPLFSYIVERLCACCYEQAWYAKLGGVVSIKFLMERLPLTWVLQNQQTFLKALLFVMMDLTGEVSNGAVAMAKTTLEQLLMRCATPLKDEERAEEIVAAQEKSFHHVTHDLVREVTSPNSTVRKQAMHSLQVLAQVTGKSVTVIMEPHKEVLQDMVPPKKHLLRHQPANAQIGLMEGNTFCTTLQPRLFTMDLNVVEHKVFYTELLNLCEAEDSALTKLPCYKSLPSLVPLRIAALNALAACNYLPQSREKIIAALFKALNSTNSELQEAGEACMRKFLEGATIEVDQIHTHMRPLLMMLGDYRSLTLNVVNRLTSVTRLFPNSFNDKFCDQMMQHLRKWMEVVVITHKGGQRSDGNESISECGRCPLSPFCQFEPAMEGVEEMKICSAIINLFHLIPAAPQTLVKPLLEVVMKTERAMLIEAGSPFREPLIKFLTRHPSQTVELFMMEATLNDPQWSRMFMSFLKHKDARPLRDVLAANPNRFITLLLPGGAQTAVRPGSPSTSTMRLDLQFQAIKIISIIVKNDDSWLASQHSLVSQLRRVWVSENFQERHRKENMAATNWKEPKLLAYCLLNYCKRNYGDIELLFQLLRAFTGRFLCNMTFLKEYMEEEIPKNYSIAQKRALFFRFVDFNDPNFGDELKAKVLQHILNPAFLYSFEKGEGEQLLGPPNPEGDNPESITSVFITKVLDPEKQADMLDSLRIYLLQYATLLVEHAPHHIHDNNKNRNSKLRRLMTFAWPCLLSKACVDPACKYSGHLLLAHIIAKFAIHKKIVLQVFHSLLKAHAMEARAIVRQAMAILTPAVPARMEDGHQMLTHWTRKIIVEEGHTVPQLVHILHLIVQHFKVYYPVRHHLVQHMVSAMQRLGFTPSVTIEQRRLAVDLSEVVIKWELQRIKDQQPDSDMDPNSSGEGVNSVSSSIKRGLSVDSAQEVKRFRTATGAISAVFGRSQSLPGADSLLAKPIDKQHTDTVVNFLIRVACQVNDNTNTAGSPGEVLSRRCVNLLKTALRPDMWPKSELKLQWFDKLLMTVEQPNQVNYGNICTGLEVLSFLLTVLQSPAILSSFKPLQRGIAACMTCGNTKVLRAVHSLLSRLMSIFPTEPSTSSVASKYEELECLYAAVGKVIYEGLTNYEKATNANPSQLFGTLMILKSACSNNPSYIDRLISVFMRSLQKMVREHLNPQAASGSTEATSGTSELVMLSLELVKTRLAVMSMEMRKNFIQAILTSLIEKSPDAKILRAVVKIVEEWVKNNSPMAANQTPTLREKSILLVKMMTYIEKRFPEDLELNAQFLDLVNYVYRDETLSGSELTAKLEPAFLSGLRCAQPLIRAKFFEVFDNSMKRRVYERLLYVTCSQNWEAMGNHFWIKQCIELLLAVCEKSTPIGTSCQGAMLPSITNVINLADSHDRAAFAMVTHVKQEPRERENSESKEEDVEIDIELAPGDQTSTPKTKELSEKDIGNQLHMLTNRHDKFLDTLREVKTGALLSAFVQLCHISTTLAEKTWVQLFPRLWKILSDRQQHALAGEISPFLCSGSHQVQRDCQPSALNCFVEAMSQCVPPIPIRPCVLKYLGKTHNLWFRSTLMLEHQAFEKGLSLQIKPKQTTEFYEQESITPPQQEILDSLAELYSLLQEEDMWAGLWQKRCKYSETATAIAYEQHGFFEQAQESYEKAMDKAKKEHERSNASPAIFPEYQLWEDHWIRCSKELNQWEALTEYGQSKGHINPYLVLECAWRVSNWTAMKEALVQVEVSCPKEMAWKVNMYRGYLAICHPEEQQLSFIERLVEMASSLAIREWRRLPHVVSHVHTPLLQAAQQIIELQEAAQINAGLQPTNLGRNNSLHDMKTVVKTWRNRLPIVSDDLSHWSSIFMWRQHHYQAIVTAYENSSQHDPSSNNAMLGVHASASAIIQYGKIARKQGLVNVALDILSRIHTIPTVPIVDCFQKIRQQVKCYLQLAGVMGKNECMQGLEVIESTNLKYFTKEMTAEFYALKGMFLAQINKSEEANKAFSAAVQMHDVLVKAWAMWGDYLENIFVKERQLHLGVSAITCYLHACRHQNESKSRKYLAKVLWLLSFDDDKNTLADAVDKYCIGVPPIQWLAWIPQLLTCLVGSEGKLLLNLISQVGRVYPQAVYFPIRTLYLTLKIEQRERYKSDSGQQQPSSVGNQSHSASDPGPIRATAPMWRCSRIMHMQRELHPTLLSSLEGIVDQMVWFRENWHEEVLRQLQQGLAKCYSVAFEKSGAVSDAKITPHTLNFVKKLVSTFGVGLENVSNVSTMFSSAASESLARRAQATAQDPVFQKLKGQFTTDFDFSVPGSMKLHNLISKLKKWIKILEAKTKQLPKFFLIEEKCRFLSNFSAQTAEVEIPGEFLMPKPTHYYIKIARFMPRVEIVQKHNTAARRLYIRGHNGKIYPYLVMNDACLTESRREERVLQLLRLLNPCLEKRKETTKRHLFFTVPRVVAVSPQMRLVEDNPSSLSLVEIYKQRCAKKGIEHDNPISRYYDRLATVQARGTQASHQVLRDILKEVQSNMVPRSMLKEWALHTFPNATDYWTFRKMFTIQLALIGFAEFVLHLNRLNPEMLQIAQDTGKLNVAYFRFDINDATGDLDANRPVPFRLTPNISEFLTTIGVSGPLTASMIAVARCFAQPNFKVDGILKTVLRDEIIAWHKKTQEDTSSPLSAAGQPENMDSQQLVSLVQKAVTAIMTRLHNLAQFEGGESKVNTLVAAANSLDNLCRMDPAWHPWL

SEQ ID NO: 90074 - protein, 71 aa, Homo sapiens
  Payload ID: 18012
  Gene Name: transformation/transcription domain-associated protein
  ENSP ID: ENSP00000401107
MAFVATQGATVVDQTTLMKKYLQFVAALTDVNTPDETKLKMMQEVSENFENVTSSPQYSTFLEHIIPRFLT

SEQ ID NO: 90075 - protein, 3848 aa, Homo sapiens
  Payload ID: 18012
  Gene Name: transformation/transcription domain-associated protein
  ENSP ID: ENSP00000403708
MAFVATQGATVVDQTTLMKKYLQFVAALTDVNTPDETKLKMMQEVSENFENVTSSPQYSTFLEHIIPRFLTFLQDGEVQFLQEKPAQQLRKLVLEIIHRIPTNEHLRPHTKNVLSVMFRFLETENEENVLICLRIIIELHKQFRPPITQEIHHFLDFVKQIYKELPKVVNRYFENPQVIPENTVPPPEMVGMITTIAVKVNPEREDSETRTHSIIPRGSLSLKVLAELPIIVVLMYQLYKLNIHNVVAEFVPLIMNTIAIQVSAQARQHKLYNKELYADFIAAQIKTLSFLAYIIRIYQELVTKYSQQMVKGMLQLLSNCPAETAHLRKELLIAAKHILTTELRNQFIPCMDKLFDESILIGSGYTARETLRPLAYSTLADLVHHVRQHLPLSDLSLAVQLFAKNIDDESLPSSIQTMSCKLLLNLVDCIRSKSEQESGNGRDVLMRMLEVFVLKFHTIARYQLSAIFKKCKPQSELGAVEAALPGVPTAPAAPGPAPSPAPVPAPPPPPPPPPPATPVTPAPVPPFEKQGEKDKEDKQTFQVTDCRSLVKTLVCGVKTITWGITSCKAPGAQFIPNKQLQPKETQIYIKLVKYAMQALDIYQVQIAGNGQTYIRVANCQTVRMKEEKEVLEHFAGVFTMMNPLTFKEIFQTTVPYMVERISKNYALQIVANSFLANPTTSALFATILVEYLLDRLPEMGSNVELSNLYLKLFKLVFGSVSLFAAENEQMLKPHLHKIVNSSMELAQTAKEPYNYFLLLRALFRSIGGGSHDLLYQEFLPLLPNLLQGLNMLQSGLHKQHMKDLFVELCLTVPVRLSSLLPYLPMLMDPLVSALNGSQTLVSQGLRTLELCVDNLQPDFLYDHIQPVRAELMQALWRTLRNPADSISHVAYRVLGKFGGSNRKMLKESQKLHYVVTEVQGPSITVEFSDCKASLQLPMEKAIETALDCLKSANTEPYYRRQAWEVIKCFLVAMMSLEDNKHALYQLLAHPNFTEKTIPNVIISHRYKAQDTPARKTFEQALTGAFMSAVIKDLRPSALPFVASLIRHYTMVAVAQQCGPFLLPCYQVGSQPSTAMFHSEENGSKGMDPLVLIDAIAICMAYEEKELCKIGEVALAVIFDVASIILGSKERACQLPLFSYIVERLCACCYEQAWYAKLGGVVSIKFLMERLPLTWVLQNQQTFLKALLFVMMDLTGEVSNGAVAMAKTTLEQLLMRCATPLKDEERAEEIVAAQEKSFHHVTHDLVREVTSPNSTVRKQAMHSLQVLAQVTGKSVTVIMEPHKEVLQDMVPPKKHLLRHQPANAQIGLMEGNTFCTTLQPRLFTMDLNVVEHKVFYTELLNLCEAEDSALTKLPCYKSLPSLVPLRIAALNALAACNYLPQSREKIIAALFKALNSTNSELQEAGEACMRKFLEGATIEVDQIHTHMRPLLMMLGDYRSLTLNVVNRLTSVTRLFPNSFNDKFCDQMMQHLRKWMEVVVITHKGGQRSDGNEMKICSAIINLFHLIPAAPQTLVKPLLEVVMKTERAMLIEAGSPFREPLIKFLTRHPSQTVELFMMEATLNDPQWSRMFMSFLKHKDARPLRDVLAANPNRFITLLLPGGAQTAVRPGSPSTSTMRLDLQFQAIKIISIIVKNDDSWLASQHSLVSQLRRVWVSENFQERHRKENMAATNWKEPKLLAYCLLNYCKRNYGDIELLFQLLRAFTGRFLCNMTFLKEYMEEEIPKNYSIAQKRALFFRFVDFNDPNFGDELKAKVLQHILNPAFLYSFEKGEGEQLLGPPNPEGDNPESITSVFITKVLDPEKQADMLDSLRIYLLQYATLLVEHAPHHIHDNNKNRNSKLRRLMTFAWPCLLSKACVDPACKYSGHLLLAHIIAKFAIHKKIVLQVFHSLLKAHAMEARAIVRQAMAILTPAVPARMEDGHQMLTHWTRKIIVEEGHTVPQLVHILHLIVQHFKVYYPVRHHLVQHMVSAMQRLGFTPSVTIEQRRLAVDLSEVVIKWELQRIKDQQPDSDMDPNSSGEGVNSVSSSIKRGLSVDSAQEVKRFRTATGAISAVFGRSQSLPGADSLLAKPIDKQHTDTVVNFLIRVACQVNDNTNTAGSPGEVLSRRCVNLLKTALRPDMWPKSELKLQWFDKLLMTVEQPNQVNYGNICTGLEVLSFLLTVLQSPAILSSFKPLQRGIAACMTCGNTKVLRAVHSLLSRLMSIFPTEPSTSSVASKYEELECLYAAVGKVIYEGLTNYEKATNANPSQLFGTLMILKSACSNNPSYIDRLISVFMRSLQKMVREHLNPQAASGSTEATSAGTSELVMLSLELVKTRLAVMSMEMRKNFIQAILTSLIEKSPDAKILRAVVKIVEEWVKNNSPMAANQTPTLREKSILLVKMMTYIEKRFPEDLELNAQFLDLVNYVYRDETLSGSELTAKLEPAFLSGLRCAQPLIRAKFFEVFDNSMKRRVYERLLYVTCSQNWEAMGNHFWIKQCIELLLAVCEKSTPIGTSCQGAMLPSITNVINLADSHDRAAFAMVTHVKQEPRERENSESKEEDVEIDIELAPGDQTSTPKTKELSEKDIGNQLHMLTNRHDKFLDTLREVKTGALLSAFVQLCHISTTLAEKTWVQLFPRLWKILSDRQQHALAGEISPFLCSGSHQVQRDCQPSALNCFVEAMSQCVPPIPIRPCVLKYLGKTHNLWFRSTLMLEHQAFEKGLSLQIKPKQTTEFYEQESITPPQQEILDSLAELYSLLQEEDMWAGLWQKRCKYSETATAIAYEQHGFFEQAQESYEKAMDKAKKEHERSNASPAIFPEYQLWEDHWIRCSKELNQWEALTEYGQSKGHINPYLVLECAWRVSNWTAMKEALVQVEVSCPKEMAWKVNMYRGYLAICHPEEQQLSFIERLVEMASSLAIREWRRLPHVVSHVHTPLLQAAQQIIELQEAAQINAGLQPTNLGRNNSLHDMKTVVKTWRNRLPIVSDDLSHWSSIFMWRQHHYQAIVTAYENSSQHDPSSNNAMLGVHASASAIIQYGKIARKQGLVNVALDILSRIHTIPTVPIVDCFQKIRQQVKCYLQLAGVMGKNECMQGLEVIESTNLKYFTKEMTAEFYALKGMFLAQINKSEEANKAFSAAVQMHDVLVKAWAMWGDYLENIFVKERQLHLGVSAITCYLHACRHQNESKSRKYLAKVLWLLSFDDDKNTLADAVDKYCIGVPPIQWLAWIPQLLTCLVGSEGKLLLNLISQVGRVYPQAVYFPIRTLYLTLKIEQRERYKSDSGQQQPSSVGNQSHSASDPGPIRATAPMWRCSRIMHMQRELHPTLLSSLEGIVDQMVWFRENWHEEVLRQLQQGLAKCYSVAFEKSGAVSDAKITPHTLNFVKKLVSTFGVGLENVSNVSTMFSSAASESLARRAQATAQDPVFQKLKGQFTTDFDFSVPGSMKLHNLISKLKKWIKILEAKTKQLPKFFLIEEKCRFLSNFSAQTAEVEIPGEFLMPKPTHYYIKIARFMPRVEIVQKHNTAARRLYIRGHNGKIYPYLVMNDACLTESRREERVLQLLRLLNPCLEKRKETTKRHLFFTVPRVVAVSPQMRLVEDNPSSLSLVEIYKQRCAKKGIEHDNPISRYYDRLATVQARGTQASHQVLRDILKEVQSNMVPRSMLKEWALHTFPNATDYWTFRKMFTIQLALIGFAEFVLHLNRLNPEMLQIAQDTGKLNVAYFRFDINDATGDLDANRPVPFRLTPNISEFLTTIGVSGPLTASMIAVARCFAQPNFKVDGILKTVLRDEIIAWHKKTQEDTSSPLSAAGQPENMDSQQLVSLVQKAVTAIMTRLHNLAQFEGGESKVNTLVAAANSLDNLCRMDPAWHPWL

SEQ ID NO: 90076 - protein, 3848 aa, Homo sapiens; identical to SEQ ID NO: 90075
  Payload ID: 18012
  Gene Name: transformation/transcription domain-associated protein
  ENSP ID: ENSP00000485781

SEQ ID NO: 90077 - protein, 282 aa, Homo sapiens
  Payload ID: 18013
  Gene Name: transformer 2 alpha homolog (Drosophila)
  Uniprot ID: Q13595
  ENSP ID: ENSP00000297071
MSDVEENNFEGRESRSQSKSPTGTPARVKSESRSGSRSPSRVSKHSESHSRSRSKSRSRSRRHSHRRYTRSRSHSHSHRRRSRSRSYTPEYRRRRSRSHSPMSNRRRHTGSRANPDPNTCLGVFGLSLYTTERDLREVFSRYGPLSGVNVVYDQRTGRSRGFAFVYFERIDDSKEAMERANGMELDGRRIRVDYSITKRAHTPTPGIYMGRPTHSGGGGGGGGGGGGGGGGRRRDSYYDRGYDRGYDRYEDYDYRYRRRSPSPYYSRYRSRSRSRSYSPRRY

SEQ ID NO: 90078 - protein, 180 aa, Homo sapiens
  Payload ID: 18013
  Gene Name: transformer 2 alpha homolog (Drosophila)
  Uniprot ID: Q13595
  ENSP ID: ENSP00000376290
MSNRRRHTGSRANPDPNTCLGVFGLSLYTTERDLREVFSRYGPLSGVNVVYDQRTGRSRGFAFVYFERIDDSKEAMERANGMELDGRRIRVDYSITKRAHTPTPGIYMGRPTHSGGGGGGGGGGGGGGGGRRRDSYYDRGYDRGYDRYEDYDYRYRRSPSPYYSRYRSRSRSRSYSPRRY

SEQ ID NO: 90079 - protein, 63 aa, Homo sapiens
  Payload ID: 18013
  Gene Name: transformer 2 alpha homolog (Drosophila)
  ENSP ID: ENSP00000413898
MSDVEENNFEGRVNVREEIEEFFPRMWKINQDKRRLMKRVSLSVKISNGNSCSCKIGEQVRIS

SEQ ID NO: 90080 - protein, 181 aa, Homo sapiens
  Payload ID: 18013
  Gene Name: transformer 2 alpha homolog (Drosophila)
  Uniprot ID: Q13595
  ENSP ID: ENSP00000441116
MSNRRRHTGSRANPDPNTCLGVFGLSLYTTERDLREVFSRYGPLSGVNVVYDQRTGRSRGFAFVYFERIDDSKEAMERANGMELDGRRIRVDYSITKRAHTPTPGIYMGRPTHSGGGGGGGGGGGGGGGGRRRDSYYDRGYDRGYDRYEDYDYRYRRRSPSPYYSRYRSRSRSRSYSPRRY

SEQ ID NO: 90081 - protein, 181 aa, Homo sapiens; identical to SEQ ID NO: 90080
  Payload ID: 18013
  Gene Name: transformer 2 alpha homolog (Drosophila)
  Uniprot ID: Q13595
  ENSP ID: ENSP00000480822

SEQ ID NO: 90082 - protein, 127 aa, Homo sapiens
  Payload ID: 18014
  Gene Name: transformer 2 beta homolog (Drosophila)
  ENSP ID: ENSP00000259043
  MOD_RES (1)..(1): Any amino acid
XPIADVSIVYDQQSRRSRGFAFVYFENVDDAKEAKERANGMELDGRRIRVDFSITKRPHTPTPGIYMGRPTYGSSRRRDYYDRGYDRGYDDRDYYSRSYRRRSPSPYYSRGGYRSRSRSRSYSPRRY

SEQ ID NO: 90083 - protein, 38 aa, Homo sapiens
  Payload ID: 18014
  Gene Name: transformer 2 beta homolog (Drosophila)
  Uniprot ID: P62995
  ENSP ID: ENSP00000343857
MSDSGEQNYGERVNVEEGKCGSRHLTSFINEYLKLRNK

SEQ ID NO: 90084 - protein, 188 aa, Homo sapiens
  Payload ID: 18014
  Gene Name: transformer 2 beta homolog (Drosophila)
  Uniprot ID: P62995
  ENSP ID: ENSP00000371626
MSTRRRHVGNRANPDPNCCLGVFGLSLYTTERDLREVFSKYGPIADVSIVYDQQSRRSRGFAFVYFENVDDAKEAKERANGMELDGRRIRVDFSITKRPHTPTPGIYMGRPTYGSSRRRDYYDRGYDRGYDDRDYYSRSYRGGGGGGGGWRAAQDRDQIYRRRSPSPYYSRGGYRSRSRSRSYSPRRY

SEQ ID NO: 90085 - protein, 107 aa, Homo sapiens
  Payload ID: 18014
  Gene Name: transformer 2 beta homolog (Drosophila)
  ENSP ID: ENSP00000406561
  MOD_RES (1)..(1): Any amino acid
XMELDGRRIRVDFSITKRPHTPTPGIYMGRPTYGSSRRRDYYDRGYDRGYDDRDYYSRSYRGGGGGGGGWRAAQDRDQIYRRSPSPYYSRGGYRSRSRSRSYSPRRY

SEQ ID NO: 90086 - protein, 38 aa, Homo sapiens; identical to SEQ ID NO: 90083
  Payload ID: 18014
  Gene Name: transformer 2 beta homolog (Drosophila)
  Uniprot ID: P62995
  ENSP ID: ENSP00000416887

SEQ ID NO: 90087 - protein, 288 aa, Homo sapiens
  Payload ID: 18014
  Gene Name: transformer 2 beta homolog (Drosophila)
  Uniprot ID: P62995
  ENSP ID: ENSP00000416959
MSDSGEQNYGERESRSASRSGSAHGSGKSARHTPARSRSKEDSRRSRSKSRSRSESRSRSRRSSRRHYTRSRSRSRSHRRSRSRSYSRDYRRRHSHSHSPMSTRRRHVGNRANPDPNCCLGVFGLSLYTTERDLREVFSKYGPIADVSIVYDQQSRRSRGFAFVYFENVDDAKEAKERANGMELDGRRIRVDFSITKRPHTPTPGIYMGRPTYGSSRRRDYYDRGYDRGYDDRDYYSRSYRGGGGGGGGWRAAQDRDQIYRRRSPSPYYSRGGYRSRSRSRSYSPRRY

SEQ ID NO: 90088 - protein, 444 aa, Homo sapiens
  Payload ID: 18015
  Gene Name: transforming growth factor beta 1 induced transcript 1
  Uniprot ID: O43294
  ENSP ID: ENSP00000355117
MPRSGAPKERPAEPLTPPPSYGHQPQTGSGESSGASGDKDHLYSTVCKPRSPKPAAPAAPPFSSSSGVLGTGLCELDRLLQELNATQFNITDEIMSQFPSSKVASGEQKEDQSEDKKRPSLPSSPSPGLPKASATSATLELDRLMASLSDFRVQNHLPASGPTQPPVVSSTNEGSPSPPEPTGKGSLDTMLGLLQSDLSRRGVPTQAKGLCGSCNKPIAGQVVTALGRAWHPEHFVCGGCSTALGGSSFFEKDGAPFCPECYFERFSPRCGFCNQPIRHKMVTALGTHWHPEHFCCVSCGEPFGDEGFHEREGRPYCRRDFLQLFAPRCQGCQGPILDNYISALSALWHPDCFVCRECFAPFSGGSFFEHEGRPLCENHFHARRGSLCATCGLPVTGRCVSALGRRFHPDHFTCTFCLRPLTKGSFQERAGKPYCQPCFLKLFG

SEQ ID NO: 90089 - protein, 444 aa, Homo sapiens; identical to SEQ ID NO: 90088
  Payload ID: 18015
  Gene Name: transforming growth factor beta 1 induced transcript 1
  Uniprot ID: O43294
  ENSP ID: ENSP00000378327

SEQ ID NO: 90090 - protein, 461 aa, Homo sapiens
  Payload ID: 18015
  Gene Name: transforming growth factor beta 1 induced transcript 1
  Uniprot ID: O43294
  ENSP ID: ENSP00000378332
MEDLDALLSDLETTTSHMPRSGAPKERPAEPLTPPPSYGHQPQTGSGESSGASGDKDHLYSTVCKPRSPKPAAPAAPPFSSSSGVLGTGLCELDRLLQELNATQFNITDEIMSQFPSSKVASGEQKEDQSEDKKRPSLPSSPSPGLPKASATSATLELDRLMASLSDFRVQNHLPASGPTQPPVVSSTNEGSPSPPEPTGKGSLDTMLGLLQSDLSRRGVPTQAKGLCGSCNKPIAGQVVTALGRAWHPEHFVCGGCSTALGGSSFFEKDGAPFCPECYFERFSPRCGFCNQPIRHKMVTALGTHWHPEHFCCVSCGEPFGDEGFHEREGRPYCRRDFLQLFAPRCQGCQGPILDNYISALSALWHPDCFVCRECFAPFSGGSFFEHEGRPLCENHFHARRGSLCATCGLPVTGRCVSALGRRFHPDHFTCTFCLRPLTKGSFQERAGKPYCQPCFLKLFG

SEQ ID NO: 90091 - protein, 114 aa, Homo sapiens
  Payload ID: 18015
  Gene Name: transforming growth factor beta 1 induced transcript 1
  ENSP ID: ENSP00000454688
MPRSGAPKERPAEPLTPPPSYGHQPQTGSGESSGASGDKDHLYSTVCKPRSPKPAAPAAPPFSSSSGVLGTGLCELDRLLQELNATQFNITALPARLLASQRLLPPQPLWSWID

SEQ ID NO: 90092 - protein, 216 aa, Homo sapiens
  Payload ID: 18015
  Gene Name: transforming growth factor beta 1 induced transcript 1
  ENSP ID: ENSP00000455709
MPCSLTWRLPPRTCQGQGLPKSALRSLSPLPHPMATSHSTVCKPRSPKPAAPAAPPFSSSSGVLGTGLCELDRLLQELNATQFNITDEIMSQFPSSKVASGEQKEDQSEDKKRPSLPSSPSPGLPKASATSATLELDRLMASLSDFRVQNHLPASGPTQPPVVSSTNEGSPSPPEPTGKGSLDTMLGLLQSDLSRRGVPTQAKGLCGSCNKPIAGQ

SEQ ID NO: 90093 - protein, 52 aa, Homo sapiens
  Payload ID: 18015
  Gene Name: transforming growth factor beta 1 induced transcript 1
  ENSP ID: ENSP00000456341
MEDLDRVWGVFRSLGGQGPPVQHGMQASVPKACSPGGPSILLFQRCLGYRAL

SEQ ID NO: 90094 - protein, 89 aa, Homo sapiens
  Payload ID: 18015
  Gene Name: transforming growth factor beta 1 induced transcript 1
  ENSP ID: ENSP00000456482
MPRSGAPKERPAEPLTPPPSYGHQPQTGSGESSGASGDKDHLYSTVCKPRSPKPAAPAAPPFSSSSGVLGTGLCELDRLLQELNATQFN

SEQ ID NO: 90095 - protein, 165 aa, Homo sapiens
  Payload ID: 18015
  Gene Name: transforming growth factor beta 1 induced transcript 1
  ENSP ID: ENSP00000456783
MPRSGAPKERPAEPLTPPPSYGHQPQTGSGESSGASGDKDHLYSTVCKPRSPKPAAPAAPPFSSSSGVLGTGLCELDRLLQELNATQFNITDEIMSQFPSSKVASGEQKEDQSEDKKRPSLPSSPSPGLPKASATSATLELDRLMASLSDFRVQNHLPASGPTQP

SEQ ID NO: 90096 - protein, 444 aa, Homo sapiens; identical to SEQ ID NO: 90088
  Payload ID: 18015
  Gene Name: transforming growth factor beta 1 induced transcript 1
  Uniprot ID: O43294
  ENSP ID: ENSP00000457586

SEQ ID NO: 90097 - protein, 61 aa, Homo sapiens
  Payload ID: 18015
  Gene Name: transforming growth factor beta 1 induced transcript 1
  ENSP ID: ENSP00000459283
MEDLDALLSDLETTTSHMPRSGAPKERPAEPLTPPPSYGHQPQTGSGESSGASGDKDHLYR

SEQ ID NO: 90098 - protein, 160 aa, Homo sapiens
  Payload ID: 18016
  Gene Name: transforming growth factor beta regulator 1
  ENSP ID: ENSP00000284290
MSLLDGLASSPRAPLQSSKARMKKLPKKSQNEKYRLKYLRLRKAAKATVFENAAICDEIARLEEKFLKAKEERRYLLKKLLQLQALTEGEVQAAAPSHSSSLPLTYGVASSVGTIQGAGPISGPSTGAEEPFGKKTKKEKKEKGKENNKLEDHHRPTWLS

SEQ ID NO: 90099 - protein, 411 aa, Homo sapiens
  Payload ID: 18016
  Gene Name: transforming growth factor beta regulator 1
  Uniprot ID: Q3YBR2
  ENSP ID: ENSP00000409016
MSLLDGLASSPRAPLQSSKARMKKLPKKSQNEKYRLKYLRLRKAAKATVFENAAICDEIARLEEKFLKAKEERRYLLKKLLQLQALTEGEVQAAAPSHSSSLPLTYGVASSVGTIQGAGPISGPSTGAEEPFGKKTKKEKKEKGKENNKLEVLKKTCKKKKMAGGARKLVQPIALDPSGRPVFPIGLGGLTVYSLGEIITDRPGFHDESAIYPVGYCSTRIYASMKCPDQKCLYTCQIKDGGVQPQFEIVPEDDPQNAIVSSSADACHAELLRTISTTMGKLMPNLLPAGADFFGFSHPAIHNLIQSCPGARKCINYQWVKFDVCKPGDGQLPEGLPENDAAMSFEAFQRQIFDEDQNDPLLPGSLDLPELQPAAFVSSYQPMYLTHEPLVDTHLQHLKSPSQGSPIQSSD

SEQ ID NO: 90100 - protein, 112 aa, Homo sapiens
  Payload ID: 18016
  Gene Name: transforming growth factor beta regulator 1
  ENSP ID: ENSP00000435448
MSLLDGLASSPRAPLQSSKARMKKLPKKSQNEKYRLKYLRLRKAAKATVFIITDRPGFHDESAIYPVGYCSTRIYASMKCPDQKCLYTCQIKDGGVQPQFEIVPEDDPQNAI

SEQ ID NO: 90101 - protein, 160 aa, Homo sapiens; identical to SEQ ID NO: 90098
  Payload ID: 18016
  Gene Name: transforming growth factor beta regulator 1
  ENSP ID: ENSP00000436238

SEQ ID NO: 90102 - protein, 101 aa, Homo sapiens
  Payload ID: 18016
  Gene Name: transforming growth factor beta regulator 1
  ENSP ID: ENSP00000436599
MSLLDGLASSPRAPLQSSKARMKKLPKKSQNEKYRLKYLRLRKAAKATVFENAAICDEIARLEEKFLKAKEERRSSPTDLAFMMRVPSTPWAIAVLEYMPA

SEQ ID NO: 90103 - protein, 631 aa, Homo sapiens
  Payload ID: 18017
  Gene Name: transforming growth factor beta regulator 4
  Uniprot ID: Q969Z0
  ENSP ID: ENSP00000258770
MAAHLVKRCTCLLREAARQAPAMAPVGRLRLAWVAHKTLTSSATSPISHLPGSLMEPVEKERASTPYIEKQVDHLIKKATRPEELLELLGGSHDLDSNQAAMVLIRLSHLLSEKPEDKGLLIQDAHFHQLLCLLNSQIASVWHGTLSKLLGSLYALGIPKASKELQSVEQEVRWRMRKLKYKHLAFLAESCATLSQEQHSQELLAELLTHLERRWTEIEDSHTLVTVMMKVGHLSEPLMNRLEDKCLELVEHFGPNELRKVLVMLAAQSRRSVPLLRAISYHLVQKPFSLTKDVLLDVAYAYGKLSFHQTQVSQRLATDLLSLMPSLTSGEVAHCAKSFALLKWLSLPLFEAFAQHVLNRAQDITLPHLCSVLLAFARLNFHPDQEDQFFSLVHEKLGSELPGLEPALQVDLVWALCVLQQAREAELQAVLHPEFHIQFLGGKSQKDQNTFQKLLHINATALLEYPEYSGPLLPASAVAPGPSALDRKVTPLQKELQETLKGLLGSADKGSLEVATQYGWVLDAEVLLDSDGEFLPVRDFVAPHLAQPTGSQSPPPGSKRLAFLRWEFPNFNSRSKDLLGRFVLARRHIVAAGFLIVDVPFYEWLELKSEWQKGAYLKDKMRKAVAEELAK

SEQ ID NO: 90104 - protein, 521 aa, Homo sapiens
  Payload ID: 18017
  Gene Name: transforming growth factor beta regulator 4
  Uniprot ID: Q969Z0
  ENSP ID: ENSP00000354992
MAAHLVKRCTCLLREAARQAPAMAPVGRLRLAWVAHKTLTSSATSPISHLPGSLMEPVEKERASTPYIEKQVDHLIKKATRPEELLELLGGSHDLDSNQAAMVLIRLSHLLSEKPEDKGLLIQDAHFHQLLCLLNSQIASVWHGTLSKLLGSLYALGIPKASKELQSVEQEVRWRMRKLKYKHLAFLAESCATLSQEQHSQELLAELLTHLERRWTEIEDSHTLVTVMMKVGHLSEPLMNRLEDKHVLNRAQDITLPHLCSVLLAFARLNFHPDQEDQFFSLVHEKLGSELPGLEPALQVDLVWALCVLQQAREAELQAVLHPEFHIQFLGGKSQKDQNTFQKLLHINATALLEYPEYSGPLLPASAVAPGPSALDRKVTPLQKELQETLKGLLGSADKGSLEVATQYGWVLDAEVLLDSDGEFLPVRDFVAPHLAQPTGSQSPPPGSKRLAFLRWEFPNFNSRSKDLLGRFVLARRHIVAAGFLIVDVPFYEWLELKSEWQKGAYLKDKMRKAVAEELAK

SEQ ID NO: 90105 - protein, 521 aa, Homo sapiens; identical to SEQ ID NO: 90104
  Payload ID: 18017
  Gene Name: transforming growth factor beta regulator 4
  Uniprot ID: Q969Z0
  ENSP ID: ENSP00000379016

SEQ ID NO: 90106 - protein, 103 aa, Homo sapiens
  Payload ID: 18017
  Gene Name: transforming growth factor beta regulator 4
  ENSP ID: ENSP00000417071
MAAHLVKRCTCLLREAARQAPAMAPVGRLRLAWVAHKTLTSSATSPISHLPGSLMEPVEKERASTPYIEKQVDHLIKKATRPEELLELLGGSHDLDSNQAAMV

SEQ ID NO: 90107 - protein, 128 aa, Homo sapiens
  Payload ID: 18017
  Gene Name: transforming growth factor beta regulator 4
  ENSP ID: ENSP00000417324
MAAHLVKRCTCLLREAARQAPAMAPVGRLRLAWVAHKTLTSSATSPISHLPGSLMEPVEKERASTPYIEKQVDHLIKKATRPEELLELLGGSHDLDSNQAAMVLIRLSHLLSEKPEDKGLLIQDAHFH

SEQ ID NO: 90108 - protein, 248 aa, Homo sapiens
  Payload ID: 18017
  Gene Name: transforming growth factor beta regulator 4
  ENSP ID: ENSP00000417743
MEPVEKERASTPYIEKQVDHLIKKATRPEELLELLGGSHDLDSNQAAMVLIRLSHLLSEKPEDKGLLIQDAHFHQLLCLLNSQIASVWHGTLSKLLGSLYALGIPKASKELQSVEQEVRWRMRKLKYKHLAFLAESCATLSQEQHSQELLAELLTHLERRWTEIEDSHTLVTVMMKVGHLSEPLMNRLEDKCLELVEHFGPNELRKVLVMLAAQSRRSVPLLRAISYHLVQKPFSLTKDVLLDVAYAY

SEQ ID NO: 90109 - protein, 118 aa, Homo sapiens
  Payload ID: 18017
  Gene Name: transforming growth factor beta regulator 4
  ENSP ID: ENSP00000417967
MAAHLVKRCTCLLREAARQAPAMAPVGRLRLAWVAHKTLTSSATSPISHLPGSLMEPVEKERASTPYIEKQVDHLIKKATRPEELLELLGGSHDLDSNQAAMVLIRLSHLLSEKPEDK

SEQ ID NO: 90110 - protein, 274 aa, Homo sapiens
  Payload ID: 18017
  Gene Name: transforming growth factor beta regulator 4
  ENSP ID: ENSP00000417974
  MOD_RES (1)..(1): Any amino acid
XQTQVSQRLATDLLSLMPSLTSGEVAHCAKSFALLKWLSLPLFEAFAQHVLNRAQDITLPHLCSVLLAFARLNFHPDQEDQFFSLVHEKLGSELPGLEPALQVDLVWALCVLQQAREAELQAVLHPEFHIQFLGEPPAPSTTGTGKLPGLVCLVPGGKSQKDQNTFQKLLHINATALLEYPEYSGPLLPASAVAPGPSALDRKVTPLQKELQETLKGLLGSADKGSLEVATQYGWVLDAEVLLDSDGEFLPVRDFVAPHLAQPTGSQSPPPGSK

SEQ ID NO: 90111 - protein, 283 aa, Homo sapiens
  Payload ID: 18017
  Gene Name: transforming growth factor beta regulator 4
  ENSP ID: ENSP00000418631
MAAHLVKRCTCLLREAARQAPAMAPVGRLRLAWVAHKTLTSSATSPISHLPGSLMEPVEKERASTPYIEKQVDHLIKKATRPEELLELLGGSHDLDSNQAAMIASVWHGTLSKLLGSLYALGIPKASKELQSVEQEVRWRMRKLKYKHLAFLAESCATLSQEQHSQELLAELLTHLERRWTEIEDSHTLVTVMMKVGHLSEPLMNRLEDKCLELVEHFGPNELRKVLVMLAAQSRRSVPLLRAISYHLVQKPFSLTKDVLLDVAYAYGKLSFHQTQVSQRLAT

SEQ ID NO: 90112 - protein, 631 aa, Homo sapiens; identical to SEQ ID NO: 90103
  Payload ID: 18017
  Gene Name: transforming growth factor beta regulator 4
  Uniprot ID: Q969Z0
  ENSP ID: ENSP00000420597

SEQ ID NO: 90113 - protein, 160 aa, Homo sapiens
  Payload ID: 18018
  Gene Name: transforming growth factor, alpha
  Uniprot ID: P01135
  ENSP ID: ENSP00000295400
MVPSAGQLALFALGIVLAACQALENSTSPLSADPPVAAAVVSHFNDCPDSHTQFCFHGTCRFLVQEDKPACVCHSGYVGARCEHADLLAVVAASQKKQAITALVVVSIVALAVLIITCVLIHCCQVRKHCEWCRALICRHEKPSALLKGRTACCHSETVV

SEQ ID NO: 90114 - protein, 120 aa, Homo sapiens
  Payload ID: 18018
  Gene Name: transforming growth factor, alpha
  ENSP ID: ENSP00000377787
MVPSAGQLALFALGIVLAACQALENSTSPLSDPPVAAAVVSHFNDCPDSHTQFCFHGTCRFLVQEDKPACVCHSGYVGARCEHADLLAVVAASQKKQAITALVVVSIVALAVLIITCVLI

SEQ ID NO: 90115 - protein, 161 aa, Homo sapiens
  Payload ID: 18018
  Gene Name: transforming growth factor, alpha
  Uniprot ID: P01135
  ENSP ID: ENSP00000387493
MVPSAGQLALFALGIVLAACQALENSTSPLSDPPVAAAVVSHFNDCPDSHTQFCFHGTCRFLVQEDKPACVCHSGYVGARCEHADLLAVVAASQKKQAITALVVVSIVALAVLIITCVLIHCCQVRKHCEWCRALICRHEKPSALLKGRTACCHSETATLG

SEQ ID NO: 90116 - protein, 159 aa, Homo sapiens
  Payload ID: 18018
  Gene Name: transforming growth factor, alpha
  Uniprot ID: P01135
  ENSP ID: ENSP00000404099
MVPSAGQLALFALGIVLAACQALENSTSPLSDPPVAAAVVSHFNDCPDSHTQFCFHGTCRFLVQEDKPACVCHSGYVGARCEHADLLAVVAASQKKQAITALVVVSIVALAVLIITCVLIHCCQVRKHCEWCRALICRHEKPSALLKGRTACCHSETVV

SEQ ID NO: 90117 - protein, 166 aa, Homo sapiens
  Payload ID: 18018
  Gene Name: transforming growth factor, alpha
  ENSP ID: ENSP00000404131
MFKIGRGALDLFSELLSFGGIVLAACQALENSTSPLSADPPVAAAVVSHFNDCPDSHTQFCFHGTCRFLVQEDKPACVCHSGYVGARCEHADLLAVVAASQKKQAITALVVVSIVALAVLIITCVLIHCCQVRKHCEWCRALICRHEKPSALLKGRTACCHSETVV

SEQ ID NO: 90118 - protein, 131 aa, Homo sapiens
  Payload ID: 18018
  Gene Name: transforming growth factor, alpha
  ENSP ID: ENSP00000407432
  MOD_RES (1)..(1): Any amino acid
XPPVAAAVVSHFNDCPDSHTQFCFHGTCRFLVQEDKPACVCHSGYVGARCEHADLLAVVAASQKKQAITALVVVSIVALAVLIITCVLIHCCQVRKHCEWCRALICRHEKPSALLKGRTACCHSETGCRLY

SEQ ID NO: 90119 - protein, 165 aa, Homo sapiens
  Payload ID: 18018
  Gene Name: transforming growth factor, alpha
  ENSP ID: ENSP00000414127
MFKIGRGALDLFSELLSFGGIVLAACQALENSTSPLSDPPVAAAVVSHFNDCPDSHTQFCFHGTCRFLVQEDKPACVCHSGYVGARCEHADLLAVVAASQKKQAITALVVVSIVALAVLIITCVLIHCCQVRKHCEWCRALICRHEKPSALLKGRTACCHSETVV

SEQ ID NO: 90120 - protein, 390 aa, Homo sapiens
  Payload ID: 18019
  Gene Name: transforming growth factor, beta 1
  Uniprot ID: P01137
  ENSP ID: ENSP00000221930
MPPSGLRLLPLLLPLLWLLVLTPGRPAAGLSTCKTIDMELVKRKRIEAIRGQILSKLRLASPPSQGEVPPGPLPEAVLALYNSTRDRVAGESAEPEPEPEADYYAKEVTRVLMVETHNEIYDKFKQSTHSIYMFFNTSELREAVPEPVLLSRAELRLLRLKLKVEQHVELYQKYSNNSWRYLSNRLLAPSDSPEWLSFDVTGVVRQWLSRGGEIEGFRLSAHCSCDSRDNTLQVDINGFTTGRRGDLATIHGMNRPFLLLMATPLERAQHLQSSRHRRALDTNYCFSSTEKNCCVRQLYIDFRKDLGWKWIHEPKGYHANFCLGPCPYIWSLDTQYSKVLALYNQHNPGASAAPCCVPQALEPLPIVYYVGRKPKVEQLSNMIVRSCKCS

SEQ ID NO: 90121 - protein, 120 aa, Homo sapiens
  Payload ID: 18019
  Gene Name: transforming growth factor, beta 1
  ENSP ID: ENSP00000472767
  MOD_RES (1)..(1): Any amino acid
XFTTGRRGDLATIHGMNRPFLLLMATPLERAQHLQSSRHRRALDTNYCFSSTEKNCCVRQLYIDFRKDLGWKWIHEPKGYHANFCLGPCPYIWSLDTQYSKLNEQNLIQEVPNIWQREVG

SEQ ID NO: 90122 - protein, 442 aa, Homo sapiens
  Payload ID: 18020
  Gene Name: transforming growth factor, beta 2
  Uniprot ID: P61812
  ENSP ID: ENSP00000355896
MHYCVLSAFLILHLVTVALSLSTCSTLDMDQFMRKRIEAIRGQILSKLKLTSPPEDYPEPEEVPPEVISIYNSTRDLLQEKASRRAAACERERSDEEYYAKEVYKIDMPPFFPSETVCPVVTTPSGSVGSLCSRQSQVLCGYLDAIPPTFYRPYFRIVRFDVSAMEKNASNLVKAEFRVFRLQNPKARVPEQRIELYQILKSKDLTSPTQRYIDSKVVKTRAEGEWLSFDVTDAVHEWLHHKDRNLGFKISLHCPCCTFVPSNNYIIPNKSEELEARFAGIDGTSTYTSGDQKTIKSTRKKNSGKTPHLLLMLLPSYRLESQQTNRRKKRALDAAYCFRNVQDNCCLRPLYIDFKRDLGWKWIHEPKGYNANFCAGACPYLWSSDTQHSRVLSLYNTINPEASASPCCVSQDLEPLTILYYIGKTPKIEQLSNMIVKSCKCS

SEQ ID NO: 90123 - protein, 414 aa, Homo sapiens
  Payload ID: 18020
  Gene Name: transforming growth factor, beta 2
  Uniprot ID: P61812
  ENSP ID: ENSP00000355897
MHYCVLSAFLILHLVTVALSLSTCSTLDMDQFMRKRIEAIRGQILSKLKLTSPPEDYPEPEEVPPEVISIYNSTRDLLQEKASRRAAACERERSDEEYYAKEVYKIDMPPFFPSENAIPPTFYRPYFRIVRFDVSAMEKNASNLVKAEFRVFRLQNPKARVPEQRIELYQILKSKDLTSPTQRYIDSKVVKTRAEGEWLSFDVTDAVHEWLHHKDRNLGFKISLHCPCCTFVPSNNYIIPNKSEELEARFAGIDGTSTYTSGDQKTIKSTRKKNSGKTPHLLLMLLPSYRLESQQTNRRKKRALDAAYCFRNVQDNCCLRPLYIDFKRDLGWKWIHEPKGYNANFCAGACPYLWSSDTQHSRVLSLYNTINPEASASPCCVSQDLEPLTILYYIGKTPKIEQLSNMIVKSCKCS

SEQ ID NO: 90124 - protein, 412 aa, Homo sapiens
  Payload ID: 18021
  Gene Name: transforming growth factor, beta 3
  Uniprot ID: P10600
  ENSP ID: ENSP00000238682
MKMHLQRALVVLALLNFATVSLSLSTCTTLDFGHIKKKRVEAIRGQILSKLRLTSPPEPTVMTHVPYQVLALYNSTRELLEEMHGEREEGCTQENTESEYYAKEIHKFDMIQGLAEHNELAVCPKGITSKVFRFNVSSVEKNRTNLFRAEFRVLRVPNPSSKRNEQRIELFQILRPDEHIAKQRYIGGKNLPTRGTAEWLSFDVTDTVREWLLRRESNLGLEISIHCPCHTFQPNGDILENIHEVMEIKFKGVDNEDDHGRGDLGRLKKQKDHHNPHLILMMIPPHRLDNPGQGGQRKKRALDTNYCFRNLEENCCVRPLYIDFRQDLGWKWVHEPKGYYANFCSGPCPYLRSADTTHSTVLGLYNTLNPEASASPCCVPQDLEPLTILYYVGRTPKVEQLSNMVVKSCKCS

SEQ ID NO: 90125 - protein, 309 aa, Homo sapiens
  Payload ID: 18021
  Gene Name: transforming growth factor, beta 3
  Uniprot ID: P10600
  ENSP ID: ENSP00000451110
MKMHLQRALVVLALLNFATVSLSLSTCTTLDFGHIKKKRVEAIRGQILSKLRLTSPPEPTVMTHVPYQVLALYNSTRELLEEMHGEREEGCTQENTESEYYAKEIHKFDMIQGLAEHNELAVCPKGITSKVFRFNVSSVEKNRTNLFRAEFRVLRVPNPSSKRNEQRIELFQILRPDEHIAKQRYIGGKNLPTRGTAEWLSFDVTDTVREWLLRRESNLGLEISIHCPCHTFQPNGDILENIHEVMEIKFKGVDNEDDHGRGDLGRLKKQKDHHNPHLILMMIPPHRLDNPGQGGQRKKRALDTNYCFR

SEQ ID NO: 90126 - protein, 426 aa, Homo sapiens
  Payload ID: 18022
  Gene Name: transforming growth factor, beta receptor 1
  Uniprot ID: P36897
  ENSP ID: ENSP00000364129
MEAAVAAPRPRLLLLVLAAAAAAAAALLPGATALQCFCHLCTKDNFTCVTDGLCFVSVTETTDKVIHNSMCIAEIDLIPRDRPFVCAPSSKTGSVTTTYCCNQDHCNKIELPTTGLPLLVQRTIARTIVLQESIGKGRFGEVWRGKWRGEEVAVKIFSSREERSWFREAEIYQTVMLRHENILGFIAADNKDNGTWTQLWLVSDYHEHGSLFDYLNRYTVTVEGMIKLALSTASGLAHLHMEIVGTQGKPAIAHRDLKSKNILVKKNGTCCIADLGLAVRHDSATDTIDIAPNHRVGTKRYMAPEVLDDSINMKHFESFKRADIYAMGLVFWEIARRCSIGGIHEDYQLPYYDLVPSDPSVEEMRKVVCEQKLRPNIPNRWQSCEALRVMAKIMRECWYANGAARLTALRIKKTLSQLSQQEGIKM

SEQ ID NO: 90127 - protein, 503 aa, Homo sapiens
  Payload ID: 18022
  Gene Name: transforming growth factor, beta receptor 1
  Uniprot ID: P36897
  ENSP ID: ENSP00000364133
MEAAVAAPRPRLLLLVLAAAAAAAAALLPGATALQCFCHLCTKDNFTCVTDGLCFVSVTETTDKVIHNSMCIAEIDLIPRDRPFVCAPSSKTGSVTTTYCCNQDHCNKIELPTTVKSSPGLGPVELAAVIAGPVCFVCISLMLMVYICHNRTVIHHRVPNEEDPSLDRPFISEGTTLKDLIYDMTTSGSGSGLPLLVQRTIARTIVLQESIGKGRFGEVWRGKWRGEEVAVKIFSSREERSWFREAEIYQTVMLRHENILGFIAADNKDNGTWTQLWLVSDYHEHGSLFDYLNRYTVTVEGMIKLALSTASGLAHLHMEIVGTQGKPAIAHRDLKSKNILVKKNGTCCIADLGLAVRHDSATDTIDIAPNHRVGTKRYMAPEVLDDSINMKHFESFKRADIYAMGLVFWEIARRCSIGGIHEDYQLPYYDLVPSDPSVEEMRKVVCEQKLRPNIPNRWQSCEALRVMAKIMRECWYANGAARLTALRIKKTLSQLSQQEGIKM

SEQ ID NO: 90128 - protein, 383 aa, Homo sapiens
  Payload ID: 18022
  Gene Name: transforming growth factor, beta receptor 1
  ENSP ID: ENSP00000446685
MEAAVAAPRPRLLLLVLAAAAAAAAALLPGATALQCFCHLCTKDNFTCVTDGLCFVSVTETTDKVIHNSMCIAEIDLIPRDRPFVCAPSSKTGSVTTTYCCNQDHCNKIELPTTGPFSVKSSPGLGPVELAAVIAGPVCFVCISLMLMVYICHNRTVIHHRVPNEEDPSLDRPFISEGTTLKDLIYDMTTSGSGSGLPLLVQRTIARTIVLQESIGKGRFGEVWRGKWRGEEVAVKIFSSREERSWFREAEIYQTVMLRHENILGFIAADNKDNGTWTQLWLVSDYHEHGSLFDYLNRYTVTVEGMIKLALSTASGLAHLHMEIVGTQGKPAIAHRDLKSKNILVKKNGTCCIADLGLAVRHDSATDTIDIAPNHRVGTKRNS

SEQ ID NO: 90129 - protein, 126 aa, Homo sapiens
  Payload ID: 18022
  Gene Name: transforming growth factor, beta receptor 1
  ENSP ID: ENSP00000447182
MCIAEIDLIPRDRPFVCAPSSKTGSVTTTYCCNQDHCNKIELPTTGPFSVKSSPGLGPVELAAVIAGPVCFVCISLMLMVYICHNRTVIHHRVPNEEDPSLDRPFISEGTTLKDLIYDMTTSGSGS

SEQ ID NO: 90130 - protein, 507 aa, Homo sapiens
  Payload ID: 18022
  Gene Name: transforming growth factor, beta receptor 1
  Uniprot ID: P36897
  ENSP ID: ENSP00000447297
MEAAVAAPRPRLLLLVLAAAAAAAAALLPGATALQCFCHLCTKDNFTCVTDGLCFVSVTETTDKVIHNSMCIAEIDLIPRDRPFVCAPSSKTGSVTTTYCCNQDHCNKIELPTTGPFSVKSSPGLGPVELAAVIAGPVCFVCISLMLMVYICHNRTVIHHRVPNEEDPSLDRPFISEGTTLKDLIYDMTTSGSGSGLPLLVQRTIARTIVLQESIGKGRFGEVWRGKWRGEEVAVKIFSSREERSWFREAEIYQTVMLRHENILGFIAADNKDNGTWTQLWLVSDYHEHGSLFDYLNRYTVTVEGMIKLALSTASGLAHLHMEIVGTQGKPAIAHRDLKSKNILVKKNGTCCIADLGLAVRHDSATDTIDIAPNHRVGTKRYMAPEVLDDSINMKHFESFKRADIYAMGLVFWEIARRCSIGGIHEDYQLPYYDLVPSDPSVEEMRKVVCEQKLRPNIPNRWQSCEALRVMAKIMRECWYANGAARLTALRIKKTLSQLSQQEGIKM

SEQ ID NO: 90131 - protein, 122 aa, Homo sapiens
  Payload ID: 18022
  Gene Name: transforming growth factor, beta receptor 1
  ENSP ID: ENSP00000447707
MCIAEIDLIPRDRPFVCAPSSKTGSVTTTYCCNQDHCNKIELPTTVKSSPGLGPVELAAVIAGPVCFVCISLMLMVYICHNRTVIHHRVPNEEDPSLDRPFISEGTTLKDLIYDMTTSGSGS

SEQ ID NO: 90132 - protein, 114 aa, Homo sapiens
  Payload ID: 18022
  Gene Name: transforming growth factor, beta receptor 1
  ENSP ID: ENSP00000448518
MCIAEIDLIPRDRPFVCAPSSKTGSVTTTYCCNQDHCNKIELPTTGPFSVKSSPGLGPVELAAVIAGPVCFVCISLMLMVYICHNRTVIHHRVPNEEDPSLDRPFISEGTTLKD

SEQ ID NO: 90133 - protein, 114 aa, Homo sapiens
  Payload ID: 18022
  Gene Name: transforming growth factor, beta receptor 1
  ENSP ID: ENSP00000449028
MCIAEIDLIPRDRPFVCAPSSKTGSVTTTYCCNQDHCNKIELPTTGLPLLVQRTIARTIVLQESIGKGRFGEVWRGKWRGEEVAVKIFSSREERSWFREAEIYQTVMLRHENIL

SEQ ID NO: 90134 - protein, 118 aa, Homo sapiens
  Payload ID: 18022
  Gene Name: transforming growth factor, beta receptor 1
  ENSP ID: ENSP00000449934
MCIAEIDLIPRDRPFVCAPSSKTGSVTTTYCCNQDHCNKIELPTTVKSSPGLGPVELAAVIAGPVCFVCISLMLMVYICHNRTVIHHRVPNEEDPSLDRPFISEGTTLKDLIYDMTTS

SEQ ID NO: 90135 - protein, 434 aa, Homo sapiens
  Payload ID: 18022
  Gene Name: transforming growth factor, beta receptor 1
  ENSP ID: ENSP00000450052
MCIAEIDLIPRDRPFVCAPSSKTGSVTTTYCCNQDHCNKIELPTTVKSSPGLGPVELAAVIAGPVCFVCISLMLMVYICHNRTVIHHRVPNEEDPSLDRPFISEGTTLKDLIYDMTTSGSGSGLPLLVQRTIARTIVLQESIGKGRFGEVWRGKWRGEEVAVKIFSSREERSWFREAEIYQTVMLRHENILGFIAADNKDNGTWTQLWLVSDYHEHGSLFDYLNRYTVTVEGMIKLALSTASGLAHLHMEIVGTQGKPAIAHRDLKSKNILVKKNGTCCIADLGLAVRHDSATDTIDIAPNHRVGTKRYMAPEVLDDSINMKHFESFKRADIYAMGLVFWEIARRCSIGGIHEDYQLPYYDLVPSDPSVEEMRKVVCEQKLRPNIPNRWQSCEALRVMAKIMRECWYANGAARLTALRIKKTLSQLSQQEGIKM

SEQ ID NO: 90136 - protein, 860 aa, Homo sapiens
  Payload ID: 18023
  Gene Name: transforming growth factor, beta receptor associated protein 1
  Uniprot ID: Q8WUH2
  ENSP ID: ENSP00000258449
MMSIKAFTLVSAVERELLMGDKERVNIECVECCGRDLYVGTNDCFVYHFLLEERPVPAGPATFTATKQLQRHLGFKKPVNELRAASALNRLLVLCDNSISLVNMLNLEPVPSGARIKGAATFALNENPVSGDPFCVEVCIISVKRRTIQMFLVYEDRVQIVKEVSTAEQPLAVAVDGHFLCLALTTQYIIHNYSTGVSQDLFPYCSEERPPIVKRIGRQEFLLAGPGGLGMFATVAGISQRAPVHWSENVIGAAVSFPYVIALDDEFITVHSMLDQQQKQTLPFKEGHILQDFEGRVIVATSKGVYILVPLPLEKQIQDLLASRRVEEALVLAKGARRNIPKEKFQVMYRRILQQAGFIQFAQLQFLEAKELFRSGQLDVRELISLYPFLLPTSSSFTRSHPPLHEYADLNQLTQGDQEKMAKCKRFLMSYLNEVRSTEVANGYKEDIDTALLKLYAEADHDSLLDLLVTENFCLLTDSAAWLEKHKKYFALGLLYHYNNQDAAAVQLWVNIVNGDVQDSTRSDLYEYIVDFLTYCLDEELVWAYADWVLQKSEEVGVQVFTKRPLDEQQKNSFNPDDIINCLKKYPKALVKYLEHLVIDKRLQKEEYHTHLAVLYLEEVLLQRASASGKGAEATETQAKLRRLLQKSDLYRVHFLLERLQGAGLPMESAILHGKLGEHEKALHILVHELQDFAAAEDYCLWCSEGRDPPHRQQLFHTLLAIYLHAGPTAHELAVAAVDLLNRHATEFDAAQVLQMLPDTWSVQLLCPFLMGAMRDSIHARRTMQVALGLARSENLIYTYDKMKLKGSSIQLSDKKLCQICQNPFCEPVFVRYPNGGLVHTHCAASRHTNPSSSSPGTRT

SEQ ID NO: 90137 - protein, 860 aa, Homo sapiens; identical to SEQ ID NO: 90136
  Payload ID: 18023
  Gene Name: transforming growth factor, beta receptor associated protein 1
  Uniprot ID: Q8WUH2
  ENSP ID: ENSP00000377027

SEQ ID NO: 90138 - protein, 860 aa, Homo sapiens; identical to SEQ ID NO: 90136
  Payload ID: 18023
  Gene Name: transforming growth factor, beta receptor associated protein 1
  Uniprot ID: Q8WUH2
  ENSP ID: ENSP00000471434

SEQ ID NO: 90139 - protein, 567 aa, Homo sapiens
  Payload ID: 18024
  Gene Name: transforming growth factor, beta receptor II (70/80kDa)
  Uniprot ID: P37173
  ENSP ID: ENSP00000295754
MGRGLLRGLWPLHIVLWTRIASTIPPHVQKSVNNDMIVTDNNGAVKFPQLCKFCDVRFSTCDNQKSCMSNCSITSICEKPQEVCVAVWRKNDENITLETVCHDPKLPYHDFILEDAASPKCIMKEKKKPGETFFMCSCSSDECNDNIIFSEEYNTSNPDLLLVIFQVTGISLLPPLGVAISVIIIFYCYRVNRQQKLSSTWETGKTRKLMEFSEHCAIILEDDRSDISSTCANNINHNTELLPIELDTLVGKGRFAEVYKAKLKQNTSEQFETVAVKIFPYEEYASWKTEKDIFSDINLKHENILQFLTAEERKTELGKQYWLITAFHAKGNLQEYLTRHVISWEDLRKLGSSLARGIAHLHSDHTPCGRPKMPIVHRDLKSSNILVKNDLTCCLCDFGLSLRLDPTLSVDDLANSGQVGTARYMAPEVLESRMNLENVESFKQTDVYSMALVLWEMTSRCNAVGEVKDYEPPFGSKVREHPCVESMKDNVLRDRGRPEIPSFWLNHQGIQMVCETLTECWDHDPEARLTAQCVAERFSELEHLDRLSGRSCSEEKIPEDGSLNTTK

SEQ ID NO: 90140 - protein, 592 aa, Homo sapiens
  Payload ID: 18024
  Gene Name: transforming growth factor, beta receptor II (70/80kDa)
  Uniprot ID: P37173
  ENSP ID: ENSP00000351905
MGRGLLRGLWPLHIVLWTRIASTIPPHVQKSDVEMEAQKDEIICPSCNRTAHPLRHINNDMIVTDNNGAVKFPQLCKFCDVRFSTCDNQKSCMSNCSITSICEKPQEVCVAVWRKNDENITLETVCHDPKLPYHDFILEDAASPKCIMKEKKKPGETFFMCSCSSDECNDNIIFSEEYNTSNPDLLLVIFQVTGISLLPPLGVAISVIIIFYCYRVNRQQKLSSTWETGKTRKLMEFSEHCAIILEDDRSDISSTCANNINHNTELLPIELDTLVGKGRFAEVYKAKLKQNTSEQFETVAVKIFPYEEYASWKTEKDIFSDINLKHENILQFLTAEERKTELGKQYWLITAFHAKGNLQEYLTRHVISWEDLRKLGSSLARGIAHLHSDHTPCGRPKMPIVHRDLKSSNILVKNDLTCCLCDFGLSLRLDPTLSVDDLANSGQVGTARYMAPEVLESRMNLENVESFKQTDVYSMALVLWEMTSRCNAVGEVKDYEPPFGSKVREHPCVESMKDNVLRDRGRPEIPSFWLNHQGIQMVCETLTECWDHDPEARLTAQCVAERFSELEHLDRLSGRSCSEEKIPEDGSLNTTK

SEQ ID NO: 90141 - protein, 851 aa, Homo sapiens
  Payload ID: 18025
  Gene Name: transforming growth factor, beta receptor III
  Uniprot ID: Q03167
  ENSP ID: ENSP00000212355
MTSHYVIAIFALMSSCLATAGPEPGALCELSPVSASHPVQALMESFTVLSGCASRGTTGLPQEVHVLNLRTAGQGPGQLQREVTLHLNPISSVHIHHKSVVFLLNSPHPLVWHLKTERLATGVSRLFLVSEGSVVQFSSANFSLTAETEERNFPHGNEHLLNWARKEYGAVTSFTELKIARNIYIKVGEDQVFPPKCNIGKNFLSLNYLAEYLQPKAAEGCVMSSQPQNEEVHIIELITPNSNPYSAFQVDITIDIRPSQEDLEVVKNLILILKCKKSVNWVIKSFDVKGSLKIIAPNSIGFGKESERSMTMTKSIRDDIPSTQGNLVKWALDNGYSPITSYTMAPVANRFHLRLENNAEEMGDEEVHTIPPELRILLDPGALPALQNPPIRGGEGQNGGLPFPFPDISRRVWNEEGEDGLPRPKDPVIPSIQLFPGLREPEEVQGSVDIALSVKCDNEKMIVAVEKDSFQASGYSGMDVTLLDPTCKAKMNGTHFVLESPLNGCGTRPRWSALDGVVYYNSIVIQVPALGDSSGWPDGYEDLESGDNGFPGDMDEGDASLFTRPEIVVFNCSLQQVRNPSSFQEQPHGNITFNMELYNTDLFLVPSQGVFSVPENGHVYVEVSVTKAEQELGFAIQTCFISPYSNPDRMSHYTIIENICPKDESVKFYSPKRVHFPIPQADMDKKRFSFVFKPVFNTSLLFLQCELTLCTKMEKHPQKLPKCVPPDEACTSLDASIIWAMMQNKKTFTKPLAVIHHEAESKEKGPSMKEPNPISPPIFHGLDTLTVMGIAFAAFVIGALLTGALWYIYSHTGETAGRQQVPTSPPASENSSAAHSIGSTQSTPCSSSSTA

SEQ ID NO: 90142 - protein, 850 aa, Homo sapiens
  Payload ID: 18025
  Gene Name: transforming growth factor, beta receptor III
  Uniprot ID: Q03167
  ENSP ID: ENSP00000359426
MTSHYVIAIFALMSSCLATAGPEPGALCELSPVSASHPVQALMESFTVLSGCASRGTTGLPQEVHVLNLRTAGQGPGQLQREVTLHLNPISSVHIHHKSVVFLLNSPHPLVWHLKTERLATGVSRLFLVSEGSVVQFSSANFSLTAETEERNFPHGNEHLLNWARKEYGAVTSFTELKIARNIYIKVGEDQVFPPKCNIGKNFLSLNYLAEYLQPKAAEGCVMSSQPQNEEVHIIELITPNSNPYSAFQVDITIDIRPSQEDLEVVKNLILILKCKKSVNWVIKSFDVKGSLKIIAPNSIGFGKESERSMTMTKSIRDDIPSTQGNLVKWALDNGYSPITSYTMAPVANRFHLRLENNEEMGDEEVHTIPPELRILLDPGALPALQNPPIRGGEGQNGGLPFPFPDISRRVWNEEGEDGLPRPKDPVIPSIQLFPGLREPEEVQGSVDIALSVKCDNEKMIVAVEKDSFQASGYSGMDVTLLDPTCKAKMNGTHFVLESPLNGCGTRPRWSALDGVVYYNSIVIQVPALGDSSGWPDGYEDLESGDNGFPGDMDEGDASLFTRPEIVVFNCSLQQVRNPSSFQEQPHGNITFNMELYNTDLFLVPSQGVFSVPENGHVYVEVSVTKAEQELGFAIQTCFISPYSNPDRMSHYTIIENICPKDESVKFYSPKRVHFPIPQADMDKKRFSFVFKPVFNTSLLFLQCELTLCTKMEKHPQKLPKCVPPDEACTSLDASIIWAMMQNKKTFTKPLAVIHHEAESKEKGPSMKEPNPISPPIFHGLDTLTVMGIAFAAFVIGALLTGALWYIYSHTGETAGRQQVPTSPPASENSSAAHSIGSTQSTPCSSSSTA

SEQ ID NO: 90143 - protein, 35 aa, Homo sapiens
  Payload ID: 18025
  Gene Name: transforming growth factor, beta receptor III
  ENSP ID: ENSP00000395975
MTSHYVIAIFALMSSCLATAGPEPGALCELSPVSA

SEQ ID NO: 90144 - protein, 850 aa, Homo sapiens; identical to SEQ ID NO: 90142
  Payload ID: 18025
  Gene Name: transforming growth factor, beta receptor III
  Uniprot ID: Q03167
  ENSP ID: ENSP00000432638

SEQ ID NO: 90145 - protein, 89 aa, Homo sapiens
  Payload ID: 18025
  Gene Name: transforming growth factor, beta receptor III
  ENSP ID: ENSP00000433477
MTSHYVIAIFALMSSCLATAGPEPGALCELSPVSASHPVQALMESFTVLSGCASRGTTGLPQEVHVLNLRTAGQGPGQLQREACSMNHY

SEQ ID NO: 90146 - protein, 49 aa, Homo sapiens
  Payload ID: 18025
  Gene Name: transforming growth factor, beta receptor III
  ENSP ID: ENSP00000434994
MTSHYVIAIFALMSSCLATAGWSAMARSWLTATSASRVQAILLPQPPEY

SEQ ID NO: 90147 - protein, 851 aa, Homo sapiens; identical to SEQ ID NO: 90141
  Payload ID: 18025
  Gene Name: transforming growth factor, beta receptor III
  Uniprot ID: Q03167
  ENSP ID: ENSP00000436127

SEQ ID NO: 90148 - protein, 316 aa, Homo sapiens
  Payload ID: 18026
  Gene Name: transforming growth factor, beta receptor III-like
  Uniprot ID: H3BV60
  ENSP ID: ENSP00000457962
MGESAAATASLFQRRRRGRGGRVTFPGGLKGSARFLSFGPPFPAPPAPPFPAAPGPWLRRPLFSLKLSDTEDVFPRRAGPLEVPADSRVFVQAALARPSPRWGLALHRCSVTPSSRPAPGPALALLREGCPADTSVAFPPPPPPSPGAARPARFSFRLRPVFNASVQFLHCQLSRCRRLRGVRRAPAPLTPPPPPPPSRCLPQDEACADTGSGSAEGLAADGPHLHTLTQPIVVTVPRPPPRPPKSVPGRAVRPEPPAPAPAALEPAPVVALVLAAFVLGAALAAGLGLVCAHSAPHAPGPPARASPSGPQPRRSQ

SEQ ID NO: 90149 - protein, 683 aa, Homo sapiens
  Payload ID: 18027
  Gene Name: transforming growth factor, beta-induced, 68kDa
  Uniprot ID: Q15582
  ENSP ID: ENSP00000416330
MALFVRLLALALALALGPAATLAGPAKSPYQLVLQHSRLRGRQHGPNVCAVQKVIGTNRKYFTNCKQWYQRKICGKSTVISYECCPGYEKVPGEKGCPAALPLSNLYETLGVVGSTTTQLYTDRTEKLRPEMEGPGSFTIFAPSNEAWASLPAEVLDSLVSNVNIELLNALRYHMVGRRVLTDELKHGMTLTSMYQNSNIQIHHYPNGIVTVNCARLLKADHHATNGVVHLIDKVISTITNNIQQIIEIEDTFETLRAAVAASGLNTMLEGNGQYTLLAPTNEAFEKIPSETLNRILGDPEALRDLLNNHILKSAMCAEAIVAGLSVETLEGTTLEVGCSGDMLTINGKAIISNKDILATNGVIHYIDELLIPDSAKTLFELAAESDVSTAIDLFRQAGLGNHLSGSERLTLLAPLNSVFKDGTPPIDAHTRNLLRNHIIKDQLASKYLYHGQTLETLGGKKLRVFVYRNSLCIENSCIAAHDKRGRYGTLFTMDRVLTPPMGTVMDVLKGDNRFSMLVAAIQSAGLTETLNREGVYTVFAPTNEAFRALPPRERSRLLGDAKELANILKYHIGDEILVSGGIGALVRLKSLQGDKLEVSLKNNVVSVNKEPVAEPDIMATNGVVHVITNVLQPPANRPQERGDELADSALEIFKQASAFSRASQRSVRLAPVYQKLLERMKH

SEQ ID NO: 90150 - protein, 366 aa, Homo sapiens
  Payload ID: 18027
  Gene Name: transforming growth factor, beta-induced, 68kDa
  ENSP ID: ENSP00000421440
  MOD_RES (1)..(1): Any amino acid
XAFEKIPSETLNRILGDPEALRDLLNNHILKSAMCAEAIVAGLSVETLEGTTLEVGCSGDMLTINGKAIISNKDILATNGVIHYIDELLIPDSAKTLFELAAESDVSTAIDLFRQAGLGNHLSGSERLTLLAPLNSVFKDGTPPIDAHTRNLLRNHIIKDQLASKYLYHGQTLETLGGKKLRVFVYRNSLCIENSCIAAHDKRGRYGTLFTMDRVLTPPMGTVMDVLKGDNRFSMLVAAIQSAGLTETLNREGVYTVFAPTNEAFRALPPRERSRLLGDAKELANILKYHIGDEILVSGGIGALVRLKSLQGDKLEVSLKNNVVSVNKEPVAEPDIMATNGVVHVITNVLQPPAPVYQKLLERMKH

SEQ ID NO: 90151 - protein, 128 aa, Homo sapiens
  Payload ID: 18027
  Gene Name: transforming growth factor, beta-induced, 68kDa
  ENSP ID: ENSP00000421540
  MOD_RES (1)..(1): Any amino acid
XPYQLVLQHSRLRGRQHGPNVCAVQKVIGTNRKYFTNCKQWYQRKICGKSTVISYECCPGYEKVPGEKGCPAALPLSNLYETLGVVGSTTTQLYTDRTEKLRPEMEGPGSFTIFAPSNEAWASLPAVR

SEQ ID NO: 90152 - protein, 194 aa, Homo sapiens
  Payload ID: 18027
  Gene Name: transforming growth factor, beta-induced, 68kDa
  ENSP ID: ENSP00000423871
  MOD_RES (1)..(1): Any amino acid
XNGVVHLIDKVISTITNNIQQIIEIEDTFETLRAAVAASGLNTMLEGNGQYTLLAPTNEAFEKIPSETLNRILGDPEALRDMLTINGKAIISNKDILATNGVIHYIDELLIPDSAKTLFELAAESDVSTAIDLFRQAGLGNHLSGSERLTLLAPLNSVFKDGTPPIDAHTRNLLRNHIIKDQLASKYLYHGQTL

SEQ ID NO: 90153 - protein, 65 aa, Homo sapiens
  Payload ID: 18027
  Gene Name: transforming growth factor, beta-induced, 68kDa
  ENSP ID: ENSP00000423935
MATNGVVHVITNVLQPPANRPQERGDELADSALEIFKQASAFSRASQRSVRLAPVYQKLLERMKH

SEQ ID NO: 90154 - protein, 59 aa, Homo sapiens
  Payload ID: 18027
  Gene Name: transforming growth factor, beta-induced, 68kDa
  ENSP ID: ENSP00000426589
  MOD_RES (1)..(1): Any amino acid
XKTLFELAAESDVSTAIDLFRQAGLGNHLSGSERLTLLAPLNSVFKGAHLSGPNHHPFL

SEQ ID NO: 90155 - protein, 78 aa, Homo sapiens
  Payload ID: 18027
  Gene Name: transforming growth factor, beta-induced, 68kDa
  ENSP ID: ENSP00000427137
  MOD_RES (1)..(1): Any amino acid
XQGDKLEVSLKNNVVSVNKEPVAEPDIMATNGVVHVITNVLQPPANRPQERGDELADSALEIFKQASAFSRPLSIKSY

SEQ ID NO: 90156 - protein, 219 aa, Homo sapiens
  Payload ID: 18027
  Gene Name: transforming growth factor, beta-induced, 68kDa
  ENSP ID: ENSP00000474155
RAAVAASGLNTMLEGNGQYTLLAPTNEAFEKIPSETLNRILGDPEALRDLLNNHILKSAMCAEAIVAGLSVETLEGTTLEVGCSGDMLTINGKAIISNKDILATNGVIHYIDELLIPDSAKTLFELAAESDVSTAIDLFRQAGLGNHLSGSERLTLLAPLNSVFKDGTPPIDAHTRNLLRNHIIKDQLASKYLYHGQTLETLGGKKLRVFVYRNVSSGS

SEQ ID NO: 90157 - protein, 395 aa, Homo sapiens
  Payload ID: 18028
  Gene Name: transforming, acidic coiled-coil containing protein 1
  Uniprot ID: O75410
  ENSP ID: ENSP00000276520
MAFSPWQILSPVQWAKWTWSAVRGGAAGEDEAGGPEGDPEEEDSQAETKSLSFRSGCKVKKHETQSLALDACSRDEGAVISQISDISNRDGHATDEEKLASTSCGQKSAGAEVKGEPEEDLEYFECSNVPVSTINHAFSSSEAGIEKETCQKMEEDGSTVLGLLESSAEKAPVSVSCGGESPLDGICLSESDKTAVLTLIREEIITKEIEANEWKKKYEETRQEVLEMRKIVAEYEKTIAQMIEDEQRTSMTSQKSFQQLTMEKEQALADLNSVERSLSDLFRRYENLKGVLEGFKKNEEALKKCAQDYLARVKQEEQRYQALKIHAEEKLDKANEEIAQVRTKAKAESAALHAGLRKEQMKVESLERALQQKNQEIEELTKICDELIAKLGKTD

SEQ ID NO: 90158 - protein, 805 aa, Homo sapiens
  Payload ID: 18028
  Gene Name: transforming, acidic coiled-coil containing protein 1
  Uniprot ID: O75410
  ENSP ID: ENSP00000321703
MAFSPWQILSPVQWAKWTWSAVRGGAAGEDEAGGPEGDPEEEDSQAETKSLSFSSDSEGNFETPEAETPIRSPFKESCDPSLGLAGPGAKSQESQEADEQLVAEVVEKCSSKTCSKPSENEVPQQAIDSHSVKNFREEPEHDFSKISIVRPFSIETKDSTDISAVLGTKAAHGCVTAVSGKALPSSPPDALQDEAMTEGSMGVTLEASAEADLKAGNSCPELVPSRRSKLRKPKPVPLRKKAIGGEFSDTNAAVEGTPLPKASYHFSPEELDENTSPLLGDARFQKSPPDLKETPGTLSSDTNDSGVELGEESRSSPLKLEFDFTEDTGNIEARKALPRKLGRKLGSTLTPKIQKDGISKSAGLEQPTDPVARDGPLSQTSSKPDPSQWESPSFNPFGSHSVLQNSPPLSSEGSYHFDPDNFDESMDPFKPTTTLTSSDFCSPTGNHVNEILESPKKAKSRLITSGCKVKKHETQSLALDACSRDEGAVISQISDISNRDGHATDEEKLASTSCGQKSAGAEVKGEPEEDLEYFECSNVPVSTINHAFSSSEAGIEKETCQKMEEDGSTVLGLLESSAEKAPVSVSCGGESPLDGICLSESDKTAVLTLIREEIITKEIEANEWKKKYEETRQEVLEMRKIVAEYEKTIAQMIEDEQRTSMTSQKSFQQLTMEKEQALADLNSVERSLSDLFRRYENLKGVLEGFKKNEEALKKCAQDYLARVKQEEQRYQALKIHAEEKLDKANEEIAQVRTKAKAESAALHAGLRKEQMKVESLERALQQKNQEIEELTKICDELIAKLGKTD

SEQ ID NO: 90159 - protein, 138 aa, Homo sapiens
  Payload ID: 18028
  Gene Name: transforming, acidic coiled-coil containing protein 1
  ENSP ID: ENSP00000428175
MTEGSMGVTLEASAEADLKAGNSCPELVPSRRSKLRKPKPVPLRKKAIGGEFSDTNAAVEGTPLPKASYHFSPEELDENTSPLLGDARFQKSPPDLKETPGTLSSDTNDSGVELGEESRSSPLKLEFDFTEDTGNIEA

SEQ ID NO: 90160 - protein, 562 aa, Homo sapiens
  Payload ID: 18028
  Gene Name: transforming, acidic coiled-coil containing protein 1
  ENSP ID: ENSP00000428253
  MOD_RES (1)..(1): Any amino acid
XRSKLRKPKPVPLRKKAIGGEFSDTNAAVEGTPLPKASYHFSPEELDENTSPLLGDARFQKSPPDLKETPGTLSSDTNDSGVELGEESRSSPLKLEFDFTEDTGNIEARKALPRKLGRKLGSTLTPKIQKDGISKSAGLEQPTDPVARDGPLSQTSSKPDPSQWESPSFNPFGSHSVLQNSPPLSSEGSYHFDPDNFDESMDPFKPTTTLTSSDFCSPTGNHVNEILESPKKAKSRLITTTEQVKFLCFLLSGCKVKKHETQSLALDACSRDEGAVISQISDISNRDGHATDEEKLASTSCGQKSAGAEVKGIEKETCQKMEEDGSTVLGLLESSAEKAPVSVSCGGESPLDGICLSESDKTAVLTLIREEIITKEIEANEWKKKYEETRQEVLEMRKIVAEYEKTIAQMIDEQRTSMTSQKSFQQLTMEKEQALADLNSVERSLSDLFRRYENLKGVLEGFKKNEEALKKCAQDYLARVKQEEQRYQALKIHAEEKLDKANEEIAQVRTKAKAESAALHAGLRKEQMKVESLERALQQKNQEIEELTKICDELIAKLGKTD

SEQ ID NO: 90161 - protein, 610 aa, Homo sapiens
  Payload ID: 18028
  Gene Name: transforming, acidic coiled-coil containing protein 1
  Uniprot ID: O75410
  ENSP ID: ENSP00000428450
MTEGSMGVTLEASAEADLKAGNSCPELVPSRRSKLRKPKPVPLRKKAIGGEFSDTNAAVEGTPLPKASYHFSPEELDENTSPLLGDARFQKSPPDLKETPGTLSSDTNDSGVELGEESRSSPLKLEFDFTEDTGNIEARKALPRKLGRKLGSTLTPKIQKDGISKSAGLEQPTDPVARDGPLSQTSSKPDPSQWESPSFNPFGSHSVLQNSPPLSSEGSYHFDPDNFDESMDPFKPTTTLTSSDFCSPTGNHVNEILESPKKAKSRLITSGCKVKKHETQSLALDACSRDEGAVISQISDISNRDGHATDEEKLASTSCGQKSAGAEVKGEPEEDLEYFECSNVPVSTINHAFSSSEAGIEKETCQKMEEDGSTVLGLLESSAEKAPVSVSCGGESPLDGICLSESDKTAVLTLIREEIITKEIEANEWKKKYEETRQEVLEMRKIVAEYEKTIAQMIEDEQRTSMTSQKSFQQLTMEKEQALADLNSVERSLSDLFRRYENLKGVLEGFKKNEEALKKCAQDYLARVKQEEQRYQALKIHAEEKLDKANEEIAQVRTKAKAESAALHAGLRKEQMKVESLERALQQKNQEIEELTKICDELIAKLGKTD

SEQ ID NO: 90162 - protein, 133 aa, Homo sapiens
  Payload ID: 18028
  Gene Name: transforming, acidic coiled-coil containing protein 1
  ENSP ID: ENSP00000428466
MGGSHSQTPRGREPAGERHPRPTETASGCKVKKHETQSLALDACSRDEGAVISQISDISNRDGHATDEEKLASTSCGQKSAGAEVKGEPEEDLEYFECSNVPVSTINHAFSSSEAGIEKETCQKMEEDGSTVL

SEQ ID NO: 90163 - protein, 609 aa, Homo sapiens
  Payload ID: 18028
  Gene Name: transforming, acidic coiled-coil containing protein 1
  ENSP ID: ENSP00000428687
MTEGSMGVTLEASAEADLKAGNSCPELVPSRRSKLRKPKPVPLRKKAIGGEFSDTNAAVEGTPLPKASYHFSPEELDENTSPLLGDARFQKSPPDLKETPGTLSSDTNDSGVELGEESRSSPLKLEFDFTEDTGNIEARKALPRKLGRKLGSTLTPKIQKDGISKSAGLEQPTDPVARDGPLSQTSSKPDPSQWESPSFNPFGSHSVLQNSPPLSSEGSYHFDPDNFDESMDPFKPTTTLTSSDFCSPTGNHVNEILESPKKAKSRLITGCKVKKHETQSLALDACSRDEGAVISQISDISNRDGHATDEEKLASTSCGQKSAGAEVKGEPEEDLEYFECSNVPVSTINHAFSSSEAGIEKETCQKMEEDGSTVLGLLESSAEKAPVSVSCGGESPLDGICLSESDKTAVLTLIREEIITKEIEANEWKKKYEETRQEVLEMRKIVAEYEKTIAQMIEDEQRTSMTSQKSFQQLTMEKEQALADLNSVERSLSDLFRRYENLKGVLEGFKKNEEALKKCAQDYLARVKQEEQRYQALKIHAEEKLDKANEEIAQVRTKAKAESAALHAGLRKEQMKVESLERALQQKNQEIEELTKICDELIAKLGKTD

SEQ ID NO: 90164 - protein, 731 aa, Homo sapiens
  Payload ID: 18028
  Gene Name: transforming, acidic coiled-coil containing protein 1
  Uniprot ID: O75410
  ENSP ID: ENSP00000428706
MNNILKLKSSDSEGNFETPEAETPIRSPFKESCDPSLGLAGPGAKSQESQEADEQLVAEVVEKCSSKTCSKPSENEVPQQAIDSHSVKNFREEPEHDFSKISIVRPFSIETKDSTDISAVLGTKAAHGCVTAVSGKALPSSPPDALQDEAMTEGSMGVTLEASAEADLKAGNSCPELVPSRRSKLRKPKPVPLRKKAIGGEFSDTNAAVEGTPLPKASYHFSPEELDENTSPLLGDARFQKSPPDLKETPGTLSSDTNDSGVELGEESRSSPLKLEFDFTEDTGNIEARKALPRKLGRKLGSTLTPKIQKDGISKSAGLEQPTDPVARDGPLSQTSSKPDPSQWESPSFNPFGSHSVLQNSPPLSSEGSYHFDPDNFDESMDPFKPTTTLTSSDFCSPTGNHVNEILESPKKAKSRLITSGCKVKKHETQSLALDACSRDEGAVISQISDISNRDGHATDEEKLASTSCGQKSAGAEVKGIEKETCQKMEEDGSTVLGLLESSAEKAPVSVSCGGESPLDGICLSESDKTAVLTLIREEIITKEIEANEWKKKYEETRQEVLEMRKIVAEYEKTIAQMIEDEQRTSMTSQKSFQQLTMEKEQALADLNSVERSLSDLFRRYENLKGVLEGFKKNEEALKKCAQDYLARVKQEEQRYQALKIHAEEKLDKANEEIAQVRTKAKAESAALHAGLRKEQMKVESLERALQQKNQEIEELTKICDELIAKLGKTD

SEQ ID NO: 90165 - protein, 145 aa, Homo sapiens
  Payload ID: 18028
  Gene Name: transforming, acidic coiled-coil containing protein 1
  ENSP ID: ENSP00000428949
MGGSHSQTPRGREPAGERHPRPTETATTEQVKFLCFLLSGCKVKKHETQSLALDACSRDEGAVISQISDISNRDGHATDEEKLASTSCGQKSAGAEVKGEPEEDLEYFECSNVPVSTINHAFSSSEAGIEKETCQKMEEDGSTVL

SEQ ID NO: 90166 - protein, 60 aa, Homo sapiens
  Payload ID: 18028
  Gene Name: transforming, acidic coiled-coil containing protein 1
  ENSP ID: ENSP00000429330
MTEGSMGVTLEASAEADLKAGNSCPELVPSRRSKLRKPKPVPLRKKAIGGEFSDTNAAVE

SEQ ID NO: 90167 - protein, 242 aa, Homo sapiens
  Payload ID: 18028
  Gene Name: transforming, acidic coiled-coil containing protein 1
  ENSP ID: ENSP00000429418
MEEDGSTVLGLLESSAEKAPVSVSCGGESPLDGICLSESDKTAVLTLIREEIITKEIEANEWKKKYEETRQEVLEMRKIVAEYEKTIAQMIDEQRTSMTSQKSFQQLTMEKEQALADLNSVERSLSDLFRRYENLKGVLEGFKKNEEALKKCAQDYLARVKQEEQRYQALKIHAEEKLDKANEEIAQVRTKAKAESAALHAGLRKEQMKVESLERALQQKNQEIEELTKICDELIAKLGKTD

SEQ ID NO: 90168 - protein, 454 aa, Homo sapiens
  Payload ID: 18028
  Gene Name: transforming, acidic coiled-coil containing protein 1
  ENSP ID: ENSP00000430306
  MOD_RES (1)..(1): Any amino acid
XLEQPTDPVARDGPLSQTSSKPDPSQWESPSFNPFGSHSVLQNSPPLSSEGSYHFDPDNFDESMDPFKPTTTLTSSDFCSPTGNHVNEILESPKKAKSRLITTTEQVKFLCFLLSGCKVKKHETQSLALDACSRDEGAVISQISDISNRDGHATDEEKLASTSCGQKSAGAEVKGEPEEDLEYFECSNVPVSTINHAFSSSEAGIEKETCQKMEEDGSTVLGLLESSAEKAPVSVSCGGESPLDGICLSESDKTAVLTLIREEIITKEIEANEWKKKYEETRQEVLEMRKIVAEYEKTIAQMIDEQRTSMTSQKSFQQLTMEKEQALADLNSVERSLSDLFRRYENLKGVLEGFKKNEEALKKCAQDYLARVKQEEQRYQALKIHAEEKLDKANEEIAQVRTKAKAESAALHAGLRKEQMKVESLERALQQKNQEIEELTKICDELIAKLGKTD

SEQ ID NO: 90169 - protein, 557 aa, Homo sapiens [sequence omitted]

SEQ ID NO: 90170 - protein, 129 aa, Homo sapiens
  Payload ID: 18028
  Gene Name: transforming, acidic coiled-coil containing protein 1
  ENSP ID: ENSP00000430562
MAFSPWQILSPVQWAKWTWSAVRGGAAGEDEAGGPEGDPEEEDSQAETKSLSFSSDSEGNFETPEAETPIRSPFKESCDPSLGLAGPGAKSQESQEADEQLVAEVVEKCSSKTCSKPSENEVPQQAIDS

SEQ ID NO: 90171 - protein, 30 aa, Homo sapiens
  Payload ID: 18028
  Gene Name: transforming, acidic coiled-coil containing protein 1
  ENSP ID: ENSP00000430819
MTEGSMGVTLEASAEADLKAGNSCPELVPS

SEQ ID NO: 90172 - protein, 581 aa, Homo sapiens
  Payload ID: 18028
  Gene Name: transforming, acidic coiled-coil containing protein 1
  ENSP ID: ENSP00000430959
MTEGSMGVTLEASAEADLKAGNSCPELVPSRRSKLRKPKPVPLRKKAIGGEFSDTNAAVEGTPLPKASYHFSPEELDENTSPLLGDARFQKSPPDLKETPGTLSSDTNDSGVELGEESRSSPLKLEFDFTEDTGNIEARKALPRKLGRKLGSTLTPKIQKDGISKSAGLEQPTDPVARDGPLSQTSSKPDPSQWESPSFNPFGSHSVLQNSPPLSSEGSYHFDPDNFDESMDPFKPTTTLTSSDFCSPTGNHVNEILESPKKAKSRLITSGCKVKKHETQSLALDACSRDEGAVISQISDISNRDGHATDEEKLASTSCGQKSAGAEVKGIEKETCQKMEEDGSTVLGLLESSAEKAPVSVSCGGESPLDGICLSESDKTAVLTLIREEIITKEIEANEWKKKYEETRQEVLEMRKIVAEYEKTIAQMIEDEQRTSMTSQKSFQQLTMEKEQALADLNSVERSLSDLFRRYENLKGVLEGFKKNEEALKKCAQDYLARVKQEEQRYQALKIHAEEKLDKANEEIAQVRTKAKAESAALHAGLRKEQMKVESLERALQQKNQEIEELTKICDELIAKLGKTD

SEQ ID NO: 90173 - protein, 580 aa, Homo sapiens
  Payload ID: 18028
  Gene Name: transforming, acidic coiled-coil containing protein 1
  ENSP ID: ENSP00000473342
MFTLPSTLRSNAKTNHQSSDSEGNFETPEAETPIRSPFKESCDPSLGLAGPGAKSQESQEADEQLVAEVVEKCSSKTCSKPSENEVPQQAIDSHSVKNFREEPEHDFSKISIVRPFSIETKDSTDISAVLGTKAAHGCVTAVSGKALPSSPPDALQDEAMTEGSMGVTLEASAEADLKAGNSCPELVPSRRSKLRKPKPVPLRKKAIGGEFSDTNAAVEGTPLPKASYHFSPEELDENTSPLLGDARFQKSPPDLKETPGTLSSDTNDSGVELGEESRSSPLKLEFDFTEDTGNIEARKALPRKLGRKLGSTLTPKIQKDGISKSAGLEQPTDPVARDGPLSQTSSKPDPSQWESPSFNPFGSHSVLQNSPPLSSEGSYHFDPDNFDESMDPFKPTTTLTSSDFCSPTGNHVNEILESPKKAKSRLITSGCKVKKHETQSLALDACSRDEGAVISQISDISNRDGHATDEEKLASTSCGQKSAGAEVKGIEKETCQKMEEDGSTVLGLLESSAEKAPVSVSCGGESPLDGICLSESDKTAVLTLIREEIITKEIEANEWKKKYEETRQEVLEMRKESYEP

SEQ ID NO: 90174 - protein, 1026 aa, Homo sapiens
  Payload ID: 18029
  Gene Name: transforming, acidic coiled-coil containing protein 2
  Uniprot ID: O95359
  ENSP ID: ENSP00000260733
MGGSQSLQPAPASDLNLEASEAMSSDSEEAFETPESTTPVKAPPAPPPPPPEVIPEPEVSTQPPPEEPGCGSETVPVPDGPRSDSVEGSPFRPPSHSFSAVFDEDKPIASSGTYNLDFDNIELVDTFQTLEPRASDAKNQEGKVNTRRKSTDSVPISKSTLSRSLSLQASDFDGASSSGNPEAVALAPDAYSTGSSSASSTLKRTKKPRPPSLKKKQTTKKPTETPPVKETQQEPDEESLVPSGENLASETKTESAKTEGPSPALLEETPLEPAVGPKAACPLDSESAEGVVPPASGGGRVQNSPPVGRKTLPLTTAPEAGEVTPSDSGGQEDSPAKGLSVRLEFDYSEDKSSWDNQQENPPPTKKIGKKPVAKMPLRRPKMKKTPEKLDNTPASPPRSPAEPNDIPIAKGTYTFDIDKWDDPNFNPFSSTSKMQESPKLPQQSYNFDPDTCDESVDPFKTSSKTPSSPSKSPASFEIPASAMEANGVDGDGLNKPAKKKKTPLKTDTFRVKKSPKRSPLSDPPSQDPTPAATPETPPVISAVVHATDEEKLAVTNQKWTCMTVDLEADKQDYPQPSDLSTFVNETKFSSPTEELDYRNSYEIEYMEKIGSSLPQDDDAPKKQALYLMFDTSQESPVKSSPVRMSESPTPCSGSSFEETEALVNTAAKNQHPVPRGLAPNQESHLQVPEKSSQKELEAMGLGTPSEAIEITAPEGSFASADALLSRLAHPVSLCGALDYLEPDLAEKNPPLFAQKLQEELEFAIMRIEALKLARQIALASRSHQDAKREAAHPTDVSISKTALYSRIGTAEVEKPAGLLFQQPDLDSALQIARAEIITKEREVSEWKDKYEESRREVMEMRKIVAEYEKTIAQMIEDEQREKSVSHQTVQQLVLEKEQALADLNSVEKSLADLFRRYEKMKEVLEGFRKNEEVLKRCAQEYLSRVKKEEQRYQALKVHAEEKLDRANAEIAQVRGKAQQEQAAHQASLRKEQLRVDALERTLEQKNKEIEELTKICDELIAKMGKS

SEQ ID NO: 90175 - protein, 2948 aa, Homo sapiens
  Payload ID: 18029
  Gene Name: transforming, acidic coiled-coil containing protein 2
  Uniprot ID: O95359
  ENSP ID: ENSP00000334280
MGNENSTSDNQRTLSAQTPRSAQPPGNSQNIKRKQQDTPGSPDHRDASSIGSVGLGGFCTASESSASLDPCLVSPEVTEPRKDPQGARGPEGSLLPSPPPSQEREHPSSSMPFAECPPEGCLASPAAAPEDGPQTQSPRREPAPNAPGDIAAAFPAERDSSTPYQEIAAVPSAGRERQPKEEGQKSSFSFSSGIDQSPGMSPVPLREPMKAPLCGEGDQPGGFESQEKEAAGGFPPAESRQGVASVQVTPEAPAAAQQGTESSAVLEKSPLKPMAPIPQDPAPRASDRERGQGEAPPQYLTDDLEFLRACHLPRSNSGAAPEAEVNAASQESCQQPVGAYLPHAELPWGLPSPALVPEAGGSGKEALDTIDVQGHPQTGMRGTKPNQVVCVAAGGQPEGGLPVSPEPSLLTPTEEAHPASSLASFPAAQIPIAVEEPGSSSRESVSKAGMPVSADAAKEVVDAGLVGLERQVSDLGSKGEHPEGDPGEVPAPSPQERGEHLNTEQSHEVQPGVPPPPLPKEQSHEVQPGAPPPPLPKAPSESARGPPGPTDGAKVHEDSTSPAVAKEGSRSPGDSPGGKEEAPEPPDGGDPGNLQGEDSQAFSSKRDPEVGKDELSKPSSDAESRDHPSSHSAQPPRKGGAGHTDGPHSQTAEADASGLPHKLGEEDPVLPPVPDGAGEPTVPEGAIWEGSGLQPKCPDTLQSREGLGRMESFLTLESEKSDFPPTPVAEVAPKAQEGESTLEIRKMGSCDGEGLLTSPDQPRGPACDASRQEFHAGVPHPPQGENLAADLGLTALILDQDQQGIPSCPGEGWIRGAASEWPLLSSEKHLQPSQAQPETSIFDVLKEQAQPPENGKETSPSHPGFKDQGADSSQIHVPVEPQEDNNLPTHGGQEQALGSELQSQLPKGTLSDTPTSSPTDMVWESSLTEESELSAPTRQKLPALGEKRPEGACGDGQSSRVSPPAADVLKDFSLAGNFSRKETCCTGQGPNKSQQALADALEEGSQHEEACQRHPGASEAADGCSPLWGLSKREMASGNTGEAPPCQPDSVALLDAVPCLPALAPASPGVTPTQDAPETEACDETQEGRQQPVPAPQQKMECWATSDAESPKLLASFPSAGEQGGEAGAAETGGSAGAGDPGKQQAPEKPGEATLSCGLLQTEHCLTSGEEASTSALRESCQAEHPMASCQDALLPARELGGIPRSTMDFSTHQAVPDPKELLLSGPPEVAAPDTPYLHVDSAAQRGAEDSGVKAVSSADPRAPGESPCPVGEPPLALENAASLKLFAGSLAPLLQPGAAGGEIPAVQASSGSPKARTTEGPVDSMPCLDRMPLLAKGKQATGEEKAATAPGAGAKASGEGMAGDAAGETEGSMERMGEPSQDPKQGTSGGVDTSSEQIATLTGFPDFREHIAKIFEKPVLGALATPGEKAGAGRSAVGKDLTRPLGPEKLLDGPPGVDVTLLPAPPARLQVEKKQQLAGEAEISHLALQDPASDKLLGPAGLTWERNLPGAGVGKEMAGVPPTLREDERPEGPGAAWPGLEGQAYSQLERSRQELASGLPSPAATQELPVERAAAFQVAPHSHGEEAVAQDRIPSGKQHQETSACDSPHGEDGPGDFAHTGVPGHVPRSTCAPSPQREVLTVPEANSEPWTLDTLGGERRPGVTAGILEMRNALGNQSTPAPPTGEVADTPLEPGKVAGAAGEAEGDITLSTAETQACASGDLPEAGTTRTFSVVAGDLVLPGSCQDPACSDKAPGMEGTAALHGDSPARPQQAKEQPGPERPIPAGDGKVCVSSPPEPDETHDPKLQHLAPEELHTDRESPRPGPSMLPSVPKKDAPRVMDKVTSDETRGAEGTESSPVADDIIQPAAPADLESPTLAASSYHGDVVGQVSTDLIAQSISPAAAHAGLPPSAAEHIVSPSAPAGDRVEASTPSCPDPAKDLSRSSDSEEAFETPESTTPVKAPPAPPPPPPEVIPEPEVSTQPPPEEPGCGSETVPVPDGPRSDSVEGSPFRPPSHSFSAVFDEDKPIASSGTYNLDFDNIELVDTFQTLEPRASDAKNQEGKVNTRRKSTDSVPISKSTLSRSLSLQASDFDGASSSGNPEAVALAPDAYSTGSSSASSTLKRTKKPRPPSLKKKQTTKKPTETPPVKETQQEPDEESLVPSGENLASETKTESAKTEGPSPALLEETPLEPAVGPKAACPLDSESAEGVVPPASGGGRVQNSPPVGRKTLPLTTAPEAGEVTPSDSGGQEDSPAKGLSVRLEFDYSEDKSSWDNQQENPPPTKKIGKKPVAKMPLRRPKMKKTPEKLDNTPASPPRSPAEPNDIPIAKGTYTFDIDKWDDPNFNPFSSTSKMQESPKLPQQSYNFDPDTCDESVDPFKTSSKTPSSPSKSPASFEIPASAMEANGVDGDGLNKPAKKKKTPLKTDTFRVKKSPKRSPLSDPPSQDPTPAATPETPPVISAVVHATDEEKLAVTNQKWTCMTVDLEADKQDYPQPSDLSTFVNETKFSSPTEELDYRNSYEIEYMEKIGSSLPQDDDAPKKQALYLMFDTSQESPVKSSPVRMSESPTPCSGSSFEETEALVNTAAKNQHPVPRGLAPNQESHLQVPEKSSQKELEAMGLGTPSEAIEITAPEGSFASADALLSRLAHPVSLCGALDYLEPDLAEKNPPLFAQKLQEELEFAIMRIEALKLARQIALASRSHQDAKREAAHPTDVSISKTALYSRIGTAEVEKPAGLLFQQPDLDSALQIARAEIITKEREVSEWKDKYEESRREVMEMRKIVAEYEKTIAQMIEDEQREKSVSHQTVQQLVLEKEQALADLNSVEKSLADLFRRYEKMKEVLEGFRKNEEVLKRCAQEYLSRVKKEEQRYQALKVHAEEKLDRANAEIAQVRGKAQQEQAAHQASLRKEQLRVDALERTLEQKNKEIEELTKICDELIAKMGKS

SEQ ID NO: 90176 - protein, 1094 aa, Homo sapiens
  Payload ID: 18029
  Gene Name: transforming, acidic coiled-coil containing protein 2
  Uniprot ID: O95359
  ENSP ID: ENSP00000350701
MGNENSTSDNQRTLSAQTPRSAQPPGNSQNIKRKQQDTPGSPDHRDASSSPVADDIIQPAAPADLESPTLAASSYHGDVVGQVSTDLIAQRSSDSEEAFETPESTTPVKAPPAPPPPPPEVIPEPEVSTQPPPEEPGCGSETVPVPDGPRSDSVEGSPFRPPSHSFSAVFDEDKPIASSGTYNLDFDNIELVDTFQTLEPRASDAKNQEGKVNTRRKSTDSVPISKSTLSRSLSLQASDFDGASSSGNPEAVALAPDAYSTGSSSASSTLKRTKKPRPPSLKKKQTTKKPTETPPVKETQQEPDEESLVPSGENLASETKTESAKTEGPSPALLEETPLEPAVGPKAACPLDSESAEGVVPPASGGGRVQNSPPVGRKTLPLTTAPEAGEVTPSDSGGQEDSPAKGLSVRLEFDYSEDKSSWDNQQENPPPTKKIGKKPVAKMPLRRPKMKKTPEKLDNTPASPPRSPAEPNDIPIAKGTYTFDIDKWDDPNFNPFSSTSKMQESPKLPQQSYNFDPDTCDESVDPFKTSSKTPSSPSKSPASFEIPASAMEANGVDGDGLNKPAKKKKTPLKTDTFRVKKSPKRSPLSDPPSQDPTPAATPETPPVISAVVHATDEEKLAVTNQKWTCMTVDLEADKQDYPQPSDLSTFVNETKFSSPTEELDYRNSYEIEYMEKIGSSLPQDDDAPKKQALYLMFDTSQESPVKSSPVRMSESPTPCSGSSFEETEALVNTAAKNQHPVPRGLAPNQESHLQVPEKSSQKELEAMGLGTPSEAIEITAPEGSFASADALLSRLAHPVSLCGALDYLEPDLAEKNPPLFAQKLQEELEFAIMRIEALKLARQIALASRSHQDAKREAAHPTDVSISKTALYSRIGTAEVEKPAGLLFQQPDLDSALQIARAEIITKEREVSEWKDKYEESRREVMEMRKIVAEYEKTIAQMIEDEQREKSVSHQTVQQLVLEKEQALADLNSVEKSLADLFRRYEKMKEVLEGFRKNEEVLKRCAQEYLSRVKKEEQRYQALKVHAEEKLDRANAEIAQVRGKAQQEQAAHQASLRKEQLRVDALERTLEQKNKEIEELTKICDELIAKMGKS

SEQ ID NO: 90177 - protein, 996 aa, Homo sapiens
  Payload ID: 18029
  Gene Name: transforming, acidic coiled-coil containing protein 2
  Uniprot ID: O95359
  ENSP ID: ENSP00000353763
MGGSQSLQPAPASDLNLEASEAMSSDSEEAFETPESTTPVKAPPAPPPPPPEVIPEPEVSTQPPPEEPGCGSETVPVPDGPRSDSVEGSPFRPPSHSFSAVFDEDKPIASSGTYNLDFDNIELVDTFQTLEPRASDAKNQEGKVNTRRKSTDSVPISKSTLSRSLSLQASDFDGASSSGNPEAVALAPDAYSTGSSSASSTLKRTKKPRPPSLKKKQTTKKPTETPPVKETQQEPDEESLVPSGENLASETKTESAKTEGPSPALLEETPLEPAVGPKAACPLDSESAEGVVPPASGGGRVQNSPPVGRKTLPLTTAPEAGEVTPSDSGGQEDSPAKGLSVRLEFDYSEDKSSWDNQQENPPPTKKIGKKPVAKMPLRRPKMKKTPEKLDNTPASPPRSPAEPNDIPIAKGTYTFDIDKWDDPNFNPFSSTSKMQESPKLPQQSYNFDPDTCDESVDPFKTSSKTPSSPSKSPASFEIPASAMEANGVDGDGLNKPAKKKKTPLKTDTFRVKKSPKRSPLSDPPSQDPTPAATPETPPVISAVVHATDEEKLAVTNQKWTCMTVDLEADKQDYPQPSDLSTFVNETKFSSPTEELDYRNSYEIEYMEKIGSSLPQDDDAPKKQALYLMFDTSQESPVKSSPVRMSESPTPCSGSSFEETEALVNTAAKNQHPVPRGLAPNQESHLQVPEKSSQKELEAMGLGTPSEAIEITAPEGSFASADALLSRLAHPVSLCGALDYLEPDLAEKNPPLFAQKLQREAAHPTDVSISKTALYSRIGTAEVEKPAGLLFQQPDLDSALQIARAEIITKEREVSEWKDKYEESRREVMEMRKIVAEYEKTIAQMIEDEQREKSVSHQTVQQLVLEKEQALADLNSVEKSLADLFRRYEKMKEVLEGFRKNEEVLKRCAQEYLSRVKKEEQRYQALKVHAEEKLDRANAEIAQVRGKAQQEQAAHQASLRKEQLRVDALERTLEQKNKEIEELTKICDELIAKMGKS

SEQ ID NO: 90178 - protein, 1038 aa, Homo sapiens
  Payload ID: 18029
  Gene Name: transforming, acidic coiled-coil containing protein 2
  ENSP ID: ENSP00000357995
MGGSQSLQPAPASDLNLEASEAMSSDSEEAFETPESTTPVKAPPAPPPPPPEVIPEPEVSTQPPPEEPGCGSETVPVPDGPRSDSVEGSPFRPPSHSFSAVFDEDKPIASSGTYNLDFDNIELVDTFQTLEPRASDAKNQEGKVNTRRKSTDSVPISKSTLSRSLSLQASDFDGASSSGNPEAVALAPDAYSTGSSSASSTLKRTKKPRPPSLKKKQTTKKPTETPPVKETQQEPDEESLVPSGENLASETKTESAKTEGPSPALLEETPLEPAVGPKAACPLDSESAEGVVPPASGGGRVQNSPPVGRKTLPLTTAPEAGEVTPSDSGGQEDSPAKGLSVRLEFDYSEDKSSWDNQQENPPPTKKIGKKPVAKMPLRRPKMKKTPEKLDNTPASPPRSPAEPNDIPIAKGTYTFDIDKWDDPNFNPFSSTSKMQESPKLPQQSYNFDPDTCDESVDPFKTSSKTPSSPSKSPASFEIPASAMEANGVDGDGLNKPAKKKKTPLKTMVEDVMSVCSLFDTFRVKKSPKRSPLSDPPSQDPTPAATPETPPVISAVVHATDEEKLAVTNQKWTCMTVDLEADKQDYPQPSDLSTFVNETKFSSPTEELDYRNSYEIEYMEKIGSSLPQDDDAPKKQALYLMFDTSQESPVKSSPVRMSESPTPCSGSSFEETEALVNTAAKNQHPVPRGLAPNQESHLQVPEKSSQKELEAMGLGTPSEAIEITAPEGSFASADALLSRLAHPVSLCGALDYLEPDLAEKNPPLFAQKLQEELEFAIMRIEALKLARQIALASRSHQDAKREAAHPTDVSISKTALYSRIGTAEVEKPAGLLFQQPDLDSALQIARAEIITKEREVSEWKDKYEESRREVMEMRKIVAEYEKTIAQMIEDEQREKSVSHQTVQQLVLEKEQALADLNSVEKSLADLFRRYEKMKEVLEGFRKNEEVLKRCAQEYLSRVKKEEQRYQALKVHAEEKLDRANAEIAQVRGKAQQEQAAHQASLRKEQLRVDALERTLEQKNKEIEELTKICDELIAKMGKS

SEQ ID NO: 90179 - protein, 571 aa, Homo sapiens
  Payload ID: 18029
  Gene Name: transforming, acidic coiled-coil containing protein 2
  Uniprot ID: O95359
  ENSP ID: ENSP00000357996
MPLRRPKMKKTPEKLDNTPASPPRSPAEPNDIPIAKGTYTFDIDKWDDPNFNPFSSTSKMQESPKLPQQSYNFDPDTCDESVDPFKTSSKTPSSPSKSPASFEIPASAMEANGVDGDGLNKPAKKKKTPLKTVKKSPKRSPLSDPPSQDPTPAATPETPPVISAVVHATDEEKLAVTNQKWTCMTVDLEADKQDYPQPSDLSTFVNETKFSSPTEELDYRNSYEIEYMEKIGSSLPQDDDAPKKQALYLMFDTSQESPVKSSPVRMSESPTPCSGSSFEETEALVNTAAKNQHPVPRGLAPNQESHLQVPEKSSQKELEAMGLGTPSEAIEIREAAHPTDVSISKTALYSRIGTAEVEKPAGLLFQQPDLDSALQIARAEIITKEREVSEWKDKYEESRREVMEMRKIVAEYEKTIAQMIEDEQREKSVSHQTVQQLVLEKEQALADLNSVEKSLADLFRRYEKMKEVLEGFRKNEEVLKRCAQEYLSRVKKEEQRYQALKVHAEEKLDRANAEIAQVRGKAQQEQAAHQASLRKEQLRVDALERTLEQKNKEIEELTKICDELIAKMGKS

SEQ ID NO: 90180 - protein, 575 aa, Homo sapiens
  Payload ID: 18029
  Gene Name: transforming, acidic coiled-coil containing protein 2
  ENSP ID: ENSP00000357997
MPLRRPKMKKTPEKLDNTPASPPRSPAEPNDIPIAKGTYTFDIDKWDDPNFNPFSSTSKMQESPKLPQQSYNFDPDTCDESVDPFKTSSKTPSSPSKSPASFEIPASAMEANGVDGDGLNKPAKKKKTPLKTDTFRVKKSPKRSPLSDPPSQDPTPAATPETPPVISAVVHATDEEKLAVTNQKWTCMTVDLEADKQDYPQPSDLSTFVNETKFSSPTEELDYRNSYEIEYMEKIGSSLPQDDDAPKKQALYLMFDTSQESPVKSSPVRMSESPTPCSGSSFEETEALVNTAAKNQHPVPRGLAPNQESHLQVPEKSSQKELEAMGLGTPSEAIEIREAAHPTDVSISKTALYSRIGTAEVEKPAGLLFQQPDLDSALQIARAEIITKEREVSEWKDKYEESRREVMEMRKIVAEYEKTIAQMIEDEQREKSVSHQTVQQLVLEKEQALADLNSVEKSLADLFRRYEKMKEVLEGFRKNEEVLKRCAQEYLSRVKKEEQRYQALKVHAEEKLDRANAEIAQVRGKAQQEQAAHQASLRKEQLRVDALERTLEQKNKEIEELTKICDELIAKMGKS

SEQ ID NO: 90181 - protein, 2948 aa, Homo sapiens; identical to SEQ ID NO: 90175
  Payload ID: 18029
  Gene Name: transforming, acidic coiled-coil containing protein 2
  Uniprot ID: O95359
  ENSP ID: ENSP00000358001

SEQ ID NO: 90182 - protein, 2875 aa, Homo sapiens
  Payload ID: 18029
  Gene Name: transforming, acidic coiled-coil containing protein 2
  ENSP ID: ENSP00000395048
MGNENSTSDNQRTLSAQTPRSAQPPGNSQNIKRKQQDTPGSPDHRDASSIGSVGLGGFCTASESSASLDPCLVSPEVTEPRKDPQGARGPEGSLLPSPPPSQEREHPSSSMPFAECPPEGCLASPAAAPEDGPQTQSPRREPAPNAPGDIAAAFPAERDSSTPYQEIAAVPSAGRERQPKEEGQKSSFSFSSGIDQSPGMSPVPLREPMKAPLCGEGDQPGGFESQEKEAAGGFPPAESRQGVASVQVTPEAPAAAQQGTESSAVLEKSPLKPMAPIPQDPAPRASDRERGQGEAPPQYLTDDLEFLRACHLPRSNSGAAPEAEVNAASQESCQQPVGAYLPHAELPWGLPSPALVPEAGGSGKEALDTIDVQGHPQTGMRGTKPNQVVCVAAGGQPEGGLPVSPEPSLLTPTEEAHPASSLASFPAAQIPIAVEEPGSSSRESVSKAGMPVSADAAKEVVDAGLVGLERQVSDLGSKGEHPEGDPGEVPAPSPQERGEHLNTEQSHEVQPGVPPPPLPKEQSHEVQPGAPPPPLPKAPSESARGPPGPTDGAKVHEDSTSPAVAKEGSRSPGDSPGGKEEAPEPPDGGDPGNLQGEDSQAFSSKRDPEVGKDELSKPSSDAESRDHPSSHSAQPPRKGGAGHTDGPHSQTAEADASGLPHKLGEEDPVLPPVPDGAGEPTVPEGAIWEGSGLQPKCPDTLQSREGLGRMESFLTLESEKSDFPPTPVAEVAPKAQEGESTLEIRKMGSCDGEGLLTSPDQPRGPACDASRQEFHAGVPHPPQGENLAADLGLTALILDQDQQGIPSCPGEGWIRGAASEWPLLSSEKHLQPSQAQPETSIFDVLKEQAQPPENGKETSPSHPGFKDQGADSSQIHVPVEPQEDNNLPTHGGQEQALGSELQSQLPKGTLSDTPTSSPTDMVWESSLTEESELSAPTRQKLPALGEKRPEGACGDGQSSRVSPPAADVLKDFSLAGNFSRKETCCTGQGPNKSQQALADALEEGSQHEEACQRHPGASEAADGCSPLWGLSKREMASGNTGEAPPCQPDSVALLDAVPCLPALAPASPGVTPTQDAPETEACDETQEGRQQPVPAPQQKMECWATSDAESPKLLASFPSAGEQGGEAGAAETGGSAGAGDPGKQQAPEKPGEATLSCGLLQTEHCLTSGEEASTSALRESCQAEHPMASCQDALLPARELGGIPRSTMDFSTHQAVPDPKELLLSGPPEVAAPDTPYLHVDSAAQRGAEDSGVKAVSSADPRAPGESPCPVGEPPLALENAASLKLFAGSLAPLLQPGAAGGEIPAVQASSGSPKARTTEGPVDSMPCLDRMPLLAKGKQATGEEKAATAPGAGAKASGEGMAGDAAGETEGSMERMGEPSQDPKQGTSGGVDTSSEQIATLTGFPDFREHIAKIFEKPVLGALATPGEKAGAGRSAVGKDLTRPLGPEKLLDGPPGVDVTLLPAPPARLQVEKKQQLAGEAEISHLALQDPASDKLLGPAGLTWERNLPGAGVGKEMAGVPPTLREDERPEGPGAAWPGLEGQAYSQLERSRQELASGLPSPAATQELPVERAAAFQVAPHSHGEEAVAQDRIPSGKQHQETSACDSPHGEDGPGDFAHTGVPGHVPRSTCAPSPQREVLTVPEANSEPWTLDTLGGERRPGVTAGILEMRNALGNQSTPAPPTGEVADTPLEPGKVAGAAGEAEGDITLSTAETQACASGDLPEAGTTRTFSVVAGDLVLPGSCQDPACSDKAPGMEGTAALHGDSPARPQQAKEQPGPERPIPAGDGKVCVSSPPEPDETHDPKLQHLAPEELHTDRESPRPGPSMLPSVPKKDAPRVMDKVTSDETRGAEGTERSAKDIGLWKAMMPSLDTDTLDVLERRVVLIQHEFLHKKEANGHSRFMYSSPVADDIIQPAAPADLESPTLAASSYHGDVVGQVSTDLIAQRSSDSEEAFETPESTTPVKAPPAPPPPPPEVIPEPEVSTQPPPEEPGCGSETVPVPDGPRSDSVEGSPFRPPSHSFSAVFDEDKPIASSGTYNLDFDNIELVDTFQTLEPRASDAKNQEGKVNTRRKSTDSVPISKSTLSRSLSLQASDFDGASSSGNPEAVALAPDAYSTGSSSASSTLKRTKKPRPPSLKKKQTTKKPTETPPVKETQQEPDEESLVPSGENLASETKTESAKTEGPSPALLEETPLEPAVGPKAACPLDSESAEGVVPPASGGGRVQNSPPVGRKTLPLTTAPEAGEVTPSDSGGQEDSPAKGLSVRLEFDYSEDKSSWDNQQENPPPTKKIGKKPVAKMPLRRPKMKKTPEKLDNTPASPPRSPAEPNDIPIAKGTYTFDIDKWDDPNFNPFSSTSKMQESPKLPQQSYNFDPDTCDESVDPFKTSSKTPSSPSKSPASFEIPASAMEANGVDGDGLNKPAKKKKTPLKTDTFRVKKSPKRSPLSDPPSQDPTPAATPETPPVISAVVHATDEEKLAVTNQKWTCMTVDLEADKQDYPQPSDLSTFVNETKFSSPTEELDYRNSYEIEYMEKIGSSLPQDDDAPKKQALYLMFDTSQESPVKSSPVRMSESPTPCSGSSFEETEALVNTAAKNQHPVPRGLAPNQESHLQVPEKSSQKELEAMGLGTPSEAIEIREAAHPTDVSISKTALYSRIGTAEVEKPAGLLFQQPDLDSALQIARAEIITKEREVSEWKDKYEESRREVMEMRKIVAEYEKTIAQMIEDEQREKSVSHQTVQQLVLEKEQALADLNSVEKSLADLFRRYEKMKEVLEGFRKNEEVLKRCAQEYLSRVKKEEQRYQALKVHAEEKLDRANAEIAQVRGKAQQEQAAHQASLRKEQLRVDALERTLEQKNKEIEELTKICDELIAKMGKS

SEQ ID NO: 90183 - protein, 669 aa, Homo sapiens
  Payload ID: 18029
  Gene Name: transforming, acidic coiled-coil containing protein 2
  ENSP ID: ENSP00000420967
MAYASWQRWSPVEWARWMWTAVTSSGDSSLLVLQGDSGKRSSDSEEAFETPESTTPVKAPPAPPPPPPEVIPEPEVSTQPPPEEPGCGSETVPVPDGPRSDSVEGSPFRPPSHSFSAVFDEDKPIASSGTYNLDFDNIELVDTFQTLEPRASDAKNQEGKVNTRRKSTDSVPISKSTLSRSLSLQASDFDGASSSGNPEAVALAPDAYSTGSSSASSTLKRTKKPRPPSLKKKQTTKKPTETPPVKETQQEPDEESLVPSGENLASETKTESAKTEGPSPALLEETPLEPAVGPKAACPLDSESAEGVVPPASGGGRVQNSPPVGRKTLPLTTAPEAGEVTPSDSGGQEDSPAKGLSVRLEFDYSEDKSSWDNQQENPPPTKKIGKKPVAKMPLRRPKMKKTPEKLDNTPASPPRSPAEPNDIPIAKGTYTFDIDKWDDPNFNPFSSTSKMQESPKLPQQSYNFDPDTCDESVDPFKTSSKTPSSPSKSPASFEIPASAMEANGVDGDGLNKPAKKKKTPLKTDTFRVKKSPKRSPLSDPPSQDPTPAATPETPPVISAVVHATDEEKLAVTNQKWTCMTVDLEADKQDYPQPSDLSTFVNETKFSSPTEELDYRNSYEIEYMEKIGSSLPQDDDAPKKQALYLMFDTSQESPVKSSPVRMSESPTPCS

SEQ ID NO: 90184 - protein, 184 aa, Homo sapiens
  Payload ID: 18029
  Gene Name: transforming, acidic coiled-coil containing protein 2
  ENSP ID: ENSP00000421702
  MOD_RES (1)..(1): Any amino acid
XQEPDEESLVPSGENLASETKTESAKTEGPSPALLEETPLEPAVGPKAACPLDSESAEGVVPPASGGGRVQNSPPVGRKTLPLTTAPEAGEVTPSDSGGQEDSPAKGLSVRLEFDYSEDKSSWDNQQENPPPTKKIGKKPVAKMPLRRPKMKKTPEKLDNTPASPPRSPAEPNDIPIAKVTHLG

SEQ ID NO: 90185 - protein, 409 aa, Homo sapiens
  Payload ID: 18029
  Gene Name: transforming, acidic coiled-coil containing protein 2
  ENSP ID: ENSP00000422725
SVRLEFDYSEDKSSWDNQQENPPPTKKIGKKPVAKMPLRRPKMKKTPEKLDNTPASPPRSPAEPNDIPIAKGTYTFDIDKWDDPNFNPFSSTSKMQESPKLPQQSYNFDPDTCDESVDPFKTSSKTPSSPSKSPASFEIPASAMEANGVDGDGLNKPAKKKKTPLKTVKKSPKRSPLSDPPSQDPTPAATPETPPVISAVVHATDEEKLAVTNQKWTCMTVDLEADKQDYPQPSDLSTFVNETKFSSPTEELDYRNSYEIEYMEKIGSSLPQDDDAPKKQALYLMFDTSQESPVKSSPVRMSESPTPCSGSSFEETEALVNTAAKNQHPVPRGLAPNQESHLQVPEKSSQKELEAMGLGTPSEAIEIREAAHPTDVSISKTALYSRIGTAEVEKPAGLLFQQPDLDSAL

SEQ ID NO: 90186 - protein, 1008 aa, Homo sapiens
  Payload ID: 18029
  Gene Name: transforming, acidic coiled-coil containing protein 2
  ENSP ID: ENSP00000422815
MGGSQSLQPAPASDLNLEASEAMSSDSEEAFETPESTTPVKAPPAPPPPPPEVIPEPEVSTQPPPEEPGCGSETVPVPDGPRSDSVEGSPFRPPSHSFSAVFDEDKPIASSGTYNLDFDNIELVDTFQTLEPRASDAKNQEGKVNTRRKSTDSVPISKSTLSRSLSLQASDFDGASSSGNPEAVALAPDAYSTGSSSASSTLKRTKKPRPPSLKKKQTTKKPTETPPVKETQQEPDEESLVPSGENLASETKTESAKTEGPSPALLEETPLEPAVGPKAACPLDSESAEGVVPPASGGGRVQNSPPVGRKTLPLTTAPEAGEVTPSDSGGQEDSPAKGLSVRLEFDYSEDKSSWDNQQENPPPTKKIGKKPVAKMPLRRPKMKKTPEKLDNTPASPPRSPAEPNDIPIAKGTYTFDIDKWDDPNFNPFSSTSKMQESPKLPQQSYNFDPDTCDESVDPFKTSSKTPSSPSKSPASFEIPASAMEANGVDGDGLNKPAKKKKTPLKTMVEDVMSVCSLFDTFRVKKSPKRSPLSDPPSQDPTPAATPETPPVISAVVHATDEEKLAVTNQKWTCMTVDLEADKQDYPQPSDLSTFVNETKFSSPTEELDYRNSYEIEYMEKIGSSLPQDDDAPKKQALYLMFDTSQESPVKSSPVRMSESPTPCSGSSFEETEALVNTAAKNQHPVPRGLAPNQESHLQVPEKSSQKELEAMGLGTPSEAIEITAPEGSFASADALLSRLAHPVSLCGALDYLEPDLAEKNPPLFAQKLQREAAHPTDVSISKTALYSRIGTAEVEKPAGLLFQQPDLDSALQIARAEIITKEREVSEWKDKYEESRREVMEMRKIVAEYEKTIAQMIEDEQREKSVSHQTVQQLVLEKEQALADLNSVEKSLADLFRRYEKMKEVLEGFRKNEEVLKRCAQEYLSRVKKEEQRYQALKVHAEEKLDRANAEIAQVRGKAQQEQAAHQASLRKEQLRVDALERTLEQKNKEIEELTKICDELIAKMGKS

SEQ ID NO: 90187 - protein, 183 aa, Homo sapiens
  Payload ID: 18029
  Gene Name: transforming, acidic coiled-coil containing protein 2
  ENSP ID: ENSP00000423069
  MOD_RES (1)..(1): Any amino acid
XNSTSDNQQEDSVLHNVILWPPNPEPTQRTLSAQTPRSAQPPGNSQNIKRKQQDTPGSPDHRDASSVGLGGFCTASESSASLDPCLVSPEVTEPRKDPQGARGPEGSLLPSPPPSQEREHPSSSMPFAECPPEGCLASPAAAPEDGPQTQSPRREPAPNAPGDIAAAFPAERDSSTPYQEIAA

SEQ ID NO: 90188 - protein, 153 aa, Homo sapiens
  Payload ID: 18029
  Gene Name: transforming, acidic coiled-coil containing protein 2
  ENSP ID: ENSP00000423764
  MOD_RES (1)..(1): Any amino acid
XIITKEREVSEWKDKYEESRREVMEMRKIVAEYEKTIAQMIEDEQREKSVSHQTVQQLVLEKEQALADLNSVEKSLADLFRRYEKMKEVLEGFRKNEEVLKRCAQEYLSRFHGQVLFSLFRMHYCISFLNKIDLIVCSTKETIRISCYWFAFS

SEQ ID NO: 90189 - protein, 2875 aa, Homo sapiens; identical to SEQ ID NO: 90182
  Payload ID: 18029
  Gene Name: transforming, acidic coiled-coil containing protein 2
  ENSP ID: ENSP00000424467

SEQ ID NO: 90190 - protein, 1094 aa, Homo sapiens; identical to SEQ ID NO: 90176
  Payload ID: 18029
  Gene Name: transforming, acidic coiled-coil containing protein 2
  Uniprot ID: O95359
  ENSP ID: ENSP00000425062

SEQ ID NO: 90191 - protein, 165 aa, Homo sapiens
  Payload ID: 18029
  Gene Name: transforming, acidic coiled-coil containing protein 2
  ENSP ID: ENSP00000425525
KKKTPLKTDTFRVKKSPKRSPLSDPPSQDPTPAATPETPPVISAVVHATDEEKLAVTNQKWTCMTVDLEADKQDYPQPSDLSTFVNETKFSSPTEGKQLCSQLDPHSASENPAPREPKARRETSQPELDYRNSYEIEYMEKIGSSLPQDDDAPKKQALYLMFDTS

SEQ ID NO: 90192 - protein, 189 aa, Homo sapiens
  Payload ID: 18029
  Gene Name: transforming, acidic coiled-coil containing protein 2
  ENSP ID: ENSP00000426303
ESLVPSGENLASETKTESAKTEGPSPALLEETPLEPAVGPKAACPLDSESAEGVVPPASGGGRVQNSPPVGRKTLPLTTAPEAGEESPKLPQQSYNFDPDTCDESVDPFKTSSKTPSSPSKSPASFEIPASAMEANGVDGDGLNKPAKKKKTPLKTDTFRVKKSPKRSPLSDPPSQDPTPAATPETPPV

SEQ ID NO: 90193 - protein, 2826 aa, Homo sapiens
  Payload ID: 18029
  Gene Name: transforming, acidic coiled-coil containing protein 2
  ENSP ID: ENSP00000427618
MGNENSTSDNQRTLSAQTPRSAQPPGNSQNIKRKQQDTPGSPDHRDASSIGSVGLGGFCTASESSASLDPCLVSPEVTEPRKDPQGARGPEGSLLPSPPPSQEREHPSSSMPFAECPPEGCLASPAAAPEDGPQTQSPRREPAPNAPGDIAAAFPAERDSSTPYQEIAAVPSAGRERQPKEEGQKSSFSFSSGIDQSPGMSPVPLREPMKAPLCGEGDQPGGFESQEKEAAGGFPPAESRQGVASVQVTPEAPAAAQQGTESSAVLEKSPLKPMAPIPQDPAPRASDRERGQGEAPPQYLTDDLEFLRACHLPRSNSGAAPEAEVNAASQESCQQPVGAYLPHAELPWGLPSPALVPEAGGSGKEALDTIDVQGHPQTGMRGTKPNQVVCVAAGGQPEGGLPVSPEPSLLTPTEEAHPASSLASFPAAQIPIAVEEPGSSSRESVSKAGMPVSADAAKEVVDAGLVGLERQVSDLGSKGEHPEGDPGEVPAPSPQERGEHLNTEQSHEVQPGVPPPPLPKEQSHEVQPGAPPPPLPKAPSESARGPPGPTDGAKVHEDSTSPAVAKEGSRSPGDSPGGKEEAPEPPDGGDPGNLQGEDSQAFSSKRDPEVGKDELSKPSSDAESRDHPSSHSAQPPRKGGAGHTDGPHSQTAEADASGLPHKLGEEDPVLPPVPDGAGEPTVPEGAIWEGSGLQPKCPDTLQSREGLGRMESFLTLESEKSDFPPTPVAEVAPKAQEGESTLEIRKMGSCDGEGLLTSPDQPRGPACDASRQEFHAGVPHPPQGENLAADLGLTALILDQDQQGIPSCPGEGWIRGAASEWPLLSSEKHLQPSQAQPETSIFDVLKEQAQPPENGKETSPSHPGFKDQGADSSQIHVPVEPQEDNNLPTHGGQEQALGSELQSQLPKGTLSDTPTSSPTDMVWESSLTEESELSAPTRQKLPALGEKRPEGACGDGQSSRVSPPAADVLKDFSLAGNFSRKETCCTGQGPNKSQQALADALEEGSQHEEACQRHPGASEAADGCSPLWGLSKREMASGNTGEAPPCQPDSVALLDAVPCLPALAPASPGVTPTQDAPETEACDETQEGRQQPVPAPQQKMECWATSDAESPKLLASFPSAGEQGGEAGAAETGGSAGAGDPGKQQAPEKPGEATLSCGLLQTEHCLTSGEEASTSALRESCQAEHPMASCQDALLPARELGGIPRSTMDFSTHQAVPDPKELLLSGPPEVAAPDTPYLHVDSAAQRGAEDSGVKAVSSADPRAPGESPCPVGEPPLALENAASLKLFAGSLAPLLQPGAAGGEIPAVQASSGSPKARTTEGPVDSMPCLDRMPLLAKGKQATGEEKAATAPGAGAKASGEGMAGDAAGETEGSMERMGEPSQDPKQGTSGGVDTSSEQIATLTGFPDFREHIAKIFEKPVLGALATPGEKAGAGRSAVGKDLTRPLGPEKLLDGPPGVDVTLLPAPPARLQVEKKQQLAGEAEISHLALQDPASDKLLGPAGLTWERNLPGAGVGKEMAGVPPTLREDERPEGPGAAWPGLEGQAYSQLERSRQELASGLPSPAATQELPVERAAAFQVAPHSHGEEAVAQDRIPSGKQHQETSACDSPHGEDGPGDFAHTGVPGHVPRSTCAPSPQREVLTVPEANSEPWTLDTLGGERRPGVTAGILEMRNALGNQSTPAPPTGEVADTPLEPGKVAGAAGEAEGDITLSTAETQACASGDLPEAGTTRTFSVVAGDLVLPGSCQDPACSDKAPGMEGTAALHGDSPARPQQAKEQPGPERPIPAGDGKVCVSSPPEPDETHDPKLQHLAPEELHTDRESPRPGPSMLPSVPKKDAPRVMDKVTSDETRGAEGTESSPVADDIIQPAAPADLESPTLAASSYHGDVVGQVSTDLIAQRSSDSEEAFETPESTTPVKAPPAPPPPPPEVIPEPEVSTQPPPEEPGCGSETVPVPDGPRSDSVEGSPFRPPSHSFSAVFDEDKPIASSGTYNLDFDNIELVDTFQTLEPRASDAKNQEGKVNTRRKSTDSVPISKSTLSRSLSLQASDFDGASSSGNPEAVALAPDAYSTGSSSASSTLKRTKKPRPPSLKKKQTTKKPTETPPVKETQQEPDEESLVPSGENLASETKTESAKTEGPSPALLEETPLEPAVGPKAACPLDSESAEGVVPPASGGGRVQNSPPVGRKTLPLTTAPEAGEVTPSDSGGQEDSPAKGLSVRLEFDYSEDKSSWDNQQENPPPTKKIGKKPVAKMPLRRPKMKKTPEKLDNTPASPPRSPAEPNDIPIAKGTYTFDIDKWDDPNFNPFSSTSKMQESPKLPQQSYNFDPDTCDESVDPFKTSSKTPSSPSKSPASFEIPASAMEANGVDGDGLNKPAKKKKTPLKTDTFRVKKSPKRSPLSDPPSQDPTPAATPETPPVISAVVHATDEEKLAVTNQKWTCMTVDLEADKQDYPQPSDLSTFVNETKFSSPTEELDYRNSYEIEYMEKIGSSLPQDDDAPKKQALYLMFDTSQESPVKSSPVRMSESPTPCSGSSFEETEALVNTAAKNQHPVPRGLAPNQESHLQVPEKSSQKELEAMGLGTPSEAIEIREAAHPTDVSISKTALYSRIGTAEVEKPAGLLFQQPDLDSALQIARAEIITKEREVSEWKDKYEESRREVMEMRKIVAEYEKTIAQMIEDEQREKSVSHQTVQQLVLEKEQALADLNSVEKSLADLFRRYEKMKEVLEGFRKNEEVLKRCAQEYLSRVKKEEQRYQALKVHAEEKLDRANAEIAQVRGKAQQEQAAHQASLRKEQLRVDALERTLEQKNKEIEELTKICDELIAKMGKS

SEQ ID NO: 90194 - protein, 175 aa, Homo sapiens
  Payload ID: 18029
  Gene Name: transforming, acidic coiled-coil containing protein 2
  ENSP ID: ENSP00000489610
  MOD_RES (1)..(1): Any amino acid
XEVMEMRKIVAEYEKTIAQMIGKPEDEQREKSVSHQTVQQLVLEKEQALADLNSVEKSLADLFRRYEKMKEVLEGFRKNEEVLKRCAQEYLSRVKKEEQRYQALKVHAEEKLDRANAEIAQVRGKAQQEQAAHQASLRKEQLRVDALERTLEQKNKEIEELTKICDELIAKMGKS

SEQ ID NO: 90195 - protein, 838 aa, Homo sapiens
  Payload ID: 18030
  Gene Name: transforming, acidic coiled-coil containing protein 3
  Uniprot ID: Q9Y6A5
  ENSP ID: ENSP00000326550
MSLQVLNDKNVSNEKNTENCDFLFSPPEVTGRSSVLRVSQKENVPPKNLAKAMKVTFQTPLRDPQTHRILSPSMASKLEAPFTQDDTLGLENSHPVWTQKENQQLIKEVDAKTTHGILQKPVEADTDLLGDASPAFGSGSSSESGPGALADLDCSSSSQSPGSSENQMVSPGKVSGSPEQAVEENLSSYSLDRRVTPASETLEDPCRTESQHKAETPHGAEEECKAETPHGAEEECRHGGVCAPAAVATSPPGAIPKEACGGAPLQGLPGEALGCPAGVGTPVPADGTQTLTCAHTSAPESTAPTNHLVAGRAMTLSPQEEVAAGQMASSSRSGPVKLEFDVSDGATSKRAPPPRRLGERSGLKPPLRKAAVRQQKAPQEVEEDDGRSGAGEDPPMPASRGSYHLDWDKMDDPNFIPFGGDTKSGCSEAQPPESPETRLGQPAAEQLHAGPATEEPGPCLSQQLHSASAEDTPVVQLAAETPTAESKERALNSASTSLPTSCPGSEPVPTHQQGQPALELKEESFRDPAEVLGTGAEVDYLEQFGTSSFKESALRKQSLYLKFDPLLRDSPGRPVPVATETSSMHGANETPSGRPREAKLVEFDFLGALDIPVPGPPPGVPAPGGPPLSTGPIVDLLQYSQKDLDAVVKATQEENRELRSRCEELHGKNLELGKIMDRFEEVVYQAMEEVQKQKELSKAEIQKVLKEKDQLTTDLNSMEKSFSDLFKRFEKQKEVIEGYRKNEESLKKCVEDYLARITQEGQRYQALKAHAEEKLQLANEEIAQVRSKAQAEALALQASLRKEQMRIQSLEKTVEQKTKENEELTRICDDLISKMEKI

SEQ ID NO: 90196 - protein, 221 aa, Homo sapiens
  Payload ID: 18030
  Gene Name: transforming, acidic coiled-coil containing protein 3
  ENSP ID: ENSP00000415914
MSLQVLNDKNVSNEKNTENCDFLFSPPEVTGRSSVLRVSQKENVPPKNLAKAMKVTFQTPLRDPQTHRILSPSMASKLEAPFTQDDTLGLENSHPVWTQKENQQLIKEVDAKTTHGILQKPVEADTDLLGDASPAFGSGSSSESGPGALADLDCSSSSQSPGSSENQMVSPGKVSGSPEQAVEENLSSYSLDRRVTPASETLEDPCRTESQHKAETPHGAE

SEQ ID NO: 90197 - protein, 230 aa, Homo sapiens
  Payload ID: 18030
  Gene Name: transforming, acidic coiled-coil containing protein 3
  ENSP ID: ENSP00000418095
MSLQVLNDKNVSNEKNTENCDFLFSPPEVTGRSSVLRVSQKENVPPKNLAKAMKVTFQTPLRDPQTHRILSPSMASKLEAPFTQDDTLGLENSHPVWTQKENQQLIKEVDAKTTHGILQKPVEADTDLLGDASPAFGSGSSSESGPGALADLDCSSSSQSPGSSENQMVSPGKVSGSPEQAVEENLSSYSLDRRVTPASETLEDPCRTESQHKAETPHGAEEECKAETPH

SEQ ID NO: 90198 - protein, 63 aa, Homo sapiens
  Payload ID: 18030
  Gene Name: transforming, acidic coiled-coil containing protein 3
  ENSP ID: ENSP00000418727
MSLQVLNDKNVSNEKNTENCDFLFSPPEVTGRSSVLRVSQKENVPPKNLAKAMKVLSSSLRNR

SEQ ID NO: 90199 - protein, 193 aa, Homo sapiens
  Payload ID: 18030
  Gene Name: transforming, acidic coiled-coil containing protein 3
  ENSP ID: ENSP00000419210
MSLQVLNDKNVSNEKNTENCDFLFSPPEVTGRSSVLRVSQKENVPPKNLAKAMKVTFQTPLRDPQTHRILSPSMASKLEAPFTQDDTLGLENSHPVWTQKEKQLHSASAEDTPVVQLAAETPTAESKERALNSASTSLPTSCPGSEPVPTHQQGQPALELKEESFRDPAEVLGTGAEVDYLEQFGTSSFKESA

SEQ ID NO: 90200 - protein, 217 aa, Homo sapiens
  Payload ID: 18030
  Gene Name: transforming, acidic coiled-coil containing protein 3
  ENSP ID: ENSP00000420838
  MOD_RES (1)..(1): Any amino acid
XPVKLEFDVSDGATSKRAPPPRRLGERSGLKPPLRKAAVRQQKAPQEVEEDDGRSGAGEDPPMPASRGSYHLDWDKMDDPNFIPFGGDTKSGCSEAQPPESPETRLGQPAAEQLHAGPATEEPGPCLSQQLHSASAEDTPVVQLAAETPTAESKERALNSASTSLPTSCPGSEPVDYLEQFGTSSFKESALRKQSLYLKFDPLLRDSPGRPVPVATE

SEQ ID NO: 90201 - protein, 145 aa, Homo sapiens
  Payload ID: 18030
  Gene Name: transforming, acidic coiled-coil containing protein 3
  ENSP ID: ENSP00000478580
MSLQVLNDKNVSNEKNTENCDFLFSPPEVTGRSSVLRVSQKENVPPKNLAKAMKVTFQTPLRDPQTHRILSPSMASKLEAPFTQDDTLGLENSHPVWTQKEKAAAFSLSGGHACGAVGSRDPNSREQGESLELCQHLASHKLSRQ

SEQ ID NO: 90202 - protein, 145 aa, Homo sapiens; identical to SEQ ID NO: 90201
  Payload ID: 18030
  Gene Name: transforming, acidic coiled-coil containing protein 3
  ENSP ID: ENSP00000483196

SEQ ID NO: 90203 - protein, 201 aa, Homo sapiens
  Payload ID: 18031
  Gene Name: transgelin
  Uniprot ID: Q01995
  ENSP ID: ENSP00000278968
MANKGPSYGMSREVQSKIEKKYDEELEERLVEWIIVQCGPDVGRPDRGRLGFQVWLKNGVILSKLVNSLYPDGSKPVKVPENPPSMVFKQMEQVAQFLKAAEDYGVIKTDMFQTVDLFEGKDMAAVQRTLMALGSLAVTKNDGHYRGDPNWFMKKAQEHKREFTESQLQEGKHVIGLQMGSNRGASQAGMTGYGRPRQIIS

SEQ ID NO: 90204 - protein, 201 aa, Homo sapiens; identical to SEQ ID NO: 90203
  Payload ID: 18031
  Gene Name: transgelin
  Uniprot ID: Q01995
  ENSP ID: ENSP00000376678

SEQ ID NO: 90205 - protein, 91 aa, Homo sapiens
  Payload ID: 18031
  Gene Name: transgelin
  ENSP ID: ENSP00000431862
MANKGPSYGMSREVQSKIEKKYDEELEERLVEWIIVQCGPDVGRPDRGRLGFQVWLKNGVILSKLVNSLYPDGSKPVKVPENPPSMVFKQM

SEQ ID NO: 90206 - protein, 201 aa, Homo sapiens; identical to SEQ ID NO: 90203
  Payload ID: 18031
  Gene Name: transgelin
  Uniprot ID: Q01995
  ENSP ID: ENSP00000431941

SEQ ID NO: 90207 - protein, 201 aa, Homo sapiens; identical to SEQ ID NO: 90203
  Payload ID: 18031
  Gene Name: transgelin
  Uniprot ID: Q01995
  ENSP ID: ENSP00000432054

SEQ ID NO: 90208 - protein, 201 aa, Homo sapiens; identical to SEQ ID NO: 90203
  Payload ID: 18031
  Gene Name: transgelin
  Uniprot ID: Q01995
  ENSP ID: ENSP00000432282

SEQ ID NO: 90209 - protein, 151 aa, Homo sapiens
  Payload ID: 18031
  Gene Name: transgelin
  ENSP ID: ENSP00000432380
  MOD_RES (1)..(1): Any amino acid
XPDRGRLGFQILSKLVNSLYPDGSKPVKVPENPPSMVFKQMEQVAQFLKAAEDYGVIKTDMFQTVDLFEGKDMAAVQRTLMALGSLAVTKNDGHYRGDPNWFMKKAQEHKREFTESQLQEGKHVIGLQMGSNRGASQAGMTGYGRPRQIIS

SEQ ID NO: 90210 - protein, 199 aa, Homo sapiens
  Payload ID: 18032
  Gene Name: transgelin 2
  Uniprot ID: P37802
  ENSP ID: ENSP00000357075
MANRGPAYGLSREVQQKIEKQYDADLEQILIQWITTQCRKDVGRPQPGRENFQNWLKDGTVLCELINALYPEGQAPVKKIQASTMAFKQMEQISQFLQAAERYGINTTDIFQTVDLWEGKNMACVQRTLMNLGGLAVARDDGLFSGDPNWFPKKSKENPRNFSDNQLQEGKNVIGLQMGTNRGASQAGMTGYGMPRQIL

SEQ ID NO: 90211 - protein, 220 aa, Homo sapiens
  Payload ID: 18032
  Gene Name: transgelin 2
  Uniprot ID: P37802
  ENSP ID: ENSP00000357076
MSAFSLALALVSSPQPPPPIGMANRGPAYGLSREVQQKIEKQYDADLEQILIQWITTQCRKDVGRPQPGRENFQNWLKDGTVLCELINALYPEGQAPVKKIQASTMAFKQMEQISQFLQAAERYGINTTDIFQTVDLWEGKNMACVQRTLMNLGGLAVARDDGLFSGDPNWFPKKSKENPRNFSDNQLQEGKNVIGLQMGTNRGASQAGMTGYGMPRQIL

SEQ ID NO: 90212 - protein, 199 aa, Homo sapiens; identical to SEQ ID NO: 90210
  Payload ID: 18032
  Gene Name: transgelin 2
  Uniprot ID: P37802
  ENSP ID: ENSP00000357077

SEQ ID NO: 90213 - protein, 187 aa, Homo sapiens
  Payload ID: 18032
  Gene Name: transgelin 2
  ENSP ID: ENSP00000412429
MANRGPAYGLSREVQQKIEKQYDADLEQILIQWITTQCRKDVGRPQPGRENFQNWLKDGTVLCELINALYPEGQAPVKKIQASTMAFKQMEQISQFLQAAERYGINTTDIFQTVDLWEGKNMACVQRTLMNLGGLAVARDDGLFSGDPNWFPKKSKENPRNFSDNQLQEGKNVIGLQMGTNRGASQA

SEQ ID NO: 90214 - protein, 199 aa, Homo sapiens
  Payload ID: 18033
  Gene Name: transgelin 3
  Uniprot ID: Q9UI15
  ENSP ID: ENSP00000273368
MANRGPSYGLSREVQEKIEQKYDADLENKLVDWIILQCAEDIEHPPPGRAHFQKWLMDGTVLCKLINSLYPPGQEPIPKISESKMAFKQMEQISQFLKAAETYGVRTTDIFQTVDLWEGKDMAAVQRTLMALGSVAVTKDDGCYRGEPSWFHRKAQQNRRGFSEEQLRQGQNVIGLQMGSNKGASQAGMTGYGMPRQIM

SEQ ID NO: 90215 - protein, 199 aa, Homo sapiens; identical to SEQ ID NO: 90214
  Payload ID: 18033
  Gene Name: transgelin 3
  Uniprot ID: Q9UI15
  ENSP ID: ENSP00000377494

SEQ ID NO: 90216 - protein, 199 aa, Homo sapiens; identical to SEQ ID NO: 90214
  Payload ID: 18033
  Gene Name: transgelin 3
  Uniprot ID: Q9UI15
  ENSP ID: ENSP00000391160

SEQ ID NO: 90217 - protein, 115 aa, Homo sapiens
  Payload ID: 18033
  Gene Name: transgelin 3
  ENSP ID: ENSP00000417904
MAFKQMEQISQFLKAAETYGVRTTDIFQTVDLWEGKDMAAVQRTLMALGSVAVTKDDGCYRGEPSWFHRKAQQNRRGFSEEQLRQGQNVIGLQMGSNKGASQAGMTGYGMPRQIM

SEQ ID NO: 90218 - protein, 199 aa, Homo sapiens; identical to SEQ ID NO: 90214
  Payload ID: 18033
  Gene Name: transgelin 3
  Uniprot ID: Q9UI15
  ENSP ID: ENSP00000419105

SEQ ID NO: 90219 - protein, 78 aa, Homo sapiens
  Payload ID: 18033
  Gene Name: transgelin 3
  ENSP ID: ENSP00000420346
VLCKLINSLYPPGQEPIPKISESKMAFKQMEQISQFLKAAETYGVRTTDIFQTVDLWEGKPSRIGEAFPRSSFARDRT

SEQ ID NO: 90220 - protein, 163 aa, Homo sapiens
  Payload ID: 18033
  Gene Name: transgelin 3
  ENSP ID: ENSP00000420675
MANRGPSYGLSREVQEKIEQKYDADLENKLVDWIILQCAEDIEHPPPGRAHFQKWLMDGTESPAESERLFRGAASPGTERNRPADGQQQGSLPGGHDRVRDAQADHVGRGILPLVERTNVPHHGLYEKEIVSHLLTFSSFSKPSVPGFCKCCISAENPRCLLL

SEQ ID NO: 90221 - protein, 221 aa, Homo sapiens
  Payload ID: 18033
  Gene Name: transgelin 3
  ENSP ID: ENSP00000480097
MANRGPSYGLSREVQEKIEQKYDADLENKLVDWIILQCAEDIEHPPPGRAHFQKWLMDGTVLCKLINSLYPPGQEPIPKISESKMAFKQMEQISQFLKAAETYGVRTTDIFQTVDLWEGKDMAAVQRTLMALGSVAVTKDDGCYRGEPSWFHRKAQQNRRGFSEEQLRQGQNVIGLQMGSNKGASQAGMTGYGMPGRSCRTRHLPLVERTNVPHHGLYEKK

SEQ ID NO: 90222 - protein, 817 aa, Homo sapiens
  Payload ID: 18034
  Gene Name: transglutaminase 1
  Uniprot ID: P22735
  ENSP ID: ENSP00000206765
MMDGPRSDVGRWGGNPLQPPTTPSPEPEPEPDGRSRRGGGRSFWARCCGCCSCRNAADDDWGPEPSDSRGRGSSSGTRRPGSRGSDSRRPVSRGSGVNAAGDGTIREGMLVVNGVDLLSSRSDQNRREHHTDEYEYDELIVRRGQPFHMLLLLSRTYESSDRITLELLIGNNPEVGKGTHVIIPVGKGGSGGWKAQVVKASGQNLNLRVHTSPNAIIGKFQFTVRTQSDAGEFQLPFDPRNEIYILFNPWCPEDIVYVDHEDWRQEYVLNESGRIYYGTEAQIGERTWNYGQFDHGVLDACLYILDRRGMPYGGRGDPVNVSRVISAMVNSLDDNGVLIGNWSGDYSRGTNPSAWVGSVEILLSYLRTGYSVPYGQCWVFAGVTTTVLRCLGLATRTVTNFNSAHDTDTSLTMDIYFDENMKPLEHLNHDSVWNFHVWNDCWMKRPDLPSGFDGWQVVDATPQETSSGIFCCGPCSVESIKNGLVYMKYDTPFIFAEVNSDKVYWQRQDDGSFKIVYVEEKAIGTLIVTKAISSNMREDITYLYKHPEGSDAERKAVETAAAHGSKPNVYANRGSAEDVAMQVEAQDAVMGQDLMVSVMLINHSSSRRTVKLHLYLSVTFYTGVSGTIFKETKKEVELAPGASDRVTMPVAYKEYRPHLVDQGAMLLNVSGHVKESGQVLAKQHTFRLRTPDLSLTLLGAAVVGQECEVQIVFKNPLPVTLTNVVFRLEGSGLQRPKILNVGDIGGNETVTLRQSFVPVRPGPRQLIASLDSPQLSQVHGVIQVDVAPAPGDGGFFSDAGGDSHLGETIPMASRGGA

SEQ ID NO: 90223 - protein, 375 aa, Homo sapiens
  Payload ID: 18034
  Gene Name: transglutaminase 1
  Uniprot ID: P22735
  ENSP ID: ENSP00000439446
MKRPDLPSGFDGWQVVDATPQETSSGIFCCGPCSVESIKNGLVYMKYDTPFIFAEVNSDKVYWQRQDDGSFKIVYVEEKAIGTLIVTKAISSNMREDITYLYKHPEGSDAERKAVETAAAHGSKPNVYANRGSAEDVAMQVEAQDAVMGQDLMVSVMLINHSSSRRTVKLHLYLSVTFYTGVSGTIFKETKKEVELAPGASDRVTMPVAYKEYRPHLVDQGAMLLNVSGHVKESGQVLAKQHTFRLRTPDLSLTLLGAAVVGQECEVQIVFKNPLPVTLTNVVFRLEGSGLQRPKILNVGDIGGNETVTLRQSFVPVRPGPRQLIASLDSPQLSQVHGVIQVDVAPAPGDGGFFSDAGGDSHLGETIPMASRGGA

SEQ ID NO: 90224 - protein, 9 aa, Homo sapiens
  Payload ID: 18034
  Gene Name: transglutaminase 1
  ENSP ID: ENSP00000452690
MMDGPRSDV

SEQ ID NO: 90225 - protein, 64 aa, Homo sapiens
  Payload ID: 18034
  Gene Name: transglutaminase 1
  ENSP ID: ENSP00000452822
MMDGPRSDVGRWGGNPLQPPTTPSPEPEPEPDGRSRRGGGRSFWARCCGCCSCRNAADDDWGPE

SEQ ID NO: 90226 - protein, 50 aa, Homo sapiens
  Payload ID: 18034
  Gene Name: transglutaminase 1
  ENSP ID: ENSP00000453234
MMDGPRSDVGRWGGNPLQPPTTPSPEPEPEPDGRSRRGGGRSFWARCCGC

SEQ ID NO: 90227 - protein, 209 aa, Homo sapiens
  Payload ID: 18034
  Gene Name: transglutaminase 1
  ENSP ID: ENSP00000453337
MPYGGRGDPVNVSRVISAMVNSLDDNGVLIGNWSGDYSRGTNPSAWVGSVEILLSYLRTGYSVPYGQCWVFAGVTTTVLRCLGLATRTVTNFNSAHDTDTSLTMDIYFDENMKPLEHLNHDSVWNFHVWNDCWMKRPDLPSGFDGWQVVDATPQETSSGIFCCGPCSVESIKNGLVYMKYDTPFIFAEVNSDKVYWQRQDDGSFKIVYV

SEQ ID NO: 90228 - protein, 128 aa, Homo sapiens
  Payload ID: 18034
  Gene Name: transglutaminase 1
  ENSP ID: ENSP00000453701
YLSVTFYTGVSGTIFKETKKEVELAPGASDRVTMPVAYKEYRPHLVDQGAMLLNVSGHVKESGQVLAKQHTFRLRTPDLSLTLLGAAVVGQECEVQIVFKNPLPVTLTNVVFRLEGSGLQRPKILNVG

SEQ ID NO: 90229 - protein, 135 aa, Homo sapiens
  Payload ID: 18034
  Gene Name: transglutaminase 1
  ENSP ID: ENSP00000453840
MMDGPRSDVGRWGGNPLQPPTTPSPEPEPEPDGRSRRGGGRSFWARCCGCCSCRNAADDDWGPEPSDSRGRGSSSGTRRPGSRGSDSRRPVSRGSGVNAAGDGTIREGMLVVNGVDLLSSRSDQNRREHHTDEYE

SEQ ID NO: 90230 - protein, 42 aa, Homo sapiens
  Payload ID: 18034
  Gene Name: transglutaminase 1
  ENSP ID: ENSP00000454070
MMDGPRSDVGRWGGNPLQPPTTPSPEPEPEPDGRSRRGGGRS

SEQ ID NO: 90231 - protein, 687 aa, Homo sapiens
  Payload ID: 18035
  Gene Name: transglutaminase 2
  Uniprot ID: P21980
  ENSP ID: ENSP00000355330
MAEELVLERCDLELETNGRDHHTADLCREKLVVRRGQPFWLTLHFEGRNYEASVDSLTFSVVTGPAPSQEAGTKARFPLRDAVEEGDWTATVVDQQDCTLSLQLTTPANAPIGLYRLSLEASTGYQGSSFVLGHFILLFNAWCPADAVYLDSEEERQEYVLTQQGFIYQGSAKFIKNIPWNFGQFEDGILDICLILLDVNPKFLKNAGRDCSRRSSPVYVGRVVSGMVNCNDDQGVLLGRWDNNYGDGVSPMSWIGSVDILRRWKNHGCQRVKYGQCWVFAAVACTVLRCLGIPTRVVTNYNSAHDQNSNLLIEYFRNEFGEIQGDKSEMIWNFHCWVESWMTRPDLQPGYEGWQALDPTPQEKSEGTYCCGPVPVRAIKEGDLSTKYDAPFVFAEVNADVVDWIQQDDGSVHKSINRSLIVGLKISTKSVGRDEREDITHTYKYPEGSSEEREAFTRANHLNKLAEKEETGMAMRIRVGQSMNMGSDFDVFAHITNNTAEEYVCRLLLCARTVSYNGILGPECGTKYLLNLNLEPFSEKSVPLCILYEKYRDCLTESNLIKVRALLVEPVINSYLLAERDLYLENPEIKIRILGEPKQKRKLVAEVSLQNPLPVALEGCTFTVEGAGLTEEQKTVEIPDPVEAGEEVKVRMDLLPLHMGLHKLVVNFESDKLKAVKGFRNVIIGPA

SEQ ID NO: 90232 - protein, 280 aa, Homo sapiens
  Payload ID: 18035
  Gene Name: transglutaminase 2
  ENSP ID: ENSP00000362502
MAEELVLERCDLELETNGRDHHTADLCREKLVVRRGQPFWLTLHFEGRNYEASVDSLTFSVVTGPAPSQEAGTKARFPLRDAVEEGDWTATVVDQQDCTLSLQLTTPANAPIGLYRLSLEASTGYQGSSFVLGHFILLFNAWCPADAVYLDSEEERQEYVLTQQGFIYQGSAKFIKNIPWNFGQFEDGILDICLILLDVNPKFLKNAGRDCSRRSSPVYVGRVVSGMVNCNDDQGVLLGRWDNNYGDGVSPMSWIGSVDILRRWKNHGCQRVKYGQCWVF

SEQ ID NO: 90233 - protein, 159 aa, Homo sapiens
  Payload ID: 18035
  Gene Name: transglutaminase 2
  ENSP ID: ENSP00000387642
MAEELVLERCDLELETNGRDHHTADLCREKLVVRRGQPFWLTLHFEGRNYEASVDSLTFSVVTGPAPSQEAGTKARFPLRDAVEEGDWTATVVDQQDCTLSLQLTTPANAPIGLYRLSLEASTGYQGSSFVLGHFILLFNAWCPADAVYLDSEEERQEY

SEQ ID NO: 90234 - protein, 693 aa, Homo sapiens
  Payload ID: 18036
  Gene Name: transglutaminase 3
  Uniprot ID: Q08188
  ENSP ID: ENSP00000370867
MAALGVQSINWQTAFNRQAHHTDKFSSQELILRRGQNFQVLMIMNKGLGSNERLEFIVSTGPYPSESAMTKAVFPLSNGSSGGWSAVLQASNGNTLTISISSPASAPIGRYTMALQIFSQGGISSVKLGTFILLFNPWLNVDSVFMGNHAEREEYVQEDAGIIFVGSTNRIGMIGWNFGQFEEDILSICLSILDRSLNFRRDAATDVASRNDPKYVGRVLSAMINSNDDNGVLAGNWSGTYTGGRDPRSWNGSVEILKNWKKSGFSPVRYGQCWVFAGTLNTALRSLGIPSRVITNFNSAHDTDRNLSVDVYYDPMGNPLDKGSDSVWNFHVWNEGWFVRSDLGPSYGGWQVLDATPQERSQGVFQCGPASVIGVREGDVQLNFDMPFIFAEVNADRITWLYDNTTGKQWKNSVNSHTIGRYISTKAVGSNARMDVTDKYKYPEGSDQERQVFQKALGKLKPNTPFAATSSMGLETEEQEPSIIGKLKVAGMLAVGKEVNLVLLLKNLSRDTKTVTVNMTAWTIIYNGTLVHEVWKDSATMSLDPEEEAEHPIKISYAQYEKYLKSDNMIRITAVCKVPDESEVVVERDIILDNPTLTLEVLNEARVRKPVNVQMLFSNPLDEPVRDCVLMVEGSGLLLGNLKIDVPTLGPKEGSRVRFDILPSRSGTKQLLADFSCNKFPAIKAMLSIDVAE

SEQ ID NO: 90235 - protein, 684 aa, Homo sapiens
  Payload ID: 18037
  Gene Name: transglutaminase 4
  Uniprot ID: P49221
  ENSP ID: ENSP00000296125
MMDASKELQVLHIDFLNQDNAVSHHTWEFQTSSPVFRRGQVFHLRLVLNQPLQSYHQLKLEFSTGPNPSIAKHTLVVLDPRTPSDHYNWQATLQNESGKEVTVAVTSSPNAILGKYQLNVKTGNHILKSEENILYLLFNPWCKEDMVFMPDEDERKEYILNDTGCHYVGAARSIKCKPWNFGQFEKNVLDCCISLLTESSLKPTDRRDPVLVCRAMCAMMSFEKGQGVLIGNWTGDYEGGTAPYKWTGSAPILQQYYNTKQAVCFGQCWVFAGILTTVLRALGIPARSVTGFDSAHDTERNLTVDTYVNENGEKITSMTHDSVWNFHVWTDAWMKRPDLPKGYDGWQAVDATPQERSQGVFCCGPSPLTAIRKGDIFIVYDTRFVFSEVNGDRLIWLVKMVNGQEELHVISMETTSIGKNISTKAVGQDRRRDITYEYKYPEGSSEERQVMDHAFLLLSSEREHRRPVKENFLHMSVQSDDVLLGNSVNFTVILKRKTAALQNVNILGSFELQLYTGKKMAKLCDLNKTSQIQGQVSEVTLTLDSKTYINSLAILDDEPVIRGFIIAEIVESKEIMASEVFTSFQYPEFSIELPNTGRIGQLLVCNCIFKNTLAIPLTDVKFSLESLGISSLQTSDHGTVQPGETIQSQIKCTPIKTGPKKFIVKLSSKQVKEINAQKIVLITK

SEQ ID NO: 90236 - protein, 91 aa, Homo sapiens
  Payload ID: 18037
  Gene Name: transglutaminase 4
  ENSP ID: ENSP00000403711
MMDASKELQVLHIDFLNQDNAVSHHTWEFQTSSPVFRRGQVFHLRLVLNQPLQSYHQLKLEFSTGHSGCHQFPQCHPGQVPTKRENWKPHP

SEQ ID NO: 90237 - protein, 684 aa, Homo sapiens; identical to SEQ ID NO: 90235
  Payload ID: 18037
  Gene Name: Transglutaminase 4
  ENSP ID: ENSP00000487307

SEQ ID NO: 90238 - protein, 91 aa, Homo sapiens; identical to SEQ ID NO: 90236
  Payload ID: 18037
  Gene Name: Transglutaminase 4
  ENSP ID: ENSP00000487489

SEQ ID NO: 90239 - protein, 638 aa, Homo sapiens
  Payload ID: 18038
  Gene Name: transglutaminase 5
  Uniprot ID: O43548
  ENSP ID: ENSP00000220419
MAQGLEVALTDLQSSRNNVRHHTEEITVDHLLVRRGQAFNLTLYFRNRSFQPGLDNIIFVVETEDAVYLDSEPQRQEYVMNDYGFIYQGSKNWIRPCPWNYGQFEDKIIDICLKLLDKSLHFQTDPATDCALRGSPVYVSRVVCAMINSNDDNGVLNGNWSENYTDGANPAEWTGSVAILKQWNATGCQPVRYGQCWVFAAVMCTVMRCLGIPTRVITNFDSGHDTDGNLIIDEYYDNTGRILGNKKKDTIWNFHVWNECWMARKDLPPAYGGWQVLDATPQEMSNGVYCCGPASVRAIKEGEVDLNYDTPFVFSMVNADCMSWLVQGGKEQKLHQDTSSVGNFISTKSIQSDERDDITENYKYEEGSLQERQVFLKALQKLKARSFHGSQRGAELQPSRPTSLSQDSPRSLHTPSLRPSDVVQVSLKFKLLDPPNMGQDICFVLLALNMSSQFKDLKVNLSAQSLLHDGSPLSPFWQDTAFITLSPKEAKTYPCKISYSQYSQYLSTDKLIRISALGEEKSSPEKILVNKIITLSYPSITINVLGAAVVNQPLSIQVIFSNPLSEQVEDCVLTVEGSGLFKKQQKVFLGVLKPQHQASIILETVPFKSGQRQIQANMRSNKFKDIKGYRNVYVDFAL

SEQ ID NO: 90240 - protein, 720 aa, Homo sapiens
  Payload ID: 18038
  Gene Name: transglutaminase 5
  Uniprot ID: O43548
  ENSP ID: ENSP00000220420
MAQGLEVALTDLQSSRNNVRHHTEEITVDHLLVRRGQAFNLTLYFRNRSFQPGLDNIIFVVETGPLPDLALGTRAVFSLARHHSPSPWIAWLETNGATSTEVSLCAPPTAAVGRYLLKIHIDSFQGSVTAYQLGEFILLFNPWCPEDAVYLDSEPQRQEYVMNDYGFIYQGSKNWIRPCPWNYGQFEDKIIDICLKLLDKSLHFQTDPATDCALRGSPVYVSRVVCAMINSNDDNGVLNGNWSENYTDGANPAEWTGSVAILKQWNATGCQPVRYGQCWVFAAVMCTVMRCLGIPTRVITNFDSGHDTDGNLIIDEYYDNTGRILGNKKKDTIWNFHVWNECWMARKDLPPAYGGWQVLDATPQEMSNGVYCCGPASVRAIKEGEVDLNYDTPFVFSMVNADCMSWLVQGGKEQKLHQDTSSVGNFISTKSIQSDERDDITENYKYEEGSLQERQVFLKALQKLKARSFHGSQRGAELQPSRPTSLSQDSPRSLHTPSLRPSDVVQVSLKFKLLDPPNMGQDICFVLLALNMSSQFKDLKVNLSAQSLLHDGSPLSPFWQDTAFITLSPKEAKTYPCKISYSQYSQYLSTDKLIRISALGEEKSSPEKILVNKIITLSYPSITINVLGAAVVNQPLSIQVIFSNPLSEQVEDCVLTVEGSGLFKKQQKVFLGVLKPQHQASIILETVPFKSGQRQIQANMRSNKFKDIKGYRNVYVDFAL

SEQ ID NO: 90241 - protein, 721 aa, Homo sapiens
  Payload ID: 18038
  Gene Name: transglutaminase 5
  ENSP ID: ENSP00000479638
LAAPGLEVALTDLQSSRNNVRHHTEEITVDHLLVRRGQAFNLTLYFRNRSFQPGLDNIIFVVETGPLPDLALGTRAVFSLARHHSPSPWIAWLETNGATSTEVSLCAPPTAAVGRYLLKIHIDSFQGSVTAYQLGEFILLFNPWCPEDAVYLDSEPQRQEYVMNDYGFIYQGSKNWIRPCPWNYGQFEDKIIDICLKLLDKSLHFQTDPATDCALRGSPVYVSRVVCAMINSNDDNGVLNGNWSENYTDGANPAEWTGSVAILKQWNATGCQPVRYGQCWVFAAVMCTVMRCLGIPTRVITNFDSGHDTDGNLIIDEYYDNTGRILGNKKKDTIWNFHVWNECWMARKDLPPAYGGWQVLDATPQEMSNGVYCCGPASVRAIKEGEVDLNYDTPFVFSMVNADCMSWLVQGGKEQKLHQDTSSVGNFISTKSIQSDERDDITENYKYEEGSLQERQVFLKALQKLKARSFHGSQRGAELQPSRPTSLSQDSPRSLHTPSLRPSDVVQVSLKFKLLDPPNMGQDICFVLLALNMSSQFKDLKVNLSAQSLLHDGSPLSPFWQDTAFITLSPKEAKTYPCKISYSQYSQYLSTDKLIRISALGEEKSSPEKILVNKIITLSYPSITINVLGAAVVNQPLSIQVIFSNPLSEQVEDCVLTVEGSGLFKKQQKVFLGVLKPQHQASIILETVPFKSGQRQIQANMRSNKFKDIKGYRNVYVDFAL

SEQ ID NO: 90242 - protein, 719 aa, Homo sapiens
  Payload ID: 18038
  Gene Name: transglutaminase 5
  ENSP ID: ENSP00000479732
AQGLEVALTDLQSSRNNVRHHTEEITVDHLLVRRGQAFNLTLYFRNRSFQPGLDNIIFVVETGPLPDLALGTRAVFSLARHHSPSPWIAWLETNGATSTEVSLCAPPTAAVGRYLLKIHIDSFQGSVTAYQLGEFILLFNPWCPEDAVYLDSEPQRQEYVMNDYGFIYQGSKNWIRPCPWNYGQFEDKIIDICLKLLDKSLHFQTDPATDCALRGSPVYVSRVVCAMINSNDDNGVLNGNWSENYTDGANPAEWTGSVAILKQWNATGCQPVRYGQCWVFAAVMCTVMRCLGIPTRVITNFDSGHDTDGNLIIDEYYDNTGRILGNKKKDTIWNFHVWNECWMARKDLPPAYGGWQVLDATPQEMSNGVYCCGPASVRAIKEGEVDLNYDTPFVFSMVNADCMSWLVQGGKEQKLHQDTSSVGNFISTKSIQSDERDDITENYKYEEGSLQERQVFLKALQKLKARSFHGSQRGAELQPSRPTSLSQDSPRSLHTPSLRPSDVVQVSLKFKLLDPPNMGQDICFVLLALNMSSQFKDLKVNLSAQSLLHDGSPLSPFWQDTAFITLSPKEAKTYPCKISYSQYSQYLSTDKLIRISALGEEKSSPEKILVNKIITLSYPSITINVLGAAVVNQPLSIQVIFSNPLSEQVEDCVLTVEGSGLFKKQQKVFLGVLKPQHQASIILETVPFKSGQRQIQANMRSNKFKDIKGYRNVYVDFAL

SEQ ID NO: 90243 - protein, 637 aa, Homo sapiens
  Payload ID: 18038
  Gene Name: transglutaminase 5
  ENSP ID: ENSP00000482542
AQGLEVALTDLQSSRNNVRHHTEEITVDHLLVRRGQAFNLTLYFRNRSFQPGLDNIIFVVETEDAVYLDSEPQRQEYVMNDYGFIYQGSKNWIRPCPWNYGQFEDKIIDICLKLLDKSLHFQTDPATDCALRGSPVYVSRVVCAMINSNDDNGVLNGNWSENYTDGANPAEWTGSVAILKQWNATGCQPVRYGQCWVFAAVMCTVMRCLGIPTRVITNFDSGHDTDGNLIIDEYYDNTGRILGNKKKDTIWNFHVWNECWMARKDLPPAYGGWQVLDATPQEMSNGVYCCGPASVRAIKEGEVDLNYDTPFVFSMVNADCMSWLVQGGKEQKLHQDTSSVGNFISTKSIQSDERDDITENYKYEEGSLQERQVFLKALQKLKARSFHGSQRGAELQPSRPTSLSQDSPRSLHTPSLRPSDVVQVSLKFKLLDPPNMGQDICFVLLALNMSSQFKDLKVNLSAQSLLHDGSPLSPFWQDTAFITLSPKEAKTYPCKISYSQYSQYLSTDKLIRISALGEEKSSPEKILVNKIITLSYPSITINVLGAAVVNQPLSIQVIFSNPLSEQVEDCVLTVEGSGLFKKQQKVFLGVLKPQHQASIILETVPFKSGQRQIQANMRSNKFKDIKGYRNVYVDFAL

SEQ ID NO: 90244 - protein, 706 aa, Homo sapiens
  Payload ID: 18039
  Gene Name: transglutaminase 6
  Uniprot ID: O95932
  ENSP ID: ENSP00000202625
MAGIRVTKVDWQRSRNGAAHHTQEYPCPELVVRRGQSFSLTLELSRALDCEEILIFTMETGPRASEALHTKAVFQTSELERGEGWTAAREAQMEKTLTVSLASPPSAVIGRYLLSIRLSSHRKHSNRRLGEFVLLFNPWCAEDDVFLASEEERQEYVLSDSGIIFRGVEKHIRAQGWNYGQFEEDILNICLSILDRSPGHQNNPATDVSCRHNPIYVTRVISAMVNSNNDRGVVQGQWQGKYGGGTSPLHWRGSVAILQKWLKGRYKPVKYGQCWVFAGVLCTVLRCLGIATRVVSNFNSAHDTDQNLSVDKYVDSFGRTLEDLTEDSMWNFHVWNESWFARQDLGPSYNGWQVLDATPQEESEGVFRCGPASVTAIREGDVHLAHDGPFVFAEVNADYITWLWHEDESRERVYSNTKKIGRCISTKAVGSDSRVDITDLYKYPEGSRKERQVYSKAVNRLFGVEASGRRIWIRRAGGRCLWRDDLLEPATKPSIAGKFKVLEPPMLGHDLRLALCLANLTSRAQRVRVNLSGATILYTRKPVAEILHESHAVRLGPQEEKRIPITISYSKYKEDLTEDKKILLAAMCLVTKGEKLLVEKDITLEDFITIKVLGPAMVGVAVTVEVTVVNPLIERVKDCALMVEGSGLLQEQLSIDVPTLEPQERASVQFDITPSKSGPRQLQVDLVSPHFPDIKGFVIVHVATAK

SEQ ID NO: 90245 - protein, 625 aa, Homo sapiens
  Payload ID: 18039
  Gene Name: transglutaminase 6
  Uniprot ID: O95932
  ENSP ID: ENSP00000370831
MAGIRVTKVDWQRSRNGAAHHTQEYPCPELVVRRGQSFSLTLELSRALDCEEILIFTMETGPRASEALHTKAVFQTSELERGEGWTAAREAQMEKTLTVSLASPPSAVIGRYLLSIRLSSHRKHSNRRLGEFVLLFNPWCAEDDVFLASEEERQEYVLSDSGIIFRGVEKHIRAQGWNYGQFEEDILNICLSILDRSPGHQNNPATDVSCRHNPIYVTRVISAMVNSNNDRGVVQGQWQGKYGGGTSPLHWRGSVAILQKWLKGRYKPVKYGQCWVFAGVLCTVLRCLGIATRVVSNFNSAHDTDQNLSVDKYVDSFGRTLEDLTEDSMWNFHVWNESWFARQDLGPSYNGWQVLDATPQEESEGVFRCGPASVTAIREGDVHLAHDGPFVFAEVNADYITWLWHEDESRERVYSNTKKIGRCISTKAVGSDSRVDITDLYKYPEGSRKERQVYSKAVNRLFGVEASGRRIWIRRAGGRCLWRDDLLEPATKPSIAGKFKVLEPPMLGHDLRLALCLANLTSRAQRVRVNLSGATILYTRKPVAEILHESHAVRLGPQEEKRIPITISYSKYKEDLTEDKKILLAAMCLVTKGEKLLVEKDITLEDFITIKRAYPGASGEGLSPV

SEQ ID NO: 90246 - protein, 710 aa, Homo sapiens
  Payload ID: 18040
  Gene Name: transglutaminase 7
  Uniprot ID: Q96PF1
  ENSP ID: ENSP00000389466
MDQVATLRLESVDLQSSRNNKEHHTQEMGVKRLTVRRGQPFYLRLSFSRPFQSQNDHITFVAETGPKPSELLGTRATFFLTRVQPGNVWSASDFTIDSNSLQVSLFTPANAVIGHYTLKIEISQGQGHSVTYPLGTFILLFNPWSPEDDVYLPSEILLQEYIMRDYGFVYKGHERFITSWPWNYGQFEEDIIDICFEILNKSLYHLKNPAKDCSQRNDVVYVCRVVSAMINSNDDNGVLQGNWGEDYSKGVSPLEWKGSVAILQQWSARGGQPVKYGQCWVFASVMCTVMRCLGVPTRVVSNFRSAHNVDRNLTIDTYYDRNAEMLSTQKRDKIWNFHVWNECWMIRKDLPPGYNGWQVLDPTPQQTSSGLFCCGPASVKAIREGDVHLAYDTPFVYAEVNADEVIWLLGDGQAQEILAHNTSSIGKEISTKMVGSDQRQSITSSYKYPEGSPEERAVFMKASRKMLGPQRASLPFLDLLESGGLRDQPAQLQLHLARIPEWGQDLQLLLRIQRVPDSTHPRGPIGLVVRFCAQALLHGGGTQKPFWRHTVRMNLDFGKETQWPLLLPYSNYRNKLTDEKLIRVSGIAEVEETGRSMLVLKDICLEPPHLSIEVSERAEVGKALRVHVTLTNTLMVALSSCTMVLEGSGLINGQIAKDLGTLVAGHTLQIQLDLYPTKAGPRQLQVLISSNEVKEIKGYKDIFVTVAGAP

SEQ ID NO: 90247 - protein, 479 aa, Homo sapiens
  Payload ID: 18041
  Gene Name: trans-golgi network protein 2
  ENSP ID: ENSP00000282120
MRFVVALVLLNVAAAGAVPLLATESVKQEEAGVRPSAGNVSTHPSLSQRPGGSTKSHPEPQTPKDSPSKSSAEAQTPEDTPNKSGAEAKTQKDSSNKSGAEAKTQKGSTSKSGSEAQTTKDSTSKSHPELQTPKDSTGKSGAEAQTPEDSPNRSGAEAKTQKDSPSKSGSEAQTTKDVPNKSGADGQTPKDGSSKSGAEDQTPKDVPNKSGAEKQTPKDGSNKSGAEEQGPIDGPSKSGAEEQTSKDSPNKVVPEQPSRKDHSKPISNPSDNKELPKADTNQLADKGKLSPHAFKTESGEETDLISPPQEEVKSSEPTEDVEPKEAEDDDTGPEEGSPPKEEKEKMSGSASSENREGTLSDSTGSEKDDLYPNGSGNGSAESSHFFAYLVTAAILVAVLYIAHHNKRKIIAFVLEGKRSKVTRRPKASDYQRLDQKYVLILNVFPAPPKRSFFPVLTEWYIPLEKDERHQWIVLLSFQL

SEQ ID NO: 90248 - protein, 437 aa, Homo sapiens
  Payload ID: 18041
  Gene Name: trans-golgi network protein 2
  Uniprot ID: O43493
  ENSP ID: ENSP00000366603
MRFVVALVLLNVAAAGAVPLLATESVKQEEAGVRPSAGNVSTHPSLSQRPGGSTKSHPEPQTPKDSPSKSSAEAQTPEDTPNKSGAEAKTQKDSSNKSGAEAKTQKGSTSKSGSEAQTTKDSTSKSHPELQTPKDSTGKSGAEAQTPEDSPNRSGAEAKTQKDSPSKSGSEAQTTKDVPNKSGADGQTPKDGSSKSGAEDQTPKDVPNKSGAEKQTPKDGSNKSGAEEQGPIDGPSKSGAEEQTSKDSPNKVVPEQPSRKDHSKPISNPSDNKELPKADTNQLADKGKLSPHAFKTESGEETDLISPPQEEVKSSEPTEDVEPKEAEDDDTGPEEGSPPKEEKEKMSGSASSENREGTLSDSTGSEKDDLYPNGSGNGSAESSHFFAYLVTAAILVAVLYIAHHNKRKIIAFVLEGKRSKVTRRPKASDYQRLDQKS

SEQ ID NO: 90249 - protein, 379 aa, Homo sapiens
  Payload ID: 18041
  Gene Name: trans-golgi network protein 2
  Uniprot ID: O43493
  ENSP ID: ENSP00000381312
MRFVVALVLLNVAAAGAVPLLATESVKQEEAGVRPSAGNVSTHPSLSQRPGGSTKSHPEPQTPKDSPSKSSAEAQTPEDTPNKSGAEAKTQKDSSNKSGAEAKTQKGSTSKSGSEAQTTKDSTSKSHPELQTPKDSTGKSGAEAQTPEDSPNRSGAEAKTQKDSPSKSGSEAQTTKDVPNKSGADGQTPKDGSSKSGAEDQTPKDVPNKSGAEKQTPKDGSNKSGAEEQGPIDGPSKSGAEEQTSKDSPNKEEVKSSEPTEDVEPKEAEDDDTGPEEGSPPKEEKEKMSGSASSENREGTLSDSTGSEKDDLYPNGSGNGSAESSHFFAYLVTAAILVAVLYIAHHNKRKIIAFVLEGKRSKVTRRPKASDYQRLDQKS

SEQ ID NO: 90250 - protein, 453 aa, Homo sapiens
  Payload ID: 18041
  Gene Name: trans-golgi network protein 2
  Uniprot ID: O43493
  ENSP ID: ENSP00000386443
MRFVVALVLLNVAAAGAVPLLATESVKQEEAGVRPSAGNVSTHPSLSQRPGGSTKSHPEPQTPKDSPSKSSAEAQTPEDTPNKSGAEAKTQKDSSNKSGAEAKTQKGSTSKSGSEAQTTKDSTSKSHPELQTPKDSTGKSGAEAQTPEDSPNRSGAEAKTQKDSPSKSGSEAQTTKDVPNKSGADGQTPKDGSSKSGAEDQTPKDVPNKSGAEKQTPKDGSNKSGAEEQGPIDGPSKSGAEEQTSKDSPNKVVPEQPSRKDHSKPISNPSDNKELPKADTNQLADKGKLSPHAFKTESGEETDLISPPQEEVKSSEPTEDVEPKEAEDDDTGPEEGSPPKEEKEKMSGSASSENREGTLSDSTGSEKDDLYPNGSGNGSAESSHFFAYLVTAAILVAVLYIAHHNKRKIIAFVLEGKRSKVTRRPKASDYQRLDQKIFFPLSPNRMVYSSGKR

SEQ ID NO: 90251 - protein, 454 aa, Homo sapiens
  Payload ID: 18041
  Gene Name: trans-golgi network protein 2
  ENSP ID: ENSP00000387035
MRFVVALVLLNVAAAGAVPLLATESVKQEEAGVRPSAGNVSTHPSLSQRPGGSTKSHPEPQTPKDSPSKSSAEAQTPEDTPNKSGAEAKTQKDSSNKSGAEAKTQKGSTSKSGSEAQTTKDSTSKSHPELQTPKDSTGKSGAEAQTPEDSPNRSGAEAKTQKDSPSKSGSEAQTTKDVPNKSGADGQTPKDGSSKSGAEDQTPKDVPNKSGAEKQTPKDGSNKSGAEEQGPIDGPSKSGAEEQTSKDSPNKVVPEQPSRKDHSKPISNPSDNKELPKADTNQLADKGKLSPHAFKTESGEETDLISPPQEEVKSSEPTEDVEPKEAEDDDTGPEEGSPPKEEKEKMSGSASSENREGTLSDSTGSEKDDLYPNGSGNGSAESSHFFAYLVTAAILVAVLYIAHHNKRKIIAFVLEGKRSKVTRRPKASDYQRLDQKYVLILNVFPAPPKRSFFP

SEQ ID NO: 90252 - protein, 447 aa, Homo sapiens
  Payload ID: 18041
  Gene Name: trans-golgi network protein 2
  Uniprot ID: O43493
  ENSP ID: ENSP00000391190
MRFVVALVLLNVAAAGAVPLLATESVKQEEAGVRPSAGNVSTHPSLSQRPGGSTKSHPEPQTPKDSPSKSSAEAQTPEDTPNKSGAEAKTQKDSSNKSGAEAKTQKGSTSKSGSEAQTTKDSTSKSHPELQTPKDSTGKSGAEAQTPEDSPNRSGAEAKTQKDSPSKSGSEAQTTKDVPNKSGADGQTPKDGSSKSGAEDQTPKDVPNKSGAEKQTPKDGSNKSGAEEQGPIDGPSKSGAEEQTSKDSPNKVVPEQPSRKDHSKPISNPSDNKELPKADTNQLADKGKLSPHAFKTESGEETDLISPPQEEVKSSEPTEDVEPKEAEDDDTGPEEGSPPKEEKEKMSGSASSENREGTLSDSTGSEKDDLYPNGSGNGSAESSHFFAYLVTAAILVAVLYIAHHNKRKIIAFVLEGKRSKVTRRPKASDYQRLDQKVRKEEPGPWEG

SEQ ID NO: 90253 - protein, 213 aa, Homo sapiens
  Payload ID: 18042
  Gene Name: trans-golgi network vesicle protein 23 homolog A (S. cerevisiae)
  Uniprot ID: A6NH52
  ENSP ID: ENSP00000299866
MKQALVDDTEDVSLDFGNEEELAFRKAKIRHPLATFFHLFFRVSAIVTYVSCDWFSKSFVGCFVMVLLLLSLDFWSVKNVTGRLLVGLRWWNQIDEDGKSHWIFEARKVSPNSIAATEAEARIFWLGLIICPMIWIVFFFSTLFSLKLKWLALVVAGISLQAANLYGYILCKMGGNSDIGKVTASFLSQTVFQTACPGDFQKPGLEGLEIHQH

SEQ ID NO: 90254 - protein, 188 aa, Homo sapiens
  Payload ID: 18042
  Gene Name: trans-golgi network vesicle protein 23 homolog A (S. cerevisiae)
  Uniprot ID: A6NH52
  ENSP ID: ENSP00000411972
MKQALVDDTEDVSLDFGNEEELAFRKAKIRDRVSKLLASVILLPWPPKVLGLKNVTGRLLVGLRWWNQIDEDGKSHWIFEARKVSPNSIAATEAEARIFWLGLIICPMIWIVFFFSTLFSLKLKWLALVVAGISLQAANLYGYILCKMGGNSDIGKVTASFLSQTVFQTACPGDFQKPGLEGLEIHQH

SEQ ID NO: 90255 - protein, 37 aa, Homo sapiens
  Payload ID: 18042
  Gene Name: trans-golgi network vesicle protein 23 homolog A (S. cerevisiae)
  ENSP ID: ENSP00000458488
MKQALVDDTEDVSLDFGNEEELAFRKAKIRNTHSPMT

SEQ ID NO: 90256 - protein, 213 aa, Homo sapiens; identical to SEQ ID NO: 90253
  Payload ID: 18042
  Gene Name: trans-golgi network vesicle protein 23 homolog A (S. cerevisiae)
  Uniprot ID: A6NH52
  ENSP ID: ENSP00000460567

SEQ ID NO: 90257 - protein, 150 aa, Homo sapiens
  Payload ID: 18042
  Gene Name: trans-golgi network vesicle protein 23 homolog A (S. cerevisiae)
  ENSP ID: ENSP00000460822
VMVLLLLSLDFWSVKNVTGRLLVGLRWWNQIDEDGKSHWIFEARKVSPNSIAATEAEARIFWLGLIICPMIWIVFFFSTLFSLKLKWLALVVAGISLQAANLYGYILCKMGGNSDIGKVTASFLSQTVFQTACPGDFQKPGLEGLEIHQH

SEQ ID NO: 90258 - protein, 62 aa, Homo sapiens
  Payload ID: 18042
  Gene Name: trans-golgi network vesicle protein 23 homolog A (S. cerevisiae)
  ENSP ID: ENSP00000461067
VSPNSIAATEAEARIFWLGLIICPMIWIVFFFSTLFSLKLKWLACPGDFQKPGLEGLEIHQH

SEQ ID NO: 90259 - protein, 153 aa, Homo sapiens
  Payload ID: 18042
  Gene Name: trans-golgi network vesicle protein 23 homolog A (S. cerevisiae)
  ENSP ID: ENSP00000482095
  MOD_RES (1)..(1): Any amino acid
XDWFSKSFVGCFVMVLLLLSLDFWSVKNVTGRLLVGLRWWNQIDEDGKSHWIFEARKVSPNSIAATEAEARIFWLGLIICPMIWIVFFFSTLFSLKLKWLALVVAGISLQAANLYGYILCKMGGNSDIGKVTASFLSQTVFQTAFLSSQAEMA

SEQ ID NO: 90260 - protein, 213 aa, Homo sapiens; identical to SEQ ID NO: 90253
  Payload ID: 18042
  Gene Name: trans-golgi network vesicle protein 23 homolog A (S. cerevisiae)
  Uniprot ID: A6NH52
  ENSP ID: ENSP00000482891

SEQ ID NO: 90261 - protein, 205 aa, Homo sapiens
  Payload ID: 18043
  Gene Name: trans-golgi network vesicle protein 23 homolog B (S. cerevisiae)
  Uniprot ID: Q9NYZ1
  ENSP ID: ENSP00000305654
MLQQDSNDDTEDVSLFDAEEETTNRPRKAKIRHPVASFFHLFFRVSAIIVYLLCGLLSSSFITCMVTIILLLSCDFWAVKNVTGRLMVGLRWWNHIDEDGKSHWVFESRKESSQENKTVSEAESRIFWLGLIACPVLWVIFAFSALFSFRVKWLAVVIMGVVLQGANLYGYIRCKVRSRKHLTSMATSYFGKQFLRQNTGDDQTS

SEQ ID NO: 90262 - protein, 53 aa, Homo sapiens
  Payload ID: 18043
  Gene Name: trans-golgi network vesicle protein 23 homolog B (S. cerevisiae)
  ENSP ID: ENSP00000460239
MLQQDSNDDTEDVSLFDAEEETTNRPRKAKIRHPVASFFHLFFRVSAIIVYLL

SEQ ID NO: 90263 - protein, 37 aa, Homo sapiens
  Payload ID: 18043
  Gene Name: trans-golgi network vesicle protein 23 homolog B (S. cerevisiae)
  ENSP ID: ENSP00000460797
MLQQDSNDDTEDVSLFDAEEETTNRPRKAKIRMSQVD

SEQ ID NO: 90264 - protein, 203 aa, Homo sapiens
  Payload ID: 18043
  Gene Name: trans-golgi network vesicle protein 23 homolog B (S. cerevisiae)
  ENSP ID: ENSP00000462334
MLQQDSNDDTEDVSLFDAEEETTNRPRKAKIRHPVASFFHLFFRVSAIIVYLLCGLLSSSFITCMVTIILLLSCDFWAVKNVTGRLMVGLRWWNHIDEDGKSHWVFESRKESSQENKTVSEAESRIFWLGLIACPVLWVIFAFSALFSFRVKWLAVVIMGVVLQGANLYGYIRCKVRSRKHLTSMATSYFGKQFLRQVSVFWM

SEQ ID NO: 90265 - protein, 141 aa, Homo sapiens
  Payload ID: 18043
  Gene Name: trans-golgi network vesicle protein 23 homolog B (S. cerevisiae)
  ENSP ID: ENSP00000463400
MVTIILLLSCDFWAVKNVTGRLMVGLRWWNHIDEDGKSHWVFESRKESSQENKTVSEAESRIFWLGLIACPVLWVIFAFSALFSFRVKWLAVVIMGVVLQGANLYGYIRCKVRSRKHLTSMATSYFGKQFLRQNTGDDQTS

SEQ ID NO: 90266 - protein, 141 aa, Homo sapiens; identical to SEQ ID NO: 90265
  Payload ID: 18043
  Gene Name: trans-golgi network vesicle protein 23 homolog B (S. cerevisiae)
  ENSP ID: ENSP00000465872

SEQ ID NO: 90267 - protein, 132 aa, Homo sapiens
  Payload ID: 18043
  Gene Name: trans-golgi network vesicle protein 23 homolog B (S. cerevisiae)
  ENSP ID: ENSP00000467001
MVTIILLLSCDFWAVKNVTGRLMVGLRWWNHIDEDGKSHWVFESRKESSQENKTVSEAESRIFWLGLIACPVLWVIFAFSALFSFRVKWLAVVIMGVVLQGANLYGYIRCKVRSRKHLTSMATSYFGKQFLR

SEQ ID NO: 90268 - protein, 276 aa, Homo sapiens
  Payload ID: 18044
  Gene Name: trans-golgi network vesicle protein 23 homolog C (S. cerevisiae)
  Uniprot ID: Q96ET8
  ENSP ID: ENSP00000225576
MLQQDSNDDTEDVSLFDAEEETTNRPRKAKIRHPVASFFHLFFRVSAIIVCLLCELLSSSFITCMVTIILLLSCDFWAVKNVTGRLMVGLRWWNHIDEDGKSHWVFESRKESSQENKTVSEAESRIFWLGLIACSVLWVIFAFSALFSFTVKWLRRSRHIAQTGLKVLGSRDPPASAFQSAGITGVSRCPGHPSRKFHQVDINSFTRITDRALYWKPAPRLSSPPLRAAPGNCQQMAPARLFLSLRLWAWRGGGESPNSRGTGEPGPKFHLASGMH

SEQ ID NO: 90269 - protein, 205 aa, Homo sapiens
  Payload ID: 18044
  Gene Name: trans-golgi network vesicle protein 23 homolog C (S. cerevisiae)
  ENSP ID: ENSP00000406387
MLQQDSNDDTEDVSLFDAEEETTNRPRKAKIRHPVASFFHLFFRVSAIIVCLLCELLSSSFITCMVTIILLLSCDFWAVKNVTGRLMVGLRWWNHIDEDGKSHWVFESRKESSQENKTVSEAESRIFWLGLIACSVLWVIFAFSALFSFTVKWLAVVIMGVVLQGANLYGYIRCKVRSRKHLTSMATSYFGKQFLRQNTGDDQTS

SEQ ID NO: 90270 - protein, 110 aa, Homo sapiens
  Payload ID: 18044
  Gene Name: trans-golgi network vesicle protein 23 homolog C (S. cerevisiae)
  ENSP ID: ENSP00000409988
MVTIILLLSCDFWAVKNVTGRLMVGLRWWNHIDEDGKSHWVFESRKESSQENKTVSEAESRIFWLGLIACSVLWVIFAFSALFSFTVKWLAVVIMGVVLQGANLYGYIRC

SEQ ID NO: 90271 - protein, 205 aa, Homo sapiens; identical to SEQ ID NO: 90269
  Payload ID: 18044
  Gene Name: trans-golgi network vesicle protein 23 homolog C (S. cerevisiae)
  ENSP ID: ENSP00000413355

SEQ ID NO: 90272 - protein, 37 aa, Homo sapiens; identical to SEQ ID NO: 90263
  Payload ID: 18044
  Gene Name: trans-golgi network vesicle protein 23 homolog C (S. cerevisiae)
  ENSP ID: ENSP00000428373

SEQ ID NO: 90273 - protein, 53 aa, Homo sapiens
  Payload ID: 18044
  Gene Name: trans-golgi network vesicle protein 23 homolog C (S. cerevisiae)
  ENSP ID: ENSP00000428748
MLQQDSNDDTEDVSLFDAEEETTNRPRKAKIRHPVASFFHLFFRVSAIIVCLL

SEQ ID NO: 90274 - protein, 141 aa, Homo sapiens
  Payload ID: 18044
  Gene Name: trans-golgi network vesicle protein 23 homolog C (S. cerevisiae)
  ENSP ID: ENSP00000463371
MVTIILLLSCDFWAVKNVTGRLMVGLRWWNHIDEDGKSHWVFESRKESSQENKTVSEAESRIFWLGLIACSVLWVIFAFSALFSFTVKWLAVVIMGVVLQGANLYGYIRCKVRSRKHLTSMATSYFGKQFLRQNTGDDQTS

SEQ ID NO: 90275 - protein, 203 aa, Homo sapiens
  Payload ID: 18044
  Gene Name: trans-golgi network vesicle protein 23 homolog C (S. cerevisiae)
  Uniprot ID: Q96ET8
  ENSP ID: ENSP00000464052
MLQQDSNDDTEDVSLFDAEEETTNRPRKAKIRHPVASFFHLFFRVSAIIVCLLCELLSSSFITCMVTIILLLSCDFWAVKNVTGRLMVGLRWWNHIDEDGKSHWVFESRKESSQENKTVSEAESRIFWLGLIACSVLWVIFAFSALFSFTVKWLAVVIMGVVLQGANLYGYIRCKVRSRKHLTSMATSYFGKQFLRQVSVFWM

SEQ ID NO: 90276 - protein, 60 aa, Homo sapiens
  Payload ID: 18044
  Gene Name: trans-golgi network vesicle protein 23 homolog C (S. cerevisiae)
  ENSP ID: ENSP00000465522
ESSQENKTVSEAESRIFWLGLIACSVLWVIFAFSALFSFTVKWLVTVFGDRTFKDMIKIK

SEQ ID NO: 90277 - protein, 1119 aa, Homo sapiens
  Payload ID: 18045
  Gene Name: transient receptor potential cation channel, subfamily A, member 1
  Uniprot ID: O75762
  ENSP ID: ENSP00000262209
MKRSLRKMWRPGEKKEPQGVVYEDVPDDTEDFKESLKVVFEGSAYGLQNFNKQKKLKRCDDMDTFFLHYAAAEGQIELMEKITRDSSLEVLHEMDDYGNTPLHCAVEKNQIESVKFLLSRGANPNLRNFNMMAPLHIAVQGMNNEVMKVLLEHRTIDVNLEGENGNTAVIIACTTNNSEALQILLKKGAKPCKSNKWGCFPIHQAAFSGSKECMEIILRFGEEHGYSRQLHINFMNNGKATPLHLAVQNGDLEMIKMCLDNGAQIDPVEKGRCTAIHFAATQGATEIVKLMISSYSGSVDIVNTTDGCHETMLHRASLFDHHELADYLISVGADINKIDSEGRSPLILATASASWNIVNLLLSKGAQVDIKDNFGRNFLHLTVQQPYGLKNLRPEFMQMQQIKELVMDEDNDGCTPLHYACRQGGPGSVNNLLGFNVSIHSKSKDKKSPLHFAASYGRINTCQRLLQDISDTRLLNEGDLHGMTPLHLAAKNGHDKVVQLLLKKGALFLSDHNGWTALHHASMGGYTQTMKVILDTNLKCTDRLDEDGNTALHFAAREGHAKAVALLLSHNADIVLNKQQASFLHLALHNKRKEVVLTIIRSKRWDECLKIFSHNSPGNKCPITEMIEYLPECMKVLLDFCMLHSTEDKSCRDYYIEYNFKYLQCPLEFTKKTPTQDVIYEPLTALNAMVQNNRIELLNHPVCKEYLLMKWLAYGFRAHMMNLGSYCLGLIPMTILVVNIKPGMAFNSTGIINETSDHSEILDTTNSYLIKTCMILVFLSSIFGYCKEAGQIFQQKRNYFMDISNVLEWIIYTTGIIFVLPLFVEIPAHLQWQCGAIAVYFYWMNFLLYLQRFENCGIFIVMLEVILKTLLRSTVVFIFLLLAFGLSFYILLNLQDPFSSPLLSIIQTFSMMLGDINYRESFLEPYLRNELAHPVLSFAQLVSFTIFVPIVLMNLLIGLAVGDIAEVQKHASLKRIAMQVELHTSLEKKLPLWFLRKVDQKSTIVYPNKPRSGGMLFHIFCFLFCTGEIRQEIPNADKSLEMEILKQKYRLKDLTFLLEKQHELIKLIIQKMEIISETEDDDSHCSFQDRFKKEQMEQRNSRWNTVLRAVKAKTHHLEP

SEQ ID NO: 90278 - protein, 916 aa, Homo sapiens
  Payload ID: 18045
  Gene Name: transient receptor potential cation channel, subfamily A, member 1
  ENSP ID: ENSP00000428151
VLLEHRTIDVNLEGENGNTAVIIACTTNNSEALQILLKKGAKPCKSNKWGCFPIHQAAFSGSKECMEIILRFGEEHGYSRQLHINFMNNGKATPLHLAVQNGDLEMIKMCLDNGAQIDPVEKGRCTAIHFAATQGATEIVKLMISSYSGSVDIVNTTDGCHETMLHRASLFDHHELADYLISVGADINKIDSEGRSPLILATASASWNIVNLLLSKGAQVDIKDNFGRNFLHLTVQQPYGLKNLRPEFMQMQQIKELVMDEDNDGCTPLHYACRQGGPGSVNNLLGFNVSIHSKSKDKKSPLHFAASYGRINTCQRLLQDISDTRLLNEGDLHGMTPLHLAAKNGHDKVVQLLLKKGALFLSDHNGWTALHHASMGGYTQTMKVILDTNLKCTDRLDEDGNTALHFAAREGHAKAVALLLSHNADIVLNKQQASFLHLALHNKRKEVVLTIIRSKRWDECLKIFSHNSPGNKCPITEMIEYLPECMKVLLDFCMLHSTEDKSCRDYYIEYNFKYLQCPLEFTKKTPTQDVIYEPLTALNAMVQNNRIELLNHPVCKEYLLMKWLAYGFRAHMMNLGSYCLGLIPMTILVVNIKPGMAFNSTGIINETSDHSEILDTTNSYLIKTCMILVFLSSIFGYCKEAGQIFQQKRNYFMDISNVLEWIIYTTGIIFVLPLFVEIPAHLQWQCGAIAVYFYWMNFLLYLQRFENCGIFIVMLEVILKTLLRSTVVFIFLLLAFGLSFYILLNLQDPFSSPLLSIIQTFSMMLGDINYRESFLEPYLRNELAHPVLSFAQLVSFTIFVPIVLMNLLIGLAVGDIAEVQKHASLKRIAMQVELHTSLEKKLPLWFLRKVDQKSTIVYPNKPRSGGMLFHIFCFLFCTGEIRQEIPNADKSLEMEILKQKYRKTTCAFVLTLIPVG

SEQ ID NO: 90279 - protein, 759 aa, Homo sapiens
  Payload ID: 18046
  Gene Name: transient receptor potential cation channel, subfamily C, member 1
  Uniprot ID: P48995
  ENSP ID: ENSP00000273482
MMAALYPSTDLSGASSSSLPSSPSSSSPNEVMALKDVREVKEENTLNEKLFLLACDKGDYYMVKKILEENSSGDLNINCVDVLGRNAVTITIENENLDILQLLLDYGCQKLMERIQNPEYSTTMDVAPVILAAHRNNYEILTMLLKQDVSLPKPHAVGCECTLCSAKNKKDSLRHSRFRLDIYRCLASPALIMLTEEDPILRAFELSADLKELSLVEVEFRNDYEELARQCKMFAKDLLAQARNSRELEVILNHTSSDEPLDKRGLLEERMNLSRLKLAIKYNQKEFVSQSNCQQFLNTVWFGQMSGYRRKPTCKKIMTVLTVGIFWPVLSLCYLIAPKSQFGRIIHTPFMKFIIHGASYFTFLLLLNLYSLVYNEDKKNTMGPALERIDYLLILWIIGMIWSDIKRLWYEGLEDFLEESRNQLSFVMNSLYLATFALKVVAHNKFHDFADRKDWDAFHPTLVAEGLFAFANVLSYLRLFFMYTTSSILGPLQISMGQMLQDFGKFLGMFLLVLFSFTIGLTQLYDKGYTSKEQKDCVGIFCEQQSNDTFHSFIGTCFALFWYIFSLAHVAIFVTRFSYGEELQSFVGAVIVGTYNVVVVIVLTKLLVAMLHKSFQLIANHEDKEWKFARAKLWLSYFDDKCTLPPPFNIIPSPKTICYMISSLSKWICSHTSKGKVKRQNSLKEWRNLKQKRDENYQKVMCCLVHRYLTSMRQKMQSTDQATVENLNELRQDLSKFRNEIRDLLGFRTSKYAMFYPRN

SEQ ID NO: 90280 - protein, 65 aa, Homo sapiens
  Payload ID: 18046
  Gene Name: transient receptor potential cation channel, subfamily C, member 1
  ENSP ID: ENSP00000418708
  MOD_RES (1)..(1): Any amino acid
XAALYPSTDLSGASSSSLPSSPSSSSPNEVMALKDVREVKEENTLNEKLFLLACDKETNGTNSES

SEQ ID NO: 90281 - protein, 793 aa, Homo sapiens
  Payload ID: 18046
  Gene Name: transient receptor potential cation channel, subfamily C, member 1
  Uniprot ID: P48995
  ENSP ID: ENSP00000419313
MMAALYPSTDLSGASSSSLPSSPSSSSPNEVMALKDVREVKEENTLNEKLFLLACDKGDYYMVKKILEENSSGDLNINCVDVLGRNAVTITIENENLDILQLLLDYGCQSADALLVAIDSEVVGAVDILLNHRPKRSSRPTIVKLMERIQNPEYSTTMDVAPVILAAHRNNYEILTMLLKQDVSLPKPHAVGCECTLCSAKNKKDSLRHSRFRLDIYRCLASPALIMLTEEDPILRAFELSADLKELSLVEVEFRNDYEELARQCKMFAKDLLAQARNSRELEVILNHTSSDEPLDKRGLLEERMNLSRLKLAIKYNQKEFVSQSNCQQFLNTVWFGQMSGYRRKPTCKKIMTVLTVGIFWPVLSLCYLIAPKSQFGRIIHTPFMKFIIHGASYFTFLLLLNLYSLVYNEDKKNTMGPALERIDYLLILWIIGMIWSDIKRLWYEGLEDFLEESRNQLSFVMNSLYLATFALKVVAHNKFHDFADRKDWDAFHPTLVAEGLFAFANVLSYLRLFFMYTTSSILGPLQISMGQMLQDFGKFLGMFLLVLFSFTIGLTQLYDKGYTSKEQKDCVGIFCEQQSNDTFHSFIGTCFALFWYIFSLAHVAIFVTRFSYGEELQSFVGAVIVGTYNVVVVIVLTKLLVAMLHKSFQLIANHEDKEWKFARAKLWLSYFDDKCTLPPPFNIIPSPKTICYMISSLSKWICSHTSKGKVKRQNSLKEWRNLKQKRDENYQKVMCCLVHRYLTSMRQKMQSTDQATVENLNELRQDLSKFRNEIRDLLGFRTSKYAMFYPRN

SEQ ID NO: 90282 - protein, 759 aa, Homo sapiens; identical to SEQ ID NO: 90279
  Payload ID: 18046
  Gene Name: transient receptor potential cation channel, subfamily C, member 1
  Uniprot ID: P48995
  ENSP ID: ENSP00000481537

SEQ ID NO: 90283 - protein, 848 aa, Homo sapiens
  Payload ID: 18047
  Gene Name: transient receptor potential cation channel, subfamily C, member 3
  Uniprot ID: Q13507
  ENSP ID: ENSP00000264811
MEGSPSLRRMTVMREKGRRQAVRGPAFMFNDRGTSLTAEEERFLDAAEYGNIPVVRKMLEESKTLNVNCVDYMGQNALQLAVGNEHLEVTELLLKKENLARIGDALLLAISKGYVRIVEAILNHPGFAASKRLTLSPCEQELQDDDFYAYDEDGTRFSPDITPIILAAHCQKYEVVHMLLMKGARIERPHDYFCKCGDCMEKQRHDSFSHSRSRINAYKGLASPAYLSLSSEDPVLTALELSNELAKLANIEKEFKNDYRKLSMQCKDFVVGVLDLCRDSEEVEAILNGDLESAEPLEVHRHKASLSRVKLAIKYEVKKFVAHPNCQQQLLTIWYENLSGLREQTIAIKCLVVLVVALGLPFLAIGYWIAPCSRLGKILRSPFMKFVAHAASFIIFLGLLVFNASDRFEGITTLPNITVTDYPKQIFRVKTTQFTWTEMLIMVWVLGMMWSECKELWLEGPREYILQLWNVLDFGMLSIFIAAFTARFLAFLQATKAQQYVDSYVQESDLSEVTLPPEIQYFTYARDKWLPSDPQIISEGLYAIAVVLSFSRIAYILPANESFGPLQISLGRTVKDIFKFMVLFIMVFFAFMIGMFILYSYYLGAKVNAAFTTVEESFKTLFWSIFGLSEVTSVVLKYDHKFIENIGYVLYGIYNVTMVVVLLNMLIAMINSSYQEIEDDSDVEWKFARSKLWLSYFDDGKTLPPPFSLVPSPKSFVYFIMRIVNFPKCRRRRLQKDIEMGMGNSKSRLNLFTQSNSRVFESHSFNSILNQPTRYQQIMKRLIKRYVLKAQVDKENDEVNEGELKEIKQDISSLRYELLEDKSQATEELAILIHKLSEKLNPSMLRCE

SEQ ID NO: 90284 - protein, 921 aa, Homo sapiens
  Payload ID: 18047
  Gene Name: transient receptor potential cation channel, subfamily C, member 3
  Uniprot ID: Q13507
  ENSP ID: ENSP00000368966
MSTKVRKCKEQARVTFPAPEEEEDEGEDEGAEPQRRRRGWRGVNGGLEPRSAPSQREPHGYCPPPFSHGPDLSMEGSPSLRRMTVMREKGRRQAVRGPAFMFNDRGTSLTAEEERFLDAAEYGNIPVVRKMLEESKTLNVNCVDYMGQNALQLAVGNEHLEVTELLLKKENLARIGDALLLAISKGYVRIVEAILNHPGFAASKRLTLSPCEQELQDDDFYAYDEDGTRFSPDITPIILAAHCQKYEVVHMLLMKGARIERPHDYFCKCGDCMEKQRHDSFSHSRSRINAYKGLASPAYLSLSSEDPVLTALELSNELAKLANIEKEFKNDYRKLSMQCKDFVVGVLDLCRDSEEVEAILNGDLESAEPLEVHRHKASLSRVKLAIKYEVKKFVAHPNCQQQLLTIWYENLSGLREQTIAIKCLVVLVVALGLPFLAIGYWIAPCSRLGKILRSPFMKFVAHAASFIIFLGLLVFNASDRFEGITTLPNITVTDYPKQIFRVKTTQFTWTEMLIMVWVLGMMWSECKELWLEGPREYILQLWNVLDFGMLSIFIAAFTARFLAFLQATKAQQYVDSYVQESDLSEVTLPPEIQYFTYARDKWLPSDPQIISEGLYAIAVVLSFSRIAYILPANESFGPLQISLGRTVKDIFKFMVLFIMVFFAFMIGMFILYSYYLGAKVNAAFTTVEESFKTLFWSIFGLSEVTSVVLKYDHKFIENIGYVLYGIYNVTMVVVLLNMLIAMINSSYQEIEDDSDVEWKFARSKLWLSYFDDGKTLPPPFSLVPSPKSFVYFIMRIVNFPKCRRRRLQKDIEMGMGNSKSRLNLFTQSNSRVFESHSFNSILNQPTRYQQIMKRLIKRYVLKAQVDKENDEVNEGELKEIKQDISSLRYELLEDKSQATEELAILIHKLSEKLNPSMLRCE

SEQ ID NO: 90285 - protein, 93 aa, Homo sapiens
  Payload ID: 18047
  Gene Name: transient receptor potential cation channel, subfamily C, member 3
  ENSP ID: ENSP00000422214
MEGSPSLRRMTVMREKGRRQAVRGPAFMFNDRGTSLTAEEERFLDAAEYGNIPVVRKMLEESKTLNVNCVDYMGQNALQLAVGNEHLEVTELL

SEQ ID NO: 90286 - protein, 276 aa, Homo sapiens
  Payload ID: 18047
  Gene Name: transient receptor potential cation channel, subfamily C, member 3
  ENSP ID: ENSP00000423866
MEGSPSLRRMTVMREKGRRQAVRGPAFMFNDRGTSLTAEEERFLDAAEYGNIPVVRKMLEESKTLNVNCVDYMGQNALQLAVGNEHLEVTELLLKKENLARIGDALLLAISKGYVRIVEAILNHPGFAASKRLTLSPCEQELQDDDFYAYDEDGTRFSPDITPIILAAHCQKYEVVHMLLMKGARIERPHDYFCKCGDCMEKQRHDSFSHSRSRINAYKGLASPAYLSLSSEDPVLTALELSNELAKLANIEKEFKISEQVENSKFRLETVEKHLE

SEQ ID NO: 90287 - protein, 793 aa, Homo sapiens
  Payload ID: 18047
  Gene Name: transient receptor potential cation channel, subfamily C, member 3
  ENSP ID: ENSP00000426899
MEGSPSLRRMTVMREKGRRQAVRGPAFMFNDRGTSLTAEEERFLDAAEYGNIPVVRKMLEESKTLNVNCVDYMGQNALQLAVGNEHLEVTELLLKKENLARIGDALLLAISKGYVRIVEAILNHPGFAASKRLTLSPCEQELQDDDFYAYDEDGTRFSPDITPIILAAHCQKYEVVHMLLMKGARIERPHDYFCKCGDCMEKQRHDSFSHSRSRINAYKGLASPAYLSLSSEDPVLTALELSNELAKLANIEKEFKNDYRKLSMQCKDFVVGVLDLCRDSEEVEAILNGDLESAEPLEVHRHKASLSRVKLAIKYEVKKLGKILRSPFMKFVAHAASFIIFLGLLVFNASDRFEGITTLPNITVTDYPKQIFRVKTTQFTWTEMLIMVWVLGMMWSECKELWLEGPREYILQLWNVLDFGMLSIFIAAFTARFLAFLQATKAQQYVDSYVQESDLSEVTLPPEIQYFTYARDKWLPSDPQIISEGLYAIAVVLSFSRIAYILPANESFGPLQISLGRTVKDIFKFMVLFIMVFFAFMIGMFILYSYYLGAKVNAAFTTVEESFKTLFWSIFGLSEVTSVVLKYDHKFIENIGYVLYGIYNVTMVVVLLNMLIAMINSSYQEIEDDSDVEWKFARSKLWLSYFDDGKTLPPPFSLVPSPKSFVYFIMRIVNFPKCRRRRLQKDIEMGMGNSKSRLNLFTQSNSRVFESHSFNSILNQPTRYQQIMKRLIKRYVLKAQVDKENDEVNEGELKEIKQDISSLRYELLEDKSQATEELAILIHKLSEKLNPSMLRCE

SEQ ID NO: 90288 - protein, 804 aa, Homo sapiens
  Payload ID: 18048
  Gene Name: transient receptor potential cation channel, subfamily C, member 4
  Uniprot ID: Q9UBN4
  ENSP ID: ENSP00000342580
MAQFYYKRNVNAPYRDRIPLRIVRAESELSPSEKAYLNAVEKGDYASVKKSLEEAEIYFKININCIDPLGRTALLIAIENENLELIELLLSFNVYVGDALLHAIRKEVVGAVELLLNHKKPSGEKQFVAQPNCQQLLASRWYDEFPGWRRRHWAVKMVTCFIIGLLFPVFSVCYLIAPKSPLGLFIRKPFIKFICHTASYLTFLFLLLLASQHIDRSDLNRQGPPPTIVEWMILPWVLGFIWGEIKQMWDGGLQDYIHDWWNLMDFVMNSLYLATISLKIVAFVKYSALNPRESWDMWHPTLVAEALFAIANIFSSLRLISLFTANSHLGPLQISLGRMLLDILKFLFIYCLVLLAFANGLNQLYFYYEETKGLTCKGIRCEKQNNAFSTLFETLQSLFWSIFGLINLYVTNVKAQHEFTEFVGATMFGTYNVISLVVLLNMLIAMMNNSYQLIADHADIEWKFARTKLWMSYFEEGGTLPTPFNVIPSPKSLWYLIKWIWTHLCKKKMRRKPESFGTIGRRAADNLRRHHQYQEVMRNLVKRYVAAMIRDAKTEEGLTEENFKELKQDISSFRFEVLGLLRGSKLSTIQSANASKESSNSADSDEKSDSEGNSKDKKKNFSLFDLTTLIHPRSAAIASERHNISNGSALVVQEPPREKQRKVNFVTDIKNFGLFHRRSKQNAAEQNANQIFSVSEEVARQQAAGPLERNIQLESRGLASRGDLSIPGLSEQCVLVDHRERNTDTLGLQVGKRVCPFKSEKVVVEDTVPIIPKEKHAKEEDSSIDYDLNLPDTVTHEDYVTTRL

SEQ ID NO: 90289 - protein, 836 aa, Homo sapiens
  Payload ID: 18048
  Gene Name: transient receptor potential cation channel, subfamily C, member 4
  Uniprot ID: Q9UBN4
  ENSP ID: ENSP00000348025
MAQFYYKRNVNAPYRDRIPLRIVRAESELSPSEKAYLNAVEKGDYASVKKSLEEAEIYFKININCIDPLGRTALLIAIENENLELIELLLSFNVYVGDALLHAIRKEVVGAVELLLNHKKPSGEKQVPPILLDKQFSEFTPDITPIILAAHTNNYEIIKLLVQKGVSVPRPHEVRCNCVECVSSSDVDSLRHSRSRLNIYKALASPSLIALSSEDPFLTAFQLSWELQELSKVENEFKSEYEELSRQCKQFAKDLLDQTRSSRELEIILNYRDDNSLIEEQSGNDLARLKLAIKYRQKEFVAQPNCQQLLASRWYDEFPGWRRRHWAVKMVTCFIIGLLFPVFSVCYLIAPKSPLGLFIRKPFIKFICHTASYLTFLFLLLLASQHIDRSDLNRQGPPPTIVEWMILPWVLGFIWGEIKQMWDGGLQDYIHDWWNLMDFVMNSLYLATISLKIVAFVKYSALNPRESWDMWHPTLVAEALFAIANIFSSLRLISLFTANSHLGPLQISLGRMLLDILKFLFIYCLVLLAFANGLNQLYFYYEETKGLTCKGIRCEKQNNAFSTLFETLQSLFWSIFGLINLYVTNVKAQHEFTEFVGATMFGTYNVISLVVLLNMLIAMMNNSYQLIADHADIEWKFARTKLWMSYFEEGGTLPTPFNVIPSPKSLWYLIKWIWTHLCKKKMRRKPESFGTIGRRAADNLRRHHQYQEVMRNLVKRYVAAMIRDAKTEEVARQQAAGPLERNIQLESRGLASRGDLSIPGLSEQCVLVDHRERNTDTLGLQVGKRVCPFKSEKVVVEDTVPIIPKEKHAKEEDSSIDYDLNLPDTVTHEDYVTTRL

SEQ ID NO: 90290 - protein, 893 aa, Homo sapiens
  Payload ID: 18048
  Gene Name: transient receptor potential cation channel, subfamily C, member 4
  Uniprot ID: Q9UBN4
  ENSP ID: ENSP00000351264
MAQFYYKRNVNAPYRDRIPLRIVRAESELSPSEKAYLNAVEKGDYASVKKSLEEAEIYFKININCIDPLGRTALLIAIENENLELIELLLSFNVYVGDALLHAIRKEVVGAVELLLNHKKPSGEKQVPPILLDKQFSEFTPDITPIILAAHTNNYEIIKLLVQKGVSVPRPHEVRCNCVECVSSSDVDSLRHSRSRLNIYKALASPSLIALSSEDPFLTAFQLSWELQELSKVENEFKSEYEELSRQCKQFAKDLLDQTRSSRELEIILNYRDDNSLIEEQSGNDLARLKLAIKYRQKEFVAQPNCQQLLASRWYDEFPGWRRRHWAVKMVTCFIIGLLFPVFSVCYLIAPKSPLGLFIRKPFIKFICHTASYLTFLFLLLLASQHIDRSDLNRQGPPPTIVEWMILPWVLGFIWGEIKQMWDGGLQDYIHDWWNLMDFVMNSLYLATISLKIVAFVKYSALNPRESWDMWHPTLVAEALFAIANIFSSLRLISLFTANSHLGPLQISLGRMLLDILKFLFIYCLVLLAFANGLNQLYFYYEETKGLTCKGIRCEKQNNAFSTLFETLQSLFWSIFGLINLYVTNVKAQHEFTEFVGATMFGTYNVISLVVLLNMLIAMMNNSYQLIADHADIEWKFARTKLWMSYFEEGGTLPTPFNVIPSPKSLWYLIKWIWTHLCKKKMRRKPESFGTIGRRAADNLRRHHQYQEVMRNLVKRYVAAMIRDAKTEEGLTEENFKELKQDISSFRFEVLGLLRGSKLSTIQSANASKESSNSADSDEKSDSEEEVARQQAAGPLERNIQLESRGLASRGDLSIPGLSEQCVLVDHRERNTDTLGLQVGKRVCPFKSEKVVVEDTVPIIPKEKHAKEEDSSIDYDLNLPDTVTHEDYVTTRL

SEQ ID NO: 90291 - protein, 828 aa, Homo sapiens
  Payload ID: 18048
  Gene Name: transient receptor potential cation channel, subfamily C, member 4
  Uniprot ID: Q9UBN4
  ENSP ID: ENSP00000368995
MAQFYYKRNVNAPYRDRIPLRIVRAESELSPSEKAYLNAVEKGDYASVKKSLEEAEIYFKININCIDPLGRTALLIAIENENLELIELLLSFNVYVGDALLHAIRKEVVGAVELLLNHKKPSGEKQVPPILLDKQFSEFTPDITPIILAAHTNNYEIIKLLVQKGVSVPRPHEVRCNCVECVSSSDVDSLRHSRSRLNIYKALASPSLIALSSEDPFLTAFQLSWELQELSKVENEFKSEYEELSRQCKQFAKDLLDQTRSSRELEIILNYRDDNSLIEEQSGNDLARLKLAIKYRQKEFVAQPNCQQLLASRWYDEFPGWRRRHWAVKMVTCFIIGLLFPVFSVCYLIAPKSPLGLFIRKPFIKFICHTASYLTFLFLLLLASQHIDRSDLNRQGPPPTIVEWMILPWVLGFIWGEIKQMWDGGLQDYIHDWWNLMDFVMNSLYLATISLKIVAFVKYSALNPRESWDMWHPTLVAEALFAIANIFSSLRLISLFTANSHLGPLQISLGRMLLDILKFLFIYCLVLLAFANGLNQLYFYYEETKGLTCKGIRCEKQNNAFSTLFETLQSLFWSIFGLINLYVTNVKAQHEFTEFVGATMFGTYNVISLVVLLNMLIAMMNNSYQLIARRAADNLRRHHQYQEVMRNLVKRYVAAMIRDAKTEEGLTEENFKELKQDISSFRFEVLGLLRGSKLSTIQSANASKESSNSADSDEKSDSEEEVARQQAAGPLERNIQLESRGLASRGDLSIPGLSEQCVLVDHRERNTDTLGLQVGKRVCPFKSEKVVVEDTVPIIPKEKHAKEEDSSIDYDLNLPDTVTHEDYVTTRL

SEQ ID NO: 90292 - protein, 804 aa, Homo sapiens; identical to SEQ ID NO: 90288
  Payload ID: 18048
  Gene Name: transient receptor potential cation channel, subfamily C, member 4
  Uniprot ID: Q9UBN4
  ENSP ID: ENSP00000369001

SEQ ID NO: 90293 - protein, 977 aa, Homo sapiens
  Payload ID: 18048
  Gene Name: transient receptor potential cation channel, subfamily C, member 4
  Uniprot ID: Q9UBN4
  ENSP ID: ENSP00000369027
MAQFYYKRNVNAPYRDRIPLRIVRAESELSPSEKAYLNAVEKGDYASVKKSLEEAEIYFKININCIDPLGRTALLIAIENENLELIELLLSFNVYVGDALLHAIRKEVVGAVELLLNHKKPSGEKQVPPILLDKQFSEFTPDITPIILAAHTNNYEIIKLLVQKGVSVPRPHEVRCNCVECVSSSDVDSLRHSRSRLNIYKALASPSLIALSSEDPFLTAFQLSWELQELSKVENEFKSEYEELSRQCKQFAKDLLDQTRSSRELEIILNYRDDNSLIEEQSGNDLARLKLAIKYRQKEFVAQPNCQQLLASRWYDEFPGWRRRHWAVKMVTCFIIGLLFPVFSVCYLIAPKSPLGLFIRKPFIKFICHTASYLTFLFLLLLASQHIDRSDLNRQGPPPTIVEWMILPWVLGFIWGEIKQMWDGGLQDYIHDWWNLMDFVMNSLYLATISLKIVAFVKYSALNPRESWDMWHPTLVAEALFAIANIFSSLRLISLFTANSHLGPLQISLGRMLLDILKFLFIYCLVLLAFANGLNQLYFYYEETKGLTCKGIRCEKQNNAFSTLFETLQSLFWSIFGLINLYVTNVKAQHEFTEFVGATMFGTYNVISLVVLLNMLIAMMNNSYQLIADHADIEWKFARTKLWMSYFEEGGTLPTPFNVIPSPKSLWYLIKWIWTHLCKKKMRRKPESFGTIGRRAADNLRRHHQYQEVMRNLVKRYVAAMIRDAKTEEGLTEENFKELKQDISSFRFEVLGLLRGSKLSTIQSANASKESSNSADSDEKSDSEGNSKDKKKNFSLFDLTTLIHPRSAAIASERHNISNGSALVVQEPPREKQRKVNFVTDIKNFGLFHRRSKQNAAEQNANQIFSVSEEVARQQAAGPLERNIQLESRGLASRGDLSIPGLSEQCVLVDHRERNTDTLGLQVGKRVCPFKSEKVVVEDTVPIIPKEKHAKEEDSSIDYDLNLPDTVTHEDYVTTRL

SEQ ID NO: 90294 - protein, 460 aa, Homo sapiens
  Payload ID: 18048
  Gene Name: transient receptor potential cation channel, subfamily C, member 4
  ENSP ID: ENSP00000410133
MAQFYYKRNVNAPYRDRIPLRIVRAESELSPSEKAYLNAVEKGDYASVKKSLEEAEIYFKININCIDPLGRTALLIAIENENLELIELLLSFNVYVGDALLHAIRKEVVGAVELLLNHKKPSGEKQVPPILLDKQFSEFTPDITPIILAAHTNNYEIIKLLVQKGVSVPRPHEVRCNCVECVSSSDVDSLRHSRSRLNIYKALASPSLIALSSEDPFLTAFQLSWELQELSKVENEFKSEYEELSRQCKQFAKDLLDQTRSSRELEIILNYRDDNSLIEEQSGNDLARLKLAIKYRQKEFVAQPNCQQLLASRWYDEFPGWRRRHWAVKMVTCFIIGLLFPVFSVCYLIAPKSPLGLFIRKPFIKFICHTASYLTFLFLLLLASQHIDRSDLNRQGPPPTIVEWMILPWVLGFIWGEIKQMWDGGLQDYIHDWWNLMDFVMNSLYLATISLKIVAFVKVI

SEQ ID NO: 90295 - protein, 323 aa, Homo sapiens
  Payload ID: 18048
  Gene Name: transient receptor potential cation channel, subfamily C, member 4
  Uniprot ID: Q9UBN4
  ENSP ID: ENSP00000435969
MAQFYYKRNVNAPYRDRIPLRIVRAESELSPSEKAYLNAVEKGDYASVKKSLEEAEIYFKININCIDPLGRTALLIAIENENLELIELLLSFNVYVGDALLHAIRKEVVGAVELLLNHKKPSGEKQVPPILLDKQFSEFTPDITPIILAAHTNNYEIIKLLVQKGVSVPRPHEVRCNCVECVSSSDVDSLRHSRSRLNIYKALASPSLIALSSEDPFLTAFQLSWELQELSKVENEFKSEYEELSRQCKQFAKDLLDQTRSSRELEIILNYRDDNSLIEEQSGNDLARLKLAIKYRQKEASYGEKLNRCGMADFRTTSMIGGI

SEQ ID NO: 90296 - protein, 982 aa, Homo sapiens
  Payload ID: 18048
  Gene Name: transient receptor potential cation channel, subfamily C, member 4
  Uniprot ID: Q9UBN4
  ENSP ID: ENSP00000486109
MAQFYYKRNVNAPYRDRIPLRIVRAESELSPSEKAYLNAVEKGDYASVKKSLEEAEIYFKININCIDPLGRTALLIAIENENLELIELLLSFNVYVGDALLHAIRKEVVGAVELLLNHKKPSGEKQVPPILLDKQFSEFTPDITPIILAAHTNNYEIIKLLVQKGVSVPRPHEVRCNCVECVSSSDVDSLRHSRSRLNIYKALASPSLIALSSEDPFLTAFQLSWELQELSKVENEFKSEYEELSRQCKQFAKDLLDQTRSSRELEIILNYRDDNSLIEEQSGNDLARLKLAIKYRQKEFVAQPNCQQLLASRWYDEFPGWRRRHWAVKMVTCFIIGLLFPVFSVCYLIAPKSPLGLFIRKPFIKFICHTASYLTFLFLLLLASQHIDRSDLNRQGPPPTIVEWMILPWVLGFIWGEIKQMWDGGLQDYIHDWWNLMDFVMNSLYLATISLKIVAFVKYSALNPRESWDMWHPTLVAEALFAIANIFSSLRLISLFTANSHLGPLQISLGRMLLDILKFLFIYCLVLLAFANGLNQLYFYYEETKGLTCKGIRCEKQNNAFSTLFETLQSLFWSIFGLINLYVTNVKAQHEFTEFVGATMFGTYNVISLVVLLNMLIAMMNNSYQLIADHADIEWKFARTKLWMSYFEEGGTLPTPFNVIPSPKSLWYLIKWIWTHLCKKKMRRKPESFGTIGVRTQHRRAADNLRRHHQYQEVMRNLVKRYVAAMIRDAKTEEGLTEENFKELKQDISSFRFEVLGLLRGSKLSTIQSANASKESSNSADSDEKSDSEGNSKDKKKNFSLFDLTTLIHPRSAAIASERHNISNGSALVVQEPPREKQRKVNFVTDIKNFGLFHRRSKQNAAEQNANQIFSVSEEVARQQAAGPLERNIQLESRGLASRGDLSIPGLSEQCVLVDHRERNTDTLGLQVGKRVCPFKSEKVVVEDTVPIIPKEKHAKEEDSSIDYDLNLPDTVTHEDYVTTRL

SEQ ID NO: 90297 - protein, 797 aa, Homo sapiens
  Payload ID: 18049
  Gene Name: transient receptor potential cation channel, subfamily C, member 4 associated protein
  Uniprot ID: Q8TEL6
  ENSP ID: ENSP00000252015
MAAAPVAAGSGAGRGRRSAATVAAWGGWGGRPRPGNILLQLRQGQLTGRGLVRAVQFTETFLTERDKQSKWSGIPQLLLKLHTTSHLHSDFVECQNILKEISPLLSMEAMAFVTEERKLTQETTYPNTYIFDLFGGVDLLVEILMRPTISIRGQKLKISDEMSKDCLSILYNTCVCTEGVTKRLAEKNDFVIFLFTLMTSKKTFLQTATLIEDILGVKKEMIRLDEVPNLSSLVSNFDQQQLANFCRILAVTISEMDTGNDDKHTLLAKNAQQKKSLSLGPSAAEINQAALLSIPGFVERLCKLATRKVSESTGTASFLQELEEWYTWLDNALVLDALMRVANEESEHNQASIVFPPPGASEENGLPHTSARTQLPQSMKIMHEIMYKLEVLYVLCVLLMGRQRNQVHRMIAEFKLIPGLNNLFDKLIWRKHSASALVLHGHNQNCDCSPDITLKIQFLRLLQSFSDHHENKYLLLNNQELNELSAISLKANIPEVEAVLNTDRSLVCDGKRGLLTRLLQVMKKEPAESSFRFWQARAVESFLRGTTSYADQMFLLKRGLLEHILYCIVDSECKSRDVLQSYFDLLGELMKFNVDAFKRFNKYINTDAKFQVFLKQINSSLVDSNMLVRCVTLSLDRFENQVDMKVAEVLSECRLLAYISQVPTQMSFLFRLINIIHVQTLTQENVSCLNTSLVILMLARRKERLPLYLRLLQRMEHSKKYPGFLLNNFHNLLRFWQQHYLHKDKDSTCLENSSCISFSYWKETVSILLNPDRQSPSALVSYIEEPYMDIDRDFTEE

SEQ ID NO: 90298 - protein, 789 aa, Homo sapiens
  Payload ID: 18049
  Gene Name: transient receptor potential cation channel, subfamily C, member 4 associated protein
  Uniprot ID: Q8TEL6
  ENSP ID: ENSP00000400614
MAAAPVAAGSGAGRGRRSAATVAAWGGWGGRPRPGNILLQLRQGQLTGRGLVRAVQFTETFLTERDKQSKWSGIPQLLLKLHTTSHLHSDFVECQNILKEISPLLSMEAMAFVTEERKLTQETTYPNTYIFDLFGGVDLLVEILMRPTISIRGQKLKISDEMSKDCLSILYNTCVCTEGVTKRLAEKNDFVIFLFTLMTSKKTFLQTATLIEDILGVKKEMIRLDEVPNLSSLVSNFDQQQLANFCRILAVTISEMDTGNDDKHTLLAKNAQQKKSLSLGPSAAEINQAALLSIPGFVERLCKLATRKVSESTGTASFLQELEEWYTWLDNALVLDALMRVANEESEHNQGASEENGLPHTSARTQLPQSMKIMHEIMYKLEVLYVLCVLLMGRQRNQVHRMIAEFKLIPGLNNLFDKLIWRKHSASALVLHGHNQNCDCSPDITLKIQFLRLLQSFSDHHENKYLLLNNQELNELSAISLKANIPEVEAVLNTDRSLVCDGKRGLLTRLLQVMKKEPAESSFRFWQARAVESFLRGTTSYADQMFLLKRGLLEHILYCIVDSECKSRDVLQSYFDLLGELMKFNVDAFKRFNKYINTDAKFQVFLKQINSSLVDSNMLVRCVTLSLDRFENQVDMKVAEVLSECRLLAYISQVPTQMSFLFRLINIIHVQTLTQENVSCLNTSLVILMLARRKERLPLYLRLLQRMEHSKKYPGFLLNNFHNLLRFWQQHYLHKDKDSTCLENSSCISFSYWKETVSILLNPDRQSPSALVSYIEEPYMDIDRDFTEE

SEQ ID NO: 90299 - protein, 973 aa, Homo sapiens
  Payload ID: 18050
  Gene Name: transient receptor potential cation channel, subfamily C, member 5
  Uniprot ID: Q9UL62
  ENSP ID: ENSP00000262839
MAQLYYKKVNYSPYRDRIPLQIVRAETELSAEEKAFLNAVEKGDYATVKQALQEAEIYYNVNINCMDPLGRSALLIAIENENLEIMELLLNHSVYVGDALLYAIRKEVVGAVELLLSYRRPSGEKQVPTLMMDTQFSEFTPDITPIMLAAHTNNYEIIKLLVQKRVTIPRPHQIRCNCVECVSSSEVDSLRHSRSRLNIYKALASPSLIALSSEDPILTAFRLGWELKELSKVENEFKAEYEELSQQCKLFAKDLLDQARSSRELEIILNHRDDHSEELDPQKYHDLAKLKVAIKYHQKEFVAQPNCQQLLATLWYDGFPGWRRKHWVVKLLTCMTIGFLFPMLSIAYLISPRSNLGLFIKKPFIKFICHTASYLTFLFMLLLASQHIVRTDLHVQGPPPTVVEWMILPWVLGFIWGEIKEMWDGGFTEYIHDWWNLMDFAMNSLYLATISLKIVAYVKYNGSRPREEWEMWHPTLIAEALFAISNILSSLRLISLFTANSHLGPLQISLGRMLLDILKFLFIYCLVLLAFANGLNQLYFYYETRAIDEPNNCKGIRCEKQNNAFSTLFETLQSLFWSVFGLLNLYVTNVKARHEFTEFVGATMFGTYNVISLVVLLNMLIAMMNNSYQLIADHADIEWKFARTKLWMSYFDEGGTLPPPFNIIPSPKSFLYLGNWFNNTFCPKRDPDGRRRRRNLRSFTERNADSLIQNQHYQEVIRNLVKRYVAAMIRNSKTHEGLTEENFKELKQDISSFRYEVLDLLGNRKHPRSFSTSSTELSQRDDNNDGSGGARAKSKSVSFNLGCKKKTCHGPPLIRTMPRSSGAQGKSKAESSSKRSFMGPSLKKLGLLFSKFNGHMSEPSSEPMYTISDGIVQQHCMWQDIRYSQMEKGKAEACSQSEINLSEVELGEVQGAAQSSECPLACSSSLHCASSICSSNSKLLDSSEDVFETWGEACDLLMHKWGDGQEEQVTTRL

SEQ ID NO: 90300 - protein, 931 aa, Homo sapiens
  Payload ID: 18051
  Gene Name: transient receptor potential cation channel, subfamily C, member 6
  Uniprot ID: Q9Y210
  ENSP ID: ENSP00000340913
MSQSPAFGPRRGSSPRGAAGAAARRNESQDYLLMDSELGEDGCPQAPLPCYGYYPCFRGSDNRLAHRRQTVLREKGRRLANRGPAYMFSDRSTSLSIEEERFLDAAEYGNIPVVRKMLEECHSLNVNCVDYMGQNALQLAVANEHLEITELLLKKENLSRVGDALLLAISKGYVRIVEAILSHPAFAEGKRLATSPSQSELQQDDFYAYDEDGTRFSHDVTPIILAAHCQEYEIVHTLLRKGARIERPHDYFCKCNDCNQKQKHDSFSHSRSRINAYKGLASPAYLSLSSEDPVMTALELSNELAVLANIEKEFKNDYKKLSMQCKDFVVGLLDLCRNTEEVEAILNGDVETLQSGDHGRPNLSRLKLAIKYEVKKFVAHPNCQQQLLSIWYENLSGLRQQTMAVKFLVVLAVAIGLPFLALIYWFAPCSKMGKIMRGPFMKFVAHAASFTIFLGLLVMNAADRFEGTKLLPNETSTDNAKQLFRMKTSCFSWMEMLIISWVIGMIWAECKEIWTQGPKEYLFELWNMLDFGMLAIFAASFIARFMAFWHASKAQSIIDANDTLKDLTKVTLGDNVKYYNLARIKWDPSDPQIISEGLYAIAVVLSFSRIAYILPANESFGPLQISLGRTVKDIFKFMVIFIMVFVAFMIGMFNLYSYYIGAKQNEAFTTVEESFKTLFWAIFGLSEVKSVVINYNHKFIENIGYVLYGVYNVTMVIVLLNMLIAMINSSFQEIEDDADVEWKFARAKLWFSYFEEGRTLPVPFNLVPSPKSLFYLLLKLKKWISELFQGHKKGFQEDAEMNKINEEKKLGILGSHEDLSKLSLDKKQVGHNKQPSIRSSEDFHLNSFNNPPRQYQKIMKRLIKRYVLQAQIDKESDEVNEGELKEIKQDISSLRYELLEEKSQNTEDLAELIRELGEKLSMEPNQEETNR

SEQ ID NO: 90301 - protein, 815 aa, Homo sapiens
  Payload ID: 18051
  Gene Name: transient receptor potential cation channel, subfamily C, member 6
  Uniprot ID: Q9Y210
  ENSP ID: ENSP00000343672
MSQSPAFGPRRGSSPRGAAGAAARRNESQDYLLMDSELGEDGCPQAPLPCYGYYPCFRGSDNRLAHRRQTVLREKGRRLANRGPAYMFSDRSTSLSIEEERFLDAAEYGNIPVVRKMLEECHSLNVNCVDYMGQNALQLAVANEHLEITELLLKKENLSRVGDALLLAISKGYVRIVEAILSHPAFAEGKRLATSPSQSELQQDDFYAYDEDGTRFSHDVTPIILAAHCQEYEIVHTLLRKGARIERPHDYFCKCNDCNQKQKHDSFSHSRSRINAYKGLASPAYLSLSSEDPVMTALELSNELAVLANIEKEFKMGKIMRGPFMKFVAHAASFTIFLGLLVMNAADRFEGTKLLPNETSTDNAKQLFRMKTSCFSWMEMLIISWVIGMIWAECKEIWTQGPKEYLFELWNMLDFGMLAIFAASFIARFMAFWHASKAQSIIDANDTLKDLTKVTLGDNVKYYNLARIKWDPSDPQIISEGLYAIAVVLSFSRIAYILPANESFGPLQISLGRTVKDIFKFMVIFIMVFVAFMIGMFNLYSYYIGAKQNEAFTTVEESFKTLFWAIFGLSEVKSVVINYNHKFIENIGYVLYGVYNVTMVIVLLNMLIAMINSSFQEIEDDADVEWKFARAKLWFSYFEEGRTLPVPFNLVPSPKSLFYLLLKLKKWISELFQGHKKGFQEDAEMNKINEEKKLGILGSHEDLSKLSLDKKQVGHNKQPSIRSSEDFHLNSFNNPPRQYQKIMKRLIKRYVLQAQIDKESDEVNEGELKEIKQDISSLRYELLEEKSQNTEDLAELIRELGEKLSMEPNQEETNR

SEQ ID NO: 90302 - protein, 876 aa, Homo sapiens
  Payload ID: 18051
  Gene Name: transient receptor potential cation channel, subfamily C, member 6
  Uniprot ID: Q9Y210
  ENSP ID: ENSP00000353687
MSQSPAFGPRRGSSPRGAAGAAARRNESQDYLLMDSELGEDGCPQAPLPCYGYYPCFRGSDNRLAHRRQTVLREKGRRLANRGPAYMFSDRSTSLSIEEERFLDAAEYGNIPVVRKMLEECHSLNVNCVDYMGQNALQLAVANEHLEITELLLKKENLSRVGDALLLAISKGYVRIVEAILSHPAFAEGKRLATSPSQSELQQDDFYAYDEDGTRFSHDVTPIILAAHCQEYEIVHTLLRKGARIERPHDYFCKCNDCNQKQKHDSFSHSRSRINAYKGLASPAYLSLSSEDPVMTALELSNELAVLANIEKEFKNDYKKLSMQCKDFVVGLLDLCRNTEEVEAILNGDVETLQSGDHGRPNLSRLKLAIKYEVKKMGKIMRGPFMKFVAHAASFTIFLGLLVMNAADRFEGTKLLPNETSTDNAKQLFRMKTSCFSWMEMLIISWVIGMIWAECKEIWTQGPKEYLFELWNMLDFGMLAIFAASFIARFMAFWHASKAQSIIDANDTLKDLTKVTLGDNVKYYNLARIKWDPSDPQIISEGLYAIAVVLSFSRIAYILPANESFGPLQISLGRTVKDIFKFMVIFIMVFVAFMIGMFNLYSYYIGAKQNEAFTTVEESFKTLFWAIFGLSEVKSVVINYNHKFIENIGYVLYGVYNVTMVIVLLNMLIAMINSSFQEIEDDADVEWKFARAKLWFSYFEEGRTLPVPFNLVPSPKSLFYLLLKLKKWISELFQGHKKGFQEDAEMNKINEEKKLGILGSHEDLSKLSLDKKQVGHNKQPSIRSSEDFHLNSFNNPPRQYQKIMKRLIKRYVLQAQIDKESDEVNEGELKEIKQDISSLRYELLEEKSQNTEDLAELIRELGEKLSMEPNQEETNR

SEQ ID NO: 90303 - protein, 853 aa, Homo sapiens
  Payload ID: 18051
  Gene Name: transient receptor potential cation channel, subfamily C, member 6
  ENSP ID: ENSP00000435574
MSQSPAFGPRRGSSPRGAAGAAARRNESQDYLLMDSELGEDGCPQAPLPCYGYYPCFRGSDNRLAHRRQTVLREKGRRLANRGPAYMFSDRSTSLSIEEERFLDAAEYGNIPVVRKMLEECHSLNVNCVDYMGQNALQLAVANEHLEITELLLKKENLSRVGDALLLAISKGYVRIVEAILSHPAFAEGKRLATSPSQSELQQDDFYAYDEDGTRFSHDVTPIILAAHCQEYEIVHTLLRKGARIERPHDYFCKCNDCNQKQKHDSFSHSRSRINAYKGLASPAYLSLSSEDPVMTALELSNELAVLANIEKEFKNDYKKLSMQCKDFVVGLLDLCRNTEEVEAILNGDVETLQSGDHGRPNLSRLKLAIKYEVKKFVAHPNCQQQLLSIWYENLSGLRQQTMAVKFLVVLAVAIGLPFLALIYWFAPCSKMGKIMRGPFMKFVAHAASFTIFLGLLVMNAADRFEGTKLLPNETSTDNAKQLFRMKTSCFSWMEMLIISWVIARIKWDPSDPQIISEGLYAIAVVLSFSRIAYILPANESFGPLQISLGRTVKDIFKFMVIFIMVFVAFMIGMFNLYSYYIGAKQNEAFTTVEESFKTLFWAIFGLSEVKSVVINYNHKFIENIGYVLYGVYNVTMVIVLLNMLIAMINSSFQEIEDDADVEWKFARAKLWFSYFEEGRTLPVPFNLVPSPKSLFYLLLKLKKWISELFQGHKKGFQEDAEMNKINEEKKLGILGSHEDLSKLSLDKKQVGHNKQPSIRSSEDFHLNSFNNPPRQYQKIMKRLIKRYVLQAQIDKESDEVNEGELKEIKQDISSLRYELLEEKSQNTEDLAELIRELGEKLSMEPNQEETNR

SEQ ID NO: 90304 - protein, 746 aa, Homo sapiens
  Payload ID: 18052
  Gene Name: transient receptor potential cation channel, subfamily C, member 7
  Uniprot ID: Q9HCX4
  ENSP ID: ENSP00000330322
MLRNSTFKNMQRRHTTLREKGRRQAIRGPAYMFNEKGTSLTPEEERFLDSAEYGNIPVVRKMLEESKTLNFNCVDYMGQNALQLAVGNEHLEVTELLLKKENLARVGDALLLAISKGYVRIVEAILNHPAFAQGQRLTLSPLEQELRDDDFYAYDEDGTRFSHDITPIILAAHCQEYEIVHILLLKGARIERPHDYFCKCNECTEKQRKDSFSHSRSRMNAYKGLASAAYLSLSSEDPVLTALELSNELARLANIETEFKLGRTLRSPFMKFVAHAVSFTIFLGLLVVNASDRFEGVKTLPNETFTDYPKQIFRVKTTQFSWTEMLIMKWVLGMIWSECKEIWEEGPREYVLHLWNLLDFGMLSIFVASFTARFMAFLKATEAQLYVDQHVQDDTLHNVSLPPEVAYFTYARDKWWPSDPQIISEGLYAIAVVLSFSRIAYILPANESFGPLQISLGRTVKDIFKFMVIFIMVFVAFMIGMFNLYSYYRGAKYNPAFTTVEESFKTLFWSIFGLSEVISVVLKYDHKFIENIGYVLYGVYNVTMVVVLLNMLIAMINNSYQEIEEDADVEWKFARAKLWLSYFDEGRTLPAPFNLVPSPKSFYYLIMRIKMCLIKLCKSKAKSCENDLEMGMLNSKFKKTRYQAGMRNSENLTANNTLSKPTRYQKIMKRLIKRYVLKAQVDRENDEVNEGELKEIKQDISSLRYELLEEKSQATGELADLIQQLSEKFGKNLNKDHLRVNKGKDI

SEQ ID NO: 90305 - protein, 801 aa, Homo sapiens
  Payload ID: 18052
  Gene Name: transient receptor potential cation channel, subfamily C, member 7
  Uniprot ID: Q9HCX4
  ENSP ID: ENSP00000367720
MLRNSTFKNMQRRHTTLREKGRRQAIRGPAYMFNEKGTSLTPEEERFLDSAEYGNIPVVRKMLEESKTLNFNCVDYMGQNALQLAVGNEHLEVTELLLKKENLARVGDALLLAISKGYVRIVEAILNHPAFAQGQRLTLSPLEQELRDDDFYAYDEDGTRFSHDITPIILAAHCQEYEIVHILLLKGARIERPHDYFCKCNECTEKQRKDSFSHSRSRMNAYKGLASAAYLSLSSEDPVLTALELSNELARLANIETEFKFVAHPNCQQQLLTMWYENLSGLRQQSIAVKFLAVFGVSIGLPFLAIAYWIAPCSKLGRTLRSPFMKFVAHAVSFTIFLGLLVVNASDRFEGVKTLPNETFTDYPKQIFRVKTTQFSWTEMLIMKWVLGMIWSECKEIWEEGPREYVLHLWNLLDFGMLSIFVASFTARFMAFLKATEAQLYVDQHVQDDTLHNVSLPPEVAYFTYARDKWWPSDPQIISEGLYAIAVVLSFSRIAYILPANESFGPLQISLGRTVKDIFKFMVIFIMVFVAFMIGMFNLYSYYRGAKYNPAFTTVEESFKTLFWSIFGLSEVISVVLKYDHKFIENIGYVLYGVYNVTMVVVLLNMLIAMINNSYQEIEEDADVEWKFARAKLWLSYFDEGRTLPAPFNLVPSPKSFYYLIMRIKMCLIKLCKSKAKSCENDLEMGMLNSKFKKTRYQAGMRNSENLTANNTLSKPTRYQKIMKRLIKRYVLKAQVDRENDEVNEGELKEIKQDISSLRYELLEEKSQATGELADLIQQLSEKFGKNLNKDHLRVNKGKDI

SEQ ID NO: 90306 - protein, 380 aa, Homo sapiens
  Payload ID: 18052
  Gene Name: transient receptor potential cation channel, subfamily C, member 7
  ENSP ID: ENSP00000421571
MLRNSTFKNMQRRHTTLREKGRRQAIRGPAYMFNEKGTSLTPEEERFLDSAEYGNIPVVRKMLEESKTLNFNCVDYMGQNALQLAVGNEHLEVTELLLKKENLARVGDALLLAISKGYVRIVEAILNHPAFAQGQRLTLSPLEQELRDDDFYAYDEDGTRFSHDITPIILAAHCQEYEIVHILLLKGARIERPHDYFCKCNECTEKQRKDSFSHSRSRMNAYKGLASAAYLSLSSEDPVLTALELSNELARLANIETEFKNDYRKLSMQCKDFVVGVLDLCRDTEEVEAILNGDVNFQVWSDHHRPSLSRIKLAIKYEVKKFVAHPNCQQQLLTMWYENLSGLRQQSIAVKFLAVFGVSIGLPFLAIAYWIAPCSKVQTA

SEQ ID NO: 90307 - protein, 807 aa, Homo sapiens
  Payload ID: 18052
  Gene Name: transient receptor potential cation channel, subfamily C, member 7
  ENSP ID: ENSP00000424854
MLRNSTFKNMQRRHTTLREKGRRQAIRGPAYMFNEKGTSLTPEEERFLDSAEYGNIPVVRKMLEESKTLNFNCVDYMGQNALQLAVGNEHLEVTELLLKKENLARVGDALLLAISKGYVRIVEAILNHPAFAQGQRLTLSPLEQELRDDDFYAYDEDGTRFSHDITPIILAAHCQEYEIVHILLLKGARIERPHDYFCKCNECTEKQRKDSFSHSRSRMNAYKGLASAAYLSLSSEDPVLTALELSNELARLANIETEFKNDYRKLSMQCKDFVVGVLDLCRDTEEVEAILNGDVNFQVWSDHHRPSLSRIKLAIKYEVKKLGRTLRSPFMKFVAHAVSFTIFLGLLVVNASDRFEGVKTLPNETFTDYPKQIFRVKTTQFSWTEMLIMKWVLGMIWSECKEIWEEGPREYVLHLWNLLDFGMLSIFVASFTARFMAFLKATEAQLYVDQHVQDDTLHNVSLPPEVAYFTYARDKWWPSDPQIISEGLYAIAVVLSFSRIAYILPANESFGPLQISLGRTVKDIFKFMVIFIMVFVAFMIGMFNLYSYYRGAKYNPAFTTVEESFKTLFWSIFGLSEVISVVLKYDHKFIENIGYVLYGVYNVTMVVVLLNMLIAMINNSYQEIEEDADVEWKFARAKLWLSYFDEGRTLPAPFNLVPSPKSFYYLIMRIKMCLIKLCKSKAKSCENDLEMGMLNSKFKKTRYQAGMRNSENLTANNTLSKPTRYQKIMKRLIKRYVLKAQVDRENDEVNEGELKEIKQDISSLRYELLEEKSQATGELADLIQQLSEKFGKNLNKDHLRVNKGKDI

SEQ ID NO: 90308 - protein, 862 aa, Homo sapiens
  Payload ID: 18052
  Gene Name: transient receptor potential cation channel, subfamily C, member 7
  Uniprot ID: Q9HCX4
  ENSP ID: ENSP00000426070
MLRNSTFKNMQRRHTTLREKGRRQAIRGPAYMFNEKGTSLTPEEERFLDSAEYGNIPVVRKMLEESKTLNFNCVDYMGQNALQLAVGNEHLEVTELLLKKENLARVGDALLLAISKGYVRIVEAILNHPAFAQGQRLTLSPLEQELRDDDFYAYDEDGTRFSHDITPIILAAHCQEYEIVHILLLKGARIERPHDYFCKCNECTEKQRKDSFSHSRSRMNAYKGLASAAYLSLSSEDPVLTALELSNELARLANIETEFKNDYRKLSMQCKDFVVGVLDLCRDTEEVEAILNGDVNFQVWSDHHRPSLSRIKLAIKYEVKKFVAHPNCQQQLLTMWYENLSGLRQQSIAVKFLAVFGVSIGLPFLAIAYWIAPCSKLGRTLRSPFMKFVAHAVSFTIFLGLLVVNASDRFEGVKTLPNETFTDYPKQIFRVKTTQFSWTEMLIMKWVLGMIWSECKEIWEEGPREYVLHLWNLLDFGMLSIFVASFTARFMAFLKATEAQLYVDQHVQDDTLHNVSLPPEVAYFTYARDKWWPSDPQIISEGLYAIAVVLSFSRIAYILPANESFGPLQISLGRTVKDIFKFMVIFIMVFVAFMIGMFNLYSYYRGAKYNPAFTTVEESFKTLFWSIFGLSEVISVVLKYDHKFIENIGYVLYGVYNVTMVVVLLNMLIAMINNSYQEIEEDADVEWKFARAKLWLSYFDEGRTLPAPFNLVPSPKSFYYLIMRIKMCLIKLCKSKAKSCENDLEMGMLNSKFKKTRYQAGMRNSENLTANNTLSKPTRYQKIMKRLIKRYVLKAQVDRENDEVNEGELKEIKQDISSLRYELLEEKSQATGELADLIQQLSEKFGKNLNKDHLRVNKGKDI

SEQ ID NO: 90309 - protein, 261 aa, Homo sapiens
  Payload ID: 18052
  Gene Name: transient receptor potential cation channel, subfamily C, member 7
  ENSP ID: ENSP00000426870
MLRNSTFKNMQRRHTTLREKGRRQAIRGPAYMFNEKGTSLTPEEERFLDSAEYGNIPVVRKMLEESKTLNFNCVDYMGQNALQLAVGNEHLEVTELLLKKENLARVGDALLLAISKGYVRIVEAILNHPAFAQGQRLTLSPLEQELRDDDFYAYDEDGTRFSHDITPIILAAHCQEYEIVHILLLKGARIERPHDYFCKCNECTEKQRKDSFSHSRSRMNAYKGLASAAYLSLSSEDPVLTALELSNELARLANIETEFKE

SEQ ID NO: 90310 - protein, 1625 aa, Homo sapiens
  Payload ID: 18053
  Gene Name: transient receptor potential cation channel, subfamily M, member 1
  Uniprot ID: Q7Z4N2
  ENSP ID: ENSP00000256552
MGQKSWIEKTFCKRECIFVIPSMKDSNRCCCGQFTNQHIPPLPSATPSKNEEESKQVETQPEKWSVAKHTQSYPTDSYGVLEFQGGGYSNKAMYIRVSYDTKPDSLLHLMVKDWQLELPKLLISVHGGLQNFEMQPKLKQVFGKGLIKAAMTTGAWIFTGGVSTGVISHVGDALKDHSSKSRGRVCAIGIAPWGIVENKEDLVGKDVTRVYQTMSNPLSKLSVLNNSHTHFILADNGTLGKYGAEVKLRRLLEKHISLQKINTRLGQGVPLVGLVVEGGPNVVSIVLEYLQEEPPIPVVICDGSGRASDILSFAHKYCEEGGIINESLREQLLVTIQKTFNYNKAQSHQLFAIIMECMKKKELVTVFRMGSEGQQDIEMAILTALLKGTNVSAPDQLSLALAWNRVDIARSQIFVFGPHWPPLGSLAPPTDSKATEKEKKPPMATTKGGRGKGKGKKKGKVKEEVEEETDPRKIELLNWVNALEQAMLDALVLDRVDFVKLLIENGVNMQHFLTIPRLEELYNTRLGPPNTLHLLVRDVKKSNLPPDYHISLIDIGLVLEYLMGGAYRCNYTRKNFRTLYNNLFGPKRPKALKLLGMEDDEPPAKGKKKKKKKKEEEIDIDVDDPAVSRFQYPFHELMVWAVLMKRQKMAVFLWQRGEESMAKALVACKLYKAMAHESSESDLVDDISQDLDNNSKDFGQLALELLDQSYKHDEQIAMKLLTYELKNWSNSTCLKLAVAAKHRDFIAHTCSQMLLTDMWMGRLRMRKNPGLKVIMGILLPPTILFLEFRTYDDFSYQTSKENEDGKEKEEENTDANADAGSRKGDEENEHKKQRSIPIGTKICEFYNAPIVKFWFYTISYLGYLLLFNYVILVRMDGWPSLQEWIVISYIVSLALEKIREILMSEPGKLSQKIKVWLQEYWNITDLVAISTFMIGAILRLQNQPYMGYGRVIYCVDIIFWYIRVLDIFGVNKYLGPYVMMIGKMMIDMLYFVVIMLVVLMSFGVARQAILHPEEKPSWKLARNIFYMPYWMIYGEVFADQIDLYAMEINPPCGENLYDEEGKRLPPCIPGAWLTPALMACYLLVANILLVNLLIAVFNNTFFEVKSISNQVWKFQRYQLIMTFHDRPVLPPPMIILSHIYIIIMRLSGRCRKKREGDQEERDRGLKLFLSDEELKRLHEFEEQCVQEHFREKEDEQQSSSDERIRVTSERVENMSMRLEEINERETFMKTSLQTVDLRLAQLEELSNRMVNALENLAGIDRSDLIQARSRASSECEATYLLRQSSINSADGYSLYRYHFNGEELLFEDTSLSTSPGTGVRKKTCSFRIKEEKDVKTHLVPECQNSLHLSLGTSTSATPDGSHLAVDDLKNAEESKLGPDIGISKEDDERQTDSKKEETISPSLNKTDVIHGQDKSDVQNTQLTVETTNIEGTISYPLEETKITRYFPDETINACKTMKSRSFVYSRGRKLVGGVNQDVEYSSITDQQLTTEWQCQVQKITRSHSTDIPYIVSEAAVQAEHKEQFADMQDEHHVAEAIPRIPRLSLTITDRNGMENLLSVKPDQTLGFPSLRSKSLHGHPRNVKSIQGKLDRSGHASSVSSLVIVSGMTAEEKKVKKEKASTETEC

SEQ ID NO: 90311 - protein, 1603 aa, Homo sapiens
  Payload ID: 18053
  Gene Name: transient receptor potential cation channel, subfamily M, member 1
  Uniprot ID: Q7Z4N2
  ENSP ID: ENSP00000380897
MKDSNRCCCGQFTNQHIPPLPSATPSKNEEESKQVETQPEKWSVAKHTQSYPTDSYGVLEFQGGGYSNKAMYIRVSYDTKPDSLLHLMVKDWQLELPKLLISVHGGLQNFEMQPKLKQVFGKGLIKAAMTTGAWIFTGGVSTGVISHVGDALKDHSSKSRGRVCAIGIAPWGIVENKEDLVGKDVTRVYQTMSNPLSKLSVLNNSHTHFILADNGTLGKYGAEVKLRRLLEKHISLQKINTRLGQGVPLVGLVVEGGPNVVSIVLEYLQEEPPIPVVICDGSGRASDILSFAHKYCEEGGIINESLREQLLVTIQKTFNYNKAQSHQLFAIIMECMKKKELVTVFRMGSEGQQDIEMAILTALLKGTNVSAPDQLSLALAWNRVDIARSQIFVFGPHWPPLGSLAPPTDSKATEKEKKPPMATTKGGRGKGKGKKKGKVKEEVEEETDPRKIELLNWVNALEQAMLDALVLDRVDFVKLLIENGVNMQHFLTIPRLEELYNTRLGPPNTLHLLVRDVKKSNLPPDYHISLIDIGLVLEYLMGGAYRCNYTRKNFRTLYNNLFGPKRPKALKLLGMEDDEPPAKGKKKKKKKKEEEIDIDVDDPAVSRFQYPFHELMVWAVLMKRQKMAVFLWQRGEESMAKALVACKLYKAMAHESSESDLVDDISQDLDNNSKDFGQLALELLDQSYKHDEQIAMKLLTYELKNWSNSTCLKLAVAAKHRDFIAHTCSQMLLTDMWMGRLRMRKNPGLKVIMGILLPPTILFLEFRTYDDFSYQTSKENEDGKEKEEENTDANADAGSRKGDEENEHKKQRSIPIGTKICEFYNAPIVKFWFYTISYLGYLLLFNYVILVRMDGWPSLQEWIVISYIVSLALEKIREILMSEPGKLSQKIKVWLQEYWNITDLVAISTFMIGAILRLQNQPYMGYGRVIYCVDIIFWYIRVLDIFGVNKYLGPYVMMIGKMMIDMLYFVVIMLVVLMSFGVARQAILHPEEKPSWKLARNIFYMPYWMIYGEVFADQIDLYAMEINPPCGENLYDEEGKRLPPCIPGAWLTPALMACYLLVANILLVNLLIAVFNNTFFEVKSISNQVWKFQRYQLIMTFHDRPVLPPPMIILSHIYIIIMRLSGRCRKKREGDQEERDRGLKLFLSDEELKRLHEFEEQCVQEHFREKEDEQQSSSDERIRVTSERVENMSMRLEEINERETFMKTSLQTVDLRLAQLEELSNRMVNALENLAGIDRSDLIQARSRASSECEATYLLRQSSINSADGYSLYRYHFNGEELLFEDTSLSTSPGTGVRKKTCSFRIKEEKDVKTHLVPECQNSLHLSLGTSTSATPDGSHLAVDDLKNAEESKLGPDIGISKEDDERQTDSKKEETISPSLNKTDVIHGQDKSDVQNTQLTVETTNIEGTISYPLEETKITRYFPDETINACKTMKSRSFVYSRGRKLVGGVNQDVEYSSITDQQLTTEWQCQVQKITRSHSTDIPYIVSEAAVQAEHKEQFADMQDEHHVAEAIPRIPRLSLTITDRNGMENLLSVKPDQTLGFPSLRSKSLHGHPRNVKSIQGKLDRSGHASSVSSLVIVSGMTAEEKKVKKEKASTETEC

SEQ ID NO: 90312 - protein, 1642 aa, Homo sapiens
  Payload ID: 18053
  Gene Name: transient receptor potential cation channel, subfamily M, member 1
  Uniprot ID: Q7Z4N2
  ENSP ID: ENSP00000437849
MSSFKRGSLKSSTSGSQKGQKSWIEKTFCKRECIFVIPSMKDSNRCCCGQFTNQHIPPLPSATPSKNEEESKQVETQPEKWSVAKHTQSYPTDSYGVLEFQGGGYSNKAMYIRVSYDTKPDSLLHLMVKDWQLELPKLLISVHGGLQNFEMQPKLKQVFGKGLIKAAMTTGAWIFTGGVSTGVISHVGDALKDHSSKSRGRVCAIGIAPWGIVENKEDLVGKDVTRVYQTMSNPLSKLSVLNNSHTHFILADNGTLGKYGAEVKLRRLLEKHISLQKINTRLGQGVPLVGLVVEGGPNVVSIVLEYLQEEPPIPVVICDGSGRASDILSFAHKYCEEGGIINESLREQLLVTIQKTFNYNKAQSHQLFAIIMECMKKKELVTVFRMGSEGQQDIEMAILTALLKGTNVSAPDQLSLALAWNRVDIARSQIFVFGPHWPPLGSLAPPTDSKATEKEKKPPMATTKGGRGKGKGKKKGKVKEEVEEETDPRKIELLNWVNALEQAMLDALVLDRVDFVKLLIENGVNMQHFLTIPRLEELYNTRLGPPNTLHLLVRDVKKSNLPPDYHISLIDIGLVLEYLMGGAYRCNYTRKNFRTLYNNLFGPKRPKALKLLGMEDDEPPAKGKKKKKKKKEEEIDIDVDDPAVSRFQYPFHELMVWAVLMKRQKMAVFLWQRGEESMAKALVACKLYKAMAHESSESDLVDDISQDLDNNSKDFGQLALELLDQSYKHDEQIAMKLLTYELKNWSNSTCLKLAVAAKHRDFIAHTCSQMLLTDMWMGRLRMRKNPGLKVIMGILLPPTILFLEFRTYDDFSYQTSKENEDGKEKEEENTDANADAGSRKGDEENEHKKQRSIPIGTKICEFYNAPIVKFWFYTISYLGYLLLFNYVILVRMDGWPSLQEWIVISYIVSLALEKIREILMSEPGKLSQKIKVWLQEYWNITDLVAISTFMIGAILRLQNQPYMGYGRVIYCVDIIFWYIRVLDIFGVNKYLGPYVMMIGKMMIDMLYFVVIMLVVLMSFGVARQAILHPEEKPSWKLARNIFYMPYWMIYGEVFADQIDLYAMEINPPCGENLYDEEGKRLPPCIPGAWLTPALMACYLLVANILLVNLLIAVFNNTFFEVKSISNQVWKFQRYQLIMTFHDRPVLPPPMIILSHIYIIIMRLSGRCRKKREGDQEERDRGLKLFLSDEELKRLHEFEEQCVQEHFREKEDEQQSSSDERIRVTSERVENMSMRLEEINERETFMKTSLQTVDLRLAQLEELSNRMVNALENLAGIDRSDLIQARSRASSECEATYLLRQSSINSADGYSLYRYHFNGEELLFEDTSLSTSPGTGVRKKTCSFRIKEEKDVKTHLVPECQNSLHLSLGTSTSATPDGSHLAVDDLKNAEESKLGPDIGISKEDDERQTDSKKEETISPSLNKTDVIHGQDKSDVQNTQLTVETTNIEGTISYPLEETKITRYFPDETINACKTMKSRSFVYSRGRKLVGGVNQDVEYSSITDQQLTTEWQCQVQKITRSHSTDIPYIVSEAAVQAEHKEQFADMQDEHHVAEAIPRIPRLSLTITDRNGMENLLSVKPDQTLGFPSLRSKSLHGHPRNVKSIQGKLDRSGHASSVSSLVIVSGMTAEEKKVKKEKASTETEC

SEQ ID NO: 90313 - protein, 1390 aa, Homo sapiens
  Payload ID: 18053
  Gene Name: transient receptor potential cation channel, subfamily M, member 1
  ENSP ID: ENSP00000452946
MKDSNRCCCGQFTNQHIPPLPSATPSKNEEESKQVETQPEKWSVAKHTQSYPTDSYGVLEFQGGGYSNKAMYIRVSYDTKPDSLLHLMVKDWQLELPKLLISVHGGLQNFEMQPKLKQVFGKGLIKAAMTTGAWIFTGGVSTGVISHVGDALKDHSSKSRGRVCAIGIAPWGIVENKEDLVGKDVTRVYQTMSNPLSKLSVLNNSHTHFILADNGTLGKYGAEVKLRRLLEKHISLQKINTRLGQGVPLVGLVVEGGPNVVSIVLEYLQEEPPIPVVICDGSGRASDILSFAHKYCEEGGIINESLREQLLVTIQKTFNYNKAQSHQLFAIIMECMKKKELVTVFRMGSEGQQDIEMAILTALLKGTNVSAPDQLSLALAWNRVDIARSQIFVFGPHWPPLGSLAPPTDSKATEKEKKPPMATTKGGRGKGKGKKKGKVKEEVEEETDPRKIELLNWVNALEQAMLDALVLDRVDFVKLLIENGVNMQHFLTIPRLEELYNTRLGPPNTLHLLVRDVKKSNLPPDYHISLIDIGLVLEYLMGGAYRCNYTRKNFRTLYNNLFGPKRPKALKLLGMEDDEPPAKGKKKKKKKKEEEIDIDVDDPAVSRFQYPFHELMVWAVLMKRQKMAVFLWQRGEESMAKALVACKLYKAMAHESSESDLVDDISQDLDNNSKDFGQLALELLDQSYKHDEQIAMKLLTYELKNWSNSTCLKLAVAAKHRDFIAHTCSQMLLTDMWMGRLRMRKNPGLKVIMGILLPPTILFLEFRTYDDFSYQTSKENEDGKEKEEENTDANADAGSRKGDEENEHKKQRSIPIGTKICEFYNAPIVKFWFYTISYLGYLLLFNYVILVRMDGWPSLQEWIVISYIVSLALEKIREILMSEPGKLSQKIKVWLQEYWNITDLVAISTFMIGAILRLQNQPYMGYGRVIYCVDIIFWYIRVLDIFGVNKYLGPYVMMIGKMMIDMLYFVVIMLVVLMSFGVARQAILHPEEKPSWKLARNIFYMPYWMIYGEVFADQIDLYAMEINPPCGENLYDEEGKRLPPCIPGAWLTPALMACYLLVANILLVNLLIAVFNNTFFEVKSISNQVWKFQRYQLIMTFHDRPVLPPPMIILSHIYIIIMRLSGRCRKKREGDQEERDRGLKLFLSDEELKRLHEFEEQCVQEHFREKEDEQQSSSDERIRVTSERVENMSMRLEEINERETFMKTSLQTVDLRLAQLEELSNRMVNALENLAGIDRSDLIQARSRASSECEATYLLRQSSINSADGYSLYRYHFNGEELLFEDTSLSTSPGTGVRKKTCSFRIKEEKDVKTHLVPECQNSLHLSLGTSTSATPDGSHLAVDDLKNAEESKLGPDIGISKEDDERQTDSKKEETISPSLNKTDVIHGQ

SEQ ID NO: 90314 - protein, 1526 aa, Homo sapiens
  Payload ID: 18053
  Gene Name: transient receptor potential cation channel, subfamily M, member 1
  ENSP ID: ENSP00000453119
YIRVSYDTKPDSLLHLMVKDWQLELPKLLISVHGGLQNFEMQPKLKQVFGKGLIKAAMTTGAWIFTGGVSTGVISHVGDALKDHSSKSRGRVCAIGIAPWGIVENKEDLVGKDVTRVYQTMSNPLSKLSVLNNSHTHFILADNGTLGKYGAEVKLRRLLEKHISLQKINTRLGQGVPLVGLVVEGGPNVVSIVLEYLQEEPPIPVVICDGSGRASDILSFAHKIINESLREQLLVTIQKTFNYNKAQSHQLFAIIMECMKKKELVTVFRMGSEGQQDIEMAILTALLKGTNVSAPDQLSLALAWNRVDIARSQIFVFGPHWPPLGSLAPPTDSKATEKEKKPPMATTKGGRGKGKGKKKGKVKEEVEEETDPRKIELLNWVNALEQAMLDALVLDRVDFVKLLIENGVNMQHFLTIPRLEELYNTRLGPPNTLHLLVRDVKKSNLPPDYHISLIDIGLVLEYLMGGAYRCNYTRKNFRTLYNNLFGPKRPKALKLLGMEDDEPPAKGKKKKKKKKEEEIDIDVDDPAVSRFQYPFHELMVWAVLMKRQKMAVFLWQRGEESMAKALVACKLYKAMAHESSESDLVDDISQDLDNNSKDFGQLALELLDQSYKHDEQIAMKLLTYELKNWSNSTCLKLAVAAKHRDFIAHTCSQMLLTDMWMGRLRMRKNPGLKVIMGILLPPTILFLEFRTYDDFSYQTSKENEDGKEKEEENTDANADAGSRKGDEENEHKKQRSIPIGTKICEFYNAPIVKFWFYTISYLGYLLLFNYVILVRMDGWPSLQEWIVISYIVSLALEKIREILMSEPGKLSQKIKVWLQEYWNITDLVAISTFMIGAILRLQNQPYMGYGRVIYCVDIIFWYIRVLDIFGVNKYLGPYVMMIGKMMIDMLYFVVIMLVVLMSFGVARQAILHPEEKPSWKLARNIFYMPYWMIYGEVFADQIDLYAMEINPPCGENLYDEEGKRLPPCIPGAWLTPALMACYLLVANILLVNLLIAVFNNTFFEVKSISNQVWKFQRYQLIMTFHDRPVLPPPMIILSHIYIIIMRLSGRCRKKREGDQEERDRGLKLFLSDEELKRLHEFEEQCVQEHFREKEDEQQSSSDERIRVTSERVENMSMRLEEINERETFMKTSLQTVDLRLAQLEELSNRMVNALENLAGIDRSDLIQARSRASSECEATYLLRQSSINSADGYSLYRYHFNGEELLFEDTSLSTSPGTGVRKKTCSFRIKEEKDVKTHLVPECQNSLHLSLGTSTSATPDGSHLAVDDLKNAEESKLGPDIGISKEDDERQTDSKKEETISPSLNKTDVIHGQDKSDVQNTQLTVETTNIEGTISYPLEETKITRYFPDETINACKTMKSRSFVYSRGRKLVGGVNQDVEYSSITDQQLTTEWQCQVQKITRSHSTDIPYIVSEAAVQAEHKEQFADMQDEHHVAEAIPRIPRLSLTITDRNGMENLLSVKPDQTLGFPSLRSKSLHGHPRNVKSIQGKLDRSGHASSVSSLVIVSGMTAEEKKVKKEKASTETEC

SEQ ID NO: 90315 - protein, 505 aa, Homo sapiens
  Payload ID: 18053
  Gene Name: transient receptor potential cation channel, subfamily M, member 1
  ENSP ID: ENSP00000453477
MKDSNRCCCGQFTNQHIPPLPSATPSKNEEESKQVETQPEKWSVAKHTQSYPTDSYGVLEFQGGGYSNKAMYIRVSYDTKPDSLLHLMVKDWQLELPKLLISVHGGLQNFEMQPKLKQVFGKGLIKAAMTTGAWIFTGGVSTAPCGENLYDEEGKRLPPCIPGAWLTPALMACYLLVANILLVNLLIAVFNNTFFEVKSISNQVWKFQRYQLIMTFHDRPVLPPPMIILSHIYIIIMRLSGRCRKKREGDQEERDRGLKLFLSDEELKRLHEFEEQCVQEHFREKEDEQQSSSDERIRVTSERVENMSMRLEEINERETFMKTSLQTVDLRLAQLEELSNRMVNALENLAGIDRSDLIQARSRASSECEATYLLRQSSINSADGYSLYRYHFNGEELLFEDTSLSTSPGTGVRKKTCSFRIKEEKDVKTHLVPECQNSLHLSLGTSTSATPDGSHLAVDDLKNAEESKLGPDIGISKEDDERQTDSKKEETISPSLNKTDVIHGQ

SEQ ID NO: 90316 - protein, 229 aa, Homo sapiens
  Payload ID: 18053
  Gene Name: transient receptor potential cation channel, subfamily M, member 1
  ENSP ID: ENSP00000453644
YIRVSYDTKPDSLLHLMVKDWQLELPKLLISVHGGLQNFEMQPKLKQVFGKGLIKAAMTTGAWIFTGGVSTGVISHVGDALKDHSSKSRGRVCAIGIAPWGIVENKEDLVGKDVTRVYQTMSNPLSKLSVLNNSHTHFILADNGTLGKYGAEVKLRRLLEKHISLQKINTRLGQGVPLVGLVVEGGPNVVSIVLEYLQEEPPIPVVICDGSGRASDILSFAHKYCEEGG

SEQ ID NO: 90317 - protein, 136 aa, Homo sapiens
  Payload ID: 18053
  Gene Name: transient receptor potential cation channel, subfamily M, member 1
  Uniprot ID: Q7Z4N2
  ENSP ID: ENSP00000453851
MKDSNRCCCGQFTNQHIPPLPSATPSKNEEESKQVETQPEKWSVAKHTQSYPTDSYGVLEFQGGGYSNKAMVRKAFRHGATRITAFIGGQSPSPKLQIPGLLHGCGSIFLDISLKNQEIYLCTWLLAMRLGNWTPL

SEQ ID NO: 90318 - protein, 300 aa, Homo sapiens
  Payload ID: 18053
  Gene Name: transient receptor potential cation channel, subfamily M, member 1
  Uniprot ID: Q7Z4N2
  ENSP ID: ENSP00000454077
MKDSNRCCCGQFTNQHIPPLPSATPSKNEEESKQVETQPEKWSVAKHTQSYPTDSYGVLEFQGGGYSNKAMYIRVSYDTKPDSLLHLMVKDWQLELPKLLISVHGGLQNFEMQPKLKQVFGKGLIKAAMTTGAWIFTGGVSTGVISHVGDALKDHSSKSRGRVCAIGIAPWGIVENKEDLVGKDVTRVYQTMSNPLSKLSVLNNSHTHFILADNGTLGKYGAEVKLRRLLEKHISLQKINTRLGQGVPLVGLVVEGGPNVVSIVLEYLQEEPPIPVVICDGSGRASDILSFAHKYCEEGG

SEQ ID NO: 90319 - protein, 1603 aa, Homo sapiens
  Payload ID: 18053
  Gene Name: transient receptor potential cation channel, subfamily M, member 1
  ENSP ID: ENSP00000479390
TKDSNRCCCGQFTNQHIPPLPSATPSKNEEENKQVETQPEKWSVAKHTQSYPTDSYGVLEFQGGGYSNKAMYIRVSYDTKPDSLLHLMVKDWQLELPKLLISVHGGLQNFEMQPKLKQVFGKGLIKAAMTTGAWIFTGGVSTGVISHVGDALKDHSSKSRGRVCAIGIAPWGIVENKEDLVGKDVTRVYQTMSNPLSKLSVLNNSHTHFILADNGTLGKYGAEVKLRRLLEKHISLQKINTRLGQGVPLVGLVVEGGPNVVSIVLEYLQEEPPIPVVICDGSGRASDILSFAHKYCEEGGIINESLREQLLVTIQKTFNYNKAQSHQLFAIIMECMKKKELVTVFRMGSEGQQDIEMAILTALLKGTNVSAPDQLSLALAWNRVDIARSQIFVFGPHWPPLGSLAPPTDSKATEKEKKPPMATTKGGRGKGKGKKKGKVKEEVEEETDPRKIELLNWVNALEQAMLDALVLDRVDFVKLLIENGVNMQHFLTIPRLEELYNTRLGPPNTLHLLVRDVKKSNLPPDYHISLIDIGLVLEYLMGGAYRCNYTRKNFRTLYNNLFGPKRPKALKLLGMEDDEPPAKGKKKKKKKKEEEIDIDVDDPAVSRFQYPFHELMVWAVLMKRQKMAVFLWQRGEESMAKALVACKLYKAMAHESSESDLVDDISQDLDNNSKDFGQLALELLDQSYKHDEQIAMKLLTYELKNWSNSTCLKLAVAAKHRDFIAHTCSQMLLTDMWMGRLRMRKNPGLKVIMGILLPPTILFLEFRTYDDFSYQTSKENEDGKEKEEENTDANADAGSRKGDEENEHKKQRSIPIGTKICEFYNAPIVKFWFYTISYLGYLLLFNYVILVRMDGWPSLQEWIVISYIVSLALEKIREILMSEPGKLSQKIKVWLQEYWNITDLVAISTFMIGAILRLQNQPYMGYGRVIYCVDIIFWYIRVLDIFGVNKYLGPYVMMIGKMMIDMLYFVVIMLVVLMSFGVARQAILHPEEKPSWKLARNIFYMPYWMIYGEVFADQIDLYAMEINPPCGENLYDEEGKRLPPCIPGAWLTPALMACYLLVANILLVNLLIAVFNNTFFEVKSISNQVWKFQRYQLIMTFHDRPVLPPPMIILSHIYIIIMRLSGRCRKKREGDQEERDRGLKLFLSDEELKRLHEFEEQCVQEHFREKEDEQQSSSDERIRVTSERVENMSMRLEEINERETFMKTSLQTVDLRLAQLEELSNRMVNALENLAGIDRSDLIQARSRASSECEATYLLRQSSINSADGYSLYRYHFNGEELLFEDTSLSTSPGTGVRKKTCSFRIKEEKDVKTHLVPECQNSLHLSLGTSTSATPDGSHLAVDDLKNAEESKLGPDIGISKEDDERQTDSKKEETISPSLNKTDVIHGQDKSDVQNTQLTVETTNIEGTISYPLEETKITRYFPDETINACKTMKSRSFVYSRGRKLVGGVNQDVEYSSITDQQLTTEWQCQVQKITRSHSTDIPYIVSEAAVQAEHKEQFADMQDEHHVAEAIPRIPRLSLTITDRNGMENLLSVKPDQTLGFPSLRSKSLHGHPRNVKSIQGKLDRSGHASSVSSLVIVSGMTAEEKKVKKEKASTETEC

SEQ ID NO: 90320 - protein, 1625 aa, Homo sapiens
  Payload ID: 18053
  Gene Name: transient receptor potential cation channel, subfamily M, member 1
  ENSP ID: ENSP00000479819
MGQKSWIEKTFCKRECIFVIPSTKDSNRCCCGQFTNQHIPPLPSATPSKNEEENKQVETQPEKWSVAKHTQSYPTDSYGVLEFQGGGYSNKAMYIRVSYDTKPDSLLHLMVKDWQLELPKLLISVHGGLQNFEMQPKLKQVFGKGLIKAAMTTGAWIFTGGVSTGVISHVGDALKDHSSKSRGRVCAIGIAPWGIVENKEDLVGKDVTRVYQTMSNPLSKLSVLNNSHTHFILADNGTLGKYGAEVKLRRLLEKHISLQKINTRLGQGVPLVGLVVEGGPNVVSIVLEYLQEEPPIPVVICDGSGRASDILSFAHKYCEEGGIINESLREQLLVTIQKTFNYNKAQSHQLFAIIMECMKKKELVTVFRMGSEGQQDIEMAILTALLKGTNVSAPDQLSLALAWNRVDIARSQIFVFGPHWPPLGSLAPPTDSKATEKEKKPPMATTKGGRGKGKGKKKGKVKEEVEEETDPRKIELLNWVNALEQAMLDALVLDRVDFVKLLIENGVNMQHFLTIPRLEELYNTRLGPPNTLHLLVRDVKKSNLPPDYHISLIDIGLVLEYLMGGAYRCNYTRKNFRTLYNNLFGPKRPKALKLLGMEDDEPPAKGKKKKKKKKEEEIDIDVDDPAVSRFQYPFHELMVWAVLMKRQKMAVFLWQRGEESMAKALVACKLYKAMAHESSESDLVDDISQDLDNNSKDFGQLALELLDQSYKHDEQIAMKLLTYELKNWSNSTCLKLAVAAKHRDFIAHTCSQMLLTDMWMGRLRMRKNPGLKVIMGILLPPTILFLEFRTYDDFSYQTSKENEDGKEKEEENTDANADAGSRKGDEENEHKKQRSIPIGTKICEFYNAPIVKFWFYTISYLGYLLLFNYVILVRMDGWPSLQEWIVISYIVSLALEKIREILMSEPGKLSQKIKVWLQEYWNITDLVAISTFMIGAILRLQNQPYMGYGRVIYCVDIIFWYIRVLDIFGVNKYLGPYVMMIGKMMIDMLYFVVIMLVVLMSFGVARQAILHPEEKPSWKLARNIFYMPYWMIYGEVFADQIDLYAMEINPPCGENLYDEEGKRLPPCIPGAWLTPALMACYLLVANILLVNLLIAVFNNTFFEVKSISNQVWKFQRYQLIMTFHDRPVLPPPMIILSHIYIIIMRLSGRCRKKREGDQEERDRGLKLFLSDEELKRLHEFEEQCVQEHFREKEDEQQSSSDERIRVTSERVENMSMRLEEINERETFMKTSLQTVDLRLAQLEELSNRMVNALENLAGIDRSDLIQARSRASSECEATYLLRQSSINSADGYSLYRYHFNGEELLFEDTSLSTSPGTGVRKKTCSFRIKEEKDVKTHLVPECQNSLHLSLGTSTSATPDGSHLAVDDLKNAEESKLGPDIGISKEDDERQTDSKKEETISPSLNKTDVIHGQDKSDVQNTQLTVETTNIEGTISYPLEETKITRYFPDETINACKTMKSRSFVYSRGRKLVGGVNQDVEYSSITDQQLTTEWQCQVQKITRSHSTDIPYIVSEAAVQAEHKEQFADMQDEHHVAEAIPRIPRLSLTITDRNGMENLLSVKPDQTLGFPSLRSKSLHGHPRNVKSIQGKLDRSGHASSVSSLVIVSGMTAEEKKVKKEKASTETEC

SEQ ID NO: 90321 - protein, 1642 aa, Homo sapiens
  Payload ID: 18053
  Gene Name: transient receptor potential cation channel, subfamily M, member 1
  ENSP ID: ENSP00000480586
MSSFKRGSLKSSTSGSQKGQKSWIEKTFCKRECIFVIPSTKDSNRCCCGQFTNQHIPPLPSATPSKNEEENKQVETQPEKWSVAKHTQSYPTDSYGVLEFQGGGYSNKAMYIRVSYDTKPDSLLHLMVKDWQLELPKLLISVHGGLQNFEMQPKLKQVFGKGLIKAAMTTGAWIFTGGVSTGVISHVGDALKDHSSKSRGRVCAIGIAPWGIVENKEDLVGKDVTRVYQTMSNPLSKLSVLNNSHTHFILADNGTLGKYGAEVKLRRLLEKHISLQKINTRLGQGVPLVGLVVEGGPNVVSIVLEYLQEEPPIPVVICDGSGRASDILSFAHKYCEEGGIINESLREQLLVTIQKTFNYNKAQSHQLFAIIMECMKKKELVTVFRMGSEGQQDIEMAILTALLKGTNVSAPDQLSLALAWNRVDIARSQIFVFGPHWPPLGSLAPPTDSKATEKEKKPPMATTKGGRGKGKGKKKGKVKEEVEEETDPRKIELLNWVNALEQAMLDALVLDRVDFVKLLIENGVNMQHFLTIPRLEELYNTRLGPPNTLHLLVRDVKKSNLPPDYHISLIDIGLVLEYLMGGAYRCNYTRKNFRTLYNNLFGPKRPKALKLLGMEDDEPPAKGKKKKKKKKEEEIDIDVDDPAVSRFQYPFHELMVWAVLMKRQKMAVFLWQRGEESMAKALVACKLYKAMAHESSESDLVDDISQDLDNNSKDFGQLALELLDQSYKHDEQIAMKLLTYELKNWSNSTCLKLAVAAKHRDFIAHTCSQMLLTDMWMGRLRMRKNPGLKVIMGILLPPTILFLEFRTYDDFSYQTSKENEDGKEKEEENTDANADAGSRKGDEENEHKKQRSIPIGTKICEFYNAPIVKFWFYTISYLGYLLLFNYVILVRMDGWPSLQEWIVISYIVSLALEKIREILMSEPGKLSQKIKVWLQEYWNITDLVAISTFMIGAILRLQNQPYMGYGRVIYCVDIIFWYIRVLDIFGVNKYLGPYVMMIGKMMIDMLYFVVIMLVVLMSFGVARQAILHPEEKPSWKLARNIFYMPYWMIYGEVFADQIDLYAMEINPPCGENLYDEEGKRLPPCIPGAWLTPALMACYLLVANILLVNLLIAVFNNTFFEVKSISNQVWKFQRYQLIMTFHDRPVLPPPMIILSHIYIIIMRLSGRCRKKREGDQEERDRGLKLFLSDEELKRLHEFEEQCVQEHFREKEDEQQSSSDERIRVTSERVENMSMRLEEINERETFMKTSLQTVDLRLAQLEELSNRMVNALENLAGIDRSDLIQARSRASSECEATYLLRQSSINSADGYSLYRYHFNGEELLFEDTSLSTSPGTGVRKKTCSFRIKEEKDVKTHLVPECQNSLHLSLGTSTSATPDGSHLAVDDLKNAEESKLGPDIGISKEDDERQTDSKKEETISPSLNKTDVIHGQDKSDVQNTQLTVETTNIEGTISYPLEETKITRYFPDETINACKTMKSRSFVYSRGRKLVGGVNQDVEYSSITDQQLTTEWQCQVQKITRSHSTDIPYIVSEAAVQAEHKEQFADMQDEHHVAEAIPRIPRLSLTITDRNGMENLLSVKPDQTLGFPSLRSKSLHGHPRNVKSIQGKLDRSGHASSVSSLVIVSGMTAEEKKVKKEKASTETEC

SEQ ID NO: 90322 - protein, 229 aa, Homo sapiens; identical to SEQ ID NO: 90316
  Payload ID: 18053
  Gene Name: transient receptor potential cation channel, subfamily M, member 1
  ENSP ID: ENSP00000483610

SEQ ID NO: 90323 - protein, 1603 aa, Homo sapiens
  Payload ID: 18053
  Gene Name: transient receptor potential cation channel, subfamily M, member 1
  ENSP ID: ENSP00000483998
IKTSKRCCCGQFTNQHIPPLPSATPSKNEEENKQVETQPEKWSVAKHTQSYPTDSYGVLEFQGGGYSNKAMYIRVSYDTKPDSLLHLMVKDWQLELPKLLISVHGGLQNFEMQPKLKQVFGKGLIKAAMTTGAWIFTGGVSTGVISHVGDALKDHSSKSRGRVCAIGIAPWGIVENKEDLVGKDVTRVYQTMSNPLSKLSVLNNSHTHFILADNGTLGKYGAEVKLRRLLEKHISLQKINTRLGQGVPLVGLVVEGGPNVVSIVLEYLQEEPPIPVVICDGSGRASDILSFAHKYCEEGGIINESLREQLLVTIQKTFNYNKAQSHQLFAIIMECMKKKELVTVFRMGSEGQQDIEMAILTALLKGTNVSAPDQLSLALAWNRVDIARSQIFVFGPHWPPLGSLAPPTDSKATEKEKKPPMATTKGGRGKGKGKKKGKVKEEVEEETDPRKIELLNWVNALEQAMLDALVLDRVDFVKLLIENGVNMQHFLTIPRLEELYNTRLGPPNTLHLLVRDVKKSNLPPDYHISLIDIGLVLEYLMGGAYRCNYTRKNFRTLYNNLFGPKRPKALKLLGMEDDEPPAKGKKKKKKKKEEEIDIDVDDPAVSRFQYPFHELMVWAVLMKRQKMAVFLWQRGEESMAKALVACKLYKAMAHESSESDLVDDISQDLDNNSKDFGQLALELLDQSYKHDEQIAMKLLTYELKNWSNSTCLKLAVAAKHRDFIAHTCSQMLLTDMWMGRLRMRKNPGLKVIMGILLPPTILFLEFRTYDDFSYQTSKENEDGKEKEEENTDANADAGSRKGDEENEHKKQRSIPIGTKICEFYNAPIVKFWFYTISYLGYLLLFNYVILVRMDGWPSLQEWIVISYIVSLALEKIREILMSEPGKLSQKIKVWLQEYWNITDLVAISTFMIGAILRLQNQPYMGYGRVIYCVDIIFWYIRVLDIFGVNKYLGPYVMMIGKMMIDMLYFVVIMLVVLMSFGVARQAILHPEEKPSWKLARNIFYMPYWMIYGEVFADQIDLYAMEINPPCGENLYDEEGKRLPPCIPGAWLTPALMACYLLVANILLVNLLIAVFNNTFFEVKSISNQVWKFQRYQLIMTFHDRPVLPPPMIILSHIYIIIMRLSGRCRKKREGDQEERDRGLKLFLSDEELKRLHEFEEQCVQEHFREKEDEQQSSSDERIRVTSERVENMSMRLEEINERETFMKTSLQTVDLRLAQLEELSNRMVNALENLAGIDRSDLIQARSRASSECEATYLLRQSSINSADGYSLYRYHFNGEELLFEDTSLSTSPGTGVRKKTCSFRIKEEKDVKTHLVPECQNSLHLSLGTSTSATPDGSHLAVDDLKNAEESKLGPDIGISKEDDERQTDSKKEETISPSLNKTDVIHGQDKSDVQNTQLTVETTNIEGTISYPLEETKITRYFPDETINACKTMKSRSFVYSRGRKLVGGVNQDVEYSSITDQQLTTEWQCQVQKITRSHSTDIPYIVSEAAVQAEHKEQFADMQDEHHVAEAIPRIPRLSLTITDRNGMENLLSVKPDQTLGFPSLRSKSLHGHPRNVKSIQGKLDRSGHASSVSSLVIVSGMTAEEKKVKKEKASTETEC

SEQ ID NO: 90324 - protein, 1449 aa, Homo sapiens
  Payload ID: 18054
  Gene Name: transient receptor potential cation channel, subfamily M, member 2
  Uniprot ID: O94759
  ENSP ID: ENSP00000300481
MEPSALRKAGSEQEEGFEGLPRRVTDLGMVSNLRRSNSSLFKSWRLQCPFGNNDKQESLSSWIPENIKKKECVYFVESSKLSDAGKVVCQCGYTHEQHLEEATKPHTFQGTQWDPKKHVQEMPTDAFGDIVFTGLSQKVKKYVRVSQDTPSSVIYHLMTQHWGLDVPNLLISVTGGAKNFNMKPRLKSIFRRGLVKVAQTTGAWIITGGSHTGVMKQVGEAVRDFSLSSSYKEGELITIGVATWGTVHRREGLIHPTGSFPAEYILDEDGQGNLTCLDSNHSHFILVDDGTHGQYGVEIPLRTRLEKFISEQTKERGGVAIKIPIVCVVLEGGPGTLHTIDNATTNGTPCVVVEGSGRVADVIAQVANLPVSDITISLIQQKLSVFFQEMFETFTESRIVEWTKKIQDIVRRRQLLTVFREGKDGQQDVDVAILQALLKASRSQDHFGHENWDHQLKLAVAWNRVDIARSEIFMDEWQWKPSDLHPTMTAALISNKPEFVKLFLENGVQLKEFVTWDTLLYLYENLDPSCLFHSKLQMHHVAQVLRELLGDFTQPLYPRPRHNDRLRLLLPVPHVKLNVQGVSLRSLYKRSSGHVTFTMDPIRDLLIWAIVQNRRELAGIIWAQSQDCIAAALACSKILKELSKEEEDTDSSEEMLALAEEYEHRAIGVFTECYRKDEERAQKLLTRVSEAWGKTTCLQLALEAKDMKFVSHGGIQAFLTKVWWGQLSVDNGLWRVTLCMLAFPLLLTGLISFREKRLQDVGTPAARARAFFTAPVVVFHLNILSYFAFLCLFAYVLMVDFQPVPSWCECAIYLWLFSLVCEEMRQLFYDPDECGLMKKAALYFSDFWNKLDVGAILLFVAGLTCRLIPATLYPGRVILSLDFILFCLRLMHIFTISKTLGPKIIIVKRMMKDVFFFLFLLAVWVVSFGVAKQAILIHNERRVDWLFRGAVYHSYLTIFGQIPGYIDGVNFNPEHCSPNGTDPYKPKCPESDATQQRPAFPEWLTVLLLCLYLLFTNILLLNLLIAMFNYTFQQVQEHTDQIWKFQRHDLIEEYHGRPAAPPPFILLSHLQLFIKRVVLKTPAKRHKQLKNKLEKNEEAALLSWEIYLKENYLQNRQFQQKQRPEQKIEDISNKVDAMVDLLDLDPLKRSGSMEQRLASLEEQVAQTAQALHWIVRTLRASGFSSEADVPTLASQKAAEEPDAEPGGRKKTEEPGDSYHVNARHLLYPNCPVTRFPVPNEKVPWETEFLIYDPPFYTAERKDAAAMDPMGENPMGRTGLRGRGSLSCFGPNHTLYPMVTRWRRNEDGAICRKSIKKMLEVLVVKLPLSEHWALPGGSREPGEMLPRKLKRILRQEHWPSFENLLKCGMEVYKGYMDDPRNTDNAWIETVAVSVHFQDQNDVELNRLNSNLHACDSGASIRWQVVDRRIPLYANHKTLLQKAAAEFGAHY

SEQ ID NO: 90325 - protein, 1503 aa, Homo sapiens
  Payload ID: 18054
  Gene Name: transient receptor potential cation channel, subfamily M, member 2
  Uniprot ID: O94759
  ENSP ID: ENSP00000300482
MEPSALRKAGSEQEEGFEGLPRRVTDLGMVSNLRRSNSSLFKSWRLQCPFGNNDKQESLSSWIPENIKKKECVYFVESSKLSDAGKVVCQCGYTHEQHLEEATKPHTFQGTQWDPKKHVQEMPTDAFGDIVFTGLSQKVKKYVRVSQDTPSSVIYHLMTQHWGLDVPNLLISVTGGAKNFNMKPRLKSIFRRGLVKVAQTTGAWIITGGSHTGVMKQVGEAVRDFSLSSSYKEGELITIGVATWGTVHRREGLIHPTGSFPAEYILDEDGQGNLTCLDSNHSHFILVDDGTHGQYGVEIPLRTRLEKFISEQTKERGGVAIKIPIVCVVLEGGPGTLHTIDNATTNGTPCVVVEGSGRVADVIAQVANLPVSDITISLIQQKLSVFFQEMFETFTESRIVEWTKKIQDIVRRRQLLTVFREGKDGQQDVDVAILQALLKASRSQDHFGHENWDHQLKLAVAWNRVDIARSEIFMDEWQWKPSDLHPTMTAALISNKPEFVKLFLENGVQLKEFVTWDTLLYLYENLDPSCLFHSKLQKVLVEDPERPACAPAAPRLQMHHVAQVLRELLGDFTQPLYPRPRHNDRLRLLLPVPHVKLNVQGVSLRSLYKRSSGHVTFTMDPIRDLLIWAIVQNRRELAGIIWAQSQDCIAAALACSKILKELSKEEEDTDSSEEMLALAEEYEHRAIGVFTECYRKDEERAQKLLTRVSEAWGKTTCLQLALEAKDMKFVSHGGIQAFLTKVWWGQLSVDNGLWRVTLCMLAFPLLLTGLISFREKRLQDVGTPAARARAFFTAPVVVFHLNILSYFAFLCLFAYVLMVDFQPVPSWCECAIYLWLFSLVCEEMRQLFYDPDECGLMKKAALYFSDFWNKLDVGAILLFVAGLTCRLIPATLYPGRVILSLDFILFCLRLMHIFTISKTLGPKIIIVKRMMKDVFFFLFLLAVWVVSFGVAKQAILIHNERRVDWLFRGAVYHSYLTIFGQIPGYIDGVNFNPEHCSPNGTDPYKPKCPESDATQQRPAFPEWLTVLLLCLYLLFTNILLLNLLIAMFNYTFQQVQEHTDQIWKFQRHDLIEEYHGRPAAPPPFILLSHLQLFIKRVVLKTPAKRHKQLKNKLEKNEEAALLSWEIYLKENYLQNRQFQQKQRPEQKIEDISNKVDAMVDLLDLDPLKRSGSMEQRLASLEEQVAQTAQALHWIVRTLRASGFSSEADVPTLASQKAAEEPDAEPGGRKKTEEPGDSYHVNARHLLYPNCPVTRFPVPNEKVPWETEFLIYDPPFYTAERKDAAAMDPMGDTLEPLSTIQYNVVDGLRDRRSFHGPYTVQAGLPLNPMGRTGLRGRGSLSCFGPNHTLYPMVTRWRRNEDGAICRKSIKKMLEVLVVKLPLSEHWALPGGSREPGEMLPRKLKRILRQEHWPSFENLLKCGMEVYKGYMDDPRNTDNAWIETVAVSVHFQDQNDVELNRLNSNLHACDSGASIRWQVVDRRIPLYANHKTLLQKAAAEFGAHY

SEQ ID NO: 90326 - protein, 1503 aa, Homo sapiens; identical to SEQ ID NO: 90325
  Payload ID: 18054
  Gene Name: transient receptor potential cation channel, subfamily M, member 2
  Uniprot ID: O94759
  ENSP ID: ENSP00000381023

SEQ ID NO: 90327 - protein, 1553 aa, Homo sapiens
  Payload ID: 18054
  Gene Name: transient receptor potential cation channel, subfamily M, member 2
  ENSP ID: ENSP00000381026
MEPSALRKAGSEQEEGFEGLPRRVTDLGMVSNLRRSNSSLFKSWRLQCPFGNNDKQESLSSWIPENIKKKECVYFVESSKLSDAGKVVCQCGYTHEQHLEEATKPHTFQGTQWDPKKHVQEMPTDAFGDIVFTGLSQKVKKYVRVSQDTPSSVIYHLMTQHWGLDVPNLLISVTGGAKNFNMKPRLKSIFRRGLVKVAQTTGAWIITGGSHTGVMKQVGEAVRDFSLSSSYKEGELITIGVATWGTVHRREGLIHPTGSFPAEYILDEDGQGNLTCLDSNHSHFILVDDGTHGQYGVEIPLRTRLEKFISEQTKERGGVAIKIPIVCVVLEGGPGTLHTIDNATTNGTPCVVVEGSGRVADVIAQVANLPVSDITISLIQQKLSVFFQEMFETFTESRIVEWTKKIQDIVRRRQLLTVFREGKDGQQDVDVAILQALLKASRSQDHFGHENWDHQLKLAVAWNRVDIARSEIFMDEWQWKPSDLHPTMTAALISNKPEFVKLFLENGVQLKEFVTWDTLLYLYENLDPSCLFHSKLQKVLVEDPERPACAPAAPRLQMHHVAQVLRELLGDFTQPLYPRPRHNDRLRLLLPVPHVKLNVQGVSLRSLYKRSSGHVTFTMDPIRDLLIWAIVQNRRELAGIIWAQSQDCIAAALACSKILKELSKEEEDTDSSEEMLALAEEYEHRAIGVFTECYRKDEERAQKLLTRVSEAWGKTTCLQLALEAKDMKFVSHGGIQAFLTKVWWGQLSVDNGLWRVTLCMLAFPLLLTGLISFREKRLQDVGTPAARARAFFTAPVVVFHLNILSYFAFLCLFAYVLMVDFQPVPSWCECAIYLWLFSLVCEEMRQLFYDPDECGLMKKAALYFSDFWNKLDVGAILLFVAGLTCRLIPATLYPGRVILSLDFILFCLRLMHIFTISKTLGPKIIIVKRMMKDVFFFLFLLAVWVVSFGVAKQAILIHNERRVDWLFRGAVYHSYLTIFGQIPGYIDGVNFNPEHCSPNGTDPYKPKCPESDATQQRPAFPEWLTVLLLCLYLLFTNILLLNLLIAMFNYTFQQVQEHTDQIWKFQRHDLIEEYHGRPAAPPPFILLSHLQLFIKRVVLKTPAKRHKQLKNKLEKNEEAALLSWEIYLKENYLQNRQFQQKQRPEQKIEDISNKAGLELWGSRTSSVCKSRQFLHLTVVESRGSEKAPVTTLACLQGCLGKHGRVDAMVDLLDLDPLKRSGSMEQRLASLEEQVAQTAQALHWIVRTLRASGFSSEADVPTLASQKAAEEPDAEPGGRKKTEEPGDSYHVNARHLLYPNCPVTRFPVPNEKVPWETEFLIYDPPFYTAERKDAAAMDPMGDTLEPLSTIQYNVVDGLRDRRSFHGPYTVQAGLPLNPMGRTGLRGRGSLSCFGPNHTLYPMVTRWRRNEDGAICRKSIKKMLEVLVVKLPLSEHWALPGGSREPGEMLPRKLKRILRQEHWPSFENLLKCGMEVYKGYMDDPRNTDNAWIETVAVSVHFQDQNDVELNRLNSNLHACDSGASIRWQVVDRRIPLYANHKTLLQKAAAEFGAHY

SEQ ID NO: 90328 - protein, 143 aa, Homo sapiens
  Payload ID: 18054
  Gene Name: transient receptor potential cation channel, subfamily M, member 2
  ENSP ID: ENSP00000393982
MEPSALRKAGSEQEEGFEGLPRRVTDLGMVSNLRRSNSSLFKSWRLQCPFGNNDKQESLSSWIPENIKKKECVYFVESSKLSDAGKVVCQCGYTHEQHLEEATKPHTFQGTQWDPKKHVQEMPTDAFGDIVFTGLSQKVKKYV

SEQ ID NO: 90329 - protein, 247 aa, Homo sapiens [sequence omitted]

SEQ ID NO: 90330 - protein, 1711 aa, Homo sapiens
  Payload ID: 18055
  Gene Name: transient receptor potential cation channel, subfamily M, member 3
  ENSP ID: ENSP00000350140
MGKKWRDAAEMERGCSDREDNAESRRRSRSASRGRFAESWKRLSSKQGSTKRSGLPSQQTPAQKSWIERAFYKRECVHIIPSTKDPHRCCCGRLIGQHVGLTPSISVLQNEKNESRLSRNDIQSEKWSISKHTQLSPTDAFGTIEFQGGGHSNKAMYVRVSFDTKPDLLLHLMTKEWQLELPKLLISVHGGLQNFELQPKLKQVFGKGLIKAAMTTGAWIFTGGVNTGVIRHVGDALKDHASKSRGKICTIGIAPWGIVENQEDLIGRDVVRPYQTMSNPMSKLTVLNSMHSHFILADNGTTGKYGAEVKLRRQLEKHISLQKINTRIGQGVPVVALIVEGGPNVISIVLEYLRDTPPVPVVVCDGSGRASDILAFGHKYSEEGGLINESLRDQLLVTIQKTFTYTRTQAQHLFIILMECMKKKELITVFRMGSEGHQDIDLAILTALLKGANASAPDQLSLALAWNRVDIARSQIFIYGQQWPVGSLEQAMLDALVLDRVDFVKLLIENGVSMHRFLTISRLEELYNTRHGPSNTLYHLVRDVKKREYPGFGWIYFKGNLPPDYRISLIDIGLVIEYLMGGAYRCNYTRKRFRTLYHNLFGPKRDDIPLRRGRKTTKKREEEVDIDLDDPEINHFPFPFHELMVWAVLMKRQKMALFFWQHGEEAMAKALVACKLCKAMAHEASENDMVDDISQELNHNSRDFGQLAVELLDQSYKQDEQLAMKLLTYELKNWSNATCLQLAVAAKHRDFIAHTCSQMLLTDMWMGRLRMRKNSGLKVILGILLPPSILSLEFKNKDDMPYMSQAQEIHLQEKEAEEPEKPTKEKEEEDMELTAMLGRNNGESSRKKDEEEVQSKHRLIPLGRKIYEFYNAPIVKFWFYTLAYIGYLMLFNYIVLVKMERWPSTQEWIVISYIFTLGIEKMREILMSEPGKLLQKVKVWLQEYWNVTDLIAILLFSVGMILRLQDQPFRSDGRVIYCVNIIYWYIRLLDIFGVNKYLGPYVMMIGKMMIDMMYFVIIMLVVLMSFGVARQAILFPNEEPSWKLAKNIFYMPYWMIYGEVFADQIDPPCGQNETREDGKIIQLPPCKTGAWIVPAIMACYLLVANILLVNLLIAVFNNTFFEVKSISNQVWKFQRYQLIMTFHERPVLPPPLIIFSHMTMIFQHLCCRWRKHESDPDERDYGLKLFITDDELKKVHDFEEQCIEEYFREKDDRFNSSNDERIRVTSERVENMSMRLEEVNEREHSMKASLQTVDIRLAQLEDLIGRMATALERLTGLERAESNKIRSRTSSDCTDAAYIVRQSSFNSQEGNTFKLQESIDPAGEETMSPTSPTLMPRMRSHSFYSVNMKDKGGIEKLESIFKERSLSLHRATSSHSVAKEPKAPAAPANTLAIVPDSRRPSSCIDIYVSAMDELHCDIDPLDNSVNILGLGEPSFSTPVPSTAPSSSAYATLAPTDRPPSRSIDFEDITSMDTRSFSSDYTHLPECQNPWDSEPPMYHTIERSKSSRYLATTPFLLEEAPIVKSHSFMFSPSRSYYANFGVPVKTAEYTSITDCIDTRCVNAPQAIADRAAFPGGLGDKVEDLTCCHPEREAELSHPSSDSEENEAKGRRATIAISSQEGDNSERTLSNNITVPKIERANSYSAEEPSAPYAHTRKSFSISDKLDRQRNTASLRNPFQRSKSSKPEGRGDSLSMRRLSRTSAFQSFESKHN

SEQ ID NO: 90331 - protein, 1569 aa, Homo sapiens
  Payload ID: 18055
  Gene Name: transient receptor potential cation channel, subfamily M, member 3
  ENSP ID: ENSP00000350791
MYVRVSFDTKPDLLLHLMTKEWQLELPKLLISVHGGLQNFELQPKLKQVFGKGLIKAAMTTGAWIFTGGVNTGVIRHVGDALKDHASKSRGKICTIGIAPWGIVENQEDLIGRDVVRPYQTMSNPMSKLTVLNSMHSHFILADNGTTGKYGAEVKLRRQLEKHISLQKINTRCLPFFSLDSRLFYSFWGSCQLDSVGIGQGVPVVALIVEGGPNVISIVLEYLRDTPPVPVVVCDGSGRASDILAFGHKYSEEGGLINESLRDQLLVTIQKTFTYTRTQAQHLFIILMECMKKKELITVFRMGSEGHQDIDLAILTALLKGANASAPDQLSLALAWNRVDIARSQIFIYGQQWPVGSLEQAMLDALVLDRVDFVKLLIENGVSMHRFLTISRLEELYNTRHGPSNTLYHLVRDVKKGNLPPDYRISLIDIGLVIEYLMGGAYRCNYTRKRFRTLYHNLFGPKRDDIPLRRGRKTTKKREEEVDIDLDDPEINHFPFPFHELMVWAVLMKRQKMALFFWQHGEEAMAKALVACKLCKAMAHEASENDMVDDISQELNHNSRDFGQLAVELLDQSYKQDEQLAMKLLTYELKNWSNATCLQLAVAAKHRDFIAHTCSQMLLTDMWMGRLRMRKNSGLKVILGILLPPSILSLEFKNKDDMPYMSQAQEIHLQEKEAEEPEKPTKEKEEEDMELTAMLGRNNGESSRKKDEEEVQSKHRLIPLGRKIYEFYNAPIVKFWFYTLAYIGYLMLFNYIVLVKMERWPSTQEWIVISYIFTLGIEKMREILMSEPGKLLQKVKVWLQEYWNVTDLIAILLFSVGMILRLQDQPFRSDGRVIYCVNIIYWYIRLLDIFGVNKYLGPYVMMIGKMMIDMMYFVIIMLVVLMSFGVARQAILFPNEEPSWKLAKNIFYMPYWMIYGEVFADQIDPPCGQNETREDGKIIQLPPCKTGAWIVPAIMACYLLVANILLVNLLIAVFNNTFFEVKSISNQVWKFQRYQLIMTFHERPVLPPPLIIFSHMTMIFQHLCCRWRKHESDPDERDYGLKLFITDDELKKVHDFEEQCIEEYFREKDDRFNSSNDERIRVTSERVENMSMRLEEVNEREHSMKASLQTVDIRLAQLEDLIGRMATALERLTGLERAESNKIRSRTSSDCTDAAYIVRQSSFNSQEGNTFKLQESIDPAGEETMSPTSPTLMPRMRSHSFYSVNMKDKGGIEKLESIFKERSLSLHRATSSHSVAKEPKAPAAPANTLAIVPDSRRPSSCIDIYVSAMDELHCDIDPLDNSVNILGLGEPSFSTPVPSTAPSSSAYATLAPTDRPPSRSIDFEDITSMDTRSFSSDYTHLPECQNPWDSEPPMYHTIERSKSSRYLATTPFLLEEAPIVKSHSFMFSPSRSYYANFGVPVKTAEYTSITDCIDTRCVNAPQAIADRAAFPGGLGDKVEDLTCCHPEREAELSHPSSDSEENEAKGRRATIAISSQEGDNSERTLSNNITVPKIERANSYSAEEPSAPYAHTRKSFSISDKLDRQRNTASLRNPFQRSKSSKPEGRGDSLSMRRLSRTSAFQSFESKHN

SEQ ID NO: 90332 - protein, 1569 aa, Homo sapiens; identical to SEQ ID NO: 90331
  Payload ID: 18055
  Gene Name: transient receptor potential cation channel, subfamily M, member 3
  ENSP ID: ENSP00000354066

SEQ ID NO: 90333 - protein, 230 aa, Homo sapiens
  Payload ID: 18055
  Gene Name: transient receptor potential cation channel, subfamily M, member 3
  Uniprot ID: Q9HCF6
  ENSP ID: ENSP00000355395
MYVRVSFDTKPDLLLHLMTKEWQLELPKLLISVHGGLQNFELQPKLKQVFGKGLIKAAMTTGAWIFTGGVNTGVIRHVGDALKDHASKSRGKICTIGIAPWGIVENQEDLIGRDVVRPYQTMSNPMSKLTVLNSMHSHFILADNGTTGKYGAEVKLRRQLEKHISLQKINTRIGQGVPVVALIVEGGPNVISIVLEYLRDTPPVPVVVCDGSGRASDILAFGHKYSEEGG

SEQ ID NO: 90334 - protein, 123 aa, Homo sapiens
  Payload ID: 18055
  Gene Name: transient receptor potential cation channel, subfamily M, member 3
  ENSP ID: ENSP00000366301
MYVRVSFDTKPDLLLHLMTKEWQLELPKLLISVHGGLQNFELQPKLKQVFGKGLIKAAMTTGAWIFTGGVNTGVIRHVGDALKDHASKSRGKICTIGIAPWGIVENQEDLIGRDVSPECCRFP

SEQ ID NO: 90335 - protein, 323 aa, Homo sapiens
  Payload ID: 18055
  Gene Name: transient receptor potential cation channel, subfamily M, member 3
  ENSP ID: ENSP00000366305
MYVRVSFDTKPDLLLHLMTKEWQLELPKLLISVHGGLQNFELQPKLKQVFGKGLIKAAMTTGAWIFTGGVNTGVIRHVGDALKDHASKSRGKICTIGIAPWGIVENQEDLIGRDVVRPYQTMSNPMSKLTVLNSMHSHFILADNGTTGKYGAEVKLRRQLEKHISLQKINTRIGQGVPVVALIVEGGPNVISIVLEYLRDTPPVPVVVCDGSGRASDILAFGHKYSEEGGLINESLRDQLLVTIQKTFTYTRTQAQHLFIILMECMKKKELVGNSAWVASCLHIFSHFLESHNIFSNHATFSLSGRAYSSPQAPLAPVASSPK

SEQ ID NO: 90336 - protein, 1566 aa, Homo sapiens
  Payload ID: 18055
  Gene Name: transient receptor potential cation channel, subfamily M, member 3
  ENSP ID: ENSP00000366309
MYVRVSFDTKPDLLLHLMTKEWQLELPKLLISVHGGLQNFELQPKLKQVFGKGLIKAAMTTGAWIFTGGVNTGVIRHVGDALKDHASKSRGKICTIGIAPWGIVENQEDLIGRDVVRPYQTMSNPMSKLTVLNSMHSHFILADNGTTGKYGAEVKLRRQLEKHISLQKINTRIGQGVPVVALIVEGGPNVISIVLEYLRDTPPVPVVVCDGSGRASDILAFGHKYSEEGGLINESLRDQLLVTIQKTFTYTRTQAQHLFIILMECMKKKELITVFRMGSEGHQDIDLAILTALLKGANASAPDQLSLALAWNRVDIARSQIFIYGQQWPVGSLEQAMLDALVLDRVDFVKLLIENGVSMHRFLTISRLEELYNTRHGPSNTLYHLVRDVKKREYPGFGWIYFKGNLPPDYRISLIDIGLVIEYLMGGAYRCNYTRKRFRTLYHNLFGPKRPKALKLLGMEDDIPLRRGRKTTKKREEEVDIDLDDPEINHFPFPFHELMVWAVLMKRQKMALFFWQHGEEAMAKALVACKLCKAMAHEASENDMVDDISQELNHNSRDFGQLAVELLDQSYKQDEQLAMKLLTYELKNWSNATCLQLAVAAKHRDFIAHTCSQMLLTDMWMGRLRMRKNSGLKVILGILLPPSILSLEFKNKDDMPYMSQAQEIHLQEKEAEEPEKPTKEKEEEDMELTAMLGRNNGESSRKKDEEEVQSKHRLIPLGRKIYEFYNAPIVKFWFYTLAYIGYLMLFNYIVLVKMERWPSTQEWIVISYIFTLGIEKMREILMSEPGKLLQKVKVWLQEYWNVTDLIAILLFSVGMILRLQDQPFRSDGRVIYCVNIIYWYIRLLDIFGVNKYLGPYVMMIGKMMIDMMYFVIIMLVVLMSFGVARQAILFPNEEPSWKLAKNIFYMPYWMIYGEVFADQIDPPCGQNETREDGKIIQLPPCKTGAWIVPAIMACYLLVANILLVNLLIAVFNNTFFEVKSISNQVWKFQRYQLIMTFHERPVLPPPLIIFSHMTMIFQHLCCRWRKHESDPDERDYGLKLFITDDELKKVHDFEEQCIEEYFREKDDRFNSSNDERIRVTSERVENMSMRLEEVNEREHSMKASLQTVDIRLAQLEDLIGRMATALERLTGLERAESNKIRSRTSSDCTDAAYIVRQSSFNSQEGNTFKLQESIDPAGEETMSPTSPTLMPRMRSHSFYSVNMKDKGGIEKLESIFKERSLSLHRATSSHSVAKEPKAPAAPANTLAIVPDSRRPSSCIDIYVSAMDELHCDIDPLDNSVNILGLGEPSFSTPVPSTAPSSSAYATLAPTDRPPSRSIDFEDITSMDTRSFSSDYTHLPECQNPWDSEPPMYHTIERSKSSRYLATTPFLLEEAPIVKSHSFMFSPSRSYYANFGVPVKTAEYTSITDCIDTRCVNAPQAIADRAAFPGGLGDKVEDLTCCHPEREAELSHPSSDSEENEAKGRRATIAISSQEGDNSERTLSNNITVPKIERANSYSAEEPSAPYAHTRKSFSISDKLDRQRNTASLRNPFQRSKSSKPEGRGDSLSMRRLSRTSAFQSFESKHN

SEQ ID NO: 90337 - protein, 1707 aa, Homo sapiens
  Payload ID: 18055
  Gene Name: transient receptor potential cation channel, subfamily M, member 3
  Uniprot ID: Q9HCF6
  ENSP ID: ENSP00000366314
MPEPWGTVYFLGIAQVFSFLFSWWNLEGVMNQADAPRPLNWTIRKLCHAAFLPSVRLLKAQKSWIERAFYKRECVHIIPSTKDPHRCCCGRLIGQHVGLTPSISVLQNEKNESRLSRNDIQSEKWSISKHTQLSPTDAFGTIEFQGGGHSNKAMYVRVSFDTKPDLLLHLMTKEWQLELPKLLISVHGGLQNFELQPKLKQVFGKGLIKAAMTTGAWIFTGGVNTGVIRHVGDALKDHASKSRGKICTIGIAPWGIVENQEDLIGRDVVRPYQTMSNPMSKLTVLNSMHSHFILADNGTTGKYGAEVKLRRQLEKHISLQKINTRIGQGVPVVALIVEGGPNVISIVLEYLRDTPPVPVVVCDGSGRASDILAFGHKYSEEGGLINESLRDQLLVTIQKTFTYTRTQAQHLFIILMECMKKKELITVFRMGSEGHQDIDLAILTALLKGANASAPDQLSLALAWNRVDIARSQIFIYGQQWPVGSLEQAMLDALVLDRVDFVKLLIENGVSMHRFLTISRLEELYNTRHGPSNTLYHLVRDVKKGNLPPDYRISLIDIGLVIEYLMGGAYRCNYTRKRFRTLYHNLFGPKRPKALKLLGMEDDIPLRRGRKTTKKREEEVDIDLDDPEINHFPFPFHELMVWAVLMKRQKMALFFWQHGEEAMAKALVACKLCKAMAHEASENDMVDDISQELNHNSRDFGQLAVELLDQSYKQDEQLAMKLLTYELKNWSNATCLQLAVAAKHRDFIAHTCSQMLLTDMWMGRLRMRKNSGLKVILGILLPPSILSLEFKNKDDMPYMSQAQEIHLQEKEAEEPEKPTKEKEEEDMELTAMLGRNNGESSRKKDEEEVQSKHRLIPLGRKIYEFYNAPIVKFWFYTLAYIGYLMLFNYIVLVKMERWPSTQEWIVISYIFTLGIEKMREILMSEPGKLLQKVKVWLQEYWNVTDLIAILLFSVGMILRLQDQPFRSDGRVIYCVNIIYWYIRLLDIFGVNKYLGPYVMMIGKMMIDMMYFVIIMLVVLMSFGVARQAILFPNEEPSWKLAKNIFYMPYWMIYGEVFADQIDPPCGQNETREDGKIIQLPPCKTGAWIVPAIMACYLLVANILLVNLLIAVFNNTFFEVKSISNQVWKFQRYQLIMTFHERPVLPPPLIIFSHMTMIFQHLCCRWRKHESDPDERDYGLKLFITDDELKKVHDFEEQCIEEYFREKDDRFNSSNDERIRVTSERVENMSMRLEEVNEREHSMKASLQTVDIRLAQLEDLIGRMATALERLTGLERAESNKIRSRTSSDCTDAAYIVRQSSFNSQEGNTFKLQESIDPAGEETMSPTSPTLMPRMRSHSFYSVNMKDKGGIEKLESIFKERSLSLHRATSSHSVAKEPKAPAAPANTLAIVPDSRRPSSCIDIYVSAMDELHCDIDPLDNSVNILGLGEPSFSTPVPSTAPSSSAYATLAPTDRPPSRSIDFEDITSMDTRSFSSDYTHLPECQNPWDSEPPMYHTIERSKSSRYLATTPFLLEEAPIVKSHSFMFSPSRSYYANFGVPVKTAEYTSITDCIDTRCVNAPQAIADRAAFPGGLGDKVEDLTCCHPEREAELSHPSSDSEENEAKGRRATIAISSQEGDNSERTLSNNITVPKIERANSYSAEEPSAPYAHTRKSFSISDKLDRQRNTASLRNPFQRSKSSKPEGRGDSLSMRRLSRTSAFQSFESKHN

SEQ ID NO: 90338 - protein, 1325 aa, Homo sapiens
  Payload ID: 18055
  Gene Name: transient receptor potential cation channel, subfamily M, member 3
  Uniprot ID: Q9HCF6
  ENSP ID: ENSP00000366315
MPEPWGTVYFLGIAQVFSFLFSWWNLEGVMNQADAPRPLNWTIRKLCHAAFLPSVRLLKAQKSWIERAFYKRECVHIIPSTKDPHRCCCGRLIGQHVGLTPSISVLQNEKNESRLSRNDIQSEKWSISKHTQLSPTDAFGTIEFQGGGHSNKAMYVRVSFDTKPDLLLHLMTKEWQLELPKLLISVHGGLQNFELQPKLKQVFGKGLIKAAMTTGAWIFTGGVNTGVIRHVGDALKDHASKSRGKICTIGIAPWGIVENQEDLIGRDVVRPYQTMSNPMSKLTVLNSMHSHFILADNGTTGKYGAEVKLRRQLEKHISLQKINTRIGQGVPVVALIVEGGPNVISIVLEYLRDTPPVPVVVCDGSGRASDILAFGHKYSEEGGLINESLRDQLLVTIQKTFTYTRTQAQHLFIILMECMKKKELITVFRMGSEGHQDIDLAILTALLKGANASAPDQLSLALAWNRVDIARSQIFIYGQQWPVGSLEQAMLDALVLDRVDFVKLLIENGVSMHRFLTISRLEELYNTRHGPSNTLYHLVRDVKKGNLPPDYRISLIDIGLVIEYLMGGAYRCNYTRKRFRTLYHNLFGPKRPKALKLLGMEDDIPLRRGRKTTKKREEEVDIDLDDPEINHFPFPFHELMVWAVLMKRQKMALFFWQHGEEAMAKALVACKLCKAMAHEASENDMVDDISQELNHNSRDFGQLAVELLDQSYKQDEQLAMKLLTYELKNWSNATCLQLAVAAKHRDFIAHTCSQMLLTDMWMGRLRMRKNSGLKVILGILLPPSILSLEFKNKDDMPYMSQAQEIHLQEKEAEEPEKPTKEKEEEDMELTAMLGRNNGESSRKKDEEEVQSKHRLIPLGRKIYEFYNAPIVKFWFYTLAYIGYLMLFNYIVLVKMERWPSTQEWIVISYIFTLGIEKMREILMSEPGKLLQKVKVWLQEYWNVTDLIAILLFSVGMILRLQDQPFRSDGRVIYCVNIIYWYIRLLDIFGVNKYLGPYVMMIGKMMIDMMYFVIIMLVVLMSFGVARQAILFPNEEPSWKLAKNIFYMPYWMIYGEVFADQIDPPCGQNETREDGKIIQLPPCKTGAWIVPAIMACYLLVANILLVNLLIAVFNNTFFEVKSISNQVWKFQRYQLIMTFHERPVLPPPLIIFSHMTMIFQHLCCRWRKHESDPDERDYGLKLFITDDELKKVHDFEEQCIEEYFREKDDRFNSSNDERIRVTSERVENMSMRLEEVNEREHSMKASLQTVDIRLAQLEDLIGRMATALERLTGLERAESNKIRSRTSSDCTDAAYIVRQSSFNSQEGNTFKLQESIDPAEHPLYSV

SEQ ID NO: 90339 - protein, 1556 aa, Homo sapiens
  Payload ID: 18055
  Gene Name: transient receptor potential cation channel, subfamily M, member 3
  ENSP ID: ENSP00000379576
MYVRVSFDTKPDLLLHLMTKEWQLELPKLLISVHGGLQNFELQPKLKQVFGKGLIKAAMTTGAWIFTGGVNTGVIRHVGDALKDHASKSRGKICTIGIAPWGIVENQEDLIGRDVVRPYQTMSNPMSKLTVLNSMHSHFILADNGTTGKYGAEVKLRRQLEKHISLQKINTRIGQGVPVVALIVEGGPNVISIVLEYLRDTPPVPVVVCDGSGRASDILAFGHKYSEEGGLINESLRDQLLVTIQKTFTYTRTQAQHLFIILMECMKKKELITVFRMGSEGHQDIDLAILTALLKGANASAPDQLSLALAWNRVDIARSQIFIYGQQWPVGSLEQAMLDALVLDRVDFVKLLIENGVSMHRFLTISRLEELYNTRHGPSNTLYHLVRDVKKREYPGFGWIYFKGNLPPDYRISLIDIGLVIEYLMGGAYRCNYTRKRFRTLYHNLFGPKRDDIPLRRGRKTTKKREEEVDIDLDDPEINHFPFPFHELMVWAVLMKRQKMALFFWQHGEEAMAKALVACKLCKAMAHEASENDMVDDISQELNHNSRDFGQLAVELLDQSYKQDEQLAMKLLTYELKNWSNATCLQLAVAAKHRDFIAHTCSQMLLTDMWMGRLRMRKNSGLKVILGILLPPSILSLEFKNKDDMPYMSQAQEIHLQEKEAEEPEKPTKEKEEEDMELTAMLGRNNGESSRKKDEEEVQSKHRLIPLGRKIYEFYNAPIVKFWFYTLAYIGYLMLFNYIVLVKMERWPSTQEWIVISYIFTLGIEKMREILMSEPGKLLQKVKVWLQEYWNVTDLIAILLFSVGMILRLQDQPFRSDGRVIYCVNIIYWYIRLLDIFGVNKYLGPYVMMIGKMMIDMMYFVIIMLVVLMSFGVARQAILFPNEEPSWKLAKNIFYMPYWMIYGEVFADQIDPPCGQNETREDGKIIQLPPCKTGAWIVPAIMACYLLVANILLVNLLIAVFNNTFFEVKSISNQVWKFQRYQLIMTFHERPVLPPPLIIFSHMTMIFQHLCCRWRKHESDPDERDYGLKLFITDDELKKVHDFEEQCIEEYFREKDDRFNSSNDERIRVTSERVENMSMRLEEVNEREHSMKASLQTVDIRLAQLEDLIGRMATALERLTGLERAESNKIRSRTSSDCTDAAYIVRQSSFNSQEGNTFKLQESIDPAGEETMSPTSPTLMPRMRSHSFYSVNMKDKGGIEKLESIFKERSLSLHRATSSHSVAKEPKAPAAPANTLAIVPDSRRPSSCIDIYVSAMDELHCDIDPLDNSVNILGLGEPSFSTPVPSTAPSSSAYATLAPTDRPPSRSIDFEDITSMDTRSFSSDYTHLPECQNPWDSEPPMYHTIERSKSSRYLATTPFLLEEAPIVKSHSFMFSPSRSYYANFGVPVKTAEYTSITDCIDTRCVNAPQAIADRAAFPGGLGDKVEDLTCCHPEREAELSHPSSDSEENEAKGRRATIAISSQEGDNSERTLSNNITVPKIERANSYSAEEPSAPYAHTRKSFSISDKLDRQRNTASLRNPFQRSKSSKPEGRGDSLSMRRLSRTSAFQSFESKHN

SEQ ID NO: 90340 - protein, 275 aa, Homo sapiens
  Payload ID: 18055
  Gene Name: transient receptor potential cation channel, subfamily M, member 3
  ENSP ID: ENSP00000379579
MYVRVSFDTKPDLLLHLMTKEWQLELPKLLISVHGGLQNFELQPKLKQVFGKGLIKAAMTTGAWIFTGGVNTGVIRHVGDALKDHASKSRGKICTIGIAPWGIVENQEDLIGRDVVRPYQTMSNPMSKLTVLNSMHSHFILADNGTTGKYGAEVKLRRQLEKHISLQKINTRCLPFFSLDSRLFYSFWGSCQLDSVGIGQGVPVVALIVEGGPNVISIVLEYLRDTPPVPVVVCDGSGRASDILAFGHKYSEEGGSKYITNLKRERKKEEESKGI

SEQ ID NO: 90341 - protein, 1566 aa, Homo sapiens
  Payload ID: 18055
  Gene Name: transient receptor potential cation channel, subfamily M, member 3
  ENSP ID: ENSP00000379581
MYVRVSFDTKPDLLLHLMTKEWQLELPKLLISVHGGLQNFELQPKLKQVFGKGLIKAAMTTGAWIFTGGVNTGVIRHVGDALKDHASKSRGKICTIGIAPWGIVENQEDLIGRDVVRPYQTMSNPMSKLTVLNSMHSHFILADNGTTGKYGAEVKLRRQLEKHISLQKINTRIGQGVPVVALIVEGGPNVISIVLEYLRDTPPVPVVVCDGSGRASDILAFGHKYSEEGGLINESLRDQLLVTIQKTFTYTRTQAQHLFIILMECMKKKELITVFRMGSEGHQDIDLAILTALLKGANASAPDQLSLALAWNRVDIARSQIFIYGQQWPVGSLEQAMLDALVLDRVDFVKLLIENGVSMHRFLTISRLEELYNTRHGPSNTLYHLVRDVKKGNLPPDYRISLIDIGLVIEYLMGGAYRCNYTRKRFRTLYHNLFGPKRPKALKLLGMEDDIPLRRGRKTTKKREEEVDIDLDDPEINHFPFPFHELMVWAVLMKRQKMALFFWQHGEEAMAKALVACKLCKAMAHEASENDMVDDISQELNHNSRDFGQLAVELLDQSYKQDEQLAMKLLTYELKNWSNATCLQLAVAAKHRDFIAHTCSQMLLTDMWMGRLRMRKNSGLKVILGILLPPSILSLEFKNKDDMPYMSQAQEIHLQEKEAEEPEKPTKEKEEEDMELTAMLGRNNGESSRKKDEEEVQSKHRLIPLGRKIYEFYNAPIVKFWFYTLAYIGYLMLFNYIVLVKMERWPSTQEWIVISYIFTLGIEKMREILMSEPGKLLQKVKVWLQEYWNVTDLIAILLFSVGMILRLQDQPFRSDGRVIYCVNIIYWYIRLLDIFGVNKYLGPYVMMIGKMMIDMMYFVIIMLVVLMSFGVARQAILFPNEEPSWKLAKNIFYMPYWMIYGEVFADQIDRKQVYDSHTPKSAPCGQNETREDGKIIQLPPCKTGAWIVPAIMACYLLVANILLVNLLIAVFNNTFFEVKSISNQVWKFQRYQLIMTFHERPVLPPPLIIFSHMTMIFQHLCCRWRKHESDPDERDYGLKLFITDDELKKVHDFEEQCIEEYFREKDDRFNSSNDERIRVTSERVENMSMRLEEVNEREHSMKASLQTVDIRLAQLEDLIGRMATALERLTGLERAESNKIRSRTSSDCTDAAYIVRQSSFNSQEGNTFKLQESIDPAGEETMSPTSPTLMPRMRSHSFYSVNMKDKGGIEKLESIFKERSLSLHRATSSHSVAKEPKAPAAPANTLAIVPDSRRPSSCIDIYVSAMDELHCDIDPLDNSVNILGLGEPSFSTPVPSTAPSSSAYATLAPTDRPPSRSIDFEDITSMDTRSFSSDYTHLPECQNPWDSEPPMYHTIERSKSSRYLATTPFLLEEAPIVKSHSFMFSPSRSYYANFGVPVKTAEYTSITDCIDTRCVNAPQAIADRAAFPGGLGDKVEDLTCCHPEREAELSHPSSDSEENEAKGRRATIAISSQEGDNSERTLSNNITVPKIERANSYSAEEPSAPYAHTRKSFSISDKLDRQRNTASLRNPFQRSKSSKPEGRGDSLSMRRLSRTSAFQSFESKHN

SEQ ID NO: 90342 - protein, 1579 aa, Homo sapiens
  Payload ID: 18055
  Gene Name: transient receptor potential cation channel, subfamily M, member 3
  ENSP ID: ENSP00000379587
MYVRVSFDTKPDLLLHLMTKEWQLELPKLLISVHGGLQNFELQPKLKQVFGKGLIKAAMTTGAWIFTGGVNTGVIRHVGDALKDHASKSRGKICTIGIAPWGIVENQEDLIGRDVVRPYQTMSNPMSKLTVLNSMHSHFILADNGTTGKYGAEVKLRRQLEKHISLQKINTRCLPFFSLDSRLFYSFWGSCQLDSVGIGQGVPVVALIVEGGPNVISIVLEYLRDTPPVPVVVCDGSGRASDILAFGHKYSEEGGLINESLRDQLLVTIQKTFTYTRTQAQHLFIILMECMKKKELITVFRMGSEGHQDIDLAILTALLKGANASAPDQLSLALAWNRVDIARSQIFIYGQQWPVGSLEQAMLDALVLDRVDFVKLLIENGVSMHRFLTISRLEELYNTRHGPSNTLYHLVRDVKKGNLPPDYRISLIDIGLVIEYLMGGAYRCNYTRKRFRTLYHNLFGPKRPKALKLLGMEDDIPLRRGRKTTKKREEEVDIDLDDPEINHFPFPFHELMVWAVLMKRQKMALFFWQHGEEAMAKALVACKLCKAMAHEASENDMVDDISQELNHNSRDFGQLAVELLDQSYKQDEQLAMKLLTYELKNWSNATCLQLAVAAKHRDFIAHTCSQMLLTDMWMGRLRMRKNSGLKVILGILLPPSILSLEFKNKDDMPYMSQAQEIHLQEKEAEEPEKPTKEKEEEDMELTAMLGRNNGESSRKKDEEEVQSKHRLIPLGRKIYEFYNAPIVKFWFYTLAYIGYLMLFNYIVLVKMERWPSTQEWIVISYIFTLGIEKMREILMSEPGKLLQKVKVWLQEYWNVTDLIAILLFSVGMILRLQDQPFRSDGRVIYCVNIIYWYIRLLDIFGVNKYLGPYVMMIGKMMIDMMYFVIIMLVVLMSFGVARQAILFPNEEPSWKLAKNIFYMPYWMIYGEVFADQIDPPCGQNETREDGKIIQLPPCKTGAWIVPAIMACYLLVANILLVNLLIAVFNNTFFEVKSISNQVWKFQRYQLIMTFHERPVLPPPLIIFSHMTMIFQHLCCRWRKHESDPDERDYGLKLFITDDELKKVHDFEEQCIEEYFREKDDRFNSSNDERIRVTSERVENMSMRLEEVNEREHSMKASLQTVDIRLAQLEDLIGRMATALERLTGLERAESNKIRSRTSSDCTDAAYIVRQSSFNSQEGNTFKLQESIDPAGEETMSPTSPTLMPRMRSHSFYSVNMKDKGGIEKLESIFKERSLSLHRATSSHSVAKEPKAPAAPANTLAIVPDSRRPSSCIDIYVSAMDELHCDIDPLDNSVNILGLGEPSFSTPVPSTAPSSSAYATLAPTDRPPSRSIDFEDITSMDTRSFSSDYTHLPECQNPWDSEPPMYHTIERSKSSRYLATTPFLLEEAPIVKSHSFMFSPSRSYYANFGVPVKTAEYTSITDCIDTRCVNAPQAIADRAAFPGGLGDKVEDLTCCHPEREAELSHPSSDSEENEAKGRRATIAISSQEGDNSERTLSNNITVPKIERANSYSAEEPSAPYAHTRKSFSISDKLDRQRNTASLRNPFQRSKSSKPEGRGDSLSMRRLSRTSAFQSFESKHN

SEQ ID NO: 90343 - protein, 1566 aa, Homo sapiens; identical to SEQ ID NO: 90336
  Payload ID: 18055
  Gene Name: transient receptor potential cation channel, subfamily M, member 3
  ENSP ID: ENSP00000386127

SEQ ID NO: 90344 - protein, 1214 aa, Homo sapiens
  Payload ID: 18056
  Gene Name: transient receptor potential cation channel, subfamily M, member 4
  Uniprot ID: Q8TD43
  ENSP ID: ENSP00000252826
MVVPEKEQSWIPKIFKKKTCTTFIVDSTDPGGTLCQCGRPRTAHPAVAMEDAFGAAVVTVWDSDAHTTEKPTDAYGELDFTGAGRKHSNFLRLSDRTDPAAVYSLVTRTWGFRAPNLVVSVLGGSGGPVLQTWLQDLLRRGLVRAAQSTGAWIVTGGLHTGIGRHVGVAVRDHQMASTGGTKVVAMGVAPWGVVRNRDTLINPKGSFPARYRWRGDPEDGVQFPLDYNYSAFFLVDDGTHGCLGGENRFRLRLESYISQQKTGVGGTGIDIPVLLLLIDGDEKMLTRIENATQAQLPCLLVAGSGGAADCLAETLEDTLAPGSGGARQGEARDRIRRFFPKGDLEVLQAQVERIMTRKELLTVYSSEDGSEEFETIVLKALVKACGSSEASAYLDELRLAVAWNRVDIAQSELFRGDIQWRSFHLEASLMDALLNDRPEFVRLLISHGLSLGHFLTPMRLAQLYSAAPSNSLIRNLLDQASHSAGTKAPALKGGAAELRPPDVGHVLRMLLGKMCAPRYPSGGAWDPHPGQGFGESMYLLSDKATSPLSLDAGLGQAPWSDLLLWALLLNRAQMAMYFWEMGSNAVSSALGACLLLRVMARLEPDAEEAARRKDLAFKFEGMGVDLFGECYRSSEVRAARLLLRRCPLWGDATCLQLAMQADARAFFAQDGVQSLLTQKWWGDMASTTPIWALVLAFFCPPLIYTRLITFRKSEEEPTREELEFDMDSVINGEGPVGTADPAEKTPLGVPRQSGRPGCCGGRCGGRRCLRRWFHFWGAPVTIFMGNVVSYLLFLLLFSRVLLVDFQPAPPGSLELLLYFWAFTLLCEELRQGLSGGGGSLASGGPGPGHASLSQRLRLYLADSWNQCDLVALTCFLLGVGCRLTPGLYHLGRTVLCIDFMVFTVRLLHIFTVNKQLGPKIVIVSKMMKDVFFFLFFLGVWLVAYGVATEGLLRPRDSDFPSILRRVFYRPYLQIFGQIPQEDMDVALMEHSNCSSEPGFWAHPPGAQAGTCVSQYANWLVVLLLVIFLLVANILLVNLLIAMFSYTFGKVQGNSDLYWKAQRYRLIREFHSRPALAPPFIVISHLRLLLRQLCRRPRSPQPSSPALEHFRVYLSKEAERKLLTWESVHKENFLLARARDKRESDSERLKRTSQKVDLALKQLGHIREYEQRLKVLEREVQQCSRVLGWVAEALSRSALLPPGGPPPPDLPGSKD

SEQ ID NO: 90345 - protein, 1069 aa, Homo sapiens
  Payload ID: 18056
  Gene Name: transient receptor potential cation channel, subfamily M, member 4
  Uniprot ID: Q8TD43
  ENSP ID: ENSP00000407492
MVVPEKEQSWIPKIFKKKTCTTFIVDSTDPGGTLCQCGRPRTAHPAVAMEDAFGAAVVTVWDSDAHTTEKPTDAYGELDFTGAGRKHSNFLRLSDRTDPAAVYSLVTRTWGFRAPNLVVSVLGGSGGPVLQTWLQDLLRRGLVRAAQSTGAWIVTGGLHTGIGRHVGVAVRDHQMASTGGTKVVAMGVAPWGVVRNRDTLINPKGSFPARYRWRGDPEDGVQFPLDYNYSAFFLVDDGTHGCLGGENRFRLRLESYISQQKTGVGGTGIDIPVLLLLIDGDEKMLTRIENATQAQLPCLLVAGSGGAADCLAETLEDTLAPGSGGARQGEARDRIRRFFPKGDLEVLQAQVERIMTRKELLTVYSSEDGSEEFETIVLKALVKACGSSEASAYLDELRLAVAWNRVDIAQSELFRGDIQWRSFHLEASLMDALLNDRPEFVRLLISHGLSLGHFLTPMRLAQLYSAAPSNSLIRNLLDQASHSAGTKAPALKGGAAELRPPDVGHVLRMLLGKMCAPRYPSGGAWDPHPGQGFGESMYLLSDKATSPLSLDAGLGQAPWSDLLLWALLLNRAQMAMYFWEMGSNAVSSALGACLLLRVMARLEPDAEEAARRKDLAFKFEGMGVDLFGECYRSSEVRAARLLLRRCPLWGDATCLQLAMQADARAFFAQDGVQSLLTQKWWGDMASTTPIWALVLAFFCPPLIYTRLITFRKSEEEPTREELEFDMDSVINGEGPVGLTPGLYHLGRTVLCIDFMVFTVRLLHIFTVNKQLGPKIVIVSKMMKDVFFFLFFLGVWLVAYGVATEGLLRPRDSDFPSILRRVFYRPYLQIFGQIPQEDMDVALMEHSNCSSEPGFWAHPPGAQAGTCVSQYANWLVVLLLVIFLLVANILLVNLLIAMFSYTFGKVQGNSDLYWKAQRYRLIREFHSRPALAPPFIVISHLRLLLRQLCRRPRSPQPSSPALEHFRVYLSKEAERKLLTWESVHKENFLLARARDKRESDSERLKRTSQKVDLALKQLGHIREYEQRLKVLEREVQQCSRVLGWVAEALSRSALLPPGGPPPPDLPGSKD

SEQ ID NO: 90346 - protein, 103 aa, Homo sapiens
  Payload ID: 18056
  Gene Name: transient receptor potential cation channel, subfamily M, member 4
  ENSP ID: ENSP00000468989
MVVPEKEQSWIPKIFKKKTCTTFIVDSTDPGARSLRGTGGAVTRRTGSSFPWTTTTRPSSWWTTAHTAAWGARTASACAWSPTSHSRRRAWEGLELTSLSCSS

SEQ ID NO: 90347 - protein, 77 aa, Homo sapiens
  Payload ID: 18056
  Gene Name: transient receptor potential cation channel, subfamily M, member 4
  ENSP ID: ENSP00000469893
MVVPEKEQSWIPKIFKKKTCTTFIVDSTDPGSLDCHWGSAHGHRPACWCGCTGPSDGQHWGHQGGGHGCGPLGCGPE

SEQ ID NO: 90348 - protein, 216 aa, Homo sapiens
  Payload ID: 18056
  Gene Name: transient receptor potential cation channel, subfamily M, member 4
  ENSP ID: ENSP00000470229
MVVPEKEQSWIPKIFKKKTCTTFIVDSTDPGGTLCQCGRPRTAHPAVAMEDAFGAAVVTVWDSDAHTTEKPTDAYGELDFTGAGRKHSNEPGLSLGVCTRASAGMLVWLYGTIRWPALGAPRWWPWVWPPGVWSGIETPSSTPRARSLRGTGGAVTRRTGSSFPWTTTTRPSSWWTTAHTAAWGARTASACAWSPTSHSRRRAWEGLELTSLSCSS

SEQ ID NO: 90349 - protein, 51 aa, Homo sapiens
  Payload ID: 18056
  Gene Name: transient receptor potential cation channel, subfamily M, member 4
  ENSP ID: ENSP00000471236
  MOD_RES (1)..(1): Any amino acid
XRKLLTWESVHKENFLLARARDKRESDSERLKRTSQKSSSVAASWGGWPRP

SEQ ID NO: 90350 - protein, 156 aa, Homo sapiens
  Payload ID: 18056
  Gene Name: transient receptor potential cation channel, subfamily M, member 4
  ENSP ID: ENSP00000473231
MVVPEKEQSWIPKIFKKKTCTTFIVDSTDPGGTLCQCGRPRTAHPAVAMEDAFGAAVVTVWDSDAHTTEKPTDAYGELDFTGAGRKHSNGSFPARYRWRGDPEDGVQFPLDYNYSAFFLVDDGTHGCLGGENRFRLRLESYISQQKTGVGGTGIDI

SEQ ID NO: 90351 - protein, 31 aa, Homo sapiens
  Payload ID: 18056
  Gene Name: transient receptor potential cation channel, subfamily M, member 4
  ENSP ID: ENSP00000483753
MVVPEKEQSWIPKIFKKKTCTTFIVDSTDPG

SEQ ID NO: 90352 - protein, 1165 aa, Homo sapiens
  Payload ID: 18057
  Gene Name: transient receptor potential cation channel, subfamily M, member 5
  Uniprot ID: Q9NZQ8
  ENSP ID: ENSP00000155858
MQDVQGPRPGSPGDAEDRRELGLHRGEVNFGGSGKKRGKFVRVPSGVAPSVLFDLLLAEWHLPAPNLVVSLVGEEQPFAMKSWLRDVLRKGLVKAAQSTGAWILTSALRVGLARHVGQAVRDHSLASTSTKVRVVAVGMASLGRVLHRRILEEAQEDFPVHYPEDDGGSQGPLCSLDSNLSHFILVEPGPPGKGDGLTELRLRLEKHISEQRAGYGGTGSIEIPVLCLLVNGDPNTLERISRAVEQAAPWLILVGSGGIADVLAALVNQPHLLVPKVAEKQFKEKFPSKHFSWEDIVRWTKLLQNITSHQHLLTVYDFEQEGSEELDTVILKALVKACKSHSQEPQDYLDELKLAVAWDRVDIAKSEIFNGDVEWKSCDLEEVMVDALVSNKPEFVRLFVDNGADVADFLTYGRLQELYRSVSRKSLLFDLLQRKQEEARLTLAGLGTQQAREPPAGPPAFSLHEVSRVLKDFLQDACRGFYQDGRPGDRRRAEKGPAKRPTGQKWLLDLNQKSENPWRDLFLWAVLQNRHEMATYFWAMGQEGVAAALAACKILKEMSHLETEAEAARATREAKYERLALDLFSECYSNSEARAFALLVRRNRCWSKTTCLHLATEADAKAFFAHDGVQAFLTRIWWGDMAAGTPILRLLGAFLCPALVYTNLITFSEEAPLRTGLEDLQDLDSLDTEKSPLYGLQSRVEELVEAPRAQGDRGPRAVFLLTRWRKFWGAPVTVFLGNVVMYFAFLFLFTYVLLVDFRPPPQGPSGPEVTLYFWVFTLVLEEIRQGFFTDEDTHLVKKFTLYVGDNWNKCDMVAIFLFIVGVTCRMLPSAFEAGRTVLAMDFMVFTLRLIHIFAIHKQLGPKIIVVERMMKDVFFFLFFLSVWLVAYGVTTQALLHPHDGRLEWIFRRVLYRPYLQIFGQIPLDEIDEARVNCSTHPLLLEDSPSCPSLYANWLVILLLVTFLLVTNVLLMNLLIAMFSYTFQVVQGNADMFWKFQRYNLIVEYHERPALAPPFILLSHLSLTLRRVFKKEAEHKREHLERDLPDPLDQKVVTWETVQKENFLSKMEKRRRDSEGEVLRKTAHRVDFIAKYLGGLREQEKRIKCLESQINYCSVLVSSVADVLAQGGGPRSSQHCGEGSQLVAADHRGGLDGWEQPGAGQPPSDT

SEQ ID NO: 90353 - protein, 1173 aa, Homo sapiens
  Payload ID: 18057
  Gene Name: transient receptor potential cation channel, subfamily M, member 5
  ENSP ID: ENSP00000434121
MQDVQGPRPGSPGDAEDRRELGLHRGEVNFGGSGKKRGKFVRVPSGVAPSVLFDLLLAEWHLPAPNLVVSLVGEEQPFAMKSWLRDVLRKGLVKAAQSTGAWILTSALRVGLARHVGQAVRDHSLASTSTKVRVVAVGMASLGRVLHRRILEEAQEDFPVHYPEDDGGSQGPLCSLDSNLSHFILVEPGPPGKGDGLTELRLRLEKHISEQRAGYGGTGSIEIPVLCLLVNGDPNTLERISRAVEQAAPWLILVGSGGIADVLAALVNQPHLLVPKVAEKQFKEKFPSKHFSWEDIVRWTKLLQNITSHQHLLTVYDFEQEGSEELDTVILKALVKACKSHSQEPQDYLDELKLAVAWDRVDIAKSEIFNGDVEWKSCDLEEVMVDALVSNKPEFVRLFVDNGADVADFLTYGRLQELYRSVSRKSLLFDLLQRKQEEARLTLAGLGTQQAREPPAGPPAFSLHEVSRVLKDFLQDACRGFYQDGRPGDRRRAEKGPAKRPTGQKWLLDLNQKSENPWRDLFLWAVLQNRHEMATYFWAMGQEGVAAALAACKILKEMSHLETEAEAARATREAKYERLALDLFSECYSNSEARAFALLVRRNRCWSKTTCLHLATEADAKAFFAHDGVQAFLTRIWWGDMAAGTPILRLLGAFLCPALVYTNLITFSEEAPLRTGLEDLQDLDSLDTEKSPLYGLQSRVEELVEAPRAQGDRGPRAVFLLTRWRKFWGAPVTVFLGNVVMYFAFLFLFTYVLLVDFRPPPQGPSGPEVTLYFWVFTLVLEEIRQGFFTDEDTHLVKKFTLYVGDNWNKCDMVAIFLFIVGVTCRMLPSAFEAGRTVLAMDFMVFTLRLIHIFAIHKQLGPKIIVVERMMKDVFFFLFFLSVWLVAYGVTTQALLHPHDGRLEWIFRRVLYRPYLQIFGQIPLDEIDEARVNCSTHPLLLEDSPSCPSLYANWLVILLLVTFLLVTNVLLMNLLIAMFSYTFQVVQGNADMFWKFQRYNLIVEYHERPALAPPFILLSHLSLTLRRVFKKEAEHKREHLERDLPDPLDQKVVTWETVQKENFLSKMEKRRRDSEGEVLRKTAHSLTTCSCRRVDFIAKYLGGLREQEKRIKCLESQINYCSVLVSSVADVLAQGGGPRSSQHCGEGSQLVAADHRGGLDGWEQPGAGQPPSDT

SEQ ID NO: 90354 - protein, 1159 aa, Homo sapiens
  Payload ID: 18057
  Gene Name: transient receptor potential cation channel, subfamily M, member 5
  ENSP ID: ENSP00000434383
PGSPGDAEDRRELGLHRGEVNFGGSGKKRGKFVRVPSGVAPSVLFDLLLAEWHLPAPNLVVSLVGEEQPFAMKSWLRDVLRKGLVKAAQSTGAWILTSALRVGLARHVGQAVRDHSLASTSTKVRVVAVGMASLGRVLHRRILEEAQVHEDFPVHYPEDDGGSQGPLCSLDSNLSHFILVEPGPPGKGDGLTELRLRLEKHISEQRAGYGGTGSIEIPVLCLLVNGDPNTLERISRAVEQAAPWLILVGSGGIADVLAALVNQPHLLVPKVAEKQFKEKFPSKHFSWEDIVRWTKLLQNITSHQHLLTVYDFEQEGSEELDTVILKALVKACKSHSQEPQDYLDELKLAVAWDRVDIAKSEIFNGDVEWKSCDLEEVMVDALVSNKPEFVRLFVDNGADVADFLTYGRLQELYRSVSRKSLLFDLLQRKQEEARLTLAGLGTQQAREPPAGPPAFSLHEVSRVLKDFLQDACRGFYQDGRPGDRRRAEKGPAKRPTGQKWLLDLNQKSENPWRDLFLWAVLQNRHEMATYFWAMGQEGVAAALAACKILKEMSHLETEAEAARATREAKYERLALDLFSECYSNSEARAFALLVRRNRCWSKTTCLHLATEADAKAFFAHDGVQAFLTRIWWGDMAAGTPILRLLGAFLCPALVYTNLITFSEEAPLRTGLEDLQDLDSLDTEKSPLYGLQSRVEELVEAPRAQGDRGPRAVFLLTRWRKFWGAPVTVFLGNVVMYFAFLFLFTYVLLVDFRPPPQGPSGPEVTLYFWVFTLVLEEIRQGFFTDEDTHLVKKFTLYVGDNWNKCDMVAIFLFIVGVTCRMLPSAFEAGRTVLAMDFMVFTLRLIHIFAIHKQLGPKIIVVERMMKDVFFFLFFLSVWLVAYGVTTQALLHPHDGRLEWIFRRVLYRPYLQIFGQIPLDEIDEARVNCSTHPLLLEDSPSCPSLYANWLVILLLVTFLLVTNVLLMNLLIAMFSYTFQVVQGNADMFWKFQRYNLIVEYHERPALAPPFILLSHLSLTLRRVFKKEAEHKREHLERDLPDPLDQKVVTWETVQKENFLSKMEKRRRDSEGEVLRKTAHRVDFIAKYLGGLREQEKRIKCLESQINYCSVLVSSVADVLAQGGGPRSSQHCGEGSQLVAADHRGGLDGWEQPGAGQPPSDT

SEQ ID NO: 90355 - protein, 1166 aa, Homo sapiens
  Payload ID: 18057
  Gene Name: transient receptor potential cation channel, subfamily M, member 5
  ENSP ID: ENSP00000436809
MQDVQGPRPGSPGDAEDRRELGLHRGEVNFGGSGKKRGKFVRVPSGVAPSVLFDLLLAEWHLPAPNLVVSLVGEEQPFAMKSWLRDVLRKGLVKAAQSTGAWILTSALRVGLARHVGQAVRDHSLASTSTKVRVVAVGMASLGRVLHRRILEEAQEDFPVHYPEDDGGSQGPLCSLDSNLSHFILVEPGPPGKGDGLTELRLRLEKHISEQRAGYGGTGSIEIPVLCLLVNGDPNTLERISRAVEQAAPWLILVGSGGIADVLAALVNQPHLLVPKVAEKQFKEKFPSKHFSWEDIVRWTKLLQNITSHQHLLTVYDFEQEGSEELDTVILKALVKACKSHSQEPQDYLDELKLAVAWDRVDIAKSEIFNGDVEWKSCDLEEVMVDALVSNKPEFVRLFVDNGADVADFLTYGRLQELYRSVSRKSLLFDLLQRKQEEARLTLAGLGTQQAREPPAGPPAFSLHEVSRVLKDFLQDACRGFYQDGRPGDRRRAEKGPAKRPTGQKWLLDLNQKSENPWRDLFLWAVLQNRHEMATYFWAMGQEGVAAALAACKILKEMSHLETEAEAARATREAKYERLALDLFSECYSNSEARAFALLVRRNRCWSKTTCLHLATEADAKAFFAHDGVQAFLTRIWWGDMAAGTPILRLLGAFLCPALVYTNLITFSEEAPLRTGLEDLQDLDSLDTEKSPLYGLQSRVEELVEAPRAQGDRGPRAVFLLTRWRKFWGAPVTVFLGNVVMYFAFLFLFTYVLLVDFRPPPQGPSGPEVTLYFWVFTLVLEEIRQGFFTDEDTHLVKKFTLYVGDNWNKCDMVAIFLFIVGVTCRMLPSAFEAGRTVLAMDFMVFTLRLIHIFAIHKQLGPKIIVVERMMKDVFFFLFFLSVWLVAYGVTTQALLHPHDGRLEWIFRRVLYRPYLQIFGQIPLDEIDEARVNCSTHPLLLEDSPSCPSLYANWLVILLLVTFLLVTNVLLMNLLIAMFSYTFQVVQGNADMFWKFQRYNLIVEYHERPALAPPFILLSHLSLTLRRVFKKEAEHKREHLERDLPDPLDQKVVTWETVQKENFLSKMEKRRRDSEGEVLRKTAHRVDFIAKYLGGLREQEKRIKCLESQINYCSVLVSSVADVLAQGGGPRTGSQHCGEGSQLVAADHRGGLDGWEQPGAGQPPSDT

SEQ ID NO: 90356 - protein, 303 aa, Homo sapiens
  Payload ID: 18058
  Gene Name: transient receptor potential cation channel, subfamily M, member 6
  ENSP ID: ENSP00000351942
MKEQPVLERLQSQKSWIKGVFDKRECSTIIPSSKNPHRCTPVCQVCQNLIRCYCGRLIGDHAGIDYSWTISAAKGKESEQWSVEKHTTKSPTDTFGTINFQDGEHTHHAKYIRTSYDTKLDHLLHLMLKEWKMELPKLVISVHGGIQNFTMPSKFKEIFSQGLVKAAETTGAWIITEGINTGVSKHVGDALKSHSSHSLRKIWTVGIPPWGVIENQRDLIGKDVVCLYQTLDNPLSKLTTLNSMHSHFILSDDGTVGKYGNEMKLRRNLEKYLSLQKIHCREYHRGSVTQSGCRPAEVFHGLP

SEQ ID NO: 90357 - protein, 2022 aa, Homo sapiens
  Payload ID: 18058
  Gene Name: transient receptor potential cation channel, subfamily M, member 6
  Uniprot ID: Q9BX84
  ENSP ID: ENSP00000354006
MKEQPVLERLQSQKSWIKGVFDKRECSTIIPSSKNPHRCTPVCQVCQNLIRCYCGRLIGDHAGIDYSWTISAAKGKESEQWSVEKHTTKSPTDTFGTINFQDGEHTHHAKYIRTSYDTKLDHLLHLMLKEWKMELPKLVISVHGGIQNFTMPSKFKEIFSQGLVKAAETTGAWIITEGINTGVSKHVGDALKSHSSHSLRKIWTVGIPPWGVIENQRDLIGKDVVCLYQTLDNPLSKLTTLNSMHSHFILSDDGTVGKYGNEMKLRRNLEKYLSLQKIHCRSRQGVPVVGLVVEGGPNVILSVWETVKDKDPVVVCEGTGRAADLLAFTHKHLADEGMLRPQVKEEIICMIQNTFNFSLKQSKHLFQILMECMVHRDCITIFDADSEEQQDLDLAILTALLKGTNLSASEQLNLAMAWDRVDIAKKHILIYEQHWKPDALEQAMSDALVMDRVDFVKLLIEYGVNLHRFLTIPRLEELYNTKQGPTNTLLHHLVQDVKQHTLLSGYRITLIDIGLVVEYLIGRAYRSNYTRKHFRALYNNLYRKYKHQRHSSGNRNESAESTLHSQFIRTAQPYKFKEKSIVLHKSRKKSKEQNVSDDPESTGFLYPYNDLLVWAVLMKRQKMAMFFWQHGEEATVKAVIACILYRAMAHEAKESHMVDDASEELKNYSKQFGQLALDLLEKAFKQNERMAMTLLTYELRNWSNSTCLKLAVSGGLRPFVSHTCTQMLLTDMWMGRLKMRKNSWLKIIISIILPPTILTLEFKSKAEMSHVPQSQDFQFMWYYSDQNASSSKESASVKEYDLERGHDEKLDENQHFGLESGHQHLPWTRKVYEFYSAPIVKFWFYTMAYLAFLMLFTYTVLVEMQPQPSVQEWLVSIYIFTNAIEVVREICISEPGKFTQKVKVWISEYWNLTETVAIGLFSAGFVLRWGDPPFHTAGRLIYCIDIIFWFSRLLDFFAVNQHAGPYVTMIAKMTANMFYIVIIMAIVLLSFGVARKAILSPKEPPSWSLARDIVFEPYWMIYGEVYAGEIDVCSSQPSCPPGSFLTPFLQAVYLFVQYIIMVNLLIAFFNNVYLDMESISNNLWKYNRYRYIMTYHEKPWLPPPLILLSHVGLLLRRLCCHRAPHDQEEGDVGLKLYLSKEDLKKLHDFEEQCVEKYFHEKMEDVNCSCEERIRVTSERVTEMYFQLKEMNEKVSFIKDSLLSLDSQVGHLQDLSALTVDTLKVLSAVDTLQEDEALLAKRKHSTCKKLPHSWSNVICAEVLGSMEIAGEKKYQYYSMPSSLLRSLAGGRHPPRVQRGALLEITNSKREATNVRNDQERQETQSSIVVSGVSPNRQAHSKYGQFLLVPSNLKRVPFSAETVLPLSRPSVPDVLATEQDIQTEVLVHLTGQTPVVSDWASVDEPKEKHEPIAHLLDGQDKAEQVLPTLSCTPEPMTMSSPLSQAKIMQTGGGYVNWAFSEGDETGVFSIKKKWQTCLPSTCDSDSSRSEQHQKQAQDSSLSDNSTRSAQSSECSEVGPWLQPNTSFWINPLRRYRPFARSHSFRFHKEEKLMKICKIKNLSGSSEIGQGAWVKAKMLTKDRRLSKKKKNTQGLQVPIITVNACSQSDQLNPEPGENSISEEEYSKNWFTVSKFSHTGVEPYIHQKMKTKEIGQCAIQISDYLKQSQEDLSKNSLWNSRSTNLNRNSLLKSSIGVDKISASLKSPQEPHHHYSAIERNNLMRLSQTIPFTPVQLFAGEEITVYRLEESSPLNLDKSMSSWSQRGRAAMIQVLSREEMDGGLRKAMRVVSTWSEDDILKPGQVFIVKSFLPEVVRTWHKIFQESTVLHLCLREIQQQRAAQKLIYTFNQVKPQTIPYTPRFLEVFLIYCHSANQWLTIEKYMTGEFRKYNNNNGDEITPTNTLEELMLAFSHWTYEYTRGELLVLDLQGVGENLTDPSVIKPEVKQSRGMVFGPANLGEDAIRNFIAKHHCNSCCRKLKLPDLKRNDYSPERINSTFGLEIKIESAEEPPARETGRNSPEDDMQL

SEQ ID NO: 90358 - protein, 2017 aa, Homo sapiens
  Payload ID: 18058
  Gene Name: transient receptor potential cation channel, subfamily M, member 6
  Uniprot ID: Q9BX84
  ENSP ID: ENSP00000354962
MTAPVTSQKSWIKGVFDKRECSTIIPSSKNPHRCTPVCQVCQNLIRCYCGRLIGDHAGIDYSWTISAAKGKESEQWSVEKHTTKSPTDTFGTINFQDGEHTHHAKYIRTSYDTKLDHLLHLMLKEWKMELPKLVISVHGGIQNFTMPSKFKEIFSQGLVKAAETTGAWIITEGINTGVSKHVGDALKSHSSHSLRKIWTVGIPPWGVIENQRDLIGKDVVCLYQTLDNPLSKLTTLNSMHSHFILSDDGTVGKYGNEMKLRRNLEKYLSLQKIHCRSRQGVPVVGLVVEGGPNVILSVWETVKDKDPVVVCEGTGRAADLLAFTHKHLADEGMLRPQVKEEIICMIQNTFNFSLKQSKHLFQILMECMVHRDCITIFDADSEEQQDLDLAILTALLKGTNLSASEQLNLAMAWDRVDIAKKHILIYEQHWKPDALEQAMSDALVMDRVDFVKLLIEYGVNLHRFLTIPRLEELYNTKQGPTNTLLHHLVQDVKQHTLLSGYRITLIDIGLVVEYLIGRAYRSNYTRKHFRALYNNLYRKYKHQRHSSGNRNESAESTLHSQFIRTAQPYKFKEKSIVLHKSRKKSKEQNVSDDPESTGFLYPYNDLLVWAVLMKRQKMAMFFWQHGEEATVKAVIACILYRAMAHEAKESHMVDDASEELKNYSKQFGQLALDLLEKAFKQNERMAMTLLTYELRNWSNSTCLKLAVSGGLRPFVSHTCTQMLLTDMWMGRLKMRKNSWLKIIISIILPPTILTLEFKSKAEMSHVPQSQDFQFMWYYSDQNASSSKESASVKEYDLERGHDEKLDENQHFGLESGHQHLPWTRKVYEFYSAPIVKFWFYTMAYLAFLMLFTYTVLVEMQPQPSVQEWLVSIYIFTNAIEVVREICISEPGKFTQKVKVWISEYWNLTETVAIGLFSAGFVLRWGDPPFHTAGRLIYCIDIIFWFSRLLDFFAVNQHAGPYVTMIAKMTANMFYIVIIMAIVLLSFGVARKAILSPKEPPSWSLARDIVFEPYWMIYGEVYAGEIDVCSSQPSCPPGSFLTPFLQAVYLFVQYIIMVNLLIAFFNNVYLDMESISNNLWKYNRYRYIMTYHEKPWLPPPLILLSHVGLLLRRLCCHRAPHDQEEGDVGLKLYLSKEDLKKLHDFEEQCVEKYFHEKMEDVNCSCEERIRVTSERVTEMYFQLKEMNEKVSFIKDSLLSLDSQVGHLQDLSALTVDTLKVLSAVDTLQEDEALLAKRKHSTCKKLPHSWSNVICAEVLGSMEIAGEKKYQYYSMPSSLLRSLAGGRHPPRVQRGALLEITNSKREATNVRNDQERQETQSSIVVSGVSPNRQAHSKYGQFLLVPSNLKRVPFSAETVLPLSRPSVPDVLATEQDIQTEVLVHLTGQTPVVSDWASVDEPKEKHEPIAHLLDGQDKAEQVLPTLSCTPEPMTMSSPLSQAKIMQTGGGYVNWAFSEGDETGVFSIKKKWQTCLPSTCDSDSSRSEQHQKQAQDSSLSDNSTRSAQSSECSEVGPWLQPNTSFWINPLRRYRPFARSHSFRFHKEEKLMKICKIKNLSGSSEIGQGAWVKAKMLTKDRRLSKKKKNTQGLQVPIITVNACSQSDQLNPEPGENSISEEEYSKNWFTVSKFSHTGVEPYIHQKMKTKEIGQCAIQISDYLKQSQEDLSKNSLWNSRSTNLNRNSLLKSSIGVDKISASLKSPQEPHHHYSAIERNNLMRLSQTIPFTPVQLFAGEEITVYRLEESSPLNLDKSMSSWSQRGRAAMIQVLSREEMDGGLRKAMRVVSTWSEDDILKPGQVFIVKSFLPEVVRTWHKIFQESTVLHLCLREIQQQRAAQKLIYTFNQVKPQTIPYTPRFLEVFLIYCHSANQWLTIEKYMTGEFRKYNNNNGDEITPTNTLEELMLAFSHWTYEYTRGELLVLDLQGVGENLTDPSVIKPEVKQSRGMVFGPANLGEDAIRNFIAKHHCNSCCRKLKLPDLKRNDYSPERINSTFGLEIKIESAEEPPARETGRNSPEDDMQL

SEQ ID NO: 90359 - protein, 2017 aa, Homo sapiens
  Payload ID: 18058
  Gene Name: transient receptor potential cation channel, subfamily M, member 6
  Uniprot ID: Q9BX84
  ENSP ID: ENSP00000396672
MIILSKSQKSWIKGVFDKRECSTIIPSSKNPHRCTPVCQVCQNLIRCYCGRLIGDHAGIDYSWTISAAKGKESEQWSVEKHTTKSPTDTFGTINFQDGEHTHHAKYIRTSYDTKLDHLLHLMLKEWKMELPKLVISVHGGIQNFTMPSKFKEIFSQGLVKAAETTGAWIITEGINTGVSKHVGDALKSHSSHSLRKIWTVGIPPWGVIENQRDLIGKDVVCLYQTLDNPLSKLTTLNSMHSHFILSDDGTVGKYGNEMKLRRNLEKYLSLQKIHCRSRQGVPVVGLVVEGGPNVILSVWETVKDKDPVVVCEGTGRAADLLAFTHKHLADEGMLRPQVKEEIICMIQNTFNFSLKQSKHLFQILMECMVHRDCITIFDADSEEQQDLDLAILTALLKGTNLSASEQLNLAMAWDRVDIAKKHILIYEQHWKPDALEQAMSDALVMDRVDFVKLLIEYGVNLHRFLTIPRLEELYNTKQGPTNTLLHHLVQDVKQHTLLSGYRITLIDIGLVVEYLIGRAYRSNYTRKHFRALYNNLYRKYKHQRHSSGNRNESAESTLHSQFIRTAQPYKFKEKSIVLHKSRKKSKEQNVSDDPESTGFLYPYNDLLVWAVLMKRQKMAMFFWQHGEEATVKAVIACILYRAMAHEAKESHMVDDASEELKNYSKQFGQLALDLLEKAFKQNERMAMTLLTYELRNWSNSTCLKLAVSGGLRPFVSHTCTQMLLTDMWMGRLKMRKNSWLKIIISIILPPTILTLEFKSKAEMSHVPQSQDFQFMWYYSDQNASSSKESASVKEYDLERGHDEKLDENQHFGLESGHQHLPWTRKVYEFYSAPIVKFWFYTMAYLAFLMLFTYTVLVEMQPQPSVQEWLVSIYIFTNAIEVVREICISEPGKFTQKVKVWISEYWNLTETVAIGLFSAGFVLRWGDPPFHTAGRLIYCIDIIFWFSRLLDFFAVNQHAGPYVTMIAKMTANMFYIVIIMAIVLLSFGVARKAILSPKEPPSWSLARDIVFEPYWMIYGEVYAGEIDVCSSQPSCPPGSFLTPFLQAVYLFVQYIIMVNLLIAFFNNVYLDMESISNNLWKYNRYRYIMTYHEKPWLPPPLILLSHVGLLLRRLCCHRAPHDQEEGDVGLKLYLSKEDLKKLHDFEEQCVEKYFHEKMEDVNCSCEERIRVTSERVTEMYFQLKEMNEKVSFIKDSLLSLDSQVGHLQDLSALTVDTLKVLSAVDTLQEDEALLAKRKHSTCKKLPHSWSNVICAEVLGSMEIAGEKKYQYYSMPSSLLRSLAGGRHPPRVQRGALLEITNSKREATNVRNDQERQETQSSIVVSGVSPNRQAHSKYGQFLLVPSNLKRVPFSAETVLPLSRPSVPDVLATEQDIQTEVLVHLTGQTPVVSDWASVDEPKEKHEPIAHLLDGQDKAEQVLPTLSCTPEPMTMSSPLSQAKIMQTGGGYVNWAFSEGDETGVFSIKKKWQTCLPSTCDSDSSRSEQHQKQAQDSSLSDNSTRSAQSSECSEVGPWLQPNTSFWINPLRRYRPFARSHSFRFHKEEKLMKICKIKNLSGSSEIGQGAWVKAKMLTKDRRLSKKKKNTQGLQVPIITVNACSQSDQLNPEPGENSISEEEYSKNWFTVSKFSHTGVEPYIHQKMKTKEIGQCAIQISDYLKQSQEDLSKNSLWNSRSTNLNRNSLLKSSIGVDKISASLKSPQEPHHHYSAIERNNLMRLSQTIPFTPVQLFAGEEITVYRLEESSPLNLDKSMSSWSQRGRAAMIQVLSREEMDGGLRKAMRVVSTWSEDDILKPGQVFIVKSFLPEVVRTWHKIFQESTVLHLCLREIQQQRAAQKLIYTFNQVKPQTIPYTPRFLEVFLIYCHSANQWLTIEKYMTGEFRKYNNNNGDEITPTNTLEELMLAFSHWTYEYTRGELLVLDLQGVGENLTDPSVIKPEVKQSRGMVFGPANLGEDAIRNFIAKHHCNSCCRKLKLPDLKRNDYSPERINSTFGLEIKIESAEEPPARETGRNSPEDDMQL

SEQ ID NO: 90360 - protein, 1865 aa, Homo sapiens
  Payload ID: 18059
  Gene Name: transient receptor potential cation channel, subfamily M, member 7
  Uniprot ID: Q96QT4
  ENSP ID: ENSP00000320239
MSQKSWIESTLTKRECVYIIPSSKDPHRCLPGCQICQQLVRCFCGRLVKQHACFTASLAMKYSDVKLGDHFNQAIEEWSVEKHTEQSPTDAYGVINFQGGSHSYRAKYVRLSYDTKPEVILQLLLKEWQMELPKLVISVHGGMQKFELHPRIKQLLGKGLIKAAVTTGAWILTGGVNTGVAKHVGDALKEHASRSSRKICTIGIAPWGVIENRNDLVGRDVVAPYQTLLNPLSKLNVLNNLHSHFILVDDGTVGKYGAEVRLRRELEKTINQQRIHARIGQGVPVVALIFEGGPNVILTVLEYLQESPPVPVVVCEGTGRAADLLAYIHKQTEEGGNLPDAAEPDIISTIKKTFNFGQNEALHLFQTLMECMKRKELITVFHIGSDEHQDIDVAILTALLKGTNASAFDQLILTLAWDRVDIAKNHVFVYGQQWLVGSLEQAMLDALVMDRVAFVKLLIENGVSMHKFLTIPRLEELYNTKQGPTNPMLFHLVRDVKQGNLPPGYKITLIDIGLVIEYLMGGTYRCTYTRKRFRLIYNSLGGNNRRSGRNTSSSTPQLRKSHESFGNRADKKEKMRHNHFIKTAQPYRPKIDTVMEEGKKKRTKDEIVDIDDPETKRFPYPLNELLIWACLMKRQVMARFLWQHGEESMAKALVACKIYRSMAYEAKQSDLVDDTSEELKQYSNDFGQLAVELLEQSFRQDETMAMKLLTYELKNWSNSTCLKLAVSSRLRPFVAHTCTQMLLSDMWMGRLNMRKNSWYKVILSILVPPAILLLEYKTKAEMSHIPQSQDAHQMTMDDSENNFQNITEEIPMEVFKEVRILDSNEGKNEMEIQMKSKKLPITRKFYAFYHAPIVKFWFNTLAYLGFLMLYTFVVLVQMEQLPSVQEWIVIAYIFTYAIEKVREIFMSEAGKVNQKIKVWFSDYFNISDTIAIISFFIGFGLRFGAKWNFANAYDNHVFVAGRLIYCLNIIFWYVRLLDFLAVNQQAGPYVMMIGKMVANMFYIVVIMALVLLSFGVPRKAILYPHEAPSWTLAKDIVFHPYWMIFGEVYAYEIDVCANDSVIPQICGPGTWLTPFLQAVYLFVQYIIMVNLLIAFFNNVYLQVKAISNIVWKYQRYHFIMAYHEKPVLPPPLIILSHIVSLFCCICKRRKKDKTSDGPKLFLTEEDQKKLHDFEEQCVEMYFNEKDDKFHSGSEERIRVTFERVEQMCIQIKEVGDRVNYIKRSLQSLDSQIGHLQDLSALTVDTLKTLTAQKASEASKVHNEITRELSISKHLAQNLIDDGPVRPSVWKKHGVVNTLSSSLPQGDLESNNPFHCNILMKDDKDPQCNIFGQDLPAVPQRKEFNFPEAGSSSGALFPSAVSPPELRQRLHGVELLKIFNKNQKLGSSSTSIPHLSSPPTKFFVSTPSQPSCKSHLETGTKDQETVCSKATEGDNTEFGAFVGHRDSMDLQRFKETSNKIKILSNNNTSENTLKRVSSLAGFTDCHRTSIPVHSKQAEKISRRPSTEDTHEVDSKAALIPDWLQDRPSNREMPSEEGTLNGLTSPFKPAMDTNYYYSAVERNNLMRLSQSIPFTPVPPRGEPVTVYRLEESSPNILNNSMSSWSQLGLCAKIEFLSKEEMGGGLRRAVKVQCTWSEHDILKSGHLYIIKSFLPEVVNTWSSIYKEDTVLHLCLREIQQQRAAQKLTFAFNQMKPKSIPYSPRFLEVFLLYCHSAGQWFAVEECMTGEFRKYNNNNGDEIIPTNTLEEIMLAFSHWTYEYTRGELLVLDLQGVGENLTDPSVIKAEEKRSCDMVFGPANLGEDAIKNFRAKHHCNSCCRKLKLPDLKRNDYTPDKIIFPQDEPSDLNLQPGNSTKESESTNSVRLML

SEQ ID NO: 90361 - protein, 535 aa, Homo sapiens
  Payload ID: 18059
  Gene Name: transient receptor potential cation channel, subfamily M, member 7
  ENSP ID: ENSP00000452873
SMHKFLTIPRLEELYNTKQGPTNPMLFHLVRDVKQGNLPPGYKITLIDIGLVIEYLMGGTYRCTYTRKRFRLIYNSLGGNNRRSGRNTSSSTPQLRKSHESFGNRADKKEKMRHNHFIKTAQPYRPKIDTVMEEGKKKRTKDEIVDIDDPETKRFPYPLNELLIWACLMKRQVMARFLWQHGEESMAKALVACKIYRSMAYEAKQSDLVDDTSEELKQYSNDFGQLAVELLEQSFRQDETMAMKLLTYELKNWSNSTCLKLAVSSRLRPFVAHTCTQMLLSDMWMGRLNMRKNSWYKVILSILVPPAILLLEYKTKAEMSHIPQSQDAHQMTMDDSENNFQNITEEIPMEVFKEVRILDSNEGKNEMEIQMKSKKLPITRKFYAFYHAPIVKFWFNTLAYLGFLMLYTFVVLVQMEQLPSVQEWIVIAYIFTYAIEKVREIFMSEAGKVNQKIKVWFSDYFNISDTIAIISFFIGFGLRFGAKWNFANAYDNHVFVAGRLIYCLNIIFWYVRLLDFLAVNQQAGPYVMMIGKMVS

SEQ ID NO: 90362 - protein, 1864 aa, Homo sapiens
  Payload ID: 18059
  Gene Name: transient receptor potential cation channel, subfamily M, member 7
  ENSP ID: ENSP00000453277
MSQKSWIESTLTKRECVYIIPSSKDPHRCLPGCQICQQLVRCFCGRLVKQHACFTASLAMKYSDVKLGDHFNQAIEEWSVEKHTEQSPTDAYGVINFQGGSHSYRAKYVRLSYDTKPEVILQLLLKEWQMELPKLVISVHGGMQKFELHPRIKQLLGKGLIKAAVTTGAWILTGGVNTGVAKHVGDALKEHASRSSRKICTIGIAPWGVIENRNDLVGRDVVAPYQTLLNPLSKLNVLNNLHSHFILVDDGTVGKYGAEVRLRRELEKTINQQRIHARIGQGVPVVALIFEGGPNVILTVLEYLQESPPVPVVVCEGTGRAADLLAYIHKQTEEGGNLPDAAEPDIISTIKKTFNFGQNEALHLFQTLMECMKRKELITVFHIGSDEHQDIDVAILTALLKGTNASAFDQLILTLAWDRVDIAKNHVFVYGQQWLVGSLEQAMLDALVMDRVAFVKLLIENGVSMHKFLTIPRLEELYNTKQGPTNPMLFHLVRDVKQGNLPPGYKITLIDIGLVIEYLMGGTYRCTYTRKRFRLIYNSLGGNNRRSGRNTSSSTPQLRKSHESFGNRADKKEKMRHNHFIKTAQPYRPKIDTVMEEGKKKRTKDEIVDIDDPETKRFPYPLNELLIWACLMKRQVMARFLWQHGEESMAKALVACKIYRSMAYEAKQSDLVDDTSEELKQYSNDFGQLAVELLEQSFRQDETMAMKLLTYELKNWSNSTCLKLAVSSRLRPFVAHTCTQMLLSDMWMGRLNMRKNSWYKVILSILVPPAILLLEYKTKAEMSHIPQSQDAHQMTMDDSENNFQNITEEIPMEVFKEVRILDSNEGKNEMEIQMKSKKLPITRKFYAFYHAPIVKFWFNTLAYLGFLMLYTFVVLVQMEQLPSVQEWIVIAYIFTYAIEKVREIFMSEAGKVNQKIKVWFSDYFNISDTIAIISFFIGFGLRFGAKWNFANAYDNHVFVAGRLIYCLNIIFWYVRLLDFLAVNQQAGPYVMMIGKMVANMFYIVVIMALVLLSFGVPRKAILYPHEAPSWTLAKDIVFHPYWMIFGEVYAYEIDVCANDSVIPQICGPGTWLTPFLQAVYLFVQYIIMVNLLIAFFNNVYLQVKAISNIVWKYQRYHFIMAYHEKPVLPPPLIILSHIVSLFCCICKRRKKDKTSDGPKLFLTEEDQKKLHDFEEQCVEMYFNEKDDKFHSGSEERIRVTFERVEQMCIQIKEVGDRVNYIKRSLQSLDSQIGHLQDLSALTVDTLKTLTAQKASEASKVHNEITRELSISKHLAQNLIDDGPVRPSVWKKHGVVNTLSSSLPQGDLESNNPFHCNILMKDDKDPQCNIFGQDLPAVPQRKEFNFPEAGSSSGALFPSAVSPPELRQRLHGVELLKIFNKNQKLGSSSTSIPHLSSPPTKFFVSTPSQPSCKSHLETGTKDQETVCSKATEGDNTEFGAFVGHRDSMDLQRFKETSNKIKILSNNNTSENTLKRVSSLAGFTDCHRTSIPVHSKQEKISRRPSTEDTHEVDSKAALIPDWLQDRPSNREMPSEEGTLNGLTSPFKPAMDTNYYYSAVERNNLMRLSQSIPFTPVPPRGEPVTVYRLEESSPNILNNSMSSWSQLGLCAKIEFLSKEEMGGGLRRAVKVQCTWSEHDILKSGHLYIIKSFLPEVVNTWSSIYKEDTVLHLCLREIQQQRAAQKLTFAFNQMKPKSIPYSPRFLEVFLLYCHSAGQWFAVEECMTGEFRKYNNNNGDEIIPTNTLEEIMLAFSHWTYEYTRGELLVLDLQGVGENLTDPSVIKAEEKRSCDMVFGPANLGEDAIKNFRAKHHCNSCCRKLKLPDLKRNDYTPDKIIFPQDEPSDLNLQPGNSTKESESTNSVRLML

SEQ ID NO: 90363 - protein, 234 aa, Homo sapiens
  Payload ID: 18059
  Gene Name: transient receptor potential cation channel, subfamily M, member 7
  ENSP ID: ENSP00000454066
  MOD_RES (1)..(1): Any amino acid
XGLRRAVKVQCTWSEHDILKSGHLYIIKSFLPEVVNTWSSIYKEDTVLHLCLREIQQQRAAQKLTFAFNQMKPKSIPYSPRFLEVFLLYCHSAGQWFAVEECMTGEFRKYNNNNGDEIIPTNTLEEIMLAFSHWTYEYTRGELLVLDLQGVGENLTDPSVIKAEEKRSCDMVFGPANLGEDAIKNFRAKHHCNSCCRKLKLPEMRSHCVTQAGLELTSSNPQCLSLTKCWDYQC

SEQ ID NO: 90364 - protein, 1104 aa, Homo sapiens
  Payload ID: 18060
  Gene Name: transient receptor potential cation channel, subfamily M, member 8
  Uniprot ID: Q7Z2W7
  ENSP ID: ENSP00000323926
MSFRAARLSMRNRRNDTLDSTRTLYSSASRSTDLSYSESDLVNFIQANFKKRECVFFTKDSKATENVCKCGYAQSQHMEGTQINQSEKWNYKKHTKEFPTDAFGDIQFETLGKKGKYIRLSCDTDAEILYELLTQHWHLKTPNLVISVTGGAKNFALKPRMRKIFSRLIYIAQSKGAWILTGGTHYGLMKYIGEVVRDNTISRSSEENIVAIGIAAWGMVSNRDTLIRNCDAEGYFLAQYLMDDFTRDPLYILDNNHTHLLLVDNGCHGHPTVEAKLRNQLEKYISERTIQDSNYGGKIPIVCFAQGGGKETLKAINTSIKNKIPCVVVEGSGQIADVIASLVEVEDALTSSAVKEKLVRFLPRTVSRLPEEETESWIKWLKEILECSHLLTVIKMEEAGDEIVSNAISYALYKAFSTSEQDKDNWNGQLKLLLEWNQLDLANDEIFTNDRRWESADLQEVMFTALIKDRPKFVRLFLENGLNLRKFLTHDVLTELFSNHFSTLVYRNLQIAKNSYNDALLTFVWKLVANFRRGFRKEDRNGRDEMDIELHDVSPITRHPLQALFIWAILQNKKELSKVIWEQTRGCTLAALGASKLLKTLAKVKNDINAAGESEELANEYETRAVELFTECYSSDEDLAEQLLVYSCEAWGGSNCLELAVEATDQHFIAQPGVQNFLSKQWYGEISRDTKNWKIILCLFIIPLVGCGFVSFRKKPVDKHKKLLWYYVAFFTSPFVVFSWNVVFYIAFLLLFAYVLLMDFHSVPHPPELVLYSLVFVLFCDEVRQWYVNGVNYFTDLWNVMDTLGLFYFIAGIVFRLHSSNKSSLYSGRVIFCLDYIIFTLRLIHIFTVSRNLGPKIIMLQRMLIDVFFFLFLFAVWMVAFGVARQGILRQNEQRWRWIFRSVIYEPYLAMFGQVPSDVDGTTYDFAHCTFTGNESKPLCVELDEHNLPRFPEWITIPLVCIYMLSTNILLVNLLVAMFGYTVGTVQENNDQVWKFQRYFLVQEYCSRLNIPFPFIVFAYFYMVVKKCFKCCCKEKNMESSVCCFKNEDNETLAWEGVMKENYLVKINTKANDTSEEMRHRFRQLDTKLNDLKGLLKEIANKIK

SEQ ID NO: 90365 - protein, 192 aa, Homo sapiens
  Payload ID: 18060
  Gene Name: transient receptor potential cation channel, subfamily M, member 8
  ENSP ID: ENSP00000347956
MKSFLPVHTIVLIRENVCKCGYAQSQHMEGTQINQSEKWNYKKHTKEFPTDAFGDIQFETLGKKGKYIRLSCDTDAEILYELLTQHWHLKTPNLVISVTGGAKNFALKPRMRKIFSRLIYIAQSKGAWILTGGTHYGLMKYIGEVVRDNTISRSSEENIVAIGIAAWGMVSNRDTLIRNCDAEVPVGQEEVC

SEQ ID NO: 90366 - protein, 165 aa, Homo sapiens
  Payload ID: 18060
  Gene Name: transient receptor potential cation channel, subfamily M, member 8
  Uniprot ID: Q7Z2W7
  ENSP ID: ENSP00000386771
MEGTQINQSEKWNYKKHTKEFPTDAFGDIQFETLGKKGKYIRLSCDTDAEILYELLTQHWHLKTPNLVISVTGGAKNFALKPRMRKIFSRLIYIAQSKGAWILTGGTHYGLMKYIGEVVRDNTISRSSEENIVAIGIAAWGMVSNRDTLIRNCDAEVPVGQEEVC

SEQ ID NO: 90367 - protein, 139 aa, Homo sapiens
  Payload ID: 18060
  Gene Name: transient receptor potential cation channel, subfamily M, member 8
  ENSP ID: ENSP00000390609
GRVIFCLDYIIFTLRLIHIFTVSRNLGPKIIMLQRMLIDVFFFLFLFAVWMVAFGVARQGILRQNEQRWRWIFRSVIYEPYLAMFGQVPSDVDGKPDLAQMETAWRRHLLPEPTPRAAPETALQKHARETESNITEYHV

SEQ ID NO: 90368 - protein, 325 aa, Homo sapiens
  Payload ID: 18060
  Gene Name: transient receptor potential cation channel, subfamily M, member 8
  ENSP ID: ENSP00000396745
MSFRAARLSMRNRRNDTLDSTRTLYSSASRSTDLSYSESDLVNFIQANFKKRECVFFTKDSKATENVCKCGYAQSQHMEGTQINQSEKWNYKKHTKEFPTDAFGDIQFETLGKKGKYIRLSCDTDAEILYELLTQHWHLKTPNLVISVTGGAKNFALKPRMRKIFSRLIYIAQSKGAWILTGGTHYGLMKYIGEVVRDNTISRSSEENIVAIGIAAWGMVSNRDTLIRNCDAEGYFLAQYLMDDFTRDPLYILDNNHTHLLLVDNGCHGHPTVEAKLRNQLEKYISERTIQDSNYGGKIPIVCFAQGGGKETLKSRRFGRRISVT

SEQ ID NO: 90369 - protein, 753 aa, Homo sapiens
  Payload ID: 18060
  Gene Name: transient receptor potential cation channel, subfamily M, member 8
  ENSP ID: ENSP00000404423
MDDFTRDPLYILDNNHTHLLLVDNGCHGHPTVEAKLRNQLEKYISERTIQDSNYGGKIPIVCFAQGGGKETLKAINTSIKNKIPCVVVEGSGQIADVIASLVEVEDALTSSAVKEKLVRFLPRTVSRLPEEETESWIKWLKEILECSHLLTVIKMEEAGDEIVSNAISYALYKAFSTSEQDKDNWNGQLKLLLEWNQLDLANDEIFTNDRRWESADLQEVMFTALIKDRPKFVRLFLENGLNLRKFLTHDVLTELFSNHFSTLVYRNLQIAKNSYNDALLTFVWKLVANFRRGFRKEDRNGRDEMDIELHDVSPITRHPLQALFIWAILQNKKELSKVIWEQTRGCTLAALGASKLLKTLAKVKNDINAAGESEELANEYETRAVELFTECYSSDEDLAEQLLVYSCEAWGGSNCLELAVEATDQHFIAQPGVQWYVNGVNYFTDLWNVMDTLGLFYFIAGIVFRLHSSNKSSLYSGRVIFCLDYIIFTLRLIHIFTVSRNLGPKIIMLQRMLIDVFFFLFLFAVWMVAFGVARQGILRQNEQRWRWIFRSVIYEPYLAMFGQVPSDVDGTTYDFAHCTFTGNESKPLCVELDEHNLPRFPEWITIPLVCIYMLSTNILLVNLLVAMFGYTVGTVQENNDQVWKFQRYFLVQEYCSRLNIPFPFIVFAYFYMVVKKCFKCCCKEKNMESSVCCFKNEDNETLAWEGVMKENYLVKINTKANDTSEEMRHRFRQLDTKLNDLKGLLKEIANKIK

SEQ ID NO: 90370 - protein, 376 aa, Homo sapiens
  Payload ID: 18060
  Gene Name: transient receptor potential cation channel, subfamily M, member 8
  ENSP ID: ENSP00000414198
TECYSSDEDLAEQLLVYSCEAWGGSNCLELAVEATDQHFIAQPGVQWYVNGVNYFTDLWNVMDTLGLFYFIAGIVFRLHSSNKSSLYSGRVIFCLDYIIFTLRLIHIFTVSRNLGPKIIMLQRMLIDVFFFLFLFAVWMVAFGVARQGILRQNEQRWRWIFRSVIYEPYLAMFGQVPSDVDGTTYDFAHCTFTGNESKPLCVELDEHNLPRFPEWITIPLVCIYMLSTNILLVNLLVAMFGYTVGTVQENNDQVWKFQRYFLVQEYCSRLNIPFPFIVFAYFYMVVKKCFKCCCKEKNMESSVCCFKNEDNETLAWEGVMKENYLVKINTKANDTSEEMRHRFRQLDTKIILRNADEQFCYRLLNERFSDPWVHGG

SEQ ID NO: 90371 - protein, 779 aa, Homo sapiens
  Payload ID: 18061
  Gene Name: transient receptor potential cation channel, subfamily V, member 1
  ENSP ID: ENSP00000311692
MKKWSSTDLGAAADPLQKDTCPDPLDGDPNSRPPPAKPQLSTAKSRTRLFGKGDSEEAFPVDCPHEEGELDSCPTITVSPVITIQRPGDGPTGARLLSQDSVAASTEKTLRLYDRRSIFEAVAQNNCQDLESLLLFLQKSKKHLTDNEFKDPETGKTCLLKAMLNLHDGQNTTIPLLLEIARQTDSLKELVNASYTDSYYKGQTALHIAIERRNMALVTLLVENGADVQAAAHGDFFKKTKGRPGFYFGELPLSLAACTNQLGIVKFLLQNSWQTADISARDSVGNTVLHALVEVADNTADNTKFVTSMYNEILMLGAKLHPTLKLEELTNKKGMTPLALAAGTGKIGNRHDMLLVEPLNRLLQDKWDRFVKRIFYFNFLVYCLYMIIFTMAAYYRPVDGLPPFKMEKTGDYFRVTGEILSVLGGVYFFFRGIQYFLQRRPSMKTLFVDSYSEMLFFLQSLFMLATVVLYFSHLKEYVASMVFSLALGWTNMLYYTRGFQQMGIYAVMIEKMILRDLCRFMFVYIVFLFGFSTAVVTLIEDGKNDSLPSESTSHRWRGPACRPPDSSYNSLYSTCLELFKFTIGMGDLEFTENYDFKAVFIILLLAYVILTYILLLNMLIALMGETVNKIAQESKNIWKLQRAITILDTEKSFLKCMRKAFRSGKLLQVGYTPDGKDDYRWCFRVDEVNWTTWNTNVGIINEDPGNCEGVKRTLSFSLRSSRVSGRHWKNFALVPLLREASARDRQSAQPEEVYLRQFSGSLKPEDAEVFKSPAASGEK

SEQ ID NO: 90372 - protein, 839 aa, Homo sapiens [sequence omitted]

SEQ ID NO: 90373 - protein, 839 aa, Homo sapiens [sequence omitted]

SEQ ID NO: 90374 - protein, 850 aa, Homo sapiens
  Payload ID: 18061
  Gene Name: transient receptor potential cation channel, subfamily V, member 1
  ENSP ID: ENSP00000409627
MKKWSSTDLGAAADPLQKDTCPDPLDGDPNSRPPPAKPQLSTAKSRTRLFGKGDSEEAFPVDCPHEEGELDSCPTITVSPVITIQRPGDGPTGARLLSQDSVAASTEKTLRLYDRRSIFEAVAQNNCQDLESLLLFLQKSKKHLTDNEFKDPETGKTCLLKAMLNLHDGQNTTIPLLLEIARQTDSLKELVNASYTDSYYKGQTALHIAIERRNMALVTLLVENGADVQAAAHGDFFKKTKGRPGFYFGELPLSLAACTNQLGIVKFLLQNSWQTADISARDSVGNTVLHALVEVADNTADNTKFVTSMYNEILMLGAKLHPTLKLEELTNKKGMTPLALAAGTGKIGVIENGPPLSFMVLAYILQREIQEPECRHLSRKFTEWAYGPVHSSLYDLSCIDTCEKNSVLEVIAYSSSETPNRHDMLLVEPLNRLLQDKWDRFVKRIFYFNFLVYCLYMIIFTMAAYYRPVDGLPPFKMEKTGDYFRVTGEILSVLGGVYFFFRGIQYFLQRRPSMKTLFVDSYSEMLFFLQSLFMLATVVLYFSHLKEYVASMVFSLALGWTNMLYYTRGFQQMGIYAVMIEKMILRDLCRFMFVYIVFLFGFSTAVVTLIEDGKNDSLPSESTSHRWRGPACRPPDSSYNSLYSTCLELFKFTIGMGDLEFTENYDFKAVFIILLLAYVILTYILLLNMLIALMGETVNKIAQESKNIWKLQRAITILDTEKSFLKCMRKAFRSGKLLQVGYTPDGKDDYRWCFRVDEVNWTTWNTNVGIINEDPGNCEGVKRTLSFSLRSSRVSGRHWKNFALVPLLREASARDRQSAQPEEVYLRQFSGSLKPEDAEVFKSPAASGEK

SEQ ID NO: 90375 - protein, 829 aa, Homo sapiens
  Payload ID: 18061
  Gene Name: transient receptor potential cation channel, subfamily V, member 1
  ENSP ID: ENSP00000459042
MKKWSSTDLGAAADPLQKDTCPDPLDGDPNSRPPPAKPQLSTAKSRTRLFGKGDSEEAFPVDCPHEEGELDSCPTITVSPVITIQRPGDGPTGARLLSQDSVAASTEKTLRLYDRRSIFEAVAQNNCQDLESLLLFLQKSKKHLTDNEFKDPETGKTCLLKAMLNLHDGQNTTIPLLLEIARQTDSLKELVNASYTDSYYKGQTALHIAIERRNMALVTLLVENGADVQAAAHGDFFKKTKGRPGFYFGELPLSLAACTNQLGIVKFLLQNSWQTADISARDSVGNTVLHALVEVADNTADNTKFVTSMYNEILMLGAKLHPTLKLEELTNKKGMTPLALAAGTGKIGVLAYILQREIQEPECRHLSRKFTEWAYGPVHSSLYDLSCIDTCEKNSVLENRHDMLLVEPLNRLLQDKWDRFVKRIFYFNFLVYCLYMIIFTMAAYYRPVDGLPPFKMEKTGDYFRVTGEILSVLGGVYFFFRGIQYFLQRRPSMKTLFVDSYSEMLFFLQSLFMLATVVLYFSHLKEYVASMVFSLALGWTNMLYYTRGFQQMGIYAVMIEKMILRDLCRFMFVYIVFLFGFSTAVVTLIEDGKNDSLPSESTSHRWRGPACRPPDSSYNSLYSTCLELFKFTIGMGDLEFTENYDFKAVFIILLLAYVILTYILLLNMLIALMGETVNKIAQESKNIWKLQRAITILDTEKSFLKCMRKAFRSGKLLQVGYTPDGKDDYRWCFRVDEVNWTTWNTNVGIINEDPGNCEGVKRTLSFSLRSSRVSGRHWKNFALVPLLREASARDRQSAQPEEVYLRQFSGSLKPEDAEVFKSPAASGEK

SEQ ID NO: 90376 - protein, 839 aa, Homo sapiens [sequence omitted]

SEQ ID NO: 90377 - protein, 839 aa, Homo sapiens [sequence omitted]

SEQ ID NO: 90378 - protein, 764 aa, Homo sapiens
  Payload ID: 18062
  Gene Name: transient receptor potential cation channel, subfamily V, member 2
  Uniprot ID: Q9Y5S1
  ENSP ID: ENSP00000342222
MTSPSSSPVFRLETLDGGQEDGSEADRGKLDFGSGLPPMESQFQGEDRKFAPQIRVNLNYRKGTGASQPDPNRFDRDRLFNAVSRGVPEDLAGLPEYLSKTSKYLTDSEYTEGSTGKTCLMKAVLNLKDGVNACILPLLQIDRDSGNPQPLVNAQCTDDYYRGHSALHIAIEKRSLQCVKLLVENGANVHARACGRFFQKGQGTCFYFGELPLSLAACTKQWDVVSYLLENPHQPASLQATDSQGNTVLHALVMISDNSAENIALVTSMYDGLLQAGARLCPTVQLEDIRNLQDLTPLKLAAKEGKIEIFRHILQREFSGLSHLSRKFTEWCYGPVRVSLYDLASVDSCEENSVLEIIAFHCKSPHRHRMVVLEPLNKLLQAKWDLLIPKFFLNFLCNLIYMFIFTAVAYHQPTLKKQAAPHLKAEVGNSMLLTGHILILLGGIYLLVGQLWYFWRRHVFIWISFIDSYFEILFLFQALLTVVSQVLCFLAIEWYLPLLVSALVLGWLNLLYYTRGFQHTGIYSVMIQKVILRDLLRFLLIYLVFLFGFAVALVSLSQEAWRPEAPTGPNATESVQPMEGQEDEGNGAQYRGILEASLELFKFTIGMGELAFQEQLHFRGMVLLLLLAYVLLTYILLLNMLIALMSETVNSVATDSWSIWKLQKAISVLEMENGYWWCRKKQRAGVMLTVGTKPDGSPDERWCFRVEEVNWASWEQTLPTLCEDPSGAGVPRTLENPVLASPPKEDEDGASEENYVPVQLLQSN

SEQ ID NO: 90379 - protein, 266 aa, Homo sapiens
  Payload ID: 18062
  Gene Name: transient receptor potential cation channel, subfamily V, member 2
  ENSP ID: ENSP00000390014
  MOD_RES (1)..(1): Any amino acid
XDFSLGVPSWWCLICFNIGPSVGPSQPDPNRFDRDRLFNAVSRGVPEDLAGLPEYLSKTSKYLTDSEYTEGSTGKTCLMKAVLNLKDGVNACILPLLQIDRDSGNPQPLVNAQCTDDYYRGHSALHIAIEKRSLQCVKLLVENGANVHARACGRFFQKGQGTCFYFGELPLSLAACTKQWDVVSYLLENPHQPASLQATDSQGNTVLHALVMISDNSAENIALVTSMYDGLLQAGARLCPTVQLEDIRNLQDLTPLKLAAKEGKIE

SEQ ID NO: 90380 - protein, 77 aa, Homo sapiens
  Payload ID: 18062
  Gene Name: transient receptor potential cation channel, subfamily V, member 2
  ENSP ID: ENSP00000464850
  MOD_RES (1)..(1): Any amino acid
XEILFLFQALLTVVSQVLCFLAIEWYLPLLVSALVLGWLNLLYYTRGFQHTGIYSVMIQKGGGGELGFMGADAAYAV

SEQ ID NO: 90381 - protein, 138 aa, Homo sapiens
  Payload ID: 18062
  Gene Name: transient receptor potential cation channel, subfamily V, member 2
  ENSP ID: ENSP00000465609
EDEGNGAQYRGILEASLELFKFTIGMGELAFQEQLHFRGMVLLLLLAYVLLTYILLLNMLIALMSETVNSVATDSWSIWKLQKAISVLEMENGYWWCRKKQRAGVMLTVGTKPDGSPDERWCFRNSREPCPGFPSQGG

SEQ ID NO: 90382 - protein, 96 aa, Homo sapiens
  Payload ID: 18062
  Gene Name: transient receptor potential cation channel, subfamily V, member 2
  ENSP ID: ENSP00000466130
  MOD_RES (1)..(1): Any amino acid
XNGAQYRGILEASLELFKFTIGMGELAFQEQLHFRGMVLLLLLAYVLLTYILLLNMLIALMSETVNSVATDSWSIWKLQGGGGELGFMGADAAYAV

SEQ ID NO: 90383 - protein, 90 aa, Homo sapiens
  Payload ID: 18062
  Gene Name: transient receptor potential cation channel, subfamily V, member 2
  ENSP ID: ENSP00000467593
ALMSETVNSVATDSWSIWKLQKAISVLEMENGYWWCRKKQRAGVMLTVGTKPDGSPDERWCFRQTSELLCCPQGGGGELGFMGADAAYAV

SEQ ID NO: 90384 - protein, 791 aa, Homo sapiens
  Payload ID: 18063
  Gene Name: transient receptor potential cation channel, subfamily V, member 3
  Uniprot ID: Q8NET8
  ENSP ID: ENSP00000301365
MKAHPKEMVPLMGKRVAAPSGNPAILPEKRPAEITPTKKSAHFFLEIEGFEPNPTVAKTSPPVFSKPMDSNIRQCISGNCDDMDSPQSPQDDVTETPSNPNSPSAQLAKEEQRRKKRRLKKRIFAAVSEGCVEELVELLVELQELCRRRHDEDVPDFLMHKLTASDTGKTCLMKALLNINPNTKEIVRILLAFAEENDILGRFINAEYTEEAYEGQTALNIAIERRQGDIAALLIAAGADVNAHAKGAFFNPKYQHEGFYFGETPLALAACTNQPEIVQLLMEHEQTDITSRDSRGNNILHALVTVAEDFKTQNDFVKRMYDMILLRSGNWELETTRNNDGLTPLQLAAKMGKAEILKYILSREIKEKRLRSLSRKFTDWAYGPVSSSLYDLTNVDTTTDNSVLEITVYNTNIDNRHEMLTLEPLHTLLHMKWKKFAKHMFFLSFCFYFFYNITLTLVSYYRPREEEAIPHPLALTHKMGWLQLLGRMFVLIWAMCISVKEGIAIFLLRPSDLQSILSDAWFHFVFFIQAVLVILSVFLYLFAYKEYLACLVLAMALGWANMLYYTRGFQSMGMYSVMIQKVILHDVLKFLFVYIVFLLGFGVALASLIEKCPKDNKDCSSYGSFSDAVLELFKLTIGLGDLNIQQNSKYPILFLFLLITYVILTFVLLLNMLIALMGETVENVSKESERIWRLQRARTILEFEKMLPEWLRSRFRMGELCKVAEDDFRLCLRINEVKWTEWKTHVSFLNEDPGPVRRTADFNKIQDSSRNNSKTTLNAFEEVEEFPETSV

SEQ ID NO: 90385 - protein, 339 aa, Homo sapiens
  Payload ID: 18063
  Gene Name: transient receptor potential cation channel, subfamily V, member 3
  ENSP ID: ENSP00000371338
  MOD_RES (1)..(1): Any amino acid
XGDIAALLIAAGADVNAHAKGAFFNPKYQHEGFYFGETPLALAACTNQPEIVQLLMEHEQTDITSRDSRGNNILHALVTVAEDFKTQNDFVKRMYDMILLRSGNWELETTRNNDGLTPLQLAAKMGKAEILKYILSREIKEKRLRSLSRKFTDWAYGPVSSSLYDLTNVDTTTDNSVLEITVYNTNIDNRHEMLTLEPLHTLLHMKWKKFAKHMFFLSFCFYFFYNITLTLVSYYRPREEEAIPHPLALTHKMGWLQLLGRMFVLIWAMCISVKEGIAIFLLRPSDLQSILSDAWFHFVLVPRLPRAGHGPGLGEHALLYAGFPVHGHVQRHDPEGHFA

SEQ ID NO: 90386 - protein, 55 aa, Homo sapiens
  Payload ID: 18063
  Gene Name: transient receptor potential cation channel, subfamily V, member 3
  ENSP ID: ENSP00000458187
MKAHPKEMVPLMGKRVAAPSGNPAILPEKRPAEITPTKKSRHRVLPHWPQTPDLN

SEQ ID NO: 90387 - protein, 55 aa, Homo sapiens; identical to SEQ ID NO: 90386
  Payload ID: 18063
  Gene Name: transient receptor potential cation channel, subfamily V, member 3
  ENSP ID: ENSP00000458239

SEQ ID NO: 90388 - protein, 765 aa, Homo sapiens
  Payload ID: 18063
  Gene Name: transient receptor potential cation channel, subfamily V, member 3
  Uniprot ID: Q8NET8
  ENSP ID: ENSP00000460215
MKAHPKEMVPLMGKRVAAPSGNPAILPEKRPAEITPTKKSAHFFLEIEGFEPNPTVAKTSPPVFSKPMDSNIRQCISGNCDDMDSPQSPQDDVTETPSNPNSPSAQLAKEEQRRKKRRLKKRIFAAVSEGCVEELVELLVELQELCRRRHDEDVPDFLMHKLTASDTGKTCLMKALLNINPNTKEIVRILLAFAEENDILGRFINAEYTEEAYEGQTALNIAIERRQGDIAALLIAAGADVNAHAKGAFFNPKYQHEGFYFGETPLALAACTNQPEIVQLLMEHEQTDITSRDSRGNNILHALVTVAEDFKTQNDFVKRMYDMILLRSGNWELETTRNNDGLTPLQLAAKMGKAEILKYILSREIKEKRLRSLSRKFTDWAYGPVSSSLYDLTNVDTTTDNSVLEITVYNTNIDNRHEMLTLEPLHTLLHMKWKKFAKHMFFLSFCFYFFYNITLTLVSYYRPREEEAIPHPLALTHKMGWLQLLGRMFVLIWAMCISVKEGIAIFLLRPSDLQSILSDAWFHFVFFIQAVLVILSVFLYLFAYKEYLACLVLAMALGWANMLYYTRGFQSMGMYSVMIQKVILHDVLKFLFVYIVFLLGFGVALASLIEKCPKDNKDCSSYGSFSDAVLELFKLTIGLGDLNIQQNSKYPILFLFLLITYVILTFVLLLNMLIALMGETVENVSKESERIWRLQRARTILEFEKMLPEWLRSRFRMGELCKVAEDDFRLCLRINEVKWTEWKTHVSFLNEDPGPVRRTGTVAVR

SEQ ID NO: 90389 - protein, 146 aa, Homo sapiens
  Payload ID: 18063
  Gene Name: transient receptor potential cation channel, subfamily V, member 3
  ENSP ID: ENSP00000460856
  MOD_RES (1)..(1): Any amino acid
XEMLTLEPLHTLLHMKWKKFAKHMFFLSFCFYFFYNITLTLVSYYRPREEEAIPHPLALTHKMGWLQLLGRMFVLIWAMCISVKEGIAIFLLRPSDLQSILSDAWFHFVFLGLADREVSQRQQGLQLLRQLQRRSAGTLQAHHRPG

SEQ ID NO: 90390 - protein, 790 aa, Homo sapiens
  Payload ID: 18063
  Gene Name: transient receptor potential cation channel, subfamily V, member 3
  Uniprot ID: Q8NET8
  ENSP ID: ENSP00000461518
MKAHPKEMVPLMGKRVAAPSGNPAILPEKRPAEITPTKKSAHFFLEIEGFEPNPTVAKTSPPVFSKPMDSNIRQCISGNCDDMDSPQSPQDDVTETPSNPNSPSAQLAKEEQRRKKRRLKKRIFAAVSEGCVEELVELLVELQELCRRRHDEDVPDFLMHKLTASDTGKTCLMKALLNINPNTKEIVRILLAFAEENDILGRFINAEYTEEAYEGQTALNIAIERRQGDIAALLIAAGADVNAHAKGAFFNPKYQHEGFYFGETPLALAACTNQPEIVQLLMEHEQTDITSRDSRGNNILHALVTVAEDFKTQNDFVKRMYDMILLRSGNWELETTRNNDGLTPLQLAAKMGKAEILKYILSREIKEKRLRSLSRKFTDWAYGPVSSSLYDLTNVDTTTDNSVLEITVYNTNIDNRHEMLTLEPLHTLLHMKWKKFAKHMFFLSFCFYFFYNITLTLVSYYRPREEEAIPHPLALTHKMGWLQLLGRMFVLIWAMCISVKEGIAIFLLRPSDLQSILSDAWFHFVFFIQAVLVILSVFLYLFAYKEYLACLVLAMALGWANMLYYTRGFQSMGMYSVMIQKVILHDVLKFLFVYIVFLLGFGVALASLIEKCPKDNKDCSSYGSFSDAVLELFKLTIGLGDLNIQQNSKYPILFLFLLITYVILTFVLLLNMLIALMGETVENVSKESERIWRLQRARTILEFEKMLPEWLRSRFRMGELCKVAEDDFRLCLRINEVKWTEWKTHVSFLNEDPGPVRRTDFNKIQDSSRNNSKTTLNAFEEVEEFPETSV

SEQ ID NO: 90391 - protein, 775 aa, Homo sapiens
  Payload ID: 18063
  Gene Name: transient receptor potential cation channel, subfamily V, member 3
  ENSP ID: ENSP00000483947
MSHHTWPSPALNLDFATYLLRDLGAHFFLEIEGFEPNPTVAKTSPPVFSKPMDSNIRQCISGNCDDMDSPQSPQDDVTETPSNPNSPSAQLAKEEQRRKKRRLKKRIFAAVSEGCVEELVELLVELQELCRRRHDEDVPDFLMHKLTASDTGKTCLMKALLNINPNTKEIVRILLAFAEENDILGRFINAEYTEEAYEGQTALNIAIERRQGDIAALLIAAGADVNAHAKGAFFNPKYQHEGFYFGETPLALAACTNQPEIVQLLMEHEQTDITSRDSRGNNILHALVTVAEDFKTQNDFVKRMYDMILLRSGNWELETTRNNDGLTPLQLAAKMGKAEILKYILSREIKEKRLRSLSRKFTDWAYGPVSSSLYDLTNVDTTTDNSVLEITVYNTNIDNRHEMLTLEPLHTLLHMKWKKFAKHMFFLSFCFYFFYNITLTLVSYYRPREEEAIPHPLALTHKMGWLQLLGRMFVLIWAMCISVKEGIAIFLLRPSDLQSILSDAWFHFVFFIQAVLVILSVFLYLFAYKEYLACLVLAMALGWANMLYYTRGFQSMGMYSVMIQKVILHDVLKFLFVYIVFLLGFGVALASLIEKCPKDNKDCSSYGSFSDAVLELFKLTIGLGDLNIQQNSKYPILFLFLLITYVILTFVLLLNMLIALMGETVENVSKESERIWRLQRARTILEFEKMLPEWLRSRFRMGELCKVAEDDFRLCLRINEVKWTEWKTHVSFLNEDPGPVRRTADFNKIQDSSRNNSKTTLNAFEEVEEFPETSV

SEQ ID NO: 90392 - protein, 871 aa, Homo sapiens
  Payload ID: 18064
  Gene Name: transient receptor potential cation channel, subfamily V, member 4
  Uniprot ID: Q9HBA0
  ENSP ID: ENSP00000261740
MADSSEGPRAGPGEVAELPGDESGTPGGEAFPLSSLANLFEGEDGSLSPSPADASRPAGPGDGRPNLRMKFQGAFRKGVPNPIDLLESTLYESSVVPGPKKAPMDSLFDYGTYRHHSSDNKRWRKKIIEKQPQSPKAPAPQPPPILKVFNRPILFDIVSRGSTADLDGLLPFLLTHKKRLTDEEFREPSTGKTCLPKALLNLSNGRNDTIPVLLDIAERTGNMREFINSPFRDIYYRGQTALHIAIERRCKHYVELLVAQGADVHAQARGRFFQPKDEGGYFYFGELPLSLAACTNQPHIVNYLTENPHKKADMRRQDSRGNTVLHALVAIADNTRENTKFVTKMYDLLLLKCARLFPDSNLEAVLNNDGLSPLMMAAKTGKIGIFQHIIRREVTDEDTRHLSRKFKDWAYGPVYSSLYDLSSLDTCGEEASVLEILVYNSKIENRHEMLAVEPINELLRDKWRKFGAVSFYINVVSYLCAMVIFTLTAYYQPLEGTPPYPYRTTVDYLRLAGEVITLFTGVLFFFTNIKDLFMKKCPGVNSLFIDGSFQLLYFIYSVLVIVSAALYLAGIEAYLAVMVFALVLGWMNALYFTRGLKLTGTYSIMIQKILFKDLFRFLLVYLLFMIGYASALVSLLNPCANMKVCNEDQTNCTVPTYPSCRDSETFSTFLLDLFKLTIGMGDLEMLSSTKYPVVFIILLVTYIILTFVLLLNMLIALMGETVGQVSKESKHIWKLQWATTILDIERSFPVFLRKAFRSGEMVTVGKSSDGTPDRRWCFRVDEVNWSHWNQNLGIINEDPGKNETYQYYGFSHTVGRLRRDRWSSVVPRVVELNKNSNPDEVVVPLDSMGNPRCDGHQQGYPRKWRTDDAPL

SEQ ID NO: 90393 - protein, 871 aa, Homo sapiens; identical to SEQ ID NO: 90392
  Payload ID: 18064
  Gene Name: transient receptor potential cation channel, subfamily V, member 4
  Uniprot ID: Q9HBA0
  ENSP ID: ENSP00000406191

SEQ ID NO: 90394 - protein, 552 aa, Homo sapiens
  Payload ID: 18064
  Gene Name: transient receptor potential cation channel, subfamily V, member 4
  ENSP ID: ENSP00000437449
MADSSEGPRAGPGEVAELPGDESGTPGGEAFPLSSLANLFEGEDGSLSPSPADASRPAGPGDGRPNLRMKFQGAFRKGVPNPIDLLESTLYESSVVPGPKKAPMDSLFDYGTYRHHSSDNKRWRKKIIEKQPQSPKAPAPQPPPILKVFNRPILFDIVSRGSTADLDGLLPFLLTHKKRLTDEEFREPSTGKTCLPKALLNLSNGRNDTIPVLLDIAERTGNMREFINSPFRDIYYRGQTALHIAIERRCKHYVELLVAQGADVHAQARGRFFQPKDEGGYFYFGELPLSLAACTNQPHIVNYLTENPHKKADMRRQDSRGNTVLHALVAIADNTRENTKFVTKMYDLLLLKCARLFPDSNLEAVLNNDGLSPLMMAAKTGKIGIFQHIIRREVTDEDTRHLSRKFKDWAYGPVYSSLYDLSSLDTCGEEASVLEILVYNSKIENRHEMLAVEPINELLRDKWRKFGAVSFYINVVSYLCAMVIFTLTAYYQPLEGTPPYPYRTTVDYLRLAGEVITLFTGVLFFFTNIKDLFMKKCPGVNSLFIDGSFQLL

SEQ ID NO: 90395 - protein, 824 aa, Homo sapiens
  Payload ID: 18064
  Gene Name: transient receptor potential cation channel, subfamily V, member 4
  Uniprot ID: Q9HBA0
  ENSP ID: ENSP00000442167
MADSSEGPRAGPGEVAELPGDESGTPGGEAFPLSSLANLFEGEDGSLSPSPADASRPAGPGDGRPNLRMKFQGAFRKGVPNPIDLLESTLYESSVVPGPKKAPMDSLFDYGTYRHHSSDNKRWRKKIIEKQPQSPKAPAPQPPPILKVFNRPILFDIVSRGSTADLDGLLPFLLTHKKRLTDEEFREPSTGKTCLPKALLNLSNGRNDTIPVLLDIAERTGNMREFINSPFRDIYYRGELPLSLAACTNQPHIVNYLTENPHKKADMRRQDSRGNTVLHALVAIADNTRENTKFVTKMYDLLLLKCARLFPDSNLEAVLNNDGLSPLMMAAKTGKIGIFQHIIRREVTDEDTRHLSRKFKDWAYGPVYSSLYDLSSLDTCGEEASVLEILVYNSKIENRHEMLAVEPINELLRDKWRKFGAVSFYINVVSYLCAMVIFTLTAYYQPLEGTPPYPYRTTVDYLRLAGEVITLFTGVLFFFTNIKDLFMKKCPGVNSLFIDGSFQLLYFIYSVLVIVSAALYLAGIEAYLAVMVFALVLGWMNALYFTRGLKLTGTYSIMIQKILFKDLFRFLLVYLLFMIGYASALVSLLNPCANMKVCNEDQTNCTVPTYPSCRDSETFSTFLLDLFKLTIGMGDLEMLSSTKYPVVFIILLVTYIILTFVLLLNMLIALMGETVGQVSKESKHIWKLQWATTILDIERSFPVFLRKAFRSGEMVTVGKSSDGTPDRRWCFRVDEVNWSHWNQNLGIINEDPGKNETYQYYGFSHTVGRLRRDRWSSVVPRVVELNKNSNPDEVVVPLDSMGNPRCDGHQQGYPRKWRTDDAPL

SEQ ID NO: 90396 - protein, 811 aa, Homo sapiens
  Payload ID: 18064
  Gene Name: transient receptor potential cation channel, subfamily V, member 4
  Uniprot ID: Q9HBA0
  ENSP ID: ENSP00000442738
MADSSEGPRAGPGEVAELPGDESGTPGGEAFPLSSLANLFEGEDGSLSPSPADASRPAGPGDGRPNLRMKFQGAFRKGVPNPIDLLESTLYESSVVPGPKKAPMDSLFDYGTYRHHSSDNKRWRKKIIEKQPQSPKAPAPQPPPILKVFNRPILFDIVSRGSTADLDGLLPFLLTHKKRLTDEEFREPSTGKTCLPKALLNLSNGRNDTIPVLLDIAERTGNMREFINSPFRDIYYRGQTALHIAIERRCKHYVELLVAQGADVHAQARGRFFQPKDEGGYFYFGELPLSLAACTNQPHIVNYLTENPHKKADMRRQDSRGNTVLHALVAIADNTRENTKFVTKMYDLLLLKCARLFPDSNLEAVLNNDGLSPLMMAAKTGKIGNRHEMLAVEPINELLRDKWRKFGAVSFYINVVSYLCAMVIFTLTAYYQPLEGTPPYPYRTTVDYLRLAGEVITLFTGVLFFFTNIKDLFMKKCPGVNSLFIDGSFQLLYFIYSVLVIVSAALYLAGIEAYLAVMVFALVLGWMNALYFTRGLKLTGTYSIMIQKILFKDLFRFLLVYLLFMIGYASALVSLLNPCANMKVCNEDQTNCTVPTYPSCRDSETFSTFLLDLFKLTIGMGDLEMLSSTKYPVVFIILLVTYIILTFVLLLNMLIALMGETVGQVSKESKHIWKLQWATTILDIERSFPVFLRKAFRSGEMVTVGKSSDGTPDRRWCFRVDEVNWSHWNQNLGIINEDPGKNETYQYYGFSHTVGRLRRDRWSSVVPRVVELNKNSNPDEVVVPLDSMGNPRCDGHQQGYPRKWRTDDAPL

SEQ ID NO: 90397 - protein, 764 aa, Homo sapiens
  Payload ID: 18064
  Gene Name: transient receptor potential cation channel, subfamily V, member 4
  Uniprot ID: Q9HBA0
  ENSP ID: ENSP00000443611
MADSSEGPRAGPGEVAELPGDESGTPGGEAFPLSSLANLFEGEDGSLSPSPADASRPAGPGDGRPNLRMKFQGAFRKGVPNPIDLLESTLYESSVVPGPKKAPMDSLFDYGTYRHHSSDNKRWRKKIIEKQPQSPKAPAPQPPPILKVFNRPILFDIVSRGSTADLDGLLPFLLTHKKRLTDEEFREPSTGKTCLPKALLNLSNGRNDTIPVLLDIAERTGNMREFINSPFRDIYYRGELPLSLAACTNQPHIVNYLTENPHKKADMRRQDSRGNTVLHALVAIADNTRENTKFVTKMYDLLLLKCARLFPDSNLEAVLNNDGLSPLMMAAKTGKIGNRHEMLAVEPINELLRDKWRKFGAVSFYINVVSYLCAMVIFTLTAYYQPLEGTPPYPYRTTVDYLRLAGEVITLFTGVLFFFTNIKDLFMKKCPGVNSLFIDGSFQLLYFIYSVLVIVSAALYLAGIEAYLAVMVFALVLGWMNALYFTRGLKLTGTYSIMIQKILFKDLFRFLLVYLLFMIGYASALVSLLNPCANMKVCNEDQTNCTVPTYPSCRDSETFSTFLLDLFKLTIGMGDLEMLSSTKYPVVFIILLVTYIILTFVLLLNMLIALMGETVGQVSKESKHIWKLQWATTILDIERSFPVFLRKAFRSGEMVTVGKSSDGTPDRRWCFRVDEVNWSHWNQNLGIINEDPGKNETYQYYGFSHTVGRLRRDRWSSVVPRVVELNKNSNPDEVVVPLDSMGNPRCDGHQQGYPRKWRTDDAPL

SEQ ID NO: 90398 - protein, 837 aa, Homo sapiens
  Payload ID: 18064
  Gene Name: transient receptor potential cation channel, subfamily V, member 4
  Uniprot ID: Q9HBA0
  ENSP ID: ENSP00000444336
MADSSEGPRAGPGEVAELPGDESGTPGDGRPNLRMKFQGAFRKGVPNPIDLLESTLYESSVVPGPKKAPMDSLFDYGTYRHHSSDNKRWRKKIIEKQPQSPKAPAPQPPPILKVFNRPILFDIVSRGSTADLDGLLPFLLTHKKRLTDEEFREPSTGKTCLPKALLNLSNGRNDTIPVLLDIAERTGNMREFINSPFRDIYYRGQTALHIAIERRCKHYVELLVAQGADVHAQARGRFFQPKDEGGYFYFGELPLSLAACTNQPHIVNYLTENPHKKADMRRQDSRGNTVLHALVAIADNTRENTKFVTKMYDLLLLKCARLFPDSNLEAVLNNDGLSPLMMAAKTGKIGIFQHIIRREVTDEDTRHLSRKFKDWAYGPVYSSLYDLSSLDTCGEEASVLEILVYNSKIENRHEMLAVEPINELLRDKWRKFGAVSFYINVVSYLCAMVIFTLTAYYQPLEGTPPYPYRTTVDYLRLAGEVITLFTGVLFFFTNIKDLFMKKCPGVNSLFIDGSFQLLYFIYSVLVIVSAALYLAGIEAYLAVMVFALVLGWMNALYFTRGLKLTGTYSIMIQKILFKDLFRFLLVYLLFMIGYASALVSLLNPCANMKVCNEDQTNCTVPTYPSCRDSETFSTFLLDLFKLTIGMGDLEMLSSTKYPVVFIILLVTYIILTFVLLLNMLIALMGETVGQVSKESKHIWKLQWATTILDIERSFPVFLRKAFRSGEMVTVGKSSDGTPDRRWCFRVDEVNWSHWNQNLGIINEDPGKNETYQYYGFSHTVGRLRRDRWSSVVPRVVELNKNSNPDEVVVPLDSMGNPRCDGHQQGYPRKWRTDDAPL

SEQ ID NO: 90399 - protein, 729 aa, Homo sapiens
  Payload ID: 18065
  Gene Name: transient receptor potential cation channel, subfamily V, member 5
  ENSP ID: ENSP00000265310
MGGFLPKAEGPGSQLQKLLPSFLVREQDWDQHLDKLHMLQQKRILESPLLRASKENDLSVLRQLLLDCTCDVRQRGALGETALHIAALYDNLEAALVLMEAAPELVFEPTTCEAFAGQTALHIAVVNQNVNLVRALLTRRASVSARATGTAFRHSPRNLIYFGEHPLSFAACVNSEEIVRLLIEHGADIRAQDSLGNTVLHILILQPNKTFACQMYNLLLSYDGHGDHLQPLDLVPNHQGLTPFKLAGVEGNTVMFQHLMQKRRHIQWTYGPLTSILYDLTEIDSWGEELSFLELVVSSDKREARQILEQTPVKELVSFKWNKYGRPYFCILAALYLLYMICFTTCCVYRPLKFRGGNRTHSRDITILQQKLLQEAYETREDIIRLVGELVSIVGAVIILLLEIPDIFRVGASRYFGKTILGGPFHVIIITYASLVLVTMVMRLTNTNGEVVPMSFALVLGWCSVMYFTRGFQMLGPFTIMIQKMIFGDLMRFCWLMAVVILGFASAFYIIFQTEDPTSLGQFYDYPMALFTTFELFLTVIDAPANYDVDLPFMFSIVNFAFTIIATLLMLNLFIAMMGDTHWRVAQERDELWRAQVVATTVMLERKLPRCLWPRSGICGCEFGLGDRWFLRVENHNDQNPLRVLRYVEVFKNSDKEDDQEHPSEKQPSGAESGTLARASLALPTSSLSRTASQSSSHRGWEILRQNTLGHLNLGLNLSEGDGEEVYHF

SEQ ID NO: 90400 - protein, 674 aa, Homo sapiens
  Payload ID: 18065
  Gene Name: transient receptor potential cation channel, subfamily V, member 5
  ENSP ID: ENSP00000406361
KAEGPGSQLQKLLPSFLVREQDWDQHLDKLHMLQQKRILESPLLRASKENDLSVLRQLLLDCTCDVRQRGALGETALHIAALYDNLEAALVLMEAAPELVFEPTTCEAFAGQTALHIAVVNQNVNLVRALLTRRASVSARATGTAFRHSPRNLIYFGEHPLSFAACVNSEEIVRLLIEHGADIRAQDSLGNTVLHILILQPNKTFACQMYNLLLSYDGHGDHLQPLDLVPNHQGLTPFKLAGVEGNTVARQILEQTPVKELVSFKWNKYGRPYFCILAALYLLYMICFTTCCVYRPLKFRGGNRTHSRDITILQQKLLQEAYETREDIIRLVGELVSIVGAVIILLLEIPDIFRVGASRYFGKTILGGPFHVIIITYASLVLVTMVMRLTNTNGEVVPMSFALVLGWCSVMYFTRGFQMLGPFTIMIQKMIFGDLMRFCWLMAVVILGFASAFYIIFQTEDPTSLGQFYDYPMALFTTFELFLTVIDAPANYDVDLPFMFSIVNFAFTIIATLLMLNLFIAMMGDTHWRVAQERDELWRAQVVATTVMLERKLPRCLWPRSGICGCEFGLGDRWFLRVENHNDQNPLRVLRYVEVFKNSDKEDDQEHPSEKQPSGAESGTLARASLALPTSSLSRTASQSSSHRGWEILRQNTLGHLNLGLNLSEGDGEEVYHF

SEQ ID NO: 90401 - protein, 381 aa, Homo sapiens
  Payload ID: 18065
  Gene Name: transient receptor potential cation channel, subfamily V, member 5
  Uniprot ID: Q9NQA5
  ENSP ID: ENSP00000406572
MGGFLPKAEGPGSQLQKLLPSFLVREQDWDQHLDKLHMLQQKRILESPLLRASKENDLSVLRQLLLDCTCDVRQRGALGETALHIAALYDNLEAALVLMEAAPELVFEPTTCEAFAGQTALHIAVVNQNVNLVRALLTRRASVSARATGTAFRHSPRNLIYFGEHPLSFAACVNSEEIVRLLIEHGADIRAQDSLGNTVLHILILQPNKTFACQMYNLLLSYDGHGDHLQPLDLVPNHQGLTPFKLAGVEGNTVMFQHLMQKRRHIQWTYGPLTSILYDLTEIDSWGEELSFLELVVSSDKREARQILEQTPVKELVSFKWNKYGRPYFCILAALYLLYMICFTTCCVYRPLKFRGGNRTHSRDITILQQKLLQVILLRRG

SEQ ID NO: 90402 - protein, 729 aa, Homo sapiens; identical to SEQ ID NO: 90399
  Payload ID: 18065
  Gene Name: transient receptor potential cation channel, subfamily V, member 5
  ENSP ID: ENSP00000483049

SEQ ID NO: 90403 - protein, 674 aa, Homo sapiens; identical to SEQ ID NO: 90400
  Payload ID: 18065
  Gene Name: transient receptor potential cation channel, subfamily V, member 5
  ENSP ID: ENSP00000488246

SEQ ID NO: 90404 - protein, 381 aa, Homo sapiens; identical to SEQ ID NO: 90401
  Payload ID: 18065
  Gene Name: transient receptor potential cation channel, subfamily V, member 5
  ENSP ID: ENSP00000488418

SEQ ID NO: 90405 - protein, 765 aa, Homo sapiens
  Payload ID: 18066
  Gene Name: transient receptor potential cation channel, subfamily V, member 6
  Uniprot ID: Q9H1D0
  ENSP ID: ENSP00000352358
TGPLQGDGGPALGGADVAPRLSPVRVWPRPQAPKEPALHPMGLSLPKEKGLILCLWSKFCRWFQRRESWAQSRDEQNLLQQKRIWESPLLLAAKDNDVQALNKLLKYEDCKVHQRGAMGETALHIAALYDNLEAAMVLMEAAPELVFEPMTSELYEGQTALHIAVVNQNMNLVRALLARRASVSARATGTAFRRSPCNLIYFGEHPLSFAACVNSEEIVRLLIEHGADIRAQDSLGNTVLHILILQPNKTFACQMYNLLLSYDRHGDHLQPLDLVPNHQGLTPFKLAGVEGNTVMFQHLMQKRKHTQWTYGPLTSTLYDLTEIDSSGDEQSLLELIITTKKREARQILDQTPVKELVSLKWKRYGRPYFCMLGAIYLLYIICFTMCCIYRPLKPRTNNRTSPRDNTLLQQKLLQEAYMTPKDDIRLVGELVTVIGAIIILLVEVPDIFRMGVTRFFGQTILGGPFHVLIITYAFMVLVTMVMRLISASGEVVPMSFALVLGWCNVMYFARGFQMLGPFTIMIQKMIFGDLMRFCWLMAVVILGFASAFYIIFQTEDPEELGHFYDYPMALFSTFELFLTIIDGPANYNVDLPFMYSITYAAFAIIATLLMLNLLIAMMGDTHWRVAHERDELWRAQIVATTVMLERKLPRCLWPRSGICGREYGLGDRWFLRVEDRQDLNRQRIQRYAQAFHTRGSEDLDKDSVEKLELGCPFSPHLSLPMPSVSRSTSRSSANWERLRQGTLRRDLRGIINRGLEDGESWEYQI

SEQ ID NO: 90406 - protein, 122 aa, Homo sapiens
  Payload ID: 18066
  Gene Name: transient receptor potential cation channel, subfamily V, member 6
  ENSP ID: ENSP00000411100
MTPKDDIRLVGELVTVIGAIIILLVEVPDIFRMGVTRFFGQTILGGPFHVLIITYAFMVLVTMVMRLISASGEVVPMSFALVLGWCNVMYFARGFQMLGPFTIMIQKMIFGDLMRFCWLMAV

SEQ ID NO: 90407 - protein, 56 aa, Homo sapiens
  Payload ID: 18066
  Gene Name: transient receptor potential cation channel, subfamily V, member 6
  ENSP ID: ENSP00000415917
MPGAMGETALHIAALYDNLEAAMVLMEAAPELVFEPMTSELYEGQTALHIAVVNQN

SEQ ID NO: 90408 - protein, 526 aa, Homo sapiens
  Payload ID: 18066
  Gene Name: transient receptor potential cation channel, subfamily V, member 6
  ENSP ID: ENSP00000479084
MNLVRALLARRASVSARATGTAFRRSPCNLIYFGEHPLSFAACVNSEEIVRLLIEHGADIRAQDSLGNTVLHILILQPNKTFACQMYNLLLSYDRHGDHLQPLDLVPNHQGLTPFKLAGVEGNTVMFQHLMQKRKHTQWTYGPLTSTLYDLTEIDSSGDEQSLLELIITTKKREARQILDQTPVKELVSLKWKRYGRPYFCMLGAIYLLYIICFTMCCIYRPLKPRTNNRTSPRDNTLLQQKLLQEAYMTPKDDIRLVGELVTVIGAIIILLVEVPDIFRMGVTRFFGQTILGGPFHVLIITYAFMVLVTMVMRLISASGEVVPMSFALVLGWCNVMYFARGFQMLGPFTIMIQKMIFGDLMRFCWLMAVVILGFASAFYIIFQTEDPEELGHFYDYPMALFSTFELFLTIIDGPANYNVDLPFMYSITYAAFAIIATLLMLNLLIAMMGDTHWRVAHERDELWRAQIVATTVMLERKLPRCLWPRSGICGREYGLGDRWFLRVEDRQDLNRQRIQRYAQAFHPGL

SEQ ID NO: 90409 - protein, 725 aa, Homo sapiens
  Payload ID: 18066
  Gene Name: transient receptor potential cation channel, subfamily V, member 6
  ENSP ID: ENSP00000479828
MGLSLPKEKGLILCLWSKFCRWFQRRESWAQSRDEQNLLQQKRIWESPLLLAAKDNDVQALNKLLKYEDCKVHQRGAMGETALHIAALYDNLEAAMVLMEAAPELVFEPMTSELYEGQTALHIAVVNQNMNLVRALLARRASVSARATGTAFRRSPRNLIYFGEHPLSFAACVNSEEIVRLLIEHGADIRAQDSLGNTVLHILILQPNKTFACQMYNLLLSYDRHGDHLQPLDLVPNHQGLTPFKLAGVEGNTVMFQHLMQKRKHTQWTYGPLTSTLYDLTEIDSSGDEQSLLELIITTKKREARQILDQTPVKELVSLKWKRYGRPYFCMLGAIYLLYIICFTMCCIYRPLKPRTNNRTSPRDNTLLQQKLLQEAYVTPKDDIRLVGELVTVIGAIIILLVEVPDIFRMGVTRFFGQTILGGPFHVLIITYAFMVLVTMVMRLISASGEVVPMSFALVLGWCNVMYFARGFQMLGPFTIMIQKMIFGDLMRFCWLMAVVILGFASAFYIIFQTEDPEELGHFYDYPMALFSTFELFLTIIDGPANYNVDLPFMYSITYAAFAIIATLLMLNLLIAMMGDTHWRVAHERDELWRAQVVATTVMLERKLPRCLWPRSGICGREYGLGDRWFLRVEDRQDLNRQRIQRYAQAFHTRGSEDLDKDSVEKLELGCPFSPHLSLPTPSVSRSTSRSSANWERLRQGTLRRDLRGIINRGLEDGESWEYQI

SEQ ID NO: 90410 - protein, 20 aa, Homo sapiens
  Payload ID: 18066
  Gene Name: transient receptor potential cation channel, subfamily V, member 6
  ENSP ID: ENSP00000487762
  MOD_RES (1)..(1): Any amino acid
XALNKLLKYEDCKVHQREAI

SEQ ID NO: 90411 - protein, 90 aa, Homo sapiens
  Payload ID: 18066
  Gene Name: transient receptor potential cation channel, subfamily V, member 6
  ENSP ID: ENSP00000488490
MGVTRFFGQTILGGPFHVLIITYAFMVLVTMVMRLISASGEVVPMSFALVLGWCNVMYFARGFQMLGPFTIMIQKMIFGDLMRFCWLMAV

SEQ ID NO: 90412 - protein, 55 aa, Homo sapiens
  Payload ID: 18067
  Gene Name: transition protein 1 (during histone to protamine replacement)
  Uniprot ID: P09430
  ENSP ID: ENSP00000236979
MSTSRKLKSHGMRRSKSRSPHKGVKRGGSKRKYRKGNLKSRKRGDDANRNYRSHL

SEQ ID NO: 90413 - protein, 138 aa, Homo sapiens
  Payload ID: 18068
  Gene Name: transition protein 2 (during histone to protamine replacement)
  Uniprot ID: Q05952
  ENSP ID: ENSP00000325738
MDTQTHSLPITHTQLHSNSQPQSRTCTRHCQTFSQSCRQSHRGSRSQSSSQSPASHRNPTGAHSSSGHQSQSPNTSPPPKRHKKTMNSHHSPMRPTILHCRCPKNRKNLEGKLKKKKMAKRIQQVYKTKTRSSGWKSN

SEQ ID NO: 90414 - protein, 457 aa, Homo sapiens
  Payload ID: 18069
  Gene Name: transketolase
  ENSP ID: ENSP00000296289
MAFASIYKLDNLVAILDINRLGQSDPAPLQHQMDIYQKRCEAFGWHAIIVDGHSVEELCKAFGQAKHQPTAIIAKTFKGRGITGVEDKESWHGKPLPKNMAEQIIQEIYSQIQSKKKILATPPQEDAPSVDIANIRMPSLPSYKVGDKIATRKAYGQALAKLGHASDRIIALDGDTKNSTFSEIFKKEHPDRFIECYIAEQNMVSIAVGCATRNRTVPFCSTFAAFFTRAFDQIRMAAISESNINLCGSHCGVSIGEDGPSQMALEDLAMFRSVPTSTVFYPSDGVATEKAVELAANTKGICFIRTSRPENAIIYNNNEDFQVGQAKVVLKSKDDQVTVIGAGVTLHEALAAAELLKKEKINIRVLDPFTIKPLDRKLILDSARATKGRILTVEDHYYEGGIGEAVSSAVVGEPGITVTHLAVNRVPRSGKPAELLKMFGIDRDAIAQAVRGLITKA

SEQ ID NO: 90415 - protein, 631 aa, Homo sapiens
  Payload ID: 18069
  Gene Name: transketolase
  Uniprot ID: P29401
  ENSP ID: ENSP00000391481
MESYHKPDQQKLQALKDTANRLRISSIQATTAAGSGHPTSCCSAAEIMAVLFFHTMRYKSQDPRNPHNDRFVLSKGHAAPILYAVWAEAGFLAEAELLNLRKISSDLDGHPVPKQAFTDVATGSLGQGLGAACGMAYTGKYFDKASLPSSWDYSYRVYCLLGDGELSEGSVWEAMAFASIYKLDNLVAILDINRLGQSDPAPLQHQMDIYQKRCEAFGWHAIIVDGHSVEELCKAFGQAKHQPTAIIAKTFKGRGITGVEDKESWHGKPLPKNMAEQIIQEIYSQIQSKKKILATPPQEDAPSVDIANIRMPSLPSYKVGDKIATRKAYGQALAKLGHASDRIIALDGDTKNSTFSEIFKKEHPDRFIECYIAEQNMVSIAVGCATRNRTVPFCSTFAAFFTRAFDQIRMAAISESNINLCGSHCGVSIGEDGPSQMALEDLAMFRSVPTSTVFYPSDGVATEKAVELAANTKGICFIRTSRPENAIIYNNNEDFQVGQAKVVLKSKDDQVTVIGAGVTLHEALAAAELLKKEKINIRVLDPFTIKPLDRKLILDSARATKGRILTVEDHYYEGGIGEAVSSAVVGEPGITVTHLAVNRVPRSGKPAELLKMFGIDRDAIAQAVRGLITKA

SEQ ID NO: 90416 - protein, 623 aa, Homo sapiens
  Payload ID: 18069
  Gene Name: transketolase
  Uniprot ID: P29401
  ENSP ID: ENSP00000405455
MESYHKPDQQKLQALKDTANRLRISSIQATTAAGSGHPTSCCSAAEIMAVLFFHTMRYKSQDPRNPHNDRFVLSKGHAAPILYAVWAEAGFLAEAELLNLRKISSDLDGHPVPKQAFTDVATGSLGQGLGAACGMAYTGKYFDKASYRVYCLLGDGELSEGSVWEAMAFASIYKLDNLVAILDINRLGQSDPAPLQHQMDIYQKRCEAFGWHAIIVDGHSVEELCKAFGQAKHQPTAIIAKTFKGRGITGVEDKESWHGKPLPKNMAEQIIQEIYSQIQSKKKILATPPQEDAPSVDIANIRMPSLPSYKVGDKIATRKAYGQALAKLGHASDRIIALDGDTKNSTFSEIFKKEHPDRFIECYIAEQNMVSIAVGCATRNRTVPFCSTFAAFFTRAFDQIRMAAISESNINLCGSHCGVSIGEDGPSQMALEDLAMFRSVPTSTVFYPSDGVATEKAVELAANTKGICFIRTSRPENAIIYNNNEDFQVGQAKVVLKSKDDQVTVIGAGVTLHEALAAAELLKKEKINIRVLDPFTIKPLDRKLILDSARATKGRILTVEDHYYEGGIGEAVSSAVVGEPGITVTHLAVNRVPRSGKPAELLKMFGIDRDAIAQAVRGLITKA

SEQ ID NO: 90417 - protein, 153 aa, Homo sapiens
  Payload ID: 18069
  Gene Name: transketolase
  ENSP ID: ENSP00000413503
MESYHKPDQQKLQALKDTANRLRISSIQATTAAGSGHPTSCCSAAEIMAVLFFHTMRYKSQDPRNPHNDRFVLSKGHAAPILYAVWAEAGFLAEAELLNLRKISSDLDGHPVPKQAFTDVATGSLGQGLGAACGMAYTGKYFDKARHQSPGPE

SEQ ID NO: 90418 - protein, 81 aa, Homo sapiens
  Payload ID: 18069
  Gene Name: transketolase
  ENSP ID: ENSP00000417312
MESYHKPDQQKLQALKDTANRLRISSIQATTAAGSGCSVFSHDREFIEIPPHVMLQRRRDHGCPLFPHHALQVPGPPESAQ

SEQ ID NO: 90419 - protein, 623 aa, Homo sapiens; identical to SEQ ID NO: 90416
  Payload ID: 18069
  Gene Name: transketolase
  Uniprot ID: P29401
  ENSP ID: ENSP00000417773

SEQ ID NO: 90420 - protein, 334 aa, Homo sapiens
  Payload ID: 18069
  Gene Name: transketolase
  ENSP ID: ENSP00000418340
MESYHKPDQQKLQALKDTANRLRISSIQATTAAGSGHPTSCCSAAEIMAVLFFHTMRYKSQDPRNPHNDRFVLSKGHAAPILYAVWAEAGFLAEAELLNLRKISSDLDGHPVPKQAFTDVATGSLGQGLGAACGMAYTGKYFDKASYRVYCLLGDGELSEGSVWEAMAFASIYKLDNLVAILDINRLGQSDPAPLQHQMDIYQKRCEAFGWHAIIVDGHSVEELCKAFGQAKHQPTAIIAKTFKGRGITGVEDKESWHGKPLPKNMAEQIIQEIYSQIQSKKKILATPPQEDAPSVDIANIRMPSLPSYKVGDKVQNSHPQGLRAGTGQAGPCQ

SEQ ID NO: 90421 - protein, 540 aa, Homo sapiens
  Payload ID: 18070
  Gene Name: transketolase-like 1
  Uniprot ID: P51854
  ENSP ID: ENSP00000358928
MSVLFFYIMRYKQSDPENPDNDRFVLAKRLSFVDVATGWLGQGLGVACGMAYTGKYFDRASYRVFCLMSDGESSEGSVWEAMAFASYYSLDNLVAIFDVNRLGHSGALPAEHCINIYQRRCEAFGWNTYVVDGRDVEALCQVFWQASQVKHKPTAVVAKTFKGRGTPSIEDAESWHAKPMPRERADAIIKLIESQIQTSRNLDPQPPIEDSPEVNITDVRMTSPPDYRVGDKIATRKACGLALAKLGYANNRVVVLDGDTRYSTFSEIFNKEYPERFIECFMAEQNMVSVALGCASRGRTIAFASTFAAFLTRAFDHIRIGGLAESNINIIGSHCGVSVGDDGASQMALEDIAMFRTIPKCTIFYPTDAVSTEHAVALAANAKGMCFIRTTRPETMVIYTPQERFEIGQAKVLRHCVSDKVTVIGAGITVYEALAAADELSKQDIFIRVIDLFTIKPLDVATIVSSAKATEGRIITVEDHYPQGGIGEAVCAAVSMDPDIQVHSLAVSGVPQSGKSEELLDMYGISARHIIVAVKCMLLN

SEQ ID NO: 90422 - protein, 596 aa, Homo sapiens
  Payload ID: 18070
  Gene Name: transketolase-like 1
  Uniprot ID: P51854
  ENSP ID: ENSP00000358931
MADAEARAEFPEEARPDRGTLQVLQDMASRLRIHSIRATCSTSSGHPTSCSSSSEIMSVLFFYIMRYKQSDPENPDNDRFVLAKRLSFVDVATGWLGQGLGVACGMAYTGKYFDRASYRVFCLMSDGESSEGSVWEAMAFASYYSLDNLVAIFDVNRLGHSGALPAEHCINIYQRRCEAFGWNTYVVDGRDVEALCQVFWQASQVKHKPTAVVAKTFKGRGTPSIEDAESWHAKPMPRERADAIIKLIESQIQTSRNLDPQPPIEDSPEVNITDVRMTSPPDYRVGDKIATRKACGLALAKLGYANNRVVVLDGDTRYSTFSEIFNKEYPERFIECFMAEQNMVSVALGCASRGRTIAFASTFAAFLTRAFDHIRIGGLAESNINIIGSHCGVSVGDDGASQMALEDIAMFRTIPKCTIFYPTDAVSTEHAVALAANAKGMCFIRTTRPETMVIYTPQERFEIGQAKVLRHCVSDKVTVIGAGITVYEALAAADELSKQDIFIRVIDLFTIKPLDVATIVSSAKATEGRIITVEDHYPQGGIGEAVCAAVSMDPDIQVHSLAVSGVPQSGKSEELLDMYGISARHIIVAVKCMLLN

SEQ ID NO: 90423 - protein, 127 aa, Homo sapiens
  Payload ID: 18070
  Gene Name: transketolase-like 1
  ENSP ID: ENSP00000399763
MADAEARAEFPEEARPDRGTLQVLQDMASRLRIHSIRATCSTSSGHPTSCSSSSEIMSVLFFYIMRYKQSDPENPDNDRFVLAKRLSFVDVATGWLGQGLGVACGTLMWWTAGTWRHCARYSGRLLR

SEQ ID NO: 90424 - protein, 197 aa, Homo sapiens
  Payload ID: 18070
  Gene Name: transketolase-like 1
  ENSP ID: ENSP00000401111
MAFLIHNAPESSSACGKATDEFKHVKEYSCQRHKGNLPRVHGALRHPTSCSSSSEIMSVLFFYIMRYKQSDPENPDNDRFVLAKRLSFVDVATGWLGQGLGVACGMAYTGKYFDRASYRVFCLMSDGESSEGSVWEAMAFASYYSLDNLVAIFDVNRLGHSGALPAEHCINIYQRRCEAFGWNTYVVDGRDVEALCQ

SEQ ID NO: 90425 - protein, 175 aa, Homo sapiens
  Payload ID: 18070
  Gene Name: transketolase-like 1
  ENSP ID: ENSP00000416552
  MOD_RES (1)..(1): Any amino acid
XEAQRKLAPSPRCSAVRSWPHCAQGEGCHPTSCSSSSEIMSVLFFYIMRYKQSDPENPDNDRFVLAKRLSFVDVATGWLGQGLGVACGMAYTGKYFDRASYRVFCLMSDGESSEGSVWEAMAFASYYSLDNLVAIFDVNRLGHSGALPAEHCINIYQRRCEAFGWNTYVVDGRDV

SEQ ID NO: 90426 - protein, 626 aa, Homo sapiens
  Payload ID: 18071
  Gene Name: transketolase-like 2
  Uniprot ID: Q9H0I9
  ENSP ID: ENSP00000280605
MMANDAKPDVKTVQVLRDTANRLRIHSIRATCASGSGQLTSCCSAAEVVSVLFFHTMKYKQTDPEHPDNDRFILSRGHAAPILYAAWVEVGDISESDLLNLRKLHSDLERHPTPRLPFVDVATGSLGQGLGTACGMAYTGKYLDKASYRVFCLMGDGESSEGSVWEAFAFASHYNLDNLVAVFDVNRLGQSGPAPLEHGADIYQNCCEAFGWNTYLVDGHDVEALCQAFWQASQVKNKPTAIVAKTFKGRGIPNIEDAENWHGKPVPKERADAIVKLIESQIQTNENLIPKSPVEDSPQISITDIKMTSPPAYKVGDKIATQKTYGLALAKLGRANERVIVLSGDTMNSTFSEIFRKEHPERFIECIIAEQNMVSVALGCATRGRTIAFAGAFAAFFTRAFDQLRMGAISQANINLIGSHCGVSTGEDGVSQMALEDLAMFRSIPNCTVFYPSDAISTEHAIYLAANTKGMCFIRTSQPETAVIYTPQENFEIGQAKVVRHGVNDKVTVIGAGVTLHEALEAADHLSQQGISVRVIDPFTIKPLDAATIISSAKATGGRVITVEDHYREGGIGEAVCAAVSREPDILVHQLAVSGVPQRGKTSELLDMFGISTRHIIAAVTLTLMK

SEQ ID NO: 90427 - protein, 203 aa, Homo sapiens
  Payload ID: 18072
  Gene Name: translation machinery associated 16 homolog
  Uniprot ID: Q96EY4
  ENSP ID: ENSP00000351380
MPKAPKGKSAGREKKVIHPYSRKAAQITREAHKQEKKEKLKNEKALRLNLVGEKLQWFQNHLDPQKKRYSKKDACELIERYLNRFSSELEQIELHNSIRDRQGRRHCSRETVIKQTMERERQQFEGYGLEIPDILNASNLKTFREWDFDLKKLPNIKMRKICANDAIPKTCKRKTIITVDQDLGELELNDESSDSDEEMTAVA

SEQ ID NO: 90428 - protein, 144 aa, Homo sapiens
  Payload ID: 18072
  Gene Name: translation machinery associated 16 homolog
  ENSP ID: ENSP00000423375
MPKAPKGKSAGREKKVIHPYSRKAAQITREAHKQEKKEKLKNEKALRLNLVGEKLQWFQNHLDPQKKRYSKKDACELIERYLNRFSSELEQIELHNSIRDRQGRRHCSRETVIKQTMERERQQFEGYGLEIPDILNASNLKTFR

SEQ ID NO: 90429 - protein, 101 aa, Homo sapiens
  Payload ID: 18072
  Gene Name: translation machinery associated 16 homolog
  ENSP ID: ENSP00000423901
MPKAPKGKSAGREKKVIHPYSRKAAQITREAHKQEKKEKLKNEKALRLNLVGEKLQWFQNHLDPQKKRYSKKDACELIERIRENVIRSLYTFLDYRLLFIF

SEQ ID NO: 90430 - protein, 242 aa, Homo sapiens
  Payload ID: 18072
  Gene Name: translation machinery associated 16 homolog
  ENSP ID: ENSP00000425347
  MOD_RES (1)..(1): Any amino acid
XGRKRVASPPGLQSPASHSAPGRVQPPAASSLPPLPASTQPKAPKGKSAGREKKVIHPYSRKAAQITREAHKQEKKEKLKNEKALRLNLVGEKLQWFQNHLDPQKKRYSKKDACELIERYLNRFSSELEQIELHNSIRDRQGRRHCSRETVIKQTMERERQQFEGYGLEIPDILNASNLKTFREWDFDLKKLPNIKMRKICANDAIPKTCKRKTIITVDQDLGELELNDESSDSDEEMTAVA

SEQ ID NO: 90431 - protein, 88 aa, Homo sapiens
  Payload ID: 18072
  Gene Name: translation machinery associated 16 homolog
  ENSP ID: ENSP00000426933
MPKAPKGKSAGREKKVIHPYSRKAAQITREAHKQEKKEKLKNEKALRLNLVGEKLQWFQNHLDPQKKRYSKKDACELIERDSRHSKCK

SEQ ID NO: 90432 - protein, 64 aa, Homo sapiens
  Payload ID: 18073
  Gene Name: translation machinery associated 7 homolog
  Uniprot ID: Q9Y2S6
  ENSP ID: ENSP00000397843
MSGREGGKKKPLKQPKKQAKEMDEEDKAFKQKQKEEQKKLEELKAKAAGKGPLATGGIKKSGKK

SEQ ID NO: 90433 - protein, 297 aa, Homo sapiens
  Payload ID: 18074
  Gene Name: translational activator of mitochondrially encoded cytochrome c oxidase I
  Uniprot ID: Q9BSH4
  ENSP ID: ENSP00000258975
MSAWAAASLSRAAARCLLARGPGVRAAPPRDPRPSHPEPRGCGAAPGRTLHFTAAVPAGHNKWSKVRHIKGPKDVERSRIFSKLCLNIRLAVKEGGPNPEHNSNLANILEVCRSKHMPKSTIETALKMEKSKDTYLLYEGRGPGGSSLLIEALSNSSHKCQADIRHILNKNGGVMAVGARHSFDKKGVIVVEVEDREKKAVNLERALEMAIEAGAEDVKETEDEEERNVFKFICDASSLHQVRKKLDSLGLCSVSCALEFIPNSKVQLAEPDLEQAAHLIQALSNHEDVIHVYDNIE

SEQ ID NO: 90434 - protein, 228 aa, Homo sapiens
  Payload ID: 18075
  Gene Name: translin
  Uniprot ID: Q15631
  ENSP ID: ENSP00000374332
MSVSEIFVELQGFLAAEQDIREEIRKVVQSLEQTAREILTLLQGVHQGAGFQDIPKRCLKAREHFGTVKTHLTSLKTKFPAEQYYRFHEHWRFVLQRLVFLAAFVVYLETETLVTREAVTEILGIEPDREKGFHLDVEDYLSGVLILASELSRLSVNSVTAGDYSRPLHISTFINELDSGFRLLNLKNDSLRKRYDGLKYDVKKVEEVVYDLSIRGFNKETAAACVEK

SEQ ID NO: 90435 - protein, 223 aa, Homo sapiens
  Payload ID: 18075
  Gene Name: translin
  ENSP ID: ENSP00000387263
MPVIPAFWEAEAARSPEEIRKVVQSLEQTAREILTLLQGVHQGAGFQDIPKRCLKAREHFGTVKTHLTSLKTKFPAEQYYRFHEHWRFVLQRLVFLAAFVVYLETETLVTREAVTEILGIEPDREKGFHLDVEDYLSGVLILASELSRLSVNSVTAGDYSRPLHISTFINELDSGFRLLNLKNDSLRKRYDGLKYDVKKVEEVVYDLSIRGFNKETAAACVEK

SEQ ID NO: 90436 - protein, 185 aa, Homo sapiens
  Payload ID: 18075
  Gene Name: translin
  ENSP ID: ENSP00000399735
  MOD_RES (1)..(1): Any amino acid
XEVVPRDWERRESRGGATWGVTRSGGRGEIRKVVQSLEQTAREILTLLQGVHQGAGFQDIPKRCLKAREHFGTVKTHLTSLKTKFPAEQYYRFHEHWRFVLQRLVFLAAFVVYLETETLVTREAVTEILGIEPDREKGFHLDVEDYLSGVLILASELSRLSVNSVTAGDYSRPLHISTFINELDS

SEQ ID NO: 90437 - protein, 148 aa, Homo sapiens
  Payload ID: 18075
  Gene Name: translin
  Uniprot ID: Q15631
  ENSP ID: ENSP00000437728
MSVSEIFVELQGFLAAEQDIREEIRKVVQSLEQTAREILTLLQGVHQGAGFQDIPKRCLKAREHFGTVKTHLTSLKTKFPAEQYYRFHEHWRFVLQRLVFLAAFVVYLETETLVTREAVTEILGIEAVCQQRDCWRLLPTPPHLHLHQ

SEQ ID NO: 90438 - protein, 92 aa, Homo sapiens
  Payload ID: 18075
  Gene Name: translin
  ENSP ID: ENSP00000487702
MSVSEIFVELQGFLAAEQDIREEIRKVVQSLEQTAREILTLLQGVHQGAGFQDSKFFVLYPIISLLFRGRVSIQKTFYNEKWLSCFMFQRGV

SEQ ID NO: 90439 - protein, 36 aa, Homo sapiens
  Payload ID: 18075
  Gene Name: translin
  ENSP ID: ENSP00000487808
MSVSEIFVELQGFLAAEQDIREASPLPSPFPLPFHA

SEQ ID NO: 90440 - protein, 36 aa, Homo sapiens; identical to SEQ ID NO: 90439
  Payload ID: 18075
  Gene Name: translin
  ENSP ID: ENSP00000487833

SEQ ID NO: 90441 - protein, 36 aa, Homo sapiens; identical to SEQ ID NO: 90439
  Payload ID: 18075
  Gene Name: translin
  ENSP ID: ENSP00000488237

SEQ ID NO: 90442 - protein, 290 aa, Homo sapiens
  Payload ID: 18076
  Gene Name: translin-associated factor X
  Uniprot ID: Q99598
  ENSP ID: ENSP00000355599
MSNKEGSGGFRKRKHDNFPHNQRREGKDVNSSSPVMLAFKSFQQELDARHDKYERLVKLSRDITVESKRTIFLLHRITSAPDMEDILTESEIKLDGVRQKIFQVAQELSGEDMHQFHRAITTGLQEYVEAVSFQHFIKTRSLISMDEINKQLIFTTEDNGKENKTPSSDAQDKQFGTWRLRVTPVDYLLGVADLTGELMRMCINSVGNGDIDTPFEVSQFLRQVYDGFSFIGNTGPYEVSKKLYTLKQSLAKVENACYALKVRGSEIPKHMLADVFSVKTEMIDQEEGIS

SEQ ID NO: 90443 - protein, 163 aa, Homo sapiens
  Payload ID: 18076
  Gene Name: translin-associated factor X
  ENSP ID: ENSP00000397537
MSNKEGSGGFRKRKHDNFPHNQRREGKDVNSSSPVMLAFKSFQQELDARHDKYERLVKLSRDITVESKRTIFLLHRITSSQYLDHSAPDMEDILTESEIKLDGVRQKIFQVAQELSGEDMHQFHRAITTGLQEYVEAVSFQHFIKTRSLISMDEINKQLIFTT

SEQ ID NO: 90444 - protein, 658 aa, Homo sapiens
  Payload ID: 18077
  Gene Name: translin-associated factor X interacting protein 1
  Uniprot ID: Q2TAA8
  ENSP ID: ENSP00000373485
MGGHLSPWPTYTSGQTILQNRKPCSDDYRKRVGSCQQHPFRTAKPQYLEELENYLRKELLLLDLGTDSTQELRLQPYREIFEFFIEDFKTYKPLLSSIKNAYEGMLAHQREKIRALEPLKAKLVTVNEDCNERILAMRAEEKYEISLLKKEKMNLLKLIDKKNEEKISLQSEVTKLRKNLAEEYLHYLSERDACKILIADLNELRYQREDMSLAQSPGIWGEDPVKLTLALKMTRQDLTRTQMELNNMKANFGDVVPRRDFEMQEKTNKDLQEQLDTLRASYEEVRKEHEILMQLHMSTLKERDQFFSELQEIQRTSTPRPDWTKCKDVVAGGPERWQMLAEGKNSDQLVDVLLEEIGSGLLREKDFFPGLGYGEAIPAFLRFDGLVENKKPSKKDVVNLLKDAWKERLAEEQKETFPDFFFNFLEHRFGPSDAMAWAYTIFENIKIFHSNEVMSQFYAVLMGKRSENVYVTQKETVAQLLKEMTNADSQNEGLLTMEQFNTVLKSTFPLKTEEQIQELMEAGGWHPSSSNADLLNYRSLFMEDEEGQSEPFVQKLWEQYMDEKDEYLQQLKQELGIELHEEVTLPKLRGGLMTIDPSLDKQTVNTYMSQAFQLPESEMPEEGDEKEEAVVEILQTALERLQVIDIRRVGPREPEPAS

SEQ ID NO: 90445 - protein, 428 aa, Homo sapiens
  Payload ID: 18077
  Gene Name: translin-associated factor X interacting protein 1
  ENSP ID: ENSP00000397147
RYHSFSSASRLQPRPSGVTIDESFLTEDKSTQNRKLLQKRRTLVTKLRKNLAEEYLHYLSERDACKILIADLNELRYQREDMSLAQSPGIWGEDPVKLTLALKMTRQDLTRTQMELNNMKANFGDVVPRRDFEMQEKTNKDLQEQLDTLRASYEEVRKEHEILMQLHMSTLKERDQFFSELQEIQRTSTPRPDWTKCKDVVAGGPERWQMLAEGKNSDQLVDVLLEEIGSGLLREKDFFPGLGYGEAIPAFLRFDGLVENKKPSKKDVVNLLKDAWKERLAEEQKETFPDFFFNFLEHRFGPSDAMAWAYTIFENIKIFHSNEVMSQFYAVLMGKRSENVYVTQKETVAQLLKEMTNADSQNEGLLTMEQFNTVLKSTFPLKTEEQIQELMEAGGWHPSSSNADLLNYRSLFMEDEEGQSEPFVQKLW

SEQ ID NO: 90446 - protein, 643 aa, Homo sapiens
  Payload ID: 18077
  Gene Name: translin-associated factor X interacting protein 1
  ENSP ID: ENSP00000411472
MACQQSRYHSFSSASRLQPRPSGVTIDESFLTEDKSTQNRKLLQKRRTLELPAAPLSHCQAPVLGGTGKLPTQGAPPAGPGHRFHPGTKAAAHQREKIRALEPLKAKLVTVNEDCNERILAMRAEEKYEISLLKKEKMNLLKLIDKKNEEKISLQSEVTKLRKNLAEEYLHYLSERDACKILIADLNELRYQREDMSLAQSPGIWGEDPVKLTLALKMTRQDLTRTQMELNNMKANFGDVVPRRDFEMQEKTNKDLQEQLDTLRASYEEVRKEHEILMQLHMSTLKERDQFFSELQEIQRTSTPRPDWTKCKDVVAGGPERWQMLAEGKNSDQLVDVLLEEIGSGLLREKDFFPGLGYGEAIPAFLRFDGLVENKKPSKKDVVNLLKDAWKERLAEEQKETFPDFFFNFLEHRFGPSDAMAWAYTIFENIKIFHSNEVMSQFYAVLMGKRSENVYVTQKETVAQLLKEMTNADSQNEGLLTMEQFNTVLKSTFPLKTEEQIQELMEAGGWHPSSSNADLLNYRSLFMEDEEGQSEPFVQKLWEQYMDEKDEYLQQLKQELGIELHEEVTLPKLRGGLMTIDPSLDKQTVNTYMSQAFQLPESEMPEEGDEKEEAVVEILQTALERLQVIDIRRVGPREPEPAS

SEQ ID NO: 90447 - protein, 171 aa, Homo sapiens
  Payload ID: 18077
  Gene Name: translin-associated factor X interacting protein 1
  ENSP ID: ENSP00000454989
MACQQSRYHSFSSASRLQPRPSGVTIDESFLTEDKSTQNRKLLQKRRTLTGQFSMGGHLSPWPTYTSGQTILQNRKPCSDDYRKRVGSCQQHPFRTAKPQYLEELENYLRKELLLLDLGTDSTQELRLQVTKLRKNLAEEYLHYLSERDACKILIADLNELRYQREDMSLA

SEQ ID NO: 90448 - protein, 97 aa, Homo sapiens
  Payload ID: 18077
  Gene Name: translin-associated factor X interacting protein 1
  ENSP ID: ENSP00000455011
MACQQSRYHSFSSASRLQPRPSGVTIDESFLTEDKSTQNRKLLQKRRTLELPAAPLSHCQAPVLGGTGKLPTQGAPPAGPGHRFHPGTKAAALQRDL

SEQ ID NO: 90449 - protein, 141 aa, Homo sapiens
  Payload ID: 18077
  Gene Name: translin-associated factor X interacting protein 1
  ENSP ID: ENSP00000455640
MACQQSRYHSFSSASRLQPRPSGVTIDESFLTEDKSTQNRKLLQKRRTLTGQFSMGGHLSPWPTYTSGQTILQNRKPCSDDYRKRVGSCQQHPFRTAKPQYLEELENYLRKELLLLDLGTDSTQELRLQPTKGRRFGLWSP

SEQ ID NO: 90450 - protein, 712 aa, Homo sapiens
  Payload ID: 18077
  Gene Name: translin-associated factor X interacting protein 1
  ENSP ID: ENSP00000457241
MACQQSRYHSFSSASRLQPRPSGVTIDESFLTEDKSTQNRKLLQKRRTLTGQFSMGGHLSPWPTYTSGQTILQNRKPCSDDYRKRVGSCQQHPFRTAKPQYLEELENYLRKELLLLDLGTDSTQELRLQPYREIFEFFIEDFKTYKPLLSSIKNAYEGMLAHQREKIRALEPLKAKLVTVNEDCNERILAMRAEEKYEISLLKKEKMNLLKLIDKKNEEKISLQSEVTKLRKNLAEEYLHYLSERDACKILIADLNELRYQREDMSLAQSPGIWGEDPVKLTLALKMTRQDLTRTQMELNNMKANFGDVVPRRDFEMQEKTNKDLQEQLDTLRASYEEVRKEHEILMQLHMSTLKERDQFFSELQEIQRTSTPRPDWTKCKDVVAGGPERWQMLAEGKNSDQLVDVLLEEIGSGLLREKDFFPGLGYGEAIPAFLRFDGLVENKKPSKKDVVNLLKDAWKERLAEEQKETFPDFFFNFLEHRFGPSDAMAWAYTIFENIKIFHSNEVMSQFYAVLMGKRSENVYVTQKETVAQLLKEMTNADSQNEGLLTMEQFNTVLKSTFPLKTEEQIQELMEAGGWHPSSSNADLLNYRSLFMEDEEGQSEPFVQKLWEQYMDEKDEYLQQLKQELGIELHEEVTLPKLRGGLMTIDPSLDKQTVNTYMSQAFQLPESEMPEEGDEKEEAVVEILQTALERLQVIDIRRVGPREPEPAS

SEQ ID NO: 90451 - protein, 61 aa, Homo sapiens
  Payload ID: 18077
  Gene Name: translin-associated factor X interacting protein 1
  ENSP ID: ENSP00000458938
MACQQSRYHSFSSASRLQPRPSGVTIDESFLTEDKSTQNRKLLQKRRTLPTKGRRFGLWSP

SEQ ID NO: 90452 - protein, 79 aa, Homo sapiens
  Payload ID: 18077
  Gene Name: translin-associated factor X interacting protein 1
  ENSP ID: ENSP00000463792
MRAEEKYEISLLKKEKMNLLKLIDKKNEEKISLQSEVTKLRKNLAEEYLHYLSERDACKILIADLNELRYQREDMSLAQ

SEQ ID NO: 90453 - protein, 123 aa, Homo sapiens
  Payload ID: 18077
  Gene Name: translin-associated factor X interacting protein 1
  ENSP ID: ENSP00000464527
  MOD_RES (1)..(1): Any amino acid
XQLKQELGIELHEEVTLPKLRGGLMTIDPSLDKQTVNTYMSQAFQLPESEMPEEGDEKEEAVVEILQTALERLQRGELSPKASRGKPNLTWRSQGSISQIPQKGTHVYSSAGWRSAGQARPLH

SEQ ID NO: 90454 - protein, 33 aa, Homo sapiens
  Payload ID: 18077
  Gene Name: translin-associated factor X interacting protein 1
  ENSP ID: ENSP00000464694
MRAEEKYEISLLKKEKMNLLKLIDKKNEEKISL

SEQ ID NO: 90455 - protein, 90 aa, Homo sapiens
  Payload ID: 18078
  Gene Name: translocase of inner mitochondrial membrane 10 homolog (yeast)
  Uniprot ID: P62072
  ENSP ID: ENSP00000257245
MDPLRAQQLAAELEVEMMADMYNRMTSACHRKCVPPHYKEAELSKGESVCLDRCVSKYLDIHERMGKKLTELSMQDEELMKRVQQSSGPA

SEQ ID NO: 90456 - protein, 90 aa, Homo sapiens; identical to SEQ ID NO: 90455
  Payload ID: 18078
  Gene Name: translocase of inner mitochondrial membrane 10 homolog (yeast)
  Uniprot ID: P62072
  ENSP ID: ENSP00000433627

SEQ ID NO: 90457 - protein, 90 aa, Homo sapiens; identical to SEQ ID NO: 90455
  Payload ID: 18078
  Gene Name: translocase of inner mitochondrial membrane 10 homolog (yeast)
  Uniprot ID: P62072
  ENSP ID: ENSP00000435678

SEQ ID NO: 90458 - protein, 103 aa, Homo sapiens; identical to SEQ ID NO: 51883
  Payload ID: 18079
  Gene Name: translocase of inner mitochondrial membrane 10 homolog B (yeast)
  Uniprot ID: Q9Y5J6
  ENSP ID: ENSP00000254616

SEQ ID NO: 90459 - protein, 71 aa, Homo sapiens; identical to SEQ ID NO: 51882
  Payload ID: 18079
  Gene Name: translocase of inner mitochondrial membrane 10 homolog B (yeast)
  ENSP ID: ENSP00000433087

SEQ ID NO: 90460 - protein, 71 aa, Homo sapiens; identical to SEQ ID NO: 51882
  Payload ID: 18079
  Gene Name: translocase of inner mitochondrial membrane 10 homolog B (yeast)
  ENSP ID: ENSP00000436579

SEQ ID NO: 90461 - protein, 103 aa, Homo sapiens; identical to SEQ ID NO: 51883
  Payload ID: 18079
  Gene Name: translocase of inner mitochondrial membrane 10 homolog B (yeast)
  Uniprot ID: Q9Y5J6
  ENSP ID: ENSP00000436948

SEQ ID NO: 90462 - protein, 95 aa, Homo sapiens
  Payload ID: 18080
  Gene Name: translocase of inner mitochondrial membrane 13 homolog (yeast)
  Uniprot ID: Q9Y5L4
  ENSP ID: ENSP00000215570
MEGGFGSDFGGSGSGKLDPGLIMEQVKVQIAVANAQELLQRMTDKCFRKCIGKPGGSLDNSEQKCIAMCMDRYMDAWNTVSRAYNSRLQRERANM

SEQ ID NO: 90463 - protein, 80 aa, Homo sapiens
  Payload ID: 18080
  Gene Name: translocase of inner mitochondrial membrane 13 homolog (yeast)
  ENSP ID: ENSP00000464881
MEGGFGSDFGGSGSGKLDPGLIMEQRMTDKCFRKCIGKPGGSLDNSEQKCIAMCMDRYMDAWNTVSRAYNSRLQRERANM

SEQ ID NO: 90464 - protein, 171 aa, Homo sapiens
  Payload ID: 18081
  Gene Name: translocase of inner mitochondrial membrane 17 homolog A (yeast)
  Uniprot ID: Q99595
  ENSP ID: ENSP00000356256
MEEYAREPCPWRIVDDCGGAFTMGTIGGGIFQAIKGFRNSPVGVNHRLRGSLTAIKTRAPQLGGSFAVWGGLFSMIDCSMVQVRGKEDPWNSITSGALTGAILAARNGPVAMVGSAAMGGILLALIEGAGILLTRFASAQFPNGPQFAEDPSQLPSTQLPSSPFGDYRQYQ

SEQ ID NO: 90465 - protein, 172 aa, Homo sapiens
  Payload ID: 18082
  Gene Name: translocase of inner mitochondrial membrane 17 homolog B (yeast)
  Uniprot ID: O60830
  ENSP ID: ENSP00000365766
MEEYAREPCPWRIVDDCGGAFTMGVIGGGVFQAIKGFRNAPVGIRHRLRGSANAVRIRAPQIGGSFAVWGGLFSTIDCGLVRLRGKEDPWNSITSGALTGAVLAARSGPLAMVGSAMMGGILLALIEGVGILLTRYTAQQFRNAPPFLEDPSQLPPKDGTPAPGYPSYQQYH

SEQ ID NO: 90466 - protein, 222 aa, Homo sapiens
  Payload ID: 18082
  Gene Name: translocase of inner mitochondrial membrane 17 homolog B (yeast)
  Uniprot ID: O60830
  ENSP ID: ENSP00000379999
MEEYAREPCPWRIVDDCGGAFTMGVIGGGVFQAIKGFRNAPVCRLLSEAPLFIYSCSRSVSPTVNVSSERAESRPTLFMAVSLHMAWCLAHIGIRHRLRGSANAVRIRAPQIGGSFAVWGGLFSTIDCGLVRLRGKEDPWNSITSGALTGAVLAARSGPLAMVGSAMMGGILLALIEGVGILLTRYTAQQFRNAPPFLEDPSQLPPKDGTPAPGYPSYQQYH

SEQ ID NO: 90467 - protein, 56 aa, Homo sapiens
  Payload ID: 18082
  Gene Name: translocase of inner mitochondrial membrane 17 homolog B (yeast)
  ENSP ID: ENSP00000476861
MEEYAREPCPWRIVDDCGGAFTMGVIGGGVFQAIKGFRNAPVRRGFNVLLRLVSNS

SEQ ID NO: 90468 - protein, 192 aa, Homo sapiens
  Payload ID: 18082
  Gene Name: translocase of inner mitochondrial membrane 17 homolog B (yeast)
  ENSP ID: ENSP00000477027
MIAVEPSLWVSSVAESSRPSRVSAMPLLSVSPTVNVSSERAESRPTLFMAVSLHMAWCLAHIGIRHRLRGSANAVRIRAPQIGGSFAVWGGLFSTIDCGLVRLRGKEDPWNSITSGALTGAVLAARSGPLAMVGSAMMGGILLALIEGVGILLTRYTAQQFRNAPPFLEDPSQLPPKDGTPAPGYPSYQQYH

SEQ ID NO: 90469 - protein, 222 aa, Homo sapiens; identical to SEQ ID NO: 90466
  Payload ID: 18082
  Gene Name: translocase of inner mitochondrial membrane 17 homolog B (yeast)
  Uniprot ID: O60830
  ENSP ID: ENSP00000477073

SEQ ID NO: 90470 - protein, 159 aa, Homo sapiens
  Payload ID: 18082
  Gene Name: translocase of inner mitochondrial membrane 17 homolog B (yeast)
  ENSP ID: ENSP00000477085
MRGHNQRSPWRIVDDCGGAFTMGVIGGGVFQAIKGFRNAPVCRLLSEAPLFIYSCSRSVSPTVNVSSERAESRPTLFMAVSLHMAWCLAHIGIRHRLRGSANAVRIRAPQIGGSFAVWGGLFSTIDCGLVRLRGKEDPWNSITSGALTGAVLAARSGPL

SEQ ID NO: 90471 - protein, 248 aa, Homo sapiens
  Payload ID: 18083
  Gene Name: translocase of inner mitochondrial membrane 21 homolog (yeast)
  Uniprot ID: Q9BVV7
  ENSP ID: ENSP00000169551
MICTFLRAVQYTEKLHRSSAKRLLLPYIVLNKACLKTEPSLRCGLQYQKKTLRPRCILGVTQKTIWTQGPSPRKAKEDGSKQVSVHRSQRGGTAVPTSQKVKEAGRDFTYLIVVLFGISITGGLFYTIFKELFSSSSPSKIYGRALEKCRSHPEVIGVFGESVKGYGEVTRRGRRQHVRFTEYVKDGLKHTCVKFYIEGSEPGKQGTVYAQVKENPGSGEYDFRYIFVEIESYPRRTIIIEDNRSQDD

SEQ ID NO: 90472 - protein, 172 aa, Homo sapiens
  Payload ID: 18083
  Gene Name: translocase of inner mitochondrial membrane 21 homolog (yeast)
  ENSP ID: ENSP00000462028
MICTFLRAVQYTEKLHRSSAKRLLLPYIVLNKACLKTEPSLRCGLQYQKKTLRPRCILGVTQKTIWTQGPSPRKAKEDGSKQVSVHRSQRGGTAVPTSQKVKEAGRDFTYLIVVLFGISITGGLFYTIFKELFSSSSPSKIYGRALEKCRSHPEGCSSHRPRSNVIARICSP

SEQ ID NO: 90473 - protein, 127 aa, Homo sapiens
  Payload ID: 18083
  Gene Name: translocase of inner mitochondrial membrane 21 homolog (yeast)
  ENSP ID: ENSP00000464228
  MOD_RES (1)..(1): Any amino acid
XIVVLFGISITGGLFYTIFKELFSSSSPSKIYGRALEKCRSHPEVIGVFGESVKGYGEVTRRGRRQHVRFTEYVKDGLKHTCVKFYIEGSEPGKQGTVYAQVKEVWESWDVGSEVLSAVLFKFWKGK

SEQ ID NO: 90474 - protein, 194 aa, Homo sapiens
  Payload ID: 18084
  Gene Name: translocase of inner mitochondrial membrane 22 homolog (yeast)
  Uniprot ID: Q9Y584
  ENSP ID: ENSP00000320236
MAAAAPNAGGSAPETAGSAEAPLQYSLLLQYLVGDKRQPRLLEPGSLGGIPSPAKSEEQKMIEKAMESCAFKAALACVGGFVLGGAFGVFTAGIDTNVGFDPKDPYRTPTAKEVLKDMGQRGMSYAKNFAIVGAMFSCTECLIESYRGTSDWKNSVISGCITGGAIGFRAGLKAGAIGCGGFAAFSAAIDYYLR

SEQ ID NO: 90475 - protein, 194 aa, Homo sapiens; identical to SEQ ID NO: 90474
  Payload ID: 18084
  Gene Name: translocase of inner mitochondrial membrane 22 homolog (yeast)
  Uniprot ID: Q9Y584
  ENSP ID: ENSP00000478463

SEQ ID NO: 90476 - protein, 194 aa, Homo sapiens; identical to SEQ ID NO: 90474
  Payload ID: 18084
  Gene Name: translocase of inner mitochondrial membrane 22 homolog (yeast)
  Uniprot ID: Q9Y584
  ENSP ID: ENSP00000482204

SEQ ID NO: 90477 - protein, 209 aa, Homo sapiens
  Payload ID: 18085
  Gene Name: translocase of inner mitochondrial membrane 23 homolog (yeast)
  Uniprot ID: O14925
  ENSP ID: ENSP00000464522
MEGGGGSGNKTTGGLAGFFGAGGAGYSHADLAGVPLTGMNPLSPYLNVDPRYLVQDTDEFILPTGANKTRGRFELAFFTIGGCCMTGAAFGAMNGLRLGLKETQNMAWSKPRNVQILNMVTRQGALWANTLGSLALLYSAFGVIIEKTRGAEDDLNTVAAGTMTGMLYKCTGGLRGIARGGLTGLTLTSLYALYNNWEHMKGSLLQQSL

SEQ ID NO: 90478 - protein, 188 aa, Homo sapiens
  Payload ID: 18086
  Gene Name: translocase of inner mitochondrial membrane 23 homolog B (yeast)
  Uniprot ID: Q5SRD1
  ENSP ID: ENSP00000363211
MEGGGGSGDKTTGVLAGFFGAGEAGYSHADLAGVPLTGMNPLCPYLNVDPRYLVQDTDEFILPTGANKTWGRFELAFFTIGGCCMTGAAFGAMNGLRLGLKETQNMAWSKPGNVQILNMVTRQGALWANTLGSLALLYSAFGVIIEKTRGAEDDLNTVAAGTMTGMLYKCTVSEMALDSPFCVLLSGS

SEQ ID NO: 90479 - protein, 140 aa, Homo sapiens
  Payload ID: 18086
  Gene Name: translocase of inner mitochondrial membrane 23 homolog B (yeast)
  ENSP ID: ENSP00000389331
MEGGGGSGDKTTGVLAGFFGAGEAGYSHADLAGVPLTGMNPLCPYLNVDPRYLVQDTDEFILPTGANKTWGRFELAFFTIGGCCMTALLYSAFGVIIEKTRGAEDDLNTVAAGTMTGMLYKCTVSEMALDSPFCVLLSGS

SEQ ID NO: 90480 - protein, 38 aa, Homo sapiens
  Payload ID: 18086
  Gene Name: translocase of inner mitochondrial membrane 23 homolog B (yeast)
  ENSP ID: ENSP00000470535
MEGGGGSGDKTTGVLAGFFGAGEAGYSHADLAGVPRYR

SEQ ID NO: 90481 - protein, 99 aa, Homo sapiens
  Payload ID: 18086
  Gene Name: translocase of inner mitochondrial membrane 23 homolog B (yeast)
  ENSP ID: ENSP00000473724
MEGGGGSGDKTTGVLAGFFGAGEAGYSHADLAGVPQSGPRSVTHVGVRWHDYSSLKPGTPELKQSSPLSLLSSWESSNWYEPSVSLFKCGSTIPRAGYR

SEQ ID NO: 90482 - protein, 452 aa, Homo sapiens
  Payload ID: 18087
  Gene Name: translocase of inner mitochondrial membrane 44 homolog (yeast)
  Uniprot ID: O43615
  ENSP ID: ENSP00000270538
MAAAALRSGWCRCPRRCLGSGIQFLSSHNLPHGSTYQMRRPGGELPLSKSYSSGNRKGFLSGLLDNVKQELAKNKEMKESIKKFRDEARRLEESDVLQEARRKYKTIESETVRTSEVLRKKLGELTGTVKESLHEVSKSDLGRKIKEGVEEAAKTAKQSAESVSKGGEKLGRTAAFRALSQGVESVKKEIDDSVLGQTGPYRRPQRLRKRTEFAGDKFKEEKVFEPNEEALGVVLHKDSKWYQQWKDFKENNVVFNRFFEMKMKYDESDNAFIRASRALTDKVTDLLGGLFSKTEMSEVLTEILRVDPAFDKDRFLKQCENDIIPNVLEAMISGELDILKDWCYEATYSQLAHPIQQAKALGLQFHSRILDIDNVDLAMGKMMEQGPVLIITFQAQLVMVVRNPKGEVVEGDPDKVLRMLYVWALCRDQDELNPYAAWRLLDISASSTEQIL

SEQ ID NO: 90483 - protein, 133 aa, Homo sapiens
  Payload ID: 18087
  Gene Name: translocase of inner mitochondrial membrane 44 homolog (yeast)
  ENSP ID: ENSP00000469273
LFSKTEMSEVLTEILRVDPAFDKDRFLKQCENDIIPNVLEAMISGELDILKDWCYEALAMGKMMEQGPVLIITFQAQLVMVVRNPKGEVVEGDPDKVLRMLYVWALCRDQDELNPYAAWRLLDISASSTEQIL

SEQ ID NO: 90484 - protein, 273 aa, Homo sapiens
  Payload ID: 18087
  Gene Name: translocase of inner mitochondrial membrane 44 homolog (yeast)
  ENSP ID: ENSP00000469389
MAAAALRSGWCRCPRSKSYSSGNRKGFLSGLLDNVKQELAKNKEMKESIKKFRDEARRLEESDVLQEARRKYKTIESETVRTSEVLRKKLGELTGTVKESLHEVSKSDLGRKIKEGVEEAAKTAKQSAESVSKGGEKLGRTAAFRALSQGVESVKKEIDDSVLGQTGPYRRPQRLRKRTEFAGDKFKEEKVFEPNEEALGVVLHKDSKWYQQWKDFKENNVVFNRFFEMKMKYDESDNAFIRASRALTDKVTDLLGGLFSKTEMSEVLTEILR

SEQ ID NO: 90485 - protein, 139 aa, Homo sapiens
  Payload ID: 18087
  Gene Name: translocase of inner mitochondrial membrane 44 homolog (yeast)
  ENSP ID: ENSP00000471596
MAAAALRSGWCRCPRRCLGSGIQFLSSHNLPHGSTYQMRRPGGELPLSKSYSSGNRKGFLSGLLDNVKQELAKNKEMKESIKKFRDEARRLEESDVLQEARRKYEEVAVSRERATVLQPRQRRHCLKKKKKKKDTALFT

SEQ ID NO: 90486 - protein, 126 aa, Homo sapiens
  Payload ID: 18087
  Gene Name: translocase of inner mitochondrial membrane 44 homolog (yeast)
  ENSP ID: ENSP00000472916
  MOD_RES (1)..(1): Any amino acid
XRSGWCRCPRRCLGSGIQFLSSHNLPHGSTYQMRRPGGELPLSKSYSSGNRKGFLSGLLDNVKQELAKNKEMKESIKKFRDEARRLEESDVLQEARRKYKTIESETVRTSEVLRKKLGELTGTVKE

SEQ ID NO: 90487 - protein, 456 aa, Homo sapiens
  Payload ID: 18088
  Gene Name: translocase of inner mitochondrial membrane 50 homolog (S. cerevisiae)
  Uniprot ID: Q3ZCQ8
  ENSP ID: ENSP00000318115
MASALSLGNKCDPFLRCVLCRGGGALQGPRGRGPDDFESQLSPPGSARRLVRSKRACGNPPDAFGLSRASVHPPLPRVSIGCSSGPGRAKRERVGGAAWRQRKMAASAAVFSRLRSGLRLGSRGLCTRLATPPRRAPDQAAEIGSRGSTKAQGPQQQPGSEGPSYAKKVALWLAGLLGAGGTVSVVYIFGNNPVDENGAKIPDEFDNDPILVQQLRRTYKYFKDYRQMIIEPTSPCLLPDPLQEPYYQPPYTLVLELTGVLLHPEWSLATGWRFKKRPGIETLFQQLAPLYEIVIFTSETGMTAFPLIDSVDPHGFISYRLFRDATRYMDGHHVKDISCLNRDPARVVVVDCKKEAFRLQPYNGVALRPWDGNSDDRVLLDLSAFLKTIALNGVEDVRTVLEHYALEDDPLAAFKQRQSRLEQEEQQRLAELSKSNKQNLFLGSLTSRLWPRSKQP

SEQ ID NO: 90488 - protein, 456 aa, Homo sapiens; identical to SEQ ID NO: 90487
  Payload ID: 18088
  Gene Name: translocase of inner mitochondrial membrane 50 homolog (S. cerevisiae)
  Uniprot ID: Q3ZCQ8
  ENSP ID: ENSP00000445806

SEQ ID NO: 90489 - protein, 111 aa, Homo sapiens
  Payload ID: 18088
  Gene Name: translocase of inner mitochondrial membrane 50 homolog (S. cerevisiae)
  ENSP ID: ENSP00000469052
  MOD_RES (1)..(1): Any amino acid
XLRSGLRLGSRGLCTRLATPPRRAPDQAAEIGSRGSTKAQGPQQQPGSEGPSYAKKVALWLAGLLGAGGTVSVVYIFGNNPVDENGAKIPDEFDNETEFHHVGQDGLDLTS

SEQ ID NO: 90490 - protein, 257 aa, Homo sapiens
  Payload ID: 18088
  Gene Name: translocase of inner mitochondrial membrane 50 homolog (S. cerevisiae)
  ENSP ID: ENSP00000470896
  MOD_RES (1)..(1): Any amino acid
XAASAAVFSRLRSGLRLGSRGLCTRLATPPRRAPDQAAEIGSRGSTKAQGPQQQPGSEGPSYAKKVALWLAGLLGAGGTVSVVYIFGNNPVDENGAKMIIEPTSPCLLPDPLQEPYYQPPYTLVLELTGVLLHPEWSLATGWRFKKRPGIETLFQQLAPLYEIVIFTSETGMTAFPLIDSVDPHGFISYRLFRDATRYMDGHHVKDISCLNRDPARVVVVDCKKEAFRLQPYNGVALRPWDGNSDDRVLLDLSAFLK

SEQ ID NO: 90491 - protein, 227 aa, Homo sapiens
  Payload ID: 18088
  Gene Name: translocase of inner mitochondrial membrane 50 homolog (S. cerevisiae)
  ENSP ID: ENSP00000470994
  MOD_RES (1)..(1): Any amino acid
XQVILEQEGPGTLESQSGRGSYFLCGVGGGEAAEIGSRGSTKAQGPQQQPGSEGPSYAKKVALWLAGLLGAGGTVSVVYIFGNNPVDENGAKIPDEFDNDPILVQQLRRTYKYFKDYRQMIIEPTSPCLLPDPLQEPYYQPPYTLVLELTGVLLHPEWSLATGWRFKKRPGIETLFQQLAPLYEIVIFTSETGMTAFPLIDSVDPHGFISYRLFRDATRYMDGHHVK

SEQ ID NO: 90492 - protein, 104 aa, Homo sapiens
  Payload ID: 18088
  Gene Name: translocase of inner mitochondrial membrane 50 homolog (S. cerevisiae)
  ENSP ID: ENSP00000471142
  MOD_RES (1)..(1): Any amino acid
XKEAFRLQPYNGVALRPWDGNSDDRVLLDLSAFLKTIALNGVEDVRTVLEHYALEDDPLAAFKQRQSRLEQEEQQRLAELSKSNKQNLFLGSLTSRLWPRSKQP

SEQ ID NO: 90493 - protein, 256 aa, Homo sapiens
  Payload ID: 18088
  Gene Name: translocase of inner mitochondrial membrane 50 homolog (S. cerevisiae)
  ENSP ID: ENSP00000472184
MAASAAVFSRLRSGLRLGSRGLCTRLATPPRRAPDQAAEIGSRGSTKAQGPQQQPGSEGPSYAKKVALWLAGLLGAGGTVSVVYIFDPILVQQLRRTYKYFKDYRQMIIEPTSPCLLPDPLQEPYYQPPYTLVLELTGVLLHPEWSLATGWRFKKRPGIETLFQQLAPLYEIVIFTSETGMTAFPLIDSVDPHGFISYRLFRDATRYMDGHHVKDISCLNRDPARVVVVDCKKEAFRLQPYNGVALRPWDGNSDDR

SEQ ID NO: 90494 - protein, 141 aa, Homo sapiens
  Payload ID: 18088
  Gene Name: translocase of inner mitochondrial membrane 50 homolog (S. cerevisiae)
  ENSP ID: ENSP00000472476
MAASAAVFSRLRSGLRLGSRGLCTRLATPPRRAPDQAAEIGSRGSTKAQGPQQQPGSEGPSYAKKVALWLAGLLGAGGTVSVVYIFGNNPVDENGAKIPDEFDNDDHRAHQPLPSPRPSAGTVLPATLHARFGAHRRPLAS

SEQ ID NO: 90495 - protein, 157 aa, Homo sapiens
  Payload ID: 18088
  Gene Name: translocase of inner mitochondrial membrane 50 homolog (S. cerevisiae)
  ENSP ID: ENSP00000472524
MAASAAVFSRLRSGLRLGSRGLCTRLATPPRRAPDQDISCLNRDPARVVVVDCKKEAFRLQPYNGVALRPWDGNSDDRVLLDLSAFLKTIALNGVEDVRTVLEHYALEDDPLAAFKQRQSRLEQEEQQRLAELSKSNKQNLFLGSLTSRLWPRSKQP

SEQ ID NO: 90496 - protein, 200 aa, Homo sapiens
  Payload ID: 18088
  Gene Name: translocase of inner mitochondrial membrane 50 homolog (S. cerevisiae)
  ENSP ID: ENSP00000472723
MAASAAVFSRLRSGLRLGSRGLCTRLATPPRRAPDQETTRWTKMVPRFLMSSTMMIIEPTSPCLLPDPLQEPYYQPPYTLVLELTGVLLHPEWSLATGWRFKKRPGIETLFQQLAPLYEIVIFTSETGMTAFPLIDSVDPHGFISYRLFRDATRYMDGHHVKDISCLNRDPARVVVVDCKKEAFRLQPYNGVALRPWDGN

SEQ ID NO: 90497 - protein, 116 aa, Homo sapiens
  Payload ID: 18088
  Gene Name: translocase of inner mitochondrial membrane 50 homolog (S. cerevisiae)
  ENSP ID: ENSP00000472904
  MOD_RES (1)..(1): Any amino acid
XLATPPRRAPDQAAEIGSRGSTKAQGPQQQPGSEGPSYAKKVALWLAGLLGAGGTVSVVYIFGNNPVDENGAKVRGKETEALPGVLVCGFLMSSTMIQFWYSSCAGHTNISKIIDR

SEQ ID NO: 90498 - protein, 117 aa, Homo sapiens
  Payload ID: 18088
  Gene Name: translocase of inner mitochondrial membrane 50 homolog (S. cerevisiae)
  ENSP ID: ENSP00000472920
  MOD_RES (1)..(1): Any amino acid
XLATPPRRAPDQAAEIGSRGSTKAQGPQQQPGSEGPSYAKKVALWLAGLLGAGGTVSVVYIFGNNPVDENGAKIPDEFDNDDHRAHQPLPSPRPSAGTVLPATLHARFGAHRRPLAS

SEQ ID NO: 90499 - protein, 353 aa, Homo sapiens
  Payload ID: 18088
  Gene Name: translocase of inner mitochondrial membrane 50 homolog (S. cerevisiae)
  Uniprot ID: Q3ZCQ8
  ENSP ID: ENSP00000475531
MAASAAVFSRLRSGLRLGSRGLCTRLATPPRRAPDQAAEIGSRGSTKAQGPQQQPGSEGPSYAKKVALWLAGLLGAGGTVSVVYIFGNNPVDENGAKIPDEFDNDPILVQQLRRTYKYFKDYRQMIIEPTSPCLLPDPLQEPYYQPPYTLVLELTGVLLHPEWSLATGWRFKKRPGIETLFQQLAPLYEIVIFTSETGMTAFPLIDSVDPHGFISYRLFRDATRYMDGHHVKDISCLNRDPARVVVVDCKKEAFRLQPYNGVALRPWDGNSDDRVLLDLSAFLKTIALNGVEDVRTVLEHYALEDDPLAAFKQRQSRLEQEEQQRLAELSKSNKQNLFLGSLTSRLWPRSKQP

SEQ ID NO: 90500 - protein, 97 aa, Homo sapiens
  Payload ID: 18089
  Gene Name: translocase of inner mitochondrial membrane 8 homolog A (yeast)
  Uniprot ID: O60220
  ENSP ID: ENSP00000361993
MDSSSSSSAAGLGAVDPQLQHFIEVETQKQRFQQLVHQMTELCWEKCMDKPGPKLDSRAEACFVNCVERFIDTSQFILNRLEQTQKSKPVFSESLSD

SEQ ID NO: 90501 - protein, 32 aa, Homo sapiens
  Payload ID: 18090
  Gene Name: translocase of inner mitochondrial membrane 8 homolog B (yeast)
  ENSP ID: ENSP00000421964
MAELGEADEAELQRLVAAEQQKAQFTAQATCP

SEQ ID NO: 90502 - protein, 83 aa, Homo sapiens
  Payload ID: 18090
  Gene Name: translocase of inner mitochondrial membrane 8 homolog B (yeast)
  Uniprot ID: Q9Y5J9
  ENSP ID: ENSP00000422122
MAELGEADEAELQRLVAAEQQKAQFTAQVHHFMELCWDKCVEKPGNRLDSRTENCLSSCVDRFIDTTLAITSRFAQIVQKGGQ

SEQ ID NO: 90503 - protein, 98 aa, Homo sapiens
  Payload ID: 18090
  Gene Name: translocase of inner mitochondrial membrane 8 homolog B (yeast)
  ENSP ID: ENSP00000438455
MRKHSCRKVASLRRTMAELGEADEAELQRLVAAEQQKAQFTAQVHHFMELCWDKCVEKPGNRLDSRTENCLSSCVDRFIDTTLAITSRFAQIVQKGGQ

SEQ ID NO: 90504 - protein, 89 aa, Homo sapiens
  Payload ID: 18091
  Gene Name: translocase of inner mitochondrial membrane 9 homolog (yeast)
  Uniprot ID: Q9Y5J7
  ENSP ID: ENSP00000378588
MAAQIPESDQIKQFKEFLGTYNKLTETCFLDCVKDFTTREVKPEETTCSEHCLQKYLKMTQRISMRFQEYHIQQNEALAAKAGLLGQPR

SEQ ID NO: 90505 - protein, 44 aa, Homo sapiens
  Payload ID: 18091
  Gene Name: translocase of inner mitochondrial membrane 9 homolog (yeast)
  ENSP ID: ENSP00000450624
MAAQIPESDQIKQFKEFLGTYNKLTETCFLDCVKDFTTREVKPE

SEQ ID NO: 90506 - protein, 89 aa, Homo sapiens; identical to SEQ ID NO: 90504
  Payload ID: 18091
  Gene Name: translocase of inner mitochondrial membrane 9 homolog (yeast)
  Uniprot ID: Q9Y5J7
  ENSP ID: ENSP00000450638

SEQ ID NO: 90507 - protein, 89 aa, Homo sapiens; identical to SEQ ID NO: 90504
  Payload ID: 18091
  Gene Name: translocase of inner mitochondrial membrane 9 homolog (yeast)
  Uniprot ID: Q9Y5J7
  ENSP ID: ENSP00000451006

SEQ ID NO: 90508 - protein, 89 aa, Homo sapiens; identical to SEQ ID NO: 90504
  Payload ID: 18091
  Gene Name: translocase of inner mitochondrial membrane 9 homolog (yeast)
  Uniprot ID: Q9Y5J7
  ENSP ID: ENSP00000451198

SEQ ID NO: 90509 - protein, 66 aa, Homo sapiens
  Payload ID: 18091
  Gene Name: translocase of inner mitochondrial membrane 9 homolog (yeast)
  ENSP ID: ENSP00000452091
MAAQIPESDQIKQFKEFLGTYNKLTETCFLDCVKDFTTREVKPEEEYHIQQNEALAAKAGLLGQPR

SEQ ID NO: 90510 - protein, 175 aa, Homo sapiens
  Payload ID: 18092
  Gene Name: translocase of inner mitochondrial membrane domain containing 1
  ENSP ID: ENSP00000264244
MEVPPPAPRSFLCRALCLFPRVFAAEAVTADSEVLEERQKRLPYVPEPYYPESGWDRLRELFGKDEQQRISKDLANICKTAATAGIIGWVYGGIPAFIHAKQQYIEQSQAEIYHNRFDAVQSAHRAATRGFIRYGWRWGWRTAVFVTIFNTVNTSLNVYRNKDALSHFVIAGALL

SEQ ID NO: 90511 - protein, 71 aa, Homo sapiens
  Payload ID: 18092
  Gene Name: translocase of inner mitochondrial membrane domain containing 1
  ENSP ID: ENSP00000417083
MEVPPPAPRSFLCRALCLFPRVFAAEAVTADSEVLEERQKRLPYVPEPYYPESGWDRLRELFGKDCHGKSF

SEQ ID NO: 90512 - protein, 65 aa, Homo sapiens
  Payload ID: 18092
  Gene Name: translocase of inner mitochondrial membrane domain containing 1
  ENSP ID: ENSP00000417205
MEVPPPAPRSFLCRALCLFPRVFAAEAVTADSEVLEERQKRLPYVPEPYYPESGWDRLRELFGKE

SEQ ID NO: 90513 - protein, 285 aa, Homo sapiens
  Payload ID: 18092
  Gene Name: translocase of inner mitochondrial membrane domain containing 1
  Uniprot ID: Q9NPL8
  ENSP ID: ENSP00000418803
MEVPPPAPRSFLCRALCLFPRVFAAEAVTADSEVLEERQKRLPYVPEPYYPESGWDRLRELFGKDEQQRISKDLANICKTAATAGIIGWVYGGIPAFIHAKQQYIEQSQAEIYHNRFDAVQSAHRAATRGFIRYGWRWGWRTAVFVTIFNTVNTSLNVYRNKDALSHFVIAGAVTGSLFRINVGLRGLVAGGIIGALLGTPVGGLLMAFQKYSGETVQERKQKDRKALHELKLEEWKGRLQVTEHLPEKIESSLQEDEPENDAKKIEALLNLPRNPSVIDKQDKD

SEQ ID NO: 90514 - protein, 90 aa, Homo sapiens
  Payload ID: 18092
  Gene Name: translocase of inner mitochondrial membrane domain containing 1
  ENSP ID: ENSP00000418846
MEVPPPAPRSFLCRALCLFPRVFAAEAVTADSEVLEERQKRLPYVPEPYYPESGWDRLRELFGKDNLHIVLPHEASFVMAGAGVGELQCL

SEQ ID NO: 90515 - protein, 151 aa, Homo sapiens
  Payload ID: 18092
  Gene Name: translocase of inner mitochondrial membrane domain containing 1
  ENSP ID: ENSP00000419510
MEVPPPAPRSFLCRALCLFPRVFAAEAVTADSEVLEERQKRLPYVPEPYYPESGWDRLRELFGKDTPVGGLLMAFQKYSGETVQERKQKDRKALHELKLEEWKGRLQVTEHLPEKIESSLQEDEPENDAKKIEALLNLPRNPSVIDKQDKD

SEQ ID NO: 90516 - protein, 150 aa, Homo sapiens
  Payload ID: 18092
  Gene Name: translocase of inner mitochondrial membrane domain containing 1
  ENSP ID: ENSP00000420122
MEVPPPAPRSFLCRALCLFPRVFAAEAVTADSEVLEERQKRLPYVPEPYYPESGWDRLRELFGKDTVNTSLNVYRNKDALSHFVIAGAVTGSLFRINVGLRGLVAGGIIGALLGTPVGGLLMAFQKYSGETVQERKQKDRKALHELKLEE

SEQ ID NO: 90517 - protein, 38 aa, Homo sapiens
  Payload ID: 18092
  Gene Name: translocase of inner mitochondrial membrane domain containing 1
  ENSP ID: ENSP00000420812
  MOD_RES (1)..(1): Any amino acid
XTADSEVLEERQKRLPYVPEPYYPESGWDRLRELFGKE

SEQ ID NO: 90518 - protein, 145 aa, Homo sapiens
  Payload ID: 18093
  Gene Name: translocase of outer mitochondrial membrane 20 homolog (yeast)
  Uniprot ID: Q15388
  ENSP ID: ENSP00000355566
MVGRNSAIAAGVCGALFIGYCIYFDRKRRSDPNFKNRLRERRKKQKLAKERAGLSKLPDLKDAEAVQKFFLEEIQLGEELLAQGEYEKGVDHLTNAIAVCGQPQQLLQVLQQTLPPPVFQMLLTKLPTISQRIVSAQSLAEDDVE

SEQ ID NO: 90519 - protein, 152 aa, Homo sapiens
  Payload ID: 18094
  Gene Name: translocase of outer mitochondrial membrane 20 homolog (yeast)-like
  Uniprot ID: Q6UXN7
  ENSP ID: ENSP00000354204
MPSVRSLLRLLAAAAACGAFAFLGYCIYLNRKRRGDPAFKRRLRDKRRAEPQKAEEQGTQLWDPTKNKKLQELFLQEVRMGELWLSRGEHRMGIQHLGNALLVCEQPRELLKVFKHTLPPKVFEMLLHKIPLICQQFEADMNEQDCLEDDPD

SEQ ID NO: 90520 - protein, 74 aa, Homo sapiens
  Payload ID: 18094
  Gene Name: translocase of outer mitochondrial membrane 20 homolog (yeast)-like
  ENSP ID: ENSP00000451683
MPSVRSLLRLLAAAAACGAFAFLGYCIYLNRKRRGDPAFKRRLRDKRRAEPQKAEEQGTQESTEWGFNTSAMPF

SEQ ID NO: 90521 - protein, 142 aa, Homo sapiens
  Payload ID: 18095
  Gene Name: translocase of outer mitochondrial membrane 22 homolog (yeast)
  Uniprot ID: Q9NS69
  ENSP ID: ENSP00000216034
MAAAVAAAGAGEPQSPDELLPKGDAEKPEEELEEDDDEELDETLSERLWGLTEMFPERVRSAAGATFDLSLFVAQKMYRFSRAALWIGTTSFMILVLPVVFETEKLQMEQQQQLQQRQILLGPNTGLSGGMPGALPSLPGKI

SEQ ID NO: 90522 - protein, 309 aa, Homo sapiens
  Payload ID: 18096
  Gene Name: translocase of outer mitochondrial membrane 34
  Uniprot ID: Q15785
  ENSP ID: ENSP00000361900
MAPKFPDSVEELRAAGNESFRNGQYAEASALYGRALRVLQAQGSSDPEEESVLYSNRAACHLKDGNCRDCIKDCTSALALVPFSIKPLLRRASAYEALEKYPMAYVDYKTVLQIDDNVTSAVEGINRMTRALMDSLGPEWRLKLPSIPLVPVSAQKRWNSLPSENHKEMAKSKSKETTATKNRVPSAGDVEKARVLKEEGNELVKKGNHKKAIEKYSESLLCSNLESATYSNRALCYLVLKQYTEAVKDCTEALKLDGKNVKAFYRRAQAHKALKDYKSSFADISNLLQIEPRNGPAQKLRQEVKQNLH

SEQ ID NO: 90523 - protein, 361 aa, Homo sapiens
  Payload ID: 18097
  Gene Name: translocase of outer mitochondrial membrane 40 homolog (yeast)
  Uniprot ID: O96008
  ENSP ID: ENSP00000252487
MGNVLAASSPPAGPPPPPAPALVGLPPPPPSPPGFTLPPLGGSLGAGTSTSRSSERTPGAATASASGAAEDGACGCLPNPGTFEECHRKCKELFPIQMEGVKLTVNKGLSNHFQVNHTVALSTIGESNYHFGVTYVGTKQLSPTEAFPVLVGDMDNSGSLNAQVIHQLGPGLRSKMAIQTQQSKFVNWQVDGEYRGSDFTAAVTLGNPDVLVGSGILVAHYLQSITPCLALGGELVYHRRPGEEGTVMSLAGKYTLNNWLATVTLGQAGMHATYYHKASDQLQVGVEFEASTRMQDTSVSFGYQLDLPKANLLFKGSVDSNWIVGATLEKKLPPLPLTLALGAFLNHRKNKFQCGFGLTIG

SEQ ID NO: 90524 - protein, 361 aa, Homo sapiens; identical to SEQ ID NO: 90523
  Payload ID: 18097
  Gene Name: translocase of outer mitochondrial membrane 40 homolog (yeast)
  Uniprot ID: O96008
  ENSP ID: ENSP00000385184

SEQ ID NO: 90525 - protein, 361 aa, Homo sapiens; identical to SEQ ID NO: 90523
  Payload ID: 18097
  Gene Name: translocase of outer mitochondrial membrane 40 homolog (yeast)
  Uniprot ID: O96008
  ENSP ID: ENSP00000410339

SEQ ID NO: 90526 - protein, 214 aa, Homo sapiens
  Payload ID: 18097
  Gene Name: translocase of outer mitochondrial membrane 40 homolog (yeast)
  ENSP ID: ENSP00000465032
MGNVLAASSPPAGPPPPPAPALVGLPPPPPSPPGFTLPPLGGSLGAGTSTSRSSERTPGAATASASGAAEDGACGCLPNPGTFEECHRKCKELFPIQMEGVKLTVNKGLSNHFQVNHTVALSTIGESNYHFGVTYVGTKQLSPTEAFPVLVGDMDNSGSLNAQVIHQLGPGLRSKMAIQTQQSKFVNWQVDGEYRGSDFTAAVTLGNPDVLVGS

SEQ ID NO: 90527 - protein, 168 aa, Homo sapiens
  Payload ID: 18097
  Gene Name: translocase of outer mitochondrial membrane 40 homolog (yeast)
  ENSP ID: ENSP00000465608
  MOD_RES (1)..(1): Any amino acid
XQVIHQLGPGLRSKMAIQTQQSKFVNWQVDGEYRGSDFTAAVTLGNPDVLVGSGILVAHYLQSITPCLALGGELVYHRRPGEEGTVMSLAGKYTLNNWLATVTLGQAGMHATYYHKASDQLQVGVEFEASTRMQDTSVSFGYQLDLPKANLLFKGKGLGSPTRETGRR

SEQ ID NO: 90528 - protein, 36 aa, Homo sapiens
  Payload ID: 18097
  Gene Name: translocase of outer mitochondrial membrane 40 homolog (yeast)
  ENSP ID: ENSP00000465611
MGNVLAASSPPAGPPPPPAPALVGLPPPPPSPPGFT

SEQ ID NO: 90529 - protein, 329 aa, Homo sapiens
  Payload ID: 18097
  Gene Name: translocase of outer mitochondrial membrane 40 homolog (yeast)
  Uniprot ID: O96008
  ENSP ID: ENSP00000466084
MGNVLAASSPPAGPPPPPAPALVGLPPPPPSPPGFTLPPLGGSLGAGTSTSRSSERTPGAATASASGAAEDGACGCLPNPGTFEECHRKCKELFPIQMEGVKLTVNKGLSNHFQVNHTVALSTIGESNYHFGVTYVGTKQLSPTEAFPVLVGDMDNSGSLNAQVIHQLGPGLRSKMAIQTQQSKFVNWQVDGEYRGSDFTAAVTLGNPDVLVGSGILVAHYLQSITPCLALGGELVYHRRPGEEGTVMSLAGKYTLNNWLATVTLGQAGMHATYYHKASDQLQVGVEFEASTRMQDTSVSFGYQLDLPKANLLFKGKGLGSPTRETGRR

SEQ ID NO: 90530 - protein, 308 aa, Homo sapiens
  Payload ID: 18098
  Gene Name: translocase of outer mitochondrial membrane 40 homolog (yeast)-like
  Uniprot ID: Q969M1
  ENSP ID: ENSP00000356966
MGNTLGLAPMGTLPRRSPRREEPLPNPGSFDELHRLCKDVFPAQMEGVKLVVNKVLSSHFQVAHTIHMSALGLPGYHLHAAYAGDWQLSPTEVFPTVVGDMDSSGSLNAQVLLLLAERLRAKAVFQTQQAKFLTWQFDGEYRGDDYTATLTLGNPDLIGESVIMVAHFLQSLTHRLVLGGELVYHRRPGEEGAILTLAGKYSAVHWVATLNVGSGGAHASYYHRANEQVQVGVEFEANTRLQDTTFSFGYHLTLPQANMVFRGLVDSNWCVGAVLEKKMPPLPVTLALGAFLNHWRNRFHCGFSITVG

SEQ ID NO: 90531 - protein, 308 aa, Homo sapiens; identical to SEQ ID NO: 90530
  Payload ID: 18098
  Gene Name: translocase of outer mitochondrial membrane 40 homolog (yeast)-like
  Uniprot ID: Q969M1
  ENSP ID: ENSP00000356967

SEQ ID NO: 90532 - protein, 274 aa, Homo sapiens
  Payload ID: 18098
  Gene Name: translocase of outer mitochondrial membrane 40 homolog (yeast)-like
  Uniprot ID: Q969M1
  ENSP ID: ENSP00000443233
MGNTLGLAPMGTLPRRSPRREEPLPNPGSFDELHRLCKDVFPAQMEGVKLVVNKVLSSHFQVAHTIHMSALGLPGYHLHAAYAGDWQLSPTETQQAKFLTWQFDGEYRGDDYTATLTLGNPDLIGESVIMVAHFLQSLTHRLVLGGELVYHRRPGEEGAILTLAGKYSAVHWVATLNVGSGGAHASYYHRANEQVQVGVEFEANTRLQDTTFSFGYHLTLPQANMVFRGLVDSNWCVGAVLEKKMPPLPVTLALGAFLNHWRNRFHCGFSITVG

SEQ ID NO: 90533 - protein, 51 aa, Homo sapiens
  Payload ID: 18099
  Gene Name: translocase of outer mitochondrial membrane 5 homolog (yeast)
  Uniprot ID: Q8N4H5
  ENSP ID: ENSP00000313584
MFRIEGLAPKLDPEEMKRKMREDVISSIRNFLIYVALLRVTPFILKKLDSI

SEQ ID NO: 90534 - protein, 85 aa, Homo sapiens
  Payload ID: 18099
  Gene Name: translocase of outer mitochondrial membrane 5 homolog (yeast)
  Uniprot ID: Q8N4H5
  ENSP ID: ENSP00000367004
MFRIEGLAPKLDPEEMKRKMREDVISSIRNFLIYVALLRVSECLPGCDCETSGELTDGHPLTLRGHRGLRTELNAPFILKKLDSI

SEQ ID NO: 90535 - protein, 98 aa, Homo sapiens
  Payload ID: 18099
  Gene Name: translocase of outer mitochondrial membrane 5 homolog (yeast)
  ENSP ID: ENSP00000384411
MFRIEGLAPKLDPEEMKRKMREDVISSIRNFLIYVALLRVSECLPGCDCETSGELTDGHPLTLRGHRGLRTELNGSGEQGGSIYLKEIGQHMKTGHHI

SEQ ID NO: 90536 - protein, 92 aa, Homo sapiens
  Payload ID: 18099
  Gene Name: translocase of outer mitochondrial membrane 5 homolog (yeast)
  Uniprot ID: Q8N4H5
  ENSP ID: ENSP00000438204
MFRIEGLAPKLDPEEMKRKMREDVISSIRNFLIYVALLRVSECLPGCDCETSGELTDGHPLTLRGHRGLRTELNGSGEQGGCALKATGICAV

SEQ ID NO: 90537 - protein, 71 aa, Homo sapiens
  Payload ID: 18099
  Gene Name: translocase of outer mitochondrial membrane 5 homolog (yeast)
  ENSP ID: ENSP00000438585
EDVISSIRNFLIYVALLRVSECLPGCDCETSGELTDGHPLTLRGHRGLRTELNGSGEQGGCALKATGICAV

SEQ ID NO: 90538 - protein, 74 aa, Homo sapiens
  Payload ID: 18100
  Gene Name: translocase of outer mitochondrial membrane 6 homolog (yeast)
  Uniprot ID: Q96B49
  ENSP ID: ENSP00000381856
MASSTVPVSAAGSANETPEIPDNVGDWLRGVYRFATDRNDFRRNLILNLGLFAAGVWLARNLSDIDLMAPQPGV

SEQ ID NO: 90539 - protein, 74 aa, Homo sapiens; identical to SEQ ID NO: 90538
  Payload ID: 18100
  Gene Name: translocase of outer mitochondrial membrane 6 homolog (yeast)
  Uniprot ID: Q96B49
  ENSP ID: ENSP00000381859

SEQ ID NO: 90540 - protein, 55 aa, Homo sapiens
  Payload ID: 18101
  Gene Name: translocase of outer mitochondrial membrane 7 homolog (yeast)
  Uniprot ID: Q9P0U1
  ENSP ID: ENSP00000351214
MVKLSKEAKQRLQQLFKGSQFAIRWGFIPLVIYLGFKRGADPGMPEPTVLSLLWG

SEQ ID NO: 90541 - protein, 125 aa, Homo sapiens
  Payload ID: 18101
  Gene Name: translocase of outer mitochondrial membrane 7 homolog (yeast)
  ENSP ID: ENSP00000361970
MVKLSKEAKQRLQQLFKGSQFAIRWGFIPLVIYLGFKRGADPGMPEPTVLRVWWLTPVISALWKAKVGRSWEDCLKLGVQDQPGQRSETHLYQKKKTYFGDKGLFGLLDLEAISGQHGRCVLWLG

SEQ ID NO: 90542 - protein, 51 aa, Homo sapiens
  Payload ID: 18101
  Gene Name: translocase of outer mitochondrial membrane 7 homolog (yeast)
  ENSP ID: ENSP00000385203
MIIIIVVGCLCFLTCTMKGLDDFYYCPHFTGFKRGADPGMPEPTVLSLLWG

SEQ ID NO: 90543 - protein, 55 aa, Homo sapiens [sequence omitted]

SEQ ID NO: 90544 - protein, 608 aa, Homo sapiens
  Payload ID: 18102
  Gene Name: translocase of outer mitochondrial membrane 70 homolog A (S. cerevisiae)
  Uniprot ID: O94826
  ENSP ID: ENSP00000284320
MAASKPVEAAVVAAAVPSSGSGVGGGGTAGPGTGGLPRWQLALAVGAPLLLGAGAIYLWSRQQRRREARGRGDASGLKRNSERKTPEGRASPAPGSGHPEGPGAHLDMNSLDRAQAAKNKGNKYFKAGKYEQAIQCYTEAISLCPTEKNVDLSTFYQNRAAAFEQLQKWKEVAQDCTKAVELNPKYVKALFRRAKAHEKLDNKKECLEDVTAVCILEGFQNQQSMLLADKVLKLLGKEKAKEKYKNREPLMPSPQFIKSYFSSFTDDIISQPMLKGEKSDEDKDKEGEALEVKENSGYLKAKQYMEEENYDKIISECSKEIDAEGKYMAEALLLRATFYLLIGNANAAKPDLDKVISLKEANVKLRANALIKRGSMYMQQQQPLLSTQDFNMAADIDPQNADVYHHRGQLKILLDQVEEAVADFDECIRLRPESALAQAQKCFALYRQAYTGNNSSQIQAAMKGFEEVIKKFPRCAEGYALYAQALTDQQQFGKADEMYDKCIDLEPDNATTYVHKGLLQLQWKQDLDRGLELISKAIEIDNKCDFAYETMGTIEVQRGNMEKAIDMFNKAINLAKSEMEMAHLYSLCDAAHAQTEVAKKYGLKPPTL

SEQ ID NO: 90545 - protein, 2363 aa, Homo sapiens
  Payload ID: 18103
  Gene Name: translocated promoter region, nuclear basket protein
  Uniprot ID: P12270
  ENSP ID: ENSP00000356448
MAAVLQQVLERTELNKLPKSVQNKLEKFLADQQSEIDGLKGRHEKFKVESEQQYFEIEKRLSHSQERLVNETRECQSLRLELEKLNNQLKALTEKNKELEIAQDRNIAIQSQFTRTKEELEAEKRDLIRTNERLSQELEYLTEDVKRLNEKLKESNTTKGELQLKLDELQASDVSVKYREKRLEQEKELLHSQNTWLNTELKTKTDELLALGREKGNEILELKCNLENKKEEVSRLEEQMNGLKTSNEHLQKHVEDLLTKLKEAKEQQASMEEKFHNELNAHIKLSNLYKSAADDSEAKSNELTRAVEELHKLLKEAGEANKAIQDHLLEVEQSKDQMEKEMLEKIGRLEKELENANDLLSATKRKGAILSEEELAAMSPTAAAVAKIVKPGMKLTELYNAYVETQDQLLLEKLENKRINKYLDEIVKEVEAKAPILKRQREEYERAQKAVASLSVKLEQAMKEIQRLQEDTDKANKQSSVLERDNRRMEIQVKDLSQQIRVLLMELEEARGNHVIRDEEVSSADISSSSEVISQHLVSYRNIEELQQQNQRLLVALRELGETREREEQETTSSKITELQLKLESALTELEQLRKSRQHQMQLVDSIVRQRDMYRILLSQTTGVAIPLHASSLDDVSLASTPKRPSTSQTVSTPAPVPVIESTEAIEAKAALKQLQEIFENYKKEKAENEKIQNEQLEKLQEQVTDLRSQNTKISTQLDFASKRYEMLQDNVEGYRREITSLHERNQKLTATTQKQEQIINTMTQDLRGANEKLAVAEVRAENLKKEKEMLKLSEVRLSQQRESLLAEQRGQNLLLTNLQTIQGILERSETETKQRLSSQIEKLEHEISHLKKKLENEVEQRHTLTRNLDVQLLDTKRQLDTETNLHLNTKELLKNAQKEIATLKQHLSNMEVQVASQSSQRTGKGQPSNKEDVDDLVSQLRQTEEQVNDLKERLKTSTSNVEQYQAMVTSLEESLNKEKQVTEEVRKNIEVRLKESAEFQTQLEKKLMEVEKEKQELQDDKRRAIESMEQQLSELKKTLSSVQNEVQEALQRASTALSNEQQARRDCQEQAKIAVEAQNKYERELMLHAADVEALQAAKEQVSKMASVRQHLEETTQKAESQLLECKASWEERERMLKDEVSKCVCRCEDLEKQNRLLHDQIEKLSDKVVASVKEGVQGPLNVSLSEEGKSQEQILEILRFIRREKEIAETRFEVAQVESLRYRQRVELLERELQELQDSLNAEREKVQVTAKTMAQHEELMKKTETMNVVMETNKMLREEKERLEQDLQQMQAKVRKLELDILPLQEANAELSEKSGMLQAEKKLLEEDVKRWKARNQHLVSQQKDPDTEEYRKLLSEKEVHTKRIQQLTEEIGRLKAEIARSNASLTNNQNLIQSLKEDLNKVRTEKETIQKDLDAKIIDIQEKVKTITQVKKIGRRYKTQYEELKAQQDKVMETSAQSSGDHQEQHVSVQEMQELKETLNQAETKSKSLESQVENLQKTLSEKETEARNLQEQTVQLQSELSRLRQDLQDRTTQEEQLRQQITEKEEKTRKAIVAAKSKIAHLAGVKDQLTKENEELKQRNGALDQQKDELDVRITALKSQYEGRISRLERELREHQERHLEQRDEPQEPSNKVPEQQRQITLKTTPASGERGIASTSDPPTANIKPTPVVSTPSKVTAAAMAGNKSTPRASIRPMVTPATVTNPTTTPTATVMPTTQVESQEAMQSEGPVEHVPVFGSTSGSVRSTSPNVQPSISQPILTVQQQTQATAFVQPTQQSHPQIEPANQELSSNIVEVVQSSPVERPSTSTAVFGTVSATPSSSLPKRTREEEEDSTIEASDQVSDDTVEMPLPKKLKSVTPVGTEEEVMAEESTDGEVETQVYNQDSQDSIGEGVTQGDYTPMEDSEETSQSLQIDLGPLQSDQQTTTSSQDGQGKGDDVIVIDSDDEEEDDDENDGEHEDYEEDEEDDDDDEDDTGMGDEGEDSNEGTGSADGNDGYEADDAEGGDGTDPGTETEESMGGGEGNHRAADSQNSGEGNTGAAESSFSQEVSREQQPSSASERQAPRAPQSPRRPPHPLPPRLTIHAPPQELGPPVQRIQMTRRQSVGRGLQLTPGIGGMQQHFFDDEDRTVPSTPTLVVPHRTDGFAEAIHSPQVAGVPRFRFGPPEDMPQTSSSHSDLGQLASQGGLGMYETPLFLAHEEESGGRSVPTTPLQVAAPVTVFTESTTSDASEHASQSVPMVTTSTGTLSTTNETATGDDGDEVFVEAESEGISSEAGLEIDSQQEEEPVQASDESDLPSTSQDPPSSSSVDTSSSQPKPFRRVRLQTTLRQGVRGRQFNRQRGVSHAMGGRGGINRGNIN

SEQ ID NO: 90546 - protein, 150 aa, Homo sapiens
  Payload ID: 18103
  Gene Name: translocated promoter region, nuclear basket protein
  ENSP ID: ENSP00000408103
MPSSGSVSRSRQRGRSMASRGFDGSRRGSLRRAGAREPPSEVIEAAAQASGSCWSSPFFSASTPSAAATGVPGPTDMAAVLQQVLERTELNKLPKSVQNKLEKFLADQQSEIDGLKGRHEKFKVESEQQYFEIEKRLSHSQERLVNETRE

SEQ ID NO: 90547 - protein, 726 aa, Homo sapiens
  Payload ID: 18103
  Gene Name: translocated promoter region, nuclear basket protein
  Uniprot ID: P12270
  ENSP ID: ENSP00000483425
MAAVLQQVLERTELNKLPKSVQNKLEKFLADQQSEIDGLKGRHEKFKVESEQQYFEIEKRLSHSQERLVNETRECQSLRLELEKLNNQLKALTEKNKELEIAQDRNIAIQSQFTRTKEELEAEKRDLIRTNERLSQELEYLTEDVKRLNEKLKESNTTKGELQLKLDELQASDVSVKYREKRLEQEKELLHSQNTWLNTELKTKTDELLALGREKGNEILELKCNLENKKEEVSRLEEQMNGLKTSNEHLQKHVEDLLTKLKEAKEQQASMEEKFHNELNAHIKLSNLYKSAADDSEAKSNELTRAVEELHKLLKEAGEANKAIQDHLLEVEQSKDQMEKEMLEKIGRLEKELENANDLLSATKRKGAILSEEELAAMSPTAAAVAKIVKPGMKLTELYNAYVETQDQLLLEKLENKRINKYLDEIVKEVEAKAPILKRQREEYERAQKAVASLSVKLEQAMKEIQRLQEDTDKANKQSSVLERDNRRMEIQVKDLSQQIRVLLMELEEARGNHVIRDEEVSSADISSSSEVISQHLVSYRNIEELQQQNQRLLVALRELGETREREEQETTSSKITELQLKLESALTELEQLRKSRQHQMQLVDSIVRQRDMYRILLSQTTGVAIPLHASSLDDVSLASTPKRPSTSQTVSTPAPVPVIESTEAIEAKAALKQLQEIFENYKKEKAENEKIQNEQLEKLQEQVTDLRSQNTKISTQLDFASKRYL

SEQ ID NO: 90548 - protein, 374 aa, Homo sapiens
  Payload ID: 18104
  Gene Name: translocation associated membrane protein 1
  Uniprot ID: Q15629
  ENSP ID: ENSP00000262213
MAIRKKSTKSPPVLSHEFVLQNHADIVSCVAMVFLLGLMFEITAKASIIFVTLQYNVTLPATEEQATESVSLYYYGIKDLATVFFYMLVAIIIHAVIQEYMLDKINRRMHFSKTKHSKFNESGQLSAFYLFACVWGTFILISENYISDPTILWRAYPHNLMTFQMKFFYISQLAYWLHAFPELYFQKTKKEDIPRQLVYIGLYLFHIAGAYLLNLNHLGLVLLVLHYFVEFLFHISRLFYFSNEKYQKGFSLWAVLFVLGRLLTLILSVLTVGFGLARAENQKLDFSTGNFNVLAVRIAVLASICVTQAFMMWKFINFQLRRWREHSAFQAPAVKKKPTVTKGRSSKKGTENGVNGTLTSNVADSPRNKKEKSS

SEQ ID NO: 90549 - protein, 112 aa, Homo sapiens
  Payload ID: 18104
  Gene Name: translocation associated membrane protein 1
  ENSP ID: ENSP00000428025
MVFLLGLMFEITAKASIIFVTLQYNVTLPATEEQATESVSLYYYGIKDLATVFFYMLVAIIIHAVIQEYMLDKINRRMHFSKTKHSKFNESGQLSAFYLFACVWGTFILISV

SEQ ID NO: 90550 - protein, 288 aa, Homo sapiens
  Payload ID: 18104
  Gene Name: translocation associated membrane protein 1
  ENSP ID: ENSP00000428052
MLVAIIIHAVIQEYMLDKINRRMHFSKTKHSKFNESGQLSAFYLFACVWGTFILISENYISDPTILWRAYPHNLMTFQMKFFYISQLAYWLHAFPELYFQKTKKEDIPRQLVYIGLYLFHIAGAYLLNLNHLGLVLLVLHYFVEFLFHISRLFYFSNEKYQKGFSLWAVLFVLGRLLTLILSVLTVGFGLARAENQKLDFSTGNFNVLAVRIAVLASICVTQAFMMWKFINFQLRRWREHSAFQAPAVKKKPTVTKGRSSKKGTENGVNGTLTSNVADSPRNKKEKSS

SEQ ID NO: 90551 - protein, 369 aa, Homo sapiens
  Payload ID: 18105
  Gene Name: translocation associated membrane protein 1-like 1
  Uniprot ID: Q8N609
  ENSP ID: ENSP00000309402
MGLRKKSTKNPPVLSQEFILQNHADIVSCVGMFFLLGLVFEGTAEASIVFLTLQHSVAVPAAEEQATGSKSLYYYGVKDLATVFFYMLVAIIIHATIQEYVLDKINKRMQFTKAKQNKFNESGQFSVFYFFSCIWGTFILISENCLSDPTLIWKARPHSMMTFQMKFFYISQLAYWFHAFPELYFQKTKKQDIPRQLVYIGLHLFHITGAYLLYLNHLGLLLLVLHYFVELLSHMCGLFYFSDEKYQKGISLWAIVFILGRLVTLIVSVLTVGFHLAGSQNRNPDALTGNVNVLAAKIAVLSSSCTIQAYVTWNLITLWLQRWVEDSNIQASCMKKKRSRSSKKRTENGVGVETSNRVDCPPKRKEKSS

SEQ ID NO: 90552 - protein, 370 aa, Homo sapiens
  Payload ID: 18106
  Gene Name: translocation associated membrane protein 2
  Uniprot ID: Q15035
  ENSP ID: ENSP00000182527
MAFRRRTKSYPLFSQEFVIHNHADIGFCLVLCVLIGLMFEVTAKTAFLFILPQYNISVPTADSETVHYHYGPKDLVTILFYIFITIILHAVVQEYILDKISKRLHLSKVKHSKFNESGQLVVFHFTSVIWCFYVVVTEGYLTNPRSLWEDYPHVHLPFQVKFFYLCQLAYWLHALPELYFQKVRKEEIPRQLQYICLYLVHIAGAYLLNLSRLGLILLLLQYSTEFLFHTARLFYFADENNEKLFSAWAAVFGVTRLFILTLAVLAIGFGLARMENQAFDPEKGNFNTLFCRLCVLLLVCAAQAWLMWRFIHSQLRHWREYWNEQSAKRRVPATPRLPARLIKRESGYHENGVVKAENGTSPRTKKLKSP

SEQ ID NO: 90553 - protein, 169 aa, Homo sapiens
  Payload ID: 18107
  Gene Name: translocator protein (18kDa)
  Uniprot ID: P30536
  ENSP ID: ENSP00000328973
MAPPWVPAMGFTLAPSLGCFVGSRFVHGEGLRWYAGLQKPSWHPPHWVLGPVWGTLYSAMGYGSYLVWKELGGFTEKAVVPLGLYTGQLALNWAWPPIFFGARQMGWALVDLLLVSGAAAATTVAWYQVSPLAARLLYPYLAWLAFTTTLNYCVWRDNHGWRGGRRLPE

SEQ ID NO: 90554 - protein, 169 aa, Homo sapiens; identical to SEQ ID NO: 90553
  Payload ID: 18107
  Gene Name: translocator protein (18kDa)
  Uniprot ID: P30536
  ENSP ID: ENSP00000338004

SEQ ID NO: 90555 - protein, 169 aa, Homo sapiens; identical to SEQ ID NO: 90553
  Payload ID: 18107
  Gene Name: translocator protein (18kDa)
  Uniprot ID: P30536
  ENSP ID: ENSP00000379563

SEQ ID NO: 90556 - protein, 107 aa, Homo sapiens
  Payload ID: 18107
  Gene Name: translocator protein (18kDa)
  ENSP ID: ENSP00000405685
MAPPWVPAMGFTLAPSLGCFVGSRFVHGEGLRWYAGLQKPSWHPPHWVLGPVWGTLYSAMGYGSYLVWKELGGFTEKAVVPLGLYTGQLALNWAWPPIFFGARQMGW

SEQ ID NO: 90557 - protein, 65 aa, Homo sapiens
  Payload ID: 18107
  Gene Name: translocator protein (18kDa)
  ENSP ID: ENSP00000463495
MGWALVDLLLVSGAAAATTVAWYQVSPLAARLLYPYLAWLAFTTTLNYCVWRDNHGWRGGRRLPE

SEQ ID NO: 90558 - protein, 70 aa, Homo sapiens
  Payload ID: 18108
  Gene Name: translocator protein 2
  Uniprot ID: Q5TGU0
  ENSP ID: ENSP00000362252
MRLQGAIFVLLPHLGPILVWLFTRDHMSGWCEGPRMLSWCPFYKVLLLVQTAIYSVVGPCCTCCCCMGWW

SEQ ID NO: 90559 - protein, 170 aa, Homo sapiens
  Payload ID: 18108
  Gene Name: translocator protein 2
  Uniprot ID: Q5TGU0
  ENSP ID: ENSP00000362255
MRLQGAIFVLLPHLGPILVWLFTRDHMSGWCEGPRMLSWCPFYKVLLLVQTAIYSVVGYASYLVWKDLGGGLGWPLALPLGLYAVQLTISWTVLVLFFTVHNPGLALLHLLLLYGLVVSTALIWHPINKLAALLLLPYLAWLTVTSALTYHLWRDSLCPVHQPQPTEKSD

SEQ ID NO: 90560 - protein, 170 aa, Homo sapiens; identical to SEQ ID NO: 90559
  Payload ID: 18108
  Gene Name: translocator protein 2
  Uniprot ID: Q5TGU0
  ENSP ID: ENSP00000419985

SEQ ID NO: 90561 - protein, 348 aa, Homo sapiens
  Payload ID: 18109
  Gene Name: transmembrane (C-terminal) protease, serine 12
  Uniprot ID: Q86WS5
  ENSP ID: ENSP00000381476
MRLGLLSVALLFVGSSHLYSDHYSPSGRHRLGPSPEPAASSQQAEAVRKRLRRRREGGAHAEDCGTAPLKDVLQGSRIIGGTEAQAGAWPWVVSLQIKYGRVLVHVCGGTLVRERWVLTAAHCTKDASDPLMWTAVIGTNNIHGRYPHTKKIKIKAIIIHPNFILESYVNDIALFHLKKAVRYNDYIQPICLPFDVFQILDGNTKCFISGWGRTKEEGNATNILQDAEVHYISREMCNSERSYGGIIPNTSFCAGDEDGAFDTCRGDSGGPLMCYLPEYKRFFVMGITSYGHGCGRRGFPGVYIGPSFYQKWLTEHFFHASTQGILTINILRGQILIALCFVILLATT

SEQ ID NO: 90562 - protein, 320 aa, Homo sapiens
  Payload ID: 18109
  Gene Name: transmembrane (C-terminal) protease, serine 12
  ENSP ID: ENSP00000447259
MRLGLLSVALLFVGSSHLYSDHYSPSGRHRLGPSPEPAASSQQAEAVRKRLRRRREGGAHAEDCGTAPLKDVLQGSRIIGGTEAQAGAWPWVVSLQIKYGRVLVHVCGGTLVRERWVLTAAHCTKDASDPLMWTAVIGTNNIHGRYPHTKKIKIKAIIIHPNFILESYVNDIALFHLKKAVRYNDYIQPICLPFDVFQILDGNTKCFISGWGRTKEEGNATNILQDAEVHYISREMCNSERSYGGIIPNTSFCAGDEDGAFDTCRVRPSNFPLKYFLKPEGNLSNKAFDNFLVVLIIRPKNNKSFFLLFNYFNNPNLLGS

SEQ ID NO: 90563 - protein, 202 aa, Homo sapiens
  Payload ID: 18110
  Gene Name: transmembrane 4 L six family member 1
  Uniprot ID: P30408
  ENSP ID: ENSP00000304277
MCYGKCARCIGHSLVGLALLCIAANILLYFPNGETKYASENHLSRFVWFFSGIVGGGLLMLLPAFVFIGLEQDDCCGCCGHENCGKRCAMLSSVLAALIGIAGSGYCVIVAALGLAEGPLCLDSLGQWNYTFASTEGQYLLDTSTWSECTEPKHIVEWNVSLFSILLALGGIEFILCLIQVINGVLGGICGFCCSHQQQYDC

SEQ ID NO: 90564 - protein, 117 aa, Homo sapiens
  Payload ID: 18110
  Gene Name: transmembrane 4 L six family member 1
  ENSP ID: ENSP00000417084
MLSSVLAALIGIAGSGYCVIVAALGLAEGPLCLDSLGQWNYTFASTEGQYLLDTSTWSECTEPKHIVEWNVSLFSILLALGGIEFILCLIQVINGVLGGICGFCCSHQQVRTCMKMS

SEQ ID NO: 90565 - protein, 103 aa, Homo sapiens
  Payload ID: 18110
  Gene Name: transmembrane 4 L six family member 1
  ENSP ID: ENSP00000418025
MCYGKCARCIGHSLVGLALLCIAANILLYFPNGETKYASENHLSRFVWFFSGIVGGGLLMLLPAFVFIGLEQDDCCGCCGHENCGKRCAVGPPALVVKMTPKM

SEQ ID NO: 90566 - protein, 101 aa, Homo sapiens
  Payload ID: 18110
  Gene Name: transmembrane 4 L six family member 1
  ENSP ID: ENSP00000419426
MCYGKCARCIGHSLVGLALLCIAANILLYFPNGETKYASENHLSRFVWFFSGIVGGGLLMLLPAFVFIGLEQDDCCGCCGHENCGKRCAVPSGYLHMVRVH

SEQ ID NO: 90567 - protein, 232 aa, Homo sapiens
  Payload ID: 18110
  Gene Name: transmembrane 4 L six family member 1
  ENSP ID: ENSP00000477606
MCYGKCARCIGHSLVGLALLCIAANILLYFPNGETKYASENHLSRFVWFFSGIVGGGLLMLLPAFVFIGLEQDDCCGCCGHENCGKRCAMLSSVLAALIGIAGSGYCVIVAALGLAEGPLCLDSLGQWNYTFASTEGQYLLDTSTWSECTEPKHIVEWNVSLFSILLALGGIEFILCLIQVINGVLGGICGFCCSHQQQMTAKRTNPGQSHNLPLFHCNLYISLVFICKTLY

SEQ ID NO: 90568 - protein, 201 aa, Homo sapiens
  Payload ID: 18111
  Gene Name: transmembrane 4 L six family member 18
  Uniprot ID: Q96CE8
  ENSP ID: ENSP00000296059
MGSRKCGGCLSCLLIPLALWSIIVNILLYFPNGQTSYASSNKLTNYVWYFEGICFSGIMMLIVTTVLLVLENNNNYKCCQSENCSKKYVTLLSIIFSSLGIAFSGYCLVISALGLVQGPYCRTLDGWEYAFEGTAGRFLTDSSIWIQCLEPAHVVEWNIILFSILITLSGLQVIICLIRVVMQLSKILCGSYSVIFQPGII

SEQ ID NO: 90569 - protein, 159 aa, Homo sapiens
  Payload ID: 18111
  Gene Name: transmembrane 4 L six family member 18
  ENSP ID: ENSP00000418372
MGSRKCGGCLSCLLIPLALWSIIVNILLYFPNGQTSYASSNKLTNYVWYFEGICFSGIMMLIVTTVLLVLENNNNYKCCQSENCSKKYVTLLSIIFSSLGIAFSGYCLVISALGLVQGPYCRTLDGWEYAFEGTAGRFLTDSSIWIQCLEPAHVVEWNI

SEQ ID NO: 90570 - protein, 201 aa, Homo sapiens; identical to SEQ ID NO: 90568
  Payload ID: 18111
  Gene Name: transmembrane 4 L six family member 18
  Uniprot ID: Q96CE8
  ENSP ID: ENSP00000419278

SEQ ID NO: 90571 - protein, 209 aa, Homo sapiens; identical to SEQ ID NO: 89022
  Payload ID: 18112
  Gene Name: transmembrane 4 L six family member 19
  Uniprot ID: Q96DZ7
  ENSP ID: ENSP00000273695

SEQ ID NO: 90572 - protein, 183 aa, Homo sapiens
  Payload ID: 18112
  Gene Name: transmembrane 4 L six family member 19
  Uniprot ID: Q96DZ7
  ENSP ID: ENSP00000387728
MVSSPCTQASSRTCSRILGLSLGTAALFAAGANVALLLPNWDVTYLLRGLLGRHAMLGTGLWGGGLMVLTALLSGGLALLGALICFVTSGVALKDGPFCMFDVSSFNQTQAWKYGYPFKDLHSRNYLYDRSLWNSVCLEPSAAVVWHVSLFSALLCISLLQLLLVVVHVINSLLGLFCSLCEK

SEQ ID NO: 90573 - protein, 299 aa, Homo sapiens
  Payload ID: 18112
  Gene Name: transmembrane 4 L six family member 19
  ENSP ID: ENSP00000395280
MVSSPCTQASSRTCSRILGLSLGTAALFAAGANVALLLPNWDVTYLLRGLLGRHAMLGTGLWGGGLMVLTAAILISLMGWRYGCFSKSGLCRSVLTALLSGGLALLGALICFVTSGVALKDGPFCMFDVSSFNQTQAWKYGYPFKDLHRIICMTVRSGTPSAWSPLQLLSGTCPSSPPFCASACSSFSWWSFMSSTASWAFSAASARSDRQNLHLQAWVFSSSAVLNPFYKEWSLMLECSGVISAHCKLRLPGSSNSPASASQVAGITGTCHHTQLIFVFLVETGFHNVSQDGLDLLTS

SEQ ID NO: 90574 - protein, 110 aa, Homo sapiens
  Payload ID: 18112
  Gene Name: transmembrane 4 L six family member 19
  ENSP ID: ENSP00000414864
  MOD_RES (1)..(1): Any amino acid
XQTQAWKYGYPFKDLHRIICMTVRSGTPSAWSPLQLLSGTCPSSPPFCASACSSFSWWSFMSSTASWAFSAASARSDRQNLHLQAWVFSSSAVLNPFYKEWVRIINKLPL

SEQ ID NO: 90575 - protein, 229 aa, Homo sapiens
  Payload ID: 18113
  Gene Name: transmembrane 4 L six family member 20
  Uniprot ID: Q53R12
  ENSP ID: ENSP00000303028
MTCCEGWTSCNGFSLLVLLLLGVVLNAIPLIVSLVEEDQFSQNPISCFEWWFPGIIGAGLMAIPATTMSLTARKRACCNNRTGMFLSSLFSVITVIGALYCMLISIQALLKGPLMCNSPSNSNANCEFSLKNISDIHPESFNLQWFFNDSCAPPTGFNKPTSNDTMASGWRASSFHFDSEENKHRLIHFSVFLGLLLVGILEVLFGLSQIVIGFLGCLCGVSKRRSQIV

SEQ ID NO: 90576 - protein, 14 aa, Homo sapiens
  Payload ID: 18113
  Gene Name: transmembrane 4 L six family member 20
  ENSP ID: ENSP00000416565
MTCCEGWTSCNGFS

SEQ ID NO: 90577 - protein, 202 aa, Homo sapiens
  Payload ID: 18114
  Gene Name: transmembrane 4 L six family member 4
  Uniprot ID: P48230
  ENSP ID: ENSP00000305852
MCTGGCARCLGGTLIPLAFFGFLANILLFFPGGKVIDDNDHLSQEIWFFGGILGSGVLMIFPALVFLGLKNNDCCGCCGNEGCGKRFAMFTSTIFAVVGFLGAGYSFIISAISINKGPKCLMANSTWGYPFHDGDYLNDEALWNKCREPLNVVPWNLTLFSILLVVGGIQMVLCAIQVVNGLLGTLCGDCQCCGCCGGDGPV

SEQ ID NO: 90578 - protein, 81 aa, Homo sapiens
  Payload ID: 18114
  Gene Name: transmembrane 4 L six family member 4
  ENSP ID: ENSP00000419367
MCTGGCARCLGGTLIPLAFFGFLANILLFFPGGKVIDDNDHLSQEIWFFGGILGSGVLMFTSTIFAVVGFLGAGYSFIISA

SEQ ID NO: 90579 - protein, 197 aa, Homo sapiens
  Payload ID: 18115
  Gene Name: transmembrane 4 L six family member 5
  Uniprot ID: O14894
  ENSP ID: ENSP00000270560
MCTGKCARCVGLSLITLCLVCIVANALLLVPNGETSWTNTNHLSLQVWLMGGFIGGGLMVLCPGIAAVRAGGKGCCGAGCCGNRCRMLRSVFSSAFGVLGAIYCLSVSGAGLRNGPRCLMNGEWGYHFEDTAGAYLLNRTLWDRCEAPPRVVPWNVTLFSLLVAASCLEIVLCGIQLVNATIGVFCGDCRKKQDTPH

SEQ ID NO: 90580 - protein, 145 aa, Homo sapiens
  Payload ID: 18116
  Gene Name: transmembrane 6 superfamily member 1
  ENSP ID: ENSP00000258909
MSASAATGVFVLSLSAIPVTYVFNHLAAQHDSWTIVGVAALILFLVALLARVLVKRKPPRDPLFYVYAVFGFTSVVNLIIGLEQDGIIDGFMTHYLREGEPYLNTAYGHMICYWDGSAHYLMYLVMVAAIAWECWHICSILFLTL

SEQ ID NO: 90581 - protein, 370 aa, Homo sapiens
  Payload ID: 18116
  Gene Name: transmembrane 6 superfamily member 1
  Uniprot ID: Q9BZW5
  ENSP ID: ENSP00000317000
MSASAATGVFVLSLSAIPVTYVFNHLAAQHDSWTIVGVAALILFLVALLARVLVKRKPPRDPLFYVYAVFGFTSVVNLIIGLEQDGIIDGFMTHYLREGEPYLNTAYGHMICYWDGSAHYLMYLVMVAAIAWEETYRTIGLYWVGSIIMSVVVFVPGNIVGKYGTRICPAFFLSIPYTCLPVWAGFRIYNQPSENYNYPSKVIQEAQAKDLLRRPFDLMLVVCLLLATGFCLFRGLIALDCPSELCRLYTQFQEPYLKDPAAYPKIQMLAYMFYSVPYFVTALYGLVVPGCSWMPDITLIHAGGLAQAQFSHIGASLHARTAYVYRVPEEAKILFLALNIAYGVLPQLLAYRCIYKPEFFIKTKAEEKVE

SEQ ID NO: 90582 - protein, 133 aa, Homo sapiens
  Payload ID: 18116
  Gene Name: transmembrane 6 superfamily member 1
  ENSP ID: ENSP00000368693
MSASAATGVFVLSLSAIPVTYVFNHLAAQHDSWTIVGVAALILFLVALLARVLVKRKPPRDPLFYVYAVFGFTSVVNLIIGLEQDGIIDGFMTHYLREGEPYLNTAYGHMICYWDGSAHYLMYLVMVAAIAWE

SEQ ID NO: 90583 - protein, 188 aa, Homo sapiens
  Payload ID: 18116
  Gene Name: transmembrane 6 superfamily member 1
  ENSP ID: ENSP00000368700
MSASAATGVFVLSLSAIPVTYVFNHLAAQHDSWTIVGVAALILFLVALLARVLVKRKPPRDPLFYVYAVFGFTSVVNLIIGLEQDGIIDGFMTHYLREGEPYLNTAYGHMICYWDGSAHYLMYLVMVAAIAWEETYRTIGLYWVGSIIMSVVVFVPGNIVDAGIYVLFCSLLCDCTVWLSGSWMFLDA

SEQ ID NO: 90584 - protein, 166 aa, Homo sapiens
  Payload ID: 18116
  Gene Name: transmembrane 6 superfamily member 1
  ENSP ID: ENSP00000454275
MTHYLREGEPYLNTAYGHMICYWDGSAHYLMYLVMVAAIAWEETYRTIGLYWVGSIIMSVVVFVPGNIVGKYGTRICPAFFLSIPYTCLPVWAGFRIYNQPSENYNYPSKVIQEAQAKDLLRRPFDLMLVVCLLLATGFCLFRGLIALDCPSELCRLYTQFQEPYL

SEQ ID NO: 90585 - protein, 30 aa, Homo sapiens
  Payload ID: 18116
  Gene Name: transmembrane 6 superfamily member 1
  ENSP ID: ENSP00000454416
  MOD_RES (1)..(1): Any amino acid
XYGLVVPGCSWMPDITLIHAGGLAQPAAML

SEQ ID NO: 90586 - protein, 339 aa, Homo sapiens
  Payload ID: 18116
  Gene Name: transmembrane 6 superfamily member 1
  Uniprot ID: Q9BZW5
  ENSP ID: ENSP00000457477
MSASAATGVFVLSLSAIPVTYVFNHLAAQHDSWTIVGVAALILFLVALLARVLVKRKPPRDPLFYVYAVFGFTSVVNLIIGLEQDGIIDGFMTHYLREGEPYLNTAYGHMICYWDGSAHYLMYLVMVAAIAWEETYRTIGLYWVGSIIMSVVVFVPGNIVGKYGTRICPAFFLSIPYTCLPVWAGFRIYNQPSENYNYPSKVIQEAQAKDLLRRPFDLMLVVCLLLATGFCLFRGLMLAYMFYSVPYFVTALYGLVVPGCSWMPDITLIHAGGLAQAQFSHIGASLHARTAYVYRVPEEAKILFLALNIAYGVLPQLLAYRCIYKPEFFIKTKAEEKVE

SEQ ID NO: 90587 - protein, 377 aa, Homo sapiens
  Payload ID: 18117
  Gene Name: transmembrane 6 superfamily member 2
  Uniprot ID: Q9BZW4
  ENSP ID: ENSP00000374014
MDIPPLAGKIAALSLSALPVSYALNHVSALSHPLWVALMSALILGLLFVAVYSLSHGEVSYDPLYAVFAVFAFTSVVDLIIALQEDSYVVGFMEFYTKEGEPYLRTAHGVFICYWDGTVHYLLYLAMAGAICRRKRYRNFGLYWLGSFAMSILVFLTGNILGKYSSEIRPAFFLTIPYLLVPCWAGMKVFSQPRALTRCTANMVQEEQRKGLLQRPADLALVIYLILAGFFTLFRGLVVLDCPTDACFVYIYQYEPYLRDPVAYPKVQMLMYMFYVLPFCGLAAYALTFPGCSWLPDWALVFAGGIGQAQFSHMGASMHLRTPFTYRVPEDTWGCFFVCNLLYALGPHLLAYRCLQWPAFFHQPPPSDPLALHKKQH

SEQ ID NO: 90588 - protein, 418 aa, Homo sapiens
  Payload ID: 18118
  Gene Name: transmembrane 7 superfamily member 2
  Uniprot ID: O76062
  ENSP ID: ENSP00000279263
MAPTQGPRAPLEFGGPLGAAALLLLLPATMFHLLLAARSGPARLLGPPASLPGLEVLWSPRALLLWLAWLGLQAALYLLPARKVAEGQELKDKSRLRYPINGFQALVLTALLVGLGMSAGLPLGALPEMLLPLAFVATLTAFIFSLFLYMKAQVAPVSALAPGGNSGNPIYDFFLGRELNPRICFFDFKYFCELRPGLIGWVLINLALLMKEAELRGSPSLAMWLVNGFQLLYVGDALWHEEAVLTTMDITHDGFGFMLAFGDMAWVPFTYSLQAQFLLHHPQPLGLPMASVICLINATGYYIFRGANSQKNTFRKNPSDPRVAGLETISTATGRKLLVSGWWGMVRHPNYLGDLIMALAWSLPCGVSHLLPYFYLLYFTALLVHREARDERQCLQKYGLAWQEYCRRVPYRIMPYIY

SEQ ID NO: 90589 - protein, 391 aa, Homo sapiens
  Payload ID: 18118
  Gene Name: transmembrane 7 superfamily member 2
  Uniprot ID: O76062
  ENSP ID: ENSP00000329520
MAPTQGPRAPLEFGGPLGAAALLLLLPATMFHLLLAARSGPARLLGPPASLPGLEVLWSPRALLLWLAWLGLQAALYLLPARKVAEGQELKDKSRLRYPINGFQALVLTALLVGLGMSAGLPLGALPEMLLPLAFVATLTAFIFSLFLYMKAQVAPVSALAPGGNSGNPIYDFFLGRELNPRICFFDFKYFCELRPGLIGWVLINLALLMKEAELRGSPSLAMWLVNGFQLLYVGDALWHEEAVLTTMDITHDGFGFMLAFGDMAWVPFTYSLQAQFLLHHPQPLGLPMASVICLINGLETISTATGRKLLVSGWWGMVRHPNYLGDLIMALAWSLPCGVSHLLPYFYLLYFTALLVHREARDERQCLQKYGLAWQEYCRRVPYRIMPYIY

SEQ ID NO: 90590 - protein, 271 aa, Homo sapiens
  Payload ID: 18118
  Gene Name: transmembrane 7 superfamily member 2
  ENSP ID: ENSP00000431300
MFHLLLAARSGPARLLGPPASLPGLEVLWSPRALLLWLAWLGLQAALYLLPARKVAEGQELKDKSRLRYPINGNPIYDFFLGRELNPRICFFDFKYFCELRPGLIGWVLINLALLMKEAELRGSPSLAMWLVNGFQLLYVGDALWHEEAVLTTMDITHDGFGFMLAFGDMAWVPFTYSLQAQFLLHHPQPLGLPMASVICLINATGYYIFRGANSQKNTFRKNPSDPRVAGLETISTATGRKLLVSGWWGMVRHPNYLGDLIMALAWSLPC

SEQ ID NO: 90591 - protein, 181 aa, Homo sapiens
  Payload ID: 18118
  Gene Name: transmembrane 7 superfamily member 2
  ENSP ID: ENSP00000431685
PIYDFFLGRELNPRICFFDFKYFCELRPGLIGWVLINLALLMKEAELRGSPSLAMWLVNGFQLLYVGDALWHEEAVLTTMDITHDGFGFMLAFGDMAWVPFTYSLQAQFLLHHPQPLGLPMASVICLINATGYYIFRGANSQKNTFRKNPSDPRVAGVSHLLPYFYLLYFTALLVHREARD

SEQ ID NO: 90592 - protein, 219 aa, Homo sapiens
  Payload ID: 18118
  Gene Name: transmembrane 7 superfamily member 2
  ENSP ID: ENSP00000432171
MAPTQGPRAPLEFGGPLGAAALLLLLPATMFHLLLAARSGPARLLGPPASLPGLEVLWSPRALLLWLAWLGLQAALYLLPARKVLINLALLMKEAELRGSPSLAMWLVNGFQLLYVGDALWHEEAVLTTMDITHDGFGFMLAFGDMAWVPFTYSLQAQFLLHHPQPLGLPMASVICLINATGYYIFRGANSQKNTFRKNPSDPRVAGLETISTATGRKL

SEQ ID NO: 90593 - protein, 256 aa, Homo sapiens
  Payload ID: 18118
  Gene Name: transmembrane 7 superfamily member 2
  ENSP ID: ENSP00000432187
MAPTQGPRAPLEFGGPLGAAALLLLLPATMFHLLLAARSGPARLLGPPASLPGLEVLWSPRALLLWLAWLGLQAALYLLPARKAQVAPVSALAPGGNSGNPIYDFFLGRELNPRICFFDFKYFCELRPGLIGWVLINLALLMKEAELRGSPSLAMWLVNGFQLLYVGDALWHEEAVLTTMDITHDGFGFMLAFGDMAWVPFTYSLQAQFLLHHPQPLGLPMASVICLINATGYYIFRGANSQKNTFRKNPSDPRVA

SEQ ID NO: 90594 - protein, 115 aa, Homo sapiens
  Payload ID: 18118
  Gene Name: transmembrane 7 superfamily member 2
  ENSP ID: ENSP00000432413
MAPTQGPRAPLEFGGPLGAAALLLLLPATMFHLLLAARSGPARLLGPPASLPGLEVLWSPRALLLWLAWLGLQAALYLLPARKVAEGQELKDKSRLRYPINGNPIYDFFLGRELN

SEQ ID NO: 90595 - protein, 207 aa, Homo sapiens
  Payload ID: 18118
  Gene Name: transmembrane 7 superfamily member 2
  ENSP ID: ENSP00000433275
MAPTQGPRAPLEFGGPLGAAALLLLLPATMFHLLLAARSGPARLLGPPASLPGLEVLWSPRALLLWLAWLGLQAALYLLPARKVAEGQELKDKSRLRYPINGFQALVLTALLVGLGMSAGLPLGALPEMLLPLAFVATLTAFIFSLFLYMKAQVAPVSALAPGGNSELNPRICFFDFKYFCELRPGLIGWVLINLALLMKEAELRGS

SEQ ID NO: 90596 - protein, 292 aa, Homo sapiens
  Payload ID: 18118
  Gene Name: transmembrane 7 superfamily member 2
  ENSP ID: ENSP00000433325
MFHLLLAARSGPARLLGPPASLPGLEVLWSPRALLLWLAWLGLQAALYLLPARKVAEGQELKDKSRLRYPINGFQALVLTALLVGLGMSAGLPLGALPEMLLPLAFVATLTAFIFSLFLYMKAQVAPVSALAPGGNSGNPIYDFFLGRELNPRICFFDFKYFCELRPGLIGWVLINLALLMKEAELRGSPSLAMWLVNGFQLLYVGDALWHEEAVLTTMDITHDGFGFMLAFGDMAWVPFTYSLQAQFLLHHPQPLGLPMASVICLINATGYYIFRGANSQKNTFRKNPSDP

SEQ ID NO: 90597 - protein, 148 aa, Homo sapiens
  Payload ID: 18118
  Gene Name: transmembrane 7 superfamily member 2
  ENSP ID: ENSP00000434447
MAPTQGPRAPLEFGGPLGNPIYDFFLGRELNPRICFFDFKYFCELRPGLIGWVLINLALLMKEAELRGSPSLAMWLVNGFQLLYVGDALWHEEAVLTTMDITHDGFGFMLAFGDMAWVPFTYSLQAQFLLHHPQPLGLPMASVICLIN

SEQ ID NO: 90598 - protein, 93 aa, Homo sapiens
  Payload ID: 18118
  Gene Name: transmembrane 7 superfamily member 2
  ENSP ID: ENSP00000434598
  MOD_RES (1)..(1): Any amino acid
XEFGGPLGAAALLLLLPATMFHLLLAARSGPARLLGPPASLPGLEVLWSPRALLLWLAWLGLQAALYLLPARKVAEGQELKDKSRLRYPINGA

SEQ ID NO: 90599 - protein, 89 aa, Homo sapiens
  Payload ID: 18118
  Gene Name: transmembrane 7 superfamily member 2
  ENSP ID: ENSP00000435458
MAPTQGPRAPLEFGGPLGAAALLLLLPATMFHLLLAARSGPARLLGPPASLPGLEVLWSPRALLLWLAWLGLQAALYLLPARKASRPWC

SEQ ID NO: 90600 - protein, 223 aa, Homo sapiens
  Payload ID: 18118
  Gene Name: transmembrane 7 superfamily member 2
  ENSP ID: ENSP00000435972
MFHLLLAARSGPARLLGPPASLPGLEVLWSPRALLLWLAWLGLQAALYLLPARKVAEGQELKDKSRLRYPINGFQALVLTALLVGLGMSAGLPLGALPEMLLPLAFVATLTAFIFSLFLYMKAQVAPVSALAPGGNSGNPIYDFFLGRELNPRICFFDFKYFCELRPGLIGWVLINLALLMKEAELRGSPSLAMWLVNGFQLLYVGDALWHEEAVLTTMDITH

SEQ ID NO: 90601 - protein, 208 aa, Homo sapiens
  Payload ID: 18118
  Gene Name: transmembrane 7 superfamily member 2
  ENSP ID: ENSP00000436233
  MOD_RES (1)..(1): Any amino acid
XFLGRELNPRICFFDFKYFCELRPGLIGWVLINLALLMKEAELRGSPSLAMWLVNGFQLLYVGDALWHEEAVLTTMDITHDGFGFMLAFGDMAWVPFTYSLQAQFLLHHPQPLGLPMASVICLINATGYYIFRGANSQKNTFRKNPSDPRVAGLETISTATGRKLLVSGWWGMVRHPNYLGDLIMALAWSLPCDPGAFAAEPRCPHEP

SEQ ID NO: 90602 - protein, 135 aa, Homo sapiens
  Payload ID: 18118
  Gene Name: transmembrane 7 superfamily member 2
  ENSP ID: ENSP00000436370
MAPTQGPRAPLEFGGPLGAAALLLLLPATMFHLLLAARSGPARLLGPPASLPGLEVLWSPRALLLWLAWLGLQAALYLLPARKVAEGQELKDKSRLRYPINGPHQPGPVDEGGRASRQSLTGHVAGQWLPVALRG

SEQ ID NO: 90603 - protein, 570 aa, Homo sapiens
  Payload ID: 18119
  Gene Name: transmembrane 7 superfamily member 3
  Uniprot ID: Q9NS93
  ENSP ID: ENSP00000342322
MGFLQLLVVAVLASEHRVAGAAEVFGNSSEGLIEFSVGKFRYFELNRPFPEEAILHDISSNVTFLIFQIHSQYQNTTVSFSPTLLSNSSETGTASGLVFILRPEQSTCTWYLGTSGIQPVQNMAILLSYSERDPVPGGCNLEFDLDIDPNIYLEYNFFETTIKFAPANLGYARGVDPPPCDAGTDQDSRWRLQYDVYQYFLPENDLTEEMLLKHLQRMVSVPQVKASALKVVTLTANDKTSVSFSSLPGQGVIYNVIVWDPFLNTSAAYIPAHTYACSFEAGEGSCASLGRVSSKVFFTLFALLGFFICFFGHRFWKTELFFIGFIIMGFFFYILITRLTPIKYDVNLILTAVTGSVGGMFLVAVWWRFGILSICMLCVGLVLGFLISSVTFFTPLGNLKIFHDDGVFWVTFSCIAILIPVVFMGCLRILNILTCGVIGSYSVVLAIDSYWSTSLSYITLNVLKRALNKDFHRAFTNVPFQTNDFIILAVWGMLAVSGITLQIRRERGRPFFPPHPYKLWKQERERRVTNILDPSYHIPPLRERLYGRLTQIKGLFQKEQPAGERTPLLL

SEQ ID NO: 90604 - protein, 37 aa, Homo sapiens
  Payload ID: 18119
  Gene Name: transmembrane 7 superfamily member 3
  ENSP ID: ENSP00000438848
MAILLSYSERDPVPGGCNLEFDLDIDPNIYLEYNFFE

SEQ ID NO: 90605 - protein, 200 aa, Homo sapiens
  Payload ID: 18119
  Gene Name: transmembrane 7 superfamily member 3
  ENSP ID: ENSP00000439318
  MOD_RES (1)..(1): Any amino acid
XLLKHLQRMVSVPQVKASALKVVTLTANDKTSVSFSSLPGQGVIYNVIVWDPFLNTSAAYIPAHTYACSFEAGEGSCASLGRVSSKVFFTLFALLGFFICFFGHRFWKTELFFIGFIIMGFFFYILITRLTPIKYDVNLILTAVTGSVGGMFLVAVWWRFGILSICMLCVGLVLGFLISSVTFFTPLETGSLSVTHAGLQ

SEQ ID NO: 90606 - protein, 116 aa, Homo sapiens
  Payload ID: 18119
  Gene Name: transmembrane 7 superfamily member 3
  ENSP ID: ENSP00000439987
MGFLQLLVVAVLASEHRVAGAAEVFGNSSEVYLVVGLIEFSVGKFRYFELNRPFPEEAILHDISSNVTFLIFQIHSQYQNTTVSFSPTLLSNSSETGTASGLVFILRPEQSTCTWY

SEQ ID NO: 90607 - protein, 144 aa, Homo sapiens
  Payload ID: 18119
  Gene Name: transmembrane 7 superfamily member 3
  ENSP ID: ENSP00000440146
  MOD_RES (1)..(1): Any amino acid
XVPQVKASALKVVTLTANDKTSVSFSSLPGQGVIYNVIVWDPFLNTSAAYIPAHTYACSFEAGEGSCASLGRVSSKVFFTLFALLGFFICFFGHRFWKTELFFIGFIIMGFFFYILITRLTPIKYDAEHTDLWSHWLLFGGFSH

SEQ ID NO: 90608 - protein, 115 aa, Homo sapiens
  Payload ID: 18119
  Gene Name: transmembrane 7 superfamily member 3
  ENSP ID: ENSP00000440262
MSHRARPISGLIEFSVGKFRYFELNRPFPEEAILHDISSNVTFLIFQIHSQYQNTTVSFSPTLLSNSSETGTASGLVFILRPEQSTCTWYLGTSGIQPVQNMAILLSYSERDPVP

SEQ ID NO: 90609 - protein, 49 aa, Homo sapiens
  Payload ID: 18119
  Gene Name: transmembrane 7 superfamily member 3
  ENSP ID: ENSP00000440323
MGFLQLLVVAVLASEHRVAGAAEVFGNSSEDSPFQFLGNRHCQWTGFHP

SEQ ID NO: 90610 - protein, 152 aa, Homo sapiens
  Payload ID: 18119
  Gene Name: transmembrane 7 superfamily member 3
  ENSP ID: ENSP00000440736
ETTIKFAPANLGYARGVDPPPCDAGTDQDSRWRLQYDVYQYFLPENDLTEEMLLKHLQRMVSVPQVKASALKVVTLTANDKTSVSFSSLPGQGVIYNVIVWDPFLNTSAAYIPAHTYACSFEAGEGSCASLAVLYLLLCLSTSSPSFITGLF

SEQ ID NO: 90611 - protein, 86 aa, Homo sapiens
  Payload ID: 18119
  Gene Name: transmembrane 7 superfamily member 3
  ENSP ID: ENSP00000441027
MAILLSYSERDPVPGGCNLEFDLDIDPNIYLEYNFFETTIKFAPANLGYARGVDPPPCDAGTDQDSRWRLQYDVYQYFLPENDLTE

SEQ ID NO: 90612 - protein, 136 aa, Homo sapiens
  Payload ID: 18119
  Gene Name: transmembrane 7 superfamily member 3
  ENSP ID: ENSP00000441924
MLLKHLQRMVSVPQVKASALKVVTLTANDKTSVSFSSLPGQGVIYNVIVWDPFLNTSAAYIPAHTYACSFEAGEGSCASLGRVSSKVFFTLFALLGFFICFFGHRFWKTELFFIGFIIMGFFFYILITRLTPIKYD

SEQ ID NO: 90613 - protein, 128 aa, Homo sapiens
  Payload ID: 18119
  Gene Name: transmembrane 7 superfamily member 3
  ENSP ID: ENSP00000442617
MGFLQLLVVAVLASEHRVAGAAEVFGNSSEDPVPGGCNLEFDLDIDPNIYLEYNFFETTIKFAPANLGYARGVDPPPCDAGTDQDSRWRLQYDVYQYFLPENDLTEEMLLKHLQRMVSVPQVKASALK

SEQ ID NO: 90614 - protein, 81 aa, Homo sapiens
  Payload ID: 18119
  Gene Name: transmembrane 7 superfamily member 3
  ENSP ID: ENSP00000444362
FYILITRLTPIKYDGNLKIFHDDGVFWVTFSCIAILIPVVFMGCLRILNILTCGVIGSYSVVLAIDSYWSTSLSYITLNVL

SEQ ID NO: 90615 - protein, 66 aa, Homo sapiens
  Payload ID: 18119
  Gene Name: transmembrane 7 superfamily member 3
  ENSP ID: ENSP00000444632
MAILLSYSERDPVPGGCNLEFDLDIDPNIYLEYNFFETTIKFAPANLGYARGVDPPPCDAGTDQDS

SEQ ID NO: 90616 - protein, 136 aa, Homo sapiens; identical to SEQ ID NO: 90612
  Payload ID: 18119
  Gene Name: transmembrane 7 superfamily member 3
  ENSP ID: ENSP00000445156

SEQ ID NO: 90617 - protein, 222 aa, Homo sapiens
  Payload ID: 18119
  Gene Name: transmembrane 7 superfamily member 3
  ENSP ID: ENSP00000445756
VWDPFLNTSAAYIPAHTYACSFEAGEGSCASLELFFIGFIIMGFFFYILITRLTPIKYDVNLILTAVTGSVGGMFLVAVWWRFGILSICMLCVGLVLGFLISSVTFFTPLGNLKIFHDDGVFWVTFSCIAILIPVVFMGCLRILNILTCGVIGSYSVVLAIDSYWSTSLSYITLNVLKRALNKDFHRAFTNVPFQTNDFIILAVWGMLAVSGITLQIRRERG

SEQ ID NO: 90618 - protein, 606 aa, Homo sapiens
  Payload ID: 18120
  Gene Name: transmembrane 9 superfamily member 1
  Uniprot ID: O15321
  ENSP ID: ENSP00000261789
MTVVGNPRSWSCQWLPILILLLGTGHGPGVEGVTHYKAGDPVILYVNKVGPYHNPQETYHYYQLPVCCPEKIRHKSLSLGEVLDGDRMAESLYEIRFRENVEKRILCHMQLSSAQVEQLRQAIEELYYFEFVVDDLPIRGFVGYMEESGFLPHSHKIGLWTHLDFHLEFHGDRIIFANVSVRDVKPHSLDGLRPDEFLGLTHTYSVRWSETSVERRSDRRRGDDGGFFPRTLEIHWLSIINSMVLVFLLVGFVAVILMRVLRNDLARYNLDEETTSAGSGDDFDQGDNGWKIIHTDVFRFPPYRGLLCAVLGVGAQFLALGTGIIVMALLGMFNVHRHGAINSAAILLYALTCCISGYVSSHFYRQIGGERWVWNIILTTSLFSVPFFLTWSVVNSVHWANGSTQALPATTILLLLTVWLLVGFPLTVIGGIFGKNNASPFDAPCRTKNIAREIPPQPWYKSTVIHMTVGGFLPFSAISVELYYIFATVWGREQYTLYGILFFVFAILLSVGACISIALTYFQLSGEDYRWWWRSVLSVGSTGLFIFLYSVFYYARRSNMSGAVQTVEFFGYSLLTGYVFFLMLGTISFFSSLKFIRYIYVNLKMD

SEQ ID NO: 90619 - protein, 489 aa, Homo sapiens
  Payload ID: 18120
  Gene Name: transmembrane 9 superfamily member 1
  Uniprot ID: O15321
  ENSP ID: ENSP00000380063
MTVVGNPRSWSCQWLPILILLLGTGHGPGVEGVTHYKAGDPVILYVNKVGPYHNPQETYHYYQLPVCCPEKIRHKSLSLGEVLDGDRMAESLYEIRFRENVEKRILCHMQLSSAQVEQLRQAIEELYYFEFVVDDLPIRGFVGYMEESGFLPHSHKIGLWTHLDFHLEFHGDRIIFANVSVRDVKPHSLDGLRPDEFLGLTHTYSVRWSETSVERRSDRRRGDDGGFFPRTLEIHWLSIINSMVLVFLLVGFVAVILMRVLRNDLARYNLDEETTSAGSGDDFDQGDNGWKIIHTDVFRFPPYRGLLCAVLGVGAQFLALGTGIIVMALLGMFNVHRHGAINSAAILLYALTCCISGYVSSHFYRQIGGERWVWNIILTTSLFSVPFFLTWSVVNSVHWANGSTQALPATTILLLLTVWLLVGFPLTVIGGIFGKNNASPFDAPCRTKNIAREIPPQPWYKSTVIHMTVGGFLPFRYPPFIPWLLLSGS

SEQ ID NO: 90620 - protein, 300 aa, Homo sapiens
  Payload ID: 18120
  Gene Name: transmembrane 9 superfamily member 1
  ENSP ID: ENSP00000431447
MTVVGNPRSWSCQWLPILILLLGTGHGPGVEGVTHYKAGDPVILYVNKVGPYHNPQETYHYYQLPVCCPEKIRHKSLSLGEVLDGDRMAESLYEIRFRENVEKRILCHMQLSSAQVEQLRQAIEELYYFEFVVDDLPIRGFVGYMEESGFLPHSHKIGLWTHLDFHLEFHGDRIIFANVSVRDVKPHSLDGLRPDEFLGLTHTYSVRWSETSVERRSDRRRGDDGGFFPRTLEIHWLSIINSMVLVFLLVGFVAVILMRVLRNDLARYNLDEETTSAGSGDDFDQGDNGWKIIHTDVFRF

SEQ ID NO: 90621 - protein, 420 aa, Homo sapiens
  Payload ID: 18120
  Gene Name: transmembrane 9 superfamily member 1
  ENSP ID: ENSP00000431747
MTVVGNPRSWSCQWLPILILLLGTGHGPGVEGVTHYKAGDPVILYVNKVGPYHNPQETYHYYQLPVCCPEKIRHKSLSLGEVLDGDRMAESLYEIRFRENVEKRILCHMQLSSAQVEQLRQAIEELYYFEFVVDDLPIRGFVGYMEESGFLPHSHKIGLWTHLDFHLEFHGDRIIFANVSVRDVKPHSLDGLRPDEFLGLTHTYSVRWSETSVERRSDRRRGDDGGFFPRTLEIHWLSIINSMVLVFLLVGFVAVILMRVLRNDLARYNLDEETTSAGSGDDFDQGDNGWKIIHTDVFRFPPYRGLLCAVLGVGAQFLALGTGIIVMALLGMFNVHRHGAINSAAILLYALTCCISGYVSSHFYRQIGGERWVWNIILTTSLFSGSASHNHPAASDGLAAGGLSPHCHWRHLWEEQRQPL

SEQ ID NO: 90622 - protein, 242 aa, Homo sapiens
  Payload ID: 18120
  Gene Name: transmembrane 9 superfamily member 1
  ENSP ID: ENSP00000432435
MTVVGNPRSWSCQWLPILILLLGTGHGPGVEGVTHYKAGDPVILYVNKVGPYHNPQETYHYYQLPVCCPEKIRHKSLSLGEVLDGDRMAESLYEIRFRENVEKRILCHMQLSSAQVEQLRQAIEELYYFEFVVDDLPIRGFVGYMEESGFLPHSHKIGLWTHLDFHLEFHGDRIIFANVSVRDVKPHSLDGLRPDEFLGLTHTYSVRWSETSVERRSDRRRGDDGGFFPRTLEIHWLSIINS

SEQ ID NO: 90623 - protein, 589 aa, Homo sapiens
  Payload ID: 18120
  Gene Name: transmembrane 9 superfamily member 1
  ENSP ID: ENSP00000432997
MTVVGNPRSWSCQWLPILILLLGTGHGPGVEGVTHYKAGDPVILYVNKVGPYHNPQETYHYYQLPVCCPEKIRHKSLSLGEVLDGDRMAESLYEIRFRENVEKRILCHMQLSSAQVEQLRQAIEELYYFEFVVDDLPIRGFVGYMEESGFLPHSHKIGLWTHLDFHLEFHGDRIIFANVSVRDVKPHSLDGLRPDEFLGLTHTYSVRWSETSVERRSDRRRGDDGGFFPRTLEIHWLSIINSMVLVFLLVGFVAVILMRVLRNDLARYNLDEETTSAGSGDDFDQGDNGWKIIHTDVFRFPPYRGLLCAVLGVGAQFLALGTGIIVMALLGMFNVHRHGAINSAAILLYALTCCISGYVSSHFYRQIGGERWVWNIILTTSLFSVPFFLTWSVVNSVHWANGSTQALPATTILLLLTVWLLVGFPLTVIGGIFGKNNASPFDAPCRTKNIAREIPPQPCAISVELYYIFATVWGREQYTLYGILFFVFAILLSVGACISIALTYFQLSGEDYRWWWRSVLSVGSTGLFIFLYSVFYYARRSNMSGAVQTVEFFGYSLLTGYVFFLMLGTISFFSSLKFIRYIYVNLKMD

SEQ ID NO: 90624 - protein, 210 aa, Homo sapiens
  Payload ID: 18120
  Gene Name: transmembrane 9 superfamily member 1
  ENSP ID: ENSP00000433792
MTVVGNPRSWSCQWLPILILLLGTGHGPGVEGVTHYKAGDPVILYVNKVGPYHNPQETYHYYQLPVCCPEKIRHKSLSLGEVLDGDRMAESLYEIRFRENVEKRILCHMQLSSAQVEQLRQAIEELYYFEFVVDDLPIRGFVGYMEESGFLPHSHKIGLWTHLDFHLEFHGDRIIFANVSVRDVKPHSLDGLRPDEFLGLTHTYSVRWSE

SEQ ID NO: 90625 - protein, 519 aa, Homo sapiens
  Payload ID: 18120
  Gene Name: transmembrane 9 superfamily member 1
  ENSP ID: ENSP00000434387
MAESLYEIRFRENVEKRILCHMQLSSAQVEQLRQAIEELYYFEFVVDDLPIRGFVGYMEESGFLPHSHKIGLWTHLDFHLEFHGDRIIFANVSVRDVKPHSLDGLRPDEFLGLTHTYSVRWSETSVERRSDRRRGDDGGFFPRTLEIHWLSIINSMVLVFLLVGFVAVILMRVLRNDLARYNLDEETTSAGSGDDFDQGDNGWKIIHTDVFRFPPYRGLLCAVLGVGAQFLALGTGIIVMALLGMFNVHRHGAINSAAILLYALTCCISGYVSSHFYRQIGGERWVWNIILTTSLFSVPFFLTWSVVNSVHWANGSTQALPATTILLLLTVWLLVGFPLTVIGGIFGKNNASPFDAPCRTKNIAREIPPQPWYKSTVIHMTVGGFLPFSAISVELYYIFATVWGREQYTLYGILFFVFAILLSVGACISIALTYFQLSGEDYRWWWRSVLSVGSTGLFIFLYSVFYYARRSNMSGAVQTVEFFGYSLLTGYVFFLMLGTISFFSSLKFIRYIYVNLKMD

SEQ ID NO: 90626 - protein, 257 aa, Homo sapiens
  Payload ID: 18120
  Gene Name: transmembrane 9 superfamily member 1
  ENSP ID: ENSP00000435857
MTVVGNPRSWSCQWLPILILLLGTGHGPGVEGVTHYKAGDPVILYVNKVGPYHNPQETYHYYQLPVCCPEKIRHKSLSLGEVLDGDRMAESLYEIRFRENVEKRILCHMQLSSAQVEQLRQAIEELYYFEFVVDDLPIRGFVGYMEESGFLPHSHKIGLWTHLDFHLEFHGDRIIFANVSVRDVKPHSLDGLRPDEFLGLTHTYSVRWSETSVERRSDRRRGDDGGFFPRTLEIHWLSIINSMVLVFLLVGFVAVIL

SEQ ID NO: 90627 - protein, 133 aa, Homo sapiens
  Payload ID: 18120
  Gene Name: transmembrane 9 superfamily member 1
  ENSP ID: ENSP00000436486
MTVVGNPRSWSCQWLPILILLLGTALVQVYCHPHDCWRLPAFQCHLCGAVLHLCHSMGSGAVHFVRHPLLCLRHPAECGGLHLHCTHLLPVVWGGLPLVVAICAECWLHRPLHLPLLSFLLCPALQHVWGSTD

SEQ ID NO: 90628 - protein, 207 aa, Homo sapiens
  Payload ID: 18120
  Gene Name: transmembrane 9 superfamily member 1
  ENSP ID: ENSP00000437127
MAESLYEIRFRENVEKRILCHMQLSSAQVEQLRQAIEELYYFEFVVDDLPIRGFVGYMEESGFLPHSHKIGLWTHLDFHLEFHGDRIIFANVSVRDVKPHSLDGLRPDEFLGLTHTYSVRWSETSVERRSDRRRGDDGGFFPRTLEIHWLSIINSMVLVFLLVGFVAVILMRVLRNDLARYNLDEETTSAGSGDDFDQGDNGWKIIH

SEQ ID NO: 90629 - protein, 663 aa, Homo sapiens
  Payload ID: 18121
  Gene Name: transmembrane 9 superfamily member 2
  Uniprot ID: Q99805
  ENSP ID: ENSP00000365567
MSARLPVLSPPRWPRLLLLSLLLLGAVPGPRRSGAFYLPGLAPVNFCDEEKKSDECKAEIELFVNRLDSVESVLPYEYTAFDFCQASEGKRPSENLGQVLFGERIEPSPYKFTFNKKETCKLVCTKTYHTEKAEDKQKLEFLKKSMLLNYQHHWIVDNMPVTWCYDVEDGQRFCNPGFPIGCYITDKGHAKDACVISSDFHERDTFYIFNHVDIKIYYHVVETGSMGARLVAAKLEPKSFKHTHIDKPDCSGPPMDISNKASGEIKIAYTYSVSFEEDDKIRWASRWDYILESMPHTHIQWFSIMNSLVIVLFLSGMVAMIMLRTLHKDIARYNQMDSTEDAQEEFGWKLVHGDIFRPPRKGMLLSVFLGSGTQILIMTFVTLFFACLGFLSPANRGALMTCAVVLWVLLGTPAGYVAARFYKSFGGEKWKTNVLLTSFLCPGIVFADFFIMNLILWGEGSSAAIPFGTLVAILALWFCISVPLTFIGAYFGFKKNAIEHPVRTNQIPRQIPEQSFYTKPLPGIIMGGILPFGCIFIQLFFILNSIWSHQMYYMFGFLFLVFIILVITCSEATILLCYFHLCAEDYHWQWRSFLTSGFTAVYFLIYAVHYFFSKLQITGTASTILYFGYTMIMVLIFFLFTGTIGFFACFWFVTKIYSVVKVD

SEQ ID NO: 90630 - protein, 589 aa, Homo sapiens
  Payload ID: 18122
  Gene Name: transmembrane 9 superfamily member 3
  Uniprot ID: Q9HD45
  ENSP ID: ENSP00000360184
MRPLPGALGVAAAAALWLLLLLLPRTRADEHEHTYQDKEEVVLWMNTVGPYHNRQETYKYFSLPFCVGSKKSISHYHETLGEALQGVELEFSGLDIKFKDDVMPATYCEIDLDKEKRDAFVYAIKNHYWYQMYIDDLPIWGIVGEADENGEDYYLWTYKKLEIGFNGNRIVDVNLTSEGKVKLVPNTKIQMSYSVKWKKSDVKFEDRFDKYLDPSFFQHRIHWFSIFNSFMMVIFLVGLVSMILMRTLRKDYARYSKEEEMDDMDRDLGDEYGWKQVHGDVFRPSSHPLIFSSLIGSGCQIFAVSLIVIIVAMIEDLYTERGSMLSTAIFVYAATSPVNGYFGGSLYARQGGRRWIKQMFIGAFLIPAMVCGTAFFINFIAIYYHASRAIPFGTMVAVCCICFFVILPLNLVGTILGRNLSGQPNFPCRVNAVPRPIPEKKWFMEPAVIVCLGGILPFGSIFIEMYFIFTSFWAYKIYYVYGFMMLVLVILCIVTVCVTIVCTYFLLNAEDYRWQWTSFLSAASTAIYVYMYSFYYYFFKTKMYGLFQTSFYFGYMAVFSTALGIMCGAIGYMGTSAFVRKIYTNVKID

SEQ ID NO: 90631 - protein, 253 aa, Homo sapiens
  Payload ID: 18122
  Gene Name: transmembrane 9 superfamily member 3
  ENSP ID: ENSP00000401152
MNTVGPYHNRQETYKYFSLPFCVGSKKSISHYHETLGEALQGVELEFSGLDIKFKDDVMPATYCEIDLDKEKRDAFVYAIKNHYWYQMYIDDLPIWGIVGEADENGEDYYLWTYKKLEIGFNGNRIVDVNLTSEGKVKLVPNTKIQMSYSVKWKKSDVKFEDRFDKYLDPSFFQHRIHWFSIFNSFMMVIFLVGLVSMILMRTLRKDYARYSKEEEMDDMDRDLGDEYGWKQVHGDVFRPSSHPLIFSSLIGS

SEQ ID NO: 90632 - protein, 625 aa, Homo sapiens
  Payload ID: 18123
  Gene Name: transmembrane 9 superfamily protein member 4
  ENSP ID: ENSP00000217315
MCETSAFYVPGVAPINFHQNDPVEIKAVKLTSSRTQLPYEYYSLPFCQPSKITYKAENLGEVLRGDRIVNTPFQVLMNSEKKCEVLCSQSNKPVTLTVEQSRLVAERITEDYYVHLIADNLPVATRLELYSNRDSDDKKKEKDVQFEHGYRLGFTDVNKIYLHNHLSFILYYHREDMEEDQEHTYRVVRFEVIPQSIRLEDLKADEKSSCTLPEGTNSSPQEIDPTKENQLYFTYSVHWEESDIKWASRWDTYLTMSDVQIHWFSIINSVVVVFFLSGILSMIIIRTLRKDIANYNKEDDIEDTMEESGWKLVHGDVFRPPQYPMILSSLLGSGIQLFCMILIVIFVAMLGMLSPSSRGALMTTACFLFMFMGVFGGFSAGRLYRTLKGHRWKKGAFCTATLYPGVVFGICFVLNCFIWGKHSSGAVPFPTMVALLCMWFGISLPLVYLGYYFGFRKQPYDNPVRTNQIPRQIPEQRWYMNRFVGILMAGILPFGAMFIELFFIFSAIWENQFYYLFGFLFLVFIILVVSCSQISIVMVYFQLCAEDYRWWWRNFLVSGGSAFYVLVYAIFYFVNKLDIVEFIPSLLYFGYTALMVLSFWLLTGTIGFYAAYMFVRKIYAAVKID

SEQ ID NO: 90633 - protein, 642 aa, Homo sapiens
  Payload ID: 18123
  Gene Name: transmembrane 9 superfamily protein member 4
  Uniprot ID: Q92544
  ENSP ID: ENSP00000381104
MATAMDWLPWSLLLFSLMCETSAFYVPGVAPINFHQNDPVEIKAVKLTSSRTQLPYEYYSLPFCQPSKITYKAENLGEVLRGDRIVNTPFQVLMNSEKKCEVLCSQSNKPVTLTVEQSRLVAERITEDYYVHLIADNLPVATRLELYSNRDSDDKKKEKDVQFEHGYRLGFTDVNKIYLHNHLSFILYYHREDMEEDQEHTYRVVRFEVIPQSIRLEDLKADEKSSCTLPEGTNSSPQEIDPTKENQLYFTYSVHWEESDIKWASRWDTYLTMSDVQIHWFSIINSVVVVFFLSGILSMIIIRTLRKDIANYNKEDDIEDTMEESGWKLVHGDVFRPPQYPMILSSLLGSGIQLFCMILIVIFVAMLGMLSPSSRGALMTTACFLFMFMGVFGGFSAGRLYRTLKGHRWKKGAFCTATLYPGVVFGICFVLNCFIWGKHSSGAVPFPTMVALLCMWFGISLPLVYLGYYFGFRKQPYDNPVRTNQIPRQIPEQRWYMNRFVGILMAGILPFGAMFIELFFIFSAIWENQFYYLFGFLFLVFIILVVSCSQISIVMVYFQLCAEDYRWWWRNFLVSGGSAFYVLVYAIFYFVNKLDIVEFIPSLLYFGYTALMVLSFWLLTGTIGFYAAYMFVRKIYAAVKID

SEQ ID NO: 90634 - protein, 85 aa, Homo sapiens
  Payload ID: 18123
  Gene Name: transmembrane 9 superfamily protein member 4
  ENSP ID: ENSP00000390314
MATAMDWLPWSLLLFSLMCETSAFYVPGVAPINFHQNDPVEIKAVKLTSSRTQLPYEYYSLPFCQPSKITYKAENLGRRKERTGS

SEQ ID NO: 90635 - protein, 68 aa, Homo sapiens
  Payload ID: 18123
  Gene Name: transmembrane 9 superfamily protein member 4
  ENSP ID: ENSP00000404755
MCETSAFYVPGVAPINFHQNDPVEIKAVKLTSSRTQLPYEYYSLPFCQPSKITYKAENLGSHEQREEV

SEQ ID NO: 90636 - protein, 85 aa, Homo sapiens; identical to SEQ ID NO: 90634
  Payload ID: 18123
  Gene Name: transmembrane 9 superfamily protein member 4
  ENSP ID: ENSP00000413382

SEQ ID NO: 90637 - protein, 653 aa, Homo sapiens
  Payload ID: 18124
  Gene Name: transmembrane and coiled-coil domain family 1
  Uniprot ID: O94876
  ENSP ID: ENSP00000376930
MEPSGSEQLFEDPDPGGKSQDAEARKQTESEQKLSKMTHNALENINVIGQGLKHLFQHQRRRSSVSPHDVQQIQADPEPEMDLESQNACAEIDGVPTHPTALNRVLQQIRVPPKMKRGTSLHSRRGKPEAPKGSPQINRKSGQEMTAVMQSGRPRSSSTTDAPTSSAMMEIACAAAAAAAACLPGEEGTAERIERLEVSSLAQTSSAVASSTDGSIHTDSVDGTPDPQRTKAAIAHLQQKILKLTEQIKIAQTARDDNVAEYLKLANSADKQQAARIKQVFEKKNQKSAQTILQLQKKLEHYHRKLREVEQNGIPRQPKDVFRDMHQGLKDVGAKVTGFSEGVVDSVKGGFSSFSQATHSAAGAVVSKPREIASLIRNKFGSADNIPNLKDSLEEGQVDDAGKALGVISNFQSSPKYGSEEDCSSATSGSVGANSTTGGIAVGASSSKTNTLDMQSSGFDALLHEIQEIRETQARLEESFETLKEHYQRDYSLIMQTLQEERYRCERLEEQLNDLTELHQNEILNLKQELASMEEKIAYQSYERARDIQEALEACQTRISKMELQQQQQQVVQLEGLENATARNLLGKLINILLAVMAVLLVFVSTVANCVVPLMKTRNRTFSTLFLVVFIAFLWKHWDALFSYVERFFSSPR

SEQ ID NO: 90638 - protein, 539 aa, Homo sapiens
  Payload ID: 18124
  Gene Name: transmembrane and coiled-coil domain family 1
  ENSP ID: ENSP00000389892
MKRGTSLHSRRGKPEAPKGSPQINRKSGQEMTAVMQSGRPRSSSTTDAPTSSAMMEIACAAAAAAAACLPGEEGTAERIERLEVSSLAQTSSAVASSTDGSIHTDSVDGTPDPQRTKAAIAHLQQKILKLTEQIKIAQTARDDNVAEYLKLANSADKQQAARIKQVFEKKNQKSAQTILQLQKKLEHYHRKLREVEQNGIPRQPKDVFRDMHQGLKDVGAKVTGFSEGVVDSVKGGFSSFSQATHSAAGAVVSKPREIASLIRNKFGSADNIPNLKDSLEEGQVDDAGKALGVISNFQSSPKYGSEEDCSSATSGSVGANSTTGGIAVGASSSKTNTLDMQSSGFDALLHEIQEIRETQARLEESFETLKEHYQRDYSLIMQTLQEERYRCERLEEQLNDLTELHQNEILNLKQELASMEEKIAYQSYERARDIQEALEACQTRISKMELQQQQQQVVQLEGLENATARNLLGKLINILLAVMAVLLVFVSTVANCVVPLMKTRNRTFSTLFLVVFIAFLWKHWDALFSYVERFFSSPR

SEQ ID NO: 90639 - protein, 329 aa, Homo sapiens
  Payload ID: 18124
  Gene Name: transmembrane and coiled-coil domain family 1
  ENSP ID: ENSP00000404711
MHQGLKDVGAKVTGFSEGVVDSVKGGFSSFSQATHSAAGAVVSKPREIASLIRNKFGSADNIPNLKDSLEEGQVDDAGKALGVISNFQSSPKYGSEEDCSSATSGSVGANSTTGGIAVGASSSKTNTLDMQSSGFDALLHEIQEIRETQARLEESFETLKEHYQRDYSLIMQTLQEERYRCERLEEQLNDLTELHQNEILNLKQELASMEEKIAYQSYERARDIQEALEACQTRISKMELQQQQQQVVQLEGLENATARNLLGKLINILLAVMAVLLVFVSTVANCVVPLMKTRNRTFSTLFLVVFIAFLWKHWDALFSYVERFFSSPR

SEQ ID NO: 90640 - protein, 83 aa, Homo sapiens
  Payload ID: 18124
  Gene Name: transmembrane and coiled-coil domain family 1
  ENSP ID: ENSP00000422544
MKRGTSLHSRRGKPEAPKGSPQINRKSGQEMTAVMQSGRPRSSSTTDAPTSSAMMEIACAAAAAAAACLPGEEGTAERIERLE

SEQ ID NO: 90641 - protein, 17 aa, Homo sapiens
  Payload ID: 18124
  Gene Name: transmembrane and coiled-coil domain family 1
  ENSP ID: ENSP00000426180
MEEKIAYQSYERARDIQ

SEQ ID NO: 90642 - protein, 6 aa, Homo sapiens
  Payload ID: 18124
  Gene Name: transmembrane and coiled-coil domain family 1
  ENSP ID: ENSP00000427352
MKRGTS

SEQ ID NO: 90643 - protein, 469 aa, Homo sapiens
  Payload ID: 18125
  Gene Name: transmembrane and coiled-coil domain family 2
  ENSP ID: ENSP00000329436
MKSKEEETAVDKGDLVALSLPAGHGDTDGPISLDVPDGAPDPQRTKAAIDHLHQKILKITEQIKIEQEARDDNVAEYLKLANNADKQQVSRIKQVFEKKNQKSAQTIAQLHKKLEHYRRRLKEIEQNGPSRQPKDVLRDMQQGLKDVGANVRAGISGFGGGVVEGVKGSLSGLSQATHTAVVSKPREFASLIRNKFGSADNIAHLKDPLEDGPPEEAARALSGSATLVSSPKYGSDDECSSASASSAGAGSNSGAGPGGALGSPKSNALYGAPGNLDALLEELREIKEGQSHLEDSMEDLKTQLQRDYTYMTQCLQEERYRYERLEEQLNDLTELHQNEMTNLKQELASMEEKVAYQSYERARDIQEAVESCLTRVTKLELQQQQQQVVQLEGVENANARALLGKFINVILALMAVLLVFVSTIANFITPLMKTRLRITSTTLLVLVLFLLWKHWDSLTYLLEHVLLPS

SEQ ID NO: 90644 - protein, 484 aa, Homo sapiens
  Payload ID: 18125
  Gene Name: transmembrane and coiled-coil domain family 2
  ENSP ID: ENSP00000331842
MNQVVQPLMSRHSACRGSQAHLSWVDKGDLVALSLPAGHGDTDGPISLDVPDGAPDPQRTKAAIDHLHQKILKITEQIKIEQEARDDNVAEYLKLANNADKQQVSRIKQVFEKKNQKSAQTIAQLHKKLEHYRRRLKEIEQNGPSRQPKDVLRDMQQGLKDVGANVRAGISGFGGGVVEGVKGSLSGLSQATHTAVVSKPREFASLIRNKFGSADNIAHLKDPLEDGPPEEAARALSGSATLVSSPKYGSDDECSSASASSAGAGSNSGAGPGGALGSPKSNALYGAPGNLDALLEELREIKEGQSHLEDSMEDLKTQLQRDYTYMTQCLQEERYRYERLEEQLNDLTELHQNEMTNLKQELASMEEKVAYQSYERARDIQEAVESCLTRVTKLELQQQQQQVVQLEGVENANARALLGKFINVILALMAVLLVFVSTIANFITPLMKTRLRITSTTLLVLVLFLLWKHWDSLTYLLEHVLLPS

SEQ ID NO: 90645 - protein, 709 aa, Homo sapiens
  Payload ID: 18125
  Gene Name: transmembrane and coiled-coil domain family 2
  Uniprot ID: O75069
  ENSP ID: ENSP00000350718
MKRCRSDELQQQQGEEDGAGLEDAASHLPGADLRPGETTGANSAGGPTSDAGAAAAPNPGPRSKPPDLKKIQQLSEGSMFGHGLKHLFHSRRRSREREHQTSQDSQQHQQQQGMSDHDSPDEKERSPEMHRVSYAMSLHDLPARPTAFNRVLQQIRSRPSIKRGASLHSSSGGGSSGSSSRRTKSSSLEPQRGSPHLLRKAPQDSSLAAILHQHQCRPRSSSTTDTALLLADGSNVYLLAEEAEGIGDKVDKGDLVALSLPAGHGDTDGPISLDVPDGAPDPQRTKAAIDHLHQKILKITEQIKIEQEARDDNVAEYLKLANNADKQQVSRIKQVFEKKNQKSAQTIAQLHKKLEHYRRRLKEIEQNGPSRQPKDVLRDMQQGLKDVGANVRAGISGFGGGVVEGVKGSLSGLSQATHTAVVSKPREFASLIRNKFGSADNIAHLKDPLEDGPPEEAARALSGSATLVSSPKYGSDDECSSASASSAGAGSNSGAGPGGALGSPKSNALYGAPGNLDALLEELREIKEGQSHLEDSMEDLKTQLQRDYTYMTQCLQEERYRYERLEEQLNDLTELHQNEMTNLKQELASMEEKVAYQSYERARDIQEAVESCLTRVTKLELQQQQQQVVQLEGVENANARALLGKFINVILALMAVLLVFVSTIANFITPLMKTRLRITSTTLLVLVLFLLWKHWDSLTYLLEHVLLPS

SEQ ID NO: 90646 - protein, 256 aa, Homo sapiens
  Payload ID: 18125
  Gene Name: transmembrane and coiled-coil domain family 2
  ENSP ID: ENSP00000356127
MNQVVQPLMSRHSACRGSQAHLSWLWTSVPLCWPLTEFPAGTVKMKSKEEETAVDKGDLVALSLPAGHGDTDGPISLDVPDGAPDPQRTKAAIDHLHQKILKITEQIKIEQEARDDNVAEYLKLANNADKQQVSRIKQVFEKKNQKSAQTIAQLHKKLEHYRRRLKEIEQNGPSRQPKDVLRDMQQGLKDVGANVRAGISGFGGGVVEGVKGSLSGLSQATHTAVVSKPREFASLIRNKFGSADNIAHLKDPLEDG

SEQ ID NO: 90647 - protein, 631 aa, Homo sapiens
  Payload ID: 18125
  Gene Name: transmembrane and coiled-coil domain family 2
  Uniprot ID: O75069
  ENSP ID: ENSP00000437943
MFGHGLKHLFHSRRRSREREHQTSQDSQQHQQQQGMSDHDSPDEKERSPEMHRVSYAMSLHDLPARPTAFNRVLQQIRSRPSIKRGASLHSSSGGGSSGSSSRRTKSSSLEPQRGSPHLLRKAPQDSSLAAILHQHQCRPRSSSTTDTALLLADGSNVYLLAEEAEGIGDKVDKGDLVALSLPAGHGDTDGPISLDVPDGAPDPQRTKAAIDHLHQKILKITEQIKIEQEARDDNVAEYLKLANNADKQQVSRIKQVFEKKNQKSAQTIAQLHKKLEHYRRRLKEIEQNGPSRQPKDVLRDMQQGLKDVGANVRAGISGFGGGVVEGVKGSLSGLSQATHTAVVSKPREFASLIRNKFGSADNIAHLKDPLEDGPPEEAARALSGSATLVSSPKYGSDDECSSASASSAGAGSNSGAGPGGALGSPKSNALYGAPGNLDALLEELREIKEGQSHLEDSMEDLKTQLQRDYTYMTQCLQEERYRYERLEEQLNDLTELHQNEMTNLKQELASMEEKVAYQSYERARDIQEAVESCLTRVTKLELQQQQQQVVQLEGVENANARALLGKFINVILALMAVLLVFVSTIANFITPLMKTRLRITSTTLLVLVLFLLWKHWDSLTYLLEHVLLPS

SEQ ID NO: 90648 - protein, 477 aa, Homo sapiens
  Payload ID: 18126
  Gene Name: transmembrane and coiled-coil domain family 3
  Uniprot ID: Q9ULS5
  ENSP ID: ENSP00000261226
MPGSDTALTVDRTYSYPGRHHRCKSRVERHDMNTLSLPLNIRRGGSDTNLNFDVPDGILDFHKVKLTADSLKQKILKVTEQIKIEQTSRDGNVAEYLKLVNNADKQQAGRIKQVFEKKNQKSAHSIAQLQKKLEQYHRKLREIEQNGASRSSKDISKDHLKDIHRSLKDAHVKSRTAPHCMESSKSGMPGVSLTPPVFVFNKSREFANLIRNKFGSADNIAHLKNSLEEFRPEASARAYGGSATIVNKPKYGSDDECSSGTSGSADSNGNQSFGAGGASTLDSQGKLAVILEELREIKDTQAQLAEDIEALKVQFKREYGFISQTLQEERYRYERLEDQLHDLTDLHQHETANLKQELASIEEKVAYQAYERSRDIQEALESCQTRISKLELHQQEQQALQTDTVNAKVLLGRCINVILAFMTVILVCVSTIAKFVSPMMKSRCHILGTFFAVTLLAIFCKNWDHILCAIERMIIPR

SEQ ID NO: 90649 - protein, 446 aa, Homo sapiens
  Payload ID: 18126
  Gene Name: transmembrane and coiled-coil domain family 3
  ENSP ID: ENSP00000449888
MNTLSLPLNIRRGGSDTNLNFDVPDGILDFHKVKLTADSLKQKILKVTEQIKIEQTSRDGNVAEYLKLVNNADKQQAGRIKQVFEKKNQKSAHSIAQLQKKLEQYHRKLREIEQNGASRSSKDISKDHLKDIHRSLKDAHVKSRTAPHCMESSKSGMPGVSLTPPVFVFNKSREFANLIRNKFGSADNIAHLKNSLEEFRPEASARAYGGSATIVNKPKYGSDDECSSGTSGSADSNGNQSFGAGGASTLDSQGKLAVILEELREIKDTQAQLAEDIEALKVQFKREYGFISQTLQEERYRYERLEDQLHDLTDLHQHETANLKQELASIEEKVAYQAYERSRDIQEALESCQTRISKLELHQQEQQALQTDTVNAKVLLGRCINVILAFMTVILVCVSTIAKFVSPMMKSRCHILGTFFAVTLLAIFCKNWDHILCAIERMIIPR

SEQ ID NO: 90650 - protein, 132 aa, Homo sapiens
  Payload ID: 18126
  Gene Name: transmembrane and coiled-coil domain family 3
  ENSP ID: ENSP00000450078
MNTLSLPLNIRRGGSDTNLNFDVPDGILDFHKVKLTADSLKQKILKVTEQIKIEQTSRDGNVAEYLKLVNNADKQQAGRIKQVFEKKNQKSAHSIAQLQKKLEQYHRKLREIEQNGASRSSKDISKDHLKDI

SEQ ID NO: 90651 - protein, 239 aa, Homo sapiens
  Payload ID: 18127
  Gene Name: transmembrane and coiled-coil domains 1
  ENSP ID: ENSP00000356856
MPRKRKCDLRAVRVGLLLGGGGVYGSRFRFTFPGCRALSPWRVRVQRRRCEMSTMFADTLLIVFISVCTALLAEGITWVLVYRTDKYKRLKAEVEKQSKKLEKKKETITESAGRQQKKKIERQEEKLKNNNRDLSMVRMKSMFAIGFCFTALMGMFNSIFDGRVVAKLPFTPLSYIQGLSHRNLLGDDTTDCSFIFLYILCTMSIRQNIQKILGLAPSRAATKQAGGFLGPPPPSGKFS

SEQ ID NO: 90652 - protein, 188 aa, Homo sapiens
  Payload ID: 18127
  Gene Name: transmembrane and coiled-coil domains 1
  Uniprot ID: Q9UM00
  ENSP ID: ENSP00000375975
MSTMFADTLLIVFISVCTALLAEGITWVLVYRTDKYKRLKAEVEKQSKKLEKKKETITESAGRQQKKKIERQEEKLKNNNRDLSMVRMKSMFAIGFCFTALMGMFNSIFDGRVVAKLPFTPLSYIQGLSHRNLLGDDTTDCSFIFLYILCTMSIRQNIQKILGLAPSRAATKQAGGFLGPPPPSGKFS

SEQ ID NO: 90653 - protein, 143 aa, Homo sapiens
  Payload ID: 18127
  Gene Name: transmembrane and coiled-coil domains 1
  ENSP ID: ENSP00000462300
MESIAEFSLVSGITWVLVYRTDKYKRLKAEVEKQSKKLEKKKETITESAGRQQKKKIERQEEKLKNNNRDLSMVRMKSMFAIGFCFTALMGMFNSIFDGRVVAKLPFTPLSYIQGLSHRNLLGDDTTDCSFIFLYILCTMSIR

SEQ ID NO: 90654 - protein, 104 aa, Homo sapiens
  Payload ID: 18127
  Gene Name: transmembrane and coiled-coil domains 1
  ENSP ID: ENSP00000462588
MVRMKSMFAIGFCFTALMGMFNSIFDGRVVAKLPFTPLSYIQGLSHRNLLGDDTTDCSFIFLYILCTMSIRQNIQKILGLAPSRAATKQAGGFLGPPPPSGKFS

SEQ ID NO: 90655 - protein, 152 aa, Homo sapiens
  Payload ID: 18127
  Gene Name: transmembrane and coiled-coil domains 1
  ENSP ID: ENSP00000463105
MPRKRKCDLRAVRVGLLLGGGGVYGSRFRFTFPGCRALSPWRVRVQRRRCEMSTMFADTLLIVFISVCTALLAEGITWVLVYRTDKYKRLKAEVEKQSKKLEKKKETITESAGRQQKKKIDRVSPYRPGWSTVTRSWPTAASNSWAQVILPL

SEQ ID NO: 90656 - protein, 104 aa, Homo sapiens; identical to SEQ ID NO: 90654
  Payload ID: 18127
  Gene Name: transmembrane and coiled-coil domains 1
  ENSP ID: ENSP00000463951

SEQ ID NO: 90657 - protein, 95 aa, Homo sapiens
  Payload ID: 18127
  Gene Name: transmembrane and coiled-coil domains 1
  ENSP ID: ENSP00000464127
  MOD_RES (1)..(1): Any amino acid
XCDLRAVRVGLLLGGGGVYGSRFRFTFPGCRALSPWRVRVQRRRCEMSTMFADTLLIVFISVCTALLAEGITWVLVYRTDKYKRLKAEVEKQSKK

SEQ ID NO: 90658 - protein, 239 aa, Homo sapiens; identical to SEQ ID NO: 90651
  Payload ID: 18127
  Gene Name: transmembrane and coiled-coil domains 1
  ENSP ID: ENSP00000480514

SEQ ID NO: 90659 - protein, 152 aa, Homo sapiens; identical to SEQ ID NO: 90655
  Payload ID: 18127
  Gene Name: transmembrane and coiled-coil domains 1
  ENSP ID: ENSP00000485789

SEQ ID NO: 90660 - protein, 182 aa, Homo sapiens
  Payload ID: 18128
  Gene Name: transmembrane and coiled-coil domains 2
  Uniprot ID: Q7Z6W1
  ENSP ID: ENSP00000361852
MSTSSSSSWDNLLESLSLSTVWNWIQASFLGETSAPQQTSLGLLDNLAPAVQIILRISFLILLGIGIYALWKRSIQSIQKTLLFVITLYKLYKKGSHIFEALLANPEGSGLRIQDNNNLFLSLGLQEKILKKLKTVENKMKNLEGIIVAQKPATKRDCSSEPYCSCSDCQSPLSTSGFTSPI

SEQ ID NO: 90661 - protein, 414 aa, Homo sapiens
  Payload ID: 18129
  Gene Name: transmembrane and coiled-coil domains 3
  Uniprot ID: Q6UWJ1
  ENSP ID: ENSP00000364540
MKVLGRSFFWVLFPVLPWAVQAVEHEEVAQRVIKLHRGRGVAAMQSRQWVRDSCRKLSGLLRQKNAVLNKLKTAIGAVEKDVGLSDEEKLFQVHTFEIFQKELNESENSVFQAVYGLQRALQGDYKDVVNMKESSRQRLEALREAAIKEETEYMELLAAEKHQVEALKNMQHQNQSLSMLDEILEDVRKAADRLEEEIEEHAFDDNKSVKGVNFEAVLRVEEEEANSKQNITKREVEDDLGLSMLIDSQNNQYILTKPRDSTIPRADHHFIKDIVTIGMLSLPCGWLCTAIGLPTMFGYIICGVLLGPSGLNSIKSIVQVETLGEFGVFFTLFLVGLEFSPEKLRKVWKISLQGPCYMTLLMIAFGLLWGHLLRIKPTQSVFISTCLSLSSTPLVSRFLMGSARGDKEGNRTAL

SEQ ID NO: 90662 - protein, 677 aa, Homo sapiens
  Payload ID: 18129
  Gene Name: transmembrane and coiled-coil domains 3
  Uniprot ID: Q6UWJ1
  ENSP ID: ENSP00000389399
MKVLGRSFFWVLFPVLPWAVQAVEHEEVAQRVIKLHRGRGVAAMQSRQWVRDSCRKLSGLLRQKNAVLNKLKTAIGAVEKDVGLSDEEKLFQVHTFEIFQKELNESENSVFQAVYGLQRALQGDYKDVVNMKESSRQRLEALREAAIKEETEYMELLAAEKHQVEALKNMQHQNQSLSMLDEILEDVRKAADRLEEEIEEHAFDDNKSVKGVNFEAVLRVEEEEANSKQNITKREVEDDLGLSMLIDSQNNQYILTKPRDSTIPRADHHFIKDIVTIGMLSLPCGWLCTAIGLPTMFGYIICGVLLGPSGLNSIKSIVQVETLGEFGVFFTLFLVGLEFSPEKLRKVWKISLQGPCYMTLLMIAFGLLWGHLLRIKPTQSVFISTCLSLSSTPLVSRFLMGSARGDKEGDIDYSTVLLGMLVTQDVQLGLFMAVMPTLIQAGASASSSIVVEVLRILVLIGQILFSLAAVFLLCLVIKKYLIGPYYRKLHMESKGNKEILILGISAFIFLMLTVTELLDVSMELGCFLAGALVSSQGPVVTEEIATSIEPIRDFLAIVFFASIGLHVFPTFVAYELTVLVFLTLSVVVMKFLLAALVLSLILPRSSQYIKWIVSAGLAQVSEFSFVLGSRARRAGVISREVYLLILSVTTLSLLLAPVLWRAAITRCVPRPERRSSL

SEQ ID NO: 90663 - protein, 145 aa, Homo sapiens
  Payload ID: 18129
  Gene Name: transmembrane and coiled-coil domains 3
  ENSP ID: ENSP00000478818
  MOD_RES (1)..(1): Any amino acid
XIFQKELNESENSVFQAVYGLQRALQGDYKDVVNMKESSRQRLEALREAAIKEETEYMELLAAEKHQVEALKNMQHQNQSLSMLDEILEDVRKAADRLEEEIEEHAFDDNKSVSVPEQLLLHLLSHSLIRRHVVEIVHVYVFNVD

SEQ ID NO: 90664 - protein, 94 aa, Homo sapiens
  Payload ID: 18129
  Gene Name: transmembrane and coiled-coil domains 3
  ENSP ID: ENSP00000479613
FLLAALVLSLILPRSSQYIKWIVSAGLAQVSEFSFVLGSRARRAGVISREVYLLILSVTTLSLLLAPVLWRAAITRPHLPTLAVHIEGTEAFEP

SEQ ID NO: 90665 - protein, 163 aa, Homo sapiens
  Payload ID: 18129
  Gene Name: transmembrane and coiled-coil domains 3
  ENSP ID: ENSP00000481060
NITKREVEDDLGLSMLIDSQNNQYILTKPRDSTIPRADHHFIKDIVTIGMLSLPCGWLCTAIGLPTMFGYIICGVLLGPSGLNSIKVWKISLQGPCYMTLLMIAFGLLWGHLLRIKPTQSVFISTCLSLSSTPLVSRFLMGSARGDKEGDIDYSTVLLGMLVT

SEQ ID NO: 90666 - protein, 126 aa, Homo sapiens
  Payload ID: 18129
  Gene Name: transmembrane and coiled-coil domains 3
  ENSP ID: ENSP00000482311
ITKREVEDDLGLSMLIDSQNNQYILTKPRDSTIPRADHHFIKDIVTIGMLSLPCGWLCTAIGLPTMFGYIICGVLLGPSGLNSIKSIVQVETLGEFGVFFTLFLVGLEFSPEKLRKVRTSSTCYCS

SEQ ID NO: 90667 - protein, 524 aa, Homo sapiens
  Payload ID: 18129
  Gene Name: transmembrane and coiled-coil domains 3
  Uniprot ID: Q6UWJ1
  ENSP ID: ENSP00000484053
MKVLGRSFFWVLFPVLPWAVQAVEHEEVAQRVIKLHRGRGVAAMQSRQWVRDSCRKLSGLLRQKNAVLNKLKTAIGAVEKDVGLSDEEKLFQVHTFEIFQKELNESENSVFQAVYGLQRALQGDYKDVVNMKESSRQRLEALREAAIKEETEYMELLAAEKHQVEALKNMQHQNQSLSMLDEILEDVRKAADRLEEEIEEHAFDDNKSVKGVNFEAVLRVEEEEANSKQNITKREVEDDLGLSMLIDSQNNQYILTKPRDSTIPRADHHFIKDIVTIGMLSLPCGWLCTAIGLPTMFGYIICGVLLGPSGLNSIKSIVQVETLGEFGVFFTLFLVGLEFSPEKLRKVWKISLQGPCYMTLLMIAFGLLWGHLLRIKPTQSVFISTCLSLSSTPLVSRFLMGSARGDKEGDIDYSTVLLGMLVTQDVQLGLFMAVMPTLIQAGASASSSIVVEVLRILVLIGQILFSLAAVFLLCLVIKKYLIGPYYRKLHMESKGNKEILILGISAFIFLMLTVILKLCVIYVI

SEQ ID NO: 90668 - protein, 84 aa, Homo sapiens
  Payload ID: 18129
  Gene Name: transmembrane and coiled-coil domains 3
  ENSP ID: ENSP00000484911
ILPRSSQYIKWIVSAGLAQVSEFSFVLGSRARRAGVISREVYLLILSVTTLSLLLAPVLWRAAITRPHLPTLAVHIEGTEAFEP

SEQ ID NO: 90669 - protein, 634 aa, Homo sapiens
  Payload ID: 18130
  Gene Name: transmembrane and coiled-coil domains 4
  Uniprot ID: Q5TGY1
  ENSP ID: ENSP00000294543
MAMWNRPCQRLPQQPLVAEPTAEGEPHLPTGRELTEANRFAYAALCGISLSQLFPEPEHSSFCTEFMAGLVQWLELSEAVLPTMTAFASGLGGEGADVFVQILLKDPILKDDPTVITQDLLSFSLKDGHYDARARVLVCHMTSLLQVPLEELDVLEEMFLESLKEIKEEESEMAEASRKKKENRRKWKRYLLIGLATVGGGTVIGVTGGLAAPLVAAGAATIIGSAGAAALGSAAGIAIMTSLFGAAGAGLTGYKMKKRVGAIEEFTFLPLTEGRQLHITIAVTGWLASGKYRTFSAPWAALAHSREQYCLAWEAKYLMELGNALETILSGLANMVAQEALKYTVLSGIVAALTWPASLLSVANVIDNPWGVCLHRSAEVGKHLAHILLSRQQGRRPVTLIGFSLGARVIYFCLQEMAQEKDCQGIIEDVILLGAPVEGEAKHWEPFRKVVSGRIINGYCRGDWLLSFVYRTSSVQLRVAGLQPVLLQDRRVENVDLTSVVSGHLDYAKQMDAILKAVGIRTKPGWDEKGLLLAPGCLPSEEPRQAAAAASSGETPHQVGQTQGPISGDTSKLAMSTDPSQAQVPVGLDQSEGASLPAAASPERPPICSHGMDPNPLGCPDCACKTQGPSTGLD

SEQ ID NO: 90670 - protein, 580 aa, Homo sapiens
  Payload ID: 18130
  Gene Name: transmembrane and coiled-coil domains 4
  ENSP ID: ENSP00000364269
MAMWNRPCQRLPQQPLVAEPTAEGEPHLPTGRELTEANRFAYAALCGISLSQLFPEPEHSSFCTEFMAGLVQWLELSEAVLPTMTAFASGLGGEGADVFVQILLKDPILKDDPTVITQDLLSFSLKDGHYDARARVLVCHMTSLLQVPLEELDVLEEMFLESLKEIKEEESEMAEASRKKKENRRKWKRYLLIGLATVGGGTVIGVTGGLAAPLVAAGAATIIGSAGAAALGSAAGIAIMTSLFGAAGAGLTGYKMKKRVGAIEEFTFLPLTEGRQLHITIAVTGWLASGKYRTFSAPWAALAHSREQYCLAWEAKYLMELGNALETILSGLANMVAQEALKYTVLSGIVAALTWPASLLSVANVIDNPWGVCLHRSAEVGKHLAHILLSRQQGRRPVTLIGFSLGARVIYFCLQEMAQEKDCQGIIEDVILLGAPVEGEAKHWEPFRKVVSGRIINGYCRGDWLLSFVYRTSSVQLRVAGLQPVLLQDRRVENVDLTSVVSGHLDYAKQMDAILKAVGIRTKPGWDEKGLLLAPGCLPSEEPRQAAAAASSALESGCPSGGPEGSLGPEAPTPALPWPQ

SEQ ID NO: 90671 - protein, 288 aa, Homo sapiens
  Payload ID: 18131
  Gene Name: transmembrane and coiled-coil domains 5A
  Uniprot ID: Q8N6Q1
  ENSP ID: ENSP00000327234
MEISRLAQSKRNIISLNMDLERDTQRIDEANQKLLLKIQEREDKIQRLESEIIQTRGLVEDEEWEKENRTTMERERALQELEEETARLERKNKTLVHSITELQQKLTRKSQKITNCEQSSPDGALEETKVKLQQLEASYACQEKELLKVMKEYAFVTQLCEDQALYIKKYQETLKKIEEELEALFLEREVSKLVSMNPVEKEHTSQNNEGTPTQKTARLFSKKIFCCLFFITLFFIRLLSYMFFHVRFINPDLLVNVLPKVLGRSTLWKLRCFFFPSLTLETEDMLPH

SEQ ID NO: 90672 - protein, 190 aa, Homo sapiens
  Payload ID: 18131
  Gene Name: transmembrane and coiled-coil domains 5A
  ENSP ID: ENSP00000453047
MEISRLAQSKRNIISLNMDLERDTQRIDEANQKLLLKIQEREDKIQRLESEIIQTRGLVEDEEWEKENRTTMERERALQELEEETARLERKNKTLVHSITELQQKLTRKSQKITNCEQSSPDGALEETKVKLQQLEASYACQEKELLKVMKEYAFVTQLCEDQALYIKKYQETLKKIEEELEALFLEREV

SEQ ID NO: 90673 - protein, 70 aa, Homo sapiens
  Payload ID: 18131
  Gene Name: transmembrane and coiled-coil domains 5A
  ENSP ID: ENSP00000453162
MEISRLAQSKRNIISLNMDLERDTQRIDEANQKLLLKIQEREDKIQRLESEIIQTRGLVEDEEWEKENRT

SEQ ID NO: 90674 - protein, 144 aa, Homo sapiens
  Payload ID: 18131
  Gene Name: transmembrane and coiled-coil domains 5A
  ENSP ID: ENSP00000453271
MEISRLAQSKRNIISLNMDLERDTQRIDEANQKLLLKIQEREDKIQRLESEIIQTRGLVEDEEWEKENRTTMERERALQELEEETARLERKNKTLVHSITELQQKLTRKSQKITNCEQSSPDGALEETKVKLQQLEASYACQEK

SEQ ID NO: 90675 - protein, 81 aa, Homo sapiens
  Payload ID: 18131
  Gene Name: transmembrane and coiled-coil domains 5A
  ENSP ID: ENSP00000453369
MEISRLAQSKRNIISLNMDLERDTQRIDEANQKLLLKIQEREDKIQRLESEIIQTRGLVEDEEWEKENRTTMERERALQEL

SEQ ID NO: 90676 - protein, 190 aa, Homo sapiens
  Payload ID: 18131
  Gene Name: transmembrane and coiled-coil domains 5A
  ENSP ID: ENSP00000453561
MEISRLAQSKRNIISLNMDLERDTQRIDEANQKLLLKIQEREDKIQRLESEIIQTRGLVEDEEWEKENRTTMERERALQELEEETARLERKNKTLVHSITELQQKLTRKSQKITNCEQSSPDGALEETKVKLQQLEASYACQEKELLKVMKEYAFVTQLCEDQALYIKVELLEVPGNVEENRRRTRGSVP

SEQ ID NO: 90677 - protein, 228 aa, Homo sapiens
  Payload ID: 18131
  Gene Name: transmembrane and coiled-coil domains 5A
  Uniprot ID: Q8N6Q1
  ENSP ID: ENSP00000454112
MEISRLAQSKRNIISLNMDLERDTQRIDEANQKLLLKIQEREDKIQRLESEIIQTRGLVEDEEWEKENRTTMERERALQELEEETARLERKNKTLVHSITELQQKLTRKSQKITNCEQSSPDGALEETKVKLQQLEASYACQEKELLKVMKEYAFVTQLCEDQALYIKKYQETLKKIEEELEALFLEREVSKLVSMNPVEKEHTSQNNEGTPTQKTARLFSKKWASSF

SEQ ID NO: 90678 - protein, 499 aa, Homo sapiens
  Payload ID: 18132
  Gene Name: transmembrane and coiled-coil domains 6
  Uniprot ID: Q96DC7
  ENSP ID: ENSP00000252100
MWSRRQGRLRPTVCGVEELRRRRREREAALRKARREQQLVSKRLLRNDAPEEAGEGCVAAILGETEVQQFLRQAQRGTEEKEREGALVSLRRGLQHPETQQTFIRLEGSMRTLVGLLTSNQALLQLEAARCLHELSHSEQSTVAEACLPATSYLLTYLSSHSSDFIELCLYTLGNLIVESEAVRRQLLPQGIVPALAACIQSPHVAVLEALGYALSQLLQAEEAPEKIIPPASASSSILASTLPQHMLQMLQPGPKLNPGVAVEFAWCLHYIICSQVSNPLLIGHGALSTLGLLLLDLAGAVQKTEDAGLELLACPVLRCLSNLLTEAAVETVGGQMQLRDERVVAALFILLQFFFQKQPSLLPEGLWLLNNLTANSPSFCTSLLSLDLIEPLLQLLPVSNVVSVMVLTVLCNVAEKGPAYCQRLWPGPLLPALLHTLAFSDTEVVGQSLELLHLLFLYQPEAVQVFLQQSGLQALERHQEEAQLQDRVYALQQTALQG

SEQ ID NO: 90679 - protein, 493 aa, Homo sapiens
  Payload ID: 18132
  Gene Name: transmembrane and coiled-coil domains 6
  Uniprot ID: Q96DC7
  ENSP ID: ENSP00000378166
MWSRRQGRLRPTVCGVEELRRRRREREAALRKARREQQLVSKRLLRNDAPEEAGEGCVAAILGETEVQQFLRQAQRGTEEKEREGALVSLRRGLQHPETQQTFIRLEGSMRTLVGLLTSNQALLQLEAARCLHELSHSEQSTVAEACLPATSYLLTYLSSHSSDFIELCLYTLGNLIVESEAVRRQLLPQGIVPALAACIQSPHVAVLEALGYALSQLLQAEEAPEKIIPSILASTLPQHMLQMLQPGPKLNPGVAVEFAWCLHYIICSQVSNPLLIGHGALSTLGLLLLDLAGAVQKTEDAGLELLACPVLRCLSNLLTEAAVETVGGQMQLRDERVVAALFILLQFFFQKQPSLLPEGLWLLNNLTANSPSFCTSLLSLDLIEPLLQLLPVSNVVSVMVLTVLCNVAEKGPAYCQRLWPGPLLPALLHTLAFSDTEVVGQSLELLHLLFLYQPEAVQVFLQQSGLQALERHQEEAQLQDRVYALQQTALQG

SEQ ID NO: 90680 - protein, 57 aa, Homo sapiens
  Payload ID: 18132
  Gene Name: transmembrane and coiled-coil domains 6
  ENSP ID: ENSP00000421613
MRTLVGLLTSNQALLQLEAARCLHELSHSEQSTVAEACLPATSYLLTYLSSHSSDFI

SEQ ID NO: 90681 - protein, 101 aa, Homo sapiens
  Payload ID: 18132
  Gene Name: transmembrane and coiled-coil domains 6
  ENSP ID: ENSP00000423297
MWSRRQGRLRPTVCGVEELRRRRREREAALRKARREQQLVSKRLLRNDAPEEAGEGCVAAILGETEVRGQGAAVPAASPAGDRGKGERGGSGQPSSRLAAP

SEQ ID NO: 90682 - protein, 43 aa, Homo sapiens
  Payload ID: 18132
  Gene Name: transmembrane and coiled-coil domains 6
  ENSP ID: ENSP00000424937
MWSRRQGRLRPTVCGVEELRRRRREREHCGRRGGSSSWSARGC

SEQ ID NO: 90683 - protein, 43 aa, Homo sapiens; identical to SEQ ID NO: 90682
  Payload ID: 18132
  Gene Name: transmembrane and coiled-coil domains 6
  ENSP ID: ENSP00000426221

SEQ ID NO: 90684 - protein, 43 aa, Homo sapiens; identical to SEQ ID NO: 90682
  Payload ID: 18132
  Gene Name: transmembrane and coiled-coil domains 6
  ENSP ID: ENSP00000443223

SEQ ID NO: 90685 - protein, 43 aa, Homo sapiens; identical to SEQ ID NO: 90682
  Payload ID: 18132
  Gene Name: transmembrane and coiled-coil domains 6
  ENSP ID: ENSP00000445469

SEQ ID NO: 90686 - protein, 262 aa, Homo sapiens
  Payload ID: 18133
  Gene Name: transmembrane and immunoglobulin domain containing 1
  Uniprot ID: Q6UXZ0
  ENSP ID: ENSP00000332404
MAWKSSVIMQMGRFLLLVILFLPREMTSSVLTVNGKTENYILDTTPGSQASLICAVQNHTREEELLWYREEGRVDLKSGNKINSSSVCVSSISENDNGISFTCRLGRDQSVSVSVVLNVTFPPLLSGNDFQTVEEGSNVKLVCNVKANPQAQMMWYKNSSLLDLEKSRHQIQQTSESFQLSITKVEKPDNGTYSCIAKSSLKTESLDFHLIVKDKTVGVPIEPIIAACVVIFLTLCFGLIARRKKIMKLCMKDKDPHSETAL

SEQ ID NO: 90687 - protein, 218 aa, Homo sapiens
  Payload ID: 18133
  Gene Name: transmembrane and immunoglobulin domain containing 1
  Uniprot ID: Q6UXZ0
  ENSP ID: ENSP00000446118
MAWKSSVIMQMGRFLLLVILFLPREMTSSVLTVNGKTENYILDTTPGSQASLICAVQNHTREEELLWYREEGRVDLKSGNKINSSSVCVSSISENDNGISFTCRLGRDQSVSVSVVLNVTFPPLLSGNDFQTVEEGSNVKLVCNVKANPQAQMMWYKNSSLLDLEKSRHQIQQTSESFQLSITKVEKPDNGTYSCIAKSSLKTESLDFHLIVKALHEG

SEQ ID NO: 90688 - protein, 282 aa, Homo sapiens
  Payload ID: 18134
  Gene Name: transmembrane and immunoglobulin domain containing 2
  Uniprot ID: Q96BF3
  ENSP ID: ENSP00000301272
MGSPGMVLGLLVQIWALQEASSLSVQQGPNLLQVRQGSQATLVCQVDQATAWERLRVKWTKDGAILCQPYITNGSLSLGVCGPQGRLSWQAPSHLTLQLDPVSLNHSGAYVCWAAVEIPELEEAEGNITRLFVDPDDPTQNRNRIASFPGFLFVLLGVGSMGVAAIVWGAWFWGRRSCQQRDSGNSPGNAFYSNVLYRPRGAPKKSEDCSGEGKDQRGQSIYSTSFPQPAPRQPHLASRPCPSPRPCPSPRPGHPVSMVRVSPRPSPTQQPRPKGFPKVGEE

SEQ ID NO: 90689 - protein, 162 aa, Homo sapiens
  Payload ID: 18134
  Gene Name: transmembrane and immunoglobulin domain containing 2
  ENSP ID: ENSP00000470494
MGSPGMVLGLLVQIWDDPTQNRNRIASFPGFLFVLLGVGSMGVAAIVWGAWFWGRRSCQQRDSGNSPGNAFYSNVLYRPRGAPKKSEDCSGEGKDQRGQSIYSTSFPQPAPRQPHLASRPCPSPRPCPSPRPGHPVSMVRVSPRPSPTQQPRPKGFPKVGEE

SEQ ID NO: 90690 - protein, 278 aa, Homo sapiens
  Payload ID: 18134
  Gene Name: transmembrane and immunoglobulin domain containing 2
  Uniprot ID: Q96BF3
  ENSP ID: ENSP00000470561
MGSPGMVLGLLVQIWALQEASSLSVQQGPNLLQVRQGSQATLVCQVDQATAWERLRVKWTKDGAILCQPYITNGSLSLGVCGPQGRLSWQAPSHLTLQLDPVSLNHSGAYVCWAAVEIPELEEAEGNITRLFVDPDDPTQNRNRIASFPGFLFVLLGVGSMGVAAIVWGAWFWGRRSCQQRDSGNAFYSNVLYRPRGAPKKSEDCSGEGKDQRGQSIYSTSFPQPAPRQPHLASRPCPSPRPCPSPRPGHPVSMVRVSPRPSPTQQPRPKGFPKVGEE

SEQ ID NO: 90691 - protein, 110 aa, Homo sapiens
  Payload ID: 18134
  Gene Name: transmembrane and immunoglobulin domain containing 2
  ENSP ID: ENSP00000471821
MGSPGMVLGLLVQIWGNAFYSNVLYRPRGAPKKSEDCSGEGKDQRGQSIYSTSFPQPAPRQPHLASRPCPSPRPCPSPRPGHPVSMVRVSPRPSPTQQPRPKGFPKVGEE

SEQ ID NO: 90692 - protein, 347 aa, Homo sapiens
  Payload ID: 18135
  Gene Name: transmembrane and immunoglobulin domain containing 3
  ENSP ID: ENSP00000358730
MPNNSTALSLANVTYITMEIFIGLCAIVGNVLVICVVKLNPSLQTTTFYFIVSLALADIAVGVLVMPLAIVVSLGITIHFYSCLFMTCLLLIFTHASIMSLLAIAVDRYLRVKLTVRFRIPGLPGCILSFQLKVCFLPVMWLFILLSLALISDAMVMDEKVKRSFVLDTASAICNYNAHYKNHPKYWCRGYFRDYCNIIAFSPNSTNHVALRDTGNQLIVTMSCLTKEDTGWYWCGIQRDFARDDMDFTELIVTDDKGTLANDFWSGKDLSGNKTRSCKAPKVVRKADRSRTSILIICILITGLGIISVISHLTKRRRSQRNRRVGNTLKPFSRVLTPKEMAPTEQM

SEQ ID NO: 90693 - protein, 266 aa, Homo sapiens
  Payload ID: 18135
  Gene Name: transmembrane and immunoglobulin domain containing 3
  Uniprot ID: P0DMS9
  ENSP ID: ENSP00000358731
MEGSPAGPIEQKEARWESSWEEQPDWTLGCLSPESQFRIPGLPGCILSFQLKVCFLPVMWLFILLSLALISDAMVMDEKVKRSFVLDTASAICNYNAHYKNHPKYWCRGYFRDYCNIIAFSPNSTNHVALRDTGNQLIVTMSCLTKEDTGWYWCGIQRDFARDDMDFTELIVTDDKGTLANDFWSGKDLSGNKTRSCKAPKVVRKADRSRTSILIICILITGLGIISVISHLTKRRRSQRNRRVGNTLKPFSRVLTPKEMAPTEQM

SEQ ID NO: 90694 - protein, 172 aa, Homo sapiens
  Payload ID: 18135
  Gene Name: transmembrane and immunoglobulin domain containing 3
  ENSP ID: ENSP00000398770
GPIEQKEARWESSWEEQPDWTLGCLSPESHTNHVALRDTGNQLIVTMSCLTKEDTGWYWCGIQRDFARDDMDFTELIVTDDKGTLANDFWSGKDLSGNKTRSCKAPKVVRKADRSRTSILIICILITGLGIISVISHLTKRRRSQRNRRVGNTLKPFSRVLTPKEMAPTEQM

SEQ ID NO: 90695 - protein, 158 aa, Homo sapiens
  Payload ID: 18135
  Gene Name: transmembrane and immunoglobulin domain containing 3
  ENSP ID: ENSP00000415646
KPQALQGPPSSNDAMVMDEKVKRSFVLDTASAICNYNAHYKNHPKYWCRGYFRDYCNIIAFSPNSTNHVALRDTGNQLIVTMSCLTKEDTGWYWCGIQRDFARDDMDFTELIVTDDKGTLANDFWSGKDLSGNKTRSCKAPKVVRKTAPGRPFSSFAY

SEQ ID NO: 90696 - protein, 107 aa, Homo sapiens
  Payload ID: 18135
  Gene Name: transmembrane and immunoglobulin domain containing 3
  ENSP ID: ENSP00000488683
VTMSCLTKEDTGWYWCGIQRDFARDDMDFTELIVTDDKGTLANDFWSGKDLSGNKTRSCKAPKVVRKADRSRTSILIICILITGLGIISVISHLTKRRRSQRNRRGK

SEQ ID NO: 90697 - protein, 774 aa, Homo sapiens
  Payload ID: 18136
  Gene Name: transmembrane and tetratricopeptide repeat containing 1
  Uniprot ID: Q8IUR5
  ENSP ID: ENSP00000256062
MNPFYFHAVNIILHCLVTLVLMYTCDKTVFKNRGLAFVTALLFAVHPIHTEAVAGIVGRADVLACLLFLLAFLSYNRSLDQGCVGGSFPSTVSPFFLLLSLFLGTCAMLVKETGITVFGVCLVYDLFSLSNKQDKSSNGALCPRSPQQPGSPQPSSLPGHPHRENGKQQRFPHKGAWGGCHSPLPPEPKSSGFPVSPRAVWSMMRFLTYSYLLAFNVWLLLAPVTLCYDWQVGSIPLVETIWDMRNLATIFLAVVMALLSLHCLAAFKRLEHKEVLVGLLFLVFPFIPASNLFFRVGFVVAERVLYMPSMGYCILFVHGLSKLCTWLNRCGATTLIVSTVLLLLLFSWKTVKQNEIWLSRESLFRSGVQTLPHNAKVHYNYANFLKDQGRNKEAIYHYRTALKLYPRHASALNNLGTLTRDTAEAKMYYQRALQLHPQHNRALFNLGNLLKSQEKKEEAITLLKDSIKYGPEFADAYSSLASLLAEQERFKEAEEIYQTGIKNCPDSSDLHNNYGVFLVDTGLPEKAVAHYQQAIKLSPSHHVAMVNLGRLYRSLGENSMAEEWYKRALQVAHKAEILSPLGALYYNTGRYEEALQIYQEAAALQPSQRELRLALAQVLAVMGQTKEAEKMTNHIVSEETGCLECYRLLSAIYSKQENHDKALDAIDKALQLKPKDPKVISELFFTKGNQLREQNLLDKAFESYRVAVQLNPDQAQAWMNMGGIQHIKGKYVSARAYYERALQLVPDSKLLKENLAKLDRLEKRLQEVREKDQT

SEQ ID NO: 90698 - protein, 882 aa, Homo sapiens
  Payload ID: 18136
  Gene Name: transmembrane and tetratricopeptide repeat containing 1
  Uniprot ID: Q8IUR5
  ENSP ID: ENSP00000442046
MVVTTSARGGGGDRTPSRRRGCGLAPAGAAALLAGASCLCYGRSLQGEFVHDDVWAIVNNPDVRPGAPLRWGIFTNDFWGKGMAENTSHKSYRPLCVLTFKLNIFLTGMNPFYFHAVNIILHCLVTLVLMYTCDKTVFKNRGLAFVTALLFAVHPIHTEAVAGIVGRADVLACLLFLLAFLSYNRSLDQGCVGGSFPSTVSPFFLLLSLFLGTCAMLVKETGITVFGVCLVYDLFSLSNKQDKSSNGALCPRSPQQPGSPQPSSLPGHPHRENGKQQRFPHKGAWGGCHSPLPPEPKSSGFPVSPRAVWSMMRFLTYSYLLAFNVWLLLAPVTLCYDWQVGSIPLVETIWDMRNLATIFLAVVMALLSLHCLAAFKRLEHKEVLVGLLFLVFPFIPASNLFFRVGFVVAERVLYMPSMGYCILFVHGLSKLCTWLNRCGATTLIVSTVLLLLLFSWKTVKQNEIWLSRESLFRSGVQTLPHNAKVHYNYANFLKDQGRNKEAIYHYRTALKLYPRHASALNNLGTLTRDTAEAKMYYQRALQLHPQHNRALFNLGNLLKSQEKKEEAITLLKDSIKYGPEFADAYSSLASLLAEQERFKEAEEIYQTGIKNCPDSSDLHNNYGVFLVDTGLPEKAVAHYQQAIKLSPSHHVAMVNLGRLYRSLGENSMAEEWYKRALQVAHKAEILSPLGALYYNTGRYEEALQIYQEAAALQPSQRELRLALAQVLAVMGQTKEAEKMTNHIVSEETGCLECYRLLSAIYSKQENHDKALDAIDKALQLKPKDPKVISELFFTKGNQLREQNLLDKAFESYRVAVQLNPDQAQAWMNMGGIQHIKGKYVSARAYYERALQLVPDSKLLKENLAKLDRLEKRLQEVREKDQT

SEQ ID NO: 90699 - protein, 944 aa, Homo sapiens
  Payload ID: 18136
  Gene Name: transmembrane and tetratricopeptide repeat containing 1
  ENSP ID: ENSP00000448112
MVVTTSARGGGGDRTPSRRRGCGLAPAGAAALLAGASCLCYGRSLQGEFVHDDVWAIVNNPDVRPGAPLRWGIFTNDFWGKGMAENTSHKSYRPLCVLTFKLNIFLTGMNPFYFHAVNIILHCLVTLVLMYTCDKTVFKNRGLAFVTALLFAVHPIHTEAVAGIVGRADVLACLLFLLAFLSYNRSLDQGCVGGSFPSTVSPFFLLLSLFLGTCAMLVKETGITVFGVCLVYDLFSLSNKQDKSSNGALCPRSPQQPGSPQPSSLPGHPHRENGKQQRFPHKGAWGGCHSPLPPEPKSSGFPVSPRAVWSMMRYLRASSNRNFLLTMRPFLKRAILVLSYVLVILYFRLWIMGGSMPLFSEQDNPASFSPYILTRFLTYSYLLAFNVWLLLAPVTLCYDWQVGSIPLVETIWDMRNLATIFLAVVMALLSLHCLAAFKRLEHKEVLVGLLFLVFPFIPASNLFFRVGFVVAERVLYMPSMGYCILFVHGLSKLCTWLNRCGATTLIVSTVLLLLLFSWKTVKQNEIWLSRESLFRSGVQTLPHNAKVHYNYANFLKDQGRNKEAIYHYRTALKLYPRHASALNNLGTLTRDTAEAKMYYQRALQLHPQHNRALFNLGNLLKSQEKKEEAITLLKDSIKYGPEFADAYSSLASLLAEQERFKEAEEIYQTGIKNCPDSSDLHNNYGVFLVDTGLPEKAVAHYQQAIKLSPSHHVAMVNLGRLYRSLGENSMAEEWYKRALQVAHKAEILSPLGALYYNTGRYEEALQIYQEAAALQPSQRELRLALAQVLAVMGQTKEAEKMTNHIVSEETGCLECYRLLSAIYSKQENHDKALDAIDKALQLKPKDPKVISELFFTKGNQLREQNLLDKAFESYRVAVQLNPDQAQAWMNMGGIQHIKGKYVSARAYYERALQLVPDSKLLKENLAKLDRLEKRLQEVREKDQT

SEQ ID NO: 90700 - protein, 906 aa, Homo sapiens
  Payload ID: 18136
  Gene Name: transmembrane and tetratricopeptide repeat containing 1
  ENSP ID: ENSP00000449043
MVVTTSARGGGGDRTPSRRRGCGLAPAGAAALLAGASCLCYGRSLQGEFVHDDVWAIVNNPDVRPGAPLRWGIFTNDFWGKGMAENTSHKSYRPLCVLTFKLNIFLTGMNPFYFHAVNIILHCLVTLVLMYTCDKTVFKNRGLAFVTALLFAVHPIHTEAVAGIVGRADVLACLLFLLAFLSYNRSLDQGCVGGSFPSTVSPFFLLLSLFLGTCAMLVKETGITVFGVCLVYDLFSLSNKQDKSSNGALCPRSPQQPGSPQPSSLPGHPHRENGKQQRFPHKGAWGGCHSPLPPEPKSSGFPVSPRAVWSMMRYLRASSNRNFLLTMRPFLKRAILVLSYVLVILYFRLWIMGGSMPLFSEQDNPASFSPYILTRFLTYSYLLAFNVWLLLAPVTLCYDWQVGSIPLVETIWDMRNLATIFLAVVMALLSLHCLAAFKRLEHKEVLVGLLFLVFPFIPASNLFFRVGFVVAERVLYMPSMGYCILFVHGLSKLCTWLNRCGATTLIVSTVLLLLLFSWKTVKQNEIWLSRESLFRLYPRHASALNNLGTLTRDTAEAKMYYQRALQLHPQHNRALFNLGNLLKSQEKKEEAITLLKDSIKYGPEFADAYSSLASLLAEQERFKEAEEIYQTGIKNCPDSSDLHNNYGVFLVDTGLPEKAVAHYQQAIKLSPSHHVAMVNLGRLYRSLGENSMAEEWYKRALQVAHKAEILSPLGALYYNTGRYEEALQIYQEAAALQPSQRELRLALAQVLAVMGQTKEAEKMTNHIVSEETGCLECYRLLSAIYSKQENHDKALDAIDKALQLKPKDPKVISELFFTKGNQLREQNLLDKAFESYRVAVQLNPDQAQAWMNMGGIQHIKGKYVSARAYYERALQLVPDSKLLKENLAKLDRLEKRLQEVREKDQT

SEQ ID NO: 90701 - protein, 130 aa, Homo sapiens
  Payload ID: 18136
  Gene Name: transmembrane and tetratricopeptide repeat containing 1
  ENSP ID: ENSP00000449054
FRVGFVVAERVLYMPSMGYCILFVHGLSKLCTWLNRCGATTLIVSTVLLLLLFSWKTVKQNEIWLSRESLFRSGVQTLPHNAKVHYNYANFLKDQGRNKEAIYHYRTALNNNKAWDYLCWRFRKTLTDLP

SEQ ID NO: 90702 - protein, 836 aa, Homo sapiens
  Payload ID: 18137
  Gene Name: transmembrane and tetratricopeptide repeat containing 2
  Uniprot ID: Q8N394
  ENSP ID: ENSP00000322300
MIAELVSSALGLALYLNTLSADFCYDDSRAIKTNQDLLPETPWTHIFYNDFWGTLLTHSGSHKSYRPLCTLSFRLNHAIGGLNPWSYHLVNVLLHAAVTGLFTSFSKILLGDGYWTFMAGLMFASHPIHTEAVAGIVGRADVGASLFFLLSLLCYIKHCSTRGYSARTWGWFLGSGLCAGCSMLWKEQGVTVLAVSAVYDVFVFHRLKIKQILPTIYKRKNLSLFLSISLLIFWGSSLLGARLYWMGNKPPSFSNSDNPAADSDSLLTRTLTFFYLPTKNLWLLLCPDTLSFDWSMDAVPLLKTVCDWRNLHTVAFYTGLLLLAYYGLKSPSVDRECNGKTVTNGKQNANGHSCLSDVEYQNSETKSSFASKVENGIKNDVSQRTQLPSTENIVVLSLSLLIIPFVPATNLFFYVGFVIAERVLYIPSMGFCLLITVGARALYVKVQKRFLKSLIFYATATLIVFYGLKTAIRNGDWQNEEMLYRSGIKVNPAKAWGNLGNVLKSQSKISEAESAYRNALYYRSNMADMLYNLGLLLQENSRFAEALHYYKLAIGSRPTLASAYLNTGIILMNQGRTEEARRTFLKCSEIPDENLKDPHAHKSSVTSCLYNLGKLYHEQGHYEEALSVYKEAIQKMPRQFAPQSLYNMMGEAYMRLSKLPEAEHWYMESLRSKTDHIPAHLTYGKLLALTGRKSEAEKLFLKAIELDPTKGNCYMHYGQFLLEEARLIEAAEMAKKAAELDSTEFDVVFNAAHMLRQASLNEAAEKYYDLAARLRPNYPAALMNLGAILHLNGRLQKAEANYLRALQLKPDDVITQSNLRKLWNIMEKQGLKTSKT

SEQ ID NO: 90703 - protein, 830 aa, Homo sapiens
  Payload ID: 18137
  Gene Name: transmembrane and tetratricopeptide repeat containing 2
  ENSP ID: ENSP00000447609
MEPSSCRKTSSGLRTPTDYTLCRAIKTNQDLLPETPWTHIFYNDFWGTLLTHSGSHKSYRPLCTLSFRLNHAIGGLNPWSYHLVNVLLHAAVTGLFTSFSKILLGDGYWTFMAGLMFASHPIHTEAVAGIVGRADVGASLFFLLSLLCYIKHCSTRGYSARTWGWFLGSGLCAGCSMLWKEQGVTVLAVSAVYDVFVFHRLKIKQILPTIYKRKNLSLFLSISLLIFWGSSLLGARLYWMGNKPPSFSNSDNPAADSDSLLTRTLTFFYLPTKNLWLLLCPDTLSFDWSMDAVPLLKTVCDWRNLHTVAFYTGLLLLAYYGLKSPSVDRECNGKTVTNGKQNANGHSCLSDVEYQNSETKSSFASKVENGIKNDVSQRTQLPSTENIVVLSLSLLIIPFVPATNLFFYVGFVIAERVLYIPSMGFCLLITVGARALYVKVQKRFLKSLIFYATATLIVFYGLKTAIRNGDWQNEEMLYRSGIKVNPAKAWGNLGNVLKSQSKISEAESAYRNALYYRSNMADMLYNLGLLLQENSRFAEALHYYKLAIGSRPTLASAYLNTGIILMNQGRTEEARRTFLKCSEIPDENLKDPHAHKSSVTSCLYNLGKLYHEQGHYEEALSVYKEAIQKMPRQFAPQSLYNMMGEAYMRLSKLPEAEHWYMESLRSKTDHIPAHLTYGKLLALTGRKSEAEKLFLKAIELDPTKGNCYMHYGQFLLEEARLIEAAEMAKKAAELDSTEFDVVFNAAHMLRQASLNEAAEKYYDLAARLRPNYPAALMNLGAILHLNGRLQKAEANYLRALQLKPDDVITQSNLRKLWNIMEKQGLKTSKT

SEQ ID NO: 90704 - protein, 637 aa, Homo sapiens
  Payload ID: 18137
  Gene Name: transmembrane and tetratricopeptide repeat containing 2
  ENSP ID: ENSP00000448292
MIAELVSSALGLALYLNTLSADFCYDDSRAIKTNQDLLPETPWTHIFYNDFWGTLLTHSGSHKSYRPLCTLSFRLNHAIGGLNPWSYHLVNVLLHAAVTGLFTSFSKILLGDGYWTFMAGLMFASHPIHTEAVAGIVGRADVGASLFFLLSLLCYIKHCSTRGYSARTWGWFLGSGLCAGCSMLWKEQGVTVLAVSAVYDVFVFHRLKIKQILPTIYKRKNLSLFLSISLLIFWGSSLLGARLYWMGNKPPSFSNSDNPAADSDSLLTRTLTFFYLPTKNLWLLLCPDTLSFDWSMDAVPLLKTVCDWRNLHTVAFYTGLLLLAYYGLKSPSVDRECNGKTVTNGKQNANGHSCLSDVEYQNSETKSSFASKVENGIKNDVSQRTQLPSTENIVVLSLSLLIIPFVPATNLFFYVGFVIAERVLYIPSMGFCLLITVGARALYVKVQKRFLKSLIFYATATLIVFYGLKTAIRNGDWQNEEMLYRSGIKVNPAKAWGNLGNVLKSQSKISEAESAYRNALYYRSNMADMLYNLGLLLQENSRFAEALHYYKLAIGSRPTLASAYLNTGIILMNQGRTEEARRTFLKCSEIPDENLKDPHAHKSSVTSCLYNLGKLYHEQGHYEVWPMPLCPFPSPLF

SEQ ID NO: 90705 - protein, 35 aa, Homo sapiens
  Payload ID: 18137
  Gene Name: transmembrane and tetratricopeptide repeat containing 2
  ENSP ID: ENSP00000448630
MIAELVSSALGLALYLNTLSADFCYDDRGRTCRFS

SEQ ID NO: 90706 - protein, 914 aa, Homo sapiens
  Payload ID: 18138
  Gene Name: transmembrane and tetratricopeptide repeat containing 3
  Uniprot ID: Q6ZXV5
  ENSP ID: ENSP00000266712
MANINLKEITLIVGVVTACYWNSLFCGFVFDDVSAILDNKDLHPSTPLKTLFQNDFWGTPMSEERSHKSYRPLTVLTFRLNYLLSELKPMSYHLLNMIFHAVVSVIFLKVCKLFLDNKSSVIASLLFAVHPIHTEAVTGVVGRAELLSSIFFLAAFLSYTRSKGPDNSIIWTPIALTVFLVAVATLCKEQGITVVGICCVYEVFIAQGYTLPLLCTTAGQFLRGKGSIPFSMLQTLVKLIVLMFSTLLLVVIRVQVIQSQLPVFTRFDNPAAVSPTPTRQLTFNYLLPVNAWLLLNPSELCCDWTMGTIPLIESLLDIRNLATFTFFCFLGMLGVFSIRYSGDSSKTVLMALCLMALPFIPASNLFFPVGFVVAERVLYVPSMGFCILVAHGWQKISTKSVFKKLSWICLSMVILTHSLKTFHRNWDWESEYTLFMSALKVNKNNAKLWNNVGHALENEKNFERALKYFLQATHVQPDDIGAHMNVGRTYKNLNRTKEAEESYMMAKSLMPQIIPGKKYAARIAPNHLNVYINLANLIRANESRLEEADQLYRQAISMRPDFKQAYISRGELLLKMNKPLKAKEAYLKALELDRNNADLWYNLAIVHIELKEPNEALKNFNRALELNPKHKLALFNSAIVMQESGEVKLRPEARKRLLSYINEEPLDANGYFNLGMLAMDDKKDNEAEIWMKKAIKLQADFRSALFNLALLYSQTAKELKALPILEELLRYYPDHIKGLILKGDILMNQKKDILGAKKCFERILEMDPSNVQGKHNLCVVYFEEKDLLKAERCLLETLALAPHEEYIQRHLNIVRDKISSSSFIEPIFPTSKISSVEGKKIPTESVKEIRGESRQTQIVKTSDNKSQSKSNKQLGKNGDEETPHKTTKDIKEIEKKRVAALKRLEEIERILNGE

SEQ ID NO: 90707 - protein, 148 aa, Homo sapiens
  Payload ID: 18138
  Gene Name: transmembrane and tetratricopeptide repeat containing 3
  ENSP ID: ENSP00000447640
MANINLKEITLIVGVVTACYWNSLFCGFVFDDVSAILDNKDLHPSTPLKTLFQNDFWGTPMSEERSHKSYRPLTVLTFRLNYLLSELKPMSYHLLNMIFHAVVSVIFLKVCKLFLDNKSSVIASLLFAVHPIHTEAVTGVVGRAELLS

SEQ ID NO: 90708 - protein, 145 aa, Homo sapiens
  Payload ID: 18138
  Gene Name: transmembrane and tetratricopeptide repeat containing 3
  ENSP ID: ENSP00000448566
MANINLKEITLIVGVVTACYWNSLFCGFVFDDVSAILDNKDLHPSTPLKTLFQNDFWGTPMSEVTGVVGRAELLSSIFFLAAFLSYTRSKGPDNSIIWTPIALTVFLVAVATLCKEQGITVVGICCVYEVFIAQGYTLPLLCTTA

SEQ ID NO: 90709 - protein, 406 aa, Homo sapiens
  Payload ID: 18138
  Gene Name: transmembrane and tetratricopeptide repeat containing 3
  ENSP ID: ENSP00000448733
MANINLKEITLIVGVVTACYWNSLFCGFVFDDVSAILDNKDLHPSTPLKTLFQNDFWGTPMSEERSHKSYRPLTVLTFRLNYLLSELKPMSYHLLNMIFHAVVSVIFLKVCKLFLDNKSSVIASLLFAVHPIHTEAVTGVVGRAELLSSIFFLAAFLSYTRSKGPDNSIIWTPIALTVFLVAVATLCKEQGITVVGICCVYEVFIAQGYTLPLLCTTAGQFLRGKGSIPFSMLQTLVKLIVLMFSTLLLVVIRVQVIQSQLPVFTRFDNPAAVSPTPTRQLTFNYLLPVNAWLLLNPSELCCDWTMGTIPLIESLLDIRNLATFTFFCFLGMLGVFSIRYSGDSSKTVLMALCLMALPFIPASNLFFPVGFVVAERVLYVPSMGFCILVAHGWQKISTKSLRQNKL

SEQ ID NO: 90710 - protein, 760 aa, Homo sapiens
  Payload ID: 18139
  Gene Name: transmembrane and tetratricopeptide repeat containing 4
  Uniprot ID: Q5T4D3
  ENSP ID: ENSP00000343871
MIPNQHNAGAGSHQPAVFRMAVLDTDLDHILPSSVLPPFWAKLVVGSVAIVCFARSYDGDFVFDDSEAIVNNKDLQAETPLGDLWHHDFWGSRLSSNTSHKSYRPLTVLTFRINYYLSGGFHPVGFHVVNILLHSGISVLMVDVFSVLFGGLQYTSKGRRLHLAPRASLLAALLFAVHPVHTECVAGVVGRADLLCALFFLLSFLGYCKAFRESNKEGAHSSTFWVLLSIFLGAVAMLCKEQGITVLGLNAVFDILVIGKFNVLEIVQKVLHKDKSLENLGMLRNGGLLFRMTLLTSGGAGMLYVRWRIMGTGPPAFTEVDNPASFADSMLVRAVNYNYYYSLNAWLLLCPWWLCFDWSMGCIPLIKSISDWRVIALAALWFCLIGLICQALCSEDGHKRRILTLGLGFLVIPFLPASNLFFRVGFVVAERVLYLPSVGYCVLLTFGFGALSKHTKKKKLIAAVVLGILFINTLRCVLRSGEWRSEEQLFRSALSVCPLNAKVHYNIGKNLADKGNQTAAIRYYREAVRLNPKYVHAMNNLGNILKERNELQEAEELLSLAVQIQPDFAAAWMNLGIVQNSLKRFEAAEQSYRTAIKHRRKYPDCYYNLGRLYADLNRHVDALNAWRNATVLKPEHSLAWNNMIILLDNTGNLAQAEAVGREALELIPNDHSLMFSLANVLGKSQKYKESEALFLKAIKANPNAASYHGNLAVLYHRWGHLDLAKKHYEISLQLDPTASGTKENYGLLRRKLELMQKKAV

SEQ ID NO: 90711 - protein, 741 aa, Homo sapiens
  Payload ID: 18139
  Gene Name: transmembrane and tetratricopeptide repeat containing 4
  Uniprot ID: Q5T4D3
  ENSP ID: ENSP00000365408
MAVLDTDLDHILPSSVLPPFWAKLVVGSVAIVCFARSYDGDFVFDDSEAIVNNKDLQAETPLGDLWHHDFWGSRLSSNTSHKSYRPLTVLTFRINYYLSGGFHPVGFHVVNILLHSGISVLMVDVFSVLFGGLQYTSKGRRLHLAPRASLLAALLFAVHPVHTECVAGVVGRADLLCALFFLLSFLGYCKAFRESNKEGAHSSTFWVLLSIFLGAVAMLCKEQGITVLGLNAVFDILVIGKFNVLEIVQKVLHKDKSLENLGMLRNGGLLFRMTLLTSGGAGMLYVRWRIMGTGPPAFTEVDNPASFADSMLVRAVNYNYYYSLNAWLLLCPWWLCFDWSMGCIPLIKSISDWRVIALAALWFCLIGLICQALCSEDGHKRRILTLGLGFLVIPFLPASNLFFRVGFVVAERVLYLPSVGYCVLLTFGFGALSKHTKKKKLIAAVVLGILFINTLRCVLRSGEWRSEEQLFRSALSVCPLNAKVHYNIGKNLADKGNQTAAIRYYREAVRLNPKYVHAMNNLGNILKERNELQEAEELLSLAVQIQPDFAAAWMNLGIVQNSLKRFEAAEQSYRTAIKHRRKYPDCYYNLGRLYADLNRHVDALNAWRNATVLKPEHSLAWNNMIILLDNTGNLAQAEAVGREALELIPNDHSLMFSLANVLGKSQKYKESEALFLKAIKANPNAASYHGNLAVLYHRWGHLDLAKKHYEISLQLDPTASGTKENYGLLRRKLELMQKKAV

SEQ ID NO: 90712 - protein, 630 aa, Homo sapiens
  Payload ID: 18139
  Gene Name: transmembrane and tetratricopeptide repeat containing 4
  Uniprot ID: Q5T4D3
  ENSP ID: ENSP00000365409
MAVLDTDLDHILPSSVLPPFWAKLVVGSVAIVCFARSYDGDFVFDDSEAIVNNKVAGVVGRADLLCALFFLLSFLGYCKAFRESNKEGAHSSTFWVLLSIFLGAVAMLCKEQGITVLGLNAVFDILVIGKFNVLEIVQKVLHKDKSLENLGMLRNGGLLFRMTLLTSGGAGMLYVRWRIMGTGPPAFTEVDNPASFADSMLVRAVNYNYYYSLNAWLLLCPWWLCFDWSMGCIPLIKSISDWRVIALAALWFCLIGLICQALCSEDGHKRRILTLGLGFLVIPFLPASNLFFRVGFVVAERVLYLPSVGYCVLLTFGFGALSKHTKKKKLIAAVVLGILFINTLRCVLRSGEWRSEEQLFRSALSVCPLNAKVHYNIGKNLADKGNQTAAIRYYREAVRLNPKYVHAMNNLGNILKERNELQEAEELLSLAVQIQPDFAAAWMNLGIVQNSLKRFEAAEQSYRTAIKHRRKYPDCYYNLGRLYADLNRHVDALNAWRNATVLKPEHSLAWNNMIILLDNTGNLAQAEAVGREALELIPNDHSLMFSLANVLGKSQKYKESEALFLKAIKANPNAASYHGNLAVLYHRWGHLDLAKKHYEISLQLDPTASGTKENYGLLRRKLELMQKKAV

SEQ ID NO: 90713 - protein, 114 aa, Homo sapiens
  Payload ID: 18139
  Gene Name: transmembrane and tetratricopeptide repeat containing 4
  ENSP ID: ENSP00000393600
MAVLDTDLDHILPSSVLPPFWAKLVVGSVAIVCFARSYDGDFVFDDSEAIVNNKHTLLWRLHLIKYLEPRWCSFPVQREEKILCRSPSQLTGYFCKSVEEGPPSRNAPGGPVAS

SEQ ID NO: 90714 - protein, 54 aa, Homo sapiens
  Payload ID: 18139
  Gene Name: transmembrane and tetratricopeptide repeat containing 4
  ENSP ID: ENSP00000398400
MAVLDTDLDHILPSSVLPPFWAKLVVGSVAIVCFARSYDGDFVFDDSEAIVNNK

SEQ ID NO: 90715 - protein, 73 aa, Homo sapiens
  Payload ID: 18139
  Gene Name: transmembrane and tetratricopeptide repeat containing 4
  ENSP ID: ENSP00000419613
MIPNQHNAGAGSHQPAVFRMAVLDTDLDHILPSSVLPPFWAKLVVGSVAIVCFARSYDGDFVFDDSEAIVNNK

SEQ ID NO: 90716 - protein, 246 aa, Homo sapiens
  Payload ID: 18140
  Gene Name: transmembrane and ubiquitin-like domain containing 1
  Uniprot ID: Q9BVT8
  ENSP ID: ENSP00000297533
MTLIEGVGDEVTVLFSVLACLLVLALAWVSTHTAEGGDPLPQPSGTPTPSQPSAAMAATDSMRGEAPGAETPSLRHRGQAAQPEPSTGFTATPPAPDSPQEPLVLRLKFLNDSEQVARAWPHDTIGSLKRTQFPGREQQVRLIYQGQLLGDDTQTLGSLHLPPNCVLHCHVSTRVGPPNPPCPPGSEPGPSGLEIGSLLLPLLLLLLLLLWYCQIQYRPFFPLTATLGLAGFTLLLSLLAFAMYRP

SEQ ID NO: 90717 - protein, 246 aa, Homo sapiens; identical to SEQ ID NO: 90716
  Payload ID: 18140
  Gene Name: transmembrane and ubiquitin-like domain containing 1
  Uniprot ID: Q9BVT8
  ENSP ID: ENSP00000376565

SEQ ID NO: 90718 - protein, 246 aa, Homo sapiens; identical to SEQ ID NO: 90716
  Payload ID: 18140
  Gene Name: transmembrane and ubiquitin-like domain containing 1
  Uniprot ID: Q9BVT8
  ENSP ID: ENSP00000417519

SEQ ID NO: 90719 - protein, 246 aa, Homo sapiens; identical to SEQ ID NO: 90716
  Payload ID: 18140
  Gene Name: transmembrane and ubiquitin-like domain containing 1
  Uniprot ID: Q9BVT8
  ENSP ID: ENSP00000418709

SEQ ID NO: 90720 - protein, 246 aa, Homo sapiens; identical to SEQ ID NO: 90716
  Payload ID: 18140
  Gene Name: transmembrane and ubiquitin-like domain containing 1
  Uniprot ID: Q9BVT8
  ENSP ID: ENSP00000419214

SEQ ID NO: 90721 - protein, 152 aa, Homo sapiens
  Payload ID: 18140
  Gene Name: transmembrane and ubiquitin-like domain containing 1
  ENSP ID: ENSP00000420516
MTLIEGVGDEVTVLFSVLACLLVLALAWVSTHTAEGGDPLPQPSGTPTPSQPSAAMAATDSMRGEAPGAETPSLRHRGQAAQPEPSTGFTATPPAPDSPQEPLVLRLKFLNDSEQVARAWPHDTIGSLKRTQFPGREQQVRLIYQGQLLGDD

SEQ ID NO: 90722 - protein, 170 aa, Homo sapiens
  Payload ID: 18140
  Gene Name: transmembrane and ubiquitin-like domain containing 1
  ENSP ID: ENSP00000420692
MTLIEGVGDEVTVLFSVLACLLVLALAWVSTHTAEGGDPLPQPSGTPTPSQPSAAMAATDSMRGEAPGAETPSLRHRGQAAQPEPSTGFTATPPAPDSPQEPLVLRLKFLNDSEQVARAWPHDTIGSLKRTQFPGREQQVRLIYQGQLLGDDTQTLGSLHLPPNCVLHCH

SEQ ID NO: 90723 - protein, 301 aa, Homo sapiens
  Payload ID: 18141
  Gene Name: transmembrane and ubiquitin-like domain containing 2
  Uniprot ID: Q71RG4
  ENSP ID: ENSP00000313214
MELSDVTLIEGVGNEVMVVAGVVVLILALVLAWLSTYVADSGSNQLLGAIVSAGDTSVLHLGHVDHLVAGQGNPEPTELPHPSEGNDEKAEEAGEGRGDSTGEAGAGGGVEPSLEHLLDIQGLPKRQAGAGSSSPEAPLRSEDSTCLPPSPGLITVRLKFLNDTEELAVARPEDTVGALKSKYFPGQESQMKLIYQGRLLQDPARTLRSLNITDNCVIHCHRSPPGSAVPGPSASLAPSATEPPSLGVNVGSLMVPVFVVLLGVVWYFRINYRQFFTAPATVSLVGVTVFFSFLVFGMYGR

SEQ ID NO: 90724 - protein, 301 aa, Homo sapiens; identical to SEQ ID NO: 90723
  Payload ID: 18141
  Gene Name: transmembrane and ubiquitin-like domain containing 2
  Uniprot ID: Q71RG4
  ENSP ID: ENSP00000350672

SEQ ID NO: 90725 - protein, 264 aa, Homo sapiens
  Payload ID: 18141
  Gene Name: transmembrane and ubiquitin-like domain containing 2
  ENSP ID: ENSP00000413127
MELSDVTLIEGVGNEVMVVAGVVVLILALVLAWLSTYVADSGSNQLLGAIVSAGDTSVLHLGHVDHLVAGQGNPEPTELPHPSEGLPKRQAGAGSSSPEAPLRSEDSTCLPPSPGLITVRLKFLNDTEELAVARPEDTVGALKSKYFPGQESQMKLIYQGRLLQDPARTLRSLNITDNCVIHCHRSPPGSAVPGPSASLAPSATEPPSLGVNVGSLMVPVFVVLLGVVWYFRINYRQFFTAPATVSLVGVTVFFSFLVFGMYGR

SEQ ID NO: 90726 - protein, 321 aa, Homo sapiens
  Payload ID: 18141
  Gene Name: transmembrane and ubiquitin-like domain containing 2
  Uniprot ID: Q71RG4
  ENSP ID: ENSP00000444565
MISRHLQNNLMSVDPASSQAMELSDVTLIEGVGNEVMVVAGVVVLILALVLAWLSTYVADSGSNQLLGAIVSAGDTSVLHLGHVDHLVAGQGNPEPTELPHPSEGNDEKAEEAGEGRGDSTGEAGAGGGVEPSLEHLLDIQGLPKRQAGAGSSSPEAPLRSEDSTCLPPSPGLITVRLKFLNDTEELAVARPEDTVGALKSKYFPGQESQMKLIYQGRLLQDPARTLRSLNITDNCVIHCHRSPPGSAVPGPSASLAPSATEPPSLGVNVGSLMVPVFVVLLGVVWYFRINYRQFFTAPATVSLVGVTVFFSFLVFGMYGR

SEQ ID NO: 90727 - protein, 94 aa, Homo sapiens
  Payload ID: 18141
  Gene Name: transmembrane and ubiquitin-like domain containing 2
  Uniprot ID: Q71RG4
  ENSP ID: ENSP00000465015
MELSDVTLIEGVGNEVMVVAGVVVLILALVLAWLSTYVADSGSNQLLGAIVSAGDTSVLHLGHVDHLVAGQGNPEPTELPHPSEANTSLDKKAR

SEQ ID NO: 90728 - protein, 61 aa, Homo sapiens
  Payload ID: 18141
  Gene Name: transmembrane and ubiquitin-like domain containing 2
  ENSP ID: ENSP00000465152
MELSDVTLIEGVGNEATHPSSTWGMWTTWWQAKATPSQLNSPIHQRTSRCRQQQSRGPPEI

SEQ ID NO: 90729 - protein, 94 aa, Homo sapiens; identical to SEQ ID NO: 90727
  Payload ID: 18141
  Gene Name: transmembrane and ubiquitin-like domain containing 2
  Uniprot ID: Q71RG4
  ENSP ID: ENSP00000465153

SEQ ID NO: 90730 - protein, 61 aa, Homo sapiens; identical to SEQ ID NO: 90728
  Payload ID: 18141
  Gene Name: transmembrane and ubiquitin-like domain containing 2
  ENSP ID: ENSP00000465217

SEQ ID NO: 90731 - protein, 194 aa, Homo sapiens
  Payload ID: 18141
  Gene Name: transmembrane and ubiquitin-like domain containing 2
  ENSP ID: ENSP00000465810
  MOD_RES (1)..(1): Any amino acid
XGVEPSLEHLLDIQGLPKRQAGAGSSSPEAPLRSEDSTCLPPSPGLITVRLKFLNDTEELAVARPEDTVGALKSKYFPGQESQMKLIYQGRLLQDPARTLRSLNITDNCVIHCHRSPPGSAVPGPSASLAPSATEPPSLGVNVGSLMVPVFVVLLGVVWYFRINYRQFFTAPATVSLVGVTVFFSFLVFGMYGR

SEQ ID NO: 90732 - protein, 94 aa, Homo sapiens; identical to SEQ ID NO: 90727
  Payload ID: 18141
  Gene Name: transmembrane and ubiquitin-like domain containing 2
  Uniprot ID: Q71RG4
  ENSP ID: ENSP00000466189

SEQ ID NO: 90733 - protein, 321 aa, Homo sapiens; identical to SEQ ID NO: 90726
  Payload ID: 18141
  Gene Name: transmembrane and ubiquitin-like domain containing 2
  Uniprot ID: Q71RG4
  ENSP ID: ENSP00000466971

SEQ ID NO: 90734 - protein, 301 aa, Homo sapiens; identical to SEQ ID NO: 90723
  Payload ID: 18141
  Gene Name: transmembrane and ubiquitin-like domain containing 2
  Uniprot ID: Q71RG4
  ENSP ID: ENSP00000467364

SEQ ID NO: 90735 - protein, 97 aa, Homo sapiens
  Payload ID: 18141
  Gene Name: transmembrane and ubiquitin-like domain containing 2
  ENSP ID: ENSP00000467506
MELSDVTLIEGVGNEVMVVAGVVVLILALVLAWLSTYVADSGSNQLLGAIVSAGDTSVLHLGHVDHLVAGQGNPEPTELPHPSEDKQVQAAAVQRPP

SEQ ID NO: 90736 - protein, 181 aa, Homo sapiens
  Payload ID: 18141
  Gene Name: transmembrane and ubiquitin-like domain containing 2
  Uniprot ID: Q71RG4
  ENSP ID: ENSP00000467960
MELSDVTLIEGVGNEVMVVAGVVVLILALVLAWLSTYVADSGSNQLLGAIVSAGDTSVLHLGHVDHLVAGQGNPEPTELPHPSEGNDEKAEEAGEGRGDSTGEAGAGGGVEPSLEHLLDIQGLPKRQAGAGSSSPEAPLRSEDSTCLPPSPGLITVRLKFLNDTEELAVARPEDTVGALKR

SEQ ID NO: 90737 - protein, 75 aa, Homo sapiens
  Payload ID: 18141
  Gene Name: transmembrane and ubiquitin-like domain containing 2
  ENSP ID: ENSP00000468765
MELSDVTLIEGVGNEQILPWTRKPDETDLPGPPATRPSPHTAFSEHYRQLCDSLPPLTPRVSCSRPLSLLGPLGH

SEQ ID NO: 90738 - protein, 567 aa, Homo sapiens
  Payload ID: 18142
  Gene Name: transmembrane anterior posterior transformation 1
  Uniprot ID: Q6NXT6
  ENSP ID: ENSP00000385347
MAGVGDAAAPGEGGGGGVDGPQRDGRGEAEQPGGSGGQGPPPAPQLTETLGFYESDRRRERRRGRTELSLLRFLSAELTRGYFLEHNEAKYTERRERVYTCLRIPRELEKLMVFGIFLCLDAFLYVFTLLPLRVFLALFRLLTLPCYGLRDRRLLQPAQVCDILKGVILVICYFMMHYVDYSMMYHLIRGQSVIKLYIIYNMLEVADRLFSSFGQDILDALYWTATEPKERKRAHIGVIPHFFMAVLYVFLHAILIMVQATTLNVAFNSHNKSLLTIMMSNNFVEIKGSVFKKFEKNNLFQMSNSDIKERFTNYVLLLIVCLRNMEQFSWNPDHLWVLFPDVCMVIASEIAVDIVKHAFITKFNDITADVYSEYRASLAFDLVSSRQKNAYTDYSDSVARRMGFIPLPLAVLLIRVVTSSIKVQGILSYACVILFYFGLISLKVLNSIVLLGKSCQYVKEAKMEEKLSNPPATCTPGKPSSKSQNKCKPSQGLSTEENLSASITKQPIHQKENIIPLLVTSNSDQFLTTPDGDEKDITQDNSELKHRSSKKDLLEIDRFTICGNRID

SEQ ID NO: 90739 - protein, 117 aa, Homo sapiens
  Payload ID: 18142
  Gene Name: transmembrane anterior posterior transformation 1
  ENSP ID: ENSP00000422652
MAGVGDAAAPGEGGGGGVDGPQRDGRGEAEQPGGSGGQGPPPAPQLTETLGFYESDRRRERRRGRTADGFWNLSVPGCVFVCVHPASFKSFPGTIQAPHFALLWLKGQTFASACPGV

SEQ ID NO: 90740 - protein, 51 aa, Homo sapiens
  Payload ID: 18142
  Gene Name: transmembrane anterior posterior transformation 1
  ENSP ID: ENSP00000422752
  MOD_RES (1)..(1): Any amino acid
XLMVFGIFLCLDAFLYVFTLLPLRVFLALFRLLTLPCYGLRPKGGALSLPL

SEQ ID NO: 90741 - protein, 212 aa, Homo sapiens
  Payload ID: 18142
  Gene Name: transmembrane anterior posterior transformation 1
  ENSP ID: ENSP00000423359
  MOD_RES (1)..(1): Any amino acid
XLKGVILVICYFMMHYVDYSMMYHLIRGQSVIKLYIIYNMLEVADRLFSSFGQDILDALYWTATEPKERKRAHIGFVEIKGSVFKKFEKNNLFQMSNSDIKERFTNYVLLLIVCLRNMEQFSWNPDHLWVLFPDVCMVIASEIAVDIVKHAFITKFNDITADVYSEYRASLAFDLVSSRQKNAYTDYSDSVARRMGFIPLPLAVLVDIPEST

SEQ ID NO: 90742 - protein, 311 aa, Homo sapiens
  Payload ID: 18143
  Gene Name: transmembrane BAX inhibitor motif containing 1
  Uniprot ID: Q969X1
  ENSP ID: ENSP00000258412
MSNPSAPPPYEDRNPLYPGPPPPGGYGQPSVLPGGYPAYPGYPQPGYGHPAGYPQPMPPTHPMPMNYGPGHGYDGEERAVSDSFGPGEWDDRKVRHTFIRKVYSIISVQLLITVAIIAIFTFVEPVSAFVRRNVAVYYVSYAVFVVTYLILACCQGPRRRFPWNIILLTLFTFAMGFMTGTISSMYQTKAVIIAMIITAVVSISVTIFCFQTKVDFTSCTGLFCVLGIVLLVTGIVTSIVLYFQYVYWLHMLYAALGAICFTLFLAYDTQLVLGNRKHTISPEDYITGALQIYTDIIYIFTFVLQLMGDRN

SEQ ID NO: 90743 - protein, 311 aa, Homo sapiens; identical to SEQ ID NO: 90742
  Payload ID: 18143
  Gene Name: transmembrane BAX inhibitor motif containing 1
  Uniprot ID: Q969X1
  ENSP ID: ENSP00000380025

SEQ ID NO: 90744 - protein, 73 aa, Homo sapiens
  Payload ID: 18143
  Gene Name: transmembrane BAX inhibitor motif containing 1
  ENSP ID: ENSP00000394946
MSNPSAPPPYEDRNPLYPGPPPPGGYGQPSVLPGGYPAYPGYPQPGYGHPAGYPQPMPPTHPMPMNYGPGHGY

SEQ ID NO: 90745 - protein, 84 aa, Homo sapiens
  Payload ID: 18143
  Gene Name: transmembrane BAX inhibitor motif containing 1
  ENSP ID: ENSP00000395614
MSNPSAPPPYEDRNPLYPGPPPPGGYGQPSVLPGGYPAYPGYPQPGYGHPAGYPQPMPPTHPMPMNYGPGHGYDGEERAVSDSF

SEQ ID NO: 90746 - protein, 167 aa, Homo sapiens
  Payload ID: 18143
  Gene Name: transmembrane BAX inhibitor motif containing 1
  ENSP ID: ENSP00000399345
MSNPSAPPPYEDRNPLYPGPPPPGGYGQPSVLPGGYPAYPGYPQPGYGHPAGYPQPMPPTHPMPMNYGPGHGYDGEERAVSDSFGPGEWDDRKVRHTFIRKVYSIISVQLLITVAIIAIFTFVEPVSAFVRRNVAVYYVSYAVFVVTYLILACCQGPRRRFPWNIIL

SEQ ID NO: 90747 - protein, 171 aa, Homo sapiens
  Payload ID: 18143
  Gene Name: transmembrane BAX inhibitor motif containing 1
  ENSP ID: ENSP00000399987
MSNPSAPPPYEDRNPLYPGPPPPGGYGQPSVLPGGYPAYPGYPQPGYGHPAGYPQPMPPTHPMPMNYGPGHGYDGEERAVSDSFGPGEWDDRKVRHTFIRKVYSIISVQLLITVAIIAIFTFVEPVSAFVRRNVAVYYVSYAVFVVTYLILACCQGPRRRFPWNIILLTLF

SEQ ID NO: 90748 - protein, 137 aa, Homo sapiens
  Payload ID: 18143
  Gene Name: transmembrane BAX inhibitor motif containing 1
  ENSP ID: ENSP00000401491
MGFMTGTISSMYQTKAVIIAMIITAVVSISVTIFCFQTKVDFTSCTGLFCVLGIVLLVTGIVTSIVLYFQYVYWLHMLYAALGAICFTLFLAYDTQLVLGNRKHTISPEDYITGALQIYTDIIYIFTFVLQLMGDRN

SEQ ID NO: 90749 - protein, 90 aa, Homo sapiens
  Payload ID: 18143
  Gene Name: transmembrane BAX inhibitor motif containing 1
  ENSP ID: ENSP00000403462
MSNPSAPPPYEDRNPLYPGPPPPGGYGQPSVLPGGYPAYPGYPQPGYGHPAGYPQPMPPTHPMPMNYGPGHGYDGEERAVSDSFGPGEWD

SEQ ID NO: 90750 - protein, 215 aa, Homo sapiens
  Payload ID: 18143
  Gene Name: transmembrane BAX inhibitor motif containing 1
  ENSP ID: ENSP00000404709
MSNPSAPPPYEDRNPLYPGPPPPGGYGQPSVLPGGYPAYPGYPQPGYGHPAGYPQPMPPTHPMPMNYGPGHGYDGEERAVSDSFGPGEWDDRKVRHTFIRKGTCQRLCEEKCGCLLRVLCCLRCHLPDPCLLPGTQTPFPMEHHSADPFYFCHGLHDGHHFQYVPNQSRHHCNDHHCGGIHFSHHLLLSDQGGLHLVHRPLLCPGNCAPGDWDCH

SEQ ID NO: 90751 - protein, 67 aa, Homo sapiens
  Payload ID: 18143
  Gene Name: transmembrane BAX inhibitor motif containing 1
  ENSP ID: ENSP00000405516
MSNPSAPPPYEDRNPLYPGPPPPGGYGQPSVLPGGYPAYPGYPQPGYGHPAGYPQPMPPTHPMPMNY

SEQ ID NO: 90752 - protein, 150 aa, Homo sapiens
  Payload ID: 18143
  Gene Name: transmembrane BAX inhibitor motif containing 1
  ENSP ID: ENSP00000406744
MSNPSAPPPYEDRNPLYPGPPPPGGYGQPSVLPGGYPAYPGYPQPGYGHPAGYPQPMPPTHPMPMNYGPGHGYDGEERAVSDSFGPGEWDDRKVRHTFIRKVYSIISVQLLITVAIIAIFTFVEPVSAFVRRNVAVYYVSYAVFVVTYLI

SEQ ID NO: 90753 - protein, 46 aa, Homo sapiens
  Payload ID: 18143
  Gene Name: transmembrane BAX inhibitor motif containing 1
  ENSP ID: ENSP00000408729
MSNPSAPPPYEDRNPLYPGPPPPGGYGQPSVLPGGYPAYPGYPQPG

SEQ ID NO: 90754 - protein, 311 aa, Homo sapiens; identical to SEQ ID NO: 90742
  Payload ID: 18143
  Gene Name: transmembrane BAX inhibitor motif containing 1
  Uniprot ID: Q969X1
  ENSP ID: ENSP00000409738

SEQ ID NO: 90755 - protein, 106 aa, Homo sapiens
  Payload ID: 18143
  Gene Name: transmembrane BAX inhibitor motif containing 1
  ENSP ID: ENSP00000410136
MSNPSAPPPYEDRNPLYPGPPPPGGYGQPSVLPGGYPAYPGYPQPGYGHPAGYPQPMPPTHPMPMNYGPGHGYDGEERAVSDSFGPGEWDDRKVRHTFIRKVYSII

SEQ ID NO: 90756 - protein, 91 aa, Homo sapiens
  Payload ID: 18143
  Gene Name: transmembrane BAX inhibitor motif containing 1
  ENSP ID: ENSP00000410771
MSNPSAPPPYEDRNPLYPGPPPPGGYGQPSVLPGGYPAYPGYPQPGYGHPAGYPQPMPPTHPMPMNYGPGHGYDGEERAVSDSFGPGEWDD

SEQ ID NO: 90757 - protein, 107 aa, Homo sapiens
  Payload ID: 18143
  Gene Name: transmembrane BAX inhibitor motif containing 1
  ENSP ID: ENSP00000412518
MSNPSAPPPYEDRNPLYPGPPPPGGYGQPSVLPGGYPAYPGYPQPGYGHPAGYPQPMPPTHPMPMNYGPGHGYDGEERAVSDSFGPGEWDDRKVRHTFIRKVYSIIS

SEQ ID NO: 90758 - protein, 8 aa, Homo sapiens
  Payload ID: 18143
  Gene Name: transmembrane BAX inhibitor motif containing 1
  ENSP ID: ENSP00000413624
MSNPSAPP

SEQ ID NO: 90759 - protein, 140 aa, Homo sapiens
  Payload ID: 18143
  Gene Name: transmembrane BAX inhibitor motif containing 1
  ENSP ID: ENSP00000414572
MSNPSAPPPYEDRNPLYPGPPPPGGYGQPSVLPGGYPAYPGYPQPGYGHPAGYPQPMPPTHPMPMNYGPGHGYDGEERAVSDSFGPGEWDDRKVRHTFIRKVYSIISVQLLITVAIIAIFTFVEPVSAFVRRNVAVYYVS

SEQ ID NO: 90760 - protein, 285 aa, Homo sapiens
  Payload ID: 18144
  Gene Name: transmembrane BAX inhibitor motif containing 4
  ENSP ID: ENSP00000286424
MADPDPRYPRSSIEDDFNYGSSVASATVHIRMVLQRDCTFSKQYMRIPSAPSATLNIIRFFHLRQSGRSGMVNIFYKGPTFLRKVYSILSLQVLLTTVTSTVFLYFESVRTFVHESPALILLFALGSLGLIFALILNRHKYPLNLYLLFGFTLLEALTVAVVVTFYDVYIILQAFILTTTVFFGLTVYTLQSKKDFSKFGAGLFALLWILCLSGFLKFFFYSEIMELVLAAAGALLFCGFIIYDTHSLMHKLSPEEYVLAAISLYLDIINLFLHLLRFLEAVNKK

SEQ ID NO: 90761 - protein, 238 aa, Homo sapiens
  Payload ID: 18144
  Gene Name: transmembrane BAX inhibitor motif containing 4
  Uniprot ID: Q9HC24
  ENSP ID: ENSP00000350965
MADPDPRYPRSSIEDDFNYGSSVASATVHIRMAFLRKVYSILSLQVLLTTVTSTVFLYFESVRTFVHESPALILLFALGSLGLIFALILNRHKYPLNLYLLFGFTLLEALTVAVVVTFYDVYIILQAFILTTTVFFGLTVYTLQSKKDFSKFGAGLFALLWILCLSGFLKFFFYSEIMELVLAAAGALLFCGFIIYDTHSLMHKLSPEEYVLAAISLYLDIINLFLHLLRFLEAVNKK

SEQ ID NO: 90762 - protein, 161 aa, Homo sapiens
  Payload ID: 18144
  Gene Name: transmembrane BAX inhibitor motif containing 4
  ENSP ID: ENSP00000381114
MADPDPRYPRSSIEDDFNYGSSVASATVHIRMAFLRKVYSILSLQVLLTTVTSTVFLYFESVRTFVHESPALILLFALGSLGLIFALILNRHKYPLNLYLLFGFTLLEALTVAVVVTFYDVYIILQAFILTTTVFFGLTVYTLQSKKDFSKFGAGFFFIVR

SEQ ID NO: 90763 - protein, 47 aa, Homo sapiens
  Payload ID: 18144
  Gene Name: transmembrane BAX inhibitor motif containing 4
  ENSP ID: ENSP00000438957
MADPDPRYPRSSIEDDFNYGSSVASATVHIRMDAVGSSDCGSCCYFL

SEQ ID NO: 90764 - protein, 43 aa, Homo sapiens
  Payload ID: 18144
  Gene Name: transmembrane BAX inhibitor motif containing 4
  ENSP ID: ENSP00000439310
MADPDPRYPRSSIEDDFNYGSSVASATVHIRMGPRMQQVFEDY

SEQ ID NO: 90765 - protein, 43 aa, Homo sapiens; identical to SEQ ID NO: 90764
  Payload ID: 18144
  Gene Name: transmembrane BAX inhibitor motif containing 4
  ENSP ID: ENSP00000440964

SEQ ID NO: 90766 - protein, 162 aa, Homo sapiens
  Payload ID: 18144
  Gene Name: transmembrane BAX inhibitor motif containing 4
  ENSP ID: ENSP00000441291
MADPDPRYPRSSIEDDFNYGSSVASATVHIRMAFLRKVYSILSLQVLLTTVTSTVFLYFESVRTFVHESPALILLFALGSLGLIFALILNRHKYPLNLYLLFGFTLLEALTVAVVVTFYDVYIILQAFILTTTVFFGLTVYTLQSKKDFSKFGAGILEVFFL

SEQ ID NO: 90767 - protein, 61 aa, Homo sapiens
  Payload ID: 18144
  Gene Name: transmembrane BAX inhibitor motif containing 4
  ENSP ID: ENSP00000444639
MELVLAAAGALLFCGFIIYDTHSLMHKLSPEEYVLAAISLYLDIINLFLHLLRFLEAVNKK

SEQ ID NO: 90768 - protein, 162 aa, Homo sapiens
  Payload ID: 18144
  Gene Name: transmembrane BAX inhibitor motif containing 4
  ENSP ID: ENSP00000451688
MADPDPRYPRSSIEDDFNYGSSVASATVHIRMAFLRKVYSILSLQVLLTTVTSTVFLYFESVRTFVHESPALILLFALGSLGLIFALILNRHKYPLNLYLLFGFTLLEALTVAVVVTFYDVYIILQAFILTTTVFFGLTVYTLQSKKDFSKFGAGIMDIFFL

SEQ ID NO: 90769 - protein, 210 aa, Homo sapiens
  Payload ID: 18144
  Gene Name: transmembrane BAX inhibitor motif containing 4
  ENSP ID: ENSP00000481025
MADPDPRYPRSSIEDDFNYGSSVASATVHIRMAFLRKVYSILSLQVLLTTVTSTVFLYFESVRTFVHESPALILLFALGSLGLIFALILNRHKYPLNLYLLFGFTLLEALTVAVVVTFYDVYIILQAFILTTTVFFGLTVYTLQSKKDFSKFGAGLFALLWILPVRILEVFFYSEIMELVLAAAGALLFCGFIIYDTHSLMHKLSPKSTY

SEQ ID NO: 90770 - protein, 43 aa, Homo sapiens; identical to SEQ ID NO: 90764
  Payload ID: 18144
  Gene Name: transmembrane BAX inhibitor motif containing 4
  ENSP ID: ENSP00000488791

SEQ ID NO: 90771 - protein, 46 aa, Homo sapiens
  Payload ID: 18144
  Gene Name: transmembrane BAX inhibitor motif containing 4
  ENSP ID: ENSP00000488909
MADPDPRYPRSSIEDDFNYGSSVASATVHIRMGSLNYSDFNSFFIL

SEQ ID NO: 90772 - protein, 207 aa, Homo sapiens
  Payload ID: 18145
  Gene Name: transmembrane BAX inhibitor motif containing 4 [Source:EntrezGene
  Acc:51643]
  ENSP ID: ENSP00000488848
MAAAWPPPPCTSEWVLLTTVTSTVFLYFESVRTFVHESPALILLFALGSLGLIFALILNRHKYPLNLYLLFGFTLLEALTVAVVVTFYDVYIILQAFILTTTVFFGLTVYTLQSKKDFSKFGAGLFALLWILCLSGFLKFFFYSEIMELVLAAAGALLFCGFIIYDTHSLMHKLSPEEYVLAAISLYLDIINLFLHLLRFLEAVNKK

SEQ ID NO: 90773 - protein, 237 aa, Homo sapiens
  Payload ID: 18146
  Gene Name: transmembrane BAX inhibitor motif containing 6
  Uniprot ID: P55061
  ENSP ID: ENSP00000267115
MNIFDRKINFDALLKFSHITPSTQQHLKKVYASFALCMFVAAAGAYVHMVTHFIQAGLLSALGSLILMIWLMATPHSHETEQKRLGLLAGFAFLTGVGLGPALEFCIAVNPSILPTAFMGTAMIFTCFTLSALYARRRSYLFLGGILMSALSLLLLSSLGNVFFGSIWLFQANLYVGLVVMCGFVLFDTQLIIEKAEHGDQDYIWHCIDLFLDFITVFRKLMMILAMNEKDKKKEKK

SEQ ID NO: 90774 - protein, 237 aa, Homo sapiens; identical to SEQ ID NO: 90773
  Payload ID: 18146
  Gene Name: transmembrane BAX inhibitor motif containing 6
  Uniprot ID: P55061
  ENSP ID: ENSP00000378454

SEQ ID NO: 90775 - protein, 295 aa, Homo sapiens
  Payload ID: 18146
  Gene Name: transmembrane BAX inhibitor motif containing 6
  Uniprot ID: P55061
  ENSP ID: ENSP00000389277
MSHSSVTREAPQLLSQRQRREVRGVWGWGCLPGPRGGPALFGLVTFGQSGDCCTDSGTMNIFDRKINFDALLKFSHITPSTQQHLKKVYASFALCMFVAAAGAYVHMVTHFIQAGLLSALGSLILMIWLMATPHSHETEQKRLGLLAGFAFLTGVGLGPALEFCIAVNPSILPTAFMGTAMIFTCFTLSALYARRRSYLFLGGILMSALSLLLLSSLGNVFFGSIWLFQANLYVGLVVMCGFVLFDTQLIIEKAEHGDQDYIWHCIDLFLDFITVFRKLMMILAMNEKDKKKEKK

SEQ ID NO: 90776 - protein, 108 aa, Homo sapiens
  Payload ID: 18146
  Gene Name: transmembrane BAX inhibitor motif containing 6
  ENSP ID: ENSP00000446668
MNIFDRKINFDALLKFSHITPSTQQHLKKVYASFALCMFVAAAGAYVHMVTHFIQAGLLSALGSLILMIWLMATPHSHETEQKRLGLLAGFAFLTGVGLGPALEFCIA

SEQ ID NO: 90777 - protein, 295 aa, Homo sapiens; identical to SEQ ID NO: 90775
  Payload ID: 18146
  Gene Name: transmembrane BAX inhibitor motif containing 6
  Uniprot ID: P55061
  ENSP ID: ENSP00000446734

SEQ ID NO: 90778 - protein, 200 aa, Homo sapiens
  Payload ID: 18146
  Gene Name: transmembrane BAX inhibitor motif containing 6
  ENSP ID: ENSP00000447030
MFVAAAGAYVHMVTHFIQAGLLSALGSLILMIWLMATPHSHETEQKRLGLLAGFAFLTGVGLGPALEFCIAVNPSILPTAFMGTAMIFTCFTLSALYARRRSYLFLGGILMSALSLLLLSSLGNVFFGSIWLFQANLYVGLVVMCGFVLFDTQLIIEKAEHGDQDYIWHCIDLFLDFITVFRKLMMILAMNEKDKKKEKK

SEQ ID NO: 90779 - protein, 16 aa, Homo sapiens
  Payload ID: 18146
  Gene Name: transmembrane BAX inhibitor motif containing 6
  ENSP ID: ENSP00000447074
MNIFDRKINFDALLKF

SEQ ID NO: 90780 - protein, 95 aa, Homo sapiens
  Payload ID: 18146
  Gene Name: transmembrane BAX inhibitor motif containing 6
  ENSP ID: ENSP00000447400
MNIFDRKINFDALLKFSHITPSTQQHLKKVYASFALCMFVAAAGAYVHMVTHFIQAGLLSALGSLILMIWLMATPHSHETEQKRLGLLAGFAFLT

SEQ ID NO: 90781 - protein, 10 aa, Homo sapiens
  Payload ID: 18146
  Gene Name: transmembrane BAX inhibitor motif containing 6
  ENSP ID: ENSP00000447888
MNIFDRKINF

SEQ ID NO: 90782 - protein, 237 aa, Homo sapiens; identical to SEQ ID NO: 90773
  Payload ID: 18146
  Gene Name: transmembrane BAX inhibitor motif containing 6
  Uniprot ID: P55061
  ENSP ID: ENSP00000448036

SEQ ID NO: 90783 - protein, 138 aa, Homo sapiens
  Payload ID: 18146
  Gene Name: transmembrane BAX inhibitor motif containing 6
  ENSP ID: ENSP00000448269
MNIFDRKINFDALLKFSHITPSTQQHLKKVYASFALCMFVAAAGAYVHMVTHFIQAGLLSALGSLILMIWLMATPHSHETEQKRLGLLAGFAFLTGVGLGPALEFCIAVNPSILPTAFMGTAMIFTCFTLSALYARRR

SEQ ID NO: 90784 - protein, 95 aa, Homo sapiens; identical to SEQ ID NO: 90780
  Payload ID: 18146
  Gene Name: transmembrane BAX inhibitor motif containing 6
  ENSP ID: ENSP00000448612

SEQ ID NO: 90785 - protein, 11 aa, Homo sapiens
  Payload ID: 18146
  Gene Name: transmembrane BAX inhibitor motif containing 6
  ENSP ID: ENSP00000449000
MNIFDRKINFD

SEQ ID NO: 90786 - protein, 44 aa, Homo sapiens
  Payload ID: 18146
  Gene Name: transmembrane BAX inhibitor motif containing 6
  ENSP ID: ENSP00000449421
MNIFDRKINFDALLKFSHITPSTQQHLKKVYASFALCMFVAAAG

SEQ ID NO: 90787 - protein, 95 aa, Homo sapiens; identical to SEQ ID NO: 90780
  Payload ID: 18146
  Gene Name: transmembrane BAX inhibitor motif containing 6
  ENSP ID: ENSP00000449904

SEQ ID NO: 90788 - protein, 145 aa, Homo sapiens
  Payload ID: 18146
  Gene Name: transmembrane BAX inhibitor motif containing 6
  ENSP ID: ENSP00000449907
MNIFDRKINFDALLKFSHITPSTQQHLKKVYASFALCMFVAAAGAYVHMVTHFIQAGLLSALGSLILMIWLMATPHSHETEQKRLGLLAGFAFLTGVGLGPALEFCIAVNPSILPTAFMGTAMIFTCFTLSALYARRRSYLFLGG

SEQ ID NO: 90789 - protein, 113 aa, Homo sapiens
  Payload ID: 18146
  Gene Name: transmembrane BAX inhibitor motif containing 6
  ENSP ID: ENSP00000450050
MNIFDRKINFDALLKFSHITPSTQQHLKKVYASFALCMFVAAAGAYVHMVTHFIQAGLLSALGSLILMIWLMATPHSHETEQKRLGLLAGFAFLTGVGLGPALEFCIAVNPSP

SEQ ID NO: 90790 - protein, 237 aa, Homo sapiens; identical to SEQ ID NO: 90773
  Payload ID: 18146
  Gene Name: transmembrane BAX inhibitor motif containing 6
  Uniprot ID: P55061
  ENSP ID: ENSP00000450158

SEQ ID NO: 90791 - protein, 145 aa, Homo sapiens; identical to SEQ ID NO: 90788
  Payload ID: 18146
  Gene Name: transmembrane BAX inhibitor motif containing 6
  ENSP ID: ENSP00000450159

SEQ ID NO: 90792 - protein, 130 aa, Homo sapiens
  Payload ID: 18146
  Gene Name: transmembrane BAX inhibitor motif containing 6
  ENSP ID: ENSP00000450265
MNIFDRKINFDALLKFSHITPSTQQHLKKVYASFALCMFVAAAGAYVHMVTHFIQAGLLSALGSLILMIWLMATPHSHETEQKRLGLLAGFAFLTGVGLGPALEFCIAVNPSILPTAFMGTAMIFTCFTL

SEQ ID NO: 90793 - protein, 89 aa, Homo sapiens
  Payload ID: 18146
  Gene Name: transmembrane BAX inhibitor motif containing 6
  ENSP ID: ENSP00000450305
MNIFDRKINFDALLKFSHITPSTQQHLKKVYASFALCMFVAAAGAYVHMVTHFIQAGLLSALGSLILMIWLMATPHSHETEQKRLGLLA

SEQ ID NO: 90794 - protein, 41 aa, Homo sapiens
  Payload ID: 18146
  Gene Name: transmembrane BAX inhibitor motif containing 6
  ENSP ID: ENSP00000450417
MNIFDRKINFDALLKFSHITPSTQQHLKKVYASFALCMFVA

SEQ ID NO: 90795 - protein, 760 aa, Homo sapiens
  Payload ID: 18147
  Gene Name: transmembrane channel-like 1
  Uniprot ID: Q8TDI8
  ENSP ID: ENSP00000297784
MSPKKVQIKVEEKEDETEESSSEEEEEVEDKLPRRESLRPKRKRTRDVINEDDPEPEPEDEETRKAREKERRRRLKRGAEEEEIDEEELERLKAELDEKRQIIATVKCKPWKMEKKIEVLKEAKKFVSENEGALGKGKGKRWFAFKMMMAKKWAKFLRDFENFKAACVPWENKIKAIESQFGSSVASYFLFLRWMYGVNMVLFILTFSLIMLPEYLWGLPYGSLPRKTVPRAEEASAANFGVLYDFNGLAQYSVLFYGYYDNKRTIGWMNFRLPLSYFLVGIMCIGYSFLVVLKAMTKNIGDDGGGDDNTFNFSWKVFTSWDYLIGNPETADNKFNSITMNFKEAITEEKAAQVEENVHLIRFLRFLANFFVFLTLGGSGYLIFWAVKRSQEFAQQDPDTLGWWEKNEMNMVMSLLGMFCPTLFDLFAELEDYHPLIALKWLLGRIFALLLGNLYVFILALMDEINNKIEEEKLVKANITLWEANMIKAYNASFSENSTGPPFFVHPADVPRGPCWETMVGQEFVRLTVSDVLTTYVTILIGDFLRACFVRFCNYCWCWDLEYGYPSYTEFDISGNVLALIFNQGMIWMGSFFAPSLPGINILRLHTSMYFQCWAVMCCNVPEARVFKASRSNNFYLGMLLLILFLSTMPVLYMIVSLPPSFDCGPFSGKNRMFEVIGETLEHDFPSWMAKILRQLSNPGLVIAVILVMVLAIYYLNATAKGQKAANLDLKKKMKMQALENKMRNKKMAAARAAAAAGRQ

SEQ ID NO: 90796 - protein, 760 aa, Homo sapiens; identical to SEQ ID NO: 90795
  Payload ID: 18147
  Gene Name: transmembrane channel-like 1
  Uniprot ID: Q8TDI8
  ENSP ID: ENSP00000341433

SEQ ID NO: 90797 - protein, 906 aa, Homo sapiens
  Payload ID: 18148
  Gene Name: transmembrane channel-like 2
  Uniprot ID: Q8TDI7
  ENSP ID: ENSP00000351732
MSHQVKGLKEEARGGVKGRVKSGSPHTGDRLGRRSSSKRALKAEGTPGRRGAQRSQKERAGGSPSPGSPRRKQTGRRRHREELGEQERGEAERTCEGRRKRDERASFQERTAAPKREKEIPRREEKSKRQKKPRSSSLASSASGGESLSEEELAQILEQVEEKKKLIATMRSKPWPMAKKLTELREAQEFVEKYEGALGKGKGKQLYAYKMLMAKKWVKFKRDFDNFKTQCIPWEMKIKDIESHFGSSVASYFIFLRWMYGVNLVLFGLIFGLVIIPEVLMGMPYGSIPRKTVPRAEEEKAMDFSVLWDFEGYIKYSALFYGYYNNQRTIGWLRYRLPMAYFMVGVSVFGYSLIIVIRSMASNTQGSTGEGESDNFTFSFKMFTSWDYLIGNSETADNKYASITTSFKESIVDEQESNKEENIHLTRFLRVLANFLIICCLCGSGYLIYFVVKRSQQFSKMQNVSWYERNEVEIVMSLLGMFCPPLFETIAALENYHPRTGLKWQLGRIFALFLGNLYTFLLALMDDVHLKLANEETIKNITHWTLFNYYNSSGWNESVPRPPLHPADVPRGSCWETAVGIEFMRLTVSDMLVTYITILLGDFLRACFVRFMNYCWCWDLEAGFPSYAEFDISGNVLGLIFNQGMIWMGSFYAPGLVGINVLRLLTSMYFQCWAVMSSNVPHERVFKASRSNNFYMGLLLLVLFLSLLPVAYTIMSLPPSFDCGPFSGKNRMYDVLQETIENDFPTFLGKIFAFLANPGLIIPAILLMFLAIYYLNSVSKSLSRANAQLRKKIQVLREVEKSHKSVKGKATARDSEDTPKSSSKNATQLQLTKEETTPPSASQSQAMDKKAQGPGTSNSASRTTLPASGHLPISRPPGIGPDSGHAPSQTHPWRSASGKSAQRPPH

SEQ ID NO: 90798 - protein, 1100 aa, Homo sapiens
  Payload ID: 18149
  Gene Name: transmembrane channel-like 3
  Uniprot ID: Q7Z5M5
  ENSP ID: ENSP00000352413
MKTSKASQRYRGIRRNASQCYLYQESLLLSNLDDSFSADETGDSNDPEQIFQNIQFQKDLMANIRCRPWTMGQKLRALRQAKNIVLKFEGRLTRTRGYQAAGAELWRKFARLACNFVVIFIPWEMRIKKIESHFGSGVASYFIFLRWLFGINIVLTIMTGAFIVIPELIAGQPFGSTARKTIPKEQVSSAQDLDTVWSLGGYLQYSVLFYGYYGRERKIGRAGYRLPLAYFLVGMAVFAYSFIILLKKMAKNSRTSLASASNENYTFCWRVFCAWDYLIGNPEAAESKTAAIVNSIREAILEEQEKKKSKNLAVTICLRIIANILVLLSLAGSIYLIYFVVDRSQKLEQSKKELTLWEKNEVSVVVSLVTMIAPSAFDLIAALEMYHPRTTLRFQLARVLVLYLGNLYSLIIALLDKVNSMSIEEMATKNNTSHWIDSTTFFATRTAPEEEKWSTSRPGMGLRRNNTWALEETSISAYTMPLIKANKTSLHTQSPQDQCWETYVGQEMLKLSIIDMLFTVASILLIDFFRGLFVRYLSDYWCWDLESKFPEYGEFKIAENVLHLVYNQGMIWMGAFFSPCLPAFNVLKLIGLMYLRSWAVLTCNVPHQQVFRASRSNNFYLAMLLFMLFLCMLPTIFAIVRYKPSLNCGPFSGQEKIYDIVSETIEKDFPVWFGSVVGHISSPVVILPAVLLLFMLIYYLQSIARSLKLSNHQLKMQIQNARSEDKKKVAQMVEARIQTQEESTKKLPNDSDLTSQLSSAHSGTPQNNGNVAHFDSGSSKSGRIETVAQSMPQSPRPGDRAPSSPLPGVPKSRLEHETNRYLHGLCASTSDLHRNRSRTPMTFTTHIEDVHSEPLFRKDFQQINPPHRGPQASTLLAQGPRPHAPRYYVINECDSYKKKHLNVWPERHFKIDASGDIVELYPRNVRQYASRVPRQPPSPQLSEEEEETPSRDWIKRSLPPRSLIDLRRAPHFYIGERSESQTRDPEHQGRVHYKSWNEDFEGHLERPAYVPRKPRSRNFQYPQPPLKPRGKPRFEPSLTESDSVSAASSSDQQNSSADQYLQVTHSQGRFPRSVGQPSRRKAKSGQELTVDLDDLICSDV

SEQ ID NO: 90799 - protein, 1101 aa, Homo sapiens
  Payload ID: 18149
  Gene Name: transmembrane channel-like 3
  ENSP ID: ENSP00000452681
MKTSKASQRYRGIRRNASQCYLYQESLLLSNLDDSFSADETGDSNDPEQIFQNIQFQKDLMANIRCRPWTMGQKLRALRQAKNIVLKFEGRLTRTRGYQAAGAELWRKFARLACNFVVIFIPWEMRIKKIESHFGSGVASYFIFLRWLFGINIVLTIMTGAFIVIPELIAGQPFGSTARKTIPKEQVSSAQDLDTVWSLGGYLQYSVLFYGYYGRERKIGRAGYRLPLAYFLVGMAVFAYSFIILLKKMAKNSRTSLASASNENYTFCWRVFCAWDYLIGNPEAAESKTAAIVNSIREAILEEQEKKKSKNLAVTICLRIIANILVLLSLAGSIYLIYFVVDRSQKLEQSKKELTLWEKNEQVSVVVSLVTMIAPSAFDLIAALEMYHPRTTLRFQLARVLVLYLGNLYSLIIALLDKVNSMSIEEMATKNNTSHWIDSTTFFATRTAPEEEKWSTSRPGMGLRRNNTWALEETSISAYTMPLIKANKTSLHTQSPQDQCWETYVGQEMLKLSIIDMLFTVASILLIDFFRGLFVRYLSDYWCWDLESKFPEYGEFKIAENVLHLVYNQGMIWMGAFFSPCLPAFNVLKLIGLMYLRSWAVLTCNVPHQQVFRASRSNNFYLAMLLFMLFLCMLPTIFAIVRYKPSLNCGPFSGQEKIYDIVSETIEKDFPVWFGSVVGHISSPVVILPAVLLLFMLIYYLQSIARSLKLSNHQLKMQIQNARSEDKKKVAQMVEARIQTQEESTKKLPNDSDLTSQLSSAHSGTPQNNGNVAHFDSGSSKSGRIETVAQSMPQSPRPGDRAPSSPLPGVPKSRLEHETNRYLHGLCASTSDLHRNRSRTPMTFTTHIEDVHSEPLFRKDFQQINPPHRGPQASTLLAQGPRPHAPRYYVINECDSYKKKHLNVWPERHFKIDASGDIVELYPRNVRQYASRVPRQPPSPQLSEEEEETPSRDWIKRSLPPRSLIDLRRAPHFYIGERSESQTRDPEHQGRVHYKSWNEDFEGHLERPAYVPRKPRSRNFQYPQPPLKPRGKPRFEPSLTESDSVSAASSSDQQNSSADQYLQVTHSQGRFPRSVGQPSRRKAKSGQELTVDLDDLICSDV

SEQ ID NO: 90800 - protein, 175 aa, Homo sapiens
  Payload ID: 18150
  Gene Name: transmembrane channel-like 4
  ENSP ID: ENSP00000416444
MQARRAHRQRNASRDQVVYGSGTKTDRWARLLRRSKEKTKEGLRSLQPWAWTLKRIGGQFGAGTESYFSLLRFLLLLNVLASVLMACMTLLPTWLGGAPPGPPGPDISSPCGSYNPHSQGLVTFATQLFNLLSGEGYLEWSPLFYGFYPPRPRLAVTYLCWAFAVGLICLLLILH

SEQ ID NO: 90801 - protein, 712 aa, Homo sapiens
  Payload ID: 18150
  Gene Name: transmembrane channel-like 4
  ENSP ID: ENSP00000477627
MEENPTLESEAWGSSREWLAPREARGAPCSSPGPSLSSVLNELPSAATLRYRDPGVLPWGALEEEEEDGGRSRKAFTEVTQTELQDPHPSRELPWPMQARRAHRQRNASRDQVVYGSGTKTDRWARLLRRSKEKTKEGLRSLQPWAWTLKRIGGQFGAGTESYFSLLRFLLLLNVLASVLMACMTLLPTWLGGAPPGPPGPDISSPCGSYNPHSQGLVTFATQLFNLLSGEGYLEWSPLFYGFYPPRPRLAVTYLCWAFAVGLICLLLILHRSVSGLKQTLLAESEALTSYSHRVFSAWDFGLCGDVHVRLRQRIILYELKVELEETVVRRQAAVRTLGQQARVWLVRVLLNLLVVALLGAAFYGVYWATGCTVELQEMPLVQELPLLKLGVNYLPSIFIAGVNFVLPPVFKLIAPLEGYTRSRQIVFILLRTVFLRLASLVVLLFSLWNQITCGGDSEAEDCKTCGYNYKQLPCWETVLGQEMYKLLLFDLLTVLAVALLIQFPRKLLCGLCPGALGRLAGTQEFQVPDEVLGLIYAQTVVWVGSFFCPLLPLLNTVKFLLLFYLKKLTLFSTCSPAARTFRASAANFFFPLVLLLGLAISSVPLLYSIFLIPPSKLCGPFRGQSSIWAQIPESISSLPETTQNFLFFLGTQAFAVPLLLISSILMAYTVALANSYGRLISELKRQRETEAQNKVFLARRAVALTSTKPAL

SEQ ID NO: 90802 - protein, 712 aa, Homo sapiens
  Payload ID: 18150
  Gene Name: transmembrane channel-like 4
  ENSP ID: ENSP00000477927
MEENPTLESEAWGSSRGWLAPREARGAPCSSPGPSLSSVLNELPSAATLRYRDPGVLPWGALEEEEEDGGRSRKAFTEVTQTELQDPHPSRELPWPMQARRAHRQRNASRDQVVYGSGTKTDRWARLLRRSKEKTKEGLRSLQPWAWTLKRIGGQFGAGTESYFSLLRFLLLLNVLASVLMACMTLLPTWLGGAPPGPPGPDISSPCGSYNPHSQGLVTFATQLFNLLSGEGYLEWSPLFYGFYPPRPRLAVTYLCWAFAVGLICLLLILHRSVSGLKQTLLAESEALTSYSHRVFSAWDFGLCGDVHVRLRQRIILYELKVELEETVVRRQAAVRTLGQQARVWLVRVLLNLLVVALLGAAFYGVYWATGCTVELQEMPLVQELPLLKLGVNYLPSIFIAGVNFVLPPVFKLIAPLEGYTRSRQIVFILLRTVFLRLASLVVLLFSLWNQITCGGDSEAEDCKTCGYNYKQLPCWETVLGQEMYKLLLFDLLTVLAVALLIQFPRKLLCGLCPGALGRLAGTQEFQVPDEVLGLIYAQTVVWVGSFFCPLLPLLNTVKFLLLFYLKKLTLFSTCSPAARTFRASAANFFFPLVLLLGLAISSVPLLYSIFLIPPSKLCGPFRGQSSIWAQIPESISSLPETTQNFLFFLGTQAFAVPLLLISSILMAYTVALANSYGRLISELKRQRQTEAQNKVFLARRAVALTSTKPAL

SEQ ID NO: 90803 - protein, 712 aa, Homo sapiens; identical to SEQ ID NO: 90802
  Payload ID: 18150
  Gene Name: transmembrane channel-like 4
  ENSP ID: ENSP00000477941

SEQ ID NO: 90804 - protein, 712 aa, Homo sapiens; identical to SEQ ID NO: 90802
  Payload ID: 18150
  Gene Name: transmembrane channel-like 4
  Uniprot ID: Q7Z404
  ENSP ID: ENSP00000478046

SEQ ID NO: 90805 - protein, 706 aa, Homo sapiens
  Payload ID: 18150
  Gene Name: transmembrane channel-like 4
  ENSP ID: ENSP00000479458
MEENPTLESEAWGSSREWLAPREARGGPSLSSVLNELPSAATLRYRDPGVLPWGALEEEEEDGGRSRKAFTEVTQTELQDPHPSRELPWPMQARRAHRQRNASRDQVVYGSGTKTDRWARLLRRSKEKTKEGLRSLQPWAWTLKRIGGQFGAGTESYFSLLRFLLLLNVLASVLMACMTLLPTWLGGAPPGPPGPDISSPCGSYNPHSQGLVTFATQLFNLLSGEGYLEWSPLFYGFYPPRPRLAVTYLCWAFAVGLICLLLILHRSVSGLKQTLLAESEALTSYSHRVFSAWDFGLCGDVHVRLRQRIILYELKVELEETVVRRQAAVRTLGQQARVWLVRVLLNLLVVALLGAAFYGVYWATGCTVELQEMPLVQELPLLKLGVNYLPSIFIAGVNFVLPPVFKLIAPLEGYTRSRQIVFILLRTVFLRLASLVVLLFSLWNQITCGGDSEAEDCKTCGYNYKQLPCWETVLGQEMYKLLLFDLLTVLAVALLIQFPRKLLCGLCPGALGRLAGTQEFQVPDEVLGLIYAQTVVWVGSFFCPLLPLLNTVKFLLLFYLKKLTLFSTCSPAARTFRASAANFFFPLVLLLGLAISSVPLLYSIFLIPPSKLCGPFRGQSSIWAQIPESISSLPETTQNFLFFLGTQAFAVPLLLISSILMAYTVALANSYGRLISELKRQRETEAQNKVFLARRAVALTSTKPAL

SEQ ID NO: 90806 - protein, 706 aa, Homo sapiens
  Payload ID: 18150
  Gene Name: transmembrane channel-like 4
  ENSP ID: ENSP00000479590
MEENPTLESEAWGSSREWLAPREARGGPSLSSVLNELPSAATLRYRDPGVLPWGALEEEEEDGGRSRKAFTEVTQTELQDPHPSRELPWPMQARRAYRQRNASRDQVVYGSGTKTDRWARLLRRSKEKTKEGLRSLQPWAWTLKRIGGQFGAGTESYFSLLRFLLLLNVLASVLMACMTLLPTWLGGAPPGPPGPDISSPCGSYNPHSQGLVTFATQLFNLLSGEGYLEWSPLFYGFYPPRPRLAVTYLCWAFAVGLICLLLILHRSVSGLKQTLLAESEALTSYSHRVFSAWDFGLCGDVHVRLRQRIILYELKVELEETVVRRQAAVRTLGQQARVWLVRVLLNLLVVALLGAAFYGVYWATGCTVELQEMPLVQELPLLKLGVNYLPSIFIAGVNFVLPPVFKLIAPLEGYTRSRQIVFILLRTVFLRLASLVVLLFSLWNQITCGGDSEAEDCKTCGYNYKQLPCWETVLGQEMYKLLLFDLLTVLAVALLIQFPRKLLCGLCPGALGRLAGTQEFQVPDEVLGLIYAQTVVWVGSFFCPLLPLLNTVKFLLLFYLKKLTLFSTCSPAARTFRASAANFFFPLVLLLGLAISSVPLLYSIFLIPPSKLCGPFRGQSSIWAQIPESISSLPETTQNFLFFLGTQAFAVPLLLISSILMAYTVALANSYGRLISELKRQRETEAQNKVFLARRAVALTSTKPAL

SEQ ID NO: 90807 - protein, 706 aa, Homo sapiens
  Payload ID: 18150
  Gene Name: transmembrane channel-like 4
  ENSP ID: ENSP00000479689
MEENPTLESEAWGSSREWLAPREARGGPSLSSVLNELPSAATLRYRDPGVLPWGALEEEEEDGGRSRKAFTEVTQTELQDPHPSRELPWPMQARRAYRQRNASRDQVVYGSGTKTDRWARLLRRSKEKTKEGLRSLQPWAWTLKRIGGQFGAGTESYFSLLRFLLLLNVLASVLMACMTLLPTWLGGAPPGPPGPDISSPCGSYNPHSQGLVTFATQLFNLLSGEGYLEWSPLFYGFYPPRPRLAVTYLCWAFAVGLICLLLILHRSVSGLKQTLLAESEALTSYSHRVFSAWDFGLCGDVHVRLRQRIILYELKVELEETVVRRQAAVRTLGQQARVWLVRVLLNLLVVALLGAAFYGVYWATGCTVELQEMPLVQELPLLKLGVNYLPSIFIAGVNFVLPPVFKLIAPLEGYTRSRQIVFILLRTVFLRLASLVVLLFSLWNQITCGGDSEAEDCKTCGYNYKQLPCWETVLGQEMYKLLLFDLLTVLAVALLIQFPRKLLCGLCPGALGRLAGTQEFQVPDEVLGLIYAQTVVWVGSFFCPLLPLLNTVKFLLLFYLKKLTLFSTCSPAARTFRASAANFFFPLVLLLGLAISSVPLLYSIFLIPPSKLCGPFRGQSSIWAQIPESISSLPETTQNFLFFLGTQAFAVPLLLISSILMAYTVALANSYGRLISELKRQRQTEAQNKVFLARRAVALTSTKPAL

SEQ ID NO: 90808 - protein, 239 aa, Homo sapiens
  Payload ID: 18150
  Gene Name: transmembrane channel-like 4
  ENSP ID: ENSP00000481093
  MOD_RES (1)..(1): Any amino acid
XPSLSSVLNELPSAATLRYRDPGVLPWGALEEEEEDGGRSRKAFTEVTQTELQDPHPSRELPWPMQARRAHRQRNASRDQVVYGSGTKTDRWARLLRRSKEKTKEGLRSLQPWAWTLKRIGGQFGAGTESYFSLLRFLLLLNVLASVLMACMTLLPTWLGGAPPGPPGPDISSPCGSYNPHSQGLVTFATQLFNLLSGEGYLEWSPLFYGFYPPRPRLAVTYLCWAFAVGLICLLLILH

SEQ ID NO: 90809 - protein, 712 aa, Homo sapiens; identical to SEQ ID NO: 90802
  Payload ID: 18150
  Gene Name: transmembrane channel-like 4
  ENSP ID: ENSP00000481281

SEQ ID NO: 90810 - protein, 55 aa, Homo sapiens
  Payload ID: 18150
  Gene Name: transmembrane channel-like 4
  ENSP ID: ENSP00000481392
PESISSLPETTQNFLFFLGTQAFAVPLLLISRSQTFGYNGRACQEWLPFLSPSAS

SEQ ID NO: 90811 - protein, 706 aa, Homo sapiens
  Payload ID: 18150
  Gene Name: transmembrane channel-like 4
  Uniprot ID: Q7Z404
  ENSP ID: ENSP00000481629
MEENPTLESEAWGSSRGWLAPREARGGPSLSSVLNELPSAATLRYRDPGVLPWGALEEEEEDGGRSRKAFTEVTQTELQDPHPSRELPWPMQARRAHRQRNASRDQVVYGSGTKTDRWARLLRRSKEKTKEGLRSLQPWAWTLKRIGGQFGAGTESYFSLLRFLLLLNVLASVLMACMTLLPTWLGGAPPGPPGPDISSPCGSYNPHSQGLVTFATQLFNLLSGEGYLEWSPLFYGFYPPRPRLAVTYLCWAFAVGLICLLLILHRSVSGLKQTLLAESEALTSYSHRVFSAWDFGLCGDVHVRLRQRIILYELKVELEETVVRRQAAVRTLGQQARVWLVRVLLNLLVVALLGAAFYGVYWATGCTVELQEMPLVQELPLLKLGVNYLPSIFIAGVNFVLPPVFKLIAPLEGYTRSRQIVFILLRTVFLRLASLVVLLFSLWNQITCGGDSEAEDCKTCGYNYKQLPCWETVLGQEMYKLLLFDLLTVLAVALLIQFPRKLLCGLCPGALGRLAGTQEFQVPDEVLGLIYAQTVVWVGSFFCPLLPLLNTVKFLLLFYLKKLTLFSTCSPAARTFRASAANFFFPLVLLLGLAISSVPLLYSIFLIPPSKLCGPFRGQSSIWAQIPESISSLPETTQNFLFFLGTQAFAVPLLLISSILMAYTVALANSYGRLISELKRQRQTEAQNKVFLARRAVALTSTKPAL

SEQ ID NO: 90812 - protein, 712 aa, Homo sapiens; identical to SEQ ID NO: 90802
  Payload ID: 18150
  Gene Name: transmembrane channel-like 4
  Uniprot ID: Q7Z404
  ENSP ID: ENSP00000482261

SEQ ID NO: 90813 - protein, 712 aa, Homo sapiens; identical to SEQ ID NO: 90802
  Payload ID: 18150
  Gene Name: transmembrane channel-like 4
  Uniprot ID: Q7Z404
  ENSP ID: ENSP00000482528

SEQ ID NO: 90814 - protein, 712 aa, Homo sapiens
  Payload ID: 18150
  Gene Name: transmembrane channel-like 4
  ENSP ID: ENSP00000483221
MEENPTLESEAWGSSREWLAPREARGAPCSSPGPSLSSVLNELPSAATLRYRDPGVLPWGALEEEEEDGGRSRKAFTEVTQTELQDPHPSRELPWPMQARRAYRQRNASRDQVVYGSGTKTDRWARLLRRSKEKTKEGLRSLQPWAWTLKRIGGQFGAGTESYFSLLRFLLLLNVLASVLMACMTLLPTWLGGAPPGPPGPDISSPCGSYNPHSQGLVTFATQLFNLLSGEGYLEWSPLFYGFYPPRPRLAVTYLCWAFAVGLICLLLILHRSVSGLKQTLLAESEALTSYSHRVFSAWDFGLCGDVHVRLRQRIILYELKVELEETVVRRQAAVRTLGQQARVWLVRVLLNLLVVALLGAAFYGVYWATGCTVELQEMPLVQELPLLKLGVNYLPSIFIAGVNFVLPPVFKLIAPLEGYTRSRQIVFILLRTVFLRLASLVVLLFSLWNQITCGGDSEAEDCKTCGYNYKQLPCWETVLGQEMYKLLLFDLLTVLAVALLIQFPRKLLCGLCPGALGRLAGTQEFQVPDEVLGLIYAQTVVWVGSFFCPLLPLLNTVKFLLLFYLKKLTLFSTCSPAARTFRASAANFFFPLVLLLGLAISSVPLLYSIFLIPPSKLCGPFRGQSSIWAQIPESISSLPETTQNFLFFLGTQAFAVPLLLISSILMAYTVALANSYGRLISELKRQRQTEAQNKVFLARRAVALTSTKPAL

SEQ ID NO: 90815 - protein, 55 aa, Homo sapiens; identical to SEQ ID NO: 90810
  Payload ID: 18150
  Gene Name: transmembrane channel-like 4
  ENSP ID: ENSP00000483594

SEQ ID NO: 90816 - protein, 712 aa, Homo sapiens
  Payload ID: 18150
  Gene Name: transmembrane channel-like 4
  ENSP ID: ENSP00000483893
MEENPTLESEAWGSSREWLAPREARGAPCSSPGPSLSSVLNELPSAATLRYRDPGVLPWGALEEEEEDGGRSRKAFTEVTQTELQDPHPSRELPWPMQARRAYRQRNASRDQVVYGSGTKTDRWARLLRRSKEKTKEGLRSLQPWAWTLKRIGGQFGAGTESYFSLLRFLLLLNVLASVLMACMTLLPTWLGGAPPGPPGPDISSPCGSYNPHSQGLVTFATQLFNLLSGEGYLEWSPLFYGFYPPRPRLAVTYLCWAFAVGLICLLLILHRSVSGLKQTLLAESEALTSYSHRVFSAWDFGLCGDVHVRLRQRIILYELKVELEETVVRRQAAVRTLGQQARVWLVRVLLNLLVVALLGAAFYGVYWATGCTVELQEMPLVQELPLLKLGVNYLPSIFIAGVNFVLPPVFKLIAPLEGYTRSRQIVFILLRTVFLRLASLVVLLFSLWNQITCGGDSEAEDCKTCGYNYKQLPCWETVLGQEMYKLLLFDLLTVLAVALLIQFPRKLLCGLCPGALGRLAGTQEFQVPDEVLGLIYAQTVVWVGSFFCPLLPLLNTVKFLLLFYLKKLTLFSTCSPAARTFRASAANFFFPLVLLLGLAISSVPLLYSIFLIPPSKLCGPFRGQSSIWAQIPESISSLPETTQNFLFFLGTQAFAVPLLLISSILMAYTVALANSYGRLISELKRQRETEAQNKVFLARRAVALTSTKPAL

SEQ ID NO: 90817 - protein, 712 aa, Homo sapiens; identical to SEQ ID NO: 90802
  Payload ID: 18150
  Gene Name: transmembrane channel-like 4
  Uniprot ID: Q7Z404
  ENSP ID: ENSP00000484205

SEQ ID NO: 90818 - protein, 760 aa, Homo sapiens
  Payload ID: 18151
  Gene Name: transmembrane channel-like 5
  Uniprot ID: Q6UXY8
  ENSP ID: ENSP00000219821
MLSDDHVNEIIIQVENVSSGVQSHPSSNQIFQEKVLLDSSINMVLSISDIDVIDSQTVSKRNDQKGNQVLRFSTSLNESMSQTLHSLECMGIDTPGSSHETVQGQKLIASLIPMTSRDRIKAIRNQPRTMEEKRNLRKIVDKEKSKQTHRILQLNCCIQCLNSISRAYRRSKNSLSEILNSISLWQKTLKIIGGKFGTSVLSYFNFLRWLLKFNIFSFILNFSFIIIPQFTVAKKNTLQFTGLEFFTGVGYFRDTVMYYGFYTNSTIQHGNSGASYNMQLAYIFTIGACLTTCFFSLLFSMAKYFRNNFINPHIYSGGITKLIFCWDFTVTHEKAVKLKQKNLSTEIRENLSELRQENSKLTFNQLLTRFSAYMVAWVVSTGVAIACCAAVYYLAEYNLEFLKTHSNPGAVLLLPFVVSCINLAVPCIYSMFRLVERYEMPRHEVYVLLIRNIFLKISIIGILCYYWLNTVALSGEECWETLIGQDIYRLLLMDFVFSLVNSFLGEFLRRIIGMQLITSLGLQEFDIARNVLELIYAQTLVWIGIFFCPLLPFIQMIMLFIMFYSKNISLMMNFQPPSKAWRASQMMTFFIFLLFFPSFTGVLCTLAITIWRLKPSADCGPFRGLPLFIHSIYSWIDTLSTRPGYLWVVWIYRNLIGSVHFFFILTLIVLIITYLYWQITEGRKIMIRLLHEQIINEGKDKMFLIEKLIKLQDMEKKANPSSLVLERREVEQQGFLHLGEHDGSLDLRSRRSVQEGNPRA

SEQ ID NO: 90819 - protein, 948 aa, Homo sapiens
  Payload ID: 18151
  Gene Name: transmembrane channel-like 5
  Uniprot ID: Q6UXY8
  ENSP ID: ENSP00000370822
MSAYYRNNWSEEDPDYPDYSGSQNRTQGYLKTQGYPDVPGPLNNPDYPGTRSNPYSVASRTRPDYPGSLAEPNYPRSLSNPDYSGTRSNAYSAASRTSPDHPTSLPEPDYSEFQSHPYHRASSRQPDYPGSQRNPDFAGSSSSGNYAGSRTHPDHFGSLEPDYPGAQSNSDHPGPRANLNHPGSRKNLEHTSFRINPYADSLGKPDYPGADIQPNSPPFFGEPDYPSAEDNQNLPSTWREPDYSDAENGHDYGSSETPKMTRGVLSRTSSIQPSFRHRSDDPVGSLWGENDYPEGIEMASMEMANSYGHSLPGAPGSGYVNPAYVGESGPVHAYGNPPLSECDWHKSPQGQKLIASLIPMTSRDRIKAIRNQPRTMEEKRNLRKIVDKEKSKQTHRILQLNCCIQCLNSISRAYRRSKNSLSEILNSISLWQKTLKIIGGKFGTSVLSYFNFLRWLLKFNIFSFILNFSFIIIPQFTVAKKNTLQFTGLEFFTGVGYFRDTVMYYGFYTNSTIQHGNSGASYNMQLAYIFTIGACLTTCFFSLLFSMAKYFRNNFINPHIYSGGITKLIFCWDFTVTHEKAVKLKQKNLSTEIRENLSELRQENSKLTFNQLLTRFSAYMVAWVVSTGVAIACCAAVYYLAEYNLEFLKTHSNPGAVLLLPFVVSCINLAVPCIYSMFRLVERYEMPRHEVYVLLIRNIFLKISIIGILCYYWLNTVALSGEECWETLIGQDIYRLLLMDFVFSLVNSFLGEFLRRIIGMQLITSLGLQEFDIARNVLELIYAQTLVWIGIFFCPLLPFIQMIMLFIMFYSKNISLMMNFQPPSKAWRASQMMTFFIFLLFFPSFTGVLCTLAITIWRIITYLYWQITEGRKIMIRLLHEQIINEGKDKMFLIEKLIKLQDMEKKANPSSLVLERREVEQQGFLHLGEHDGSLDLRSRRSVQEGNPRA

SEQ ID NO: 90820 - protein, 1006 aa, Homo sapiens
  Payload ID: 18151
  Gene Name: transmembrane channel-like 5
  Uniprot ID: Q6UXY8
  ENSP ID: ENSP00000379531
MSAYYRNNWSEEDPDYPDYSGSQNRTQGYLKTQGYPDVPGPLNNPDYPGTRSNPYSVASRTRPDYPGSLAEPNYPRSLSNPDYSGTRSNAYSAASRTSPDHPTSLPEPDYSEFQSHPYHRASSRQPDYPGSQRNPDFAGSSSSGNYAGSRTHPDHFGSLEPDYPGAQSNSDHPGPRANLNHPGSRKNLEHTSFRINPYADSLGKPDYPGADIQPNSPPFFGEPDYPSAEDNQNLPSTWREPDYSDAENGHDYGSSETPKMTRGVLSRTSSIQPSFRHRSDDPVGSLWGENDYPEGIEMASMEMANSYGHSLPGAPGSGYVNPAYVGESGPVHAYGNPPLSECDWHKSPQGQKLIASLIPMTSRDRIKAIRNQPRTMEEKRNLRKIVDKEKSKQTHRILQLNCCIQCLNSISRAYRRSKNSLSEILNSISLWQKTLKIIGGKFGTSVLSYFNFLRWLLKFNIFSFILNFSFIIIPQFTVAKKNTLQFTGLEFFTGVGYFRDTVMYYGFYTNSTIQHGNSGASYNMQLAYIFTIGACLTTCFFSLLFSMAKYFRNNFINPHIYSGGITKLIFCWDFTVTHEKAVKLKQKNLSTEIRENLSELRQENSKLTFNQLLTRFSAYMVAWVVSTGVAIACCAAVYYLAEYNLEFLKTHSNPGAVLLLPFVVSCINLAVPCIYSMFRLVERYEMPRHEVYVLLIRNIFLKISIIGILCYYWLNTVALSGEECWETLIGQDIYRLLLMDFVFSLVNSFLGEFLRRIIGMQLITSLGLQEFDIARNVLELIYAQTLVWIGIFFCPLLPFIQMIMLFIMFYSKNISLMMNFQPPSKAWRASQMMTFFIFLLFFPSFTGVLCTLAITIWRLKPSADCGPFRGLPLFIHSIYSWIDTLSTRPGYLWVVWIYRNLIGSVHFFFILTLIVLIITYLYWQITEGRKIMIRLLHEQIINEGKDKMFLIEKLIKLQDMEKKANPSSLVLERREVEQQGFLHLGEHDGSLDLRSRRSVQEGNPRA

SEQ ID NO: 90821 - protein, 954 aa, Homo sapiens
  Payload ID: 18151
  Gene Name: transmembrane channel-like 5
  ENSP ID: ENSP00000441227
MSAYYRNNWSEEDPDYPDYSGSQNRTQGYLKTQGYPDVPGPLNNPDYPGTRSNPYSVASRTRPDYPGSLAEPNYPRSLSNPDYSGTRSNAYSAASRTSPDHPTSLPEPDYSEFQSHPYHRASSRQPDYPGSQRNPDFAGSSSSGNYAGSRTHPDHFGSLEPDYPGAQSNSDHPGPRANLNHPGSRKNLEHTSFRINPYADSLGKPDYPGADIQPNSPPFFGEPDYPSAEDNQNLPSTWREPDYSDAENGHDYGSSETPKMTRGVLSRTSSIQPSFRHRSDDPVGSLWGENDYPEGIEMASMEMANSYGHSLPGAPGSGYVNPAYVGESGPVHAYGNPPLSECDWHKSPQGQKLIASLIPMTSRDRIKAIRNQPRTMEEKRNLRKIVDKEKSKQTHRILQLNCCIQCLNSISRAYRRSKNSLSEILNSISLWQKTLKIIGGKFGTSVLSYFNFLRWLLKFNIFSFILNFSFIIIPQFTVAKKNTLQFTGLEFFTGVGYFRDTVMYYGFYTNSTIQHGNSGASYNMQLAYIFTIGACLTTCFFSLLFSMAKYFRNNFINPHIYSGGITKLIFCWDFTVTHEKAVKLKQKNLSTEIRFLKTHSNPGAVLLLPFVVSCINLAVPCIYSMFRLVERYEMPRHEVYVLLIRNIFLKISIIGILCYYWLNTVALSGEECWETLIGQDIYRLLLMDFVFSLVNSFLGEFLRRIIGMQLITSLGLQEFDIARNVLELIYAQTLVWIGIFFCPLLPFIQMIMLFIMFYSKNISLMMNFQPPSKAWRASQMMTFFIFLLFFPSFTGVLCTLAITIWRLKPSADCGPFRGLPLFIHSIYSWIDTLSTRPGYLWVVWIYRNLIGSVHFFFILTLIVLIITYLYWQITEGRKIMIRLLHEQIINEGKDKMFLIEKLIKLQDMEKKANPSSLVLERREVEQQGFLHLGEHDGSLDLRSRRSVQEGNPRA

SEQ ID NO: 90822 - protein, 1006 aa, Homo sapiens; identical to SEQ ID NO: 90820
  Payload ID: 18151
  Gene Name: transmembrane channel-like 5
  Uniprot ID: Q6UXY8
  ENSP ID: ENSP00000446274

SEQ ID NO: 90823 - protein, 689 aa, Homo sapiens
  Payload ID: 18151
  Gene Name: transmembrane channel-like 5
  ENSP ID: ENSP00000454710
MLSDDHVNEIIIQKLIASLIPMTSRDRIKAIRNQPRTMEEKRNLSRGGLTITTEDEGRAKAHLTWWKIVDKEKSKQTHRILQLNCCIQCLNSISRAYRRSKNSLSEILNSISLWQKTLKIIGGKFGTSVLSYFNFLRWLLKFNIFSFILNFSFIIIPQFTVAKKNTLQFTGLEFFTGVGYFRDTVMYYGFYTNSTIQHGNSGASYNMQLAYIFTIGACLTTCFFSLLFSMAKYFRNNFINPHIYSGGITKLIFCWDFTVTHEKAVKLKQKNLSTEIRENLSELRQENSKLTFNQLLTRFSAYMVAWVVSTGVAIACCAAVYYLAEYNLEFLKTHSNPGAVLLLPFVVSCINLAVPCIYSMFRLVERYEMPRHEVYVLLIRNIFLKISIIGILCYYWLNTVALSGEECWETLIGQDIYRLLLMDFVFSLVNSFLGEFLRRIIGMQLITSLGLQEFDIARNVLELIYAQTLVWIGIFFCPLLPFIQMIMLFIMFYSKNISLMMNFQPPSKAWRASQMMTFFIFLLFFPSFTGVLCTLAITIWRLKPSADCGPFRGLPLFIHSIYSWIDTLSTRPGYLWVVWIYRNLIGSVHFFFILTLIVLIITYLYWQITEGRKIMIRLLHEQIINEGKDKMFLIEKLIKLQDMEKKANPSSLVLERREVEQQGFLHLGEHDGSLDLRSRRSVQEGNPRA

SEQ ID NO: 90824 - protein, 647 aa, Homo sapiens
  Payload ID: 18151
  Gene Name: transmembrane channel-like 5
  Uniprot ID: Q6UXY8
  ENSP ID: ENSP00000456148
MTSRDRIKAIRNQPRTMEEKRNLRKIVDKEKSKQTHRILQLNCCIQCLNSISRAYRRSKNSLSEILNSISLWQKTLKIIGGKFGTSVLSYFNFLRWLLKFNIFSFILNFSFIIIPQFTVAKKNTLQFTGLEFFTGVGYFRDTVMYYGFYTNSTIQHGNSGASYNMQLAYIFTIGACLTTCFFSLLFSMAKYFRNNFINPHIYSGGITKLIFCWDFTVTHEKAVKLKQKNLSTEIRENLSELRQENSKLTFNQLLTRFSAYMVAWVVSTGVAIACCAAVYYLAEYNLEFLKTHSNPGAVLLLPFVVSCINLAVPCIYSMFRLVERYEMPRHEVYVLLIRNIFLKISIIGILCYYWLNTVALSGEECWETLIGQDIYRLLLMDFVFSLVNSFLGEFLRRIIGMQLITSLGLQEFDIARNVLELIYAQTLVWIGIFFCPLLPFIQMIMLFIMFYSKNISLMMNFQPPSKAWRASQMMTFFIFLLFFPSFTGVLCTLAITIWRLKPSADCGPFRGLPLFIHSIYSWIDTLSTRPGYLWVVWIYRNLIGSVHFFFILTLIVLIITYLYWQITEGRKIMIRLLHEQIINEGKDKMFLIEKLIKLQDMEKKANPSSLVLERREVEQQGFLHLGEHDGSLDLRSRRSVQEGNPRA

SEQ ID NO: 90825 - protein, 32 aa, Homo sapiens
  Payload ID: 18151
  Gene Name: transmembrane channel-like 5
  ENSP ID: ENSP00000458240
  MOD_RES (1)..(1): Any amino acid
XRIGIFFCPLLPFIQMIMLFIMFYSKNIEAFS

SEQ ID NO: 90826 - protein, 42 aa, Homo sapiens
  Payload ID: 18151
  Gene Name: transmembrane channel-like 5
  ENSP ID: ENSP00000461008
  MOD_RES (1)..(1): Any amino acid
XPFVVSCINLAVPCIYSMFRLVERYEMPRHEVYVLLIRRGLM

SEQ ID NO: 90827 - protein, 454 aa, Homo sapiens
  Payload ID: 18152
  Gene Name: transmembrane channel-like 6
  Uniprot ID: Q7Z403
  ENSP ID: ENSP00000306405
MAQPLAFILDVPETPGDQGQGPSPYDESEVHDSFQQLIQEQSQCTAQEGLELQQREREVTGSSQQTLWRPEGTQSTATLRILASMPSRTIGRSRGAIISQYYNRTVQLRCRSSRPLLGNFVRSAWPSLRLYDLELDPTALEEEEKQSLLVKELQSLAVAQRDHMLRGMPLSLAEKRSLREKSRTPRGKWRGQPGSGGVCSCCGRLRYACVLALHSLGLALLSALQALMPWRYALKRIGGQFGSSVLSYFLFLKTLLAFNALLLLLLVAFIMGPQVAFPPALPGPAPVCTGLELLTGAGCFTHTVMYYGHYSNATLNQPCGSPLDGSQCTPRVGGLPYNMPLAYLSTVGVSFFITCITLVYSMAHSFGESYRVGSTSGIHAITVFCSWDYKVTQKRASRLQQDNIRTRLKGEDKIFLINKLHSIYERKEREERSRVGTTEEAAAPPALLTDEQDA

SEQ ID NO: 90828 - protein, 805 aa, Homo sapiens
  Payload ID: 18152
  Gene Name: transmembrane channel-like 6
  Uniprot ID: Q7Z403
  ENSP ID: ENSP00000313408
MAQPLAFILDVPETPGDQGQGPSPYDESEVHDSFQQLIQEQSQCTAQEGLELQQREREVTGSSQQTLWRPEGTQSTATLRILASMPSRTIGRSRGAIISQYYNRTVQLRCRSSRPLLGNFVRSAWPSLRLYDLELDPTALEEEEKQSLLVKELQSLAVAQRDHMLRGMPLSLAEKRSLREKSRTPRGKWRGQPGSGGVCSCCGRLRYACVLALHSLGLALLSALQALMPWRYALKRIGGQFGSSVLSYFLFLKTLLAFNALLLLLLVAFIMGPQVAFPPALPGPAPVCTGLELLTGAGCFTHTVMYYGHYSNATLNQPCGSPLDGSQCTPRVGGLPYNMPLAYLSTVGVSFFITCITLVYSMAHSFGESYRVGSTSGIHAITVFCSWDYKVTQKRASRLQQDNIRTRLKELLAEWQLRHSPRSVCGRLRQAAVLGLVWLLCLGTALGCAVAVHVFSEFMIQSPEAAGQEAVLLVLPLVVGLLNLGAPYLCRVLAALEPHDSPVLEVYVAICRNLILKLAILGTLCYHWLGRRVGVLQGQCWEDFVGQELYRFLVMDFVLMLLDTLFGELVWRIISEKKLKRRRKPEFDIARNVLELIYGQTLTWLGVLFSPLLPAVQIIKLLLVFYVKKTSLLANCQAPRRPWLASHMSTVFLTLLCFPAFLGAAVFLCYAVWQVKPSSTCGPFRTLDTMYEAGRVWVRHLEAAGPRVSWLPWVHRYLMENTFFVFLVSALLLAVIYLNIQVVRGQRKVICLLKEQISNEGEDKIFLINKLHSIYERKEREERSRVGTTEEAAAPPALLTDEQDA

SEQ ID NO: 90829 - protein, 805 aa, Homo sapiens; identical to SEQ ID NO: 90828
  Payload ID: 18152
  Gene Name: transmembrane channel-like 6
  Uniprot ID: Q7Z403
  ENSP ID: ENSP00000376260

SEQ ID NO: 90830 - protein, 384 aa, Homo sapiens
  Payload ID: 18152
  Gene Name: transmembrane channel-like 6
  Uniprot ID: Q7Z403
  ENSP ID: ENSP00000464853
MAHSFGESYRVGSTSGIHAITVFCSWDYKVTQKRASRLQQDNIRTRLKELLAEWQLRHSPRSVCGRLRQAAVLGLVWLLCLGTALGCAVAVHVFSEFMIQSPEAAGQEAVLLVLPLVVGLLNLGAPYLCRVLAALEPHDSPVLEVYVAICRIISEKKLKRRRKPEFDIARNVLELIYGQTLTWLGVLFSPLLPAVQIIKLLLVFYVKKTSLLANCQAPRRPWLASHMSTVFLTLLCFPAFLGAAVFLCYAVWQVKPSSTCGPFRTLDTMYEAGRVWVRHLEAAGPRVSWLPWVHRYLMENTFFVFLVSALLLAVIYLNIQVVRGQRKVICLLKEQISNEGEDKIFLINKLHSIYERKEREERSRVGTTEEAAAPPALLTDEQDA

SEQ ID NO: 90831 - protein, 805 aa, Homo sapiens; identical to SEQ ID NO: 90828
  Payload ID: 18152
  Gene Name: transmembrane channel-like 6
  Uniprot ID: Q7Z403
  ENSP ID: ENSP00000465261

SEQ ID NO: 90832 - protein, 298 aa, Homo sapiens
  Payload ID: 18152
  Gene Name: transmembrane channel-like 6
  Uniprot ID: Q7Z403
  ENSP ID: ENSP00000465359
MPWRYALKRIGGQFGSSVLSYFLFLKTLLAFNALLLLLLVAFIMGPQVAFPPALPGPAPVCTGLELLTGAGCFTHTVMYYGHYSNATLNQPCGSPLDGSQCTPRVGGLPYNMPLAYLSTVGVSFFITCITLVYSMAHSFGESYRVGSTSGIHAITVFCSWDYKVTQKRASRLQQDNIRTRLKELLAEWQLRHSPRSVCGRLRQAAVLGLVWLLCLGTALGCAVAVHVFSEFMIQSPEAAGQEAVLLVLPLVVGLLNLGAPYLCRVLAALEPHDSPVLEVYVAICRCVAAHENIIWCWS

SEQ ID NO: 90833 - protein, 41 aa, Homo sapiens
  Payload ID: 18152
  Gene Name: transmembrane channel-like 6
  ENSP ID: ENSP00000466159
MAQPLAFILDVPETPGDQGSSRSRASARPRRGWSCSRESGR

SEQ ID NO: 90834 - protein, 153 aa, Homo sapiens
  Payload ID: 18152
  Gene Name: transmembrane channel-like 6
  ENSP ID: ENSP00000466885
MAQPLAFILDVPETPGDQGQGPSPYDESEVHDSFQQLIQEQSQCTAQEGLELQQREREVTGSSQQTLWRPEGTQSTATLRILASMPSRTIGRSRGAIISQYYNRTVQLRCRSSRPLLGNFVRSAWPSLRLYDLELDPTALEEEEKQSLLVKEL

SEQ ID NO: 90835 - protein, 143 aa, Homo sapiens
  Payload ID: 18152
  Gene Name: transmembrane channel-like 6
  ENSP ID: ENSP00000467016
MAQPLAFILDVPETPGDQGQGPSPYDESEVHDSFQQLIQEQSQCTAQEGLELQQREREVTGSSQQTLWRPEGTQSTATLRILASMPSRTIGRSRGAIISQYYNRTVQLRCRSSRPLLGNFVRSAWPSLRLYDLELDPTALEEE

SEQ ID NO: 90836 - protein, 285 aa, Homo sapiens
  Payload ID: 18152
  Gene Name: transmembrane channel-like 6
  ENSP ID: ENSP00000468255
MAQPLAFILDVPETPGDQGQGPSPYDESEVHDSFQQLIQEQSQCTAQEGLELQQREREVTGSSQQTLWRPEGTQSTATLRILASMPSRTIGRSRGAIISQYYNRTVQLRCRSSRPLLGNFVRSAWPSLRLYDLELDPTALEEEEKQSLLVKELQSLAVAQRDHMLRGMPLSLAEKRSLREKSRTPRGKWRGQPGSGGVCSCCGRLRYACVLALHSLGLALLSALQALMPWRYALKRIGGQFGSSVLSYFLFLKTLLAFNALLLLLLVAFIMGPQVAFPPALPGPA

SEQ ID NO: 90837 - protein, 723 aa, Homo sapiens
  Payload ID: 18153
  Gene Name: transmembrane channel-like 7
  Uniprot ID: Q7Z402
  ENSP ID: ENSP00000304710
MSESSGSALQPGRPSRQPAVHPENLSLDSSCFSSPPVNFLQELPSYRSIARRRTTVHSRDKQSGTLLKPTDSYSSQLEDRIAENLSSHSLRNYALNISEKRRLRDIQETQMKYLSEWDQWKRYSSKSWKRFLEKAREMTTHLELWREDIRSIEGKFGTGIQSYFSFLRFLVLLNLVIFLIIFMLVLLPVLLTKYKITNSSFVLIPFKDMDKQCTVYPVSSSGLIYFYSYIIDLLSGTGFLEETSLFYGHYTIDGVKFQNFTYDLPLAYLLSTIASLALSLLWIVKRSVEGFKINLIRSEEHFQSYCNKIFAGWDFCITNRSMADLKHSSLRYELRADLEEERMRQKIAERTSEETIRIYSLRLFLNCIVLAVLGACFYAIYVATVFSQEHMKKEIDKMVFGENLFILYLPSIVITLANFITPMIFAKIIRYEDYSPGFEIRLTILRCVFMRLATICVLVFTLGSKITSCDDDTCDLCGYNQKLYPCWETQVGQEMYKLMIFDFIIILAVTLFVDFPRKLLVTYCSSCKLIQCWGQQEFAIPDNVLGIVYGQTICWIGAFFSPLLPAIATLKFIIIFYVKEWSLLYTCRPSPRPFRASNSNFFFLLVLLIGLCLAIIPLTISISRIPSSKACGPFTNFNTTWEVIPKTVSTFPSSLQSFIHGVTSEAFAVPFFMIICLIMFYFIALAGAHKRVVIQLREQLSLESRDKCYLIQKLTEAQRDMRN

SEQ ID NO: 90838 - protein, 613 aa, Homo sapiens
  Payload ID: 18153
  Gene Name: transmembrane channel-like 7
  Uniprot ID: Q7Z402
  ENSP ID: ENSP00000397081
MKYLSEWDQWKRYSSKSWKRFLEKAREMTTHLELWREDIRSIEGKFGTGIQSYFSFLRFLVLLNLVIFLIIFMLVLLPVLLTKYKITNSSFVLIPFKDMDKQCTVYPVSSSGLIYFYSYIIDLLSGTGFLEETSLFYGHYTIDGVKFQNFTYDLPLAYLLSTIASLALSLLWIVKRSVEGFKINLIRSEEHFQSYCNKIFAGWDFCITNRSMADLKHSSLRYELRADLEEERMRQKIAERTSEETIRIYSLRLFLNCIVLAVLGACFYAIYVATVFSQEHMKKEIDKMVFGENLFILYLPSIVITLANFITPMIFAKIIRYEDYSPGFEIRLTILRCVFMRLATICVLVFTLGSKITSCDDDTCDLCGYNQKLYPCWETQVGQEMYKLMIFDFIIILAVTLFVDFPRKLLVTYCSSCKLIQCWGQQEFAIPDNVLGIVYGQTICWIGAFFSPLLPAIATLKFIIIFYVKEWSLLYTCRPSPRPFRASNSNFFFLLVLLIGLCLAIIPLTISISRIPSSKACGPFTNFNTTWEVIPKTVSTFPSSLQSFIHGVTSEAFAVPFFMIICLIMFYFIALAGAHKRVVIQLREQLSLESRDKCYLIQKLTEAQRDMRN

SEQ ID NO: 90839 - protein, 758 aa, Homo sapiens
  Payload ID: 18153
  Gene Name: transmembrane channel-like 7
  ENSP ID: ENSP00000455041
MSESSGSALQPGRPSRQPAVHPENLSLDSSCFSSPPVNFLQELPSYRSIARRRTTVHSRDKQSGTLLKPTDSYSSQLEDRIAENLSSHSLRNYALNISEKRRLRDIQETQMKYLSEWDQWKRYSSKSWKRFLEKAREMTTHLELWREDIRSIEGKFGTGIQSYFSFLRFLVLLNLVIFLIIFMLVLLPVLLTKYKITNSSFVLIPFKDMDKQCTVYPVSSSGLIYFYSYIIDLLSGTGFLEETSLFYGHYTIDGVKFQNFTYDLPLAYLLSTIASLALSLLWIVKRSVEGFKINLIRSEEHFQSYCNKIFAGWDFCITNRSMADLKHSSLRYELRADLEEERMRQKIAERTSEETIRIYSLRLFLNCIVLAVLGACFYAIYVATVFSQEHMKKEIDKMVFGENLFILYLPSIVITLANFITPMIFAKIIRYEDYSPGFEIRLTILRCVFMRLATICVLVFTLGSKITSCDDDTCDLCGYNQKLYPCWETQVGQEMYKLMIFDFIIILAVTLFVDFPRKLLVTYCSSCKLIQCWGQQEFAIPDNVLGIVYGQTICWIGAFFSPLLPAIATLKFIIIFYVKEWSLLYTCRPSPRPFRASNSNFFFLLVLLIGLCLAIIPLTISISRIPSSKACGPFTNFNTTWEVIPKTVSTFPSSLQSFIHGVTSEAFAVPFFMIICLIMFYFIALAGAHKRVVIQLREQLSLVRKHSSRGSWLGTFTQDTARKVLFSWEGVKLLQPSLTTTSPKLCLEAQPRPASLIH

SEQ ID NO: 90840 - protein, 726 aa, Homo sapiens
  Payload ID: 18154
  Gene Name: transmembrane channel-like 8
  Uniprot ID: Q8IU68
  ENSP ID: ENSP00000325561
MLLPRSVSSERAPGVPEPEELWEAEMERLRGSGTPVRGLPYAMMDKRLIWQLREPAGVQTLRWQRWQRRRQTVERRLREAAQRLARGLGLWEGALYEIGGLFGTGIRSYFTFLRFLLLLNLLSLLLTASFVLLPLVWLRPPDPGPTLNLTLQCPGSRQSPPGVLRFHNQLWHVLTGRAFTNTYLFYGAYRVGPESSSVYSIRLAYLLSPLACLLLCFCGTLRRMVKGLPQKTLLGQGYQAPLSAKVFSSWDFCIRVQEAATIKKHEISNEFKVELEEGRRFQLMQQQTRAQTACRLLSYLRVNVLNGLLVVGAISAIFWATKYSQDNKEESLFLLLQYLPPGVIALVNFLGPLLFTFLVQLENYPPNTEVNLTLIWCVVLKLASLGMFSVSLGQTILCIGRDKSSCESYGYNVCDYQCWENSVGEELYKLSIFNFLLTVAFAFLVTLPRRLLVDRFSGRFWAWLEREEFLVPKNVLDIVAGQTVTWMGLFYCPLLPLLNSVFLFLTFYIKKYTLLKNSRASSRPFRASSSTFFFQLVLLLGLLLAAVPLGYVVSSIHSSWDCGLFTNYSAPWQVVPELVALGLPPIGQRALHYLGSHAFSFPLLIMLSLVLTVCVSQTQANARAIHRLRKQLVWQVQEKWHLVEDLSRLLPEPGPSDSPGPKYPASQASRPQSFCPGCPCPGSPGHQAPRPGPSVVDAAGLRSPCPGQHGAPASARRFRFPSGAEL

SEQ ID NO: 90841 - protein, 196 aa, Homo sapiens
  Payload ID: 18154
  Gene Name: transmembrane channel-like 8
  ENSP ID: ENSP00000465049
MLLPRSVSSERAPGVPEPEELWEAEMERLRGSGTPVRGLPYAMMDKRLIWQLREPAGVQTLRWQRWQRRRQTVERRLREAAQRLARGLGLWEGALYEIGGRTRATRTSPCPLWSPTAQIGKRRVASSHLPSPGSPDQSAPPPSHPFRPQAPQTSGPRSTPRPLRHRNSVLLHLPPLPAATQPAEPAAHRKLRAAAP

SEQ ID NO: 90842 - protein, 2 aa, Homo sapiens
  Payload ID: 18154
  Gene Name: transmembrane channel-like 8
  ENSP ID: ENSP00000467460
ML

SEQ ID NO: 90843 - protein, 503 aa, Homo sapiens
  Payload ID: 18154
  Gene Name: transmembrane channel-like 8
  Uniprot ID: Q8IU68
  ENSP ID: ENSP00000467482
MVKGLPQKTLLGQGYQAPLSAKVFSSWDFCIRVQEAATIKKHEISNEFKVELEEGRRFQLMQQQTRAQTACRLLSYLRVNVLNGLLVVGAISAIFWATKYSQDNKEESLFLLLQYLPPGVIALVNFLGPLLFTFLVQLENYPPNTEVNLTLIWCVVLKLASLGMFSVSLGQTILCIGRDKSSCESYGYNVCDYQCWENSVGEELYKLSIFNFLLTVAFAFLVTLPRRLLVDRFSGRFWAWLEREEFLVPKNVLDIVAGQTVTWMGLFYCPLLPLLNSVFLFLTFYIKKYTLLKNSRASSRPFRASSSTFFFQLVLLLGLLLAAVPLGYVVSSIHSSWDCGLFTNYSAPWQVVPELVALGLPPIGQRALHYLGSHAFSFPLLIMLSLVLTVCVSQTQANARAIHRLRKQLVWQVQEKWHLVEDLSRLLPEPGPSDSPGPKYPASQASRPQSFCPGCPCPGSPGHQAPRPGPSVVDAAGLRSPCPGQHGAPASARRFRFPSGAEL

SEQ ID NO: 90844 - protein, 273 aa, Homo sapiens
  Payload ID: 18155
  Gene Name: transmembrane epididymal protein 1
  Uniprot ID: Q5T9Z0
  ENSP ID: ENSP00000356536
MILKGCLLYPLCSPRNKQRCARLWKIAYGGLLKIVTGSLLTFYVVLCLDGGMVLMRKQVPSRFMYPKEWQHLTMFILLTLNGCVDFMSKNVLPQRCVGLEKGTLVLIIYELLLLMVSHVKDSEGVELHVYSLLILVVFLLLLVLTAELWAPNMCHLQLMETFLILMMGSWLMQAGFILYRPVSGYPWQDDDISDIMFVTTFFCWHVMINASFLLGIYGFSSFWYHCFRPSLKLTGPKEAPYYASTPGPLYKLLQEVEQSEKEDQALLLPKSSP

SEQ ID NO: 90845 - protein, 156 aa, Homo sapiens
  Payload ID: 18156
  Gene Name: transmembrane inner ear
  Uniprot ID: Q8NEW7
  ENSP ID: ENSP00000324775
MAGWPGAGPLCVLGGAALGVCLAGVAGQLVEPSTAPPKPKPPPLTKETVVFWDMRLWHVVGIFSLFVLSIIITLCCVFNCRVPRTRKEIEARYLQRKAAKMYTDKLETVPPLNELTEVPGEDKKKKKKKKKDSVDTVAIKVEEDEKNEAKKKKGEK

SEQ ID NO: 90846 - protein, 227 aa, Homo sapiens
  Payload ID: 18157
  Gene Name: transmembrane p24 trafficking protein 1
  Uniprot ID: Q13445
  ENSP ID: ENSP00000214869
MMAAGAALALALWLLMPPVEVGGAGPPPIQDGEFTFLLPAGRKQCFYQSAPANASLETEYQVIGGAGLDVDFTLESPQGVLLVSESRKADGVHTVEPTEAGDYKLCFDNSFSTISEKLVFFELIFDSLQDDEEVEGWAEAVEPEEMLDVKMEDIKESIETMRTRLERSIQMLTLLRAFEARDRNLQEGNLERVNFWSAVNVAVLLLVAVLQVCTLKRFFQDKRPVPT

SEQ ID NO: 90847 - protein, 82 aa, Homo sapiens
  Payload ID: 18157
  Gene Name: transmembrane p24 trafficking protein 1
  ENSP ID: ENSP00000464824
MLDVKMEDIKESIETMRTRLERSIQMLTLLRAFEARDRNLQEGNLERVNFWSAVNVAVLLLVAVLQVCTLKRFFQDKRPVPT

SEQ ID NO: 90848 - protein, 65 aa, Homo sapiens
  Payload ID: 18157
  Gene Name: transmembrane p24 trafficking protein 1
  ENSP ID: ENSP00000464856
  MOD_RES (1)..(1): Any amino acid
XEVEGWAEAVEPEEMLDVKMEDIKVCPGCAGATPSRSLGFTWGAPLGLTQPPLRSCALQLNYRVH

SEQ ID NO: 90849 - protein, 191 aa, Homo sapiens
  Payload ID: 18157
  Gene Name: transmembrane p24 trafficking protein 1
  ENSP ID: ENSP00000467690
MMAAGAALALALWLLMPPVEVGGAGPPPIQDGEFTFLLPAGRKQCFYQSAPANASLETEYQVIGGAGLDVDFTLESPQGVLLVSESRKADGVHTTISEKLVFFELIFDSLQDDEEVEGWAEAVEPEEMLDVKMEDIKESIETMRTRLERSIQMLTLLRAFEARDRNLQEGNLERVNFWSAVNVAVLLLVAV

SEQ ID NO: 90850 - protein, 74 aa, Homo sapiens
  Payload ID: 18157
  Gene Name: transmembrane p24 trafficking protein 1
  ENSP ID: ENSP00000468054
MMAAGAALALALWLLMPPVEVGGAGPPPIQDGEFTFLLPAGRKQCFYQSAPANASLETEYQGGANGGRGLQAVL

SEQ ID NO: 90851 - protein, 185 aa, Homo sapiens
  Payload ID: 18157
  Gene Name: transmembrane p24 trafficking protein 1
  ENSP ID: ENSP00000468294
MMAAGAALALALWLLMPPVEVGGAGPPPIQDGEFTFLLPAGRKQCFYQSAPANASLETEYQVIGGAGLDVDFTLESPQGVLLVSESRKADGVHTSPLRPCGPGWSAASRCSRYCGPSRHVTATCKRATWSGSTSGQLSTWRCCCWWLCCRSARSSASSRTSARCPRSPCHGRKNGTKEGQQGVCI

SEQ ID NO: 90852 - protein, 95 aa, Homo sapiens
  Payload ID: 18157
  Gene Name: transmembrane p24 trafficking protein 1
  ENSP ID: ENSP00000468492
MMAAGAALALALWLLMPPVEVGGAGPPPIQDGEFTFLLPAGRKQCFYQSAPANASLETEYQVIGGAGLDVDFTLESPQGVLLGGANGGRGLQAVL

SEQ ID NO: 90853 - protein, 219 aa, Homo sapiens
  Payload ID: 18158
  Gene Name: transmembrane p24 trafficking protein 10
  Uniprot ID: P49755
  ENSP ID: ENSP00000303145
MSGLSGPPARRGPFPLALLLLFLLGPRLVLAISFHLPINSRKCLREEIHKDLLVTGAYEISDQSGGAGGLRSHLKITDSAGHILYSKEDATKGKFAFTTEDYDMFEVCFESKGTGRIPDQLVILDMKHGVEAKNYEEIAKVEKLKPLEVELRRLEDLSESIVNDFAYMKKREEEMRDTNESTNTRVLYFSIFSMFCLIGLATWQVFYLRRFFKAKKLIE

SEQ ID NO: 90854 - protein, 153 aa, Homo sapiens
  Payload ID: 18158
  Gene Name: transmembrane p24 trafficking protein 10
  ENSP ID: ENSP00000450726
MSGLSGPPARRGPFPLALLLLFLLGPRLVLAISFHLPINSRKCLREEIHKDLLVTGAYEISDQSGGAGGLRSHLKITDSAGHILYSKEDATKGKFAFTTEDYDMFEVCFESKGTGRIPDQLVILDMKHGVEAKNYEEHSVSEEKVWKDNTSSL

SEQ ID NO: 90855 - protein, 201 aa, Homo sapiens
  Payload ID: 18159
  Gene Name: transmembrane p24 trafficking protein 2
  Uniprot ID: Q15363
  ENSP ID: ENSP00000262225
MVTLAELLVLLAALLATVSGYFVSIDAHAEECFFERVTSGTKMGLIFEVAEGGFLDIDVEITGPDNKGIYKGDRESSGKYTFAAHMDGTYKFCFSNRMSTMTPKIVMFTIDIGEAPKGQDMETEAHQNKLEEMINELAVAMTAVKHEQEYMEVRERIHRAINDNTNSRVVLWSFFEALVLVAMTLGQIYYLKRFFEVRRVV

SEQ ID NO: 90856 - protein, 166 aa, Homo sapiens
  Payload ID: 18159
  Gene Name: transmembrane p24 trafficking protein 2
  ENSP ID: ENSP00000405845
MVTLAELLVLLAALLATVSGYFVSIDAHAEECFFERVTSGTKMGLIFEVAEGGFLDIDVEITGPDNKGIYKGDRESSGKYTFAAHMDGTYKFCFSNRMSTMTPKIVMFTIDIGEAPKGQDMETEGGGDTWDAHQNKLEEMINELAVAMTAVKHEQEYMEVRERIHR

SEQ ID NO: 90857 - protein, 116 aa, Homo sapiens
  Payload ID: 18159
  Gene Name: transmembrane p24 trafficking protein 2
  ENSP ID: ENSP00000441161
MDGTYKFCFSNRMSTMTPKIVMFTIDIGEAPKGQDMETEAHQNKLEEMINELAVAMTAVKHEQEYMEVRERIHRAINDNTNSRVVLWSFFEALVLVAMTLGQIYYLKRFFEVRRVV

SEQ ID NO: 90858 - protein, 217 aa, Homo sapiens
  Payload ID: 18160
  Gene Name: transmembrane p24 trafficking protein 3
  Uniprot ID: Q9Y3Q3
  ENSP ID: ENSP00000299705
MGSTVPRSASVLLLLLLLRRAEQPCGAELTFELPDNAKQCFHEEVEQGVKFSLDYQVITGGHYDVDCYVEDPQGNTIYRETKKQYDSFTYRAEVKGVYQFCFSNEFSTFSHKTVYFDFQVGDEPPILPDMGNRVTALTQMESACVTIHEALKTVIDSQTHYRLREAQDRARAEDLNSRVSYWSVGETIALFVVSFSQVLLLKSFFTEKRPISRAVHS

SEQ ID NO: 90859 - protein, 173 aa, Homo sapiens
  Payload ID: 18160
  Gene Name: transmembrane p24 trafficking protein 3
  Uniprot ID: Q9Y3Q3
  ENSP ID: ENSP00000414983
MGSTVPRSASVLLLLLLLRRAEQPCGAELTFELPDNAKQCFHEEVEQGVKFSLDYQVITGGHYDVDCYVEDPQGNTIYRETKKQYDSFTYRAEVKGVYQFCFSNEFSTFSHKTVYFDFQVGDEPPILPDMGNRVTALTQRFRGAYWKEVDKMVDYMQPGGTPATEGLGRLAPS

SEQ ID NO: 90860 - protein, 146 aa, Homo sapiens
  Payload ID: 18160
  Gene Name: transmembrane p24 trafficking protein 3
  ENSP ID: ENSP00000440228
MGSTVPRSASVLLLLLLLRRAEQPCGAELTFELPDNAKQCFHEEVEQGVKFSLDYQVITGGHYDVDCYVEDPQGNTIYRETKKQYDSFTYRAEVKGVYQFCFSNEFSTFSHKTVYFDFQVGDEPPILPDMGNRVTALTQGFRVFCL

SEQ ID NO: 90861 - protein, 155 aa, Homo sapiens
  Payload ID: 18160
  Gene Name: transmembrane p24 trafficking protein 3
  ENSP ID: ENSP00000446062
MGSTVPRSASVLLLLLLLRRAEQPCGAELTFELPDNAKQCFHEEVEQGVKFSLDYQVITGGHYDVDCYVEDPQGNTIYRETKKQYDSFTYRAEVKGVYQFCFSNEFSTFSHKTVYFDFQVGDEPPILPDMGNRVTALTQGPSASPTPTPPLRVPV

SEQ ID NO: 90862 - protein, 178 aa, Homo sapiens
  Payload ID: 18161
  Gene Name: transmembrane p24 trafficking protein 4
  ENSP ID: ENSP00000289577
MAGVGAGPLRAMGRQALLLLALCATGAQGLYFHIGETEKRCFIEEIPDETMVIGNYRTQMWDKQKEVFLPSTPGLGMHVEVKDPDGKVVLSRQYGSEGRFTFTSHTPGDHQICLHSNSTRMALFAGGKLYREERFRLTSESTNQRVLWWSIAQTVILILTGIWQMRHLKSFFEAKKLV

SEQ ID NO: 90863 - protein, 227 aa, Homo sapiens
  Payload ID: 18161
  Gene Name: transmembrane p24 trafficking protein 4
  Uniprot ID: Q7Z7H5
  ENSP ID: ENSP00000404042
MAGVGAGPLRAMGRQALLLLALCATGAQGLYFHIGETEKRCFIEEIPDETMVIGNYRTQMWDKQKEVFLPSTPGLGMHVEVKDPDGKVVLSRQYGSEGRFTFTSHTPGDHQICLHSNSTRMALFAGGKLRVHLDIQVGEHANNYPEIAAKDKLTELQLRARQLLDQVEQIQKEQDYQRYREERFRLTSESTNQRVLWWSIAQTVILILTGIWQMRHLKSFFEAKKLV

SEQ ID NO: 90864 - protein, 186 aa, Homo sapiens
  Payload ID: 18161
  Gene Name: transmembrane p24 trafficking protein 4
  Uniprot ID: Q7Z7H5
  ENSP ID: ENSP00000417443
MAGVGAGPLRAMGRQALLLLALCATGAQGLYFHIGETEKRCFIEEIPDETMVIGNYRTQMWDKQKEVFLPSTPGLGMHVEVKDPDGKVVLSRQYGSEGRFTFTSHTPGDHQICLHSNSTRMALFAGGKLRVHLDIQVGEHANNYPEIAAKDKLTELQLRARQLLDQVEQIQKEQDYQRASAYLLVI

SEQ ID NO: 90865 - protein, 162 aa, Homo sapiens
  Payload ID: 18162
  Gene Name: transmembrane p24 trafficking protein 5
  ENSP ID: ENSP00000359303
MGDKIWLPFPVLLLAALPPVLLPGAAGFTPSLDSDFTFTLPAGQKECFYQPMPLKASLEIEYQVLDGAGLDIDFHLASPEGKTLVFEQRKSDGVHTVETEVGDYMFCFDNTFSTISEKVIFFELILDNMGEQAQEQEDWKKYITGTDILDMKLEDILVSMVF

SEQ ID NO: 90866 - protein, 229 aa, Homo sapiens
  Payload ID: 18162
  Gene Name: transmembrane p24 trafficking protein 5
  Uniprot ID: Q9Y3A6
  ENSP ID: ENSP00000359305
MGDKIWLPFPVLLLAALPPVLLPGAAGFTPSLDSDFTFTLPAGQKECFYQPMPLKASLEIEYQVLDGAGLDIDFHLASPEGKTLVFEQRKSDGVHTVETEVGDYMFCFDNTFSTISEKVIFFELILDNMGEQAQEQEDWKKYITGTDILDMKLEDILESINSIKSRLSKSGHIQTLLRAFEARDRNIQESNFDRVNFWSMVNLVVMVVVSAIQVYMLKSLFEDKRKSRT

SEQ ID NO: 90867 - protein, 193 aa, Homo sapiens
  Payload ID: 18162
  Gene Name: transmembrane p24 trafficking protein 5
  Uniprot ID: Q9Y3A6
  ENSP ID: ENSP00000418992
MGDKIWLPFPVLLLAALPPVLLPGAAGFTPSLDSDFTFTLPAGQKECFYQPMPLKASLEIEYQVLDGAGLDIDFHLASPEGKTLVFEQRKSDGVHTVETEVGDYMFCFDNTFSTISEKVIFFELILDNMGEQAQEQEDWKKYITGTDILDMKLEDILDPIIKIASDVQIRLHLGIHQQHQVQTKQKWAHTNSA

SEQ ID NO: 90868 - protein, 120 aa, Homo sapiens
  Payload ID: 18162
  Gene Name: transmembrane p24 trafficking protein 5
  ENSP ID: ENSP00000471060
MGDKIWLPFPVLLLAALPPVLLPGAAGFTPSLDSDFTFTLPAGQKECFYQPMPLKASLEIEYQVLDGAGLDIDFHLASPEGKTLVFEQRKSDGVHTCIRSKNGPGTAVHAYNPSTFRGQV

SEQ ID NO: 90869 - protein, 240 aa, Homo sapiens
  Payload ID: 18163
  Gene Name: transmembrane p24 trafficking protein 6
  Uniprot ID: Q8WW62
  ENSP ID: ENSP00000288025
MSPLLFGAGLVVLNLVTSARSQKTEPLSGSGDQPLFRGADRYDFAIMIPPGGTECFWQFAHQTGYFYFSYEVQRTVGMSHDRHVAATAHNPQGFLIDTSQGVRGQINFSTQETGFYQLCLSNQHNHFGSVQVYLNFGVFYEGPETDHKQKERKQLNDTLDAIEDGTQKVQNNIFHMWRYYNFARMRKMADFFLIQSNYNYVNWWSTAQSLVIILSGILQLYFLKRLFNVPTTTDTKKPRC

SEQ ID NO: 90870 - protein, 224 aa, Homo sapiens
  Payload ID: 18164
  Gene Name: transmembrane p24 trafficking protein 7
  Uniprot ID: Q9Y3B3
  ENSP ID: ENSP00000405926
MPRPGSAQRWAAVAGRWGCRLLALLLLVPGPGGASEITFELPDNAKQCFYEDIAQGTKCTLEFQVITGGHYDVDCRLEDPDGKVLYKEMKKQYDSFTFTASKNGTYKFCFSNEFSTFTHKTVYFDFQVGEDPPLFPSENRVSALTQMESACVSIHEALKSVIDYQTHFRLREAQGRSRAEDLNTRVAYWSVGEALILLVVSIGQVFLLKSFFSDKRTTTTRVGS

SEQ ID NO: 90871 - protein, 81 aa, Homo sapiens
  Payload ID: 18164
  Gene Name: transmembrane p24 trafficking protein 7
  ENSP ID: ENSP00000450928
MPRPGSAQRWAAVAGRWGCRLLALLLLVPGPGGASEITFELPDNAKQCFYEDIAQGTKCTLEFQVITGGHYDVDCRLEDPD

SEQ ID NO: 90872 - protein, 235 aa, Homo sapiens
  Payload ID: 18165
  Gene Name: transmembrane p24 trafficking protein 9
  Uniprot ID: Q9BVK6
  ENSP ID: ENSP00000330945
MAVELGVLLVRPRPGTGLGRVMRTLLLVLWLATRGSALYFHIGETEKKCFIEEIPDETMVIGNYRTQLYDKQREEYQPATPGLGMFVEVKDPEDKVILARQYGSEGRFTFTSHTPGEHQICLHSNSTKFSLFAGGMLRVHLDIQVGEHANDYAEIAAKDKLSELQLRVRQLVEQVEQIQKEQNYQRWREERFRQTSESTNQRVLWWSILQTLILVAIGVWQMRHLKSFFEAKKLV

SEQ ID NO: 90873 - protein, 325 aa, Homo sapiens
  Payload ID: 18166
  Gene Name: transmembrane p24 trafficking protein family member 8
  Uniprot ID: Q6PL24
  ENSP ID: ENSP00000216468
MSDLQAAEGPGSWSPTARPGSAGGVGDCQGVEGSQAAASENEDLENKDTSLLASATDPEPCSSPHRPQMVSPVSKDATEDLRKATGPLEAQALVKQDLLPADQAQVLNEMAKYQVPQRSGDIVMIQSEHTGAIDVLSADLESADLLGDHRKVSPPLMAPPCIWTFAKVKEFKSKLGKEKNSRLVVKRGEVVTIRVPTHPEGKRVCWEFATDDYDIGFGVYFDWTPVTSTDITVQVSDSSDDEDEEEEEEEEIEEPVPAGDVERGSRSSLRGRYGEVMPVYRRDSHRDVQAGSHDYPGEGIYLLKFDNSYSLLRNKTLYFHIYYTS

SEQ ID NO: 90874 - protein, 533 aa, Homo sapiens
  Payload ID: 18167
  Gene Name: transmembrane phosphatase with tensin homology
  Uniprot ID: P56180
  ENSP ID: ENSP00000482040
MNESPDPTDLAGVIIELGPNDSPQTSEFKGATEEAPAKESVLARLSKFEVEDAENVASYDSKIKKIVHSIVSSFAFGLFGVFLVLLDVTLILADLIFTDSKLYIPLEYRSISLAIALFFLMDVLLRVFVERRQQYFSDLFNILDTAIIVILLLVDVVYIFFDIKLLRNIPRWTHLLRLLRLIILLRIFHLFHQKRQLEKLIRRRVSENKRRYTRDGFDLDLTYVTERIIAMSFPSSGRQSFYRNPIKEVVRFLDKKHRNHYRVYNLCSERAYDPKHFHNRVVRIMIDDHNVPTLHQMVVFTKEVNEWMAQDLENIVAIHCKGGTDRTGTMVCAFLIASEICSTAKESLYYFGERRTDKTHSEKFQGVKTPSQKRYVAYFAQVKHLYNWNLPPRRILFIKHFIIYSIPRYVRDLKIQIEMEKKVVFSTISLGKCSVLDNITTDKILIDVFDGLPLYDDVKVQFFYSNLPTYYDNCSFYFWLHTSFIENNRLYLPKNELDNLHKQKARRIYPSDFAVEILFGEKMTSSDVVAGSD

SEQ ID NO: 90875 - protein, 513 aa, Homo sapiens
  Payload ID: 18167
  Gene Name: transmembrane phosphatase with tensin homology
  Uniprot ID: P56180
  ENSP ID: ENSP00000482488
MNESPDPTDLAGVIIELGPNDSPQTSEFKGATEEAPAKESSKIKKIVHSIVSSFAFGLFGVFLVLLDVTLILADLIFTDSKLYIPLEYRSISLAIALFFLMDVLLRVFVERRQQYFSDLFNILDTAIIVILLLVDVVYIFFDIKLLRNIPRWTHLLRLLRLIILLRIFHLFHQKRQLEKLIRRRVSENKRRYTRDGFDLDLTYVTERIIAMSFPSSGRQSFYRNPIKEVVRFLDKKHRNHYRVYNLCSERAYDPKHFHNRVVRIMIDDHNVPTLHQMVVFTKEVNEWMAQDLENIVAIHCKGGTDRTGTMVCAFLIASEICSTAKESLYYFGERRTDKTHSEKFQGVKTPSQKRYVAYFAQVKHLYNWNLPPRRILFIKHFIIYSIPRYVRDLKIQIEMEKKVVFSTISLGKCSVLDNITTDKILIDVFDGLPLYDDVKVQFFYSNLPTYYDNCSFYFWLHTSFIENNRLYLPKNELDNLHKQKARRIYPSDFAVEILFGEKMTSSDVVAGSD

SEQ ID NO: 90876 - protein, 413 aa, Homo sapiens
  Payload ID: 18167
  Gene Name: transmembrane phosphatase with tensin homology
  Uniprot ID: P56180
  ENSP ID: ENSP00000483087
MDVLLRVFVERRQQYFSDLFNILDTAIIVILLLVDVVYIFFDIKLLRNIPRWTHLLRLLRLIILLRIFHLFHQKRQLEKLIRRRVSENKRRYTRDGFDLDLTYVTERIIAMSFPSSGRQSFYRNPIKEVVRFLDKKHRNHYRVYNLCSERAYDPKHFHNRVVRIMIDDHNVPTLHQMVVFTKEVNEWMAQDLENIVAIHCKGGTDRTGTMVCAFLIASEICSTAKESLYYFGERRTDKTHSEKFQGVKTPSQKRYVAYFAQVKHLYNWNLPPRRILFIKHFIIYSIPRYVRDLKIQIEMEKKVVFSTISLGKCSVLDNITTDKILIDVFDGLPLYDDVKVQFFYSNLPTYYDNCSFYFWLHTSFIENNRLYLPKNELDNLHKQKARRIYPSDFAVEILFGEKMTSSDVVAGSD

SEQ ID NO: 90877 - protein, 140 aa, Homo sapiens
  Payload ID: 18167
  Gene Name: transmembrane phosphatase with tensin homology
  ENSP ID: ENSP00000484064
MNESPDPTDLAGVIIELGPNDSPHTSEFKGAARVSPISESVLARLSKFEVEDAENVASYDSKIKKIVHSIVSSFAFGLFGVFLVLLDVTLILADLIFTDSKLYIPLEYRSISLAIALFFLMDVLLRVFVERRQQYFSDLF

SEQ ID NO: 90878 - protein, 551 aa, Homo sapiens
  Payload ID: 18167
  Gene Name: transmembrane phosphatase with tensin homology
  Uniprot ID: P56180
  ENSP ID: ENSP00000484403
MNESPDPTDLAGVIIELGPNDSPQTSEFKGATEEAPAKESPHTSEFKGAARVSPISESVLARLSKFEVEDAENVASYDSKIKKIVHSIVSSFAFGLFGVFLVLLDVTLILADLIFTDSKLYIPLEYRSISLAIALFFLMDVLLRVFVERRQQYFSDLFNILDTAIIVILLLVDVVYIFFDIKLLRNIPRWTHLLRLLRLIILLRIFHLFHQKRQLEKLIRRRVSENKRRYTRDGFDLDLTYVTERIIAMSFPSSGRQSFYRNPIKEVVRFLDKKHRNHYRVYNLCSERAYDPKHFHNRVVRIMIDDHNVPTLHQMVVFTKEVNEWMAQDLENIVAIHCKGGTDRTGTMVCAFLIASEICSTAKESLYYFGERRTDKTHSEKFQGVKTPSQKRYVAYFAQVKHLYNWNLPPRRILFIKHFIIYSIPRYVRDLKIQIEMEKKVVFSTISLGKCSVLDNITTDKILIDVFDGLPLYDDVKVQFFYSNLPTYYDNCSFYFWLHTSFIENNRLYLPKNELDNLHKQKARRIYPSDFAVEILFGEKMTSSDVVAGSD

SEQ ID NO: 90879 - protein, 445 aa, Homo sapiens
  Payload ID: 18168
  Gene Name: transmembrane phosphoinositide 3-phosphatase and tensin homolog 2
  Uniprot ID: Q6XPS3
  ENSP ID: ENSP00000255310
MNESPQTNEFKGTTEEAPAKESPHTSEFKGAALVSPISKRIFGVFLVLLDVTLLLADLIFTDSKLYIPLEYRSISLAIGLFFLMDVLLRVFVEGWTHLVRLLRLIILIRIFHLLHQKRQLEKLMRRLVSENKRRYTRDGFDLDLTYVTERIIAMSFPSSGRQSFYRNPIEEVVRFLDKKHRNHYRVYNLCSERAYDPKHFHNRVSRIMIDDHNVPTLHEMVVFTKEVNEWMAQDLENIVAIHCKGGKGRTGTMVCALLIASEIFLTAEESLYYFGERRTNKTHSNKFQGVETPSQNRYVGYFAQVKHLYNWNLPPRRILFIKRFIIYSIRGDVCDLKVQVVMEKKVVFSSTSLGNCSILHDIETDKILINVYDGPPLYDDVKVQFFSSNLPKYYDNCPFFFWFNTSFIQNNRLCLPRNELDNPHKQKAWKIYPPEFAVEILFGEK

SEQ ID NO: 90880 - protein, 482 aa, Homo sapiens
  Payload ID: 18168
  Gene Name: transmembrane phosphoinositide 3-phosphatase and tensin homolog 2
  Uniprot ID: Q6XPS3
  ENSP ID: ENSP00000372438
MNESPQTNEFKGTTEEAPAKESPHTSEFKGAALVSPISKSMLERLSKFEVEDAENVASYDSKIKKIVHSIVSSFAFGIFGVFLVLLDVTLLLADLIFTDSKLYIPLEYRSISLAIGLFFLMDVLLRVFVEGWTHLVRLLRLIILIRIFHLLHQKRQLEKLMRRLVSENKRRYTRDGFDLDLTYVTERIIAMSFPSSGRQSFYRNPIEEVVRFLDKKHRNHYRVYNLCSERAYDPKHFHNRVSRIMIDDHNVPTLHEMVVFTKEVNEWMAQDLENIVAIHCKGGKGRTGTMVCALLIASEIFLTAEESLYYFGERRTNKTHSNKFQGVETPSQNRYVGYFAQVKHLYNWNLPPRRILFIKRFIIYSIRGDVCDLKVQVVMEKKVVFSSTSLGNCSILHDIETDKILINVYDGPPLYDDVKVQFFSSNLPKYYDNCPFFFWFNTSFIQNNRLCLPRNELDNPHKQKAWKIYPPEFAVEILFGEK

SEQ ID NO: 90881 - protein, 445 aa, Homo sapiens; identical to SEQ ID NO: 90879
  Payload ID: 18168
  Gene Name: transmembrane phosphoinositide 3-phosphatase and tensin homolog 2
  Uniprot ID: Q6XPS3
  ENSP ID: ENSP00000375098

SEQ ID NO: 90882 - protein, 411 aa, Homo sapiens
  Payload ID: 18168
  Gene Name: transmembrane phosphoinositide 3-phosphatase and tensin homolog 2
  Uniprot ID: Q6XPS3
  ENSP ID: ENSP00000382974
MNESPQTNEFKGTTEEAPAKESPHTSEFKGAALVSPISKSMLERLSKFEVEDAENVASYEWTHLVRLLRLIILIRIFHLLHQKRQLEKLMRRLVSENKRRYTRDGFDLDLTYVTERIIAMSFPSSGRQSFYRNPIEEVVRFLDKKHRNHYRVYNLCSERAYDPKHFHNRVSRIMIDDHNVPTLHEMVVFTKEVNEWMAQDLENIVAIHCKGGKGRTGTMVCALLIASEIFLTAEESLYYFGERRTNKTHSNKFQGVETPSQNRYVGYFAQVKHLYNWNLPPRRILFIKRFIIYSIRGDVCDLKVQVVMEKKVVFSSTSLGNCSILHDIETDKILINVYDGPPLYDDVKVQFFSSNLPKYYDNCPFFFWFNTSFIQNNRLCLPRNELDNPHKQKAWKIYPPEFAVEILFGEK

SEQ ID NO: 90883 - protein, 522 aa, Homo sapiens [sequence omitted]

SEQ ID NO: 90884 - protein, 337 aa, Homo sapiens
  Payload ID: 18168
  Gene Name: transmembrane phosphoinositide 3-phosphatase and tensin homolog 2
  ENSP ID: ENSP00000432402
MNESPQTNEFKGTTEEAPAKESPHTSEFKGAALVSPISKRWTHLVRLLRLIILIRIFHLLHQKRQLEKLMRRLVSENKRRYTRDGFDLDLTYVTERIIAMSFPSSGRQSFYRNPIEEVVRFLDKKHRNHYRVYNLCSERAYDPKHFHNRVSRIMIDDHNVPTLHEMVVFTKEVNEWMAQDLENIVAIHCKGGKGRTGTMVCALLIASEIFLTAEESLYYFGERRTNKTHSNKFQGVETPSQNRYVGYFAQVKHLYNWNLPPRRILFIKRFIIYSIRGDVCDLKVQVVMEKKVVFSSTSLGNCSREEGSTQGQLEGGAIQETCARLMGGSNSEREGGT

SEQ ID NO: 90885 - protein, 421 aa, Homo sapiens
  Payload ID: 18169
  Gene Name: transmembrane protease, serine 11A
  ENSP ID: ENSP00000334611
MMYRTVGFGTRSRNLKPWMIAVLIVLSLTVVAVTIGLLVHFLVFDQKKEYYHGSFKILDPQINNNFGQSNTYQLKDLRETTENLVSQVDEIFIDSAWKKNYIKNQVVRLTPEEDGVKVDVIMVFQFPSTEQRAVREKKIQSILNQKIRNLRALPINASSVQVNAMSSSTGELTVQASCGKRVVPLNVNRIASGVIAPKAAWPWQASLQYDNIHQCGATLISNTWLVTAAHCFQKYKNPHQWTVSFGTKINPPLMKRNVRRFIIHEKYRSAAREYDIAVVQVSSRVTFSDDIRQICLPEASASFQPNLTVHITGFGALYYGGESQNDLREARVKIISDDVCKQPQVYGNDIKPGMFCAGYMEGIYDACRGDSGGPLVTRDLKDTWYLIGIVSWGDNCGQKDKPGVYTQVTYYRNWIASKTGI

SEQ ID NO: 90886 - protein, 390 aa, Homo sapiens
  Payload ID: 18169
  Gene Name: transmembrane protease, serine 11A
  ENSP ID: ENSP00000379491
MMYRTVGFGTRSRNLKPWMIAVLIVLSLTVVAVTIGLLVHFLVFDQKKEYYHGSFKILDPQINNNFGQSNTYQLKDLRETTENLVDEIFIDSAWKKNYIKNQVVRLTPEEDGVKVDVIMVFQFPSTEQRAVREKKIQSILNQKIRNLRALPINASSVQVNAMSSSTGELTVQASCGKRVVPLNVNRIASGVIAPKAAWPWQASLQYDNIHQCGATLISNTWLVTAAHCFQKYKNPHQWTVSFGTKINPPLMKRNVRRFIIHEKYRSAAREYDIAVVQVSSRVTFSDDIRQICLPEASASFQPNLTVHITGFGALYYGGESQNDLREARVKIISDDVCKQPQVYGNDIKPGMFCAGYMEGIYDACRGDSGTFSHKGSERYVVSHWNCKLGR

SEQ ID NO: 90887 - protein, 418 aa, Homo sapiens
  Payload ID: 18169
  Gene Name: transmembrane protease, serine 11A
  Uniprot ID: Q6ZMR5
  ENSP ID: ENSP00000426911
MMYRTVGFGTRSRNLKPWMIAVLIVLSLTVVAVTIGLLVHFLVFDQKKEYYHGSFKILDPQINNNFGQSNTYQLKDLRETTENLVDEIFIDSAWKKNYIKNQVVRLTPEEDGVKVDVIMVFQFPSTEQRAVREKKIQSILNQKIRNLRALPINASSVQVNAMSSSTGELTVQASCGKRVVPLNVNRIASGVIAPKAAWPWQASLQYDNIHQCGATLISNTWLVTAAHCFQKYKNPHQWTVSFGTKINPPLMKRNVRRFIIHEKYRSAAREYDIAVVQVSSRVTFSDDIRQICLPEASASFQPNLTVHITGFGALYYGGESQNDLREARVKIISDDVCKQPQVYGNDIKPGMFCAGYMEGIYDACRGDSGGPLVTRDLKDTWYLIGIVSWGDNCGQKDKPGVYTQVTYYRNWIASKTGI

SEQ ID NO: 90888 - protein, 385 aa, Homo sapiens
  Payload ID: 18169
  Gene Name: transmembrane protease, serine 11A
  ENSP ID: ENSP00000427621
GFGTRSRNLKPWMIAVLIVLSLTVVAVTIGLLVHFLVFDPQINNNFGQSNTYQLKDLRETTENLVDEIFIDSAWKKNYIKNQVVRLTPEEDGVKVDVIMVFQFPSTEQRAVREKKIQSILNQKIRNLRALPINASSVQVNGCGKRVVPLNVNRIASGVIAPKAAWPWQASLQYDNIHQCGATLISNTWLVTAAHCFQKYKNPHQWTVSFGTKINPPLMKRNVRRFIIHEKYRSAAREYDIAVVQVSSRVTFSDDIRQICLPEASASFQPNLTVHITGFGALYYGGESQNDLREARVKIISDDVCKQPQVYGNDIKPGMFCAGYMEGIYDACRGDSGGPLVTRDLKDTWYLIGIVSWGDNCGQKDKPGVYTQVTYYRNWIASKTGI

SEQ ID NO: 90889 - protein, 416 aa, Homo sapiens
  Payload ID: 18170
  Gene Name: transmembrane protease, serine 11B
  Uniprot ID: Q86T26
  ENSP ID: ENSP00000330475
MYRHGISSQRSWPLWTTIFIFLGVAAILGVTIGLLVHFLAVEKTYYYQGDFHISGVTYNDNCENAASQASTNLSKDIETKMLNAFQNSSIYKEYVKSEVIKLLPNANGSNVQLQLKFKFPPAEGVSMRTKIKAKLHQMLKNNMASWNAVPASIKLMEISKAASEMLTNNCCGRQVANSIITGNKIVNGKSSLEGAWPWQASMQWKGRHYCGASLISSRWLLSAAHCFAKKNNSKDWTVNFGIVVNKPYMTRKVQNIIFHENYSSPGLHDDIALVQLAEEVSFTEYIRKICLPEAKMKLSENDNVVVTGWGTLYMNGSFPVILQEDFLKIIDNKICNASYAYSGFVTDTMLCAGFMSGEADACQNDSGGPLAYPDSRNIWHLVGIVSWGDGCGKKNKPGVYTRVTSYRNWITSKTGL

SEQ ID NO: 90890 - protein, 418 aa, Homo sapiens
  Payload ID: 18171
  Gene Name: transmembrane protease, serine 11D
  Uniprot ID: O60235
  ENSP ID: ENSP00000283916
MYRPARVTSTSRFLNPYVVCFIVVAGVVILAVTIALLVYFLAFDQKSYFYRSSFQLLNVEYNSQLNSPATQEYRTLSGRIESLITKTFKESNLRNQFIRAHVAKLRQDGSGVRADVVMKFQFTRNNNGASMKSRIESVLRQMLNNSGNLEINPSTEITSLTDQAAANWLINECGAGPDLITLSEQRILGGTEAEEGSWPWQVSLRLNNAHHCGGSLINNMWILTAAHCFRSNSNPRDWIATSGISTTFPKLRMRVRNILIHNNYKSATHENDIALVRLENSVTFTKDIHSVCLPAATQNIPPGSTAYVTGWGAQEYAGHTVPELRQGQVRIISNDVCNAPHSYNGAILSGMLCAGVPQGGVDACQGDSGGPLVQEDSRRLWFIVGIVSWGDQCGLPDKPGVYTRVTAYLDWIRQQTGI

SEQ ID NO: 90891 - protein, 65 aa, Homo sapiens
  Payload ID: 18171
  Gene Name: transmembrane protease, serine 11D
  ENSP ID: ENSP00000421381
  MOD_RES (1)..(1): Any amino acid
XMKSRIESVLRQMLNNSGNLEINPSTEITSLTDQAAANWLINGHTVPELRQGQVRIISNDVCNAP

SEQ ID NO: 90892 - protein, 423 aa, Homo sapiens
  Payload ID: 18172
  Gene Name: transmembrane protease, serine 11E
  Uniprot ID: Q9UL52
  ENSP ID: ENSP00000307519
MMYRPDVVRARKRVCWEPWVIGLVIFISLIVLAVCIGLTVHYVRYNQKKTYNYYSTLSFTTDKLYAEFGREASNNFTEMSQRLESMVKNAFYKSPLREEFVKSQVIKFSQQKHGVLAHMLLICRFHSTEDPETVDKIVQLVLHEKLQDAVGPPKVDPHSVKIKKINKTETDSYLNHCCGTRRSKTLGQSLRIVGGTEVEEGEWPWQASLQWDGSHRCGATLINATWLVSAAHCFTTYKNPARWTASFGVTIKPSKMKRGLRRIIVHEKYKHPSHDYDISLAELSSPVPYTNAVHRVCLPDASYEFQPGDVMFVTGFGALKNDGYSQNHLRQAQVTLIDATTCNEPQAYNDAITPRMLCAGSLEGKTDACQGDSGGPLVSSDARDIWYLAGIVSWGDECAKPNKPGVYTRVTALRDWITSKTGI

SEQ ID NO: 90893 - protein, 125 aa, Homo sapiens
  Payload ID: 18172
  Gene Name: transmembrane protease, serine 11E
  ENSP ID: ENSP00000424109
  MOD_RES (1)..(1): Any amino acid
XPDVVRARKRVCWEPWVIGLVIFISLIVLAVCIGLTVHYVRYNQKKTYNYYSTLSFTTDKLYAEFGREASNNFTEMSQRLESMVKNAFYKSPLREEFVKSQVIKFRNQQDRNRQLSKPLLRNTKK

SEQ ID NO: 90894 - protein, 423 aa, Homo sapiens
  Payload ID: 18172
  Gene Name: transmembrane protease, serine 11E
  ENSP ID: ENSP00000481425
MMYRPDVVRARKRVCWEPWVIGLVIFISLIVLAVCIGLTVHYVRYNQKKTYNYYSTLSFTTDKLYAEFGREASNNFTEMSQRLESMVKNAFYKSPLREEFVKSQVIKFSQQKHGVLAHMLLICRFHSTEDPETVDKIVQLVLHEKLQDAVGPPKVDPQSVKIKKINKTETDSYLNHCCGTRRSKTLGQSLRIVGGTEVEEGEWPWQASLQWDGSHRCGATLINATWLVSAAHCFTTYKNPARWTASFGVTIKPSKMKRGLRRIIVHEKYKHPSHDYDISLAELSSPVPYTNAVHRVCLPDASYEFQPGDVMFVTGFGALKNDGYSQNHLRQAQVTLIDATTCNEPQAYNDAITPRMLCAGSLEGKTDACQGDSGGPLVSSDARDIWYLAGIVSWGDECAKPNKPGVYTRVTALRDWITSKTGI

SEQ ID NO: 90895 - protein, 125 aa, Homo sapiens; identical to SEQ ID NO: 90893
  Payload ID: 18172
  Gene Name: transmembrane protease, serine 11E
  ENSP ID: ENSP00000486191
  MOD_RES (1)..(1): Any amino acid

SEQ ID NO: 90896 - protein, 438 aa, Homo sapiens
  Payload ID: 18173
  Gene Name: transmembrane protease, serine 11F
  Uniprot ID: Q6ZWK6
  ENSP ID: ENSP00000348639
MMYAPVEFSEAEFSRAEYQRKQQFWDSVRLALFTLAIVAIIGIAIGIVTHFVVEDDKSFYYLASFKVTNIKYKENYGIRSSREFIERSHQIERMMSRIFRHSSVGGRFIKSHVIKLSPDEQGVDILIVLIFRYPSTDSAEQIKKKIEKALYQSLKTKQLSLTINKPSFRLTPIDSKKMRNLLNSRCGIRMTSSNMPLPASSSTQRIVQGRETAMEGEWPWQASLQLIGSGHQCGASLISNTWLLTAAHCFWKNKDPTQWIATFGATITPPAVKRNVRKIILHENYHRETNENDIALVQLSTGVEFSNIVQRVCLPDSSIKLPPKTSVFVTGFGSIVDDGPIQNTLRQARVETISTDVCNRKDVYDGLITPGMLCAGFMEGKIDACKGDSGGPLVYDNHDIWYIVGIVSWGQSCALPKKPGVYTRVTKYRDWIASKTGM

SEQ ID NO: 90897 - protein, 563 aa, Homo sapiens
  Payload ID: 18174
  Gene Name: transmembrane protease, serine 13
  Uniprot ID: Q9BYE2
  ENSP ID: ENSP00000387702
MERDSHGNASPARTPSAGASPAQASPAGTPPGRASPAQASPAQASPAGTPPGRASPAQASPAGTPPGRASPGRASPAQASPAQASPARASPALASLSRSSSGRSSSARSASVTTSPTRVYLVRATPVGAVPIRSSPARSAPATRATRESPGTSLPKFTWREGQKQLPLIGCVLLLIALVVSLIILFQFWQGHTGIRYKEQRESCPKHAVRCDGVVDCKLKSDELGCVRFDWDKSLLKIYSGSSHQWLPICSSNWNDSYSEKTCQQLGFESAHRTTEVAHRDFANSFSILRYNSTIQESLHRSECPSQRYISLQCSHCGLRAMTGRIVGGALASDSKWPWQVSLHFGTTHICGGTLIDAQWVLTAAHCFFVTREKVLEGWKVYAGTSNLHQLPEAASIAEIIINSNYTDEEDDYDIALMRLSKPLTLSAHIHPACLPMHGQTFSLNETCWITGFGKTRETDDKTSPFLREVQVNLIDFKKCNDYLVYDSYLTPRMMCAGDLRGGRDSCQGDSGGPLVCEQNNRWYLAGVTSWGTGCGQRNKPGVYTKVTEVLPWIYSKMESSAG

SEQ ID NO: 90898 - protein, 586 aa, Homo sapiens
  Payload ID: 18174
  Gene Name: transmembrane protease, serine 13
  ENSP ID: ENSP00000394114
MERDSHGNASPARTPSAGASPAQASPAGTPPGRASPAQASPAQASPAGTPPGRASPAQASPAGTPPGRASPGRASPAQASPAQASPARASPALASLSRSSSGRSSSARSASVTTSPTRVYLVRATPVGAVPIRSSPARSAPATRATRESPGTSLPKFTWREGQKQLPLIGCVLLLIALVVSLIILFQFWQGHTGIRYKEQRESCPKHAVRCDGVVDCKLKSDELGCVRFDWDKSLLKIYSGSSHQWLPICSSNWNDSYSEKTCQQLGFESAHRTTEVAHRDFANSFSILRYNSTIQESLHRSECPSQRYISLQCSHCGLRAMTGRIVGGALASDSKWPWQVSLHFGTTHICGGTLIDAQWVLTAAHCFFVTREKVLEGWKVYAGTSNLHQLPEAASIAEIIINSNYTDEEDDYDIALMRLSKPLTLSAHIHPACLPMHGQTFSLNETCWITGFGKTRETDDKTSPFLREVQVNLIDFKKCNDYLVYDSYLTPRMMCAGDLRGGRDSCQGDSGGPLVCEQNNRWYLAGVTSWGTGCGQRNKPGVYTKVTEVLPWIYSKMEVRSLQQDTAPSRLGTSSGGDPGGAPRL

SEQ ID NO: 90899 - protein, 567 aa, Homo sapiens
  Payload ID: 18174
  Gene Name: transmembrane protease, serine 13
  ENSP ID: ENSP00000434279
MERDSHGNASPARTPSAGASPAQASPAGTPPGRASPAQASPAQASPAGTPPGRASPAQASPAGTPPGRASPGRASPAQASPAQASPARASPALASLSRSSSGRSSSARSASVTTSPTRVYLVRATPVGAVPIRSSPARSAPATRATRESPGTSLPKFTWREGQKQLPLIGCVLLLIALVVSLIILFQFWQGHTGIRYKEQRESCPKHAVRCDGVVDCKLKSDELGCVRFDWDKSLLKIYSGSSHQWLPICSSNWNDSYSEKTCQQLGFESAHRTTEVAHRDFANSFSILRYNSTIQESLHRSECPSQRYISLQCSHCGLRAMTGRIVGGALASDSKWPWQVSLHFGTTHICGGTLIDAQWVLTAAHCFFVTREKVLEGWKVYAGTSNLHQLPEAASIAEIIINSNYTDEEDDYDIALMRLSKPLTLSAHIHPACLPMHGQTFSLNETCWITGFGKTRETDDKTSPFLREVQVNLIDFKKCNDYLVYDSYLTPRMMCAGDLRGGRDSCQGDSGGPLVCEQNNRWYLAGVTSWGTGCGQRNKPGVYTKVTEVLPWIYSKMESEVRFRKS

SEQ ID NO: 90900 - protein, 532 aa, Homo sapiens
  Payload ID: 18174
  Gene Name: transmembrane protease, serine 13
  Uniprot ID: Q9BYE2
  ENSP ID: ENSP00000435813
MERDSHGNASPARTPSAGASPAQASPAGTPPGRASPAQASPAQASPAGTPPGRASPAQASPAGTPPGRASPGRASPAQASPAQASPARASPALASLSRSSSGRSSSARSASVTTSPTRVYLVRATPVGAVPIRSSPARSAPATRATRESPVQFWQGHTGIRYKEQRESCPKHAVRCDGVVDCKLKSDELGCVRFDWDKSLLKIYSGSSHQWLPICSSNWNDSYSEKTCQQLGFESAHRTTEVAHRDFANSFSILRYNSTIQESLHRSECPSQRYISLQCSHCGLRAMTGRIVGGALASDSKWPWQVSLHFGTTHICGGTLIDAQWVLTAAHCFFVTREKVLEGWKVYAGTSNLHQLPEAASIAEIIINSNYTDEEDDYDIALMRLSKPLTLSAHIHPACLPMHGQTFSLNETCWITGFGKTRETDDKTSPFLREVQVNLIDFKKCNDYLVYDSYLTPRMMCAGDLRGGRDSCQGDSGGPLVCEQNNRWYLAGVTSWGTGCGQRNKPGVYTKVTEVLPWIYSKMESEVRFRKS

SEQ ID NO: 90901 - protein, 40 aa, Homo sapiens
  Payload ID: 18174
  Gene Name: transmembrane protease, serine 13
  ENSP ID: ENSP00000436025
MERDSHGSSSGRATQGSGTRSRGRAVPSTLFAVTGWWTAS

SEQ ID NO: 90902 - protein, 491 aa, Homo sapiens
  Payload ID: 18174
  Gene Name: transmembrane protease, serine 13
  Uniprot ID: Q9BYE2
  ENSP ID: ENSP00000436502
MERDSHGNASPARTPSAGASPAQASPAGTPPGRASPAQASPAQASPAGTPPGRASPAQASPAGTPPGRASPGRASPAQASPAQASPARASPALASLSRSSSGRSSSARSASVTTSPTRVYLVRATPVGAVPIRSSPARSAPATRATRESPGTSLPKFTWREGQKQLPLIGCVLLLIALVVSLIILFQFWQGHTGIRYKEQRESCPKHAVRCDGVVDCKLKSDELGCVRFDWDKSLLKIYSGSSHQWLPICSSNWNDSYSEKTCQQLGFESAHRTTEVAHRDFANSFSILRYNSTIQESLHRSECPSQRYISLQCSHCGLRAMTGRIVGGALASDSKWPWQVSLHFGTTHICGGTLIDAQWVLTAAHCFFVTREKVLEGWKVYAGTSNLHQLPEAASIAEIIINSNYTDEEDDYDIALMRLSKPLTLSGEGICTPRSPAPQPQHPLQPSHLSASVNSYPGPKASAGQKSKTLKDPYMEHFCFIIRETEAQGL

SEQ ID NO: 90903 - protein, 562 aa, Homo sapiens
  Payload ID: 18174
  Gene Name: transmembrane protease, serine 13
  ENSP ID: ENSP00000480143
MERDSHGNASPARTPSAGASPAQASPAGTPPGRASPAQASPAQASPAGTPPGRASPAQASPAGTPPGRASPGRASPLQASPARASPALASLSRSSSGRSSSARSASVTTSPTRVYLVRATPVGAVPIRSSPARSAPATRATRESPGTSLPKFTWREGQKQLPLIGCVLLLIALVVSLIILFQFWQGHTGIRYKEQRESCPKHAVRCDGVVDCKLKSDELGCVRFDWDKSLLKIYSGSSHQWLPICSSNWNDSYSEKTCQQLGFESAHRTTEVAHRDFANSFSILRYNSTIQESLHRSECPSQRYISLQCSHCGLRAMTGRIVGGALASDSKWPWQVSLHFGTTHICGGTLIDAQWVLTAAHCFFVTREKVLEGWKVYAGTSNLHQLPEAASIAEIIINSNYTDEEDDYDIALMRLSKPLTLSAHIHPACLPMHGQTFSLNETCWITGFGKTRETDDKTSPFLREVQVNLIDFKKCNDYLVYDSYLTPRMMCAGDLRGGRDSCQGDSGGPLVCEQNNRWYLAGVTSWGTGCGQRNKPGVYTKVTEVLPWIYSKMESEVRFRKS

SEQ ID NO: 90904 - protein, 1019 aa, Homo sapiens
  Payload ID: 18175
  Gene Name: transmembrane protease, serine 15
  Uniprot ID: P98073
  ENSP ID: ENSP00000284885
MGSKRGISSRHHSLSSYEIMFAALFAILVVLCAGLIAVSCLTIKESQRGAALGQSHEARATFKITSGVTYNPNLQDKLSVDFKVLAFDLQQMIDEIFLSSNLKNEYKNSRVLQFENGSIIVVFDLFFAQWVSDENVKEELIQGLEANKSSQLVTFHIDLNSVDILDKLTTTSHLATPGNVSIECLPGSSPCTDALTCIKADLFCDGEVNCPDGSDEDNKMCATVCDGRFLLTGSSGSFQATHYPKPSETSVVCQWIIRVNQGLSIKLSFDDFNTYYTDILDIYEGVGSSKILRASIWETNPGTIRIFSNQVTATFLIESDESDYVGFNATYTAFNSSELNNYEKINCNFEDGFCFWVQDLNDDNEWERIQGSTFSPFTGPNFDHTFGNASGFYISTPTGPGGRQERVGLLSLPLDPTLEPACLSFWYHMYGENVHKLSINISNDQNMEKTVFQKEGNYGDNWNYGQVTLNETVKFKVAFNAFKNKILSDIALDDISLTYGICNGSLYPEPTLVPTPPPELPTDCGGPFELWEPNTTFSSTNFPNSYPNLAFCVWILNAQKGKNIQLHFQEFDLENINDVVEIRDGEEADSLLLAVYTGPGPVKDVFSTTNRMTVLLITNDVLARGGFKANFTTGYHLGIPEPCKADHFQCKNGECVPLVNLCDGHLHCEDGSDEADCVRFFNGTTNNNGLVRFRIQSIWHTACAENWTTQISNDVCQLLGLGSGNSSKPIFPTDGGPFVKLNTAPDGHLILTPSQQCLQDSLIRLQCNHKSCGKKLAAQDITPKIVGGSNAKEGAWPWVVGLYYGGRLLCGASLVSSDWLVSAAHCVYGRNLEPSKWTAILGLHMKSNLTSPQTVPRLIDEIVINPHYNRRRKDNDIAMMHLEFKVNYTDYIQPICLPEENQVFPPGRNCSIAGWGTVVYQGTTANILQEADVPLLSNERCQQQMPEYNITENMICAGYEEGGIDSCQGDSGGPLMCQENNRWFLAGVTSFGYKCALPNRPGVYARVSRFTEWIQSFLH

SEQ ID NO: 90905 - protein, 227 aa, Homo sapiens
  Payload ID: 18175
  Gene Name: transmembrane protease, serine 15
  ENSP ID: ENSP00000398253
MWNCAALGQSHEARATFKITSGVTYNPNLQDKLSVDFKVLAFDLQQMIDEIFLSSNLKNEYKNSRVLQFENGSIIVVFDLFFAQWVSDENVKEELIQGLEANKSSQLVTFHIDLNSVDILASLENFSTVSPATTSDKLTTTSHLATPGNVSIECLPGSSPCTDALTCIKADLFCDGEVNCPDGSDEDNKMCATVCDGRFLLTGSSGSFQATHYPKPSETSVVCQWII

SEQ ID NO: 90906 - protein, 5 aa, Homo sapiens
  Payload ID: 18175
  Gene Name: transmembrane protease, serine 15
  ENSP ID: ENSP00000474811
MCATV

SEQ ID NO: 90907 - protein, 492 aa, Homo sapiens
  Payload ID: 18176
  Gene Name: transmembrane protease, serine 2
  Uniprot ID: O15393
  ENSP ID: ENSP00000330330
MALNSGSPPAIGPYYENHGYQPENPYPAQPTVVPTVYEVHPAQYYPSPVPQYAPRVLTQASNPVVCTQPKSPSGTVCTSKTKKALCITLTLGTFLVGAALAAGLLWKFMGSKCSNSGIECDSSGTCINPSNWCDGVSHCPGGEDENRCVRLYGPNFILQVYSSQRKSWHPVCQDDWNENYGRAACRDMGYKNNFYSSQGIVDDSGSTSFMKLNTSAGNVDIYKKLYHSDACSSKAVVSLRCIACGVNLNSSRQSRIVGGESALPGAWPWQVSLHVQNVHVCGGSIITPEWIVTAAHCVEKPLNNPWHWTAFAGILRQSFMFYGAGYQVEKVISHPNYDSKTKNNDIALMKLQKPLTFNDLVKPVCLPNPGMMLQPEQLCWISGWGATEEKGKTSEVLNAAKVLLIETQRCNSRYVYDNLITPAMICAGFLQGNVDSCQGDSGGPLVTSKNNIWWLIGDTSWGSGCAKAYRPGVYGNVMVFTDWIYRQMRADG

SEQ ID NO: 90908 - protein, 529 aa, Homo sapiens
  Payload ID: 18176
  Gene Name: transmembrane protease, serine 2
  Uniprot ID: O15393
  ENSP ID: ENSP00000381588
MPPAPPGGESGCEERGAAGHIEHSRYLSLLDAVDNSKMALNSGSPPAIGPYYENHGYQPENPYPAQPTVVPTVYEVHPAQYYPSPVPQYAPRVLTQASNPVVCTQPKSPSGTVCTSKTKKALCITLTLGTFLVGAALAAGLLWKFMGSKCSNSGIECDSSGTCINPSNWCDGVSHCPGGEDENRCVRLYGPNFILQVYSSQRKSWHPVCQDDWNENYGRAACRDMGYKNNFYSSQGIVDDSGSTSFMKLNTSAGNVDIYKKLYHSDACSSKAVVSLRCIACGVNLNSSRQSRIVGGESALPGAWPWQVSLHVQNVHVCGGSIITPEWIVTAAHCVEKPLNNPWHWTAFAGILRQSFMFYGAGYQVEKVISHPNYDSKTKNNDIALMKLQKPLTFNDLVKPVCLPNPGMMLQPEQLCWISGWGATEEKGKTSEVLNAAKVLLIETQRCNSRYVYDNLITPAMICAGFLQGNVDSCQGDSGGPLVTSKNNIWWLIGDTSWGSGCAKAYRPGVYGNVMVFTDWIYRQMRADG

SEQ ID NO: 90909 - protein, 489 aa, Homo sapiens
  Payload ID: 18176
  Gene Name: transmembrane protease, serine 2
  ENSP ID: ENSP00000389006
MALNSGSPPAIGPYYENHGYQPENPYPAQPTVVPTVYEVHPAQYYPSPVPQYAPRVLTQASNPVVCTQPKSPSGTVCTSKTKKALCITLTLGTFLVGAALAAGLLWKFMGSKCSNSGIECDSSGTCINPSNWCDGVSHCPGGEDENRCVRLYGPNFILQVYSSQRKSWHPVCQDDWNENYGRAACRDMGYKNNFYSSQGIVDDSGSTSFMKLNTSAGNVDIYKKLYHSDACSSKAVVSLRCIACGVNLNSSRQSRIVGGESALPGAWPWQVSLHVQNVHVCGGSIITPEWIVTAAHCVEKPLNNPWHWTAFAGILRQSFMFYGAGYQVEKVISHPNYDSKTKNNDIALMKLQKPLTFNDLVKPVCLPNPGMMLQPEQLCWISGWGATEEKGKTSEVLNAAKVLLIETQRCNSRYVYDNLITPAMICAGFLQGNVDSCQGDSGGPLVTSKNNIWWLIGDTSWGSGCAKAYRPGVYGNVMVFTDWIYRQMR

SEQ ID NO: 90910 - protein, 492 aa, Homo sapiens; identical to SEQ ID NO: 90907
  Payload ID: 18176
  Gene Name: transmembrane protease, serine 2
  Uniprot ID: O15393
  ENSP ID: ENSP00000391216

SEQ ID NO: 90911 - protein, 79 aa, Homo sapiens
  Payload ID: 18176
  Gene Name: transmembrane protease, serine 2
  ENSP ID: ENSP00000391784
MALNSGSPPAIGPYYENHGYQPENPYPAQPTVVPTVYEVHPAQYYPSPVPQYAPRVLTQASNPVVCTQPKSPSGTVCTS

SEQ ID NO: 90912 - protein, 219 aa, Homo sapiens
  Payload ID: 18176
  Gene Name: transmembrane protease, serine 2
  ENSP ID: ENSP00000397846
MALNSGSPPAIGPYYENHGYQPENPYPAQPTVVPTVYEVHPAQYYPSPVPQYAPRVLTQASNPVVCTQPKSPSGTVCTSKTKKALCITLTLGTFLVGAALAAGLLWKFIRLYGPNFILQVYSSQRKSWHPVCQDDWNENYGRAACRDMGYKNNFYSSQGIVDDSGSTSFMKLNTSAGNVDIYKKLYHSDACSSKAVVSLRCIACGVNLNSSRQSRIVGG

SEQ ID NO: 90913 - protein, 454 aa, Homo sapiens
  Payload ID: 18177
  Gene Name: transmembrane protease, serine 3
  Uniprot ID: P57727
  ENSP ID: ENSP00000291532
MGENDPPAVEAPFSFRSLFGLDDLKISPVAPDADAVAAQILSLLPLKFFPIIVIGIIALILALAIGLGIHFDCSGKYRCRSSFKCIELIARCDGVSDCKDGEDEYRCVRVGGQNAVLQVFTAASWKTMCSDDWKGHYANVACAQLGFPSYVSSDNLRVSSLEGQFREEFVSIDHLLPDDKVTALHHSVYVREGCASGHVVTLQCTACGHRRGYSSRIVGGNMSLLSQWPWQASLQFQGYHLCGGSVITPLWIITAAHCVYDLYLPKSWTIQVGLVSLLDNPAPSHLVEKIVYHSKYKPKRLGNDIALMKLAGPLTFNEMIQPVCLPNSEENFPDGKVCWTSGWGATEDGAGDASPVLNHAAVPLISNKICNHRDVYGGIISPSMLCAGYLTGGVDSCQGDSGGPLVCQERRLWKLVGATSFGIGCAEVNKPGVYTRVTSFLDWIHEQMERDLKT

SEQ ID NO: 90914 - protein, 344 aa, Homo sapiens
  Payload ID: 18177
  Gene Name: transmembrane protease, serine 3
  Uniprot ID: P57727
  ENSP ID: ENSP00000381434
MGENDPPAVEAPFSFRSLFGLDDLKISPVAPDADAVAAQILSLLPLKFFPIIVIGIIALILALAIGLGIHFDCSGKYRCRSSFKCIELIARCDGVSDCKDGEDEYRCVRVGGQNAVLQVFTAASWKTMCSDDWKGHYANVACAQLGFPSYVSSDNLRVSSLEGQFREEFVSIDHLLPDDKVTALHHSVYVREGCASGHVVTLQCTACGHRRGYSSRIVGGNMSLLSQWPWQASLQFQGYHLCGGSVITPLWIITAAHCVYDLYLPKSWTIQVGLVSLLDNPAPSHLVEKIVYHSKYKPKRLGNDIALMKLAGPLTFNGTSGSLCGSAALPLFQEDLQLLIEAFL

SEQ ID NO: 90915 - protein, 451 aa, Homo sapiens
  Payload ID: 18177
  Gene Name: transmembrane protease, serine 3
  ENSP ID: ENSP00000381442
MGENDPPAVEAPFSFRSLFGLDDLKISPVAPDAVAAQILSLLPLKFFPIIVIGIIALILALAIGLGIHFDCSGKYRCRSSFKCIELIARCDGVSDCKDGEDEYRCVRVGGQNAVLQVFTAASWKTMCSDDWKGHYANVACAQLGFPSYVSSDNLRVSSLEGQFREEFVSIDHLLPDDKVTALHHSVYVREGCASGHVVTLQCTACGHRRGYSSRIVGGNMSLLSQWPWQASLQFQGYHLCGGSVITPLWIITAAHCVYDLYLPKSWTIQVGLVSLLDNPAPSHLVEKIVYHSKYKPKRLGNDIALMKLAGPLTFNEMIQPVCLPNSEENFPDGKVCWTSGWGATEDGGDASPVLNHAAVPLISNKICNHRDVYGGIISPSMLCAGYLTGGVDSCQGDSGGPLVCQERRLWKLVGATSFGIGCAEVNKPGVYTRVTSFLDWIHEQMERDLKT

SEQ ID NO: 90916 - protein, 453 aa, Homo sapiens
  Payload ID: 18177
  Gene Name: transmembrane protease, serine 3
  Uniprot ID: P57727
  ENSP ID: ENSP00000411013
MGENDPPAVEAPFSFRSLFGLDDLKISPVAPDADAVAAQILSLLPLKFFPIIVIGIIALILALAIGLGIHFDCSGKYRCRSSFKCIELIARCDGVSDCKDGEDEYRCVRVGGQNAVLQVFTAASWKTMCSDDWKGHYANVACAQLGFPSYVSSDNLRVSSLEGQFREEFVSIDHLLPDDKVTALHHSVYVREGCASGHVVTLQCTACGHRRGYSSRIVGGNMSLLSQWPWQASLQFQGYHLCGGSVITPLWIITAAHCVYDLYLPKSWTIQVGLVSLLDNPAPSHLVEKIVYHSKYKPKRLGNDIALMKLAGPLTFNEMIQPVCLPNSEENFPDGKVCWTSGWGATEDGGDASPVLNHAAVPLISNKICNHRDVYGGIISPSMLCAGYLTGGVDSCQGDSGGPLVCQERRLWKLVGATSFGIGCAEVNKPGVYTRVTSFLDWIHEQMERDLKT

SEQ ID NO: 90917 - protein, 437 aa, Homo sapiens
  Payload ID: 18178
  Gene Name: transmembrane protease, serine 4
  Uniprot ID: Q9NRS4
  ENSP ID: ENSP00000416037
MLQDPDSDQPLNSLDVKPLRKPRIPMETFRKVGIPIIIALLSLASIIIVVVLIKVILDKYYFLCGQPLHFIPRKQLCDGELDCPLGEDEEHCVKSFPEGPAVAVRLSKDRSTLQVLDSATGNWFSACFDNFTEALAETACRQMGYSSKPTFRAVEIGPDQDLDVVEITENSQELRMRNSSGPCLSGSLVSLHCLACGKSLKTPRVVGVEEASVDSWPWQVSIQYDKQHVCGGSILDPHWVLTAAHCFRKHTDVFNWKVRAGSDKLGSFPSLAVAKIIIIEFNPMYPKDNDIALMKLQFPLTFSGTVRPICLPFFDEELTPATPLWIIGWGFTKQNGGKMSDILLQASVQVIDSTRCNADDAYQGEVTEKMMCAGIPEGGVDTCQGDSGGPLMYQSDQWHVVGIVSWGYGCGGPSTPGVYTKVSAYLNWIYNVWKAEL

SEQ ID NO: 90918 - protein, 62 aa, Homo sapiens
  Payload ID: 18178
  Gene Name: transmembrane protease, serine 4
  ENSP ID: ENSP00000428246
  MOD_RES (1)..(1): Any amino acid
XKVRAGSDKLGSFPSLAVAKIIIIEFNPMYPKDNDIALMKLQFPLTFSAYLNWIYNVWKAEL

SEQ ID NO: 90919 - protein, 173 aa, Homo sapiens
  Payload ID: 18178
  Gene Name: transmembrane protease, serine 4
  ENSP ID: ENSP00000428407
MDPDSDQPLNSLDVKPLRKPRIPMETFRKVGIPIIIALLSLASIIIVVVLIRLSKDRSTLQVLDSATGNWFSACFDNFTEALAETACRQMGYSSKPTFRAVEIGPDQDLDVVEITENSQELRMRNSSGPCLSGSLVSLHCLACGKSLKTPRVVGVEEASVDSWPWQVSIQYDK

SEQ ID NO: 90920 - protein, 290 aa, Homo sapiens
  Payload ID: 18178
  Gene Name: transmembrane protease, serine 4
  ENSP ID: ENSP00000428814
MGYSRAVEIGPDQDLDVVEITENSQELRMRNSSGPCLSGSLVSLHCLACGKSLKTPRVVGVEEASVDSWPWQVSIQYDKQHVCGGSILDPHWVLTAAHCFRKHTDVFNWKVRAGSDKLGSFPSLAVAKIIIIEFNPMYPKDNDIALMKLQFPLTFSGTVRPICLPFFDEELTPATPLWIIGWGFTKQNGGKMSDILLQASVQVIDSTRCNADDAYQGEVTEKMMCAGIPEGGVDTCQGDSGGPLMYQSDQWHVVGIVSWGYGCGGPSTPGVYTKVSAYLNWIYNVWKAEL

SEQ ID NO: 90921 - protein, 397 aa, Homo sapiens
  Payload ID: 18178
  Gene Name: transmembrane protease, serine 4
  Uniprot ID: Q9NRS4
  ENSP ID: ENSP00000429209
MDPDSDQPLNSLVKVILDKYYFLCGQPLHFIPRKQLCDGELDCPLGEDEEHCVKSFPEGPAVAVRLSKDRSTLQVLDSATGNWFSACFDNFTEALAETACRQMGYSSKPTFRAVEIGPDQDLDVVEITENSQELRMRNSSGPCLSGSLVSLHCLACGKSLKTPRVVGVEEASVDSWPWQVSIQYDKQHVCGGSILDPHWVLTAAHCFRKHTDVFNWKVRAGSDKLGSFPSLAVAKIIIIEFNPMYPKDNDIALMKLQFPLTFSGTVRPICLPFFDEELTPATPLWIIGWGFTKQNGGKMSDILLQASVQVIDSTRCNADDAYQGEVTEKMMCAGIPEGGVDTCQGDSGGPLMYQSDQWHVVGIVSWGYGCGGPSTPGVYTKVSAYLNWIYNVWKAEL

SEQ ID NO: 90922 - protein, 148 aa, Homo sapiens
  Payload ID: 18178
  Gene Name: transmembrane protease, serine 4
  ENSP ID: ENSP00000429833
  MOD_RES (1)..(1): Any amino acid
XPIIIALLSLASIIIVVVLIKVILDKYYFLCGQPLHFIPRKQLCDGELDCPLGEDEEHCVKSFPEGPAVAVRLSKDRSTLQVLDSATGNWFSACFDNFTEALAETACRQMGYSSKPTFRAVEIGPDQDLDVVEITENSQELRMRNSSG

SEQ ID NO: 90923 - protein, 335 aa, Homo sapiens
  Payload ID: 18178
  Gene Name: transmembrane protease, serine 4
  ENSP ID: ENSP00000429889
MDPDSDQPLNSLDVKPLRKPRIPMETFRKVGIPIIIALLSLASIIIVVVLIKVILDKYYFLCGQPLHFIPRKQLCDGELDCPLGEDEEHCVKSFPEGPAVAVRLSKDRSTLQVLDSATGNWFSACFDNFTEALAETACRQMGYSSKPTFRAVEIGPDQDLDVVEITENSQELRMRNSSGPCLSGSLVSLHCLACGKSLKTPRVVGVEEASVDSWPWQVSIQYDKQHVCGGSILDPHWVLTAAHCFRKHTDVFNWKVRAGSDKLGSFPSLAVAKIIIIEFNPMYPKDNDIALMKLQFPLTFSGTVRPICLPFFDEELTPATPLWIIGWGFTKQNGG

SEQ ID NO: 90924 - protein, 432 aa, Homo sapiens
  Payload ID: 18178
  Gene Name: transmembrane protease, serine 4
  Uniprot ID: Q9NRS4
  ENSP ID: ENSP00000430547
MLQDPDSDQPLNSLDVKPLRKPRIPMETFRKVGIPIIIALLSLASIIIVVVLIKVILDKYYFLCGQPLHFIPRKQLCDGELDCPLGEDEEHCVKSFPEGPAVAVRLSKDRSTLQVLDSATGNWFSACFDNFTEALAETACRQMGYSRAVEIGPDQDLDVVEITENSQELRMRNSSGPCLSGSLVSLHCLACGKSLKTPRVVGVEEASVDSWPWQVSIQYDKQHVCGGSILDPHWVLTAAHCFRKHTDVFNWKVRAGSDKLGSFPSLAVAKIIIIEFNPMYPKDNDIALMKLQFPLTFSGTVRPICLPFFDEELTPATPLWIIGWGFTKQNGGKMSDILLQASVQVIDSTRCNADDAYQGEVTEKMMCAGIPEGGVDTCQGDSGGPLMYQSDQWHVVGIVSWGYGCGGPSTPGVYTKVSAYLNWIYNVWKAEL

SEQ ID NO: 90925 - protein, 59 aa, Homo sapiens
  Payload ID: 18178
  Gene Name: transmembrane protease, serine 4
  ENSP ID: ENSP00000431062
MDPDSDQPLNSLGKFRCQTPAQTPYPHGDLQKGGDPHHHSTTEPGEYHHCGCPHQGDSG

SEQ ID NO: 90926 - protein, 435 aa, Homo sapiens
  Payload ID: 18178
  Gene Name: transmembrane protease, serine 4
  Uniprot ID: Q9NRS4
  ENSP ID: ENSP00000435184
MDPDSDQPLNSLDVKPLRKPRIPMETFRKVGIPIIIALLSLASIIIVVVLIKVILDKYYFLCGQPLHFIPRKQLCDGELDCPLGEDEEHCVKSFPEGPAVAVRLSKDRSTLQVLDSATGNWFSACFDNFTEALAETACRQMGYSSKPTFRAVEIGPDQDLDVVEITENSQELRMRNSSGPCLSGSLVSLHCLACGKSLKTPRVVGVEEASVDSWPWQVSIQYDKQHVCGGSILDPHWVLTAAHCFRKHTDVFNWKVRAGSDKLGSFPSLAVAKIIIIEFNPMYPKDNDIALMKLQFPLTFSGTVRPICLPFFDEELTPATPLWIIGWGFTKQNGGKMSDILLQASVQVIDSTRCNADDAYQGEVTEKMMCAGIPEGGVDTCQGDSGGPLMYQSDQWHVVGIVSWGYGCGGPSTPGVYTKVSAYLNWIYNVWKAEL

SEQ ID NO: 90927 - protein, 437 aa, Homo sapiens; identical to SEQ ID NO: 90917
  Payload ID: 18178
  Gene Name: transmembrane protease, serine 4
  Uniprot ID: Q9NRS4
  ENSP ID: ENSP00000477949

SEQ ID NO: 90928 - protein, 399 aa, Homo sapiens
  Payload ID: 18178
  Gene Name: transmembrane protease, serine 4
  ENSP ID: ENSP00000478147
MLQDPDSDQPLNSLVKVILDKYYFLCGQPLHFIPRKQLCDGELDCPLGEDEEHCVKSFPEGPAVAVRLSKDRSTLQVLDSATGNWFSACFDNFTEALAETACRQMGYSSKPTFRAVEIGPDQDLDVVEITENSQELRMRNSSGPCLSGSLVSLHCLACGKSLKTPRVVGVEEASVDSWPWQVSIQYDKQHVCGGSILDPHWVLTAAHCFRKHTDVFNWKVRAGSDKLGSFPSLAVAKIIIIEFNPMYPKDNDIALMKLQFPLTFSGTVRPICLPFFDEELTPATPLWIIGWGFTKQNGGKMSDILLQASVQVIDSTRCNADDAYQGEVTEKMMCAGIPEGGVDTCQGDSGGPLMYQSDQWHVVGIVSWGYGCGGPSTPGVYTKVSAYLNWIYNVWKAEL

SEQ ID NO: 90929 - protein, 422 aa, Homo sapiens
  Payload ID: 18178
  Gene Name: transmembrane protease, serine 4
  ENSP ID: ENSP00000480370
MSNPCANPVSPWRPSERWIPIIIALLSLASIIIVVVLIKVILDKYYFLCGQPLHFIPRKQLCDGELDCPLGEDEEHCVKSFPEGPAVAVRLSKDRSTLQVLDSATGNWFSACFDNFTEALAETACRQMGYSSKPTFRAVEIGPDQDLDVVEITENSQELRMRNSSGPCLSGSLVSLHCLACGKSLKTPRVVGVEEASVDSWPWQVSIQYDKQHVCGGSILDPHWVLTAAHCFRKHTDVFNWKVRAGSDKLGSFPSLAVAKIIIIEFNPMYPKDNDIALMKLQFPLTFSGTVRPICLPFFDEELTPATPLWIIGWGFTKQNGGKMSDILLQASVQVIDSTRCNADDAYQGEVTEKMMCAGIPEGGVDTCQGDSGGPLMYQSDQWHVVGIVSWGYGCGGPSTPGVYTKVSAYLNWIYNVWKAEL

SEQ ID NO: 90930 - protein, 457 aa, Homo sapiens
  Payload ID: 18179
  Gene Name: transmembrane protease, serine 5
  Uniprot ID: Q9H3S3
  ENSP ID: ENSP00000299882
MSLMLDDQPPMEAQYAEEGPGPGIFRAEPGDQQHPISQAVCWRSMRRGCAVLGALGLLAGAGVGSWLLVLYLCPAASQPISGTLQDEEITLSCSEASAEEALLPALPKTVSFRINSEDFLLEAQVRDQPRWLLVCHEGWSPALGLQICWSLGHLRLTHHKGVNLTDIKLNSSQEFAQLSPRLGGFLEEAWQPRNNCTSGQVVSLRCSECGARPLASRIVGGQSVAPGRWPWQASVALGFRHTCGGSVLAPRWVVTAAHCMHSFRLARLSSWRVHAGLVSHSAVRPHQGALVERIIPHPLYSAQNHDYDVALLRLQTALNFSDTVGAVCLPAKEQHFPKGSRCWVSGWGHTHPSHTYSSDMLQDTVVPLFSTQLCNSSCVYSGALTPRMLCAGYLDGRADACQGDSGGPLVCPDGDTWRLVGVVSWGRGCAEPNHPGVYAKVAEFLDWIHDTAQDSLL

SEQ ID NO: 90931 - protein, 198 aa, Homo sapiens
  Payload ID: 18179
  Gene Name: transmembrane protease, serine 5
  ENSP ID: ENSP00000437761
MHSFRLARLSSWRVHAGLVSHSAVRPHQGALVERIIPHPLYSAQNHDYDVALLRLQTALNFSDTVGAVCLPAKEQHFPKGSRCWVSGWGHTHPSHTYSSDMLQDTVVPLFSTQLCNSSCVYSGALTPRMLCAGYLDGRADACQGDSGGPLVCPDGDTWRLVGVVSWGRGCAEPNHPGVYAKVAEFLDWIHDTAQDSLL

SEQ ID NO: 90932 - protein, 147 aa, Homo sapiens
  Payload ID: 18179
  Gene Name: transmembrane protease, serine 5
  ENSP ID: ENSP00000437937
MHSFRLARLSSWRVHAGLVSHSAVRPHQGALVERIIPHPLYSAQNHDYDVALLRLQTALNFSDTVGAVCLPAKEQHFPKGSRCWVSGWGHTHPSHTYSSDMLQDTVVPLFSTQLCNSSCVYSGALTPRMLCAGYLDGRADACQDSLL

SEQ ID NO: 90933 - protein, 388 aa, Homo sapiens
  Payload ID: 18179
  Gene Name: transmembrane protease, serine 5
  ENSP ID: ENSP00000440783
MSLMLDDQPPMEAQYAEEGPGPGIFRAEPGDQQHPISQAVCWRSMRRGCAVLGALGLLAGAGVGSWLLVLYLCPAASQPISGTLQDEEITLSCSEASAEEALLPALPKTVSFRINSEDFLLEAQVRDQPRWLLVCHEGWSPALGLQICWSLGHLRLTHHKGVNLTDIKLNSSQEFAQLSPRLGGFLEEAWQPSFRLARLSSWRVHAGLVSHSAVRPHQGALVERIIPHPLYSAQNHDYDVALLRLQTALNFSDTVGAVCLPAKEQHFPKGSRCWVSGWGHTHPSHTYSSDMLQDTVVPLFSTQLCNSSCVYSGALTPRMLCAGYLDGRADACQGDSGGPLVCPDGDTWRLVGVVSWGRGCAEPNHPGVYAKVAEFLDWIHDTAQDSLL

SEQ ID NO: 90934 - protein, 44 aa, Homo sapiens
  Payload ID: 18179
  Gene Name: transmembrane protease, serine 5
  ENSP ID: ENSP00000440976
MSLMLDDQPPMEAQYAEEGPGPGIFRAEPGDQQHPSRPDWAIGE

SEQ ID NO: 90935 - protein, 448 aa, Homo sapiens
  Payload ID: 18179
  Gene Name: transmembrane protease, serine 5
  ENSP ID: ENSP00000441104
MTGWGQWRAIILHSPDPPWGQPHMIDVSQAVCWRSMRRGCAVLGALGLLAGAGVGSWLLVLYLCPAASQPISGTLQDEEITLSCSEASAEEALLPALPKTVSFRINSEDFLLEAQVRDQPRWLLVCHEGWSPALGLQICWSLGHLRLTHHKGVNLTDIKLNSSQEFAQLSPRLGGFLEEAWQPRNNCTSGQVVSLRCSECGARPLASRIVGGQSVAPGRWPWQASVALGFRHTCGGSVLAPRWVVTAAHCMHSFRLARLSSWRVHAGLVSHSAVRPHQGALVERIIPHPLYSAQNHDYDVALLRLQTALNFSDTVGAVCLPAKEQHFPKGSRCWVSGWGHTHPSHTYSSDMLQDTVVPLFSTQLCNSSCVYSGALTPRMLCAGYLDGRADACQGDSGGPLVCPDGDTWRLVGVVSWGRGCAEPNHPGVYAKVAEFLDWIHDTAQDSLL

SEQ ID NO: 90936 - protein, 17 aa, Homo sapiens
  Payload ID: 18179
  Gene Name: transmembrane protease, serine 5
  ENSP ID: ENSP00000443681
MHSFRLARLSSWRVHAG

SEQ ID NO: 90937 - protein, 10 aa, Homo sapiens
  Payload ID: 18179
  Gene Name: transmembrane protease, serine 5
  ENSP ID: ENSP00000445502
MHSFRLARLS

SEQ ID NO: 90938 - protein, 413 aa, Homo sapiens
  Payload ID: 18179
  Gene Name: transmembrane protease, serine 5
  ENSP ID: ENSP00000445528
MRRGCAVLGALGLLAGAGVGSWLLVLYLCPAASQPISGTLQDEEITLSCSEASAEEALLPALPKTVSFRINSEDFLLEAQVRDQPRWLLVCHEGWSPALGLQICWSLGHLRLTHHKGVNLTDIKLNSSQEFAQLSPRLGGFLEEAWQPRNNCTSGQVVSLRCSECGARPLASRIVGGQSVAPGRWPWQASVALGFRHTCGGSVLAPRWVVTAAHCMHSFRLARLSSWRVHAGLVSHSAVRPHQGALVERIIPHPLYSAQNHDYDVALLRLQTALNFSDTVGAVCLPAKEQHFPKGSRCWVSGWGHTHPSHTYSSDMLQDTVVPLFSTQLCNSSCVYSGALTPRMLCAGYLDGRADACQGDSGGPLVCPDGDTWRLVGVVSWGRGCAEPNHPGVYAKVAEFLDWIHDTAQDSLL

SEQ ID NO: 90939 - protein, 344 aa, Homo sapiens
  Payload ID: 18179
  Gene Name: transmembrane protease, serine 5
  ENSP ID: ENSP00000445930
MRRGCAVLGALGLLAGAGVGSWLLVLYLCPAASQPISGTLQDEEITLSCSEASAEEALLPALPKTVSFRINSEDFLLEAQVRDQPRWLLVCHEGWSPALGLQICWSLGHLRLTHHKGVNLTDIKLNSSQEFAQLSPRLGGFLEEAWQPSFRLARLSSWRVHAGLVSHSAVRPHQGALVERIIPHPLYSAQNHDYDVALLRLQTALNFSDTVGAVCLPAKEQHFPKGSRCWVSGWGHTHPSHTYSSDMLQDTVVPLFSTQLCNSSCVYSGALTPRMLCAGYLDGRADACQGDSGGPLVCPDGDTWRLVGVVSWGRGCAEPNHPGVYAKVAEFLDWIHDTAQDSLL

SEQ ID NO: 90940 - protein, 811 aa, Homo sapiens
  Payload ID: 18180
  Gene Name: transmembrane protease, serine 6
  Uniprot ID: Q8IU80
  ENSP ID: ENSP00000334962
MLLLFHSKRMPVAEAPQVAGGQGDGGDGEEAEPEGMFKACEDSKRKARGYLRLVPLFVLLALLVLASAGVLLWYFLGYKAEVMVSQVYSGSLRVLNRHFSQDLTRRESSAFRSETAKAQKMLKELITSTRLGTYYNSSSVYSFGEGPLTCFFWFILQIPEHRRLMLSPEVVQALLVEELLSTVNSSAAVPYRAEYEVDPEGLVILEASVKDIAALNSTLGCYRYSYVGQGQVLRLKGPDHLASSCLWHLQGPKDLMLKLRLEWTLAECRDRLAMYDVAGPLEKRLITSVYGCSRQEPVVEVLASGAIMAVVWKKGLHSYYDPFVLSVQPVVFQACEVNLTLDNRLDSQGVLSTPYFPSYYSPQTHCSWHLTVPSLDYGLALWFDAYALRRQKYDLPCTQGQWTIQNRRLCGLRILQPYAERIPVVATAGITINFTSQISLTGPGVRVHYGLYNQSDPCPGEFLCSVNGLCVPACDGVKDCPNGLDERNCVCRATFQCKEDSTCISLPKVCDGQPDCLNGSDEEQCQEGVPCGTFTFQCEDRSCVKKPNPQCDGRPDCRDGSDEEHCDCGLQGPSSRIVGGAVSSEGEWPWQASLQVRGRHICGGALIADRWVITAAHCFQEDSMASTVLWTVFLGKVWQNSRWPGEVSFKVSRLLLHPYHEEDSHDYDVALLQLDHPVVRSAAVRPVCLPARSHFFEPGLHCWITGWGALREGGPISNALQKVDVQLIPQDLCSEVYRYQVTPRMLCAGYRKGKKDACQGDSGGPLVCKALSGRWFLAGLVSWGLGCGRPNYFGVYTRITGVISWIQQVVT

SEQ ID NO: 90941 - protein, 824 aa, Homo sapiens
  Payload ID: 18180
  Gene Name: transmembrane protease, serine 6
  Uniprot ID: Q8IU80
  ENSP ID: ENSP00000371211
MPVAEAPQVAGGQGDGGDGEEAEPEGMFKACEDSKRKARGYLRLVPLFVLLALLVLASAGVLLWYFLGYKAEVMVSQVYSGSLRVLNRHFSQDLTRRESSAFRSETAKAQKMLKELITSTRLGTYYNSSSVYSFGEGPLTCFFWFILQIPEHRRLMLSPEVVQALLVEELLSTVNSSAAVPYRAEYEVDPEGLVILEASVKDIAALNSTLGCYRYSYVGQGQVLRLKGPDHLASSCLWHLQGPKDLMLKLRLEWTLAECRDRLAMYDVAGPLEKRLITSVYGCSRQEPVVEVLASGAIMAVVWKKGLHSYYDPFVLSVQPVVFQACEVNLTLDNRLDSQGVLSTPYFPSYYSPQTHCSWHLTVPSLDYGLALWFDAYALRRQKYDLPCTQGQWTIQNRRLCGLRILQPYAERIPVVATAGITINFTSQISLTGPGVRVHYGLYNQSDPCPGEFLCSVNGLCVPACDGVKDCPNGLDERNCVCRATFQCKEDSTCISLPKVCDGQPDCLNGSDEEQCQEGVPCGTFTFQCEDRSCVKKPNPQCDGRPDCRDGSDEEHCDCGLQGPSSRIVGGAVSSEGEWPWQASLQVRGRHICGGALIADRWVITAAHCFQEDSMASTVLWTVFLGKVWQNSRWPGEVSFKVSRLLLHPYHEEDSHDYDVALLQLDHPVVRSAAVRPVCLPARSHFFEPGLHCWITGWGALREGALRADAVALFYGWRNQGSETCCCPISNALQKVDVQLIPQDLCSEVYRYQVTPRMLCAGYRKGKKDACQGDSGGPLVCKALSGRWFLAGLVSWGLGCGRPNYFGVYTRITGVISWIQQVVT

SEQ ID NO: 90942 - protein, 824 aa, Homo sapiens; identical to SEQ ID NO: 90941
  Payload ID: 18180
  Gene Name: transmembrane protease, serine 6
  Uniprot ID: Q8IU80
  ENSP ID: ENSP00000384964

SEQ ID NO: 90943 - protein, 802 aa, Homo sapiens
  Payload ID: 18180
  Gene Name: transmembrane protease, serine 6
  Uniprot ID: Q8IU80
  ENSP ID: ENSP00000385453
MPVAEAPQVAGGQGDGGDGEEAEPEGMFKACEDSKRKARGYLRLVPLFVLLALLVLASAGVLLWYFLGYKAEVMVSQVYSGSLRVLNRHFSQDLTRRESSAFRSETAKAQKMLKELITSTRLGTYYNSSSVYSFGEGPLTCFFWFILQIPEHRRLMLSPEVVQALLVEELLSTVNSSAAVPYRAEYEVDPEGLVILEASVKDIAALNSTLGCYRYSYVGQGQVLRLKGPDHLASSCLWHLQGPKDLMLKLRLEWTLAECRDRLAMYDVAGPLEKRLITSVYGCSRQEPVVEVLASGAIMAVVWKKGLHSYYDPFVLSVQPVVFQACEVNLTLDNRLDSQGVLSTPYFPSYYSPQTHCSWHLTVPSLDYGLALWFDAYALRRQKYDLPCTQGQWTIQNRRLCGLRILQPYAERIPVVATAGITINFTSQISLTGPGVRVHYGLYNQSDPCPGEFLCSVNGLCVPACDGVKDCPNGLDERNCVCRATFQCKEDSTCISLPKVCDGQPDCLNGSDEEQCQEGVPCGTFTFQCEDRSCVKKPNPQCDGRPDCRDGSDEEHCDCGLQGPSSRIVGGAVSSEGEWPWQASLQVRGRHICGGALIADRWVITAAHCFQEDSMASTVLWTVFLGKVWQNSRWPGEVSFKVSRLLLHPYHEEDSHDYDVALLQLDHPVVRSAAVRPVCLPARSHFFEPGLHCWITGWGALREGGPISNALQKVDVQLIPQDLCSEVYRYQVTPRMLCAGYRKGKKDACQGDSGGPLVCKALSGRWFLAGLVSWGLGCGRPNYFGVYTRITGVISWIQQVVT

SEQ ID NO: 90944 - protein, 71 aa, Homo sapiens
  Payload ID: 18180
  Gene Name: transmembrane protease, serine 6
  ENSP ID: ENSP00000392433
LTLDNRLDSQGVLSTPYFPSYYSPQTHCSWHLTVPSLDYGLALWFDAYALRRQKYDLPCTQGQWTIQNRRV

SEQ ID NO: 90945 - protein, 461 aa, Homo sapiens
  Payload ID: 18180
  Gene Name: transmembrane protease, serine 6
  ENSP ID: ENSP00000397691
MLLLFHSKRMPVAEAPQVAGGQGDGGDGEEAEPEGMFKACEDSKRKARGYLRLVPLFVLLALLVLASAGVLLWYFLGYKAEVMVSQVYSGSLRVLNRHFSQDLTRRESSAFRSETAKAQKMLKELITSTRLGTYYNSSSVYSFGEGPLTCFFWFILQIPEHRRLMLSPEVVQALLVEELLSTVNSSAAVPYRAEYEVDPEGLVILEASVKDIAALNSTLGCYRYSYVGQGQVLRLKGPDHLASSCLWHLQGPKDLMLKLRLEWTLAECRDRLAMYDVAGPLEKRLITSVYGCSRQEPVVEVLASGAIMAVVWKKGLHSYYDPFVLSVQPVVFQACEVNLTLDNRLDSQGVLSTPYFPSYYSPQTHCSWHLTVPSLDYGLALWFDAYALRRQKYDLPCTQGQWTIQNRRYHFLSSLWLPFLPPPPSLPSSIVTPSLEAQVPNLRGAARGASRGWGWCQACCP

SEQ ID NO: 90946 - protein, 141 aa, Homo sapiens
  Payload ID: 18180
  Gene Name: transmembrane protease, serine 6
  ENSP ID: ENSP00000400317
MPVAEAPQVAGGQGDGGDGEEAEPEGMFKACEDSKRKARGYLRLVPLFVLLALLVLASAGVLLWYFLGYKAEVMVSQVYSGSLRVLNRHFSQDLTRRESSAFRSETAKAQKMLKELITSTRLGTYYNSSSVYSFGEGPLTC

SEQ ID NO: 90947 - protein, 843 aa, Homo sapiens
  Payload ID: 18181
  Gene Name: transmembrane protease, serine 7
  Uniprot ID: Q7RTY8
  ENSP ID: ENSP00000398236
MDKENSDVSAAPADLKISNISVQVVSAQKKLPVRRPPLPGRRLPLPGRRPPQRPIGKAKPKKQSKKKVPFWNVQNKIILFTVFLFILAVIAWTLLWLYISKTESKDAFYFAGMFRITNIEFLPEYRQKESREFLSVSRTVQQVINLVYTTSAFSKFYEQSVVADVSSNNKGGLLVHFWIVFVMPRAKGHIFCEDCVAAILKDSIQTSIINRTSVGSLQGLAVDMDSVVLNAGLRSDYSSTIGSDKGCSQYFYAEHLSLHYPLEISAASGRLMCHFKLVAIVGYLIRLSIKSIQIEADNCVTDSLTIYDSLLPIRSSILYRICEPTRTLMSFVSTNNLMLVTFKSPHIRRLSGIRAYFEVIPEQKCENTVLVKDITGFEGKISSPYYPSYYPPKCKCTWKFQTSLSTLGIALKFYNYSITKKSMKGCEHGWWEINEHMYCGSYMDHQTIFRVPSPLVHIQLQCSSRLSDKPLLAEYGSYNISQPCPVGSFRCSSGLCVPQAQRCDGVNDCFDESDELFCVSPQPACNTSSFRQHGPLICDGFRDCENGRDEQNCTQSIPCNNRTFKCGNDICFRKQNAKCDGTVDCPDGSDEEGCTCSRSSSALHRIIGGTDTLEGGWPWQVSLHFVGSAYCGASVISREWLLSAAHCFHGNRLSDPTPWTAHLGMYVQGNAKFVSPVRRIVVHEYYNSQTFDYDIALLQLSIAWPETLKQLIQPICIPPTGQRVRSGEKCWVTGWGRRHEADNKGSLVLQQAEVELIDQTLCVSTYGIITSRMLCAGIMSGKRDACKGDSGGPLSCRRKSDGKWILTGIVSWGHGSGRPNFPGVYTRVSNFVPWIHKYVPSLL

SEQ ID NO: 90948 - protein, 717 aa, Homo sapiens
  Payload ID: 18181
  Gene Name: transmembrane protease, serine 7
  Uniprot ID: Q7RTY8
  ENSP ID: ENSP00000411645
MFRITNIEFLPEYRQKESREFLSVSRTVQQVINLVYTTSAFSKFYEQSVVADVSNNKGGLLVHFWIVFVMPRAKGHIFCEDCVAAILKDSIQTSIINRTSVGSLQGLAVDMDSVVLNDKGCSQYFYAEHLSLHYPLEISAASGRLMCHFKLVAIVGYLIRLSIKSIQIEADNCVTDSLTIYDSLLPIRSSILYRICEPTRTLMSFVSTNNLMLVTFKSPHIRRLSGIRAYFEVIPEQKCENTVLVKDITGFEGKISSPYYPSYYPPKCKCTWKFQTSLSTLGIALKFYNYSITKKSMKGCEHGWWEINEHMYCGSYMDHQTIFRVPSPLVHIQLQCSSRLSDKPLLAEYGSYNISQPCPVGSFRCSSGLCVPQAQRCDGVNDCFDESDELFCVSPQPACNTSSFRQHGPLICDGFRDCENGRDEQNCTQSIPCNNRTFKCGNDICFRKQNAKCDGTVDCPDGSDEEGCTCSRSSSALHRIIGGTDTLEGGWPWQVSLHFVGSAYCGASVISREWLLSAAHCFHGNRLSDPTPWTAHLGMYVQGNAKFVSPVRRIVVHEYYNSQTFDYDIALLQLSIAWPETLKQLIQPICIPPTGQRVRSGEKCWVTGWGRRHEADNKGSLVLQQAEVELIDQTLCVSTYGIITSRMLCAGIMSGKRDACKGDSGGPLSCRRKSDGKWILTGIVSWGHGSGRPNFPGVYTRVSNFVPWIHKYVPSLL

SEQ ID NO: 90949 - protein, 129 aa, Homo sapiens
  Payload ID: 18181
  Gene Name: transmembrane protease, serine 7
  ENSP ID: ENSP00000415472
MFRITNIEFLPEYRQKESREFLSVSRTVQQVINLVYTTSAFSKFYEQSVVADVSNNKGGLLVHFWIVFVMPRAKGHIFCEDCVAAILKDSIQTSIINRTSVGSLQGLAVDMDSVVLNEVLGLTLIVWID

SEQ ID NO: 90950 - protein, 182 aa, Homo sapiens
  Payload ID: 18181
  Gene Name: transmembrane protease, serine 7
  ENSP ID: ENSP00000447563
MPAIYWINLVYTTSAFSKFYEQSVVADVSSNNKGGLLVHFWIVFVMPRAKGHIFCEDCVAAILKDSIQTSIINRTSVGSLQGLAVDMDSVVLNAGLRSDYSSTIGSDKGCSQYFYAEHLSLHYPLEISAASGRLMCHFKLVAIVGYLIRLSIKSIQIEADNCVTDSLTIYDSLLPIRSSILY

SEQ ID NO: 90951 - protein, 717 aa, Homo sapiens; identical to SEQ ID NO: 90948
  Payload ID: 18181
  Gene Name: transmembrane protease, serine 7
  Uniprot ID: Q7RTY8
  ENSP ID: ENSP00000478830

SEQ ID NO: 90952 - protein, 1059 aa, Homo sapiens
  Payload ID: 18182
  Gene Name: transmembrane protease, serine 9
  Uniprot ID: Q7Z410
  ENSP ID: ENSP00000330264
MEPTVADVHLVPRTTKEVPALDAACCRAASIGVVATSLVVLTLGVLLAFLSTQGFHVDHTAELRGIRWTSSLRRETSDYHRTLTPTLEALLHFLLRPLQTLSLGLEEELLQRGIRARLREHGISLAAYGTIVSAELTGRHKGPLAERDFKSGRCPGNSFSCGNSQCVTKVNPECDDQEDCSDGSDEAHCECGLQPAWRMAGRIVGGMEASPGEFPWQASLRENKEHFCGAAIINARWLVSAAHCFNEFQDPTKWVAYVGATYLSGSEASTVRAQVVQIVKHPLYNADTADFDVAVLELTSPLPFGRHIQPVCLPAATHIFPPSKKCLISGWGYLKEDFLVKPEVLQKATVELLDQALCASLYGHSLTDRMVCAGYLDGKVDSCQGDSGGPLVCEEPSGRFFLAGIVSWGIGCAEARRPGVYARVTRLRDWILEATTKASMPLAPTMAPAPAAPSTAWPTSPESPVVSTPTKSMQALSTVPLDWVTVPKLQECGARPAMEKPTRVVGGFGAASGEVPWQVSLKEGSRHFCGATVVGDRWLLSAAHCFNHTKVEQVRAHLGTASLLGLGGSPVKIGLRRVVLHPLYNPGILDFDLAVLELASPLAFNKYIQPVCLPLAIQKFPVGRKCMISGWGNTQEGNATKPELLQKASVGIIDQKTCSVLYNFSLTDRMICAGFLEGKVDSCQGDSGGPLACEEAPGVFYLAGIVSWGIGCAQVKKPGVYTRITRLKGWILEIMSSQPLPMSPPSTTRMLATTSPRTTAGLTVPGATPSRPTPGAASRVTGQPANSTLSAVSTTARGQTPFPDAPEATTHTQLPDCGLAPAALTRIVGGSAAGRGEWPWQVSLWLRRREHRCGAVLVAERWLLSAAHCFDVYGDPKQWAAFLGTPFLSGAEGQLERVARIYKHPFYNLYTLDYDVALLELAGPVRRSRLVRPICLPEPAPRPPDGTRCVITGWGSVREGGSMARQLQKAAVRLLSEQTCRRFYPVQISSRMLCAGFPQGGVDSCSGDAGGPLACREPSGRWVLTGVTSWGYGCGRPHFPGVYTRVAAVRGWIGQHIQE

SEQ ID NO: 90953 - protein, 855 aa, Homo sapiens
  Payload ID: 18182
  Gene Name: transmembrane protease, serine 9
  ENSP ID: ENSP00000482424
MEPTVADVHLVPRTTKEVPALDAACCRAASIGVVATSLVVLTLGVLLAFLSTQGFHVDHTAELRGIRWTSSLRRETSDYHRTLTPTLEALLHFLLRPLQTLSLGLEEELLQRGIRARLREHGISLAAYGTIVSAELTGRHKGPLAERDFKSGRCPGNSFSCGNSQCVTKVNPECDDQEDCSDGSDEAHCECGLQPAWRMAGRIVGGMEASPGEFPWQASLRENKEHFCGAAIINARWLVSAAHCFNEFQDPTKWVAYVGATYLSGSEASTVRAQVVQIVKHPLYNADTADFDVAVLELTSPLPFGRHIQPVCLPAATHIFPPSKKCLISGWGYLKEDFLVKPEVLQKATVELLDQALCASLYGHSLTDRMVCAGYLDGKVDSCQGDSGGPLVCEEPSGRFFLAGIVSWGIGCAEARRPGVYARVTRLRDWILEATTKASMPLAPTMAPAPAAPSTAWPTSPESPVVSTPTKSMQALSTVPLDWVTVPKLQECGARPAMEKPTRVVGGFGAASGEVPWQVSLKEGSRHFCGATVVGDRWLLSAAHCFNHTKVEQVRAHLGTASLLGLGGSPVKIGLRRVVLHPLYNPGILDFDLAVLELASPLAFNKYIQPVCLPLAIQKFPVGRKCMISGWGNTQEGNATKPELLQKASVGIIDQKTCSVLYNFSLTDRMICAGFLEGKVDSCQGDSGGPLACEEAPGVFYLAGIVSWGIGCAQVKKPGVYTRITRLKGWILEIMSSQPLPMSPPSTTRMLATTSPRTTAGLTVPGATPSRPTPGAASRVTGQPANSTLSAVSTTARGQTPFPDAPEATTHTQLPDCGLAPGNTVAGPCWWQRGGCCRRRTASTSTGTPSSGRPS

SEQ ID NO: 90954 - protein, 134 aa, Homo sapiens
  Payload ID: 18183
  Gene Name: transmembrane protein 100
  Uniprot ID: Q9NV29
  ENSP ID: ENSP00000395328
MTEEPIKEILGAPKAHMAATMEKSPKSEVVITTVPLVSEIQLMAATGGTELSCYRCIIPFAVVVFIAGIVVTAVAYSFNSHGSIISIFGLVVLSSGLFLLASSALCWKVRQRSKKAKRRESQTALVANQRSLFA

SEQ ID NO: 90955 - protein, 129 aa, Homo sapiens
  Payload ID: 18183
  Gene Name: transmembrane protein 100
  ENSP ID: ENSP00000459290
MTEEPIKEILGAPKAHMAATMEKSPKSEVVITTVPLVSEIQLMAATGGTELSCYRCIIPFAVVVFIAGIVVTAVAYSFNSHGSIISIFGLVVLSSGLFLLASSALCWKVRQRSKKAKRRESQTALVANQ

SEQ ID NO: 90956 - protein, 134 aa, Homo sapiens; identical to SEQ ID NO: 90954
  Payload ID: 18183
  Gene Name: transmembrane protein 100
  Uniprot ID: Q9NV29
  ENSP ID: ENSP00000465638

SEQ ID NO: 90957 - protein, 257 aa, Homo sapiens
  Payload ID: 18184
  Gene Name: transmembrane protein 101
  Uniprot ID: Q96IK0
  ENSP ID: ENSP00000206380
MASKIGSRRWMLQLIMQLGSVLLTRCPFWGCFSQLMLYAERAEARRKPDIPVPYLYFDMGAAVLCASFMSFGVKRRWFALGAALQLAISTYAAYIGGYVHYGDWLKVRMYSRTVAIIGGFLVLASGAGELYRRKPRSRSLQSTGQVFLGIYLICVAYSLQHSKEDRLAYLNHLPGGELMIQLFFVLYGILALAFLSGYYVTLAAQILAVLLPPVMLLIDGNVAYWHNTRRVEFWNQMKLLGESVGIFGTAVILATDG

SEQ ID NO: 90958 - protein, 3 aa, Homo sapiens
  Payload ID: 18184
  Gene Name: transmembrane protein 101
  ENSP ID: ENSP00000465903
MGA

SEQ ID NO: 90959 - protein, 171 aa, Homo sapiens
  Payload ID: 18184
  Gene Name: transmembrane protein 101
  ENSP ID: ENSP00000466307
MASKIGSRRWMLQLIMQLGSVLLTRCPFWGCFSQLMLYAERAEARRKPDIPVPYLYFDMGAAVLCASFMSFGVKRRWFALGAALQLAISTYAAYIGGYVHYGDWLKVRMYSRTVAIIGGFLVLASGAGELYRRKPRSRSLQSTGQVFLGIYLICVVCWGTVGWRCLAGSEL

SEQ ID NO: 90960 - protein, 97 aa, Homo sapiens
  Payload ID: 18184
  Gene Name: transmembrane protein 101
  ENSP ID: ENSP00000466385
MGAAVLCASFMSFGVKRRWFALGAALQLAISTYAAYIGGYVHYGDWLKVRMYSRTVAIIGGFLVLASGAGELYRRKPRSRSLQSTGQVFLGIYLICV

SEQ ID NO: 90961 - protein, 51 aa, Homo sapiens
  Payload ID: 18184
  Gene Name: transmembrane protein 101
  ENSP ID: ENSP00000467545
MGAAVLCASFMSFGVKRRWFALGAALQLAISTYAAYIGGYVHYGDWLKVRM

SEQ ID NO: 90962 - protein, 257 aa, Homo sapiens; identical to SEQ ID NO: 90957
  Payload ID: 18184
  Gene Name: transmembrane protein 101
  Uniprot ID: Q96IK0
  ENSP ID: ENSP00000468025

SEQ ID NO: 90963 - protein, 88 aa, Homo sapiens
  Payload ID: 18184
  Gene Name: transmembrane protein 101
  ENSP ID: ENSP00000468388
MGAAVLCASFMSFGVKRRWFALGAALQLAISTYAAYIGGYVHYGDWLKVRMYSRTVAIIGGFLVLASGAGELYRRKPRSRSLQSTGQV

SEQ ID NO: 90964 - protein, 508 aa, Homo sapiens
  Payload ID: 18185
  Gene Name: transmembrane protein 102
  Uniprot ID: Q8N9M5
  ENSP ID: ENSP00000315387
MASAVWGSAPWWGPPPPAPARPLTDIDFCSGAQLQELTQLIQELGVQESWSDGPKPGADLLRAKDFVFSLLGLVHRRDPRFPPQAELLLLRGGIREGSLDLGHAPLGPYARGPHYDAGFTLLVPMFSLDGTELQLDLESCYAQVCLPEMVCGTPIREMWQDCLGPPVPGARDSIHRTESEESSKDWQSSVDQPHSYVTEHEAPVSLEKSPSDVSASESPQHDVVDLGSTAPLKTMSSDVTKAAVESPVPKPSEAREAWPTLCSAQVAAWFFATLAAVAESLIPVPGAPRLVHAARHAGFTTVLLATPEPPRRLLLFDLIPVVSVAGWPEGARSHSWAGPLASESASFYLVPGGGTERPCASAWQLCFARQELALKARIPAPLLQAHAAAQALLRPLVAGTRAAAPYLLRTLLYWACERLPALYLARPENAGACCLGLLDELGRVLEAGTLPHYFLNGRQLRTGDDSAALLGELARLRGDPARALRAAVEEAKVARKGGGLAGVGGGAH

SEQ ID NO: 90965 - protein, 508 aa, Homo sapiens; identical to SEQ ID NO: 90964
  Payload ID: 18185
  Gene Name: transmembrane protein 102
  Uniprot ID: Q8N9M5
  ENSP ID: ENSP00000379815

SEQ ID NO: 90966 - protein, 496 aa, Homo sapiens
  Payload ID: 18186
  Gene Name: transmembrane protein 104
  Uniprot ID: Q8NE00
  ENSP ID: ENSP00000334849
MAGEITETGELYSSYVGLVYMFNLIVGTGALTMPKAFATAGWLVSLVLLVFLGFMSFVTTTFVIEAMAAANAQLHWKRMENLKEEEDDDSSTASDSDVLIRDNYERAEKRPILSVQRRGSPNPFEITDRVEMGQMASMFFNKVGVNLFYFCIIVYLYGDLAIYAAAVPFSLMQVTCSATGNDSCGVEADTKYNDTDRCWGPLRRVDAYRIYLAIFTLLLGPFTFFDVQKTKYLQILTSLMRWIAFAVMIVLALIRIGHGQGEGHPPLADFSGVRNLFGVCVYSFMCQHSLPSLITPVSSKRHLTRLVFLDYVLILAFYGLLSFTAIFCFRGDSLMDMYTLNFARCDVVGLAAVRFFLGLFPVFTISTNFPIIAVTLRNNWKTLFHREGGTYPWVVDRVVFPTITLVPPVLVAFCTHDLESLVGITGAYAGTGIQYVIPAFLVYHCRRDTQLAFGCGVSNKHRSPFRHTFWVGFVLLWAFSCFIFVTANIILSETKL

SEQ ID NO: 90967 - protein, 327 aa, Homo sapiens
  Payload ID: 18186
  Gene Name: transmembrane protein 104
  ENSP ID: ENSP00000397676
MAGEITETGELYSSYVFVRVVKPNKIAMLFIMLIPGWARWLTPVIPALWEAEAGRSPEVRSSRPAWPTCFVTTTFVIEAMAAANAQLHWKRMENLKEEEDDDSSTASDSDVLIRDNYERAEKRPILSVQRRGSPNPFEITDRVEMGQMASMFFNKVGVNLFYFCIIVYLYGDLAIYAAAVPFSLMQVTCSATGNDSCGVEADTKYNDTDRCWGPLRRVDAYRIYLAIFTLLLGPFTFFDVQKTKYLQILTSLMRWIDGPPGSVMGRAEEDASPAWPRSRCRCGGKLKLNSLYPTSATCMAPDAPGAGQVKVGVNFLCLPPHRSTRPT

SEQ ID NO: 90968 - protein, 496 aa, Homo sapiens; identical to SEQ ID NO: 90966
  Payload ID: 18186
  Gene Name: transmembrane protein 104
  Uniprot ID: Q8NE00
  ENSP ID: ENSP00000461922

SEQ ID NO: 90969 - protein, 314 aa, Homo sapiens
  Payload ID: 18186
  Gene Name: transmembrane protein 104
  Uniprot ID: Q8NE00
  ENSP ID: ENSP00000463205
MAGEITETGELYSSYVGLVYMFNLIVGTGALTMPKAFATAGWLVSLVLLVFLGFMSFVTTTFVIEAMAAANAQLHWKRMENLKEEEDDDSSTASDSDVLIRDNYERAEKRPILSVQRRGSPNPFEITDRVEMGQMASMFFNKVGVNLFYFCIIVYLYGDLAIYAAAVPFSLMQVTCSATGNDSCGVEADTKYNDTDRCWGPLRRVDAYRIYLAIFTLLLGPFTFFDVQKTKYLQILTSLMRWIDGPPGSVMGRAEEDASPAWPRSRCRCGGKLKLNSLYPTSATCMAPDAPGAGQVKVGVNFLCLPPHRSTRPT

SEQ ID NO: 90970 - protein, 129 aa, Homo sapiens
  Payload ID: 18186
  Gene Name: transmembrane protein 104
  ENSP ID: ENSP00000463774
MAGEITETGELYSSYEEEDDDSSTASDSDVLIRDNYERAEKRPILSVQRRGSPNPFEITDRVEMGQMASMFFNKVGVNLFYFCIIVYLYGDLAIYAAAVPFSLMQVTCSATGNDSCGVEADTKYNDTDR

SEQ ID NO: 90971 - protein, 129 aa, Homo sapiens
  Payload ID: 18187
  Gene Name: transmembrane protein 105
  Uniprot ID: Q8N8V8
  ENSP ID: ENSP00000329795
MLLKVRRASLKPPATPHQGAFRAGNVIGQLIYLLTWSLFTAWLRPPTLLQGPRTSPQGSPPRSPWGDCAEPSCLCEMKIRRRRHEGPAWGQSGFLAGGLHLVPSSLSLAACGVVRMKGLWGRGAGIRGR

SEQ ID NO: 90972 - protein, 74 aa, Homo sapiens
  Payload ID: 18187
  Gene Name: transmembrane protein 105
  ENSP ID: ENSP00000461427
MLLKVRRASLKPPATPHQAWLRPPTLLQGPRTSPQGSPPRSPWGDCAEPSCLCEMKIRRRRHEGPAWGQSGFLA

SEQ ID NO: 90973 - protein, 215 aa, Homo sapiens
  Payload ID: 18188
  Gene Name: transmembrane protein 106A
  ENSP ID: ENSP00000439835
MGKTFSQLGSWREDENKSILSSKPAIGSKAVNYSSTGSSKSFCSCVPCEGTADASFVTCPTCQGSGKIPQELEKQLVALIPYGDQRLKPKHTKLFVFLAVLICLVTSSFIVFFLFPRSVIVQPAGLNSSTVAFDEADIYLNITMFYAVATKIRDENTYKICTWLEIKVHHVLLHIQGTLTCSYLSHSEQLVFQSYEYVDCRGNASVPHQLTPHPP

SEQ ID NO: 90974 - protein, 214 aa, Homo sapiens
  Payload ID: 18188
  Gene Name: transmembrane protein 106A
  Uniprot ID: Q96A25
  ENSP ID: ENSP00000439844
MGTADASFVTCPTCQGSGKIPQELEKQLVALIPYGDQRLKPKHTKLFVFLAVLICLVTSSFIVFFLFPRSVIVQPAGLNSSTVAFDEADIYLNITNILNISNGNYYPIMVTQLTLEVLHLSLVVGQVSNNLLLHIGPLASEQMFYAVATKIRDENTYKICTWLEIKVHHVLLHIQGTLTCSYLSHSEQLVFQSYEYVDCRGNASVPHQLTPHPP

SEQ ID NO: 90975 - protein, 262 aa, Homo sapiens
  Payload ID: 18188
  Gene Name: transmembrane protein 106A
  Uniprot ID: Q96A25
  ENSP ID: ENSP00000466820
MGKTFSQLGSWREDENKSILSSKPAIGSKAVNYSSTGSSKSFCSCVPCEGTADASFVTCPTCQGSGKIPQELEKQLVALIPYGDQRLKPKHTKLFVFLAVLICLVTSSFIVFFLFPRSVIVQPAGLNSSTVAFDEADIYLNITNILNISNGNYYPIMVTQLTLEVLHLSLVVGQVSNNLLLHIGPLASEQMFYAVATKIRDENTYKICTWLEIKVHHVLLHIQGTLTCSYLSHSEQLVFQSYEYVDCRGNASVPHQLTPHPP

SEQ ID NO: 90976 - protein, 241 aa, Homo sapiens
  Payload ID: 18188
  Gene Name: transmembrane protein 106A
  ENSP ID: ENSP00000468220
MGKTFSQLGSWREDENKSILSSKPAIGSKAVNYSSTGSSKSFCSCVPCEGTADASFVTCPTCQGSGKIPQELEKQLVALIPYGDQRLKPKHTKLFVFLAVLICLVTSSFIVFFLFPRSVIVQPAGLNSSTVAFDEADIYLNITNILNISNGNYYPIMVTQLTLEVLHLSLVVGQVSNNLLLHIGPLASEQMFYAVATKIRDENTYKICTWLEIKVHHVLLHIQGTLTCSYLSHSEQLVFQS

SEQ ID NO: 90977 - protein, 262 aa, Homo sapiens; identical to SEQ ID NO: 90975
  Payload ID: 18188
  Gene Name: transmembrane protein 106A
  Uniprot ID: Q96A25
  ENSP ID: ENSP00000483246

SEQ ID NO: 90978 - protein, 274 aa, Homo sapiens
  Payload ID: 18189
  Gene Name: transmembrane protein 106B
  Uniprot ID: Q9NUM4
  ENSP ID: ENSP00000379901
MGKSLSHLPLHSSKEDAYDGVTSENMRNGLVNSEVHNEDGRNGDVSQFPYVEFTGRDSVTCPTCQGTGRIPRGQENQLVALIPYSDQRLRPRRTKLYVMASVFVCLLLSGLAVFFLFPRSIDVKYIGVKSAYVSYDVQKRTIYLNITNTLNITNNNYYSVEVENITAQVQFSKTVIGKARLNNITIIGPLDMKQIDYTVPTVIAEEMSYMYDFCTLISIKVHNIVLMMQVTVTTTYFGHSEQISQERYQYVDCGRNTTYQLGQSEYLNVLQPQQ

SEQ ID NO: 90979 - protein, 274 aa, Homo sapiens; identical to SEQ ID NO: 90978
  Payload ID: 18189
  Gene Name: transmembrane protein 106B
  Uniprot ID: Q9NUM4
  ENSP ID: ENSP00000379902

SEQ ID NO: 90980 - protein, 104 aa, Homo sapiens
  Payload ID: 18189
  Gene Name: transmembrane protein 106B
  ENSP ID: ENSP00000391016
MGKSLSHLPLHSSKEDAYDGVTSENMRNGLVNSEVHNEDGRNGDVSQFPYVEFTGRDSVTCPTCQGTGRIPRGWSFPMFPRMMSNSWAQAIIQPWPPKVLELQL

SEQ ID NO: 90981 - protein, 25 aa, Homo sapiens
  Payload ID: 18189
  Gene Name: transmembrane protein 106B
  ENSP ID: ENSP00000391985
MGKSLSHLPLHSSKEDAYDGVTSEN

SEQ ID NO: 90982 - protein, 110 aa, Homo sapiens
  Payload ID: 18189
  Gene Name: transmembrane protein 106B
  ENSP ID: ENSP00000401302
MGKSLSHLPLHSSKEDAYDGVTSENMRNGLVNSEVHNEDGRNGDVSQFPYVEFTGRDSVTCPTCQGTGRIPRGQENQLVALIPYSDQRLRPRRTKLYVMASVFVCLLLSG

SEQ ID NO: 90983 - protein, 231 aa, Homo sapiens
  Payload ID: 18190
  Gene Name: transmembrane protein 106C
  Uniprot ID: Q9BVX2
  ENSP ID: ENSP00000256686
MGSQHSAAARPSSCRRKQEDDRDGLLAEREQEEAIAQFPYVEFTGRDSITCLTCQGTGYIPTEQVNELVALIPHSDQRLRPQRTKQYVLLSILLCLLASGLVVFFLFPHSVLVDDDGIKVVKVTFNKQDSLVILTIMATLKIRNSNFYTVAVTSLSSQIQYMNTVVNFTGKAEMGGPFSYVYFFCTVPEILVHNIVIFMRTSVKISYIGLMTQSSLETHHYVDCGGNSTAI

SEQ ID NO: 90984 - protein, 250 aa, Homo sapiens
  Payload ID: 18190
  Gene Name: transmembrane protein 106C
  Uniprot ID: Q9BVX2
  ENSP ID: ENSP00000400471
MGSQHSAAARPSSCRRKQEDDRDGLLAEREQEEAIAQFPYVEFTGRDSITCLTCQGTGYIPTEQVNELVALIPHSDQRLRPQRTKQYVLLSILLCLLASGLVVFFLFPHSVLVDDDGIKVVKVTFNKQDSLVILTIMATLKIRNSNFYTVAVTSLSSQIQYMNTVVSTYVTTNVSLIPPRSEQLVNFTGKAEMGGPFSYVYFFCTVPEILVHNIVIFMRTSVKISYIGLMTQSSLETHHYVDCGGNSTAI

SEQ ID NO: 90985 - protein, 231 aa, Homo sapiens; identical to SEQ ID NO: 90983
  Payload ID: 18190
  Gene Name: transmembrane protein 106C
  Uniprot ID: Q9BVX2
  ENSP ID: ENSP00000402705

SEQ ID NO: 90986 - protein, 62 aa, Homo sapiens
  Payload ID: 18190
  Gene Name: transmembrane protein 106C
  ENSP ID: ENSP00000446622
MATLKIRNSNFYTVAVTSLSSQIQYMNTVVSTYVTTNVSLIPPRSEQLVNFTGKAEMGGPFS

SEQ ID NO: 90987 - protein, 250 aa, Homo sapiens; identical to SEQ ID NO: 90984
  Payload ID: 18190
  Gene Name: transmembrane protein 106C
  Uniprot ID: Q9BVX2
  ENSP ID: ENSP00000446657

SEQ ID NO: 90988 - protein, 147 aa, Homo sapiens
  Payload ID: 18190
  Gene Name: transmembrane protein 106C
  ENSP ID: ENSP00000447254
MGSQHSAAARPSSCRRKQEDDRDGLLASGLVVFFLFPHSVLVDDDGIKVVKVTFNKQDSLVILTIMATLKIRNSNFYTVAVTSLSSQIQYMNTVVNFTGKAEMGGPFSYVYFFCTVPEILVHNIVIFMRTSVKISYIGLMTQSSLET

SEQ ID NO: 90989 - protein, 65 aa, Homo sapiens
  Payload ID: 18190
  Gene Name: transmembrane protein 106C
  ENSP ID: ENSP00000447524
MGSQHSAAARPSSCRRKQEDDRDGLLAEREQEEAIAQFPYVEFTGRDSITCLTCQGTGYIPTELQ

SEQ ID NO: 90990 - protein, 86 aa, Homo sapiens
  Payload ID: 18190
  Gene Name: transmembrane protein 106C
  ENSP ID: ENSP00000447622
MGSQHSAAARPSSCRRKQEDDRDGLLAEREQEEAIAQFPYVEFTGRDSITCLTCQGTGYIPTEQVNELVALIPHSDQRLRPQRTPP

SEQ ID NO: 90991 - protein, 117 aa, Homo sapiens
  Payload ID: 18190
  Gene Name: transmembrane protein 106C
  ENSP ID: ENSP00000447830
  MOD_RES (1)..(1): Any amino acid
XDDGIKVVKVTFNKQDSLVILTIMATLKIRNSNFYTVAVTSLSSQIQYMNTVVNFTGKAEMGGPFSYVYFFCTVPEILVHNIVIFMRACRREHSICSQGLSSGPTPTWCKQRRNWFT

SEQ ID NO: 90992 - protein, 179 aa, Homo sapiens
  Payload ID: 18190
  Gene Name: transmembrane protein 106C
  ENSP ID: ENSP00000448268
MGSQHSAAARPSSCRRKQEDDRDGLLASGLVVFFLFPHSVLVDDDGIKVVKVTFNKQDSLVILTIMATLKIRNSNFYTVAVTSLSSQIQYMNTVVSTYVTTNVSLIPPRSEQLVNFTGKAEMGGPFSYVYFFCTVPEILVHNIVIFMRTSVKISYIGLMTQSSLETHHYVDCGGNSTAI

SEQ ID NO: 90993 - protein, 109 aa, Homo sapiens
  Payload ID: 18190
  Gene Name: transmembrane protein 106C
  ENSP ID: ENSP00000448959
  MOD_RES (1)..(1): Any amino acid
XSQHSAAARPSSCRRKQEDDRDGLLAEREQEEAIAQFPYVEFTGRDSITCLTCQGTGYIPTEQVNELVALIPHSDQRLRPQRTTSVKISYIGLMTQSSLETHHYVDCGG

SEQ ID NO: 90994 - protein, 84 aa, Homo sapiens
  Payload ID: 18190
  Gene Name: transmembrane protein 106C
  ENSP ID: ENSP00000449141
MGSQHSAAARPSSCRRKQEDDRDGLLAEREQEEAIAQFPYVEFTGRDSITCLTCQGTGYIPTEQVNELVALIPHSDQRLRPQRT

SEQ ID NO: 90995 - protein, 70 aa, Homo sapiens
  Payload ID: 18190
  Gene Name: transmembrane protein 106C
  ENSP ID: ENSP00000449181
MGSQHSAAARPSSCRRKQEDDRDGLLAEREQEEAIAQFPYVEFTGRDSITCLTCQGTGYIPTGDHGGMIP

SEQ ID NO: 90996 - protein, 231 aa, Homo sapiens; identical to SEQ ID NO: 90983
  Payload ID: 18190
  Gene Name: transmembrane protein 106C
  Uniprot ID: Q9BVX2
  ENSP ID: ENSP00000449737

SEQ ID NO: 90997 - protein, 75 aa, Homo sapiens
  Payload ID: 18190
  Gene Name: transmembrane protein 106C
  ENSP ID: ENSP00000477934
  MOD_RES (1)..(1): Any amino acid
XKQDSLVILTIMATLKIRNSNFYTVAVTSLSSQIQYMNTVVSTYVTTNVSLIPPRSEQLVNFTGKAEMGGPFSYV

SEQ ID NO: 90998 - protein, 181 aa, Homo sapiens
  Payload ID: 18190
  Gene Name: transmembrane protein 106C
  ENSP ID: ENSP00000481710
MGSQHSAAARPSSCRRKQEDDRDGLLAEREQEEAIAQFPYVEFTGRDSITCLTCQGTGYIPTEQVNELVALIPHSDQRLRPQRTKQYVLLSILLCLLASGLVVFFLFPHSVLVDDDGIKVVKVTFNKQDSLVILTIMATLKIRNSNFYTVAVTSLSSQIQYMNTVVNFTGKAEMGGPFSYV

SEQ ID NO: 90999 - protein, 146 aa, Homo sapiens
  Payload ID: 18191
  Gene Name: transmembrane protein 107
  Uniprot ID: Q6UX40
  ENSP ID: ENSP00000314116
MGRVSGLVPSRFLTLLAHLVVVITLFWSRDSNIQACLPLTFTPEEYDKQDIHPLPLCRLVAALSVTLGLFAVELAGFLSGVSMFNSTQSLISIGAHCSASVALSFFIFERWECTTYWYIFVFCSALPAVTEMALFVTVFGLKKKPF

SEQ ID NO: 91000 - protein, 74 aa, Homo sapiens
  Payload ID: 18191
  Gene Name: transmembrane protein 107
  ENSP ID: ENSP00000389420
MGRVSGLVPSRFLTLLAHLVVVITLFWSRDSNIQACLPLTFTPEEYDKQDIHALPAVTEMALFVTVFGLKKKPF

SEQ ID NO: 91001 - protein, 140 aa, Homo sapiens
  Payload ID: 18191
  Gene Name: transmembrane protein 107
  Uniprot ID: Q6UX40
  ENSP ID: ENSP00000402732
MGRVSGLVPSRFLTLLAHLVVVITLFWSRDSNIQACLPLTFTPEEYDKQDIQLVAALSVTLGLFAVELAGFLSGVSMFNSTQSLISIGAHCSASVALSFFIFERWECTTYWYIFVFCSALPAVTEMALFVTVFGLKKKPF

SEQ ID NO: 91002 - protein, 35 aa, Homo sapiens
  Payload ID: 18191
  Gene Name: transmembrane protein 107
  ENSP ID: ENSP00000404753
MGRVSGLVPSRFLTLLAHLVVVITLFWSRCPSSCH

SEQ ID NO: 91003 - protein, 107 aa, Homo sapiens
  Payload ID: 18191
  Gene Name: transmembrane protein 107
  ENSP ID: ENSP00000433148
MGRVSGLVPSRFLTLLAHLVVVITLFWSRDSNIQACLPLTFTPEEYDKQDIQLVAALSVTLGLFAVELAGFLSGVSMFNSTQSLICILSACPPFPHDPLLSGLPSAT

SEQ ID NO: 91004 - protein, 139 aa, Homo sapiens
  Payload ID: 18191
  Gene Name: transmembrane protein 107
  Uniprot ID: Q6UX40
  ENSP ID: ENSP00000436674
MGRVSGLVPSRFLTLLAHLVVVITLFWSRDSNIQACLPLTFTPEEYDKQDIHPLPLCRLVAALSVTLGLFAVELAGFLSGVSMFNSTQSLISIGAHCSASVALSFFIFERWECTTYCALPAVTEMALFVTVFGLKKKPF

SEQ ID NO: 91005 - protein, 575 aa, Homo sapiens
  Payload ID: 18192
  Gene Name: transmembrane protein 108
  Uniprot ID: Q6UXF1
  ENSP ID: ENSP00000324651
MKRSLQALYCQLLSFLLILALTEALAFAIQEPSPRESLQVLPSGTPPGTMVTAPHSSTRHTSVVMLTPNPDGPPSQAAAPMATPTPRAEGHPPTHTISTIAATVTAPHSESSLSTGPAPAAMATTSSKPEGRPRGQAAPTILLTKPPGATSRPTTAPPRTTTRRPPRPPGSSRKGAGNSSRPVPPAPGGHSRSKEGQRGRNPSSTPLGQKRPLGKIFQIYKGNFTGSVEPEPSTLTPRTPLWGYSSSPQPQTVAATTVPSNTSWAPTTTSLGPAKDKPGLRRAAQGGGSTFTSQGGTPDATAASGAPVSPQAAPVPSQRPHHGDPQDGPSHSDSWLTVTPGTSRPLSTSSGVFTAATGPTPAAFDTSVSAPSQGIPQGASTTPQAPTHPSRVSESTISGAKEETVATLTMTDRVPSPLSTVVSTATGNFLNRLVPAGTWKPGTAGNISHVAEGDKPQHRATICLSKMDIAWVILAISVPISSCSVLLTVCCMKRKKKTANPENNLSYWNNTITMDYFNRHAVELPREIQSLETSEDQLSEPRSPANGDYRDTGMVLVNPFCQETLFVGNDQVSEI

SEQ ID NO: 91006 - protein, 575 aa, Homo sapiens; identical to SEQ ID NO: 91005
  Payload ID: 18192
  Gene Name: transmembrane protein 108
  Uniprot ID: Q6UXF1
  ENSP ID: ENSP00000376838

SEQ ID NO: 91007 - protein, 153 aa, Homo sapiens
  Payload ID: 18192
  Gene Name: transmembrane protein 108
  ENSP ID: ENSP00000421486
MKRSLQALYCQLLSFLLILALTEALAFAIQEPSPRESLQVLPSGTPPGTMVTAPHSSTRHTSVVMLTPNPDGPPSQAAAPMATPTPRAEGHPPTHTISTIAATVTAPHSESSLSTGPAPAAMATTSSKPEGRPRGQAAPTILLTKPPGATSRP

SEQ ID NO: 91008 - protein, 89 aa, Homo sapiens
  Payload ID: 18192
  Gene Name: transmembrane protein 108
  ENSP ID: ENSP00000422072
MVTAPHSSTRHTSVVMLTPNPDGPPSQAAAPMATPTPRAEGHPPTHTISTIAATVTAPHSESSLSTGPAPAAMATTSSKPEGRPRGQAA

SEQ ID NO: 91009 - protein, 71 aa, Homo sapiens
  Payload ID: 18192
  Gene Name: transmembrane protein 108
  ENSP ID: ENSP00000422196
MKRSLQALYCQLLSFLLILALTEALAFAIQEPSPRESLQVLPSGTPPGTMVTAPHSSTRHTSVVMLTPNPD

SEQ ID NO: 91010 - protein, 488 aa, Homo sapiens
  Payload ID: 18192
  Gene Name: transmembrane protein 108
  ENSP ID: ENSP00000423338
MKRSLQALYCQLLSFLLILALTEALAFAIQEPSPRESLQVLPSGTPPGTMVTAPHSSTRHTSVVMLTPNPDGPPSQAAAPMATPTPRAEGHPPTHTISTIAATVTAPHSESSLSTGPAPAAMATTSSKPEGRPRGQAAPTILLTKPPGATSRPTTAPPRTTTRRPPRPPGSSRKGAGNSSRPVPPAPGGHSRSKEGQRGRNPSSTPLGQKRPLGKIFQIYKGNFTGSVEPEPSTLTPRTPLWGYSSSPQPQTVAATTVPSNTSWAPTTTSLGPAKDKPGLRRAAQGGGSTFTSQGGTPDATAASGAPVSPQAAPVPSQRPHHGDPQDGPSHSDSWLTVTPGTSRPLSTSSGVFTAATGPTPAAFDTSVSAPSQGIPQGASTTPQAPTHPSRVSESTISGAKEETVATLTMTDRVPSPLSTVVSTATGNFLNRLVPAGTWKPGTAGNISHVAEGDKPQHRATICLSKMDIAWVILAISVPISSCSDPIT

SEQ ID NO: 91011 - protein, 105 aa, Homo sapiens
  Payload ID: 18192
  Gene Name: transmembrane protein 108
  ENSP ID: ENSP00000424897
MKRSLQALYCQLLTVLLTVCCMKRKKKTANPENNLSYWNNTITMDYFNRHAVELPREIQSLETSEDQLSEPRSPANGDYRDTGMVLVNPFCQETLFVGNDQVSEI

SEQ ID NO: 91012 - protein, 148 aa, Homo sapiens
  Payload ID: 18192
  Gene Name: transmembrane protein 108
  ENSP ID: ENSP00000426301
MKRSLQALYCQLLSFLLILALTEALAFAIQEPSPRESLQVLPSGTPPGTMVTAPHSSTRHTSVVMLTPNPDGPPSQAAAPMATPTPRAEGHPPTHTISTIAATVTAPHSESSLSTGPAPAAMATTSSKPEGRPRGQAAPTILLTKPPG

SEQ ID NO: 91013 - protein, 121 aa, Homo sapiens
  Payload ID: 18192
  Gene Name: transmembrane protein 108
  ENSP ID: ENSP00000427447
MVTAPHSSTRHTSVVMLTPNPDGPPSQAAAPMATPTPRAEGHPPTHTISTIAATVTAPHSESSLSTGPAPAAMATTSSKPEGRPRGQAAPTILLTKPPGATSRPTTAPPRTTTRRPPRPPG

SEQ ID NO: 91014 - protein, 243 aa, Homo sapiens
  Payload ID: 18193
  Gene Name: transmembrane protein 109
  Uniprot ID: Q9BVC6
  ENSP ID: ENSP00000227525
MAASSISSPWGKHVFKAILMVLVALILLHSALAQSRRDFAPPGQQKREAPVDVLTQIGRSVRGTLDAWIGPETMHLVSESSSQVLWAISSAISVAFFALSGIAAQLLNALGLAGDYLAQGLKLSPGQVQTFLLWGAGALVVYWLLSLLLGLVLALLGRILWGLKLVIFLAGFVALMRSVPDPSTRALLLLALLILYALLSRLTGSRASGAQLEAKVRGLERQVEELRWRQRRAAKGARSVEEE

SEQ ID NO: 91015 - protein, 243 aa, Homo sapiens; identical to SEQ ID NO: 91014
  Payload ID: 18193
  Gene Name: transmembrane protein 109
  Uniprot ID: Q9BVC6
  ENSP ID: ENSP00000443990

SEQ ID NO: 91016 - protein, 192 aa, Homo sapiens
  Payload ID: 18194
  Gene Name: transmembrane protein 11
  Uniprot ID: P17152
  ENSP ID: ENSP00000319992
MAAWGRRRLGPGSSGGSARERVSLSATDCYIVHEIYNGENAQDQFEYELEQALEAQYKYIVIEPTRIGDETARWITVGNCLHKTAVLAGTACLFTPLALPLDYSHYISLPAGVLSLACCTLYGISWQFDPCCKYQVEYDAYKLSRLPLHTLTSSTPVVLVRKDDLHRKRLHNTIALAALVYCVKKIYELYAV

SEQ ID NO: 91017 - protein, 294 aa, Homo sapiens
  Payload ID: 18195
  Gene Name: transmembrane protein 110
  Uniprot ID: Q86TL2
  ENSP ID: ENSP00000347195
MQGPAGNASRGLPGGPPSTVASGAGRCESGALMHSFGIFLQGLLGVVAFSTLMLKRFREPKHERRPWRIWFLDTSKQAIGMLFIHFANVYLADLTEEDPCSLYLINFLLDATVGMLLIYVGVRAVSVLVEWQQWESLRFGEYGDPLQCGAWVGQCALYIVIMIFEKSVVFIVLLILQWKKVALLNPIENPDLKLAIVMLIVPFFVNALMFWVVDNFLMRKGKTKAKLEERGANQDSRNGSKVRYRRAASHEESESEILISADDEMEESDVEEDLRRLTPLKPVKKKKHRFGLPV

SEQ ID NO: 91018 - protein, 89 aa, Homo sapiens
  Payload ID: 18195
  Gene Name: transmembrane protein 110
  ENSP ID: ENSP00000418652
  MOD_RES (1)..(1): Any amino acid
XFLDTSKQAIGMLFIHFANVYLADLTEEDPCSLYLINFLLDATVGMLLIYVGVRAVSVLVEWQQWESLRFGEYEEKAKSLLMRMRDSGK

SEQ ID NO: 91019 - protein, 39 aa, Homo sapiens
  Payload ID: 18195
  Gene Name: transmembrane protein 110
  ENSP ID: ENSP00000418967
LISADDEMEESDVEEDLRRLTPLKPVKKKKHRFGLPGPE

SEQ ID NO: 91020 - protein, 65 aa, Homo sapiens
  Payload ID: 18195
  Gene Name: transmembrane protein 110
  ENSP ID: ENSP00000420219
MQGPAGNASRGLPGGPPSTVASGAGRCESGALMHSFGIFLQGLLGVVAFSTLMLIICDNLAKIRC

SEQ ID NO: 91021 - protein, 142 aa, Homo sapiens
  Payload ID: 18196
  Gene Name: transmembrane protein 114
  ENSP ID: ENSP00000454261
MNPFRLENVTVSESSRQLLTMHGTFVILLPLSLILMVFGGMTGFLSFLLQAYLLLLLTGILFLFGAMVTLAGISVYIAYSAAAFREALCLLEEKALLDQVDISFGWSLALGWISFIAELLTGAAFLAAARELSLRRRQDQAI

SEQ ID NO: 91022 - protein, 223 aa, Homo sapiens
  Payload ID: 18196
  Gene Name: transmembrane protein 114
  Uniprot ID: B3SHH9
  ENSP ID: ENSP00000484263
MRVHLGGLAGAAALTGALSFVLLAAAIGTDFWYIIDTERLERTGPGAQDLLGSINRSQPEPLSSHSGLWRTCRVQSPCTPLMNPFRLENVTVSESSRQLLTMHGTFVILLPLSLILMVFGGMTGFLSFLLQAYLLLLLTGILFLFGAMVTLAGISVYIAYSAAAFREALCLLEEKALLDQVDISFGWSLALGWISFIAELLTGAAFLAAARELSLRRRQDQAI

SEQ ID NO: 91023 - protein, 177 aa, Homo sapiens
  Payload ID: 18196
  Gene Name: transmembrane protein 114
  ENSP ID: ENSP00000485294
MRVHLGGLAGAAALTGALSFVLLAAAIGTDFWYIIDTERLERTGPGAQDLLGSINRSQPEPLSSHSGLWRTCRVQSPCTPLMNPFRLENVTVSESSRQLLTMVTLAGISVYIAYSAAAFREALCLLEEKALLDQVDISFGWSLALGWISFIAELLTGAAFLAAARELSLRRRQDQAI

SEQ ID NO: 91024 - protein, 351 aa, Homo sapiens
  Payload ID: 18197
  Gene Name: transmembrane protein 115
  Uniprot ID: Q12893
  ENSP ID: ENSP00000266025
MQRALPGARQHLGAILASASVVVKALCAAVLFLYLLSFAVDTGCLAVTPGYLFPPNFWIWTLATHGLMEQHVWDVAISLTTVVVAGRLLEPLWGALELLIFFSVVNVSVGLLGAFAYLLTYMASFNLVYLFTVRIHGALGFLGGVLVALKQTMGDCVVLRVPQVRVSVMPMLLLALLLLLRLATLLQSPALASYGFGLLSSWVYLRFYQRHSRGRGDMADHFAFATFFPEILQPVVGLLANLVHSLLVKVKICQKTVKRYDVGAPSSITISLPGTDPQDAERRRQLALKALNERLKRVEDQSIWPSMDDDEEESGAKVDSPLPSDKAPTPPGKGAAPESSLITFEAAPPTL

SEQ ID NO: 91025 - protein, 302 aa, Homo sapiens
  Payload ID: 18198
  Gene Name: transmembrane protein 116
  Uniprot ID: Q8NCL8
  ENSP ID: ENSP00000347620
MATLSVIGSSSLIAYAVFHNIQKSPEIRPLFYLSFCDLLLGLCWLTETLLYGASVANKDIICYNLQAVGQVIDYTCRVCQMAFVFSSLIPLLLMTPVFCLGNTSECFQNFSQSHKCILMHSPPSAMAELPPSANTSVCSTLYFYGIAIFLGSFVLSLLTIMVLLIRAQTLYKKFVKSTGFLGSEQWAVIHIVDQRVRFYPVAFFCCWGPAVILMIIKLTKPQDTKLHMALYVLQALTATSQGLLNCGVYGWTQHKFHQLKQEARRDADTQTPLLCSQKRFYSRGLNSLESTLTFPASTSTIF

SEQ ID NO: 91026 - protein, 85 aa, Homo sapiens
  Payload ID: 18198
  Gene Name: transmembrane protein 116
  ENSP ID: ENSP00000446491
MATLSVIGSSSLIAYAVFHNIQKSPEIRPLFYLSFCDLLLGLCWLTETLLYGASVANKDIICYNLQAVGQGRRGFAMFARLVLNA

SEQ ID NO: 91027 - protein, 175 aa, Homo sapiens
  Payload ID: 18198
  Gene Name: transmembrane protein 116
  ENSP ID: ENSP00000446516
MATLSVIGSSSLIAYAVFHNIQKSPEIRPLFYLSFCDLLLGLCWLTETLLYGASVANKDIICYNLQAVGQIFYISSFLYTVNYIWYLYTELRMKHTQSGQSTSPLVIDYTCRVCQMAFVFSSLIPLLLMTPVFCLGNTSECFQNFSQSHKCILMHSPPSAMAELPPSANTSVCST

SEQ ID NO: 91028 - protein, 74 aa, Homo sapiens
  Payload ID: 18198
  Gene Name: transmembrane protein 116
  ENSP ID: ENSP00000446766
MATLSVIGSSSLIAYAVFHNIQKSPEIRPLFYLSFCDLLLGLCWLTETLLYGASVANKDIICYNLQAVGQVSAT

SEQ ID NO: 91029 - protein, 80 aa, Homo sapiens
  Payload ID: 18198
  Gene Name: transmembrane protein 116
  ENSP ID: ENSP00000447425
MATLSVIGSSSLIAYAVFHNIQKSPEIRPLFYLSFCDLLLGLCWLTETLLYGASVANKDIICYNLQAVGQFWRLEGPRLR

SEQ ID NO: 91030 - protein, 337 aa, Homo sapiens
  Payload ID: 18198
  Gene Name: transmembrane protein 116
  Uniprot ID: Q8NCL8
  ENSP ID: ENSP00000447731
MATLSVIGSSSLIAYAVFHNIQKSPEIRPLFYLSFCDLLLGLCWLTETLLYGASVANKDIICYNLQAVGQIFYISSFLYTVNYIWYLYTELRMKHTQSGQSTSPLVIDYTCRVCQMAFVFSSLIPLLLMTPVFCLGNTSECFQNFSQSHKCILMHSPPSAMAELPPSANTSVCSTLYFYGIAIFLGSFVLSLLTIMVLLIRAQTLYKKFVKSTGFLGSEQWAVIHIVDQRVRFYPVAFFCCWGPAVILMIIKLTKPQDTKLHMALYVLQALTATSQGLLNCGVYGWTQHKFHQLKQEARRDADTQTPLLCSQKRFYSRGLNSLESTLTFPASTSTIF

SEQ ID NO: 91031 - protein, 80 aa, Homo sapiens; identical to SEQ ID NO: 91029
  Payload ID: 18198
  Gene Name: transmembrane protein 116
  ENSP ID: ENSP00000448413

SEQ ID NO: 91032 - protein, 151 aa, Homo sapiens
  Payload ID: 18198
  Gene Name: transmembrane protein 116
  ENSP ID: ENSP00000449163
MFPKLQSEPQVLLIRAQTLYKKFVKSTGFLGSEQWAVIHIVDQRVRFYPVAFFCCWGPAVILMIIKLTKPQDTKLHMALYVLQALTATSQGLLNCGVYGWTQHKFHQLKQEARRDADTQTPLLCSQKRFYSRGLNSLESTLTFPASTSTIF

SEQ ID NO: 91033 - protein, 106 aa, Homo sapiens
  Payload ID: 18198
  Gene Name: transmembrane protein 116
  ENSP ID: ENSP00000449774
MATLSVIGSSSLIAYAVFHNIQKSPEIRPLFYLSFCDLLLGLCWLTETLLYGASVANKDIICYNLQAVGQIFYISSFLYTVNYIWYLYTELRMKHTQSGQSTSPLV

SEQ ID NO: 91034 - protein, 51 aa, Homo sapiens
  Payload ID: 18198
  Gene Name: transmembrane protein 116
  ENSP ID: ENSP00000450060
MATLSVIGSSSLIAYAVFHNIQKSPEIRPLFYLSFCDLLLGLCWLTETLLY

SEQ ID NO: 91035 - protein, 245 aa, Homo sapiens
  Payload ID: 18198
  Gene Name: transmembrane protein 116
  Uniprot ID: Q8NCL8
  ENSP ID: ENSP00000450377
MKHTQSGQSTSPLVIDYTCRVCQMAFVFSSLIPLLLMTPVFCLGNTSECFQNFSQSHKCILMHSPPSAMAELPPSANTSVCSTLYFYGIAIFLGSFVLSLLTIMVLLIRAQTLYKKFVKSTGFLGSEQWAVIHIVDQRVRFYPVAFFCCWGPAVILMIIKLTKPQDTKLHMALYVLQALTATSQGLLNCGVYGWTQHKFHQLKQEARRDADTQTPLLCSQKRFYSRGLNSLESTLTFPASTSTIF

SEQ ID NO: 91036 - protein, 104 aa, Homo sapiens
  Payload ID: 18198
  Gene Name: transmembrane protein 116
  ENSP ID: ENSP00000474027
MKHTQSGQSTSPLVIDYTCRVCQMAFVFSSLIPLLLMTPVFCLGNTSECFQNFSQSHKCILMHSPPSAMAELPPSANTSVCSTLYFYGIAIFLGSFVLSLLTIM

SEQ ID NO: 91037 - protein, 514 aa, Homo sapiens
  Payload ID: 18199
  Gene Name: transmembrane protein 117
  Uniprot ID: Q9H0C3
  ENSP ID: ENSP00000266534
MGKDFRYYFQHPWSRMIVAYLVIFFNFLIFAEDPVSHSQTEANVIVVGNCFSFVTNKYPRGVGWRILKVLLWLLAILTGLIAGKFLFHQRLFGQLLRLKMFREDHGSWMTMFFSTILFLFIFSHIYNTILLMDGNMGAYIITDYMGIRNESFMKLAAVGTWMGDFVTAWMVTDMMLQDKPYPDWGKSARAFWKKGNVRITLFWTVLFTLTSVVVLVITTDWISWDKLNRGFLPSDEVSRAFLASFILVFDLLIVMQDWEFPHFMGDVDVNLPGLHTPHMQFKIPFFQKIFKEEYRIHITGKWFNYGIIFLVLILDLNMWKNQIFYKPHEYGQYIGPGQKIYTVKDSESLKDLNRTKLSWEWRSNHTNPRTNKTYVEGDMFLHSRFIGASLDVKCLAFVPSLIAFVWFGFFIWFFGRFLKNEPRMENQDKTYTRMKRKSPSEHSKDMGITRENTQASVEDPLNDPSLVCIRSDFNEIVYKSSHLTSENLSSQLNESTSATEADQDPTTSKSTPTN

SEQ ID NO: 91038 - protein, 140 aa, Homo sapiens
  Payload ID: 18199
  Gene Name: transmembrane protein 117
  ENSP ID: ENSP00000446952
MGKDFRYYFQHPWSRMIVAYLVIFFNFLIFAEDPVSHSQTEANVIVVGNCFSFVTNKYPRGVGWRILKVLLWLLAILTGLIAGKFLFHQRLFGQLLRLKMFREDHGSWMTMFFSTILFLFIFSHIYNTILLMDGNMGSLI

SEQ ID NO: 91039 - protein, 268 aa, Homo sapiens
  Payload ID: 18199
  Gene Name: transmembrane protein 117
  ENSP ID: ENSP00000448595
MGKDFRYYFQHPWSRMIVAYLVIFFNFLIFAEDPVSHSQTEANVIVVGNCFSFVTNKYPRGVGWRILKVLLWLLAILTGLIAGKFLFHQRLFGQLLRLKMFREDHGSWMTMFFSTILFLFIFSHIYNTILLMDGNMGAYIITDYMGIRNESFMKLAAVGTWMGDFVTAWMVTDMMLQDKPYPDWGKSARAFWKKGNVRITLFWTVLFTLTSVVVLVITTDWISWDKLNRGFLPSDEVSRAFLASFILVFDLLIVMQANGLTMELSSSS

SEQ ID NO: 91040 - protein, 158 aa, Homo sapiens
  Payload ID: 18199
  Gene Name: transmembrane protein 117
  ENSP ID: ENSP00000448657
MGIRNESFMKLAAVGTWMGDFVTAWMVTDMMLQDKPYPDWGKSARAFWKKGNVRITLFWTVLFTLTSVVVLVITTDWISWDKLNRGFLPSDEVSRAFLASFILVFDLLIVMQDWEFPHFMGDVDVNLPGLHTPHMQFKIPFFQKIFKEEYRIHITGKW

SEQ ID NO: 91041 - protein, 283 aa, Homo sapiens
  Payload ID: 18200
  Gene Name: transmembrane protein 119
  Uniprot ID: Q4V9L6
  ENSP ID: ENSP00000376553
MVSAAAPSLLILLLLLLGSVPATDARSVPLKATFLEDVAGSGEAEGSSASSPSLPPPWTPALSPTSMGPQPITLGGPSPPTNFLDGIVDFFRQYVMLIAVVGSLAFLLMFIVCAAVITRQKQKASAYYPSSFPKKKYVDQSDRAGGPRAFSEVPDRAPDSRPEEALDSSRQLQADILAATQNLKSPTRAALGGGDGARMVEGRGAEEEEKGSQEGDQEVQGHGVPVETPEAQEEPCSGVLEGAVVAGEGQGELEGSLLLAQEAQGPVGPPESPCACSSVHPSV

SEQ ID NO: 91042 - protein, 44 aa, Homo sapiens
  Payload ID: 18200
  Gene Name: transmembrane protein 119
  ENSP ID: ENSP00000447120
MVSAAAPSLLILLLLLLGSVPATDARSVPLKATFLEDVAGSGEA

SEQ ID NO: 91043 - protein, 28 aa, Homo sapiens
  Payload ID: 18200
  Gene Name: transmembrane protein 119
  ENSP ID: ENSP00000447345
MVSAAAPSLLILLLLLLGSVPATDARSV

SEQ ID NO: 91044 - protein, 140 aa, Homo sapiens
  Payload ID: 18200
  Gene Name: transmembrane protein 119
  ENSP ID: ENSP00000448583
MVSAAAPSLLILLLLLLGSVPATDARSVPLKATFLEDVAGSGEAEGSSASSPSLPPPWTPALSPTSMGPQPITLGGPSPPTNFLDGIVDFFRQYVMLIAVVGSLAFLLMFIVCAAVITRQKQKASAYYPSSFPKKKYVDQ

SEQ ID NO: 91045 - protein, 343 aa, Homo sapiens
  Payload ID: 18201
  Gene Name: transmembrane protein 120A
  Uniprot ID: Q9BXJ8
  ENSP ID: ENSP00000473983
MQPPPPGPLGDCLRDWEDLQQDFQNIQETHRLYRLKLEELTKLQNNCTSSITRQKKRLQELALALKKCKPSLPAEAEGAAQELENQMKERQGLFFDMEAYLPKKNGLYLSLVLGNVNVTLLSKQAKFAYKDEYEKFKLYLTIILILISFTCRFLLNSRVTDAAFNFLLVWYYCTLTIRESILINNGSRIKGWWVFHHYVSTFLSGVMLTWPDGLMYQKFRNQFLSFSMYQSFVQFLQYYYQSGCLYRLRALGERHTMDLTVEGFQSWMWRGLTFLLPFLFFGHFWQLFNALTLFNLAQDPQCKEWQVLMCGFPFLLLFLGNFFTTLRVVHHKFHSQRHGSKKD

SEQ ID NO: 91046 - protein, 229 aa, Homo sapiens
  Payload ID: 18201
  Gene Name: transmembrane protein 120A
  ENSP ID: ENSP00000479079
SKQAKFAYKDEYEKFKLYLTIILILISFTCRFLLNSRVTDAAFNFLLVWYYCTLTIRESILINNGSRIKGWWVFHHYVSTFLSGVMLTWPDGLMYQKFRNQFLSFSMYQSFVQFLQYYYQSGCLYRLRALGERHTMDLTVEGFQSWMWRGLTFLLPFLFFGHFWQLFNALTLFNLAQDPQCKEWQVSRGPWTGWMGGQAHVQPSPYSSGRCLCAAFPSSSFSSAISSPP

SEQ ID NO: 91047 - protein, 99 aa, Homo sapiens
  Payload ID: 18201
  Gene Name: transmembrane protein 120A
  ENSP ID: ENSP00000480239
GARTLREAGTGAGGDGGSLLQDQRLVGVPSLRVHLPVGSHADVARRSHVPEIPEPIPLLFHVPELRAVSPVLLPERLPLPPAGAGRAAHHGPHCGFLTR

SEQ ID NO: 91048 - protein, 322 aa, Homo sapiens
  Payload ID: 18201
  Gene Name: transmembrane protein 120A
  ENSP ID: ENSP00000480803
MQPPPPGPLGDCLRDWEDLQQDFQNIQETHRLYRLKLEELTKLQNNCTSSITRQKKRLQELALALKKCKPSLPAEAEGAAQELENQMKERQGLFFDMEAYLPKKNGLYLSLVLGNVNVTLLSKQAKFAYKDEYEKFKLYLTIILILISFTCRFLLNSRVTDAAFNFLLVWYYCTLTIRESILINNGSRWAGRALREGSMEWGARTLREAGTGAGGDGGSLLQDQRLVGVPSLRVHLPVGSHADVARRSHVPEIPEPIPLLFHVPELRAVSPVLLPERLPLPPAGAGRAAHHGPHCGGLPVLDVAGPHLPAAFSFLWTLLAAF

SEQ ID NO: 91049 - protein, 322 aa, Homo sapiens; identical to SEQ ID NO: 91048
  Payload ID: 18201
  Gene Name: transmembrane protein 120A
  ENSP ID: ENSP00000481336

SEQ ID NO: 91050 - protein, 174 aa, Homo sapiens
  Payload ID: 18201
  Gene Name: transmembrane protein 120A
  ENSP ID: ENSP00000482497
MQPPPPGPLGDCLRDWEDLQQDFQNIQETHRLYRLKLEELTKLQNNCTSSITRQKKRLQELALALKKCKPSLPAEAEGAAQELENQMKERQGLFFDMEAYLPKKNGFAYKDEYEKFKLYLTIILILISFTCRFLLNSRVTDAAFNFLLVWYYCTLTIRESILINNGSRIKGWWV

SEQ ID NO: 91051 - protein, 102 aa, Homo sapiens
  Payload ID: 18201
  Gene Name: transmembrane protein 120A
  ENSP ID: ENSP00000482622
  MOD_RES (1)..(1): Any amino acid
XFLLVWYYCTLTIRESILINNGSRIKGWWVFHHYVSTFLSGVMLTWPDGLMYQKFRNQFLSFSMYQSFVQFLQYYYQSGCLYRLRALGERHTMDLTVVLAAF

SEQ ID NO: 91052 - protein, 369 aa, Homo sapiens
  Payload ID: 18201
  Gene Name: transmembrane protein 120A
  ENSP ID: ENSP00000484736
MQPPPPGPLGDCLRDWEDLQQDFQNIQETHRLYRLKLEELTKLQNNCTSSITRQKKRLQELALALKKCKPSLPAEAEGAAQELENQMKERQGLFFDMEAYLPKKNGLYLSLVLGNVNVTLLSKQAKFAYKDEYEKFKLYLTIILILISFTCRFLLNSRVTDAAFNFLLVWYYCTLTIRESILINNGSRIKGWWVFHHYVSTFLSGVMLTWPDGLMYQKFRNQFLSFSMYQSFVQFLQYYYQSGCLYRLRALGERHTMDLTVEGFQSWMWRGLTFLLPFLFFGHFWQLFNALTLFNLAQDPQCKEWQGCAPQVSQSAAREQEGLRLGLPLPAQRGFCPVCCGRGWEAPLECACIRGSLLFSLGFYGRCGP

SEQ ID NO: 91053 - protein, 339 aa, Homo sapiens
  Payload ID: 18202
  Gene Name: transmembrane protein 120B
  Uniprot ID: A0PK00
  ENSP ID: ENSP00000345152
MSGQLERCEREWHELEGEFQELQETHRIYKQKLEELAALQTLCSSSISKQKKHLKDLKLTLQRCKRHASREEAELVQQMAANIKERQDVFFDMEAYLPKKNGLYLNLVLGNVNVTLLSNQAKFAYKDEYEKFKLYLTIILLLGAVACRFVLHYRVTDEVFNFLLVWYYCTLTIRESILISNGSRIKGWWVSHHYVSTFLSGVMLTWPNGPIYQKFRNQFLAFSIFQSCVQFLQYYYQRGCLYRLRALGERNHLDLTVEGFQSWMWRGLTFLLPFLFCGHFWQLYNAVTLFELSSHEECREWQVFVLAFTFLILFLGNFLTTLKVVHAKLQKNRGKTKQP

SEQ ID NO: 91054 - protein, 339 aa, Homo sapiens; identical to SEQ ID NO: 91053
  Payload ID: 18202
  Gene Name: transmembrane protein 120B
  Uniprot ID: A0PK00
  ENSP ID: ENSP00000404991

SEQ ID NO: 91055 - protein, 247 aa, Homo sapiens
  Payload ID: 18202
  Gene Name: transmembrane protein 120B
  ENSP ID: ENSP00000442105
LQETHRIYKQKLEELAALQTLCSSSISKQKKHLKDLKLTLQRCKRHASREEAELVQQMAANIKERQDVFFDMEAYLPKKNGLYLNLVLGNVNVTLLSNQAKFAYKDEYEKFKLYLTIILLLGAVACRFVLHYRVTDEVFNFLLVWYYCTLTIRESILISNGSRIKGWWVSHHYVSTFLSGVMLTWPNGPIYQKFRNQFLAFSIFQSCVQFLQYYYQRGCLYRLRALGERNHLDLTVVLAALQCRHAV

SEQ ID NO: 91056 - protein, 92 aa, Homo sapiens
  Payload ID: 18202
  Gene Name: transmembrane protein 120B
  ENSP ID: ENSP00000446159
MQRMAGVRTGVHLPHPLPRQLPDHAQSRACQAPEEQRQDKAAVSLGLLCPRPGLQTAGGSRAPSQQPSQARGIAGRGPRPWSPSGPQWSRGM

SEQ ID NO: 91057 - protein, 319 aa, Homo sapiens
  Payload ID: 18203
  Gene Name: transmembrane protein 121
  Uniprot ID: Q9BTD3
  ENSP ID: ENSP00000376304
MVLPPPDRRHVCLTTLVIMGSMAVMDAYLVEQNQGPRKIGVCIIVLVGDVCFLLVLRYVAVWVGAEVRTAKRGYAMILWFLYIFVLEIKLYFIFQNYKAARRGAADPVARKALTLLLSVCVPGLFLLLVALDRMEYVRTFRKREDLRGRLFWVALDLLDLLDMQASLWEPPRSGLPLWAEGLTFFYCYMLLLVLPCVALSEVSMQGEHIAPQKMMLYPVLSLATVNVVAVLARAANMALFRDSRVSAIFVGKNVVALATKACTFLEYRRQVRDFPPPALSLELQPPPPQRNSVPPPPPPLHGPPGRPHMSSPTRDPLDT

SEQ ID NO: 91058 - protein, 319 aa, Homo sapiens; identical to SEQ ID NO: 91057
  Payload ID: 18203
  Gene Name: transmembrane protein 121
  Uniprot ID: Q9BTD3
  ENSP ID: ENSP00000407456

SEQ ID NO: 91059 - protein, 189 aa, Homo sapiens
  Payload ID: 18204
  Gene Name: transmembrane protein 123
  Uniprot ID: Q8N131
  ENSP ID: ENSP00000355285
MGLGARGAWAALLLGTLQVLALLGAAHESAAMAETLQHVPSDHTNETSNSTVKPPTSVASDSSNTTVTTMKPTAASNTTTPGMVSTNMTSTTLKSTPKTTSVSQNTSQISTSTMTVTHNSSVTSAASSVTITTTMHSEAKKGSKFDTGSFVGGIVLTLGVLSILYIGCKMYYSRRGIRYRTIDEHDAII

SEQ ID NO: 91060 - protein, 208 aa, Homo sapiens
  Payload ID: 18204
  Gene Name: transmembrane protein 123
  Uniprot ID: Q8N131
  ENSP ID: ENSP00000381204
MGLGARGAWAALLLGTLQVLALLGAAHESAAMAASANIENSGLPHNSSANSTETLQHVPSDHTNETSNSTVKPPTSVASDSSNTTVTTMKPTAASNTTTPGMVSTNMTSTTLKSTPKTTSVSQNTSQISTSTMTVTHNSSVTSAASSVTITTTMHSEAKKGSKFDTGSFVGGIVLTLGVLSILYIGCKMYYSRRGIRYRTIDEHDAII

SEQ ID NO: 91061 - protein, 22 aa, Homo sapiens
  Payload ID: 18204
  Gene Name: transmembrane protein 123
  ENSP ID: ENSP00000433695
MKPTAASNTTTPGMVSTNMTST

SEQ ID NO: 91062 - protein, 120 aa, Homo sapiens
  Payload ID: 18204
  Gene Name: transmembrane protein 123
  ENSP ID: ENSP00000434976
MKPTAASNTTTPGMVSTNMTSTTLKSTPKTTSVSQNTSQISTSTMTVTHNSSVTSAASSVTITTTMHSEAKKGSKFDTGSFVGGIVLTLGVLSILYIGCKMYYSRRGIRYRTIDEHDAII

SEQ ID NO: 91063 - protein, 120 aa, Homo sapiens; identical to SEQ ID NO: 91062
  Payload ID: 18204
  Gene Name: transmembrane protein 123
  ENSP ID: ENSP00000435331

SEQ ID NO: 91064 - protein, 46 aa, Homo sapiens
  Payload ID: 18204
  Gene Name: transmembrane protein 123
  ENSP ID: ENSP00000435842
MSSISVVNHQETLQHVPSDHTNETSNSTVKPPTSVASDSSNTTVTT

SEQ ID NO: 91065 - protein, 15 aa, Homo sapiens
  Payload ID: 18205
  Gene Name: transmembrane protein 125
  ENSP ID: ENSP00000428627
MSEQEAQAPGGRGLP

SEQ ID NO: 91066 - protein, 219 aa, Homo sapiens
  Payload ID: 18205
  Gene Name: transmembrane protein 125
  Uniprot ID: Q96AQ2
  ENSP ID: ENSP00000429275
MSEQEAQAPGGRGLPPDMLAEQVELWWSQQPRRSALCFVVAVGLVAGCGAGGVALLSTTSSRSGEWRLATGTVLCLLALLVLVKQLMSSAVQDMNCIRQAHHVALLRSGGGADALVVLLSGLVLLVTGLTLAGLAAAPAPARPLAAMLSVGIALAALGSLLLLGLLLYQVGVSGHCPSICMATPSTHSGHGGHGSIFSISGQLSAGRRHETTSSIASLI

SEQ ID NO: 91067 - protein, 219 aa, Homo sapiens; identical to SEQ ID NO: 91066
  Payload ID: 18205
  Gene Name: transmembrane protein 125
  Uniprot ID: Q96AQ2
  ENSP ID: ENSP00000429775

SEQ ID NO: 91068 - protein, 195 aa, Homo sapiens
  Payload ID: 18206
  Gene Name: transmembrane protein 126A
  Uniprot ID: Q9H061
  ENSP ID: ENSP00000306887
MENHKSNNKENITIVDISRKINQLPEAERNLLENGSVYVGLNAALCGLIANSLFRRILNVTKARIAAGLPMAGIPFLTTDLTYRCFVSFPLNTGDLDCETCTITRSGLTGLVIGGLYPVFLAIPVNGGLAARYQSALLPHKGNILSYWIRTSKPVFRKMLFPILLQTMFSAYLGSEQYKLLIKALQLSEPGKEIH

SEQ ID NO: 91069 - protein, 39 aa, Homo sapiens
  Payload ID: 18206
  Gene Name: transmembrane protein 126A
  ENSP ID: ENSP00000431993
MENHKSNNKENITIVDISRKINQLPEAESSFFSPFQEST

SEQ ID NO: 91070 - protein, 125 aa, Homo sapiens
  Payload ID: 18206
  Gene Name: transmembrane protein 126A
  Uniprot ID: Q9H061
  ENSP ID: ENSP00000434357
MAGIPFLTTDLTYRCFVSFPLNTGDLDCETCTITRSGLTGLVIGGLYPVFLAIPVNGGLAARYQSALLPHKGNILSYWIRTSKPVFRKMLFPILLQTMFSAYLGSEQYKLLIKALQLSEPGKEIH

SEQ ID NO: 91071 - protein, 125 aa, Homo sapiens; identical to SEQ ID NO: 91070
  Payload ID: 18206
  Gene Name: transmembrane protein 126A
  Uniprot ID: Q9H061
  ENSP ID: ENSP00000436590

SEQ ID NO: 91072 - protein, 95 aa, Homo sapiens
  Payload ID: 18206
  Gene Name: transmembrane protein 126A
  ENSP ID: ENSP00000436723
MENHKSNNKENITIVDISRKINQLPEAERNLLENGSVYVGLNAALCGLIANSLFRRILNVTKARIAAGLPMAGIPFLTTDLTYRCFVIWIVKPVP

SEQ ID NO: 91073 - protein, 230 aa, Homo sapiens
  Payload ID: 18207
  Gene Name: transmembrane protein 126B
  Uniprot ID: Q8IUX1
  ENSP ID: ENSP00000351737
MVVFGYEAGTKPRDSGVVPVGTEEAPKVFKMAASMHGQPSPSLEDAKLRRPMVIEIIEKNFDYLRKEMTQNIYQMATFGTTAGFSGIFSNFLFRRCFKVKHDALKTYASLATLPFLSTVVTDKLFVIDALYSDNISKENCVFRSSLIGIVCGVFYPSSLAFTKNGRLATKYHTVPLPPKGRVLIHWMTLCQTQMKLMAIPLVFQIMFGILNGLYHYAVFEETLEKTIHEE

SEQ ID NO: 91074 - protein, 200 aa, Homo sapiens
  Payload ID: 18207
  Gene Name: transmembrane protein 126B
  Uniprot ID: Q8IUX1
  ENSP ID: ENSP00000377039
MAASMHGQPSPSLEDAKLRRPMVIEIIEKNFDYLRKEMTQNIYQMATFGTTAGFSGIFSNFLFRRCFKVKHDALKTYASLATLPFLSTVVTDKLFVIDALYSDNISKENCVFRSSLIGIVCGVFYPSSLAFTKNGRLATKYHTVPLPPKGRVLIHWMTLCQTQMKLMAIPLVFQIMFGILNGLYHYAVFEETLEKTIHEE

SEQ ID NO: 91075 - protein, 125 aa, Homo sapiens
  Payload ID: 18207
  Gene Name: transmembrane protein 126B
  ENSP ID: ENSP00000433116
  MOD_RES (1)..(1): Any amino acid
XGTKPRDSGVVPVGTEEAPKDTKYISNGDIWNNSWFLWNILKLPVQTLLQDNISKENCVFRSSLIGIVCGVFYPSSLAFTKNGRLATKYHTVPLPPKGRVLIHWMTLCQTQMKLMAIPLVFQIMF

SEQ ID NO: 91076 - protein, 40 aa, Homo sapiens
  Payload ID: 18207
  Gene Name: transmembrane protein 126B
  ENSP ID: ENSP00000433444
MVVFGYEAGTKPRDSGVVPVGTEEAPKEMKHDFQNELNLS

SEQ ID NO: 91077 - protein, 58 aa, Homo sapiens
  Payload ID: 18207
  Gene Name: transmembrane protein 126B
  ENSP ID: ENSP00000433449
MVVFGYEAGTKPRDSGVVPVGTEEAPKDTKYISNGDIWNNSWFLWNILKLPVQTLLQG

SEQ ID NO: 91078 - protein, 170 aa, Homo sapiens
  Payload ID: 18207
  Gene Name: transmembrane protein 126B
  Uniprot ID: Q8IUX1
  ENSP ID: ENSP00000433471
MVVFGYEAGTKPRDSGVVPVGTEEAPKVFKMAASMHGQPSPSLEDAKLRRPMVIEIIEKNFDYLRKEMTQNIYQMATFGTTAGFSGIFSNFLFRRCFKVKHDALKTYASLATLPFLSTVVTDKLFVIDALYSDNISKENCVFRSSLIGIVCGVFYPSSLAFTKNGRLATK

SEQ ID NO: 91079 - protein, 43 aa, Homo sapiens
  Payload ID: 18207
  Gene Name: transmembrane protein 126B
  ENSP ID: ENSP00000435541
MVVFGYEAGTKPRDSGVVPVGTEEAPKLFCSELPLRCGFLRMG

SEQ ID NO: 91080 - protein, 40 aa, Homo sapiens
  Payload ID: 18207
  Gene Name: transmembrane protein 126B
  ENSP ID: ENSP00000435779
  MOD_RES (1)..(1): Any amino acid
XGYEAGTKPRDSGVVPVGTEEAPKLFCSELPLRCGFLRMG

SEQ ID NO: 91081 - protein, 40 aa, Homo sapiens; identical to SEQ ID NO: 91076
  Payload ID: 18207
  Gene Name: transmembrane protein 126B
  ENSP ID: ENSP00000435998

SEQ ID NO: 91082 - protein, 43 aa, Homo sapiens; identical to SEQ ID NO: 91079
  Payload ID: 18207
  Gene Name: transmembrane protein 126B
  ENSP ID: ENSP00000436468

SEQ ID NO: 91083 - protein, 40 aa, Homo sapiens; identical to SEQ ID NO: 91076
  Payload ID: 18207
  Gene Name: transmembrane protein 126B
  ENSP ID: ENSP00000436813

SEQ ID NO: 91084 - protein, 238 aa, Homo sapiens
  Payload ID: 18208
  Gene Name: transmembrane protein 127
  Uniprot ID: O75204
  ENSP ID: ENSP00000258439
MYAPGGAGLPGGRRRRSPGGSALPKQPERSLASALPGALSITALCTALAEPAWLHIHGGTCSRQELGVSDVLGYVHPDLLKDFCMNPQTVLLLRVIAAFCFLGILCSLSAFLLDVFGPKHPALKITRRYAFAHILTVLQCATVIGFSYWASELILAQQQQHKKYHGSQVYVTFAVSFYLVAGAGGASILATAANLLRHYPTEEEEQALELLSEMEENEPYPAEYEVINQFQPPPAYTP

SEQ ID NO: 91085 - protein, 154 aa, Homo sapiens
  Payload ID: 18208
  Gene Name: transmembrane protein 127
  ENSP ID: ENSP00000411810
MNPQTVLLLRVIAAFCFLGILCSLSAFLLDVFGPKHPALKITRRYAFAHILTVLQCATVIGFSYWASELILAQQQQHKKYHGSQVYVTFAVSFYLVAGAGGASILATAANLLRHYPTEEEEQALELLSEMEENEPYPAEYEVINQFQPPPAYTP

SEQ ID NO: 91086 - protein, 238 aa, Homo sapiens; identical to SEQ ID NO: 91084
  Payload ID: 18208
  Gene Name: transmembrane protein 127
  Uniprot ID: O75204
  ENSP ID: ENSP00000416660

SEQ ID NO: 91087 - protein, 141 aa, Homo sapiens
  Payload ID: 18209
  Gene Name: transmembrane protein 128
  Uniprot ID: Q5BJH2
  ENSP ID: ENSP00000254742
MPPFGYKTETSTAVEKKEKPLPRLNIHSGFWILASIVVTYYVDFFKTLKENFHTSSWFLCGSALLLVSLSIAFYCIVYLEWYCGIGEYDVKYPALIPITTASFIAAGICFNIALWHVWSFFTPLLLFTQFMGVVMFITLLG

SEQ ID NO: 91088 - protein, 165 aa, Homo sapiens
  Payload ID: 18209
  Gene Name: transmembrane protein 128
  ENSP ID: ENSP00000372201
MDSSRARQQLRRRFLLLPDAEAQLDREGDAGPETSTAVEKKEKPLPRLNIHSGFWILASIVVTYYVDFFKTLKENFHTSSWFLCGSALLLVSLSIAFYCIVYLEWYCGIGEYDVKYPALIPITTASFIAAGICFNIALWHVWSFFTPLLLFTQFMGVVMFITLLG

SEQ ID NO: 91089 - protein, 232 aa, Homo sapiens
  Payload ID: 18210
  Gene Name: transmembrane protein 129, E3 ubiquitin protein ligase
  Uniprot ID: A0AVI4
  ENSP ID: ENSP00000305243
MDSPEVTFTLAYLVFAVCFVFTPNEFHAAGLTVQNLLSGWLGSEDAAFVPFHLRRTAATLLCHSLLPLGYYVGMCLAASEKRLHALSQAPEAWRLFLLLAVTLPSIACILIYYWSRDRWACHPLARTLALYALPQSGWQAVASSVNTEFRRIDKFATGAPGARVIVTDTWVMKVTTYRVHVAQQQDVHLTVTESRQHELSPDSNLPVQLLTIRVASTNPAVQAFDIWSWRPA

SEQ ID NO: 91090 - protein, 362 aa, Homo sapiens
  Payload ID: 18210
  Gene Name: transmembrane protein 129, E3 ubiquitin protein ligase
  Uniprot ID: A0AVI4
  ENSP ID: ENSP00000372394
MDSPEVTFTLAYLVFAVCFVFTPNEFHAAGLTVQNLLSGWLGSEDAAFVPFHLRRTAATLLCHSLLPLGYYVGMCLAASEKRLHALSQAPEAWRLFLLLAVTLPSIACILIYYWSRDRWACHPLARTLALYALPQSGWQAVASSVNTEFRRIDKFATGAPGARVIVTDTWVMKVTTYRVHVAQQQDVHLTVTESRQHELSPDSNLPVQLLTIRVASTNPAVQAFDIWLNSTEYGELCEKLRAPIRRAAHVVIHQSLGDLFLETFASLVEVNPAYSVPSSQELEACIGCMQTRASVKLVKTCQEAATGECQQCYCRPMWCLTCMGKWFASRQDPLRPDTWLASRVPCPTCRARFCILDVCTVR

SEQ ID NO: 91091 - protein, 92 aa, Homo sapiens
  Payload ID: 18210
  Gene Name: transmembrane protein 129, E3 ubiquitin protein ligase
  ENSP ID: ENSP00000417259
  MOD_RES (1)..(1): Any amino acid
XVFTPNEFHAAGLTVQNLLSGWLGSEDAAFVPFHLRRTAATLLCHSLLPLVTGPTPNVDYYFLPTGTCWCNSSPSPWLIWTFKLSSIWPAGP

SEQ ID NO: 91092 - protein, 28 aa, Homo sapiens
  Payload ID: 18210
  Gene Name: transmembrane protein 129, E3 ubiquitin protein ligase
  ENSP ID: ENSP00000417412
  MOD_RES (1)..(1): Any amino acid
XSPDSNLPVQLLTIRVASTNPAVQAFDI

SEQ ID NO: 91093 - protein, 362 aa, Homo sapiens; identical to SEQ ID NO: 91090
  Payload ID: 18210
  Gene Name: transmembrane protein 129, E3 ubiquitin protein ligase
  Uniprot ID: A0AVI4
  ENSP ID: ENSP00000441812

SEQ ID NO: 91094 - protein, 321 aa, Homo sapiens
  Payload ID: 18211
  Gene Name: transmembrane protein 130
  Uniprot ID: Q8N3G9
  ENSP ID: ENSP00000330262
MAQAVWSRLGRILWLACLLPWAPAGVAAEFLVGDLVVTQNTSLPWPSSYLTKTVLKVSFLLHDPSNFLKTALFLYSWDFGDGTQMVTEDSVVYYNYSIIGTFTVKLKVVAEWEEVEPDATRAVKQKTGDFSASLKLQETLRGIQVLGPTLIQTFQKMTVTLNFLGSPPLTVCWRLKPECLPLEEGECHPVSVASTAYNLTHTFRDPGDYCFSIRAENIISKTHQYHKIQVWPSRIQPAVFAFPCATLITVMLAFIMYMTLRNATQQKDMVENPEPPSGVRCCCQMCCGPFLLETPSEYLEIVRENHGLLPPLYKSVKTYTV

SEQ ID NO: 91095 - protein, 423 aa, Homo sapiens
  Payload ID: 18211
  Gene Name: transmembrane protein 130
  Uniprot ID: Q8N3G9
  ENSP ID: ENSP00000341256
MAQAVWSRLGRILWLACLLPWAPAGVAAGLYELNLTTDSPATTGAVVTISASLVAKDNGSLALPADAHLYRFHWIHTPLVLTGKMEKGLSSTIRVVGHVPGEFPVSVWVTAADCWMCQPVARGFVVLPITEFLVGDLVVTQNTSLPWPSSYLTKTVLKVSFLLHDPSNFLKTALFLYSWDFGDGTQMVTEDSVVYYNYSIIGTFTVKLKVVAEWEEVEPDATRAVKQKTGDFSASLKLQETLRGIQVLGPTLIQTFQKMTVTLNFLGSPPLTVCWRLKPECLPLEEGECHPVSVASTAYNLTHTFRDPGDYCFSIRAENIISKTHQYHKIQVWPSRIQPAVFAFPCATLITVMLAFIMYMTLRNATQQKDMVENPEPPSGVRCCCQMCCGPFLLETPSEYLEIVRENHGLLPPLYKSVKTYTV

SEQ ID NO: 91096 - protein, 46 aa, Homo sapiens
  Payload ID: 18211
  Gene Name: transmembrane protein 130
  ENSP ID: ENSP00000389379
MEKGLSSTIRVVGHVPGEFPVSVWVTAADCWMCQPVARGFVVLPIT

SEQ ID NO: 91097 - protein, 339 aa, Homo sapiens
  Payload ID: 18211
  Gene Name: transmembrane protein 130
  ENSP ID: ENSP00000390200
MEKGLSSTIRVVGHVPGEFPVSVWVTAADCWMCQPVARGFVVLPITEFLVGDLVVTQNTSLPWPSSYLTKTVLKVSFLLHDPSNFLKTALFLYSWDFGDGTQMVTEDSVVYYNYSIIGTFTVKLKVVAEWEEVEPDATRAVKQKTGDFSASLKLQETLRGIQVLGPTLIQTFQKMTVTLNFLGSPPLTVCWRLKPECLPLEEGECHPVSVASTAYNLTHTFRDPGDYCFSIRAENIISKTHQYHKIQVWPSRIQPAVFAFPCATLITVMLAFIMYMTLRNATQQKDMVENPEPPSGVRCCCQMCCGPFLLETPSEYLEIVRENHGLLPPLYKSVKTYTV

SEQ ID NO: 91098 - protein, 435 aa, Homo sapiens
  Payload ID: 18211
  Gene Name: transmembrane protein 130
  Uniprot ID: Q8N3G9
  ENSP ID: ENSP00000413163
MAQAVWSRLGRILWLACLLPWAPAGVAAGLYELNLTTDSPATTGAVVTISASLVAKDNGSLALPADAHLYRFHWIHTPLVLTGKMEKGLSSTIRVVGHVPGEFPVSVWVTAADCWMCQPVARGFVVLPITEFLVGDLVVTQNTSLPWPSSYLTKTVLKVSFLLHDPSNFLKTALFLYSWDFGDGTQMVTEDSVVYYNYSIIGTFTVKLKVVAEWEEVEPDATRAVKQKTGDFSASLKLQETLRGIQVLGPTLIQTFQKMTVTLNFLGSPPLTVCWRLKPECLPLEEGECHPVSVASTAYNLTHTFRDPGDYCFSIRAENIISKTHQYHKIQVWPSRIQPAVFAFPCATLITVMLAFIMYMTLRNATQQKDMVEVADFDFSPMSDKNPEPPSGVRCCCQMCCGPFLLETPSEYLEIVRENHGLLPPLYKSVKTYTV

SEQ ID NO: 91099 - protein, 1883 aa, Homo sapiens
  Payload ID: 18212
  Gene Name: transmembrane protein 131
  Uniprot ID: Q92545
  ENSP ID: ENSP00000186436
MGKRAGGGATGATTAAVSTSAGAGLEPAAARSGGPRSAAAGLLGALHLVMTLVVAAARAEKEAFVQSESIIEVLRFDDGGLLQTETTLGLSSYQQKSISLYRGNCRPIRFEPPMLDFHEQPVGMPKMEKVYLHNPSSEETITLVSISATTSHFHASFFQNRKILPGGNTSFDVVFLARVVGNVENTLFINTSNHGVFTYQVFGVGVPNPYRLRPFLGARVPVNSSFSPIINIHNPHSEPLQVVEMYSSGGDLHLELPTGQQGGTRKLWEIPPYETKGVMRASFSSREADNHTAFIRIKTNASDSTEFIILPVEVEVTTAPGIYSSTEMLDFGTLRTQDLPKVLNLHLLNSGTKDVPITSVRPTPQNDAITVHFKPITLKASESKYTKVASISFDASKAKKPSQFSGKITVKAKEKSYSKLEIPYQAEVLDGYLGFDHAATLFHIRDSPADPVERPIYLTNTFSFAILIHDVLLPEEAKTMFKVHNFSKPVLILPNESGYIFTLLFMPSTSSMHIDNNILLITNASKFHLPVRVYTGFLDYFVLPPKIEERFIDFGVLSATEASNILFAIINSNPIELAIKSWHIIGDGLSIELVAVERGNRTTIISSLPEFEKSSLSDQSSVTLASGYFAVFRVKLTAKKLEGIHDGAIQITTDYEILTIPVKAVIAVGSLTCFPKHVVLPPSFPGKIVHQSLNIMNSFSQKVKIQQIRSLSEDVRFYYKRLRGNKEDLEPGKKSKIANIYFDPGLQCGDHCYVGLPFLSKSEPKVQPGVAMQEDMWDADWDLHQSLFKGWTGIKENSGHRLSAIFEVNTDLQKNIISKITAELSWPSILSSPRHLKFPLTNTNCSSEEEITLENPADVPVYVQFIPLALYSNPSVFVDKLVSRFNLSKVAKIDLRTLEFQVFRNSAHPLQSSTGFMEGLSRHLILNLILKPGEKKSVKVKFTPVHNRTVSSLIIVRNNLTVMDAVMVQGQGTTENLRVAGKLPGPGSSLRFKITEALLKDCTDSLKLREPNFTLKRTFKVENTGQLQIHIETIEISGYSCEGYGFKVVNCQEFTLSANASRDIIILFTPDFTASRVIRELKFITTSGSEFVFILNASLPYHMLATCAEALPRPNWELALYIIISGIMSALFLLVIGTAYLEAQGIWEPFRRRLSFEASNPPFDVGRPFDLRRIVGISSEGNLNTLSCDPGHSRGFCGAGGSSSRPSAGSHKQCGPSVHPHSSHSNRNSADVENVRAKNSSSTSSRTSAQAASSQSANKTSPLVLDSNTVTQGHTAGRKSKGAKQSQHGSQHHAHSPLEQHPQPPLPPPVPQPQEPQPERLSPAPLAHPSHPERASSARHSSEDSDITSLIEAMDKDFDHHDSPALEVFTEQPPSPLPKSKGKGKPLQRKVKPPKKQEEKEKKGKGKPQEDELKDSLADDDSSSTTTETSNPDTEPLLKEDTEKQKGKQAMPEKHESEMSQVKQKSKKLLNIKKEIPTDVKPSSLELPYTPPLESKQRRNLPSKIPLPTAMTSGSKSRNAQKTKGTSKLVDNRPPALAKFLPNSQELGNTSSSEGEKDSPPPEWDSVPVHKPGSSTDSLYKLSLQTLNADIFLKQRQTSPTPASPSPPAAPCPFVARGSYSSIVNSSSSSDPKIKQPNGSKHKLTKAASLPGKNGNPTFAAVTAGYDKSPGGNGFAKVSSNKTGFSSSLGISHAPVDSDGSDSSGLWSPVSNPSSPDFTPLNSFSAFGNSFNLTGEVFSKLGLSRSCNQASQRSWNEFNSGPSYLWESPATDPSPSWPASSGSPTHTATSVLGNTSGLWSTTPFSSSIWSSNLSSALPFTTPANTLASIGLMGTENSPAPHAPSTSSPADDLGQTYNPWRIWSPTIGRRSSDPWSNSHFPHEN

SEQ ID NO: 91100 - protein, 142 aa, Homo sapiens
  Payload ID: 18212
  Gene Name: transmembrane protein 131
  ENSP ID: ENSP00000386372
ENTGQLQIHIETIEISGYSCEGYGFKVVNCQEFTLSANASRDIIIFALFLLVIGTAYLEAQGIWEPFRRRLSFEASNPPFDVGRPFDLRRIVGISSEGNLNTLSCDPGHSRGFCGAGGSSSRPSAGSHKQCGPSVHPHSSHS

SEQ ID NO: 91101 - protein, 332 aa, Homo sapiens
  Payload ID: 18212
  Gene Name: transmembrane protein 131
  ENSP ID: ENSP00000391566
  MOD_RES (1)..(1): Any amino acid
XGLLGALHLVMTLVVAAARAEKEAFVQSESIIEVLRFDDGGLLQTETTLGLSSYQQKSISLYRGNCRPIRFEPPMLDFHEQPVGMPKMEKVYLHNPSSEETITLVSISATTSHFHASFFQNRKILPGGNTSFDVVFLARVVGNVENTLFINTSNHGVFTYQVFGVGVPNPYRLRPFLGARVPVNSSFSPIINIHNPHSEPLQVVEMYSSGGDLHLELPTGQQGGTRKLWEIPPYETKGVMRASFSSREADNHTAFIRIKTNASDSTEFIILPVEVEVTTAPGIYSSTEMLDFGTLRTQDLPKVLNLHLLNSGTKDVPITHRRQKSHLSFLGK

SEQ ID NO: 91102 - protein, 128 aa, Homo sapiens
  Payload ID: 18212
  Gene Name: transmembrane protein 131
  ENSP ID: ENSP00000411549
MLDFHEQPVGMPKMEKVYLHNPSSEETITLVSISATTSHFHASFFQNRKILPGGNTSFDVVFLARVVGNVENTLFINTSNHGVFTYQVFGVGVPNPYRLRPFLGARVPVNSSFSPIINIHNPHSEPLQ

SEQ ID NO: 91103 - protein, 1024 aa, Homo sapiens
  Payload ID: 18213
  Gene Name: transmembrane protein 132A
  Uniprot ID: Q24JP5
  ENSP ID: ENSP00000005286
MCARMAGRTTAAPRGPYGPWLCLLVALALDVVRVDCGQAPLDPVYLPAALELLDAPEHFRVQQVGHYPPANSSLSSRSETFLLLQPWPRAQPLLRASYPPFATQQVVPPRVTEPHQRPVPWDVRAVSVEAAVTPAEPYARVLFHLKGQDWPPGSGSLPCARLHATHPAGTAHQACRFQPSLGACVVELELPSHWFSQASTTRAELAYTLEPAAEGPGGCGSGEENDPGEQALPVGGVELRPADPPQYQEVPLDEAVTLRVPDMPVRPGQLFSATLLLRHNFTASLLTLRIKVKKGLHVTAARPAQPTLWTAKLDRFKGSRHHTTLITCHRAGLTEPDSSSPLELSEFLWVDFVVENSTGGGVAVTRPVTWQLEYPGQAPEAEKDKMVWEILVSERDIRALIPLAKAEELVNTAPLTGVPQHVPVRLVTVDGGGALVEVTEHVGCESANTQVLQVSEACDAVFVAGKESRGARGVRVDFWWRRLRASLRLTVWAPLLPLRIELTDTTLEQVRGWRVPGPAEGPAEPAAEASDEAERRARGCHLQYQRAGVRFLAPFAAHPLDGGRRLTHLLGPDWLLDVSHLVAPHARVLDSRVASLEGGRVVVGREPGVTSIEVRSPLSDSILGEQALAVTDDKVSVLELRVQPVMGISLTLSRGTAHPGEVTATCWAQSALPAPKQEVALSLWLSFSDHTVAPAELYDRRDLGLSVSAEEPGAILPAEEQGAQLGVVVSGAGAEGLPLHVALHPPEPCRRGRHRVPLASGTAWLGLPPASTPAPALPSSPAWSPPATEATMGGKRQVAGSVGGNTGVRGKFERAEEEARKEETEAREEEEEEEEEMVPAPQHVTELELGMYALLGVFCVAIFIFLVNGVVFVLRYQRKEPPDSATDPTSPQPHNWVWLGTDQEELSRQLDRQSPGPPKGEGSCPCESGGGGEAPTLAPGPPGGTTSSSSTLARKEAGGRRKRVEFVTFAPAPPAQSPEEPVGAPAVQSILVAGEEDIRWVCEDMGLKDPEELRNYMERIRGSS

SEQ ID NO: 91104 - protein, 1023 aa, Homo sapiens
  Payload ID: 18213
  Gene Name: transmembrane protein 132A
  Uniprot ID: Q24JP5
  ENSP ID: ENSP00000405823
MCARMAGRTTAAPRGPYGPWLCLLVALALDVVRVDCGQAPLDPVYLPAALELLDAPEHFRVQQVGHYPPANSSLSSRSETFLLLQPWPRAQPLLRASYPPFATQQVVPPRVTEPHQRPVPWDVRAVSVEAAVTPAEPYARVLFHLKGQDWPPGSGSLPCARLHATHPAGTAHQACRFQPSLGACVVELELPSHWFSQASTTRAELAYTLEPAAEGPGGCGSGEENDPGEQALPVGGVELRPADPPQYQEVPLDEAVTLRVPDMPVRPGQLFSATLLLRHNFTASLLTLRIKVKKGLHVTAARPAQPTLWTAKLDRFKGSRHHTTLITCHRAGLTEPDSSPLELSEFLWVDFVVENSTGGGVAVTRPVTWQLEYPGQAPEAEKDKMVWEILVSERDIRALIPLAKAEELVNTAPLTGVPQHVPVRLVTVDGGGALVEVTEHVGCESANTQVLQVSEACDAVFVAGKESRGARGVRVDFWWRRLRASLRLTVWAPLLPLRIELTDTTLEQVRGWRVPGPAEGPAEPAAEASDEAERRARGCHLQYQRAGVRFLAPFAAHPLDGGRRLTHLLGPDWLLDVSHLVAPHARVLDSRVASLEGGRVVVGREPGVTSIEVRSPLSDSILGEQALAVTDDKVSVLELRVQPVMGISLTLSRGTAHPGEVTATCWAQSALPAPKQEVALSLWLSFSDHTVAPAELYDRRDLGLSVSAEEPGAILPAEEQGAQLGVVVSGAGAEGLPLHVALHPPEPCRRGRHRVPLASGTAWLGLPPASTPAPALPSSPAWSPPATEATMGGKRQVAGSVGGNTGVRGKFERAEEEARKEETEAREEEEEEEEEMVPAPQHVTELELGMYALLGVFCVAIFIFLVNGVVFVLRYQRKEPPDSATDPTSPQPHNWVWLGTDQEELSRQLDRQSPGPPKGEGSCPCESGGGGEAPTLAPGPPGGTTSSSSTLARKEAGGRRKRVEFVTFAPAPPAQSPEEPVGAPAVQSILVAGEEDIRWVCEDMGLKDPEELRNYMERIRGSS

SEQ ID NO: 91105 - protein, 113 aa, Homo sapiens
  Payload ID: 18213
  Gene Name: transmembrane protein 132A
  ENSP ID: ENSP00000437848
  MOD_RES (1)..(1): Any amino acid
XWLLDVSHLVAPHARVLDSRVASLEGGRVVVGREPGVTSIEVRSPLSDSILGEQALAVTDDKVSVLELRVQPVMGISLTLSRGTAHPGEVTATCWAQSALPAPKQVTVGGSGG

SEQ ID NO: 91106 - protein, 103 aa, Homo sapiens
  Payload ID: 18213
  Gene Name: transmembrane protein 132A
  ENSP ID: ENSP00000439716
SVLELRVQPVMGISLTLSRGTAHPGEVTATCWAQSALPAPKQEVALSLWLSFSDHTVAPAELYDRRDLGLSVSAEEPGAILPAEEQGAQLGVVPLQPSHLRSL

SEQ ID NO: 91107 - protein, 152 aa, Homo sapiens
  Payload ID: 18213
  Gene Name: transmembrane protein 132A
  ENSP ID: ENSP00000439717
  MOD_RES (1)..(1): Any amino acid
XAVTRPVTWQLEYPGQAPEAEKDKMVWEILVSERDIRALIPLAKVSEACDAVFVAGKESRGARGVRVDFWWRRLRASLRLTVWAPLLPLRIELTDTTLEQVRGWRVPGPAEGPAEPAAEASDEAERRARGCHLQYQRAGVRFLAPFAAHPLD

SEQ ID NO: 91108 - protein, 76 aa, Homo sapiens
  Payload ID: 18213
  Gene Name: transmembrane protein 132A
  ENSP ID: ENSP00000442754
MPVRPGQLFSATLLLRHNFTASLLTLRIKVKKGLHVTAARPAQPTLWTAKLDRFKGSRHHTTLITCHRAGLTEPDS

SEQ ID NO: 91109 - protein, 1078 aa, Homo sapiens
  Payload ID: 18214
  Gene Name: transmembrane protein 132B
  Uniprot ID: Q14DG7
  ENSP ID: ENSP00000299308
MFGAASRMDTTAVCTGGVTESRGIVDSLQKFSSLPAYLPTNLHISNAEESFFLKEANQDLTRNSSLQARVEPFFIYRARTPPIINASYGPFSVEKIIPQELLLTSTAFGNMDKFPFNWKLKSHILDSSIYSNRPKVQTLFYVTGMGWDDSDLTEDLPCVKMFAFPEAREVAASCRLQGAPGLCVAELELLPEWFSSGLDLEPEEEIPALLGGTTMELFFTLYPADKAGQCPLEEEGKWENNIHSGLESPQQAFPARERIGSVVVYPTQDDLKWSLVSLDENVVISVPLNLVREGDTATFLVSLTSSSVADQFTLRIKAAAGVKITAVRVSSEDQWAVQEEIDNGSTQTSATLTCMGHRPDTQSRVNGSFYEILQVDFGIDNSSDLAGAQQITWQVEYPIEDSMSELVVSEIFVSQTTFVGIVPLAMDTEVLNTAILTGKPVSVPVKVVGVQEDGSVVDVSESVECKSADEDVIKVSNNCDSIFVNGKEMKSKVDTIVNFTHQHFTSQFEVTVWAPRLPLQIEISDTELSQIKGWRIPVAANRRPTRESDDEDDEEKKGRGCSLQYQHATVRVLTQFVAESPDLGQLTYMLGPDWQFDITDLVTEFMKVEEPKIAQLQDGRTLAGREPGITTVQVLSPLSDSILAEKTVIVLDDRVTIAELGVQLVAGMSLSLQPHRADKRAIVSTAAALDVLQSPQQEAIVSSWILFSDGSVTPLDIYDPKDYSVTVSSLDEMVVSVQANLESKWPIVVAEGEGQGPLIKLEMMISEPCQKTKRKSVLAVGKGNVKVKFEPSSDEHQGGSNDIEGINREYKDHLSNSIEREGNQERAVQEWFHRGTPVGQEESTNKSTTPQSPMEGKNKLLKSGGPDAFTSFPTQGKSPDPNNPSDLTVTSRGLTDLEIGMYALLCVFCLAILVFLINCVAFAWKYRHKRFAVSEQGNIPHSHDWVWLGNEVELLENPVDITLPSEECTTMIDRGLQFEERNFLLNGSSQKTFHSQLLRPSDYVYEKEIKNEPMNSSGPKRKRVKFTSYTTILPEDGGPYTNSILFDSDDNIKWVCQDMGLGDSQDFRDYMESLQDQM

SEQ ID NO: 91110 - protein, 590 aa, Homo sapiens
  Payload ID: 18214
  Gene Name: transmembrane protein 132B
  Uniprot ID: Q14DG7
  ENSP ID: ENSP00000482788
MKSKVDTIVNFTHQHFTSQFEVTVWAPRLPLQIEISDTELSQIKGWRIPVAANRRPTRESDDEDDEEKKGRGCSLQYQHATVRVLTQFVAESPDLGQLTYMLGPDWQFDITDLVTEFMKVEEPKIAQLQDGRTLAGREPGITTVQVLSPLSDSILAEKTVIVLDDRVTIAELGVQLVAGMSLSLQPHRADKRAIVSTAAALDVLQSPQQEAIVSSWILFSDGSVTPLDIYDPKDYSVTVSSLDEMVVSVQANLESKWPIVVAEGEGQGPLIKLEMMISEPCQKTKRKSVLAVGKGNVKVKFEPSSDEHQGGSNDIEGINREYKDHLSNSIEREGNQERAVQEWFHRGTPVGQEESTNKSTTPQSPMEGKNKLLKSGGPDAFTSFPTQGKSPDPNNPSDLTVTSRGLTDLEIGMYALLCVFCLAILVFLINCVAFAWKYRHKRFAVSEQGNIPHSHDWVWLGNEVELLENPVDITLPSEECTTMIDRGLQFEERNFLLNGSSQKTFHSQLLRPSDYVYEKEIKNEPMNSSGPKRKRVKFTSYTTILPEDGGPYTNSILFDSDDNIKWVCQDMGLGDSQDFRDYMESLQDQM

SEQ ID NO: 91111 - protein, 1108 aa, Homo sapiens
  Payload ID: 18215
  Gene Name: transmembrane protein 132C
  Uniprot ID: Q8N3T6
  ENSP ID: ENSP00000410852
MRSEGAAPGPAAPLCGALSLLLGALLGKVIEGHGVTDNIQRFSSLPPYLPVSYHILRAETSFFLKEANQDLLRNSSLQARVESFFTYKTRQPPVLNASYGPFSVEKVVPLDLMLTSNFLGPTNKFSFDWKLKAHILRDKVYLSRPKVQVLFHIMGRDWDDHGAGEKLPCLRVFAFRETREVRGSCRLKGDLGLCVAELELLSSWFSAPTVGAGRKKSMDQPEGTPVELYYTVHPGNERGDCAGGDFRKGNAIRPGKDGLEETTSHLQRIGTVGLYRAQDSAQLSELRLDGNVVIWLPSRPVKQGEVVTAYVTISSNSSVDLFILRAKVKKGVNILSAQTREPRQWGVKQEVGSGGKHVTATVACQRLGPSPRNRSSSLFNEVVQMNFEIASFSSLSGTQPITWQVEYPRKGTTDIAVSEIFVSQKDLVGIVPLAMDTEILNTAVLTGKTVAMPIKVVSVEENSAVMDISESVECKSTDEDVIKVSERCDYIFVNGKEIKGKMDAVVNFTYQYLSAPLCVTVWVPRLPLQIEVSDTELSQIKGWRVPIVTNKRPTRESEDEDEEERRGRGCALQYQHATVRVLTQFVSEGAGPWGQPNYLLSPNWQFDITHLVADFMKLEEPHVATLQDSRVLVGREVGMTTIQVLSPLSDSILAEKTITVLDDKVSVTDLAIQLVAGLSVALYPNAENSKAVTAVVTAEEVLRTPKQEAVFSTWLQFSDGSVTPLDIYDTKDFSLAATSQDEAVVSVPQPRSPRWPVVVAEGEGQGPLIRVDMTIAEACQKSKRKSILAVGVGNVRVKFGQNDADSSPGGDYEEDEIKNHASDRRQKGQHHERTGQDGHLYGSSPVEREEGALRRATTTARSLLDNKVVKNSRADGGRLAGEGQLQNIPIDFTNFPAHVDLPKAGSGLEENDLVQTPRGLSDLEIGMYALLGVFCLAILVFLINCATFALKYRHKQVPLEGQASMTHSHDWVWLGNEAELLESMGDAPPPQDEHTTIIDRGPGACEESNHLLLNGGSHKHVQSQIHRSADSGGRQGREQKQDPLHSPTSKRKKVKFTTFTTIPPDDSCPTVNSIVSSNDEDIKWVCQDVAVGAPKELRNYLEKLKDKA

SEQ ID NO: 91112 - protein, 637 aa, Homo sapiens
  Payload ID: 18216
  Gene Name: transmembrane protein 132D
  Uniprot ID: Q14C87
  ENSP ID: ENSP00000374092
MQRDESSPFPPLFSLTSSQVSDRCDYVFVNGKEMKGKVNVVVNFTYQHLSSPLEMTVWVPRLPLQIEVSDTELNQIKGWRVPIVSSRRPAGDSEEEEDDERRGRGCTLQYQHAMVRVLTQFVAEAAGPGGHLAHLLGSDWQVDITELINDFMQVEEPRIAKLQGGQILMGQELGMTTIQILSPLSDTILAEKTITVLDEKVTITDLGVQLVTGLSLSLQLSPGSNRAIFATAVAQELLQRPKQEAAISCWVQFSDGSVTPLDIYDGKDFSLMATSLDEKVVSIHQDPKFKWPIIAAETEGQGTLVKVEMVISESCQKSKRKSVLAVGTANIKVKFGQNDANPNTSDSRHTGAGVHMENNVSDRRPKKPSQEWGSQEGQYYGSSSMGLMEGRGTTTDRSILQKKKGQESLLDDNSHLQTIPSDLTSFPAQVDLPRSNGEMDGNDLMQASKGLSDLEIGMYALLGVFCLAILVFLINCVTFALKYRHKQVPFEEQEGMSHSHDWVGLSNRTELLENHINFASSQDEQITAIDRGMDFEESKYLLSTNSQKSINGQLFKPLGPIIIDGKDQKSEPPTSPTSKRKRVKFTTFTAVSSDDEYPTRNSIVMSSEDDIKWVCQDLDPGDCKELHNYMERLHENV

SEQ ID NO: 91113 - protein, 1099 aa, Homo sapiens
  Payload ID: 18216
  Gene Name: transmembrane protein 132D
  Uniprot ID: Q14C87
  ENSP ID: ENSP00000408581
MCPSEMGTLWHHWSPVLISLAALFSKVTEGRGILESIQRFSLLPTYLPVTYHINNADVSFFLKEANQDIMRNSSLQSRVESFLIYKSRRLPVLNASYGPFSIEQVVPQDLMLPSNPFGFTNKFSLNWKLKAHILRDKVYLSRPKVQVLFHIMGRDWDDRSAGEKLPCLRVFAFRETREVRGSCRLQGDLGLCVAELELLSSWFSPPTVVAGRRKSVDQPEGTPVELYYTVHPGGERGDCVREDARRSNGIRTGHSDIDESGPPLQRIGSIFLYQTHRKPSLRELRLDNSVAIHYIPKTVRKGDVLTFPVSISRNSTEDRFTLRAKVKKGVNIIGVRASSPSIWDVKERTDYTGKYAPAVIVCQKKAAGSENSADGASYEVMQIDVEVEEPGDLPATQLVTWQVEYPGEITSDLGVSKIYVSPKDLIGVVPLAMEAEILNTAILTGKTVAVPVKVVSVEDDGTVTELLESVECRSSDEDVIKVSDRCDYVFVNGKEMKGKVNVVVNFTYQHLSSPLEMTVWVPRLPLQIEVSDTELNQIKGWRVPIVSSRRPAGDSEEEEDDERRGRGCTLQYQHAMVRVLTQFVAEAAGPGGHLAHLLGSDWQVDITELINDFMQVEEPRIAKLQGGQILMGQELGMTTIQILSPLSDTILAEKTITVLDEKVTITDLGVQLVTGLSLSLQLSPGSNRAIFATAVAQELLQRPKQEAAISCWVQFSDGSVTPLDIYDGKDFSLMATSLDEKVVSIHQDPKFKWPIIAAETEGQGTLVKVEMVISESCQKSKRKSVLAVGTANIKVKFGQNDANPNTSDSRHTGAGVHMENNVSDRRPKKPSQEWGSQEGQYYGSSSMGLMEGRGTTTDRSILQKKKGQESLLDDNSHLQTIPSDLTSFPAQVDLPRSNGEMDGNDLMQASKGLSDLEIGMYALLGVFCLAILVFLINCVTFALKYRHKQVPFEEQEGMSHSHDWVGLSNRTELLENHINFASSQDEQITAIDRGMDFEESKYLLSTNSQKSINGQLFKPLGPIIIDGKDQKSEPPTSPTSKRKRVKFTTFTAVSSDDEYPTRNSIVMSSEDDIKWVCQDLDPGDCKELHNYMERLHENV

SEQ ID NO: 91114 - protein, 1079 aa, Homo sapiens
  Payload ID: 18216
  Gene Name: transmembrane protein 132D
  ENSP ID: ENSP00000478824
ALRFPTVTEGRGILESIQRFSLLPTYLPVTYHINNADVSFFLKEANQDIMRNSSLQSRVESFLIYKSRRLPVLNASYGPFSIEQVVPQDLMLPSNPFGFTNKFSLNWKLKAHILRDKVYLSRPKVQVLFHIMGRDWDDRSAGEKLPCLRVFAFRETREVRGSCRLQGDLGLCVAELELLSSWFSPPTVVAGRRKSVDQPEGTPVELYYTVHPGGERGDCVREDARRSNGIRTGHSDIDESGPPLQRIGSIFLYQTHRKPSLRELRLDNSVAIHYIPKTVRKGDVLTFPVSISRNSTEDRFTLRAKVKKGVNIIGVRASSPSIWDVKERTDYTGKYAPAVIVCQKKAAGSENSADGASYEVMQIDVEVEEPGDLPATQLVTWQVEYPGEITSDLGVSKIYVSPKDLIGVVPLAMEAEILNTAILTGKTVAVPVKVVSVEDDGTVTELLESVECRSSDEDVIKVSDRCDYVFVNGKEMKGKVNVVVNFTYQHLSSPLEMTVWVPRLPLQIEVSDTELNQIKGWRVPIVSSRRPAGDSEEEEDDERRGRGCTLQYQHAMVRVLTQFVAEAAGPGGHLAHLLGSDWQVDITELINDFMQVEEPRIAKLQGGQILMGQELGMTTIQILSPLSDTILAEKTITVLDEKVTITDLGVQLVTGLSLSLQLSPGSNRAIFATAVAQELLQRPKQEAAISCWVQFSDGSVTPLDIYDGKDFSLMATSLDEKVVSIHQDPKFKWPIIAAETEGQGTLVKVEMVISESCQKSKRKSVLAVGTANIKVKFGQNDANPNTSDSRHTGAGVHMENNVSDRRPKKPSQEWGSQEGQYYGSSSMGLMEGRGTTTDRSILQKKKGQESLLDDNSHLQTIPSDLTSFPAQVDLPRSNGEMDGNDLMQASKGLSDLEIGMYALLGVFCLAILVFLINCVTFALKYRHKQVPFEEQEGMSHSHDWVGLSNRTELLENHINFASSQDEQITAIDRGMDFEESKYLLSTNSQKSINGQLFKPLGPIIIDGKDQKSEPPTSPTSKRKRVKFTTFTAVSSDDEYPTRNSIVMSSEDDIKWVCQDLDPGDCKELHNYMERLHENV

SEQ ID NO: 91115 - protein, 984 aa, Homo sapiens
  Payload ID: 18217
  Gene Name: transmembrane protein 132E
  Uniprot ID: Q6IEE7
  ENSP ID: ENSP00000316532
MAPGMSGRGGAALLCLSALLAHASGRSHPASPSPPGPQASPVLPVSYRLSHTRLAFFLREARPPSPAVANSSLQRSEPFVVFQTKELPVLNVSLGPFSTSQVVARELLQPSSTLDIPERLTVNWKVRAFIVRSHVPASQPVVQVLFYVAGRDWDDFGVTERLPCVRLHAFRDAREHPLLRIGSISLFRPPPRRTLQEHRLDSNLMIRLPDRPLKPGEVLSILLYLAPNSSSPSSPSVEHFTLRVKAKKGVTLLGTKSRSGQWHVTSELLTGAKHSTATVDVAWAQSTPLPPREGQGPLEILQLDFEMENFTSQSVKRRIMWHIDYRGHGALPDLERAVTELTVIQRDVQAILPLAMDTEIINTAILTGRTVAIPVKVIAIEVNGLVLDISALVECESDNEDIIKVSSSCDYVFVSGKESRGSMNARVTFRYDVLNAPLEMTVWVPKLPLHIELSDARLSQVKGWRVPILPDRRSVRESEDEDEEEEERRQSASRGCTLQYQHATLQVFTQFHTTSSEGTDQVVTMLGPDWLVEVTDLVSDFMRVGDPRVAHMVDSSTLAGLEPGTTPFKVVSPLTEAVLGETLLTVTEEKVSITQLQAQVVASLALSLRPSPGSSHTILATTAAQQTLSFLKQEALLSLWLSYSDGTTAPLSLYSPRDYGLLVSSLDEHVATVTQDRAFPLVVAEAEGSGELLRAELTIAESCQKTKRKSVLATTPVGLRVHFGRDEEDPTYDYPGPSQPGPGGGEDEARGAGPPGSALPAPEAPGPGTASPVVPPTEDFLPLPTGFLQVPRGLTDLEIGMYALLGVFCLAILVFLINCIVFVLRYRHKRIPPEGQTSMDHSHHWVFLGNGQPLRVQGELSPPAGNPLETVPAFCHGDHHSSGSSQTSVQSQVHGRGDGSSGGSARDQAEDPASSPTSKRKRVKFTTFTTLPSEELAYDSVPAGEEDEEEEEDLGWGCPDVAGPTRPTAPPDLHNYMRRIKEIA

SEQ ID NO: 91116 - protein, 1074 aa, Homo sapiens
  Payload ID: 18217
  Gene Name: transmembrane protein 132E
  ENSP ID: ENSP00000487800
MAPGMSGRGGAALLCLSALLAHASGRSHPASPSPPGPQASPVLPVSYRLSHTRLAFFLREARPPSPAVANSSLQRSEPFVVFQTKELPVLNVSLGPFSTSQVVARELLQPSSTLDIPERLTVNWKVRAFIVRSHVPASQPVVQVLFYVAGRDWDDFGVTERLPCVRLHAFRDAREVKSSCRLSGGLATCLVRAELPLAWFGPPAPAAPPTARRKSPDGLEPEATGESQQAELYYTLHAPDASGGCGGSRRGAGPGVGARAESPTQHPLLRIGSISLFRPPPRRTLQEHRLDSNLMIRLPDRPLKPGEVLSILLYLAPNSSSPSSPSVEHFTLRVKAKKGVTLLGTKSRSGQWHVTSELLTGAKHSTATVDVAWAQSTPLPPREGQGPLEILQLDFEMENFTSQSVKRRIMWHIDYRGHGALPDLERAVTELTVIQRDVQAILPLAMDTEIINTAILTGRTVAIPVKVIAIEVNGLVLDISALVECESDNEDIIKVSSSCDYVFVSGKESRGSMNARVTFRYDVLNAPLEMTVWVPKLPLHIELSDARLSQVKGWRVPILPDRRSVRESEDEDEEEEERRQSASRGCTLQYQHATLQVFTQFHTTSSEGTDQVVTMLGPDWLVEVTDLVSDFMRVGDPRVAHMVDSSTLAGLEPGTTPFKVVSPLTEAVLGETLLTVTEEKVSITQLQAQVVASLALSLRPSPGSSHTILATTAAQQTLSFLKQEALLSLWLSYSDGTTAPLSLYSPRDYGLLVSSLDEHVATVTQDRAFPLVVAEAEGSGELLRAELTIAESCQKTKRKSVLATTPVGLRVHFGRDEEDPTYDYPGPSQPGPGGGEDEARGAGPPGSALPAPEAPGPGTASPVVPPTEDFLPLPTGFLQVPRGLTDLEIGMYALLGVFCLAILVFLINCIVFVLRYRHKRIPPEGQTSMDHSHHWVFLGNGQPLRVQGELSPPAGNPLETVPAFCHGDHHSSGSSQTSVQSQVHGRGDGSSGGSARDQAEDPASSPTSKRKRVKFTTFTTLPSEELAYDSVPAGEEDEEEEEDLGWGCPDVAGPTRPTAPPDLHNYMRRIKEIA

SEQ ID NO: 91117 - protein, 129 aa, Homo sapiens
  Payload ID: 18218
  Gene Name: transmembrane protein 133
  Uniprot ID: Q9H2Q1
  ENSP ID: ENSP00000303999
MTSHHCVGPGNHISWSGHEKEHRLDYCPEVTFPLTKGFPLGYTLLFNFASYPFLLPSKIKTLLRNKDSFLNILCPACLLLIRRCNIEYSSTGLNFLNTFTVSLIVTVIPLLQNVPVPLGNNVGKMQVYE

SEQ ID NO: 91118 - protein, 195 aa, Homo sapiens
  Payload ID: 18219
  Gene Name: transmembrane protein 134
  Uniprot ID: Q9H6X4
  ENSP ID: ENSP00000312615
MSAARPQFSIDDAFELSLEDGGPGPESSGVARFGPLHFERRARFEVADEDKQSRLRYQNLENDEDGAQASPEPDGGVGTRDSSRTSIRSSQWSFSTISSSTQRSYNTCCSWTQHPLIQKNRRVVLASFLLLLLGLVLILVGVGLEATPSPGVSSAIFFVPGFLLLVPGVYHVIFIYCAVKGHRGFQFFYLPYFEK

SEQ ID NO: 91119 - protein, 180 aa, Homo sapiens
  Payload ID: 18219
  Gene Name: transmembrane protein 134
  Uniprot ID: Q9H6X4
  ENSP ID: ENSP00000377455
MSAARPQFSIDDAFELSLEDGGPGPESSGVARFGPLHFERRARFEVADEDKQSRLRYQNLENDEDGAQASPEPDGGVGTRDSSRTSIRSSQWSFSTISSSTQRSYNTCCSWTQHPLIQKNRRVVLASFLLLLLGLGVSSAIFFVPGFLLLVPGVYHVIFIYCAVKGHRGFQFFYLPYFEK

SEQ ID NO: 91120 - protein, 192 aa, Homo sapiens
  Payload ID: 18219
  Gene Name: transmembrane protein 134
  Uniprot ID: Q9H6X4
  ENSP ID: ENSP00000438439
MSAARPQFSIDDAFELSLEDGGPGPESSGVARFGPLHFERRARFEVADEDKQSRLRYQNLENDEDGAQASPEPDGGVGTRDSSRTSIRSSQWSFSTISSSTQRSYNTCCSWTQHPLIQKNRRVVLASFLLLLLGLGPAQCLALETELGELPGEGLCLGHLQLRWWVSRAGGGSPRPHHCSCPHPRGSVCVQC

SEQ ID NO: 91121 - protein, 110 aa, Homo sapiens
  Payload ID: 18219
  Gene Name: transmembrane protein 134
  ENSP ID: ENSP00000440630
MSAARPQFSIDDAFELSLEDGGPGPESSGVARFGPLHFERRARFEVADEDKQSRLRYQNLENDEDGAQASPEPDGGVGTRLGPAPSGPSAPSAAAPSAPTTPAAAGPNTL

SEQ ID NO: 91122 - protein, 119 aa, Homo sapiens
  Payload ID: 18219
  Gene Name: transmembrane protein 134
  ENSP ID: ENSP00000441975
MSAARPQFSIDDAFELSLEDGGPGPESSGVARFGPLHFERRARFEVADEDKQSRLRYQNLENDEDGAQASPEPDGGVGTRLGPGIPAELPSAAPSGPSAPSAAAPSAPTTPAAAGPNTL

SEQ ID NO: 91123 - protein, 98 aa, Homo sapiens
  Payload ID: 18219
  Gene Name: transmembrane protein 134
  ENSP ID: ENSP00000481549
  MOD_RES (1)..(1): Any amino acid
XDSSRTSIRSSQWSFSTISSSTQRSYNTCCSWTQHPLIQKNRRVVLASFLLLLLGLVLILVGVGLEATPSPVYHVIFIYCAVKGHRGFQFFYLPYFEK

SEQ ID NO: 91124 - protein, 41 aa, Homo sapiens
  Payload ID: 18219
  Gene Name: transmembrane protein 134
  ENSP ID: ENSP00000483083
  MOD_RES (1)..(1): Any amino acid
XSTQRSYNTCCSWTQHPLIQKNRRVVLASFLLLLLGLGEWP

SEQ ID NO: 91125 - protein, 458 aa, Homo sapiens
  Payload ID: 18220
  Gene Name: transmembrane protein 135
  Uniprot ID: Q86UB9
  ENSP ID: ENSP00000306344
MAALSKSIPHNCYEIGHTWHPSCRVSFLQITGGALEESLKIYAPLYLIAAILRKRKLDYYLHKLLPEILQSASFLTANGALYMAFFCILRKILGKFYSWTPGFGAALPASYVAILIERKSRRGLLTIYMANLATETLFRMGVARGTITTLRNGEVLLFCITAAMYMFFFRCKDGLKGFTFSALRFIVGKEEIPTHSFSPEAAYAKVEQKREQHEEKPGRMNMIGLVRKFVDSICKHGPRHRCCKHYEDNCISYCIKGFIRMFSVGYLIQCCLRIPSAFRHLFTQPSRLLSLFYNKENFQLGAFLGSFVSIYKGTSCFLRWIRNLDDELHAIIAGFLAGISMMFYKSTTISMYLASKLVETMYFKGIEAGKVPYFPHADTIIYSISTAICFQAAVMEVQTLRPSYWKFLLRLTKGKFAVMNRKVLDVFGTGASKHFQDFIPRLDPRYTTVTPELPTEFS

SEQ ID NO: 91126 - protein, 436 aa, Homo sapiens
  Payload ID: 18220
  Gene Name: transmembrane protein 135
  Uniprot ID: Q86UB9
  ENSP ID: ENSP00000345513
MAALSKSIPHNCYEIGHTWHPSCRVSFLQITGGALEESLKIYAPLYLIAAILRKRKLDYYLHKLLPEILQSASFLTANGALYMAFFCILRKILGKFYSWTPGFGAALPASYVAILIERKSRRGLLTIYMANLVLLFCITAAMYMFFFRCKDGLKGFTFSALRFIVGKEEIPTHSFSPEAAYAKVEQKREQHEEKPGRMNMIGLVRKFVDSICKHGPRHRCCKHYEDNCISYCIKGFIRMFSVGYLIQCCLRIPSAFRHLFTQPSRLLSLFYNKENFQLGAFLGSFVSIYKGTSCFLRWIRNLDDELHAIIAGFLAGISMMFYKSTTISMYLASKLVETMYFKGIEAGKVPYFPHADTIIYSISTAICFQAAVMEVQTLRPSYWKFLLRLTKGKFAVMNRKVLDVFGTGASKHFQDFIPRLDPRYTTVTPELPTEFS

SEQ ID NO: 91127 - protein, 123 aa, Homo sapiens
  Payload ID: 18220
  Gene Name: transmembrane protein 135
  ENSP ID: ENSP00000433674
MAALSKSIPHNCYEIGHTWHPSCRVSFLQITGGALEESLKIYAPLYLIAAILRKRKLDYYLHKLLPEILQSASFLTANGALYMAFFCILRRGLLTIYMANLATETLFRMGVARGTITTLRNGE

SEQ ID NO: 91128 - protein, 230 aa, Homo sapiens
  Payload ID: 18220
  Gene Name: transmembrane protein 135
  ENSP ID: ENSP00000433927
MAALSKSIPHNCYEIGHTWHPSCRVSFLQITGGALEESLKIYAPLYLIAAILRKRKLDYYLHKLLPEILQSASFLTANGALYMAFFCILRKILGKFYSWTPGFGAALPASYVAILIERKSRRGLLTIYMANLTESRFVAQAGVQWCDLSSLQPAPPGFKRFLFLSHLSSWDYRFVPPCLANFCIFVEMRFHHVSQAGLEFLALSDPPALASQSAEITGVSHCAWPKNKIF

SEQ ID NO: 91129 - protein, 329 aa, Homo sapiens
  Payload ID: 18220
  Gene Name: transmembrane protein 135
  ENSP ID: ENSP00000436179
MRSATETLFRMGVARGTITTLRNGEVLLFCITAAMYMFFFRCKDGLKGFTFSALRFIVGKEEIPTHSFSPEAAYAKVEQKREQHEEKPGRMNMIGLVRKFVDSICKHGPRHRCCKHYEDNCISYCIKGFIRMFSVGYLIQCCLRIPSAFRHLFTQPSRLLSLFYNKENFQLGAFLGSFVSIYKGTSCFLRWIRNLDDELHAIIAGFLAGISMMFYKSTTISMYLASKLVETMYFKGIEAGKVPYFPHADTIIYSISTAICFQAAVMEVQTLRPSYWKFLLRLTKGKFAVMNRKVLDVFGTGASKHFQDFIPRLDPRYTTVTPELPTEFS

SEQ ID NO: 91130 - protein, 267 aa, Homo sapiens
  Payload ID: 18221
  Gene Name: transmembrane protein 136
  Uniprot ID: Q6ZRR5
  ENSP ID: ENSP00000312672
MTQCCFLRVHPLFFWFWSFHHRMALALCLQVLCSLCGWLSLYISFCHLNKHRSYEWSCRLVTFTHGVLSIGLSAYIGFIDGPWPFTHPGSPNTPLQVHVLCLTLGYFIFDLGWCVYFQSEGALMLAHHTLSILGIIMALVLGESGTEVNAVLFGSELTNPLLQMRWFLRETGHYHSFTGDVVDFLFVALFTGVRIGVGACLLFCEMVSPTPKWFVKAGGVAMYAVSWCFMFSIWRFAWRKSIKKYHAWRSRRSEERQLKHNGHLKIH

SEQ ID NO: 91131 - protein, 245 aa, Homo sapiens
  Payload ID: 18221
  Gene Name: transmembrane protein 136
  Uniprot ID: Q6ZRR5
  ENSP ID: ENSP00000364236
MALALCLQVLCSLCGWLSLYISFCHLNKHRSYEWSCRLVTFTHGVLSIGLSAYIGFIDGPWPFTHPGSPNTPLQVHVLCLTLGYFIFDLGWCVYFQSEGALMLAHHTLSILGIIMALVLGESGTEVNAVLFGSELTNPLLQMRWFLRETGHYHSFTGDVVDFLFVALFTGVRIGVGACLLFCEMVSPTPKWFVKAGGVAMYAVSWCFMFSIWRFAWRKSIKKYHAWRSRRSEERQLKHNGHLKIH

SEQ ID NO: 91132 - protein, 148 aa, Homo sapiens
  Payload ID: 18221
  Gene Name: transmembrane protein 136
  Uniprot ID: Q6ZRR5
  ENSP ID: ENSP00000434862
MTQCCFLRVHPLFFWFWSFHHRMALALCLQVLCSLCGWLSLYISFCHLNKHRSYEWSCRLVTFTHGVLSIGLSAYIGFIDGPWPFTHPGSPNTPLQVHVLCLTLGYFIFDLGCIWRFAWRKSIKKYHAWRSRRSEERQLKHNGHLKIH

SEQ ID NO: 91133 - protein, 162 aa, Homo sapiens
  Payload ID: 18222
  Gene Name: transmembrane protein 138
  Uniprot ID: Q9NPI0
  ENSP ID: ENSP00000278826
MLQTSNYSLVLSLQFLLLSYDLFVNSFSELLQKTPVIQLVLFIIQDIAVLFNIIIIFLMFFNTFVFQAGLVNLLFHKFKGTIILTAVYFALSISLHVWVMNLRWKNSNSFIWTDGLQMLFVFQRLAAVLYCYFYKRTAVRLGDPHFYQDSLWLRKEFMQVRR

SEQ ID NO: 91134 - protein, 104 aa, Homo sapiens
  Payload ID: 18222
  Gene Name: transmembrane protein 138
  ENSP ID: ENSP00000371206
MFFNTFVFQAGLVNLLFHKFKGTIILTAVYFALSISLHVWVMNLRWKNSNSFIWTDGLQMLFVFQRLAAVLYCYFYKRTAVRLGDPHFYQDSLWLRKEFMQVRR

SEQ ID NO: 91135 - protein, 105 aa, Homo sapiens
  Payload ID: 18222
  Gene Name: transmembrane protein 138
  Uniprot ID: Q9NPI0
  ENSP ID: ENSP00000445792
MLQTSNYSLVLSLQFLLLSYDLFVNSFSELLQKTPVIQLVLFIIQDIAVLFNIIIIFLMFFNTFVFQAGLVNLLFHKFKGTIILTAVYFALSISLHVWVMVRVAV

SEQ ID NO: 91136 - protein, 216 aa, Homo sapiens
  Payload ID: 18223
  Gene Name: transmembrane protein 139
  Uniprot ID: Q8IV31
  ENSP ID: ENSP00000352284
MVPMHLLGRLEKPLLLLCCASFLLGLALLGIKTDITPVAYFFLTLGGFFLFAYLLVRFLEWGLRSQLQSMQTESPGPSGNARDNEAFEVPVYEEAVVGLESQCRPQELDQPPPYSTVVIPPAPEEEQPSHPEGSRRAKLEQRRMASEGSMAQEGSPGRAPINLRLRGPRAVSTAPDLQSLAAVPTLEPLTPPPAYDVCFGHPDDDSVFYEDNWAPP

SEQ ID NO: 91137 - protein, 216 aa, Homo sapiens; identical to SEQ ID NO: 91136
  Payload ID: 18223
  Gene Name: transmembrane protein 139
  Uniprot ID: Q8IV31
  ENSP ID: ENSP00000386335

SEQ ID NO: 91138 - protein, 216 aa, Homo sapiens; identical to SEQ ID NO: 91136
  Payload ID: 18223
  Gene Name: transmembrane protein 139
  Uniprot ID: Q8IV31
  ENSP ID: ENSP00000386564

SEQ ID NO: 91139 - protein, 216 aa, Homo sapiens; identical to SEQ ID NO: 91136
  Payload ID: 18223
  Gene Name: transmembrane protein 139
  Uniprot ID: Q8IV31
  ENSP ID: ENSP00000386879

SEQ ID NO: 91140 - protein, 216 aa, Homo sapiens; identical to SEQ ID NO: 91136
  Payload ID: 18223
  Gene Name: transmembrane protein 139
  Uniprot ID: Q8IV31
  ENSP ID: ENSP00000387044

SEQ ID NO: 91141 - protein, 185 aa, Homo sapiens
  Payload ID: 18224
  Gene Name: transmembrane protein 140
  Uniprot ID: Q9NV12
  ENSP ID: ENSP00000275767
MAGPRPRWRDQLLFMSIIVLVIVVICLMFYALLWEAGNLTDLPNLRIGFYNFCLWNEDTSTLQCHQFPELEALGVPRVGLGLARLGVYGSLVLTLFAPQPLLLAQCNSDERAWRLAVGFLAVSSVLLAGGLGLFLSYVWKWVRLSLPGPGFLALGSAQALLILLLIAMAVFPLRAERAESKLESC

SEQ ID NO: 91142 - protein, 108 aa, Homo sapiens
  Payload ID: 18225
  Gene Name: transmembrane protein 141
  Uniprot ID: Q96I45
  ENSP ID: ENSP00000290079
MVNLGLSRVDDAVAAKHPGLGEYAACQSHAFMKGVFTFVTGTGMAFGLQMFIQRKFPYPLQWSLLVAVVAGSVVSYGVTRVESEKCNNLWLFLETGQLPKDRSTDQRS

SEQ ID NO: 91143 - protein, 459 aa, Homo sapiens
  Payload ID: 18226
  Gene Name: transmembrane protein 143
  Uniprot ID: Q96AN5
  ENSP ID: ENSP00000293261
MTVELWLRLRGKGLAMLHVTRGVWGSRVRVWPLLPALLGPPRALSSLAAKMGEYRKMWNPREPRDWAQQYRERFIPFSKEQLLRLLIQEFHSSPAEKAALEAFSAHVDFCTLFHYHQILARLQALYDPINPDRETLDQPSLTDPQRLSNEQEVLRALEPLLAQANFSPLSEDTLAYALVVHHPQDEVQVTVNLDQYVYIHFWALGQRVGQMPLKSSVGSRRGFFTKLPPAERRYFKRVVLAARTKRGHLVLKSFKDTPLEGLEQLLPELKVRTPTLQRALLNLMLVVSGVAIFVNVGMVVLTDLKVATSLLLLLFAIFMGLRASKMFGQRRSAQALELAHMLYYRSTSNNSELLSALALRAQDEHTKEALLAHSFLARRPGGTQGSPEETSRWLRSEVENWLLAKSGCEVTFNGTRALAHLQALTPSMGLYPPPGFPKLDPVAPITSEPPQATPSSNIS

SEQ ID NO: 91144 - protein, 359 aa, Homo sapiens
  Payload ID: 18226
  Gene Name: transmembrane protein 143
  Uniprot ID: Q96AN5
  ENSP ID: ENSP00000366649
MTVELWLRLRGKGLAMLHVTRGVWGSRVRVWPLLPALLGPPRALSSLAAKMGEYRKMWNPREPRDWAQQYRERFIPFSKEQLLRLLIQVTVNLDQYVYIHFWALGQRVGQMPLKSSVGSRRGFFTKLPPAERRYFKRVVLAARTKRGHLVLKSFKDTPLEGLEQLLPELKVRTPTLQRALLNLMLVVSGVAIFVNVGMVVLTDLKVATSLLLLLFAIFMGLRASKMFGQRRSAQALELAHMLYYRSTSNNSELLSALALRAQDEHTKEALLAHSFLARRPGGTQGSPEETSRWLRSEVENWLLAKSGCEVTFNGTRALAHLQALTPSMGLYPPPGFPKLDPVAPITSEPPQATPSSNIS

SEQ ID NO: 91145 - protein, 424 aa, Homo sapiens
  Payload ID: 18226
  Gene Name: transmembrane protein 143
  ENSP ID: ENSP00000397038
MTVELWLRLRGKGLAMLHVTRGVWGSRVRVWPLLPALLGPPRALSSLAAKMGEYRKMWNPREPRDWAQQYRERFIPFSKEQLLRLLIQALYDPINPDRETLDQPSLTDPQRLSNEQEVLRALEPLLAQANFSPLSEDTLAYALVVHHPQDEVQVTVNLDQYVYIHFWALGQRVGQMPLKSSVGSRRGFFTKLPPAERRYFKRVVLAARTKRGHLVLKSFKDTPLEGLEQLLPELKVRTPTLQRALLNLMLVVSGVAIFVNVGMVVLTDLKVATSLLLLLFAIFMGLRASKMFGQRRSAQALELAHMLYYRSTSNNSELLSALALRAQDEHTKEALLAHSFLARRPGGTQGSPEETSRWLRSEVENWLLAKSGCEVTFNGTRALAHLQALTPSMGLYPPPGFPKLDPVAPITSEPPQATPSSNIS

SEQ ID NO: 91146 - protein, 135 aa, Homo sapiens
  Payload ID: 18226
  Gene Name: transmembrane protein 143
  ENSP ID: ENSP00000470195
MLHVTRGVWGSRVRVWPLLPALLGPPRALSSLAAKMGEYRKMWNPREPRDWAQQYRERFIPFSKEQLLRLLIQEFHSSPAEKAALEAFSAHVDFCTLFHYHQILARLQALYDPINPDRETLDQPSLTDPQRLSNE

SEQ ID NO: 91147 - protein, 102 aa, Homo sapiens
  Payload ID: 18226
  Gene Name: transmembrane protein 143
  ENSP ID: ENSP00000471640
MTVELWLRLRGKGLAMLHVTRGVWGSRVRVWPLLPALLGPPRALSSLAAKMGEYRKMWNPREPRDWAQQYRERFIPFSKEQLLRLLIQRQDFTMLATLVLNS

SEQ ID NO: 91148 - protein, 170 aa, Homo sapiens
  Payload ID: 18226
  Gene Name: transmembrane protein 143
  ENSP ID: ENSP00000471875
MGSAPCLGLRGKGLAMLHVTRGVWGSRVRVWPLLPALLGPPRALSSLAAKMGEYRKMWNPREPRDWAQQYRERFIPFSKEQLLRLLIQEFHSSPAEKAALEAFSAHVDFCTLFHYHQILARLQVTVNLDQYVYIHFWALGQRVGQMPLKSSVGSRRGFFTKLPPAERRYF

SEQ ID NO: 91149 - protein, 93 aa, Homo sapiens
  Payload ID: 18226
  Gene Name: transmembrane protein 143
  ENSP ID: ENSP00000472952
MTVELWLRLRGKGLAMLHVTRGVWGSRVRVWPLLPALLGPPRALSSLAAKMGEYRKMWNPREPRDWAQQYRERFIPFSKEQLLRLLIQSLDVV

SEQ ID NO: 91150 - protein, 345 aa, Homo sapiens
  Payload ID: 18227
  Gene Name: transmembrane protein 144
  Uniprot ID: Q7Z5S9
  ENSP ID: ENSP00000296529
MSNNGADLTFGYISCFVAILLFGSNFVPLKKFDTGDGMFLQWVLCAAIWLVALVVNLILHCPKFWPFAMLGGCIWATGNIAVVPIIKTIGLGLGILIWGSFNALTGWASSRFGWFGLDAEEVSNPLLNYIGAGLSVVSAFIFLFIKSEIPNNTCSMDTTPLITEHVINTTQDPCSWVDKLSTVHHRIVGCSLAVISGVLYGSTFVPIIYIKDHSKRNDSIYAGASQYDLDYVFAHFSGIFLTSTVYFLAYCIAMKNSPKLYPEAVLPGFLSGVLWAIATCCWFIANHSLSAVVSFPIITAGPGFIAAMWGIFMFKEIKGLQNYLLMILAFCIILTGALCTAFSKI

SEQ ID NO: 91151 - protein, 194 aa, Homo sapiens
  Payload ID: 18227
  Gene Name: transmembrane protein 144
  ENSP ID: ENSP00000420930
MSNNGADLTFGYISCFVAILLFGSNFVPLKKFDTGDGMFLQWVLCAAIWLVALVVNLILHCPKFWPFAMLGGCIWATGNIAVVPIIKTIGLGLGILIWGSFNALTGWASSRFGWFGLDAEEVSNPLLNYIGAGLSVVSAFIFLFIKSEIPNNTCSMDTTPLITEHGLQSCSDIWSTLWIYICANHLHQGPQQKK

SEQ ID NO: 91152 - protein, 110 aa, Homo sapiens
  Payload ID: 18227
  Gene Name: transmembrane protein 144
  ENSP ID: ENSP00000420990
MSNNGADLTFGYISCFVAILLFGSNFVPLKKFDTGDGMFLQWVLCAAIWLVALVVNLILHCPKFWPFAMLGGCIWATGNIAVVPIIKTIGLGLGILIWGSFNALTGWASS

SEQ ID NO: 91153 - protein, 87 aa, Homo sapiens
  Payload ID: 18227
  Gene Name: transmembrane protein 144
  ENSP ID: ENSP00000421289
MSNNGADLTFGYISCFVAILLFGSNFVPLKKFDTGDGMFLQWVLCAAIWLVALVVNLILHCPKFWPFAMLGGCIWATGNIAVVPIIK

SEQ ID NO: 91154 - protein, 137 aa, Homo sapiens
  Payload ID: 18227
  Gene Name: transmembrane protein 144
  ENSP ID: ENSP00000422082
MSNNGADLTFGYISCFVAILLFGSNFVPLKKFDTGDGMFLQWVLCAAIWLVALVVNLILHCPKFWPFAMLGGCIWATGNIAVVPIIKTIGLGLGILIWGSFNALTGWASSRFGWFGLDAEEVSNPLLNYIGAGLSVV

SEQ ID NO: 91155 - protein, 10 aa, Homo sapiens
  Payload ID: 18227
  Gene Name: transmembrane protein 144
  ENSP ID: ENSP00000422255
MSNNGADLTF

SEQ ID NO: 91156 - protein, 167 aa, Homo sapiens
  Payload ID: 18227
  Gene Name: transmembrane protein 144
  ENSP ID: ENSP00000422297
MSNNGADLTFGYISCFVAILLFGSNFVPLKKFDTGDGMFLQWVLCAAIWLVALVVNLILHCPKFWPFAMLGGCIWATGNIAVVPIIKTIGLGLGILIWGSFNALTGWASSRFGWFGLDAEEVSNPLLNYIGAGLSVVSAFIFLFIKSEIPNNTCSMDTTPLITEHVI

SEQ ID NO: 91157 - protein, 91 aa, Homo sapiens
  Payload ID: 18227
  Gene Name: transmembrane protein 144
  ENSP ID: ENSP00000422899
MSNNGADLTFGYISCFVAILLFGSNFVPLKKFDTGDGMFLQWVLCAAIWLVALVVNLILHCPKFWPFAMLGGCIWATGNIAVVPIIKTIGL

SEQ ID NO: 91158 - protein, 87 aa, Homo sapiens; identical to SEQ ID NO: 91153
  Payload ID: 18227
  Gene Name: transmembrane protein 144
  ENSP ID: ENSP00000424659

SEQ ID NO: 91159 - protein, 77 aa, Homo sapiens
  Payload ID: 18227
  Gene Name: transmembrane protein 144
  ENSP ID: ENSP00000425266
MSNNGADLTFGYISCFVAILLFGSNFVPLKKFDTGDGMFLQWVLCAAIWLVALVVNLILHCPKFWPFAMLGGCIWAT

SEQ ID NO: 91160 - protein, 73 aa, Homo sapiens
  Payload ID: 18227
  Gene Name: transmembrane protein 144
  ENSP ID: ENSP00000425815
MSNNGADLTFGYISCFVAILLFGSNFVPLKKFDTGDGNYFSLIVNVILFLKMKFLFWSFKSIATKINHVDLDT

SEQ ID NO: 91161 - protein, 77 aa, Homo sapiens; identical to SEQ ID NO: 91159
  Payload ID: 18227
  Gene Name: transmembrane protein 144
  ENSP ID: ENSP00000425907

SEQ ID NO: 91162 - protein, 169 aa, Homo sapiens
  Payload ID: 18227
  Gene Name: transmembrane protein 144
  Uniprot ID: Q7Z5S9
  ENSP ID: ENSP00000426211
MSNNGADLTFGYISCFVAILLFGSNFVPLKKFDTGDGMFLQWVLCAAIWLVALVVNLILHCPKFWPFAMLGGCIWATGNIAVVPIIKTIGLGLGILIWGSFNALTGWASSRFGWFGLDAEEVSNPLLNYIGAGLSVVSAFIFLFIKSEIPNNTCSMDTTPLITEHVSIV

SEQ ID NO: 91163 - protein, 493 aa, Homo sapiens
  Payload ID: 18228
  Gene Name: transmembrane protein 145
  Uniprot ID: Q8NBT3
  ENSP ID: ENSP00000301204
MEPLRAPALRRLLPPLLLLLLSLPPRARAKYVRGNLSSKEDWVFLTRFCFLSDYGRLDFRFRYPEAKCCQNILLYFDDPSQWPAVYKAGDKDCLAKESVIRPENNQVINLTTQYAWSGCQVVSEEGTRYLSCSSGRSFRSGDGLQLEYEMVLTNGKSFWTRHFSADEFGILETDVTFLLIFILIFFLSCYFGYLLKGRQLLHTTYKMFMAAAGVEVLSLLFFCIYWGQYATDGIGNESVKILAKLLFSSSFLIFLLMLILLGKGFTVTRGRISHAGSVKLSVYMTLYTLTHVVLLIYEAEFFDPGQVLYTYESPAGYGLIGLQVAAYVWFCYAVLVSLRHFPEKQPFYVPFFAAYTLWFFAVPVMALIANFGIPKWAREKIVNGIQLGIHLYAHGVFLIMTRPSAANKNFPYHVRTSQIASAGVPGPGGSQSADKAFPQHVYGNVTFISDSVPNFTELFSIPPPATSPLPRAAPDSGLPLFRDLRPPGPLRDL

SEQ ID NO: 91164 - protein, 78 aa, Homo sapiens
  Payload ID: 18228
  Gene Name: transmembrane protein 145
  ENSP ID: ENSP00000470602
HPQVGPGEDCQWHPAGDPLVRPWRVSGSPASASGVAGTTGARHHARRDGVSLCWPGWSRSPDLMIRPPRPPKVLGLQE

SEQ ID NO: 91165 - protein, 488 aa, Homo sapiens
  Payload ID: 18228
  Gene Name: transmembrane protein 145
  ENSP ID: ENSP00000470827
MEPLRAPALRRLLPPLLLLLLSLPPRARAKYVRGNLSSKEDWVFLTRFCFLSDYGRLDFRFRYPELPVPNISGLQAKCCQNILLYFDDPSQWPAVYKAGDKDCLAKESVIRPENNQVINLTTQYAWSGCQVVSEEGTRYLSCSSGRSFRSVRERWWYIALSKCGGDGLQLEYEMVLTNGKSFWTRHFSADEFGILETDVTFLLIFILIFFLSCYFGYLLKGRQLLHTTYKMFMAAAGVEVLSLLFFCIYWGQYATDGIGNESVKILAKLLFSSSFLIFLLMLILLGKGFTVTRGRISHAGSVKLSVYMTLYTLTHVVLLIYEAEFFDPGQVLYTYESPAGYGLIGLQVAAYVWFCYAVLVSLRHFPEKQPFYVPFFAAYTLWFFAVPVMALIANFGIPKWAREKIVNGIQLGIHLYAHGVFLILPFLFCIPTAFPTLLDLSTLPLPLPKFCHHRPLFRKKHLGWHRVKLLGSWVGNRRVQHHIFFFFF

SEQ ID NO: 91166 - protein, 224 aa, Homo sapiens
  Payload ID: 18229
  Gene Name: transmembrane protein 147
  Uniprot ID: Q9BVK8
  ENSP ID: ENSP00000222284
MTLFHFGNCFALAYFPYFITYKCSGLSEYNAFWKCVQAGVTYLFVQLCKMLFLATFFPTWEGGIYDFIGEFMKASVDVADLIGLNLVMSRNAGKGEYKIMVAALGWATAELIMSRCIPLWVGARGIEFDWKYIQMSIDSNISLVHYIVASAQVWMITRYDLYHTFRPAVLLLMFLSVYKAFVMETFVHLCSLGSWAALLARAVVTGLLALSTLALYVAVVNVHS

SEQ ID NO: 91167 - protein, 175 aa, Homo sapiens
  Payload ID: 18229
  Gene Name: transmembrane protein 147
  Uniprot ID: Q9BVK8
  ENSP ID: ENSP00000376040
MLFLATFFPTWEGGIYDFIGEFMKASVDVADLIGLNLVMSRNAGKGEYKIMVAALGWATAELIMSRCIPLWVGARGIEFDWKYIQMSIDSNISLVHYIVASAQVWMITRYDLYHTFRPAVLLLMFLSVYKAFVMETFVHLCSLGSWAALLARAVVTGLLALSTLALYVAVVNVHS

SEQ ID NO: 91168 - protein, 184 aa, Homo sapiens
  Payload ID: 18229
  Gene Name: transmembrane protein 147
  ENSP ID: ENSP00000376041
MTLFHFGNCFALAYFPYFITYKCSGLSEYNAFWKCVQAGVTYLFVQLCKMLFLATFFPTWEGGIYDFIGEFMKASVDVADLIGLNLVMSRNAGKGEYKIMVAALGWATAELIMSRCIPLWVGARGIEFDWKYIQMSIDSNISLVHYIVASAQVWMITRYDLYHTFRPAVLLLMFLSVYKAFVME

SEQ ID NO: 91169 - protein, 31 aa, Homo sapiens
  Payload ID: 18229
  Gene Name: transmembrane protein 147
  ENSP ID: ENSP00000466262
MRPGWSHLPLCPTLQDAVLGHFLSHLGRRHL

SEQ ID NO: 91170 - protein, 99 aa, Homo sapiens
  Payload ID: 18230
  Gene Name: transmembrane protein 14A
  Uniprot ID: Q9Y6G1
  ENSP ID: ENSP00000211314
MDLIGFGYAALVTFGSIFGYKRRGGVPSLIAGLFVGCLAGYGAYRVSNDKRDVKVSLFTAFFLATIMGVRFKRSKKIMPAGLVAGLSLMMILRLVLLLL

SEQ ID NO: 91171 - protein, 80 aa, Homo sapiens
  Payload ID: 18231
  Gene Name: transmembrane protein 14B
  Uniprot ID: Q9NUH8
  ENSP ID: ENSP00000368845
MEKPLFPLVPLHWFGFGYTALVVSGGIVGYVKTAATSVTFVGVMGMRSYYYGKFMPVGLIAGASLLMAAKVGVRMLMTSD

SEQ ID NO: 91172 - protein, 114 aa, Homo sapiens
  Payload ID: 18231
  Gene Name: transmembrane protein 14B
  Uniprot ID: Q9NUH8
  ENSP ID: ENSP00000368858
MEKPLFPLVPLHWFGFGYTALVVSGGIVGYVKTGSVPSLAAGLLFGSLAGLGAYQLYQDPRNVWGFLAATSVTFVGVMGMRSYYYGKFMPVGLIAGASLLMAAKVGVRMLMTSD

SEQ ID NO: 91173 - protein, 35 aa, Homo sapiens
  Payload ID: 18231
  Gene Name: transmembrane protein 14B
  ENSP ID: ENSP00000417095
MEKPLFPLVPLHWFGFGYTALVVSGGIVGYVKTGI

SEQ ID NO: 91174 - protein, 35 aa, Homo sapiens; identical to SEQ ID NO: 91173
  Payload ID: 18231
  Gene Name: transmembrane protein 14B
  ENSP ID: ENSP00000417416

SEQ ID NO: 91175 - protein, 101 aa, Homo sapiens
  Payload ID: 18231
  Gene Name: transmembrane protein 14B
  ENSP ID: ENSP00000418334
MEKPLFPLVPLHWFGFGYTALVVSGGIVGYVKTAATSVTFVGVMGMRSYYYGKFMPVGLIAGARYFHSITLLYHVEFSLLPRILYAFKTLLVSEYLMLCIN

SEQ ID NO: 91176 - protein, 135 aa, Homo sapiens
  Payload ID: 18231
  Gene Name: transmembrane protein 14B
  ENSP ID: ENSP00000418730
MEKPLFPLVPLHWFGFGYTALVVSGGIVGYVKTGSVPSLAAGLLFGSLAGLGAYQLYQDPRNVWGFLAATSVTFVGVMGMRSYYYGKFMPVGLIAGARYFHSITLLYHVEFSLLPRILYAFKTLLVSEYLMLCIN

SEQ ID NO: 91177 - protein, 47 aa, Homo sapiens
  Payload ID: 18231
  Gene Name: transmembrane protein 14B
  ENSP ID: ENSP00000418927
VSGGIVGYVKTGSVPSLAAGLLFGSLAGLGAYQLYQDPRNVWGFLGI

SEQ ID NO: 91178 - protein, 35 aa, Homo sapiens; identical to SEQ ID NO: 91173
  Payload ID: 18231
  Gene Name: transmembrane protein 14B
  ENSP ID: ENSP00000419156

SEQ ID NO: 91179 - protein, 35 aa, Homo sapiens; identical to SEQ ID NO: 91173
  Payload ID: 18231
  Gene Name: transmembrane protein 14B
  ENSP ID: ENSP00000419208

SEQ ID NO: 91180 - protein, 59 aa, Homo sapiens
  Payload ID: 18231
  Gene Name: transmembrane protein 14B
  ENSP ID: ENSP00000419731
  MOD_RES (1)..(1): Any amino acid
XSLAGLGAYQLYQDPRNVWGFLAATSVTFVGVMGMRSYYYGKFMPVGLIAGARNLENCI

SEQ ID NO: 91181 - protein, 35 aa, Homo sapiens; identical to SEQ ID NO: 91173
  Payload ID: 18231
  Gene Name: transmembrane protein 14B
  ENSP ID: ENSP00000419806

SEQ ID NO: 91182 - protein, 117 aa, Homo sapiens
  Payload ID: 18231
  Gene Name: transmembrane protein 14B
  ENSP ID: ENSP00000420172
MEKPLFPLVPLHWFGFGYTALVVSGGIVGYVKTAATSVTFVGVMGMRSYYYGKFMPVGLIAGARWSMALVAQAGVQWCDLSSLQPPPPRFKRFSCLTLLSSWDFRCAPPHPANFLYF

SEQ ID NO: 91183 - protein, 53 aa, Homo sapiens
  Payload ID: 18231
  Gene Name: transmembrane protein 14B
  ENSP ID: ENSP00000420580
MEKPLFPFRYICYFCWCYGNEILLLWKIHACRFNCRCQFADGRQSWSSYVDDI

SEQ ID NO: 91184 - protein, 151 aa, Homo sapiens
  Payload ID: 18231
  Gene Name: transmembrane protein 14B
  ENSP ID: ENSP00000420658
MEKPLFPLVPLHWFGFGYTALVVSGGIVGYVKTGSVPSLAAGLLFGSLAGLGAYQLYQDPRNVWGFLAATSVTFVGVMGMRSYYYGKFMPVGLIAGARWSMALVAQAGVQWCDLSSLQPPPPRFKRFSCLTLLSSWDFRCAPPHPANFLYF

SEQ ID NO: 91185 - protein, 103 aa, Homo sapiens
  Payload ID: 18231
  Gene Name: transmembrane protein 14B
  ENSP ID: ENSP00000478448
MQAWGSLLSGLRREEWRSPSSHCSVPSLAAGLLFGSLAGLGAYQLYQDPRNVWGFLAATSVTFVGVMGMRSYYYGKFMPVGLIAGASLLMAAKVGVRMLMTSD

SEQ ID NO: 91186 - protein, 112 aa, Homo sapiens
  Payload ID: 18232
  Gene Name: transmembrane protein 14C
  Uniprot ID: Q9P0S9
  ENSP ID: ENSP00000229563
MQDTGSVVPLHWFGFGYAALVASGGIIGYVKAGSVPSLAAGLLFGSLAGLGAYQLSQDPRNVWVFLATSGTLAGIMGMRFYHSGKFMPAGLIAGASLLMVAKVGVSMFNRPH

SEQ ID NO: 91187 - protein, 112 aa, Homo sapiens; identical to SEQ ID NO: 91186
  Payload ID: 18232
  Gene Name: transmembrane protein 14C
  Uniprot ID: Q9P0S9
  ENSP ID: ENSP00000444561

SEQ ID NO: 91188 - protein, 125 aa, Homo sapiens
  Payload ID: 18233
  Gene Name: transmembrane protein 14E, pseudogene
  Uniprot ID: Q6UXP3
  ENSP ID: ENSP00000386163
MQMDPGPQVPLYWLGFVYAALAALGGISGYAKVGSVQSPSAGFFFSELAGLDASQPSRNPKEHLSSPVYIWDLARYYANKILTLWNIYACGFSCRCLLIVSKLGSMYGEQILSVVAMSQLGLMKN

SEQ ID NO: 91189 - protein, 218 aa, Homo sapiens
  Payload ID: 18234
  Gene Name: transmembrane protein 150A
  Uniprot ID: Q86TG1
  ENSP ID: ENSP00000302715
MYALWRTGPTTSPALLTLLSKGVPRPAAPWTMSPSSVALICLLRYGQLLEQSRHSWVNTTALITGCTNAAGLLVVGNFQVDHARSLHYVGAGVAFPAGLLFVCLHCALSYQGATAPLDLAVAYLRSVLAVIAFITLVLSGVFFVHESSQLQHGAALCEWVCVIDILIFYGTFSYEFGAVSSDTLVAALQPTPGRACKSSGSSSTSTHLNCAPESIAMI

SEQ ID NO: 91190 - protein, 271 aa, Homo sapiens
  Payload ID: 18234
  Gene Name: transmembrane protein 150A
  Uniprot ID: Q86TG1
  ENSP ID: ENSP00000334708
MTAWILLPVSLSAFSITGIWTVYAMAVMNHHVCPVENWSYNESCPPDPAEQGGPKTCCTLDDVPLISKCGSYPPESCLFSLIGNMGAFMVALICLLRYGQLLEQSRHSWVNTTALITGCTNAAGLLVVGNFQVDHARSLHYVGAGVAFPAGLLFVCLHCALSYQGATAPLDLAVAYLRSVLAVIAFITLVLSGVFFVHESSQLQHGAALCEWVCVIDILIFYGTFSYEFGAVSSDTLVAALQPTPGRACKSSGSSSTSTHLNCAPESIAMI

SEQ ID NO: 91191 - protein, 271 aa, Homo sapiens; identical to SEQ ID NO: 91190
  Payload ID: 18234
  Gene Name: transmembrane protein 150A
  Uniprot ID: Q86TG1
  ENSP ID: ENSP00000387292

SEQ ID NO: 91192 - protein, 45 aa, Homo sapiens
  Payload ID: 18234
  Gene Name: transmembrane protein 150A
  ENSP ID: ENSP00000388247
MYALWRTGMKDSADNLALKLPSSLSPLGPEAATSQTATLSLTALL

SEQ ID NO: 91193 - protein, 67 aa, Homo sapiens
  Payload ID: 18234
  Gene Name: transmembrane protein 150A
  ENSP ID: ENSP00000394945
MYALWRTGPTTSPALLTLLSKGVPRPAAPWTMSPSSVALICLLRYGQLLEQSRHSWVNTTALITGCT

SEQ ID NO: 91194 - protein, 59 aa, Homo sapiens
  Payload ID: 18234
  Gene Name: transmembrane protein 150A
  ENSP ID: ENSP00000401631
MTAWILLPVSLSAFSITGIWTVYAMAVMNHHVCPVENWYEGLCRQPCSKASFISVPSWA

SEQ ID NO: 91195 - protein, 45 aa, Homo sapiens; identical to SEQ ID NO: 91192
  Payload ID: 18234
  Gene Name: transmembrane protein 150A
  ENSP ID: ENSP00000409224

SEQ ID NO: 91196 - protein, 233 aa, Homo sapiens
  Payload ID: 18235
  Gene Name: transmembrane protein 150B
  Uniprot ID: A6NC51
  ENSP ID: ENSP00000320757
MWGYLSLMPVFLAVWAISGVWIVFAIAVTNRTVDLSKGFPYISICGSFPPQSCIFSQVLNMGAALAAWICIVRYHQLRDWGVRRWPNQLILWTGLLCALGTSVVGNFQEKNQRPTHLAGAFLAFILGNVYFWLQLLLWRLKRLPQPGAAWIGPLRLGLCSVCTILIVAMIVLHACSLRSVSAACEWVVAMLLFALFGLLAVDFSALESCTLCVQPWPSLSPPPASPISLPVQL

SEQ ID NO: 91197 - protein, 152 aa, Homo sapiens
  Payload ID: 18235
  Gene Name: transmembrane protein 150B
  ENSP ID: ENSP00000465672
GSFPPQSCIFSQVLNMGAALAAWICIVRYHQLRDWGVRRWPNQLILWTGLLCALGTSVVGNFQEKNQRPTHLAGAFLAFILGNVYFWLQLLLWRLKRLPQPGAAWIGPLRLGLCSVCTILIVAMIVLHACSLRSVSAACEWVVAMLLFALFG

SEQ ID NO: 91198 - protein, 84 aa, Homo sapiens
  Payload ID: 18235
  Gene Name: transmembrane protein 150B
  ENSP ID: ENSP00000465815
MWGYLSLMPVFLAVWAISGVWIVFAIAVTNRTVDLSKGFPYISICGSFPPQSCIFSQVLNMGAALGKEPAAYALGRGLPCLHLG

SEQ ID NO: 91199 - protein, 134 aa, Homo sapiens
  Payload ID: 18235
  Gene Name: transmembrane protein 150B
  ENSP ID: ENSP00000466297
MWGYLSLMPVFLAVWAISGVWIVFAIAVTNRTVDLSKGFPYISICGSFPPQSCIFSQVLNMGAALAAWICIVRYHQLRDWGVRRWPNQLILWTGLLCALGTSVVGNFQEKNQRPTHLAGAFLAFILGNVYFWLQ

SEQ ID NO: 91200 - protein, 63 aa, Homo sapiens
  Payload ID: 18235
  Gene Name: transmembrane protein 150B
  ENSP ID: ENSP00000466957
MWGYLSLMPVFLAVWAISGVWIVFAIAVTNRTVDLSKGFPYISRVDLHCPLPPAPGLGRQKVA

SEQ ID NO: 91201 - protein, 63 aa, Homo sapiens; identical to SEQ ID NO: 91200
  Payload ID: 18235
  Gene Name: transmembrane protein 150B
  ENSP ID: ENSP00000468745

SEQ ID NO: 91202 - protein, 249 aa, Homo sapiens
  Payload ID: 18236
  Gene Name: transmembrane protein 150C
  Uniprot ID: B9EJG8
  ENSP ID: ENSP00000403438
MDGKKCSVWMFLPLVFTLFTSAGLWIVYFIAVEDDKILPLNSAERKPGVKHAPYISIAGDDPPASCVFSQVMNMAAFLALVVAVLRFIQLKPKVLNPWLNISGLVALCLASFGMTLLGNFQLTNDEEIHNVGTSLTFGFGTLTCWIQAALTLKVNIKNEGRRVGIPRVILSASITLCVVLYFILMAQSIHMYAARVQWGLVMCFLSYFGTFAVEFRHYRYEIVCSEYQENFLSFSESLSEASEYQTDQV

SEQ ID NO: 91203 - protein, 67 aa, Homo sapiens
  Payload ID: 18236
  Gene Name: transmembrane protein 150C
  ENSP ID: ENSP00000414988
MDGKKCSVWMFLPLVFTLFTSAGLWIVYFIAVEDDKILPLNSAERKPGVKHAPYISIAGDDPPASCV

SEQ ID NO: 91204 - protein, 249 aa, Homo sapiens; identical to SEQ ID NO: 91202
  Payload ID: 18236
  Gene Name: transmembrane protein 150C
  Uniprot ID: B9EJG8
  ENSP ID: ENSP00000420919

SEQ ID NO: 91205 - protein, 120 aa, Homo sapiens
  Payload ID: 18236
  Gene Name: transmembrane protein 150C
  ENSP ID: ENSP00000421812
MDGKKCSVWMFLPLVFTLFTSAGLWIVYFIAVEDDKILPLNSAERKPGVKHAPYISIAGDDPPASCVFSQVMNMAAFLALVVAVLRFIQLKPKVLNPWLNISGLVALCLASFGMTLLAHK

SEQ ID NO: 91206 - protein, 468 aa, Homo sapiens
  Payload ID: 18237
  Gene Name: transmembrane protein 151A
  Uniprot ID: Q8N4L1
  ENSP ID: ENSP00000326244
MPEDGAGDGGEVPALIPDGEPLREEQRPLKQSLGSSLCRESHWKCLLLTLLIHACGAVVAWCRLATVPRLVLGPEAALARGAGGPPPTYPASPCSDGYLYIPLAFVSLLYLLYLAECWHCHVRSCQAPRTDAHTVLALIRRLQQAPPCVWWKATSYHYVRRTRQITRYRNGDAYTTTQVYHERADSRTARGEFDYSAHGVRDVSKELVGLAEHAATRLRFTKCFSFGSAEAEASYLTQRARFFSANEGLDDYLEAREGMHLKDVDFRESLMVFADPRSPPWYARAWVFWLVSAATLSWPLRVVAAYGTAHVHYQVEKLFGASSPPPGAVPSGPPLSRVATVDFTELEWHICSNRQLVPSYSEAVVMGAGSGAYLRGCQRCRRSVSSNSLPPARPSGPRLPFSRSRLSLGAGGRATPGVFRSLSGGPLGRRGEDTEPLESPPCYEDALYFPVLIVHGDSGCQGDGQGAL

SEQ ID NO: 91207 - protein, 566 aa, Homo sapiens
  Payload ID: 18238
  Gene Name: transmembrane protein 151B
  Uniprot ID: Q8IW70
  ENSP ID: ENSP00000393161
MSPPGSAAGESAAGGGGGGGGPGVSEELTAAAAAAAADEGPAREEQRPIQPSFTKSLCRESHWKCLLLSLLMYGCLGAVAWCHVTTVTRLTFSSAYQGNSLMYHDSPCSNGYVYIPLAFLLMLYAVYLVECWHCQARHELQHRVDVSSVRERVGRMQQATPCIWWKAISYHYVRRTRQVTRYRNGDAYTTTQVYHERVNTHVAEAEFDYARCGVRDVSKTLVGLEGAPATRLRFTKCFSFASVEAENAYLCQRARFFAENEGLDDYMEAREGMHLKNVDFREFMVAFPDPARPPWYACSSAFWAAALLTLSWPLRVLAEYRTAYAHYHVEKLFGLEGPGSASSAGGGLSPSDELLPPLTHRLPRVNTVDSTELEWHIRSNQQLVPSYSEAVLMDLAGLGTRCGGAGGGYAPSCRYGGVGGPGAAGVAPYRRSCEHCQRAVSSSSIFSRSALSICASPRAGPGPGGGAGCGGSRFSLGRLYGSRRSCLWRSRSGSVNEASCPTEQTRLSSQASMGDDEDDDEEEAGPPPPYHDALYFPVLIVHRQEGCLGHSHRPLHRHGSCVETSL

SEQ ID NO: 91208 - protein, 222 aa, Homo sapiens
  Payload ID: 18238
  Gene Name: transmembrane protein 151B
  Uniprot ID: Q8IW70
  ENSP ID: ENSP00000409337
MSPPGSAAGESAAGGGGGGGGPGVSEELTAAAAAAAADEGPAREEQRPIQPSFTKSLCRESHWKCLLLSLLMYGCLGAVAWCHVTTVTRLTFSSAYQGNSLMYHDSPCSNGYVYIPLAFLLMLYAVYLVECWHCQARHELQHRVDVSSVRERVGRMQQATPCIWWKAISYHYVRRTRQVTRYRNGDAYTTTQVPGCLGSQVVPLRSPWRNAQLDAGSDEEPA

SEQ ID NO: 91209 - protein, 183 aa, Homo sapiens
  Payload ID: 18239
  Gene Name: transmembrane protein 154
  Uniprot ID: Q6P9G4
  ENSP ID: ENSP00000302144
MQAPRAALVFALVIALVPVGRGNYEELENSGDTTVESERPNKVTIPSTFAAVTIKETLNANINSTNFAPDENQLEFILMVLIPLILLVLLLLSVVFLATYYKRKRTKQEPSSQGSQSALQTYELGSENVKVPIFEEDTPSVMEIEMEELDKWMNSMNRNADFECLPTLKEEKESNHNPSDSES

SEQ ID NO: 91210 - protein, 125 aa, Homo sapiens
  Payload ID: 18239
  Gene Name: transmembrane protein 154
  ENSP ID: ENSP00000422156
MQAPRAALVFALVIALVPVGRGNYEELENSGDTTVESERPNKVTIPSTFAAVTIKETLNANINSTNFAPDENQLEFILMVLIPLILLVLLLLSVVFLATYYKRKRTKQEPSSQGSQSALQTYLLV

SEQ ID NO: 91211 - protein, 162 aa, Homo sapiens [sequence omitted]

SEQ ID NO: 91212 - protein, 130 aa, Homo sapiens
  Payload ID: 18240
  Gene Name: transmembrane protein 155
  Uniprot ID: Q4W5P6
  ENSP ID: ENSP00000336987
MASDLIRTILAVALISKLGTAVDAELMPSGAILQNKRENLPRVCHALAFLGMARCQDLFLVRLQGWKLGTRFQDGPRSTPQEEGGSPQRKRGMPVQIHFLLKSFLSSPITFAFISLARTVSLATAICKIV

SEQ ID NO: 91213 - protein, 130 aa, Homo sapiens; identical to SEQ ID NO: 91212
  Payload ID: 18240
  Gene Name: transmembrane protein 155
  Uniprot ID: Q4W5P6
  ENSP ID: ENSP00000377917

SEQ ID NO: 91214 - protein, 130 aa, Homo sapiens; identical to SEQ ID NO: 91212
  Payload ID: 18240
  Gene Name: transmembrane protein 155
  Uniprot ID: Q4W5P6
  ENSP ID: ENSP00000377919

SEQ ID NO: 91215 - protein, 70 aa, Homo sapiens
  Payload ID: 18240
  Gene Name: transmembrane protein 155
  ENSP ID: ENSP00000422869
MASDLIRTILAVALISKLGTAVDAELMPSGAILQNKRENLPRVCHALAFLGMARCQDLFLVRLQGWKLGT

SEQ ID NO: 91216 - protein, 179 aa, Homo sapiens
  Payload ID: 18241
  Gene Name: transmembrane protein 156
  ENSP ID: ENSP00000343758
MTKTALLKLFVAIVITFILILPEYFKTPKERTLELSCLEVCLQSNFTYSLSSLNFSFVTFLQPVRETQIIMRIFLNPSNFRNFTRTCQDITVLIRRGSMEVKANDFHSPCQHFNFSVAPLVDHLEEYNTTCHLKNHTGRSTIMEDEPSKEKSINYTCRIMEYPNDCIHISLHLEMDIKS

SEQ ID NO: 91217 - protein, 296 aa, Homo sapiens
  Payload ID: 18241
  Gene Name: transmembrane protein 156
  Uniprot ID: Q8N614
  ENSP ID: ENSP00000371364
MTKTALLKLFVAIVITFILILPEYFKTPKERTLELSCLEVCLQSNFTYSLSSLNFSFVTFLQPVRETQIIMRIFLNPSNFRNFTRTCQDITGEFKMCSSCLVCESKGNMDFISQEQTSKVLIRRGSMEVKANDFHSPCQHFNFSVAPLVDHLEEYNTTCHLKNHTGRSTIMEDEPSKEKSINYTCRIMEYPNDCIHISLHLEMDIKNITCSMKITWYILVLLVFIFLIILTIRKILEGQRRVQKWQSHRDKPTSVLLRGSDSEKLRALNVQVLSAETTQRLPLDQVQEVLPPIPEL

SEQ ID NO: 91218 - protein, 300 aa, Homo sapiens
  Payload ID: 18242
  Gene Name: transmembrane protein 158 (gene/pseudogene)
  Uniprot ID: Q8WZ71
  ENSP ID: ENSP00000422431
MLPLLAALLAAACPLPPVRGGAADAPGLLGVPSNASVNASSADEPIAPRLLASAAPGPPERPGPEEAAAAAAPCNISVQRQMLSSLLVRWGRPRGFQCDLLLFSTNAHGRAFFAAAFHRVGPPLLIEHLGLAAGGAQQDLRLCVGCGWVRGRRTGRLRPAAAPSAAAATAGAPTALPAYPAAEPPGPLWLQGEPLHFCCLDFSLEELQGEPGWRLNRKPIESTLVACFMTLVIVVWSVAALIWPVPIIAGFLPNGMEQRRTTASTTAATPAAVPAGTTAAAAAAAAAAAAAAVTSGVATK

SEQ ID NO: 91219 - protein, 161 aa, Homo sapiens
  Payload ID: 18243
  Gene Name: transmembrane protein 159
  Uniprot ID: Q96B96
  ENSP ID: ENSP00000233047
MAKEEPQSISRDLQELQKKLSLLIDSFQNNSKVVAFMKSPVGQYLDSHPFLAFTLLVFIVMSAVPVGFFLLIVVLTTLAALLGVIILEGLVISVGGFSLLCILCGLGFVSLAMSGMMIASYVVVSSLISCWFSPRPLTQQNTSCDFLPAMKSAEFEGLYQE

SEQ ID NO: 91220 - protein, 161 aa, Homo sapiens; identical to SEQ ID NO: 91219
  Payload ID: 18243
  Gene Name: transmembrane protein 159
  Uniprot ID: Q96B96
  ENSP ID: ENSP00000261388

SEQ ID NO: 91221 - protein, 185 aa, Homo sapiens
  Payload ID: 18243
  Gene Name: transmembrane protein 159
  Uniprot ID: Q96B96
  ENSP ID: ENSP00000409879
MAKEEPQSISRDLQELQKKLSLLIDSFQNNSKLPQHSRISLDSDDGVSRLGSAGSKVVAFMKSPVGQYLDSHPFLAFTLLVFIVMSAVPVGFFLLIVVLTTLAALLGVIILEGLVISVGGFSLLCILCGLGFVSLAMSGMMIASYVVVSSLISCWFSPRPLTQQNTSCDFLPAMKSAEFEGLYQE

SEQ ID NO: 91222 - protein, 90 aa, Homo sapiens
  Payload ID: 18243
  Gene Name: transmembrane protein 159
  ENSP ID: ENSP00000459481
MAKEEPQSISRDLQELQKKLSLLIDSFQNNSKVVAFMKSPVGQYLDSHPFLAFTLLVFIVMSAVPVGFFLLIVVLTTLAALLGVIILEGH

SEQ ID NO: 91223 - protein, 98 aa, Homo sapiens
  Payload ID: 18243
  Gene Name: transmembrane protein 159
  ENSP ID: ENSP00000460102
  MOD_RES (1)..(1): Any amino acid
XLDSHPFLAFTLLVFIVMSAVPVGFFLLIVVLTTLAALLGVIILEGLVISVGGFSLLCILCGLGFVSLAMSGMMIASYVVVSSLISCWFSPRSLSYLP

SEQ ID NO: 91224 - protein, 161 aa, Homo sapiens; identical to SEQ ID NO: 91219
  Payload ID: 18243
  Gene Name: transmembrane protein 159
  Uniprot ID: Q96B96
  ENSP ID: ENSP00000460687

SEQ ID NO: 91225 - protein, 46 aa, Homo sapiens
  Payload ID: 18243
  Gene Name: transmembrane protein 159
  ENSP ID: ENSP00000461826
MAKEEPQSISRDLQELQKKLSLLIDSFQNNSKLPQHSRISLDSDDG

SEQ ID NO: 91226 - protein, 163 aa, Homo sapiens
  Payload ID: 18243
  Gene Name: transmembrane protein 159
  ENSP ID: ENSP00000461828
MAKEEPQSISRDLQELQKKLSLLIDSFQNNSKLPQHSRISLDSDDGVSRLGSAGSKVVAFMKSPVGQYLDSHPFLAFTLLVFIVMSAVPVGFFLLIVVLTTLAALLGVIILEGLVISVGGFSLLCILCGLGFVSLAMSGMMIASYVVVSSLISCWFSPRSHEI

SEQ ID NO: 91227 - protein, 188 aa, Homo sapiens
  Payload ID: 18244
  Gene Name: transmembrane protein 160
  Uniprot ID: Q9NX00
  ENSP ID: ENSP00000253047
MGGGWWWARAARLARLRFRRSLLPPQRPRSGGARGSFAPGHGPRAGASPPPVSELDRADAWLLRKAHETAFLSWFRNGLLASGIGVISFMQSDMGREAAYGFFLLGGLCVVWGSASYAVGLAALRGPMQLTLGGAAVGAGAVLAASLLWACAVGLYMGQLELDVELVPEDDGTASAEGPDEAGRPPPE

SEQ ID NO: 91228 - protein, 479 aa, Homo sapiens
  Payload ID: 18245
  Gene Name: transmembrane protein 161A
  Uniprot ID: Q9NX61
  ENSP ID: ENSP00000162044
MAVLGVQLVVTLLTATLMHRLAPHCSFARWLLCNGSLFRYKHPSEEELRALAGKPRPRGRKERWANGLSEEKPLSVPRDAPFQLETCPLTTVDALVLRFFLEYQWFVDFAVYSGGVYLFTEAYYYMLGPAKETNIAVFWCLLTVTFSIKMFLTVTRLYFSAEEGGERSVCLTFAFLFLLLAMLVQVVREETLELGLEPGLASMTQNLEPLLKKQGWDWALPVAKLAIRVGLAVVGSVLGAFLTFPGLRLAQTHRDALTMSEDRPMLQFLLHTSFLSPLFILWLWTKPIARDFLHQPPFGETRFSLLSDSAFDSGRLWLLVVLCLLRLAVTRPHLQAYLCLAKARVEQLRREAGRIEAREIQQRVVRVYCYVTVVSLQYLTPLILTLNCTLLLKTLGGYSWGLGPAPLLSPDPSSASAAPIGSGEDEVQQTAARIAGALGGLLTPLFLRGVLAYLIWWTAACQLLASLFGLYFHQHLAGS

SEQ ID NO: 91229 - protein, 376 aa, Homo sapiens
  Payload ID: 18245
  Gene Name: transmembrane protein 161A
  Uniprot ID: Q9NX61
  ENSP ID: ENSP00000404208
MAVLGVQLVVTLLTATLMHRLAPHCSFARWLLCNGSLFRYKHPSEEELRALAGKPRPRGRKERWANGLSEEKPLSVPRDAPFQLETCPLTTVDALGLASMTQNLEPLLKKQGWDWALPVAKLAIRVGLAVVGSVLGAFLTFPGLRLAQTHRDALTMSEDRPMLQFLLHTSFLSPLFILWLWTKPIARDFLHQPPFGETRFSLLSDSAFDSGRLWLLVVLCLLRLAVTRPHLQAYLCLAKARVEQLRREAGRIEAREIQQRVVRVYCYVTVVSLQYLTPLILTLNCTLLLKTLGGYSWGLGPAPLLSPDPSSASAAPIGSGEDEVQQTAARIAGALGGLLTPLFLRGVLAYLIWWTAACQLLASLFGLYFHQHLAGS

SEQ ID NO: 91230 - protein, 40 aa, Homo sapiens
  Payload ID: 18245
  Gene Name: transmembrane protein 161A
  ENSP ID: ENSP00000465215
MAVLGVQLVVTLLTATLMHRLAPHCSFARWLLCNGRLPSN

SEQ ID NO: 91231 - protein, 194 aa, Homo sapiens
  Payload ID: 18245
  Gene Name: transmembrane protein 161A
  ENSP ID: ENSP00000465840
ETNIAVFWCLLTVTFSIKMFLTVTRLYFSAEEGGERSVCLTFAFLFLLLAMLVQVVREETLELGLEPGLASMTQNLEPLLKKQGWDWALPVAKLAIRVGLAVVGSVLGAFLTFPGLRLAQTHRDALTMSEDRPMLQLSDSAFDSGRLWLLVVLCLLRLAVTRPHLQAYLCLAKARVEQLRREAGRIEAREIQQR

SEQ ID NO: 91232 - protein, 454 aa, Homo sapiens
  Payload ID: 18245
  Gene Name: transmembrane protein 161A
  ENSP ID: ENSP00000467300
MAVLGVQLVVTLLTATLMHRLAPHCSFARWLLCNGSLFRYKHPSEEELRALAGKPRPRGRKERWANGLSEEKPLSVPRDAPFQLETCPLTTVDALEAYYYMLGPAKETNIAVFWCLLTVTFSIKMFLTVTRLYFSAEEGGERSVCLTFAFLFLLLAMLVQVVREETLELGLEPGLASMTQNLEPLLKKQGWDWALPVAKLAIRVGLAVVGSVLGAFLTFPGLRLAQTHRDALTMSEDRPMLQFLLHTSFLSPLFILWLWTKPIARDFLHQPPFGETRFSLLSDSAFDSGRLWLLVVLCLLRLAVTRPHLQAYLCLAKARVEQLRREAGRIEAREIQQRVVRVYCYVTVVSLQYLTPLILTLNCTLLLKTLGGYSWGLGPAPLLSPDPSSASAAPIGSGEDEVQQTAARIAGALGGLLTPLFLRGVLAYLIWWTAACQLLASLFGLYFHQHLAGS

SEQ ID NO: 91233 - protein, 315 aa, Homo sapiens
  Payload ID: 18245
  Gene Name: transmembrane protein 161A
  ENSP ID: ENSP00000467649
MHRLAPHCSFARWLLCNGSLFRYKHPSEEELRALAGKPRPRGRKERWANGLSEEKPLSVPRDAPFQLETCPLTTVDALVLRFFLEYQWFVDFAVYSGGVYLFTEAYYYMLGPAKETNIAVFWCLLTVTFSIKMFLTVTRLYFSAEEGGERSVCLTFAFLFLLLAMLVQVVREETLELGLEPGLASMTQNLEPLLKKQGWDWALPVAKLAIRVGLAVVGSVLGAFLTFPGLRLAQTHRDALTMSEDRPMLQFLLHTSFLSPLFILWLWTKPIARDFLHQPPFGETRFSLLSDSAFDSGRLWLLVVLCLLRLAVTRP

SEQ ID NO: 91234 - protein, 145 aa, Homo sapiens
  Payload ID: 18245
  Gene Name: transmembrane protein 161A
  ENSP ID: ENSP00000467793
MHRLAPHCSFARWLLCNGSLFRYKHPSEEELRALAGKPRPRGRKERWANGLSEEKPLSVPRDAPFQLETCPLTTVDALVLRFFLEYQWFVDFAVYSGGVYLFTEAYYYMLGPAKETNIAVFWCLLTVTFSIKMFLTVTRLYFSAE

SEQ ID NO: 91235 - protein, 325 aa, Homo sapiens
  Payload ID: 18245
  Gene Name: transmembrane protein 161A
  ENSP ID: ENSP00000476205
MAVLGVQLVVTLLTATLMHRLAPHCSFARWLLCNGSLFRYKHPSEEELRALAGKPRPRGRKERWANGLSEEKPLSVPRDAPFQLETCPLTTVDALVLRFFLEYQWFVDFAVYSGGVYLFTEAYYYMLGPAKETNIAVFWCLLTVTFSIKMFLTVTRLYFSAEEGGERSVCLTFAFLFLLLAMLVQVVREETLELGLEPGLASMTQNLEPLLKKQGWDWALPVAKLAIRVGLAVVGSVLGAFLTFPGLRLAQTHRDALTMSEDRPMLQFLLHTSFLSPLFILWLWTKPIARDFLHQPPFGETRCPILPSTLGASGCWWCCACCGWR

SEQ ID NO: 91236 - protein, 61 aa, Homo sapiens
  Payload ID: 18245
  Gene Name: transmembrane protein 161A
  ENSP ID: ENSP00000476977
MLGPAKETNIAVFWCLLTVTFSIKMFLTVTRLYFSAEEGGERSVCLTFAFLFLLLAMLVQV

SEQ ID NO: 91237 - protein, 487 aa, Homo sapiens
  Payload ID: 18246
  Gene Name: transmembrane protein 161B
  Uniprot ID: Q8NDZ6
  ENSP ID: ENSP00000296595
MGVIGIQLVVTMVMASVMQKIIPHYSLARWLLCNGSLRWYQHPTEEELRILAGKQQKGKTKKDRKYNGHIESKPLTIPKDIDLHLETKSVTEVDTLALHYFPEYQWLVDFTVAATVVYLVTEVYYNFMKPTQEMNISLVWCLLVLSFAIKVLFSLTTHYFKVEDGGERSVCVTFGFFFFVKAMAVLIVTENYLEFGLETGFTNFSDSAMQFLEKQGLESQSPVSKLTFKFFLAIFCSFIGAFLTFPGLRLAQMHLDALNLATEKITQTLLHINFLAPLFMVLLWVKPITKDYIMNPPLGKESIPLMTEATFDTLRLWLIILLCALRLAMMRSHLQAYLNLAQKCVDQMKKEAGRISTVELQKMVARVFYYLCVIALQYVAPLVMLLHTTLLLKTLGNHSWGIYPESISTLPVDNSLLSNSVYSELPSAEGKMKVTVTQITVALSSLKNIFTPLLFRGLLSFLTWWIAACLFSTSLFGLFYHQYLTVA

SEQ ID NO: 91238 - protein, 476 aa, Homo sapiens
  Payload ID: 18246
  Gene Name: transmembrane protein 161B
  ENSP ID: ENSP00000421498
MVMASVMQKIIPHYSLARWLLCNGSLRWYQHPTEEELRILAGKQQKGKTKKDRKYNGHIESKPLTIPKDIDLHLETKSVTEVDTLALHYFPEYQWLVDFTVAATVVYLVTEVYYNFMKPTQEMNISLVWCLLVLSFAIKVLFSLTTHYFKVEDGGERSVCVTFGFFFFVKAMAVLIVTENYLEFGLETGFTNFSDSAMQFLEKQGLESQSPVSKLTFKFFLAIFCSFIGAFLTFPGLRLAQMHLDALNLATEKITQTLLHINFLAPLFMVLLWVKPITKDYIMNPPLGKESIPLMTEATFDTLRLWLIILLCALRLAMMRSHLQAYLNLAQKCVDQMKKEAGRISTVELQKMVARVFYYLCVIALQYVAPLVMLLHTTLLLKTLGNHSWGIYPESISTLPVDNSLLSNSVYSELPSAEGKMKVTVTQITVALSSLKNIFTPLLFRGLLSFLTWWIAACLFSTSLFGLFYHQYLTVA

SEQ ID NO: 91239 - protein, 217 aa, Homo sapiens
  Payload ID: 18246
  Gene Name: transmembrane protein 161B
  ENSP ID: ENSP00000421733
MAVLIVTENYLEFGLETGFTNFSDSAMQFLEKQGLESQSPVSKLTFKFFLAIFCSFIGAFLTFPGLRLAQMHLDALNLATEKITQTLLHINFLAPLFMVLLWVKPITKDYIMNPPLGKESIPLMTEATFDTLRLWLIILLCALRLAMMRSHLQAYLNLAQKCVDQMKKEAGRISTVELQKMVIIPGVFIQNLSLPYQWIIVYCPILFTLNYHQLKGK

SEQ ID NO: 91240 - protein, 121 aa, Homo sapiens
  Payload ID: 18246
  Gene Name: transmembrane protein 161B
  ENSP ID: ENSP00000421805
MGVIGIQLVVTMVMASVMQKIIPHYSLARWLLCNGSLRWYQHPTEEELRILAGKQQKGKTKKDRKYNGHIESKPLTIPKDIDLHLETKSVTEVDTLGGLLKNDVDVLDYTLVEVNQNTYAT

SEQ ID NO: 91241 - protein, 140 aa, Homo sapiens
  Payload ID: 18246
  Gene Name: transmembrane protein 161B
  Uniprot ID: Q8NDZ6
  ENSP ID: ENSP00000423380
MKPTQEMNISLVWCLLVLSFAIKVLFSLTTHYFKVEDGGERSVCVTFGFFFFVKAMAVLIVTENYLEFGLETGFTNFSDSAMQFLEKQGLESQSPVSKLTFKFFLAIFCSFIGAFLTFPGLRLAQMHLDALNLATEKITQ

SEQ ID NO: 91242 - protein, 178 aa, Homo sapiens
  Payload ID: 18246
  Gene Name: transmembrane protein 161B
  ENSP ID: ENSP00000424200
MKPTQEMNISLVWCLLVLSFAIKVLFSLTTHYFKVEDGGERSVCVTFGFFFFVKAMAVLIVTENYLEFGLETGFTNFSDSAMQFLEKQGLESQSPVSKLTFKFFLAIFCSFIGAFLTFPGLRLAQMHLDALNLATEKITQTLLHINFLAPLFMVLLWVKPITKDYIMNPPLGKESIPL

SEQ ID NO: 91243 - protein, 278 aa, Homo sapiens
  Payload ID: 18246
  Gene Name: transmembrane protein 161B
  ENSP ID: ENSP00000425991
MAVLIVTENYLEFGLETGFTNFSDSAMQFLEKQGLESQSPVSKLTFKFFLAIFCSFIGAFLTFPGLRLAQMHLDALNLATEKITQTLLHINFLAPLFMVLLWVKPITKDYIMNPPLGKESIPFHLQAYLNLAQKCVDQMKKEAGRISTVELQKMVARVFYYLCVIALQYVAPLVMLLHTTLLLKTLGNHSWGIYPESISTLPVDNSLLSNSVYSELPSAEGKMKVTVTQITVALSSLKNIFTPLLFRGLLSFLTWWIAACLFSTSLFGLFYHQYLTVA

SEQ ID NO: 91244 - protein, 502 aa, Homo sapiens
  Payload ID: 18246
  Gene Name: transmembrane protein 161B
  ENSP ID: ENSP00000426354
MGVIGIQLVVTMVMASVMQKIIPHYSLARWLLCNGSLRWYQHPTEEELRILAGKQQKGKTKKDRKYNGHIESKPLTIPKDIDLHLETKSVTEVDTLALHYFPEYQWLVDFTVAATVVYLVTEVYYNFMKPTQEMNISLVWCLLVLSFAIKVLFSLTTHYFKVEDGGERSVCVTFGFFFFVKAMAVLIVTENYLEFGLETGFTNFSDSAMQFLEKQGLESQSPVSKLTFKFFLAIFCSFIGAFLTFPGLRLAQMHLDALNLATEKITQTLLHINFLAPLFMVLLWVKPITKDYIMNPPLGKESIPLMTEATFDTLRLWLIILLCALRLAMMRSHLQAYLNLAQKCVDQMKKEAGRISTVELQKMVARVFYYLCVIALQYVAPLVMLLHTTLLLKTLGNHSWGIYPESISTLPVDNSLLSNSVYSELPSAEGKMKHNARQGPAVPPGMQAYGAAPFEDLQLDFTEMPKCGGNKYLLVLVCTFSGWVEAYPTRTEKACEITHVLL

SEQ ID NO: 91245 - protein, 153 aa, Homo sapiens
  Payload ID: 18246
  Gene Name: transmembrane protein 161B
  ENSP ID: ENSP00000427312
MGVIGIQLVVTMVMASVMQKIIPHYSLARWLLCNGSLRWYQHPTEEELRILAGKQQKGKTKKDRKYNGHIESKPLTIPKDIDLHLETKSVTEVDTLALHYFPEYQWLVDFTVAATVVYLVTEVYYNFMKPTQEMNISLVWCLLVLSFAIRRWW

SEQ ID NO: 91246 - protein, 289 aa, Homo sapiens
  Payload ID: 18247
  Gene Name: transmembrane protein 163
  Uniprot ID: Q8TC26
  ENSP ID: ENSP00000281924
MEPAAGIQRRSSQGPTVPPPPRGHAPPAAAPGPAPLSSPVREPPQLEEERQVRISESGQFSDGLEDRGLLESSTRLKPHEAQNYRKKALWVSWFSIIVTLALAVAAFTVSVMRYSASAFGFAFDAILDVLSSAIVLWRYSNAAAVHSAHREYIACVILGVIFLLSSICIVVKAIHDLSTRLLPEVDDFLFSVSILSGILCSILAVLKFMLGKVLTSRALITDGFNSLVGGVMGFSILLSAEVFKHDSAVWYLDGSIGVLIGLTIFAYGVKLLIDMVPRVRQTRHYEMFE

SEQ ID NO: 91247 - protein, 258 aa, Homo sapiens
  Payload ID: 18248
  Gene Name: transmembrane protein 164
  ENSP ID: ENSP00000288381
MSRYSYQSLLDWLYGGVDPSFAGNGGPDCAAFLSWQQRLLESVVVLTLALLEILVALRHILRQTKEDGRGSPGSQPEQVTQRPEEGKESLSKNLLLVALCLTFGVEVGFKFATKTVIYLLNPCHLVTMMHLPFELEIYYIQHVMLYVVPIYLLWKGGAYTPEPLSSFRWALLSTGLMFFYHFSVLQILGLVTEVNLNNMLCPAISDPFYGPWYRIWASGHQTLMTMTHGKLVILFSYMAGPLCKYLLDLLRLPAKKID

SEQ ID NO: 91248 - protein, 297 aa, Homo sapiens [sequence omitted]

SEQ ID NO: 91249 - protein, 297 aa, Homo sapiens [sequence omitted]

SEQ ID NO: 91250 - protein, 148 aa, Homo sapiens
  Payload ID: 18248
  Gene Name: transmembrane protein 164
  Uniprot ID: Q5U3C3
  ENSP ID: ENSP00000384075
MHMLNGALLALLFPVVNTRLLPFELEIYYIQHVMLYVVPIYLLWKGGAYTPEPLSSFRWALLSTGLMFFYHFSVLQILGLVTEVNLNNMLCPAISDPFYGPWYRIWASGHQTLMTMTHGKLVILFSYMAGPLCKYLLDLLRLPAKKID

SEQ ID NO: 91251 - protein, 324 aa, Homo sapiens
  Payload ID: 18249
  Gene Name: transmembrane protein 165
  Uniprot ID: Q9HC07
  ENSP ID: ENSP00000370736
MAAAAPGNGRASAPRLLLLFLVPLLWAPAAVRAGPDEDLSHRNKEPPAPAQQLQPQPVAVQGPEPARVEKIFTPAAPVHTNKEDPATQTNLGFIHAFVAAISVIIVSELGDKTFFIAAIMAMRYNRLTVLAGAMLALGLMTCLSVLFGYATTVIPRVYTYYVSTVLFAIFGIRMLREGLKMSPDEGQEELEEVQAELKKKDEEFQRTKLLNGPGDVETGTSITVPQKKWLHFISPIFVQALTLTFLAEWGDRSQLTTIVLAAREDPYGVAVGGTVGHCLCTGLAVIGGRMIAQKISVRTVTIIGGIVFLAFAFSALFISPDSGF

SEQ ID NO: 91252 - protein, 76 aa, Homo sapiens
  Payload ID: 18249
  Gene Name: transmembrane protein 165
  ENSP ID: ENSP00000422639
MAAAAPGNGRASAPRLLLLFLVPLLWAPAAVRAGPDEDLSHRNKEPPAPAQQLQPQPVAVQGPEPARVEGHQFFSW

SEQ ID NO: 91253 - protein, 129 aa, Homo sapiens
  Payload ID: 18249
  Gene Name: transmembrane protein 165
  ENSP ID: ENSP00000425449
MAAAAPGNGRASAPRLLLLFLVPLLWAPAAVRAGPDEDLSHRNKEPPAPAQQLQPQPVAVQGPEPARVEDPYGVAVGGTVGHCLCTGLAVIGGRMIAQKISVRTVTIIGGIVFLAFAFSALFISPDSGF

SEQ ID NO: 91254 - protein, 158 aa, Homo sapiens
  Payload ID: 18249
  Gene Name: transmembrane protein 165
  ENSP ID: ENSP00000476531
  MOD_RES (1)..(1): Any amino acid
XVLFAIFGIRMLREGLKMSPDEGQEELEEVQAELKKKDEEFQRTKLLNGPGDVETGTSITVPQKKWLHFISPIFVQALTLTFLAEWGDRSQLTTIVLAAREDPYGVAVGGTVGHCLCTGLAVIGGRMIAQKISVRTGSFSPWLILHACSDGKGHLERN

SEQ ID NO: 91255 - protein, 27 aa, Homo sapiens
  Payload ID: 18249
  Gene Name: transmembrane protein 165
  ENSP ID: ENSP00000476621
  MOD_RES (1)..(1): Any amino acid
XLTFLAEWGDRSQLTTIVLAAREVSDI

SEQ ID NO: 91256 - protein, 72 aa, Homo sapiens
  Payload ID: 18250
  Gene Name: transmembrane protein 167A
  Uniprot ID: Q8TBQ9
  ENSP ID: ENSP00000424707
MSAIFNFQSLLTVILLLICTCAYIRSLAPSLLDRNKTGLLGIFWKCARIGERKSPYVAVCCIVMAFSILFIQ

SEQ ID NO: 91257 - protein, 74 aa, Homo sapiens
  Payload ID: 18251
  Gene Name: transmembrane protein 167B
  Uniprot ID: Q9NRX6
  ENSP ID: ENSP00000342148
MTNVYSLDGILVFGLLFVCTCAYFKKVPRLKTWLLSEKKGVWGVFYKAAVIGTRLHAAVAIACVVMAFYVLFIK

SEQ ID NO: 91258 - protein, 697 aa, Homo sapiens
  Payload ID: 18252
  Gene Name: transmembrane protein 168
  Uniprot ID: Q9H0V1
  ENSP ID: ENSP00000323068
MCKSLRYCFSHCLYLAMTRLEEVNREVNMHSSVRYLGYLARINLLVAICLGLYVRWEKTANSLILVIFILGLFVLGIASILYYYFSMEAASLSLSNLWFGFLLGLLCFLDNSSFKNDVKEESTKYLLLTSIVLRILCSLVERISGYVRHRPTLLTTVEFLELVGFAIASTTMLVEKSLSVILLVVALAMLIIDLRMKSFLAIPNLVIFAVLLFFSSLETPKNPIAFACFFICLITDPFLDIYFSGLSVTERWKPFLYRGRICRRLSVVFAGMIELTFFILSAFKLRDTHLWYFVIPGFSIFGIFWMICHIIFLLTLWGFHTKLNDCHKVYFTHRTDYNSLDRIMASKGMRHFCLISEQLVFFSLLATAILGAVSWQPTNGIFLSMFLIVLPLESMAHGLFHELGNCLGGTSVGYAIVIPTNFCSPDGQPTLLPPEHVQELNLRSTGMLNAIQRFFAYHMIETYGCDYSTSGLSFDTLHSKLKAFLELRTVDGPRHDTYILYYSGHTHGTGEWALAGGDTLRLDTLIEWWREKNGSFCSRLIIVLDSENSTPWVKEVRKINDQYIAVQGAELIKTVDIEEADPPQLGDFTKDWVEYNCNSSNNICWTEKGRTVKAVYGVSKRWSDYTLHLPTGSDVAKHWMLHFPRITYPLVHLANWLCGLNLFWICKTCFRCLKRLKMSWFLPTVLDTGQGFKLVKS

SEQ ID NO: 91259 - protein, 697 aa, Homo sapiens; identical to SEQ ID NO: 91258
  Payload ID: 18252
  Gene Name: transmembrane protein 168
  Uniprot ID: Q9H0V1
  ENSP ID: ENSP00000390696

SEQ ID NO: 91260 - protein, 258 aa, Homo sapiens
  Payload ID: 18252
  Gene Name: transmembrane protein 168
  ENSP ID: ENSP00000404253
FFSLLATAILGAVSWQPTNGIFLSMFLIVLPLESMAHGLFHELGNCLGGTSVGYAIVIPTNFCSGHTHGTGEWALAGGDTLRLDTLIEWWREKNGSFCSRLIIVLDSENSTPWVKEVRKINDQYIAVQGAELIKTVDIEEADPPQLGDFTKDWVEYNCNSSNNICWTEKGRTVKAVYGVSKRWSDYTLHLPTGSDVAKHWMLHFPRITYPLVHLANWLCGLNLFWICKTCFRCLKRLKMSWFLPTVLDTGQGFKLVKS

SEQ ID NO: 91261 - protein, 124 aa, Homo sapiens
  Payload ID: 18252
  Gene Name: transmembrane protein 168
  ENSP ID: ENSP00000407373
MFLIVLPLESMAHGLFHELGNCLGGTSVGYAIVIPTNFCSPDGQPTLLPPEHVQELNLRSTGMLNAIQRFFAYHMIETYGCDYSTSGLSFDTLHSKLKAFLELRTVDGPRHDTYILYYSGHTHG

SEQ ID NO: 91262 - protein, 313 aa, Homo sapiens
  Payload ID: 18252
  Gene Name: transmembrane protein 168
  Uniprot ID: Q9H0V1
  ENSP ID: ENSP00000410307
MFLIVLPLESMAHGLFHELGNCLGGTSVGYAIVIPTNFCSPDGQPTLLPPEHVQELNLRSTGMLNAIQRFFAYHMIETYGCDYSTSGLSFDTLHSKLKAFLELRTVDGPRHDTYILYYSGHTHGTGEWALAGGDTLRLDTLIEWWREKNGSFCSRLIIVLDSENSTPWVKEVRKINDQYIAVQGAELIKTVDIEEADPPQLGDFTKDWVEYNCNSSNNICWTEKGRTVKAVYGVSKRWSDYTLHLPTGSDVAKHWMLHFPRITYPLVHLANWLCGLNLFWICKTCFRCLKRLKMSWFLPTVLDTGQGFKLVKS

SEQ ID NO: 91263 - protein, 112 aa, Homo sapiens
  Payload ID: 18252
  Gene Name: transmembrane protein 168
  ENSP ID: ENSP00000412462
MRHFCLISEQLVFFSLLATAILGAVSWQPTNGIFLSMFLIVLPLESMAHGLFHELGNCLGGTSVGYAIVIPTNFCSPDGQPTLLPPEHVQELNLRSTGMLNAIQRFFAYHMI

SEQ ID NO: 91264 - protein, 297 aa, Homo sapiens
  Payload ID: 18253
  Gene Name: transmembrane protein 169
  Uniprot ID: Q96HH4
  ENSP ID: ENSP00000295658
MEEPTAVEGQVQLPSPHQGSLRKAVAAALALDGESTMGHRKKKRKESRPESIIIYRSDNEKTDEEPGESEGGDQPKEEEGDDFLDYPVDDDMWNLPLDSRYVTLTGTITRGKKKGQMVDIHVTLTEKELQELTKPKESSRETTPEGRMACQMGADRGPHVVLWTLICLPVVFILSFVVSFYYGTITWYNIFLVYNEERTFWHKISYCPCLVLFYPVLIMAMASSLGLYAAVVQLSWSWEAWWQAARDMEKGFCGWLCSKLGLEDCSPYSIVELLESDNISSTLSNKDPIQEVETSTV

SEQ ID NO: 91265 - protein, 297 aa, Homo sapiens; identical to SEQ ID NO: 91264
  Payload ID: 18253
  Gene Name: transmembrane protein 169
  Uniprot ID: Q96HH4
  ENSP ID: ENSP00000384100

SEQ ID NO: 91266 - protein, 116 aa, Homo sapiens
  Payload ID: 18253
  Gene Name: transmembrane protein 169
  ENSP ID: ENSP00000400798
MEEPTAVEGQVQLPSPHQGSLRKAVAAALALDGESTMGHRKKKRKESRPESIIIYRSDNEKTDEEPGESEGGDQPKEEEGDDFLDYPVDDDMWNLPLDSRYVTLTGTITRGKKKGQ

SEQ ID NO: 91267 - protein, 297 aa, Homo sapiens; identical to SEQ ID NO: 91264
  Payload ID: 18253
  Gene Name: transmembrane protein 169
  Uniprot ID: Q96HH4
  ENSP ID: ENSP00000401305

SEQ ID NO: 91268 - protein, 297 aa, Homo sapiens; identical to SEQ ID NO: 91264
  Payload ID: 18253
  Gene Name: transmembrane protein 169
  Uniprot ID: Q96HH4
  ENSP ID: ENSP00000412524

SEQ ID NO: 91269 - protein, 101 aa, Homo sapiens
  Payload ID: 18253
  Gene Name: transmembrane protein 169
  ENSP ID: ENSP00000413257
MEEPTAVEGQVQLPSPHQGSLRKAVAAALALDGESTMGHRKKKRKESRPESIIIYRSDNEKTDEEPGESEGGDQPKEEEGDDFLDYPVDDDMWNLPLDSRY

SEQ ID NO: 91270 - protein, 198 aa, Homo sapiens
  Payload ID: 18254
  Gene Name: transmembrane protein 17
  Uniprot ID: Q86X19
  ENSP ID: ENSP00000335094
MELPDPVRQRLGNFSRAVFSDSNRTGPESNEGPENEMVSSLALQMSLYFNTYYFPLWWVSSIMMLHMKYSILPDYYKFIVITVIILITLIEAIRLYLGYVGNLQEKVPELAGFWLLSLLLQLPLILFLLFNEGLTNLPLEKAIHIIFTLFLAFQVVAAFLTLRKMVNQLAVRFHLQDFDRLSANRGDMRRMRSCIEEI

SEQ ID NO: 91271 - protein, 121 aa, Homo sapiens
  Payload ID: 18255
  Gene Name: transmembrane protein 170A
  Uniprot ID: Q8WVE7
  ENSP ID: ENSP00000350230
MEREGSGGSGGSAGLLQQILSLKVVPRVGNGTLCPNSTSLCSFPEMWYGVFLWALVSSLFFHVPAGLLALFTLRHHKYGAAIAGVYRAAGKEMIPFEALTLGTGQTFCVLVVSFLRILATL

SEQ ID NO: 91272 - protein, 144 aa, Homo sapiens
  Payload ID: 18255
  Gene Name: transmembrane protein 170A
  Uniprot ID: Q8WVE7
  ENSP ID: ENSP00000454404
MEREGSGGSGGSAGLLQQILSLKVVPRVGNGTLCPNSTSLCSFPEMWYGVFLWALVSSLFFHVPAGLLALFTLRHHKYGRFMSVSILLMGIVGPITAGILTSAAIAGVYRAAGKEMIPFEALTLGTGQTFCVLVVSFLRILATL

SEQ ID NO: 91273 - protein, 121 aa, Homo sapiens; identical to SEQ ID NO: 91271
  Payload ID: 18255
  Gene Name: transmembrane protein 170A
  Uniprot ID: Q8WVE7
  ENSP ID: ENSP00000454552

SEQ ID NO: 91274 - protein, 106 aa, Homo sapiens
  Payload ID: 18255
  Gene Name: transmembrane protein 170A
  ENSP ID: ENSP00000455491
MQRAAAEMWYGVFLWALVSSLFFHVPAGLLALFTLRHHKYGRFMSVSILLMGIVGPITAGILTSAAIAGVYRAAGKEMIPFEALTLGTGQTFCVLVVSFLRILATL

SEQ ID NO: 91275 - protein, 113 aa, Homo sapiens
  Payload ID: 18255
  Gene Name: transmembrane protein 170A
  ENSP ID: ENSP00000455938
MEREGSGGSGGSAGLLQQILSLKVVPRVGNGTLCPNSTSLCSFPEMWYGVFLWALVSSLFFHVPAGLLALFTLRHHKYGRFMSVSILLMGIVGPITAGILTSMLDIKIPVKNV

SEQ ID NO: 91276 - protein, 76 aa, Homo sapiens
  Payload ID: 18255
  Gene Name: transmembrane protein 170A
  ENSP ID: ENSP00000456194
MWYGVFLWALVSSLFFHVPAGLLALFTLRHHKYGAAIAGVYRAAGKEMIPFEALTLGTGQTFCVLVVSFLRILATL

SEQ ID NO: 91277 - protein, 99 aa, Homo sapiens
  Payload ID: 18255
  Gene Name: transmembrane protein 170A
  ENSP ID: ENSP00000456509
MWYGVFLWALVSSLFFHVPAGLLALFTLRHHKYGRFMSVSILLMGIVGPITAGILTSAAIAGVYRAAGKEMIPFEALTLGTGQTFCVLVVSFLRILATL

SEQ ID NO: 91278 - protein, 132 aa, Homo sapiens
  Payload ID: 18256
  Gene Name: transmembrane protein 170B
  Uniprot ID: Q5T4T1
  ENSP ID: ENSP00000368737
MKAEGGDHSMINLSVQQVLSLWAHGTVLRNLTEMWYWIFLWALFSSLFVHGAAGVLMFVMLQRHRQGRVISVIAVSIGFLASVTGAMITSAAVAGIYRVAGKNMAPLEALVWGVGQTVLTLIISFSRILATL

SEQ ID NO: 91279 - protein, 323 aa, Homo sapiens
  Payload ID: 18257
  Gene Name: transmembrane protein 171
  Uniprot ID: Q8WVE6
  ENSP ID: ENSP00000287773
MSPAAAAEPDGDQQDRHVSKLIFCFFVFGAVLLCVGVLLSIFGFQACQYKPLPDCPMVLKVAGPACAVVGLGAVILARSRAQLQLRAGLQRGQQMDPDRAFICGESRQFAQCLIFGFLFLTSGMLISVLGIWVPGCGSNWAQEPLNETDTGDSEPRMCGFLSLQIMGPLIVLVGLCFFVVAHVKKRNTLNAGQDASEREEGQIQIMEPVQVTVGDSVIIFPPPPPPYFPESSASAVAESPGTNSLLPNENPPSYYSIFNYGTPTSEGAASERDCESIYTISGTNSSSEASHTPHLPSELPPRYEEKENAAATFLPLSSEPSPP

SEQ ID NO: 91280 - protein, 324 aa, Homo sapiens
  Payload ID: 18257
  Gene Name: transmembrane protein 171
  Uniprot ID: Q8WVE6
  ENSP ID: ENSP00000415030
MSPAAAAEPDGDQQDRHVSKLIFCFFVFGAVLLCVGVLLSIFGFQACQYKPLPDCPMVLKVAGPACAVVGLGAVILARSRAQLQLRAGLQRGQQMDPDRAFICGESRQFAQCLIFGFLFLTSGMLISVLGIWVPGCGSNWAQEPLNETDTGDSEPRMCGFLSLQIMGPLIVLVGLCFFVVAHVKKRNTLNAGQDASEREEGQIQIMEPVQVTVGDSVIIFPPPPPPYFPESSASAVAESPGTNSLLPNENPPSYYSIFNYGRTPTSEGAASERDCESIYTISGTNSSSEASHTPHLPSELPPRYEEKENAAATFLPLSSEPSPP

SEQ ID NO: 91281 - protein, 379 aa, Homo sapiens
  Payload ID: 18258
  Gene Name: transmembrane protein 173
  Uniprot ID: Q86WV6
  ENSP ID: ENSP00000331288
MPHSSLHPSIPCPRGHGAQKAALVLLSACLVTLWGLGEPPEHTLRYLVLHLASLQLGLLLNGVCSLAEELRHIHSRYRGSYWRTVRACLGCPLRRGALLLLSIYFYYSLPNAVGPPFTWMLALLGLSQALNILLGLKGLAPAEISAVCEKGNFNVAHGLAWSYYIGYLRLILPELQARIRTYNQHYNNLLRGAVSQRLYILLPLDCGVPDNLSMADPNIRFLDKLPQQTGDHAGIKDRVYSNSIYELLENGQRAGTCVLEYATPLQTLFAMSQYSQAGFSREDRLEQAKLFCRTLEDILADAPESQNNCRLIAYQEPADDSSFSLSQEVLRHLRQEEKEEVTVGSLKTSAVPSTSTMSQEPELLISGMEKPLPLRTDFS

SEQ ID NO: 91282 - protein, 253 aa, Homo sapiens
  Payload ID: 18258
  Gene Name: transmembrane protein 173
  ENSP ID: ENSP00000427455
MPHSSLHPSIPCPRGHGAQKAALVLLSACLVTLWGLGEPPEHTLRYLVLHLASLQLGLLLNGVCSLAEELRHIHSRYRGSYWRTVRACLGCPLRRGALLLLSIYFYYSLPNAVGPPFTWMLALLGLSQALNILLGLKGLAPAEISAVCEKGNFNVAHGLAWSYYIGYLRLILPELQARIRTYNQHYNNLLRGAVSQRLYILLPLDCGVPDNLSMADPNIRFLDKLPQQTGDHAGIKDRVYSNSIYELLENGQR

SEQ ID NO: 91283 - protein, 243 aa, Homo sapiens
  Payload ID: 18259
  Gene Name: transmembrane protein 174
  Uniprot ID: Q8WUU8
  ENSP ID: ENSP00000296776
MEQGSGRLEDFPVNVFSVTPYTPSTADIQVSDDDKAGATLLFSGIFLGLVGITFTVMGWIKYQGVSHFEWTQLLGPVLLSVGVTFILIAVCKFKMLSCQLCKESEERVPDSEQTPGGPSFVFTGINQPITFHGATVVQYIPPPYGSPEPMGINTSYLQSVVSPCGLITSGGAAAAMSSPPQYYTIYPQDNSAFVVDEGCLSFTDGGNHRPNPDVDQLEETQLEEEACACFSPPPYEEIYSLPR

SEQ ID NO: 91284 - protein, 504 aa, Homo sapiens
  Payload ID: 18260
  Gene Name: transmembrane protein 175
  Uniprot ID: Q9BSA9
  ENSP ID: ENSP00000264771
MSQPRTPEQALDTPGDCPPGRRDEDAGEGIQCSQRMLSFSDALLSIIATVMILPVTHTEISPEQQFDRSVQRLLATRIAVYLMTFLIVTVAWAAHTRLFQVVGKTDDTLALLNLACMMTITFLPYTFSLMVTFPDVPLGIFLFCVCVIAIGVVQALIVGYAFHFPHLLSPQIQRSAHRALYRRHVLGIVLQGPALCFAAAIFSLFFVPLSYLLMVTVILLPYVSKVTGWCRDRLLGHREPSAHPVEVFSFDLHEPLSKERVEAFSDGVYAIVATLLILDICEDNVPDPKDVKERFSGSLVAALSATGPRFLAYFGSFATVGLLWFAHHSLFLHVRKATRAMGLLNTLSLAFVGGLPLAYQQTSAFARQPRDELERVRVSCTIIFLASIFQLAMWTTALLHQAETLQPSVWFGGREHVLMFAKLALYPCASLLAFASTCLLSRFSVGIFHLMQIAVPCAFLLLRLLVGLALATLRVLRGLARPEHPPPAPTGQDDPQSQLLPAPC

SEQ ID NO: 91285 - protein, 162 aa, Homo sapiens
  Payload ID: 18260
  Gene Name: transmembrane protein 175
  ENSP ID: ENSP00000421750
MTFLIVTVAWAAHTRLFQVVGKTDDTLALLNLFSLMVTFPDVPLGIFLFCVCVIAIGVVQALIVGYAFHFPHLLSPQIQRSAHRALYRRHVLGIVLQGPALCFAAAIFSLFFVPLSYLLMVTVILLPYVSKVTGWCRDRLLGHREPSAHPVEVFSFDLHEPL

SEQ ID NO: 91286 - protein, 422 aa, Homo sapiens
  Payload ID: 18260
  Gene Name: transmembrane protein 175
  ENSP ID: ENSP00000423669
MTFLIVTVAWAAHTRLFQVVGKTDDTLALLNLACMMTITFLPYTFSLMVTFPDVPLGIFLFCVCVIAIGVVQALIVGYAFHFPHLLSPQIQRSAHRALYRRHVLGIVLQGPALCFAAAIFSLFFVPLSYLLMVTVILLPYVSKVTGWCRDRLLGHREPSAHPVEVFSFDLHEPLSKERVEAFSDGVYAIVATLLILDICEDNVPDPKDVKERFSGSLVAALSATGPRFLAYFGSFATVGLLWFAHHSLFLHVRKATRAMGLLNTLSLAFVGGLPLAYQQTSAFARQPRDELERVRVSCTIIFLASIFQLAMWTTALLHQAETLQPSVWFGGREHVLMFAKLALYPCASLLAFASTCLLSRFSVGIFHLMQIAVPCAFLLLRLLVGLALATLRVLRGLARPEHPPPAPTGQDDPQSQLLPAPC

SEQ ID NO: 91287 - protein, 72 aa, Homo sapiens
  Payload ID: 18260
  Gene Name: transmembrane protein 175
  ENSP ID: ENSP00000423751
MSQPRTPEQALDTPGDCPPGRRDEDAGEGIQCSQRMLSFSDALLSIIATVMILPVTHTEISPEQWTKAAPWK

SEQ ID NO: 91288 - protein, 284 aa, Homo sapiens
  Payload ID: 18260
  Gene Name: transmembrane protein 175
  ENSP ID: ENSP00000424208
MTFLIVTVAWAAHTRLFQVVGKTDDTLALLNLACMMTITFLPYTFSLMVTFPDVPLGIFLFCVCVIAIGVVQALIVGYAFHFPHLLSPQIQRSAHRALYRRHVLGIVLQGPALCFAAAIFSLFFVPLSYLLMVTVILLPYVSKVTGWCRDRLLGHREPSAHPVEVFSFDLHEPLSKERVEAFSDGVYAIVATLLILDICEDNVPDPKDVKERFSGSLVAALSATGPRFLAYFGSFATVGLLWFAHHSLFLHVRKATRAMGLLNTLSLAFVGGLPLAYQQTSAFA

SEQ ID NO: 91289 - protein, 113 aa, Homo sapiens
  Payload ID: 18260
  Gene Name: transmembrane protein 175
  ENSP ID: ENSP00000424746
MSQPRTPEQALDTPGDCPPGRRDEDAGEGIQCSQRMLSFSDALLSIIATVMILPVTHTEISPEQFDRSVQRLLATRIAVYLMTFLIVTVAWAAHTRLFQVVGKTDDTLALLNL

SEQ ID NO: 91290 - protein, 179 aa, Homo sapiens
  Payload ID: 18260
  Gene Name: transmembrane protein 175
  ENSP ID: ENSP00000425181
MSQPRTPEQALDTPGDCPPGRRDEDAGEGIQCSQRMLSFSDALLSIIATVMQFDRSVQRLLATRIAVYLMTFLIVTVAWAAHTRLFQVVGKTDDTLALLNLACMMTITFLPYTFSLMVTFPDVPLGIFLFCVCVIAIGVVQALIVGYAFHFPHLLSPQIQRSAHRALYRRHVLGIVLQG

SEQ ID NO: 91291 - protein, 133 aa, Homo sapiens
  Payload ID: 18260
  Gene Name: transmembrane protein 175
  ENSP ID: ENSP00000425763
MSQPRTPEQALDTPGDCPPGRRDEDAGEGIQCSQRMLSFSDALLSIIATVMILPVTHTEISPEQQFDRSVQRLLATRIAVYLMTFLIVTVAWAAHTRLFQVVGKTDDTLALLNLACMMTITFLPYTFSLMVTF

SEQ ID NO: 91292 - protein, 212 aa, Homo sapiens
  Payload ID: 18260
  Gene Name: transmembrane protein 175
  ENSP ID: ENSP00000425867
MTFLIVTVAWAAHTRLFQVVGKTDDTLALLNLACMMTITFLPYTFSLMVTFPDVPLGIFLFCVCVIAIGVVQALIVGYAFHFPHLLSPQIQRSAHRALYRRHVLGIVLQGPALCFAAAIFSLFFVPLSYLLMVTVILLPYVSKVTGWCRDRLLGHREPSAHPVEVFSFDLHEPLSKERVEAFSDGVYAIVATLLILDICEDNVPDPKDVKER

SEQ ID NO: 91293 - protein, 388 aa, Homo sapiens
  Payload ID: 18260
  Gene Name: transmembrane protein 175
  Uniprot ID: Q9BSA9
  ENSP ID: ENSP00000427039
MMTITFLPYTFSLMVTFPDVPLGIFLFCVCVIAIGVVQALIVGYAFHFPHLLSPQIQRSAHRALYRRHVLGIVLQGPALCFAAAIFSLFFVPLSYLLMVTVILLPYVSKVTGWCRDRLLGHREPSAHPVEVFSFDLHEPLSKERVEAFSDGVYAIVATLLILDICEDNVPDPKDVKERFSGSLVAALSATGPRFLAYFGSFATVGLLWFAHHSLFLHVRKATRAMGLLNTLSLAFVGGLPLAYQQTSAFARQPRDELERVRVSCTIIFLASIFQLAMWTTALLHQAETLQPSVWFGGREHVLMFAKLALYPCASLLAFASTCLLSRFSVGIFHLMQIAVPCAFLLLRLLVGLALATLRVLRGLARPEHPPPAPTGQDDPQSQLLPAPC

SEQ ID NO: 91294 - protein, 72 aa, Homo sapiens; identical to SEQ ID NO: 91287
  Payload ID: 18260
  Gene Name: transmembrane protein 175
  ENSP ID: ENSP00000427218

SEQ ID NO: 91295 - protein, 77 aa, Homo sapiens
  Payload ID: 18260
  Gene Name: transmembrane protein 175
  ENSP ID: ENSP00000427626
MSQPRTPEQALDTPGDCPPGRRDEDAGEGIQCSQRMLSFSDALLSIIATVMILPVTHTEISPEQLPQQAGPLRSCSE

SEQ ID NO: 91296 - protein, 388 aa, Homo sapiens; identical to SEQ ID NO: 91293
  Payload ID: 18260
  Gene Name: transmembrane protein 175
  Uniprot ID: Q9BSA9
  ENSP ID: ENSP00000485461

SEQ ID NO: 91297 - protein, 235 aa, Homo sapiens
  Payload ID: 18261
  Gene Name: transmembrane protein 176A
  Uniprot ID: Q96HP8
  ENSP ID: ENSP00000004103
MGTADSDEMAPEAPQHTHIDVHIHQESALAKLLLTCCSALRPRATQARGSSRLLVASWVMQIVLGILSAVLGGFFYIRDYTLLVTSGAAIWTGAVAVLAGAAAFIYEKRGGTYWALLRTLLTLAAFSTAIAALKLWNEDFRYGYSYYNSACRISSSSDWNTPAPTQSPEEVRRLHLCTSFMDMLKALFRTLQAMLLGVWILLLLASLTPLWLYCWRMFPTKGKRDQKEMLEVSGI

SEQ ID NO: 91298 - protein, 235 aa, Homo sapiens; identical to SEQ ID NO: 91297
  Payload ID: 18261
  Gene Name: transmembrane protein 176A
  Uniprot ID: Q96HP8
  ENSP ID: ENSP00000417626

SEQ ID NO: 91299 - protein, 177 aa, Homo sapiens
  Payload ID: 18261
  Gene Name: transmembrane protein 176A
  ENSP ID: ENSP00000417834
GSSRLLVASWVMQIVLGILSAVLGGFFYIRDYTLLVTSGAAIWTGAVAVLAGAAAFIYEKRGGTYWALLRTLLTLAAFSTAIAALKLWNEDFRYGYSYYNSACRISSSSDWNTPAPTQSPEEVRRLHLCTSFMDMLKALFRTLQAMLLGVWILLLLASLTPLWLYCWRMFPTKGVSP

SEQ ID NO: 91300 - protein, 118 aa, Homo sapiens
  Payload ID: 18261
  Gene Name: transmembrane protein 176A
  ENSP ID: ENSP00000420081
MQIVLGILSAVLGGFFYIRDYTLLVTSGAAIWTGAVAVLAGAAAFIYEKRGGTYWALLRTLLTLAAFSTAIAALKLWNEDFRYGYSYYNSACRISSSSDWNTPAPTQSPEEVRRLHLC

SEQ ID NO: 91301 - protein, 176 aa, Homo sapiens
  Payload ID: 18261
  Gene Name: transmembrane protein 176A
  ENSP ID: ENSP00000420818
MQIVLGILSAVLGGFFYIRDYTLLVTSGAAIWTGAVAVLAGAAAFIYEKRGGTYWALLRTLLTLAAFSTAIAALKLWNEDFRYGYSYYNSACRISSSSDWNTPAPTQSPEEVRRLHLCTSFMDMLKALFRTLQAMLLGVWILLLLASLTPLWLYCWRMFPTKGKRDQKEMLEVSGI

SEQ ID NO: 91302 - protein, 270 aa, Homo sapiens
  Payload ID: 18262
  Gene Name: transmembrane protein 176B
  Uniprot ID: Q3YBM2
  ENSP ID: ENSP00000318409
MTQNTVIVNGVAMASRPSQPTHVNVHIHQESALTQLLKAGGSLKKFLFHPGDTVPSTARIGYEQLALGVTQILLGVVSCVLGVCLSLGPWTVLSASGCAFWAGSVVIAAGAGAIVHEKHPGKLAGYISSLLTLAGFATAMAAVVLCVNSFIWQTEPFLYIDTVCDRSDPVFPTTGYRWMRRSQENQWQKEECRAYMQMLRKLFTAIRALFLAVCVLKVIVSLVSLGVGLRNLCGQSSQPLNEEGSEKRLLGENSVPPSPSREQTSTAIVL

SEQ ID NO: 91303 - protein, 270 aa, Homo sapiens; identical to SEQ ID NO: 91302
  Payload ID: 18262
  Gene Name: transmembrane protein 176B
  Uniprot ID: Q3YBM2
  ENSP ID: ENSP00000397810

SEQ ID NO: 91304 - protein, 233 aa, Homo sapiens
  Payload ID: 18262
  Gene Name: transmembrane protein 176B
  Uniprot ID: Q3YBM2
  ENSP ID: ENSP00000404831
MTQNTVIVNGVAMASRPSQPTHVNVHIHQESALTQLLKAGGSLKKFLFHPGDTVPSTARIGYEQLALGVIAAGAGAIVHEKHPGKLAGYISSLLTLAGFATAMAAVVLCVNSFIWQTEPFLYIDTVCDRSDPVFPTTGYRWMRRSQENQWQKEECRAYMQMLRKLFTAIRALFLAVCVLKVIVSLVSLGVGLRNLCGQSSQPLNEEGSEKRLLGENSVPPSPSREQTSTAIVL

SEQ ID NO: 91305 - protein, 270 aa, Homo sapiens; identical to SEQ ID NO: 91302
  Payload ID: 18262
  Gene Name: transmembrane protein 176B
  Uniprot ID: Q3YBM2
  ENSP ID: ENSP00000410269

SEQ ID NO: 91306 - protein, 270 aa, Homo sapiens; identical to SEQ ID NO: 91302
  Payload ID: 18262
  Gene Name: transmembrane protein 176B
  Uniprot ID: Q3YBM2
  ENSP ID: ENSP00000413531

SEQ ID NO: 91307 - protein, 270 aa, Homo sapiens; identical to SEQ ID NO: 91302
  Payload ID: 18262
  Gene Name: transmembrane protein 176B
  Uniprot ID: Q3YBM2
  ENSP ID: ENSP00000419258

SEQ ID NO: 91308 - protein, 311 aa, Homo sapiens
  Payload ID: 18263
  Gene Name: transmembrane protein 177
  Uniprot ID: Q53S58
  ENSP ID: ENSP00000272521
MAGPLWRTAAFVQRHRTGLLVGSCAGLFGVPISYHLFPDPVVQWLYQYWPQGQPAPLPPQLQSLFQEVLQDIGVPSGHCYKPFTTFTFQPVSAGFPRLPAGAVVGIPASFLGDLVINTNHPVVIHGHTVDWRSPAGARLRASLTLSREAQKFALAREVVYLESSTTAVHALLAPACLAGTWALGVGAKYTLGLHAGPMNLRAAFSLVAAVAGFVAYAFSQDSLTHAVESWLDRRTASLSAAYACGGVEFYEKLLSGNLALRSLLGKDGEKLYTPSGNIVPRHLFRIKHLPYTTRRDSVLQMWRGMLNPGRS

SEQ ID NO: 91309 - protein, 311 aa, Homo sapiens; identical to SEQ ID NO: 91308
  Payload ID: 18263
  Gene Name: transmembrane protein 177
  Uniprot ID: Q53S58
  ENSP ID: ENSP00000385966

SEQ ID NO: 91310 - protein, 108 aa, Homo sapiens
  Payload ID: 18263
  Gene Name: transmembrane protein 177
  ENSP ID: ENSP00000386430
MAGPLWRTAAFVQRHRTGLLVGSCAGLFGVPISYHLFPDPVVQWLYQYWPQGQPAPLPPQLQSLFQEVLQDIGVPSGHCYKPFTTFTFQPEREHHRKVKKFALNHKTL

SEQ ID NO: 91311 - protein, 311 aa, Homo sapiens; identical to SEQ ID NO: 91308
  Payload ID: 18263
  Gene Name: transmembrane protein 177
  Uniprot ID: Q53S58
  ENSP ID: ENSP00000402661

SEQ ID NO: 91312 - protein, 114 aa, Homo sapiens
  Payload ID: 18263
  Gene Name: transmembrane protein 177
  ENSP ID: ENSP00000405898
MAGPLWRTAAFVQRHRTGLLVGSCAGLFGVPISYHLFPDPVVQWLYQYWPQGQPAPLPPQLQSLFQEVLQDIGVPSGHCYKPFTTFTFQPVSAGFPRLPAGAVVGIPASFLGDL

SEQ ID NO: 91313 - protein, 297 aa, Homo sapiens
  Payload ID: 18264
  Gene Name: transmembrane protein 178A
  Uniprot ID: Q8NBL3
  ENSP ID: ENSP00000281961
MEPRALVTALSLGLSLCSLGLLVTAIFTDHWYETDPRRHKESCERSRAGADPPDQKNRLMPLSHLPLRDSPPLGRRLLPGGPGRADPESWRSLLGLGGLDAECGRPLFATYSGLWRKCYFLGIDRDIDTLILKGIAQRCTAIKYHFSQPIRLRNIPFNLTKTIQQDEWHLLHLRRITAGFLGMAVAVLLCGCIVATVSFFWEESLTQHVAGLLFLMTGIFCTISLCTYAASISYDLNRLPKLIYSLPADVEHGYSWSIFCAWCSLGFIVAAGGLCIAYPFISRTKIAQLKSGRDSTV

SEQ ID NO: 91314 - protein, 111 aa, Homo sapiens
  Payload ID: 18264
  Gene Name: transmembrane protein 178A
  Uniprot ID: Q8NBL3
  ENSP ID: ENSP00000477622
MEPRALVTALSLGLSLCSLGLLVTAIFTDHWYETDPRRHKESCERSRAGADPPDQKNRLMPLSHLLGPLEEVLLPGHRPGHRHPHPERYCAAMHGHQVPLFSAHPLAKHSF

SEQ ID NO: 91315 - protein, 294 aa, Homo sapiens
  Payload ID: 18265
  Gene Name: transmembrane protein 178B
  Uniprot ID: H3BS89
  ENSP ID: ENSP00000456594
MAAGRLLLYTGLSLALCALGMLAVAICSDHWYETDARKHRDRCKAFNTRRVDPGFIYNNNNNLPLRASRSRLDRWEGKLLRARNRRQLFAMSPADECSRQYNSTNMGLWRKCHRQGFDPEIAALIRKGEIERCTYIKYHYSSATIPRNLTFNITKTIRQDEWHALHLRRMTAGFMGMAVAIILFGWIIGVLGCCWDRGLMQYVAGLLFLMGGTFCIISLCTCVAGINFELSRYPRYLYGLPDDISHGYGWSMFCAWGGLGLTLISGFFCTLAPSVQPVPRTNYPKSRPENGTVC

SEQ ID NO: 91316 - protein, 292 aa, Homo sapiens
  Payload ID: 18265
  Gene Name: transmembrane protein 178B
  ENSP ID: ENSP00000484025
MAAGRLLLYTGLSLALCALGMLAVAICSDHWYETDARKHRDRCKAFNTRRVDPGFIYNNNNNLPLRASRSRLDRWEGKLLRARNRRQLFAMSPADECSRQYNSTNMGLWRKCHRQGFDPEIAALIRKGEIERCTYIKYHYSSATIPRNLTFNVTKTLRCMYCMYLRRMTAGFMGMAVAIILFGWIIGVLGCCWDRGLMQYVAGLLFLMGGTFCIISLCTCVAGINFELSRYPRYLYGLPDDISHGYGWSMFCAWGGLGLTLISGFFCTLAPSVQPVPRTNYPKSRPENGTVC

SEQ ID NO: 91317 - protein, 197 aa, Homo sapiens
  Payload ID: 18266
  Gene Name: transmembrane protein 179
  Uniprot ID: Q6ZVK1
  ENSP ID: ENSP00000340477
MALNNFLFAQCACYFLAFLFSFVVVVPLSENGHDFRGRCLLFTEGMWLSANLTVQERERFTVQEWGPPAACRFSLLASLLSLLLAAAHAWRTLFFLCKGHEGSFFSAFLNLLVSAFVVFLVFIASTIVSVGFTMWCDTITEKGTVPHSCEELQDIDLELGVDNSAFYDQFAIAQVGGSGQEGRLAMLGGGHLLLDIC

SEQ ID NO: 91318 - protein, 190 aa, Homo sapiens
  Payload ID: 18266
  Gene Name: transmembrane protein 179
  ENSP ID: ENSP00000397763
MALNNFLFAQCACYFLAFLFSFVVVVPLSENGHDFRGRCLLFTEGMWLSANLTVQERERFTVQEWGPPAACRFSLLASLLSLLLAAAHAWRTLFFLCKGHEGSFFSAFLNLLVSAFVVFLVFIASTIVSVGFTMWCDTITEKGTVPHSCEELQDIDLELGVDNSAFYDQFAIAQGSLIDSHGVETPPGQS

SEQ ID NO: 91319 - protein, 233 aa, Homo sapiens
  Payload ID: 18266
  Gene Name: transmembrane protein 179
  Uniprot ID: Q6ZVK1
  ENSP ID: ENSP00000450958
MALNNFLFAQCACYFLAFLFSFVVVVPLSENGHDFRGRCLLFTEGMWLSANLTVQERERFTVQEWGPPAACRFSLLASLLSLLLAAAHAWRTLFFLCKGHEGSFFSAFLNLLVSAFVVFLVFIASTIVSVGFTMWCDTITEKGTVPHSCEELQDIDLELGVDNSAFYDQFAIAQFGLWASWLAWLAITTLAFLKVYHNYRQEDLLDSLIHEKELLLARPSPRTSFQEEKSAVI

SEQ ID NO: 91320 - protein, 78 aa, Homo sapiens
  Payload ID: 18266
  Gene Name: transmembrane protein 179
  ENSP ID: ENSP00000452113
  MOD_RES (1)..(1): Any amino acid
XPDPREGAAAGPAVPTHLLPRGEERCHLGTVQAGGAGPDLPAALGGTGLPGEAAGGLCLGPGHMQPCVCPLDATCSEP

SEQ ID NO: 91321 - protein, 182 aa, Homo sapiens
  Payload ID: 18266
  Gene Name: transmembrane protein 179
  ENSP ID: ENSP00000477614
MCTPVRVSIVCVMGAVGAVWTAPLPLPWAPTPSIHLREEGAAFPFCRVCVLRPRRSKWRSWDVNLGPRRRGLLGCGPCPSGKPRVHLQRTRSGAGAEAGGLPTRGSMRGCPFLGSSAAKCSLLLRPPSRGEASPWLPEFMTHPVHHQQLACVSGWLGTSLLEATCLGPHGGSWWGHHPGSRE

SEQ ID NO: 91322 - protein, 182 aa, Homo sapiens; identical to SEQ ID NO: 91321
  Payload ID: 18266
  Gene Name: transmembrane protein 179
  ENSP ID: ENSP00000479740

SEQ ID NO: 91323 - protein, 189 aa, Homo sapiens
  Payload ID: 18266
  Gene Name: transmembrane protein 179
  ENSP ID: ENSP00000481424
MALNNFLFAQCACYFLAFLFSFVVVVPLSENGHDFRGRCLLFTEGMWLSANLTVQERERFTVQEWGPPAACRFSLLASLLSLLLAAAHAWRTLFFLCKGHEGSFFSAFLNLLVSAFVVFLVFIASTIVSVGFTMWCDTITEKGTVPHSCEELQDIDLELGVDNSAFYDQFAIAQGSLIDSHGVETPPGQ

SEQ ID NO: 91324 - protein, 211 aa, Homo sapiens
  Payload ID: 18266
  Gene Name: transmembrane protein 179
  ENSP ID: ENSP00000483627
MALNNFLFAQCACYFLAFLFSFVVVVPLSENGHDFRGRCLLFTEGMWLSANLTVQERERFTVQEWGPPAACRFSLLASLLSLLLAAAHAWRTLFFLCKGHEGSFFSAFLNLLVSAFVVFLVFIASTIVSVGFTMWCDTITEKGTVPHSCEELQDIDLELGVDNSAFYDQFAIAQVQFRTPGWPLKALAGRGWPEDASPGQEPSKGAGHGWA

SEQ ID NO: 91325 - protein, 211 aa, Homo sapiens; identical to SEQ ID NO: 91324
  Payload ID: 18266
  Gene Name: transmembrane protein 179
  ENSP ID: ENSP00000484829

SEQ ID NO: 91326 - protein, 233 aa, Homo sapiens; identical to SEQ ID NO: 91319
  Payload ID: 18266
  Gene Name: transmembrane protein 179
  Uniprot ID: Q6ZVK1
  ENSP ID: ENSP00000485891

SEQ ID NO: 91327 - protein, 78 aa, Homo sapiens; identical to SEQ ID NO: 91320
  Payload ID: 18266
  Gene Name: transmembrane protein 179
  ENSP ID: ENSP00000486955
  MOD_RES (1)..(1): Any amino acid

SEQ ID NO: 91328 - protein, 197 aa, Homo sapiens; identical to SEQ ID NO: 91317
  Payload ID: 18266
  Gene Name: transmembrane protein 179
  Uniprot ID: Q6ZVK1
  ENSP ID: ENSP00000487568

SEQ ID NO: 91329 - protein, 219 aa, Homo sapiens
  Payload ID: 18267
  Gene Name: transmembrane protein 179B
  Uniprot ID: Q7Z7N9
  ENSP ID: ENSP00000333697
MALSWLQRVELALFAAAFLCGAVAAAAMTRTQGSFSGRCPLYGVATLNGSSLALSRPSAPSLCYFVAGASGLLALYCLLLLLFWIYSSCIEDSHRGAIGLRIALAISAIAVFLVLVSACILRFGTRSLCNSIISLNTTISCSEAQKIPWTPPGTALQFYSNLHNAETSSWVNLVLWCVVLVLQVVQWKSEATPYRPLERGDPEWSSETDALVGSRLSHS

SEQ ID NO: 91330 - protein, 144 aa, Homo sapiens
  Payload ID: 18267
  Gene Name: transmembrane protein 179B
  ENSP ID: ENSP00000433055
MALSWLQRVELALFAAAFLCGAVAAAAMTRTQGSFSGRCPLYGVATLNGSSLALSRPSAPSLCYFVAGASGLLALYCLLLLLFWIYSSCIEDSHRGAIGLRIALAISAIAVFLVLVSACILRFGTRSLCNSIISLNTTIRPLLG

SEQ ID NO: 91331 - protein, 95 aa, Homo sapiens
  Payload ID: 18267
  Gene Name: transmembrane protein 179B
  ENSP ID: ENSP00000436606
  MOD_RES (1)..(1): Any amino acid
XLFWIYSSCIEDSHRGAIGLRIALAISAIAVFLVLVSACILRFGTRSLCNSIISLNTTISCSEAQKIPWTPPGTALQFYSNLHNAEVRPKDRRKN

SEQ ID NO: 91332 - protein, 140 aa, Homo sapiens
  Payload ID: 18268
  Gene Name: transmembrane protein 18
  Uniprot ID: Q96B42
  ENSP ID: ENSP00000281017
MPSAFSVSSFPVSIPAVLTQTDWTEPWLMGLATFHALCVLLTCLSSRSYRLQIGHFLCLVILVYCAEYINEAAAMNWRLFSKYQYFDSRGMFISIVFSAPLLVNAMIIVVMWVWKTLNVMTDLKNAQERRKEKKRRRKED

SEQ ID NO: 91333 - protein, 127 aa, Homo sapiens
  Payload ID: 18268
  Gene Name: transmembrane protein 18
  Uniprot ID: Q96B42
  ENSP ID: ENSP00000347874
MLSGYLQTDWTEPWLMGLATFHALCVLLTCLSSRSYRLQIGHFLCLVILVYCAEYINEAAAMNWRLFSKYQYFDSRGMFISIVFSAPLLVNAMIIVVMWVWKTLNVMTDLKNAQERRKEKKRRRKED

SEQ ID NO: 91334 - protein, 143 aa, Homo sapiens
  Payload ID: 18268
  Gene Name: transmembrane protein 18
  ENSP ID: ENSP00000384347
MGTRWGLGRKPCSPHLRASGLLQTDWTEPWLMGLATFHALCVLLTCLSSRSYRLQIGHFLCLVILVYCAEYINEAAAMNWRLFSKYQYFDSRGMFISIVFSAPLLVNAMIIVVMWVWKTLNVMTDLKNAQERRKEKKRRRKED

SEQ ID NO: 91335 - protein, 66 aa, Homo sapiens
  Payload ID: 18268
  Gene Name: transmembrane protein 18
  ENSP ID: ENSP00000390474
MPSAFSVSSFPVSIPAVLTVQQGPGESRRRRSAALSGEFSVLQRGWRKSSLARGDGSRFPEVFSAD

SEQ ID NO: 91336 - protein, 59 aa, Homo sapiens
  Payload ID: 18268
  Gene Name: transmembrane protein 18
  ENSP ID: ENSP00000408658
MGSGQKAVLPSPPCLWSSGTAGSRGVQEAAECGTVWRVQCIAERLEKIKSCTWRWLKIP

SEQ ID NO: 91337 - protein, 517 aa, Homo sapiens
  Payload ID: 18269
  Gene Name: transmembrane protein 180
  Uniprot ID: Q14CX5
  ENSP ID: ENSP00000238936
MGLGQPQAWLLGLPTAVVYGSLALFTTILHNVFLLYYVDTFVSVYKINKMAFWVGETVFLLWNSLNDPLFGWLSDRQFLSSQPRSGAGLSSRAVVLARVQALGWHGPLLALSFLAFWVPWAPAGLQFLLCLCLYDGFLTLVDLHHHALLADLALSAHDRTHLNFYCSLFSAAGSLSVFASYAFWNKEDFSSFRAFCVTLAVSSGLGFLGATQLLRRRVEAARKDPGCSGLVVDSGLCGEELLVGSEEADSITLGRYLRQLARHRNFLWFVSMDLVQVFHCHFNSNFFPLFLEHLLSDHISLSTGSILLGLSYVAPHLNNLYFLSLCRRWGVYAVVRGLFLLKLGLSLLMLLAGPDHLSLLCLFIASNRVFTEGTCKLLTLVVTDLVDEDLVLNHRKQAASALLFGMVALVTKPGQTFAPLLGTWLLCFYTGHDLFQQSLITPVGSAHPWPEPPAPAPAQAPTLRQGCFYLLVLVPITCALLQLFTWSQFTLHGRRLHMVKAQRQNLSQAQTLDVKMV

SEQ ID NO: 91338 - protein, 153 aa, Homo sapiens
  Payload ID: 18269
  Gene Name: transmembrane protein 180
  ENSP ID: ENSP00000358947
MGLGQPQAWLLGLPTAVVYGSLALFTTILHNVFLLYYVDTFVSVYKINKMAFWVGETVFLLWNSLNDPLFGWLSDRQFLSSQPRLCGEELLVGSEEADSITLGRYLRQLARHRNFLWFVSMDLVQVQWLTPVIPALRDAKVERPLEPRSSRLQ

SEQ ID NO: 91339 - protein, 612 aa, Homo sapiens
  Payload ID: 18270
  Gene Name: transmembrane protein 181
  Uniprot ID: Q9P2C4
  ENSP ID: ENSP00000356057
MGAAPSPTQASSRGGGPGPPAPTRAVSSSSRARGGALSALGPSPARPLTTSPAPAPPPRSRPARQQPDPQCWEKRGGAGGDTKGGAAGPGPGRLRGMDAEYPAFEPPLCSELKHLCRRLREAYRELKEDLTPFKDDRYYRLAPMRLYTLSKRHFVLVFVVFFICFGLTIFVGIRGPKVIQTSAANFSLNNSKKLKPIQILSNPLSTYNQQLWLTCVVELDQSKETSIKTSFPMTVKVDGVAQDGTTMYIHNKVHNRTRTLTCAGKCAEIIVAHLGYLNYTQYTVIVGFEHLKLPIKGMNFTWKTYNPAFSRLEIWFRFFFVVLTFIVTCLFAHSLRKFSMRDWGIEQKWMSVLLPLLLLYNDPFFPLSFLVNSWLPGMLDDLFQSMFLCALLLFWLCVYHGIRVQGERKCLTFYLPKFFIVGLLWLASVTLGIWQTVNELHDPMYQYRVDTGNFQGMKVFFMVVAAVYILYLLFLIVRACSELRHMPYVDLRLKFLTALTFVVLVISIAILYLRFGAQVLQDNFVAELSTHYQNSAEFLSFYGLLNFYLYTLAFVYSPSKNALYESQLKDNPAFSMLNDSDDDVIYGSDYEEMPLQNGQAIRAKYKEESDSD

SEQ ID NO: 91340 - protein, 186 aa, Homo sapiens
  Payload ID: 18271
  Gene Name: transmembrane protein 182
  ENSP ID: ENSP00000387184
MIENVTFHHEGFFWRCWFNGIVEENDSNIWKFWYTNQPPSKNCTHAYLSPYPFMRGEHNSTSYDSAVIYRGFWAVLMLLGVVAVVIASFLIICAAPFASHFLYKAGGGSYIAAGILFSLVVMLYVIWVQAVADMESYRNMKMKDCLDFTPSVLYGWSFFLAPAGIFFSLLAGLLFLVVGWHIQIHH

SEQ ID NO: 91341 - protein, 133 aa, Homo sapiens
  Payload ID: 18271
  Gene Name: transmembrane protein 182
  Uniprot ID: Q6ZP80
  ENSP ID: ENSP00000387258
MRGEHNSTSYDSAVIYRGFWAVLMLLGVVAVVIASFLIICAAPFASHFLYKAGGGSYIAAGILFSLVVMLYVIWVQAVADMESYRNMKMKDCLDFTPSVLYGWSFFLAPAGIFFSLLAGLLFLVVGWHIQIHH

SEQ ID NO: 91342 - protein, 80 aa, Homo sapiens
  Payload ID: 18271
  Gene Name: transmembrane protein 182
  ENSP ID: ENSP00000392106
MIENVTFHHEGFFWRCWFNGIVEENDSNIWKFWYTNQPPSKNCTHAYLSPYPFMRGEHNSTSYDSAVIYRGFWAVLMLLG

SEQ ID NO: 91343 - protein, 229 aa, Homo sapiens
  Payload ID: 18271
  Gene Name: transmembrane protein 182
  Uniprot ID: Q6ZP80
  ENSP ID: ENSP00000394178
MRLNIAIFFGALFGALGVLLFLVAFGSDYWLLATEVGRCSGEKNIENVTFHHEGFFWRCWFNGIVEENDSNIWKFWYTNQPPSKNCTHAYLSPYPFMRGEHNSTSYDSAVIYRGFWAVLMLLGVVAVVIASFLIICAAPFASHFLYKAGGGSYIAAGILFSLVVMLYVIWVQAVADMESYRNMKMKDCLDFTPSVLYGWSFFLAPAGIFFSLLAGLLFLVVGWHIQIHH

SEQ ID NO: 91344 - protein, 376 aa, Homo sapiens
  Payload ID: 18272
  Gene Name: transmembrane protein 183A
  Uniprot ID: Q8IXX5
  ENSP ID: ENSP00000356211
MARGPGPLGRPRPDTVAMPKRGKRLKFRAHDACSGRVTVADYANSDPAVVRSGRVKKAVANAVQQEVKSLCGLEASQVPAEEALSGAGEPCDIIDSSDEMDAQEESIHERTVSRKKKSKRHKEELDGAGGEEYPMDIWLLLASYIRPEDIVNFSLICKNAWTVTCTAAFWTRLYRRHYTLDASLPLRLRPESMEKLRCLRACVIRSLYHMYEPFAARISKNPAIPESTPSTLKNSKCLLFWCRKIVGNRQEPMWEFNFKFKKQSPRLKSKCTGGLQPPVQYEDVHTNPDQDCCLLQVTTLNFIFIPIVMGMIFTLFTINVSTDMRHHRVRLVFQDSPVHGGRKLRSEQGVQVILDPVHSVRLFDWWHPQYPFSLRA

SEQ ID NO: 91345 - protein, 413 aa, Homo sapiens
  Payload ID: 18273
  Gene Name: transmembrane protein 184A
  Uniprot ID: Q6ZMB5
  ENSP ID: ENSP00000297477
MSNVSGILETAGVPLVSANWPQPSPPPAVPAGPQMDHMGNSSQGAPWLFLTSALARGVSGIFVWTALVLTCHQIYLHLRSYTVPQEQRYIIRLLLIVPIYAFDSWLSLLLLGDHQYYVYFDSVRDCYEAFVIYSFLSLCFQYLGGEGAIMAEIRGKPIKSSCLYGTCCLRGMTYSIGFLRFCKQATLQFCLVKPVMAVTTIILQAFGKYHDGDFNVRSGYLYVTLIYNASVSLALYALFLFYFTTRELLRPFQPVLKFLTIKAVIFLSFWQGLLLAILERCGVIPEVETSGGNKLGAGTLAAGYQNFIICVEMLFASVALRYAFPCQVYAEKKENSPAPPAPMQSISSGIRETVSPQDIVQDAIHNFSPAYQHYTQQATHEAPRPGTHPSGGSGGSRKSRSLEKRMLIPSEDL

SEQ ID NO: 91346 - protein, 247 aa, Homo sapiens
  Payload ID: 18273
  Gene Name: transmembrane protein 184A
  ENSP ID: ENSP00000325945
MSNVSGILETAGVPLVSANWPQPSPPPAVPAGPQMDHMGNSSQGAPWLFLTSALARGVSGIFVWTALVLTCHQIYLHLRSYTVPQEQRYIIRLLLIVPIYAFDSWLSLLLLGDHQYYVYFDSVRDCYEAFVIYSFLSLCFQYLGGEGAIMAEIRGKPIKSSCLYGTCCLRGMTYSIGFLRFCKQATLQFCLVKPVMAVTTIILQAFGKYHDGDFKTSVPAKAGGLDLPSQDTAGCPQRLPLCDPHLQ

SEQ ID NO: 91347 - protein, 166 aa, Homo sapiens
  Payload ID: 18273
  Gene Name: transmembrane protein 184A
  ENSP ID: ENSP00000326348
MSNVSGILETAGVPLVSANWPQPSPPPAVPAGPQMDHMGNSSQGAPWLFLTSALARGVSGIFVWTALVLTCHQIYLHLRSYTVPQEQRYIIRLLLIVPIYAFDSWLSLLLLGDHQYYVYFDSVRDCYEAFVIYSFLSLCFQYLGGEGAIMAEIRGKPIKPLCSSAW

SEQ ID NO: 91348 - protein, 158 aa, Homo sapiens
  Payload ID: 18273
  Gene Name: transmembrane protein 184A
  ENSP ID: ENSP00000389092
MSNVSGILETAGVPLVSANWPQPSPPPAVPAGPQMDHMGNSSQGAPWLFLTSALARGVSGIFVWTALVLTCHQIYLHLRSYTVPQEQRYIIRLLLIVPIYAFDSWLSLLLLGDHQYYVYFDSVRDCYEAFVIYSFLSLCFQYLGGEGAIMAEIRGKPI

SEQ ID NO: 91349 - protein, 175 aa, Homo sapiens
  Payload ID: 18273
  Gene Name: transmembrane protein 184A
  ENSP ID: ENSP00000398382
MSNVSGILETAGVPLVSANWPQPSPPPAVPAGPQMDHMGNSSQGAPWLFLTSALARGVSGIFVWTALVLTCHQIYLHLRSYTVPQEQRYIIRLLLIVPIYAFDSWLSLLLLGDHQYYVYFDSVRDCYEAFVIYSFLSLCFQYLGGEGAIMAEIRGKPIKSSCLYGTCCLRGMTYS

SEQ ID NO: 91350 - protein, 139 aa, Homo sapiens
  Payload ID: 18273
  Gene Name: transmembrane protein 184A
  ENSP ID: ENSP00000403499
MSNVSGILETAGVPLVSANWPQPSPPPAVPAGPQMDHMGNSSQGAPWLFLTSALARGVSGIFVWTALVLTCHQIYLHLRSYTVPQEQRYIIRLLLIVPIYAFDSWLSLLLLGDHQYYVYFDSVRDCYEAFVIYSFLSLC

SEQ ID NO: 91351 - protein, 130 aa, Homo sapiens
  Payload ID: 18273
  Gene Name: transmembrane protein 184A
  ENSP ID: ENSP00000413955
MSNVSGILETAGVPLVSANWPQPSPPPAVPAGPQMDHMGNSSQGAPWLFLTSALARGVSGIFVWTALVLTCHQIYLHLRSYTVPQEQRYIIRLLLIVPIYAFDSWLSLLLLGDHQYYVYFDSVRDCYEAS

SEQ ID NO: 91352 - protein, 407 aa, Homo sapiens
  Payload ID: 18274
  Gene Name: transmembrane protein 184B
  Uniprot ID: Q9Y519
  ENSP ID: ENSP00000354441
MTVRGDVLAPDPASPTTAAASPSVSVIPEGSPTAMEQPVFLMTTAAQAISGFFVWTALLITCHQIYMHLRCYSCPNEQRYIVRILFIVPIYAFDSWLSLLFFTNDQYYVYFGTVRDCYEALVIYNFLSLCYEYLGGESSIMSEIRGKPIESSCMYGTCCLWGKTYSIGFLRFCKQATLQFCVVKPLMAVSTVVLQAFGKYRDGDFDVTSGYLYVTIIYNISVSLALYALFLFYFATRELLSPYSPVLKFFMVKSVIFLSFWQGMLLAILEKCGAIPKIHSARVSVGEGTVAAGYQDFIICVEMFFAALALRHAFTYKVYADKRLDAQGRCAPMKSISSSLKETMNPHDIVQDAIHNFSPAYQQYTQQSTLEPGPTWRGGAHGLSRSHSLSGARDNEKTLLLSSDDEF

SEQ ID NO: 91353 - protein, 407 aa, Homo sapiens; identical to SEQ ID NO: 91352
  Payload ID: 18274
  Gene Name: transmembrane protein 184B
  Uniprot ID: Q9Y519
  ENSP ID: ENSP00000355210

SEQ ID NO: 91354 - protein, 72 aa, Homo sapiens
  Payload ID: 18274
  Gene Name: transmembrane protein 184B
  ENSP ID: ENSP00000393918
MTVRGDVLAPDPASPTTAAASPSVSVIPEGSPTAMEQPVFLMTTAAQAISGFFVWTALLITCHQPRARLGQV

SEQ ID NO: 91355 - protein, 75 aa, Homo sapiens
  Payload ID: 18274
  Gene Name: transmembrane protein 184B
  ENSP ID: ENSP00000399073
MTVRGDVLAPDPASPTTAAASPSVSVIPEGSPTAMEQPVFLMTTAAQAISGFFVWTALLITCHQNPSICGPILLI

SEQ ID NO: 91356 - protein, 72 aa, Homo sapiens; identical to SEQ ID NO: 91354
  Payload ID: 18274
  Gene Name: transmembrane protein 184B
  ENSP ID: ENSP00000413085

SEQ ID NO: 91357 - protein, 348 aa, Homo sapiens
  Payload ID: 18274
  Gene Name: transmembrane protein 184B
  ENSP ID: ENSP00000488878
  MOD_RES (1)..(1): Any amino acid
XHLRCYSCPNEQRYIVRILFIVPIYAFDSWLSLLFFTNDQYYVYFGTVRDCYEALVIYNFLSLCYEYLGGESSIMSEIRGKPIESSCMYGTCCLWGKTYSIGFLRFCKQATLQFCVVKPLMAVSTVVLQAFGKYRDGDFDVTSGYLYVTIIYNISVSLALYALFLFYFATRELLSPYSPVLKFFMVKSVIFLSFWQGMLLAILEKCGAIPKIHSARVSVGEGTVAAGYQDFIICVEMFFAALALRHAFTYKVYADKRLDAQVPTYGPYGRCAPMKSISSSLKETMNPHDIVQDAIHNFSPAYQQYTQQSTLEPGPTWRGGAHGLSRSHSLSGARDNEKTLLLSSDDEF

SEQ ID NO: 91358 - protein, 438 aa, Homo sapiens
  Payload ID: 18275
  Gene Name: transmembrane protein 184C
  Uniprot ID: Q9NVA4
  ENSP ID: ENSP00000296582
MPCTCTWRNWRQWIRPLVAVIYLVSIVVAVPLCVWELQKLEVGIHTKAWFIAGIFLLLTIPISLWVILQHLVHYTQPELQKPIIRILWMVPIYSLDSWIALKYPGIAIYVDTCRECYEAYVIYNFMGFLTNYLTNRYPNLVLILEAKDQQKHFPPLCCCPPWAMGEVLLFRCKLGVLQYTVVRPFTTIVALICELLGIYDEGNFSFSNAWTYLVIINNMSQLFAMYCLLLFYKVLKEELSPIQPVGKFLCVKLVVFVSFWQAVVIALLVKVGVISEKHTWEWQTVEAVATGLQDFIICIEMFLAAIAHHYTFSYKPYVQEAEEGSCFDSFLAMWDVSDIRDDISEQVRHVGRTVRGHPRKKLFPEDQDQNEHTSLLSSSSQDAISIASSMPPSPMGHYQGFGHTVTPQTTPTTAKISDEILSDTIGEKKEPSDKSVDS

SEQ ID NO: 91359 - protein, 72 aa, Homo sapiens
  Payload ID: 18275
  Gene Name: transmembrane protein 184C
  ENSP ID: ENSP00000421159
LGIYDEGNFSFSNAWTYLVIINNMSQLFAMYCLLLFYKVLKEELSPIQPVGKFLCVKLVVFVSFCIRGNGKL

SEQ ID NO: 91360 - protein, 261 aa, Homo sapiens
  Payload ID: 18275
  Gene Name: transmembrane protein 184C
  ENSP ID: ENSP00000425940
MPCTCTWRNWRQWIRPLVAVIYLVSIVVAVPLCVWELQKLEVGIHTKAWFIAGIFLLLTIPISLWVILQHLVHYTQPELQKPIIRILWMVPIYSLDSWIALKYPGIAIYVDTCRECYEAYVIYNFMGFLTNYLTNRYPNLVLILEAKDQQKHFPPLCCCPPWAMGEVLLFRCKLGVLQYTVVRPFTTIVALICELLGIYDEGNFSFSNAWTYLVIINNMSQLFAMYCLLLFYKVLKEELSPIQPVGKFLCVKLVVFVSFWP

SEQ ID NO: 91361 - protein, 173 aa, Homo sapiens
  Payload ID: 18276
  Gene Name: transmembrane protein 185A
  ENSP ID: ENSP00000427766
MNLRGLFQDFNPSKFLIYACLLLFSVLLALRLDGIIQWSYWAVFAPIWLWKLMVIVGASVGTGVWARNPQYRAEGETCVEFKAMLIAVGIHLLLLMFEVLVCDRIERGSHFWLLVFMPLFFVSPVSVAACVWGFRHDRSLELEILCSVNILQFIFIALRLDKIIHWPWLVCNF

SEQ ID NO: 91362 - protein, 223 aa, Homo sapiens
  Payload ID: 18276
  Gene Name: transmembrane protein 185A
  ENSP ID: ENSP00000427814
  MOD_RES (1)..(1): Any amino acid
XVCDRIERGSHFWLLVFMPLFFVSPVSVAACVWGFRHDRSLEVVCVPLWILMSFLCLVVLYYIVWSVLFLRSMDVIAEQRRTHITMALSWMTIVVPLLTFEILLVHKLDGHNAFSCIPIFVPLWLSLITLMATTFGQKGGNHWWFGIRKDFCQFLLEIFPFLREYGNISYDLHHEDNEETEETPVPEPPKIAPMFRKKARVVITQSPGKYVLPPPKLNIEMPD

SEQ ID NO: 91363 - protein, 60 aa, Homo sapiens
  Payload ID: 18276
  Gene Name: transmembrane protein 185A
  ENSP ID: ENSP00000428659
MNLRGLFQDFNPRAEGETCVEFKAMLIAVGIHLLLLMFEVLVCDRIERGSHFWLLVFMPL

SEQ ID NO: 91364 - protein, 79 aa, Homo sapiens
  Payload ID: 18276
  Gene Name: transmembrane protein 185A
  ENSP ID: ENSP00000428852
MNLRGLFQDFNPSKFLIYACLLLFSVLLALRLDGIIQWSYWAVFAPIWLWKLMVIVGASVGTGVWARNPQYRRRNVCGV

SEQ ID NO: 91365 - protein, 60 aa, Homo sapiens
  Payload ID: 18276
  Gene Name: transmembrane protein 185A
  ENSP ID: ENSP00000429625
  MOD_RES (1)..(1): Any amino acid
XKFLIYACLLLFSVLLALRLDGIIQWSYWAVFAPIWLWKLMVIVGASVGTGVWARNPQYR

SEQ ID NO: 91366 - protein, 350 aa, Homo sapiens
  Payload ID: 18276
  Gene Name: transmembrane protein 185A
  Uniprot ID: Q8NFB2
  ENSP ID: ENSP00000471932
MNLRGLFQDFNPSKFLIYACLLLFSVLLALRLDGIIQWSYWAVFAPIWLWKLMVIVGASVGTGVWARNPQYRAEGETCVEFKAMLIAVGIHLLLLMFEVLVCDRIERGSHFWLLVFMPLFFVSPVSVAACVWGFRHDRSLELEILCSVNILQFIFIALRLDKIIHWPWLVVCVPLWILMSFLCLVVLYYIVWSVLFLRSMDVIAEQRRTHITMALSWMTIVVPLLTFEILLVHKLDGHNAFSCIPIFVPLWLSLITLMATTFGQKGGNHWWFGIRKDFCQFLLEIFPFLREYGNISYDLHHEDNEETEETPVPEPPKIAPMFRKKARVVITQSPGKYVLPPPKLNIEMPD

SEQ ID NO: 91367 - protein, 172 aa, Homo sapiens
  Payload ID: 18276
  Gene Name: transmembrane protein 185A
  ENSP ID: ENSP00000482375
MSFLCLVVLYYIVWSVLFLRSMDVIAEQRRTHITMALSWMTIVVPLLTFEILLVHKLDGHNAFSCIPIFVPLWLSLITLMATTFGQKGGNHWWFGIRKDFCQFLLEIFPFLREYGNISYDLHHEDNEETEETPVPEPPKIAPMFRKKARVVITQSPGKYVLPPPKLNIEMPD

SEQ ID NO: 91368 - protein, 45 aa, Homo sapiens
  Payload ID: 18276
  Gene Name: transmembrane protein 185A
  ENSP ID: ENSP00000483167
MNLRGLFQDFNPRLCVSRCGFSCPFCAWWSSTTLCGPSCSCALWM

SEQ ID NO: 91369 - protein, 291 aa, Homo sapiens
  Payload ID: 18276
  Gene Name: transmembrane protein 185A
  ENSP ID: ENSP00000483235
MNLRGLFQDFNPRAEGETCVEFKAMLIAVGIHLLLLMFEVLVCDRIERGSHFWLLVFMPLFFVSPVSVAACVWGFRHDRSLELEILCSVNILQFIFIALRLDKIIHWPWLVVCVPLWILMSFLCLVVLYYIVWSVLFLRSMDVIAEQRRTHITMALSWMTIVVPLLTFEILLVHKLDGHNAFSCIPIFVPLWLSLITLMATTFGQKGGNHWWFGIRKDFCQFLLEIFPFLREYGNISYDLHHEDNEETEETPVPEPPKIAPMFRKKARVVITQSPGKYVLPPPKLNIEMPD

SEQ ID NO: 91370 - protein, 350 aa, Homo sapiens
  Payload ID: 18277
  Gene Name: transmembrane protein 185B
  Uniprot ID: Q9H7F4
  ENSP ID: ENSP00000453399
MNPRGLFQDFNPSKFLIYTCLLLFSVLLPLRLDGIIQWSYWAVFAPIWLWKLLVVAGASVGAGVWARNPRYRTEGEACVEFKAMLIAVGIHLLLLMFEVLVCDRVERGTHFWLLVFMPLFFVSPVSVAACVWGFRHDRSLELEILCSVNILQFIFIALKLDRIIHWPWLVVFVPLWILMSFLCLVVLYYIVWSLLFLRSLDVVAEQRRTHVTMAISWITIVVPLLTFEVLLVHRLDGHNTFSYVSIFVPLWLSLLTLMATTFRRKGGNHWWFGIRRDFCQFLLEIFPFLREYGNISYDLHHEDSEDAEETSVPEAPKIAPIFGKKARVVITQSPGKYVPPPPKLNIDMPD

SEQ ID NO: 91371 - protein, 213 aa, Homo sapiens
  Payload ID: 18278
  Gene Name: transmembrane protein 186
  Uniprot ID: Q96B77
  ENSP ID: ENSP00000331640
MAALLRAVRRFRGKAVWERPLHGLWCCSGQEDPKRWVGSSSPISKEKLPNAETEKFWMFYRFDAIRTFGFLSRLKLAQTALTVVALPPGYYLYSQGLLTLNTVCLMSGISGFALTMLCWMSYFLRRLVGILYLNESGTMLRVAHLNFWGWRQDTYCPMADVIPLTETKDRPQEMFVRIQRYSGKQTFYVTLRYGRILDRERFTQVFGVHQMLK

SEQ ID NO: 91372 - protein, 261 aa, Homo sapiens
  Payload ID: 18279
  Gene Name: transmembrane protein 187
  Uniprot ID: Q14656
  ENSP ID: ENSP00000358999
MNPEWGQAFVHVAVAGGLCAVAVFTGIFDSVSVQVGYEHYAEAPVAGLPAFLAMPFNSLVNMAYTLLGLSWLHRGGAMGLGPRYLKDVFAAMALLYGPVQWLRLWTQWRRAAVLDQWLTLPIFAWPVAWCLYLDRGWRPWLFLSLECVSLASYGLALLHPQGFEVALGAHVVAAVGQALRTHRHYGSTTSATYLALGVLSCLGFVVLKLCDHQLARWRLFQCLTGHFWSKVCDVLQFHFAFLFLTHFNTHPRFHPSGGKTR

SEQ ID NO: 91373 - protein, 66 aa, Homo sapiens
  Payload ID: 18279
  Gene Name: transmembrane protein 187
  ENSP ID: ENSP00000390108
MNPEWGQAFVHVAVAGGLCAVAVFTGIFDSVSVQVGYEHYAEAPVAGLPAFLAMPFNSLVNMAYTL

SEQ ID NO: 91374 - protein, 33 aa, Homo sapiens
  Payload ID: 18279
  Gene Name: transmembrane protein 187
  ENSP ID: ENSP00000412872
MNPEWGQAFVHVAVAGGLCAVAVFTGIFDSVSV

SEQ ID NO: 91375 - protein, 267 aa, Homo sapiens
  Payload ID: 18280
  Gene Name: transmembrane protein 189
  Uniprot ID: A5PLL7
  ENSP ID: ENSP00000360713
MAGAENWPGQQLELDEDEASCCRWGAQHAGARELAALYSPGKRLQEWCSVILCFSLIAHNLVHLLLLARWEDTPLVILGVVAGALIADFLSGLVHWGADTWGSVELPIAFIRPFREHHIDPTAITRHDFIETNGDNCLVTLLPLLNMAYKFRTHSPEALEQLYPWECFVFCLIIFGTFTNQIHKWSHTYFGLPRWVTLLQDWHVILPRKHHRIHHVSPHETYFCITTGWLNYPLEKIGFWRRLEDLIQGLTGEKPRADDMKWAQKIK

SEQ ID NO: 91376 - protein, 270 aa, Homo sapiens
  Payload ID: 18280
  Gene Name: transmembrane protein 189
  Uniprot ID: A5PLL7
  ENSP ID: ENSP00000360715
MAGAENWPGQQLELDEDEASCCRWGAQHAGARELAALYSPGKRLQEWCSVILCFSLIAHNLVHLLLLARWEDTPLVILGVVAGALIADFLSGLVHWGADTWGSVELPIVGKAFIRPFREHHIDPTAITRHDFIETNGDNCLVTLLPLLNMAYKFRTHSPEALEQLYPWECFVFCLIIFGTFTNQIHKWSHTYFGLPRWVTLLQDWHVILPRKHHRIHHVSPHETYFCITTGWLNYPLEKIGFWRRLEDLIQGLTGEKPRADDMKWAQKIK

SEQ ID NO: 91377 - protein, 195 aa, Homo sapiens
  Payload ID: 18280
  Gene Name: transmembrane protein 189
  ENSP ID: ENSP00000360719
MNERAIAGALIADFLSGLVHWGADTWGSVELPIVGKAFIRPFREHHIDPTAITRHDFIETNGDNCLVTLLPLLNMAYKFRTHSPEALEQLYPWECFVFCLIIFGTFTNQIHKWSHTYFGLPRWVTLLQDWHVILPRKHHRIHHVSPHETYFCITTGWLNYPLEKIGFWRRLEDLIQGLTGEKPRADDMKWAQKIK

SEQ ID NO: 91378 - protein, 91 aa, Homo sapiens
  Payload ID: 18280
  Gene Name: transmembrane protein 189
  ENSP ID: ENSP00000360721
MAGAENWPGQQLELDEDEASCCRWGAQHAGARELAALYSPGKRLQEWCSVILCFSLIAHNLVHLLLLARWEDTPLVILGVGFHPTLPGAPH

SEQ ID NO: 91379 - protein, 45 aa, Homo sapiens
  Payload ID: 18280
  Gene Name: transmembrane protein 189
  ENSP ID: ENSP00000411045
MAGAENWPGQQLELDEDEASCCRWGAQHAGARELAALYSPVPFTL

SEQ ID NO: 91380 - protein, 336 aa, Homo sapiens
  Payload ID: 18281
  Gene Name: transmembrane protein 19
  Uniprot ID: Q96HH6
  ENSP ID: ENSP00000266673
MTDLNDNICKRYIKMITNIVILSLIICISLAFWIISMTASTYYGNLRPISPWRWLFSVVVPVLIVSNGLKKKSLDHSGALGGLVVGFILTIANFSFFTSLLMFFLSSSKLTKWKGEVKKRLDSEYKEGGQRNWVQVFCNGAVPTELALLYMIENGPGEIPVDFSKQYSASWMCLSLLAALACSAGDTWASEVGPVLSKSSPRLITTWEKVPVGTNGGVTVVGLVSSLLGGTFVGIAYFLTQLIFVNDLDISAPQWPIIAFGGLAGLLGSIVDSYLGATMQYTGLDESTGMVVNSPTNKARHIAGKPILDNNAVNLFSSVLIALLLPTAAWGFWPRG

SEQ ID NO: 91381 - protein, 152 aa, Homo sapiens
  Payload ID: 18281
  Gene Name: transmembrane protein 19
  ENSP ID: ENSP00000448069
  MOD_RES (1)..(1): Any amino acid
XDTWASEVGPVLSKSSPRLITTWEKVPVGTNGGVTVVGLVSSLLGGTFVGIAYFLTQLIFVNDLDISAPQWPIIAFGGLAGLLGSIVDSYLGATMQYTGLDESTGMVVNSPTNKARHIAGKPILDNNAVNLFSSVLIALLLPTAAWGFWPRG

SEQ ID NO: 91382 - protein, 143 aa, Homo sapiens
  Payload ID: 18281
  Gene Name: transmembrane protein 19
  ENSP ID: ENSP00000448528
MFFLSSSKLTKWKGEVKKRLDSEYKEGGQRNWVQVFCNGAVPTELALLYMIENGPGEIPVDFSKQYSASWMCLSLLAALACSAGDTWASEVGPVLSKSSPRLITTWEKVPVGTNGGVTVVGLVSSLLGGTFVGIAYFLTQLIF

SEQ ID NO: 91383 - protein, 170 aa, Homo sapiens
  Payload ID: 18281
  Gene Name: transmembrane protein 19
  ENSP ID: ENSP00000448587
MTDLNDNICKRYIKMITNIVILSLIICISLAFWIISMTASTYYGNLRPISPWRWLFSVVVPVLIVSNGLKKKSLDHSGALGGLVVGFILTIANFSFFTSLLMFFLSSSKLTKWKGEVKKRLDSEYKEGGQRNWVQVFCNGAVPTELALLYMIENGPGEIPVDFSKQYSAS

SEQ ID NO: 91384 - protein, 298 aa, Homo sapiens
  Payload ID: 18281
  Gene Name: transmembrane protein 19
  Uniprot ID: Q96HH6
  ENSP ID: ENSP00000449955
MTDLNDNICKRYIKMITNIVILSLIICISLAFWIISMTASTYYGNLRPISPWRWLFSVVVPVLIVSNGLKKKSLDHSGALGGLVVGFILTIANFSFFTSLLMFFLSSSKLTKWKGEVKKRLDSEYKEGGQRNWVQVFCNGAVPTELALLYMIENGPGEIPVDFSKQYSASWMCLSLLAALACSAGDTWASEVGPVLSKSSPRLITTWEKVPVGTNGGVTVVGLVSSLLGGTFVGIAYFLTQLIFVNDLDISAPQWPIIAFGGLAGLLGSIVDSYLGATMQYTGKNIPSFLQLIGMLKK

SEQ ID NO: 91385 - protein, 166 aa, Homo sapiens
  Payload ID: 18281
  Gene Name: transmembrane protein 19
  ENSP ID: ENSP00000450089
GEIPVDFSKQYSASWMCLSLLAALACSAGDTWASEVGPVLSKSSPRLITTWEKVPVGTNGGVTVVGLVSSLLGGTFVGIAYFLTQLIFVNDLDISAPQWPIIAFGGLAGLLGSIVDSYLGATMQYTGLDESTGMVVNSPTNKNGQFMLKSLFMERALCNSIIKLPT

SEQ ID NO: 91386 - protein, 177 aa, Homo sapiens
  Payload ID: 18282
  Gene Name: transmembrane protein 190
  Uniprot ID: Q8WZ59
  ENSP ID: ENSP00000291934
MLGCGIPALGLLLLLQGSADGNGIQGFFYPWSCEGDIWDRESCGGQAAIDSPNLCLRLRCCYRNGVCYHQRPDENVRRKHMWALVWTCSGLLLLSCSICLFWWAKRRDVLHMPGFLAGPCDMSKSVSLLSKHRGTKKTPSTGSVPVALSKESRDVEGGTEGEGTEEGEETEGEEEED

SEQ ID NO: 91387 - protein, 121 aa, Homo sapiens
  Payload ID: 18283
  Gene Name: transmembrane protein 191B
  ENSP ID: ENSP00000477586
MEAAEELDAWQSGRELCDGQLRGVQYSTESLMEEMARADRETRLFGGPRALAIRRCVLGALQVLLTLPLLFLGLSLLWTVLLDPGAVSAWLWSLTSETTLRRLRYTLSPLLELRANGLLPT

SEQ ID NO: 91388 - protein, 346 aa, Homo sapiens
  Payload ID: 18283
  Gene Name: transmembrane protein 191B
  Uniprot ID: P0C7N4
  ENSP ID: ENSP00000481358
MCRATLGLPLPPIVIQPARRSLPPIVTPASRRLGPRGGRHLGSVSTAMAATQELLLQLQKDNRDGRQRKQELEKLMRGLEAESESLNQRLQDLSERERSLLRRRSQAAQPLQGEAREAARERAERVRRRLEEAERHKEDLEQHSRQLQEQWEELSSQLFYGGEPQSQKSTEQQLAAQLVTLQNELELAETKCALQEEKLQQDALQTAEAWAIFQEQTVVLQVRPHSDAKVPPASPPPDLGRCDGQLRGVQYSTESLMEEMARADRETRLFGGPRALAIRRCVLGALQVLLTLPLLFLGLSLLWTVLLDPGAVSAWLWSLTSETTLRRLRYTLSPLLELRANGLLPT

SEQ ID NO: 91389 - protein, 118 aa, Homo sapiens
  Payload ID: 18283
  Gene Name: transmembrane protein 191B
  ENSP ID: ENSP00000483146
  MOD_RES (1)..(1): Any amino acid
XSQKSTEQQLAAQLVTLQNELELAETKCALQEEKLQQDALQTAEAWAIFQEQTVVLQVRPHSDAKEVQVKVMEAAEELDAWQSGRELCDGQLRGVQYSTESLMEEMARADRETRLFGG

SEQ ID NO: 91390 - protein, 271 aa, Homo sapiens
  Payload ID: 18284
  Gene Name: transmembrane protein 192
  Uniprot ID: Q8IY95
  ENSP ID: ENSP00000305069
MAAGGRMEDGSLDITQSIEDDPLLDAQLLPHHSLQAHFRPRFHPLPTVIIVNLLWFIHLVFVVLAFLTGVLCSYPNPNEDKCPGNYTNPLKVQTVIILGKVILWILHLLLECYIQYHHSKIRNRGYNLIYRSTRHLKRLALMIQSSGNTVLLLILCMQHSFPEPGRLYLDLILAILALELICSLICLLIYTVKIRRFNKAKPEPDILEEEKIYAYPSNITSETGFRTISSLEEIVEKQGDTIEYLKRHNALLSKRLLALTSSDLGCQPSRT

SEQ ID NO: 91391 - protein, 84 aa, Homo sapiens
  Payload ID: 18284
  Gene Name: transmembrane protein 192
  ENSP ID: ENSP00000424590
MIQSSGNTVLLLILCMQHSFPEPGRLYLDLILAILALELICSLICLLIYTVKIRRFNKAKPEPDILEEEKIYAYPSNITSETGF

SEQ ID NO: 91392 - protein, 267 aa, Homo sapiens
  Payload ID: 18284
  Gene Name: transmembrane protein 192
  Uniprot ID: Q8IY95
  ENSP ID: ENSP00000425335
MNKATGSLDITQSIEDDPLLDAQLLPHHSLQAHFRPRFHPLPTVIIVNLLWFIHLVFVVLAFLTGVLCSYPNPNEDKCPGNYTNPLKVQTVIILGKVILWILHLLLECYIQYHHSKIRNRGYNLIYRSTRHLKRLALMIQSSGNTVLLLILCMQHSFPEPGRLYLDLILAILALELICSLICLLIYTVKIRRFNKAKPEPDILEEEKIYAYPSNITSETGFRTISSLEEIVEKQGDTIEYLKRHNALLSKRLLALTSSDLGCQPSRT

SEQ ID NO: 91393 - protein, 172 aa, Homo sapiens
  Payload ID: 18285
  Gene Name: transmembrane protein 196
  Uniprot ID: Q5HYL7
  ENSP ID: ENSP00000384234
MCTSGQIIGSLLVLSVLEIGLGVSSVAVGAVSFSLALREHKPQLGDSSPFLLCGICGILCAKKKSGLVMILFSACCICGLIGGILNFQFLRAVTKKTSSLYPLHLASMSLACIGIGGCTLSSWLTCRLASYEQRRMFSEREHSLHHSHEMAEKEITDNMSNGGPQLIFNGRV

SEQ ID NO: 91394 - protein, 179 aa, Homo sapiens
  Payload ID: 18285
  Gene Name: transmembrane protein 196
  ENSP ID: ENSP00000385087
MCTSGQIIGSLLVLSVLEIGLGVSSVAVGAVSFSLALREHKPQLGDSSPFLLCGICGILCAKKKSGLVMILFSACCICGLIGGILNFQFLRAVTKKTSSLYPLHLASMSLACIGIGGCTLSSWLTCRLASYEQRRMFSEREHSLHHSHEMAEKRLRAIEITDLPSCPVVPPTPELPTRK

SEQ ID NO: 91395 - protein, 89 aa, Homo sapiens
  Payload ID: 18285
  Gene Name: transmembrane protein 196
  Uniprot ID: Q5HYL7
  ENSP ID: ENSP00000406460
MILFSACCICGLIGGILNFQFLRAVTKKTSSLYPLHLASMSLACIGIGGCTLSSWLTCRLASYEQRRMFSEREHSLHHSHEMAEKIEGY

SEQ ID NO: 91396 - protein, 111 aa, Homo sapiens
  Payload ID: 18285
  Gene Name: transmembrane protein 196
  ENSP ID: ENSP00000414247
MILFSACCICGLIGGILNFQFLRAVTKKTSSLYPLHLASMSLACIGIGGCTLSSWLTCRLASYEQRRMFSEREHSLHHSHEMAEKRLRAIEITDLPSCPVVPPTPELPTRK

SEQ ID NO: 91397 - protein, 104 aa, Homo sapiens
  Payload ID: 18285
  Gene Name: transmembrane protein 196
  Uniprot ID: Q5HYL7
  ENSP ID: ENSP00000438368
MILFSACCICGLIGGILNFQFLRAVTKKTSSLYPLHLASMSLACIGIGGCTLSSWLTCRLASYEQRRMFSEREHSLHHSHEMAEKEITDNMSNGGPQLIFNGRV

SEQ ID NO: 91398 - protein, 360 aa, Homo sapiens
  Payload ID: 18286
  Gene Name: transmembrane protein 198
  Uniprot ID: Q66K66
  ENSP ID: ENSP00000343507
MPGTVATLRFQLLPPEPDDAFWGAPCEQPLERRYQALPALVCIMCCLFGVVYCFFGYRCFKAVLFLTGLLFGSVVIFLLCYRERVLETQLSAGASAGIALGIGLLCGLVAMLVRSVGLFLVGLLLGLLLAAAALLGSAPYYQPGSVWGPLGLLLGGGLLCALLTLRWPRPLTTLATAVTGAALIATAADYFAELLLLGRYVVERLRAAPVPPLCWRSWALLALWPLLSLMGVLVQWRVTAEGDSHTEVVISRQRRRVQLMRIRQQEDRKEKRRKKRPPRAPLRGPRAPPRPGPPDPAYRRRPVPIKRFNGDVLSPSYIQSFRDRQTGSSLSSFMASPTDADYEYGSRGPLTACSGPPVRV

SEQ ID NO: 91399 - protein, 360 aa, Homo sapiens; identical to SEQ ID NO: 91398
  Payload ID: 18286
  Gene Name: transmembrane protein 198
  Uniprot ID: Q66K66
  ENSP ID: ENSP00000362990

SEQ ID NO: 91400 - protein, 227 aa, Homo sapiens
  Payload ID: 18286
  Gene Name: transmembrane protein 198
  ENSP ID: ENSP00000388087
MPGTVATLRFQLLPPEPDDAFWGAPCEQPLERRYQALPALVCIMCCLFGVVYCFFGYRCFKAVLFLTGLLFGSVVIFLLCYRERVLETQLSAGASAGIALGIGLLCGLVAMLVRSVGLFLVGLLLGLLLAAAALLGSAPYYQPGSVWGPLGLLLGGGLLCALLTLRWPRPLTTLATAVTGAALIATAADYFAELLLLGRYVVERLRAAPVPPLCWRSWALLALWPLL

SEQ ID NO: 91401 - protein, 156 aa, Homo sapiens
  Payload ID: 18286
  Gene Name: transmembrane protein 198
  ENSP ID: ENSP00000415186
MGPRFWGGPSPGSCAFPFLRPSPSSRTPRDWSASRCWTWSGAATAPTPFSPAQQPPSSHDGLSLDPSQLEPLAPRNPGPSGLCTASFTQKLRSPPAQLLPPEPDDAFWGAPCEQPLERRYQALPALVCIMCCLFGVVYCFFGYRCFKAVLFLTGLL

SEQ ID NO: 91402 - protein, 208 aa, Homo sapiens
  Payload ID: 18287
  Gene Name: transmembrane protein 199
  Uniprot ID: Q8N511
  ENSP ID: ENSP00000292114
MASSLLAGERLVRALGPGGELEPERLPRKLRAELEAALGKKHKGGDSSSGPQRLVSFRLIRDLHQHLRERDSKLYLHELLEGSEIYLPEVVKPPRNPELVARLEKIKIQLANEEYKRITRNVTCQDTRHGGTLSDLGKQVRSLKALVITIFNFIVTVVAAFVCTYLGSQYIFTEMASRVLAALIVASVVGLAELYVMVRAMEGELGEL

SEQ ID NO: 91403 - protein, 89 aa, Homo sapiens
  Payload ID: 18287
  Gene Name: transmembrane protein 199
  ENSP ID: ENSP00000462195
MASSLLAGERLVRALGPGGELEPERLPRKLRAELEAALGKKHKGGDSSSGPQRLVSFRLIRDLHQHLRERGEPQSPVREPRTSCPAGED

SEQ ID NO: 91404 - protein, 125 aa, Homo sapiens
  Payload ID: 18287
  Gene Name: transmembrane protein 199
  ENSP ID: ENSP00000462356
MASSLLAGERLVRALGPGGELEPERLPRKLRAELEAALGKKHKGGDSSSGPQRLVSFRLIRDLHQHLRERDSKLYLHELLEGSEIYLPEVVKPPRNPELVARLEKIKIQLANEEYKRITRNVTCQ

SEQ ID NO: 91405 - protein, 34 aa, Homo sapiens
  Payload ID: 18287
  Gene Name: transmembrane protein 199
  ENSP ID: ENSP00000465232
MASRVLAALIVASVVGLAELYVMVRAMEGELGEL

SEQ ID NO: 91406 - protein, 176 aa, Homo sapiens
  Payload ID: 18288
  Gene Name: transmembrane protein 2
  ENSP ID: ENSP00000366242
GFLMKNSWQITPRNNISLVKFGPHVSLNVFFGKPGPWFEDCEMDGDKNSIFHDIDGSVTGYKDAYVGRMDNYLIRHPSCVNVSKWNAVICSGTYAQVYVQTWSTQNLSMTITRDEYPSNPMVLRGINQKAAFPQYQPVVMLEKGYTIHWNGPAPRTTFLYLVNFNKYVSVTVISNS

SEQ ID NO: 91407 - protein, 1383 aa, Homo sapiens
  Payload ID: 18288
  Gene Name: transmembrane protein 2
  Uniprot ID: Q9UHN6
  ENSP ID: ENSP00000366243
MYATDSRGHSPAFLQPQNGNSRHPSGYVPGKVVPLRPPPPPKSQASAKFTSIRREDRATFAFSPEEQQAQRESQKQKRHKNTFICFAITSFSFFIALAIILGISSKYAPDENCPDQNPRLRNWDPGQDSAKQVVIKEGDMLRLTSDATVHSIVIQDGGLLVFGDNKDGSRNITLRTHYILIQDGGALHIGAEKCRYKSKATITLYGKSDEGESMPTFGKKFIGVEAGGTLELHGARKASWTLLARTLNSSGLPFGSYTFEKDFSRGLNVRVIDQDTAKILESERFDTHEYRNESRRLQEFLRFQDPGRIVAIAVGDSAAKSLLQGTIQMIQERLGSELIQGLGYRQAWALVGVIDGGSTSCNESVRNYENHSSGGKALAQREFYTVDGQKFSVTAYSEWIEGVSLSGFRVEVVDGVKLNLLDDVSSWKPGDQIVVASTDYSMYQAEEFTLLPCSECSHFQVKVKETPQFLHMGEIIDGVDMRAEVGILTRNIVIQGEVEDSCYAENQCQFFDYDTFGGHIMIMKNFTSVHLSYVELKHMGQQQMGRYPVHFHLCGDVDYKGGYRHATFVDGLSIHHSFSRCITVHGTNGLLIKDTIGFDTLGHCFFLEDGIEQRNTLFHNLGLLTKPGTLLPTDRNNSMCTTMRDKVFGNYIPVPATDCMAVSTFWIAHPNNNLINNAAAGSQDAGIWYLFHKEPTGESSGLQLLAKPELTPLGIFYNNRVHSNFKAGLFIDKGVKTTNSSAADPREYLCLDNSARFRPHQDANPEKPRVAALIDRLIAFKNNDNGAWVRGGDIIVQNSAFADNGIGLTFASDGSFPSDEGSSQEVSESLFVGESRNYGFQGGQNKYVGTGGIDQKPRTLPRNRTFPIRGFQIYDGPIHLTRSTFKKYVPTPDRYSSAIGFLMKNSWQITPRNNISLVKFGPHVSLNVFFGKPGPWFEDCEMDGDKNSIFHDIDGSVTGYKDAYVGRMDNYLIRHPSCVNVSKWNAVICSGTYAQVYVQTWSTQNLSMTITRDEYPSNPMVLRGINQKAAFPQYQPVVMLEKGYTIHWNGPAPRTTFLYLVNFNKNDWIRVGLCYPSNTSFQVTFGYLQRQNGSLSKIEEYEPVHSLEELQRKQSERKFYFDSSTGLLFLYLKAKSHRHGHSYCSSQGCERVKIQAATDSKDISNCMAKAYPQYYRKPSVVKRMPAMLTGLCQGCGTRQVVFTSDPHKSYLPVQFQSPDKAETQRGDPSVISVNGTDFTFRSAGVLLLVVDPCSVPFRLTEKTVFPLADVSRIEEYLKTGIPPRSIVLLSTRGEIKQLNISHLLVPLGLAKPAHLYDKGSTIFLGFSGNFKPSWTKLFTSPAGQGLGVLEQFIPLQLDEYGCPRATTVRRRDLELLKQASKAH

SEQ ID NO: 91408 - protein, 178 aa, Homo sapiens
  Payload ID: 18288
  Gene Name: transmembrane protein 2
  ENSP ID: ENSP00000366254
LIRHPSCVNVSKWNAVICSGTYAQVYVQTWSTQNLSMTITRDEYPSNPMVLRGINQKAAFPQYQPVVMLEKGYTIHWNGPAPRTTFLYLVNFNKNDWIRVGLCYPSNTSFQVTFGYLQRQNGSLSKIEEYEPVHSLEELQRKQSERKFYFDSSTGDGVSLCCPGWSAVHRHSCGTLQP

SEQ ID NO: 91409 - protein, 1320 aa, Homo sapiens
  Payload ID: 18288
  Gene Name: transmembrane protein 2
  Uniprot ID: Q9UHN6
  ENSP ID: ENSP00000366266
MYATDSRGHSPAFLQPQNGNSRHPSGYVPGKVVPLRPPPPPKSQASAKFTSIRREDRATFAFSPEEQQAQRESQKQKRHKNTFICFAITSFSFFIALAIILGISSKYAPDENCPDQNPRLRNWDPGQDSAKQVVIKEGDMLRLTSDATVHSIVIQDGGLLVFGDNKDGSRNITLRTHYILIQDGGALHIGAEKCRYKSKATITLYGKSDEGESMPTFGKKFIGVEAGGTLELHGARKASWTLLARTLNSSGLPFGSYTFEKDFSRGLNVRVIDQDTAKILESERFDTHEYRNESRRLQEFLRFQDPGRIVAIAVGDSAAKSLLQGTIQMIQERLGSELIQGLGYRQAWALVGVIDGGSTSCNESVRNYENHSSGGKALAQREFYTVDGQKFSVTAYSEWIEETPQFLHMGEIIDGVDMRAEVGILTRNIVIQGEVEDSCYAENQCQFFDYDTFGGHIMIMKNFTSVHLSYVELKHMGQQQMGRYPVHFHLCGDVDYKGGYRHATFVDGLSIHHSFSRCITVHGTNGLLIKDTIGFDTLGHCFFLEDGIEQRNTLFHNLGLLTKPGTLLPTDRNNSMCTTMRDKVFGNYIPVPATDCMAVSTFWIAHPNNNLINNAAAGSQDAGIWYLFHKEPTGESSGLQLLAKPELTPLGIFYNNRVHSNFKAGLFIDKGVKTTNSSAADPREYLCLDNSARFRPHQDANPEKPRVAALIDRLIAFKNNDNGAWVRGGDIIVQNSAFADNGIGLTFASDGSFPSDEGSSQEVSESLFVGESRNYGFQGGQNKYVGTGGIDQKPRTLPRNRTFPIRGFQIYDGPIHLTRSTFKKYVPTPDRYSSAIGFLMKNSWQITPRNNISLVKFGPHVSLNVFFGKPGPWFEDCEMDGDKNSIFHDIDGSVTGYKDAYVGRMDNYLIRHPSCVNVSKWNAVICSGTYAQVYVQTWSTQNLSMTITRDEYPSNPMVLRGINQKAAFPQYQPVVMLEKGYTIHWNGPAPRTTFLYLVNFNKNDWIRVGLCYPSNTSFQVTFGYLQRQNGSLSKIEEYEPVHSLEELQRKQSERKFYFDSSTGLLFLYLKAKSHRHGHSYCSSQGCERVKIQAATDSKDISNCMAKAYPQYYRKPSVVKRMPAMLTGLCQGCGTRQVVFTSDPHKSYLPVQFQSPDKAETQRGDPSVISVNGTDFTFRSAGVLLLVVDPCSVPFRLTEKTVFPLADVSRIEEYLKTGIPPRSIVLLSTRGEIKQLNISHLLVPLGLAKPAHLYDKGSTIFLGFSGNFKPSWTKLFTSPAGQGLGVLEQFIPLQLDEYGCPRATTVRRRDLELLKQASKAH

SEQ ID NO: 91410 - protein, 376 aa, Homo sapiens
  Payload ID: 18288
  Gene Name: transmembrane protein 2
  ENSP ID: ENSP00000379569
MTITRDEYPSNPMVLRGINQKAAFPQYQPVVMLEKGYTIHWNGPAPRTTFLYLVNFNKNDWIRVGLCYPSNTSFQVTFGYLQRQNGSLSKIEEYEPVHSLEELQRKQSERKFYFDSSTGLLFLYLKAKSHRHGHSYCSSQGCERVKIQAATDSKDISNCMAKAYPQYYRKPSVVKRMPAMLTGLCQGCGTRQVVFTSDPHKSYLPVQFQSPDKAETQRGDPSVISVNGTDFTFRSAGVLLLVVDPCSVPFRLTEKTVFPLADVSRIEEYLKTGIPPRSIVLLSTRGEIKQLNISHLLVPLGLAKPAHLYDKGSTIFLGFSGNFKPSWTKLFTSPAGQGLGVLEQFIPLQLDEYGCPRATTVRRRDLELLKQASKAH

SEQ ID NO: 91411 - protein, 580 aa, Homo sapiens
  Payload ID: 18288
  Gene Name: transmembrane protein 2
  ENSP ID: ENSP00000437750
MYATDSRGHSPAFLQPQNGNSRHPSGYVPGKVVPLRPPPPPKSQASAKFTSIRREDRATFAFSPEEQQAQRESQKQKRHKNTFICFAITSFSFFIALAIILGISSKYAPDENCPDQNPRLRNWDPGQDSAKQVVIKEGDMLRLTSDATVHSIVIQDGGLLVFGDNKDGSRNITLRTHYILIQDGGALHIGAEKCRYKSKATITLYGKSDEGESMPTFGKKFIGVEAGGTLELHGARKASWTLLARTLNSSGLPFGSYTFEKDFSRGLNVRVIDQDTAKILESERFDTHEYRNESRRLQEFLRFQDPGRIVAIAVGDSAAKSLLQGTIQMIQERLGSELIQGLGYRQAWALVGVIDGGSTSCNESVRNYENHSSGGKALAQREFYTVDGQKFSVTAYSEWIEGVSLSGFRVEVVDGVKLNLLDDVSSWKPGDQIVVASTDYSMYQAEEFTLLPCSECSHFQVKVKETPQFLHMGEIIDGVDMRAEVGILTRNIVIQGEVEDSCYAENQCQFFDYDTFGGHIMIMKNFTSVHLSYVELKHMGQQQMGRYPVHFHLCGDVDYKGGYRHATFVDGLSIHHSFSR

SEQ ID NO: 91412 - protein, 18 aa, Homo sapiens
  Payload ID: 18288
  Gene Name: transmembrane protein 2
  ENSP ID: ENSP00000444571
MYATDSRGHSPAFLQPQN

SEQ ID NO: 91413 - protein, 491 aa, Homo sapiens
  Payload ID: 18289
  Gene Name: transmembrane protein 200A
  Uniprot ID: Q86VY9
  ENSP ID: ENSP00000296978
MIATGGVITGLAALKRQDSARSQQHVNLSPSPATQEKKPIRRRPRADVVVVRGKIRLYSPSGFFLILGVLISIIGIAMAVLGYWPQKEHFIDAETTLSTNETQVIRNEGGVVVRFFEQHLHSDKMKMLGPFTMGIGIFIFICANAILHENRDKETKIIHMRDIYSTVIDIHTLRIKEQRQMNGMYTGLMGETEVKQNGSSCASRLAANTIASFSGFRSSFRMDSSVEEDELMLNEGKSSGHLMPPLLSDSSVSVFGLYPPPSKTTDDKTSGSKKCETKSIVSSSISAFTLPVIKLNNCVIDEPSIDNITEDADNLKSRSRNLSMDSLVVPLPNTSESFQPVSTVLPRNNSIGESLSSQYKSSMALGPGAGQLLSPGAARRQFGSNTSLHLLSSHSKSLDLDRGPSTLTVQAEQRKHPSWPRLDRNNSKGYMKLENKEDPMDRLLVPQVAIKKDFTNKEKLLMISRSHNNLSFEHDEFLSNNLKRGTSETRF

SEQ ID NO: 91414 - protein, 491 aa, Homo sapiens; identical to SEQ ID NO: 91413
  Payload ID: 18289
  Gene Name: transmembrane protein 200A
  Uniprot ID: Q86VY9
  ENSP ID: ENSP00000376224

SEQ ID NO: 91415 - protein, 491 aa, Homo sapiens; identical to SEQ ID NO: 91413
  Payload ID: 18289
  Gene Name: transmembrane protein 200A
  Uniprot ID: Q86VY9
  ENSP ID: ENSP00000438928

SEQ ID NO: 91416 - protein, 491 aa, Homo sapiens; identical to SEQ ID NO: 91413
  Payload ID: 18289
  Gene Name: transmembrane protein 200A
  Uniprot ID: Q86VY9
  ENSP ID: ENSP00000480294

SEQ ID NO: 91417 - protein, 307 aa, Homo sapiens
  Payload ID: 18290
  Gene Name: transmembrane protein 200B
  Uniprot ID: Q69YZ2
  ENSP ID: ENSP00000428459
MTAGSPEECGEVRRSPEGRVSRLGRRLGRRRRPRSPPEPLRVRARLRLRSPSGAFAALGALVVLVGMGIAVAGYWPHRAGAPGSRAANASSPQMSELRREGRGGGRAHGPHERLRLLGPVIMGVGLFVFICANTLLYENRDLETRRLRQGVLRAQALRPPDGPGWDCALLPSPGPRSPRAVGCAEPEIWDPSPRRGTSPVPSVRSLRSEPANPRLGLPALLNSYPLKGPGLPPPWGPRTQTGHVIITVQPSGSCIEHSKSLDLGLGELLLGAPAARDCAHRSWPRLDRLSLGGYAKLGGGGDLGARV

SEQ ID NO: 91418 - protein, 307 aa, Homo sapiens; identical to SEQ ID NO: 91417
  Payload ID: 18290
  Gene Name: transmembrane protein 200B
  Uniprot ID: Q69YZ2
  ENSP ID: ENSP00000428544

SEQ ID NO: 91419 - protein, 621 aa, Homo sapiens
  Payload ID: 18291
  Gene Name: transmembrane protein 200C
  Uniprot ID: A6NKL6
  ENSP ID: ENSP00000372982
MIATGGLLRISARKQDPLRPPSQIPKRKRKAKKRRKNDVVVVKGKLKLCSISGLIALCGILVLLVGIAMAVVGYWPKATGTNREGGKQLPPAGSSHRVPTTANSSSSGSKNRSRSHPRAPGGVNSSSAGAPRSTPPARAASPSSSSTSVGFFFRIFSGYLHSDKLKVFGPLIMGIGIFLFICANAVLHENRDKKTKIINLRDLYSTVIDVHSLRAKDLAAAAAAAAAAAASSSSSAPAAAPPGAIPLNGFLSYVQSRGLELKPGGCGGSGDAFGAAAMLAKGSWPPHPAAPSGGRPRGAASPPDLASSPRCPREPPSLAEAVYSVYRERSGVAGSRRAAAATAAAAASSCSSPAPCSPPESWGRQSTASSFVDSSLSAFALLPLQGGRDRGGDAEGASCSWQRPPGERGSQEIPRGELDLSMTNLRGAEGSMRGARREPEEPEGAVAARAARGQGGRLPRTGRYAALRRRSTSGLPDYRAPPSPEPPPSPGSADPDSSPLAKAASPSPPLRLEGSPPTRRDSGSSQSDDPSSSNKGYTPLREAGTSTESVLDAVAGQTRDSAVAAPVLGAEQSSPEGASQEPPTAEQPQPVQRQFTNKEKLIMISRSHAIGVEEELESTGI

SEQ ID NO: 91420 - protein, 621 aa, Homo sapiens; identical to SEQ ID NO: 91419
  Payload ID: 18291
  Gene Name: transmembrane protein 200C
  Uniprot ID: A6NKL6
  ENSP ID: ENSP00000463375

SEQ ID NO: 91421 - protein, 666 aa, Homo sapiens
  Payload ID: 18292
  Gene Name: transmembrane protein 201
  Uniprot ID: Q5SNT2
  ENSP ID: ENSP00000344503
MEGVSALLARCPTAGLAGGLGVTACAAAGVLLYRIARRMKPTHTMVNCWFCNQDTLVPYGNRNCWDCPHCEQYNGFQENGDYNKPIPAQYLEHLNHVVSSAPSLRDPSQPQQWVSSQVLLCKRCNHHQTTKIKQLAAFAPREEGRYDEEVEVYRHHLEQMYKLCRPCQAAVEYYIKHQNRQLRALLLSHQFKRREADQTHAQNFSSAVKSPVQVILLRALAFLACAFLLTTALYGASGHFAPGTTVPLALPPGGNGSATPDNGTTPGAEGWRQLLGLLPEHMAEKLCEAWAFGQSHQTGVVALGLLTCLLAMLLAGRIRLRRIDAFCTCLWALLLGLHLAEQHLQAASPSWLDTLKFSTTSLCCLVGFTAAVATRKATGPRRFRPRRFFPGDSAGLFPTSPSLAIPHPSVGGSPASLFIPSPPSFLPLANQQLFRSPRRTSPSSLPGRLSRALSLGTIPSLTRADSGYLFSGSRPPSQVSRSGEFPVSDYFSLLSGSCPSSPLPSPAPSVAGSVASSSGSLRHRRPLISPARLNLKGQKLLLFPSPPGEAPTTPSSSDEHSPHNGSLFTMEPPHVPRKPPLQDVKHALDLRSKLERGSACSNRSIKKEDDSSQSSTCVVDTTTRGCSEEAATWRGRFGPSLVRGLLAVSLAANALFTSVFLYQSLR

SEQ ID NO: 91422 - protein, 392 aa, Homo sapiens
  Payload ID: 18292
  Gene Name: transmembrane protein 201
  Uniprot ID: Q5SNT2
  ENSP ID: ENSP00000344772
MEGVSALLARCPTAGLAGGLGVTACAAAGVLLYRIARRMKPTHTMVNCWFCNQDTLVPYGNRNCWDCPHCEQYNGFQENGDYNKPIPAQYLEHLNHVVSSAPSLRDPSQPQQWVSSQVLLCKRCNHHQTTKIKQLAAFAPREEGRYDEEVEVYRHHLEQMYKLCRPCQAAVEYYIKHQNRQLRALLLSHQFKRREADQTHAQNFSSAVKSPVQVILLRALAFLACAFLLTTALYGASGHFAPGTTVPLALPPGGNGSATPDNGTTPGAEGWRQLLGLLPEHMAEKLCEAWAFGQSHQTGVVALGLLTCLLAMLLAGRIRLRRIDAFCTCLWALLLGLHLAEQHLQAASPSWLDTLKFSTTSLCCLVGFTAAVATRKATGPRRFRPRRSEKQP

SEQ ID NO: 91423 - protein, 552 aa, Homo sapiens
  Payload ID: 18292
  Gene Name: transmembrane protein 201
  ENSP ID: ENSP00000393626
  MOD_RES (1)..(1): Any amino acid
XEHLNHVVSSAPSLRDPSQPQQWVSSQVLLCKRCNHHQTTKIKQLAAFAPREEGRYDEEVEVYRHHLEQMYKLCRPCQAAVEYYIKHQNRQLRALLLSHQFKRREADQTHAQNFSSAVKSPVQVILLRALAFLACAFLLTTALYGASGHFAPGTTVPLALPPGGNGSATPDNGTTPGAEGWRQLLGLLPEHMAEKLCEAWAFGQSHQTGVVALGLLTCLLAMLLAGRIRLRRIDAFCTCLWALLLGLHLAEQHLQAASPSWLDTLKFSTTSLCCLVGFTAAVATRKATGPRRFRPRRFFPGDSAGLFPTSPSLAIPHPSVGGSPASLFIPSPPSFLPLANQQLFRSPRRTSPSSLPGRLSRALSLGTIPSLTRADYFSLLSGSCPSSPLPSPAPSVAGSVASSSGSLRHRRPLISPARLNLKGQKLLLFPSPPGEAPTTPSSSDEHSPHNGSLFTMEPPHVPRKPPLQDVKHALDLRSKLERGSACSNRSIKKEDDSSQSSTCVVDTTTRGCSEEAATWRGRFGPSLVRGLLAVSLAANALFTSVFLYQSLR

SEQ ID NO: 91424 - protein, 166 aa, Homo sapiens
  Payload ID: 18292
  Gene Name: transmembrane protein 201
  ENSP ID: ENSP00000423430
  MOD_RES (1)..(1): Any amino acid
XLPGRLSRALSLGTIPSLTRADSGYLFSGSRPPSQVSRSGEFPVSDYFSLLSGSCPSSPLPSPAPSVAGSVASSSGSLRHRRPLISPARLNLKGQKLLLFPSPPGEAPTTPSSSDEHSPHNGSLFTMEPPHVPRKPPLQDVKHALVDLQGPLFLGTDRKHITHCQT

SEQ ID NO: 91425 - protein, 273 aa, Homo sapiens
  Payload ID: 18293
  Gene Name: transmembrane protein 202
  Uniprot ID: A6NGA9
  ENSP ID: ENSP00000340212
MERREHLTLTFHSPEVPKIKGNRKYQRPTVPAKKHPSASMSCQRQQQLMDQAHIYIRTLCGSLCSFSLLMLIAMSPLNWVQFLVIKNGLELYAGLWTLCNHELCWSHTPKPPYYLQYSRAFFLISVFTILTGLGWLFSSWILNRGSMTTNLDLKVSMLSFISATCLLLCLNLFVAQVHWHTRDAMESDLLWTYYLNWCSDIFYMFAGIISLLNYLTSRSPACDENVTVIPTERSRLGVGPVTTVSPAKDEGPRSEMESLSVREKNLPKSGLWW

SEQ ID NO: 91426 - protein, 61 aa, Homo sapiens
  Payload ID: 18293
  Gene Name: transmembrane protein 202
  ENSP ID: ENSP00000456083
MERREHLTLTFHSPEVPKIKGNRKYQRIISNIPGPSFSSLSLPYLLALAGSSALGSLIEEA

SEQ ID NO: 91427 - protein, 61 aa, Homo sapiens; identical to SEQ ID NO: 91426
  Payload ID: 18293
  Gene Name: transmembrane protein 202
  ENSP ID: ENSP00000457632

SEQ ID NO: 91428 - protein, 136 aa, Homo sapiens
  Payload ID: 18294
  Gene Name: transmembrane protein 203
  Uniprot ID: Q969S6
  ENSP ID: ENSP00000375053
MLFSLRELVQWLGFATFEIFVHLLALLVFSVLLALRVDGLVPGLSWWNVFVPFFAADGLSTYFTTIVSVRLFQDGEKRLAVLRLFWVLTVLSLKFVFEMLLCQKLAEQTRELWFGLITSPLFILLQLLMIRACRVN

SEQ ID NO: 91429 - protein, 226 aa, Homo sapiens
  Payload ID: 18295
  Gene Name: transmembrane protein 204
  Uniprot ID: Q9BSN7
  ENSP ID: ENSP00000253934
MTVQRLVAAAVLVALVSLILNNVAAFTSNWVCQTLEDGRRRSVGLWRSCWLVDRTRGGPSPGARAGQVDAHDCEALGWGSEAAGFQESRGTVKLQFDMMRACNLVATAALTAGQLTFLLGLVGLPLLSPDAPCWEEAMAAAFQLASFVLVIGLVTFYRIGPYTNLSWSCYLNIGACLLATLAAAMLIWNILHKREDCMAPRVIVISRSLTARFRRGLDNDYVESPC

SEQ ID NO: 91430 - protein, 226 aa, Homo sapiens; identical to SEQ ID NO: 91429
  Payload ID: 18295
  Gene Name: transmembrane protein 204
  Uniprot ID: Q9BSN7
  ENSP ID: ENSP00000454945

SEQ ID NO: 91431 - protein, 189 aa, Homo sapiens
  Payload ID: 18296
  Gene Name: transmembrane protein 205
  Uniprot ID: Q6UW68
  ENSP ID: ENSP00000346954
MEEGGNLGGLIKMVHLLVLSGAWGMQMWVTFVSGFLLFRSLPRHTFGLVQSKLFPFYFHISMGCAFINLCILASQHAWAQLTFWEASQLYLLFLSLTLATVNARWLEPRTTAAMWALQTVEKERGLGGEVPGSHQGPDPYRQLREKDPKYSALRQNFFRYHGLSSLCNLGCVLSNGLCLAGLALEIRSL

SEQ ID NO: 91432 - protein, 189 aa, Homo sapiens; identical to SEQ ID NO: 91431
  Payload ID: 18296
  Gene Name: transmembrane protein 205
  Uniprot ID: Q6UW68
  ENSP ID: ENSP00000398258

SEQ ID NO: 91433 - protein, 189 aa, Homo sapiens; identical to SEQ ID NO: 91431
  Payload ID: 18296
  Gene Name: transmembrane protein 205
  Uniprot ID: Q6UW68
  ENSP ID: ENSP00000465149

SEQ ID NO: 91434 - protein, 107 aa, Homo sapiens
  Payload ID: 18296
  Gene Name: transmembrane protein 205
  ENSP ID: ENSP00000465283
MEEGGNLGGLIKMVHLLVLSGAWGMQMWVTFVSGFLLFRSLPRHTFGLVQSKLFPFYFHISMGCAFINLCILASQHAWAQLTFWEASQLYLLFLSLTLATVNARWLE

SEQ ID NO: 91435 - protein, 189 aa, Homo sapiens; identical to SEQ ID NO: 91431
  Payload ID: 18296
  Gene Name: transmembrane protein 205
  Uniprot ID: Q6UW68
  ENSP ID: ENSP00000465483

SEQ ID NO: 91436 - protein, 189 aa, Homo sapiens; identical to SEQ ID NO: 91431
  Payload ID: 18296
  Gene Name: transmembrane protein 205
  Uniprot ID: Q6UW68
  ENSP ID: ENSP00000465553

SEQ ID NO: 91437 - protein, 170 aa, Homo sapiens
  Payload ID: 18296
  Gene Name: transmembrane protein 205
  ENSP ID: ENSP00000466180
MEEGGNLGGLIKMVHLLVLSGAWGMQMWVTFVSGFLLFRSLPRHTFGLVQSKLFPFYFHISMGCAFINLCILASQHAWAQLTFWEASQLYLLFLSLTLATVNARWLEPRTTAAMWALQTVEKERGLGGEVPGSHQGPDPYRQLREKDPKYSALRQNFFRYHGLSSLCNLG

SEQ ID NO: 91438 - protein, 120 aa, Homo sapiens
  Payload ID: 18296
  Gene Name: transmembrane protein 205
  ENSP ID: ENSP00000466310
MGCAFINLCILASQHAWAQLTFWEASQLYLLFLSLTLATVNARWLEPRTTAAMWALQTVEKERGLGGEVPGSHQGPDPYRQLREKDPKYSALRQNFFRYHGLSSLCNLGCVLSNGLCLAG

SEQ ID NO: 91439 - protein, 189 aa, Homo sapiens; identical to SEQ ID NO: 91431
  Payload ID: 18296
  Gene Name: transmembrane protein 205
  Uniprot ID: Q6UW68
  ENSP ID: ENSP00000466495

SEQ ID NO: 91440 - protein, 123 aa, Homo sapiens
  Payload ID: 18296
  Gene Name: transmembrane protein 205
  ENSP ID: ENSP00000466672
MEEGGNLGGLIKMVHLLVLSGAWGMQMWVTFVSALPAVPEPYAGHCQRPLAGTPHHSCHVGPANRGEGARPGWGGTRQPPGSRSLPPAAREGPQVQCSPPEFLPLPWAVLSLQSGLRPEQWAL

SEQ ID NO: 91441 - protein, 189 aa, Homo sapiens; identical to SEQ ID NO: 91431
  Payload ID: 18296
  Gene Name: transmembrane protein 205
  Uniprot ID: Q6UW68
  ENSP ID: ENSP00000466986

SEQ ID NO: 91442 - protein, 128 aa, Homo sapiens
  Payload ID: 18296
  Gene Name: transmembrane protein 205
  ENSP ID: ENSP00000467493
MGCAFINLCILASQHAWAQLTFWEASQLYLLFLSLTLATVNARWLEPRTTAAMWALQTVEKERGLGGEVPGSHQGPDPYRQLREKDPKYSALRQNFFRYHGLSSLCNLGCVLSNGLCLAGLALEIRSL

SEQ ID NO: 91443 - protein, 88 aa, Homo sapiens
  Payload ID: 18296
  Gene Name: transmembrane protein 205
  ENSP ID: ENSP00000468056
MEEGGNLGGLIKMVHLLVLSGAWGMQMWVTFVSGFLLFRSLPRHTFGLVQSKLFPFYFHISMGCAFINLCILASQHAWAQLTFWEASQ

SEQ ID NO: 91444 - protein, 189 aa, Homo sapiens; identical to SEQ ID NO: 91431
  Payload ID: 18296
  Gene Name: transmembrane protein 205
  Uniprot ID: Q6UW68
  ENSP ID: ENSP00000468733

SEQ ID NO: 91445 - protein, 350 aa, Homo sapiens
  Payload ID: 18297
  Gene Name: transmembrane protein 206
  Uniprot ID: Q9H813
  ENSP ID: ENSP00000261455
MIRQERSTSYQELSEELVQVVENSELADEQDKETVRVQGPGILPGLDSESASSSIRFSKACLKNVFSVLLIFIYLLLMAVAVFLVYRTITDFREKLKHPVMSVSYKEVDRYDAPGIALYPGQAQLLSCKHHYEVIPPLTSPGQPGDMNCTTQRINYTDPFSNQTVKSALIVQGPREVKKRELVFLQFRLNKSSEDFSAIDYLLFSSFQEFLQSPNRVGFMQACESAYSSWKFSGGFRTWVKMSLVKTKEEDGREAVEFRQETSVVNYIDQRPAAKKSAQLFFVVFEWKDPFIQKVQDIVTANPWNTIALLCGAFLALFKAAEFAKLSIKWMIKIRKRYLKRRGQATSHIS

SEQ ID NO: 91446 - protein, 411 aa, Homo sapiens
  Payload ID: 18297
  Gene Name: transmembrane protein 206
  Uniprot ID: Q9H813
  ENSP ID: ENSP00000438863
MIRQERSTSYQEAVRPALPSSKPCLLTSPAVLVKLLSSSASTSRPPNLGHLWQPSSSVPLHRAASLAKVRQFQLSEELVQVVENSELADEQDKETVRVQGPGILPGLDSESASSSIRFSKACLKNVFSVLLIFIYLLLMAVAVFLVYRTITDFREKLKHPVMSVSYKEVDRYDAPGIALYPGQAQLLSCKHHYEVIPPLTSPGQPGDMNCTTQRINYTDPFSNQTVKSALIVQGPREVKKRELVFLQFRLNKSSEDFSAIDYLLFSSFQEFLQSPNRVGFMQACESAYSSWKFSGGFRTWVKMSLVKTKEEDGREAVEFRQETSVVNYIDQRPAAKKSAQLFFVVFEWKDPFIQKVQDIVTANPWNTIALLCGAFLALFKAAEFAKLSIKWMIKIRKRYLKRRGQATSHIS

SEQ ID NO: 91447 - protein, 146 aa, Homo sapiens
  Payload ID: 18298
  Gene Name: transmembrane protein 207
  Uniprot ID: Q6UWW9
  ENSP ID: ENSP00000346981
MSRSRLFSVTSAISTIGILCLPLFQLVLSDLPCEEDEMCVNYNDQHPNGWYIWILLLLVLVAALLCGAVVLCLQCWLRRPRIDSHRRTMAVFAVGDLDSIYGTEAAVSPTVGIHLQTQTPDLYPVPAPCFGPLGSPPPYEEIVKTT

SEQ ID NO: 91448 - protein, 173 aa, Homo sapiens
  Payload ID: 18299
  Gene Name: transmembrane protein 208
  Uniprot ID: Q9BTX3
  ENSP ID: ENSP00000305892
MAPKGKVGTRGKKQIFEENRETLKFYLRIILGANAIYCLVTLVFFYSSASFWAWLALGFSLAVYGASYHSMSSMARAAFSEDGALMDGGMDLNMEQGMAEHLKDVILLTAIVQVLSCFSLYVWSFWLLAPGRALYLLWVNVLGPWFTADSGTPAPEHNEKRQRRQERRQMKRL

SEQ ID NO: 91449 - protein, 140 aa, Homo sapiens
  Payload ID: 18299
  Gene Name: transmembrane protein 208
  ENSP ID: ENSP00000454579
MAPKGKVGTRGKKQIFEENRETLKFYLRIILGANAIYCLVTLVFFYSSASFWAWLALGFSLAVYGASYHSMSSMARAAFSEDGALMDGGMDLNMEQGMAEHLKDVILLTAIVQVLSCFSLYVWSFWLLVCGLGALPRRGI

SEQ ID NO: 91450 - protein, 100 aa, Homo sapiens
  Payload ID: 18299
  Gene Name: transmembrane protein 208
  Uniprot ID: Q9BTX3
  ENSP ID: ENSP00000457502
MAPKGKVGTRGKKQIFEENRETLKFYLRIILGANAIYCLVTLVFFYSSASFWAWLALGFSLAVYGASYHSMSSMARAAFSEDGALMDGGMDLNMEQGMAE

SEQ ID NO: 91451 - protein, 103 aa, Homo sapiens
  Payload ID: 18299
  Gene Name: transmembrane protein 208
  ENSP ID: ENSP00000462217
MSSMARAAFSEDGALMDGGMDLNMEQGMAEHLKDVILLTAIVQVLSCFSLYVWSFWLLAPGRALYLLWVNVLGPWFTADSGTPAPEHNEKRQRRQERRQMKRL

SEQ ID NO: 91452 - protein, 36 aa, Homo sapiens
  Payload ID: 18299
  Gene Name: transmembrane protein 208
  ENSP ID: ENSP00000464439
MAGEQEAIDPSCGCWRDGVSPRQNGLEDGWTSQGFC

SEQ ID NO: 91453 - protein, 561 aa, Homo sapiens
  Payload ID: 18300
  Gene Name: transmembrane protein 209
  Uniprot ID: Q96SK2
  ENSP ID: ENSP00000380747
MMQGEAHPSASLIDRTIKMRKETEARKVVLAWGLLNVSMAGMIYTEMTGKLISSYYNVTYWPLWYIELALASLFSLNALFDFWRYFKYTVAPTSLVVSPGQQTLLGLKTAVVQTTPPHDLAATQIPPAPPSPSIQGQSVLSYSPSRSPSTSPKFTTSCMTGYSPQLQGLSSGGSGSYSPGVTYSPVSGYNKLASFSPSPPSPYPTTVGPVESSGLRSRYRSSPTVYNSPTDKEDYMTDLRTLDTFLRSEEEKQHRVKLGSPDSTSPSSSPTFWNYSRSMGDYAQTLKKFQYQLACRSQAPCANKDEADLSSKQAAEEVWARVAMNRQLLDHMDSWTAKFRNWINETILVPLVQEIESVSTQMRRMGCPELQIGEASITSLKQAALVKAPLIPTLNTIVQYLDLTPNQEYLFERIKELSQGGCMSSFRWNRGGDFKGRKWDTDLPTDSAIIMHVFCTYLDSRLPPHPKYPDGKTFTSQHFVQTPNKPDVTNENVFCIYQSAINPPHYELIYQRHVYNLPKGRNNMFHTLLMFLYIIKTKESGMLGRVNLGLSGVNILWIFGE

SEQ ID NO: 91454 - protein, 519 aa, Homo sapiens
  Payload ID: 18300
  Gene Name: transmembrane protein 209
  Uniprot ID: Q96SK2
  ENSP ID: ENSP00000417258
MMQGEAHPSASLIDRTIKMRKETEARKVVLAWGLLNVSMAGMIYTEMTGKLISSYYNVTYWPLWYIELALASLFSLNALFDFWRYFKYTVAPTSLVVSPGQQTLLGLKTAVVQTTPPHDLAATQIPPAPPSPSIQGQSVLSYSPSRSPSTSPKFTTSCMTGYSPQLQGLSSGGSGSYSPGVTYSPVSGYNKLASFSPSPPSPYPTTVGPVESSGLRSRYRSSPTVYNSPTDKEDYMTDLRTLDTFLRSEEEKQHRVKLGSPDSTSPSSSPTFWNYSRSMGDYAQTLKKFQYQLACRSQAPCANKDEADLSSKQAAEEVWARVAMNRQLLDHMDSWTAKFRNWINETILVPLVQEIESVSTQMRRMGCPELQIGELSQGGCMSSFRWNRGGDFKGRKWDTDLPTDSAIIMHVFCTYLDSRLPPHPKYPDGKTFTSQHFVQTPNKPDVTNENVFCIYQSAINPPHYELIYQRHVYNLPKGRNNMFHTLLMFLYIIKTKESGMLGRVNLGLSGVNILWIFGE

SEQ ID NO: 91455 - protein, 56 aa, Homo sapiens
  Payload ID: 18300
  Gene Name: transmembrane protein 209
  ENSP ID: ENSP00000418474
MQGEAHPSASLIDRTIKMRKETEARKVVLAWGLLNVSMAGMIYTEMTGKLISSYYN

SEQ ID NO: 91456 - protein, 560 aa, Homo sapiens
  Payload ID: 18300
  Gene Name: transmembrane protein 209
  Uniprot ID: Q96SK2
  ENSP ID: ENSP00000419697
MQGEAHPSASLIDRTIKMRKETEARKVVLAWGLLNVSMAGMIYTEMTGKLISSYYNVTYWPLWYIELALASLFSLNALFDFWRYFKYTVAPTSLVVSPGQQTLLGLKTAVVQTTPPHDLAATQIPPAPPSPSIQGQSVLSYSPSRSPSTSPKFTTSCMTGYSPQLQGLSSGGSGSYSPGVTYSPVSGYNKLASFSPSPPSPYPTTVGPVESSGLRSRYRSSPTVYNSPTDKEDYMTDLRTLDTFLRSEEEKQHRVKLGSPDSTSPSSSPTFWNYSRSMGDYAQTLKKFQYQLACRSQAPCANKDEADLSSKQAAEEVWARVAMNRQLLDHMDSWTAKFRNWINETILVPLVQEIESVSTQMRRMGCPELQIGEASITSLKQAALVKAPLIPTLNTIVQYLDLTPNQEYLFERIKELSQGGCMSSFRWNRGGDFKGRKWDTDLPTDSAIIMHVFCTYLDSRLPPHPKYPDGKTFTSQHFVQTPNKPDVTNENVFCIYQSAINPPHYELIYQRHVYNLPKGRNNMFHTLLMFLYIIKTKESGMLGRVNLGLSGVNILWIFGE

SEQ ID NO: 91457 - protein, 189 aa, Homo sapiens
  Payload ID: 18300
  Gene Name: transmembrane protein 209
  ENSP ID: ENSP00000419852
MLLGLLSLWKGLTLSPRLECSGTILAHRNLGFPGSSDSPASASRMQGEAHPSASLIDRTIKMRKETEARKVVLAWGLLNVSMAGMIYTEMTGKLISSYYNVTYWPLWYIELALASLFSLNALFDFWRYFKYTVAPTSLVVSPGQQTLLGLKTAVVQTTPPHDLAATQIPPAPPSPSIQGQSVLSYSPSR

SEQ ID NO: 91458 - protein, 53 aa, Homo sapiens
  Payload ID: 18301
  Gene Name: transmembrane protein 210
  ENSP ID: ENSP00000454984
MAPGPWPVSCLRGGPLGLTYLSLLLIPAAGASSCPRTPLPAMAPLPQASWNLL

SEQ ID NO: 91459 - protein, 147 aa, Homo sapiens
  Payload ID: 18301
  Gene Name: transmembrane protein 210
  Uniprot ID: A6NLX4
  ENSP ID: ENSP00000456333
MAPGPWPVSCLRGGPLGLTYLSLLLIPAAAGTYCECSLGLSREALIALLVVLAGISASCFCALVIVAIGVLRAKGETCPRQVDNRLVENFGVQEDLMDLHPVYVESQLMDADLEVSLVPPLEDQSLVAIPMEASSEEPPPPPPLPPE

SEQ ID NO: 91460 - protein, 129 aa, Homo sapiens
  Payload ID: 18302
  Gene Name: transmembrane protein 211
  ENSP ID: ENSP00000385494
MLLGGWLLLAFNAIFLLSWAVAPKGLCPRRSSVPMPGVQAVAATAMIVGLLIFPIGLASPFIKEVCEASSMYYGGKCRLGWGYMTAILNAVLASLLPIISWPHTTKVQGRTIIFSSATERIIFVPEMNK

SEQ ID NO: 91461 - protein, 200 aa, Homo sapiens
  Payload ID: 18302
  Gene Name: transmembrane protein 211
  Uniprot ID: Q6ICI0
  ENSP ID: ENSP00000387813
MLSSVWVALGLSLTCTSAFSLISPAWFQTPTFSFGILTYCSWPQGNSWNQSCVTFSSLEDIPDFAWKVSAVMLLGGWLLLAFNAIFLLSWAVAPKGLCPRRSSVPMPGVQAVAATAMIVGLLIFPIGLASPFIKEVCEASSMYYGGKCRLGWGYMTAILNAVLASLLPIISWPHTTKVQGRTIIFSSATERIIFVPEMNK

SEQ ID NO: 91462 - protein, 194 aa, Homo sapiens
  Payload ID: 18303
  Gene Name: transmembrane protein 212
  Uniprot ID: A6NML5
  ENSP ID: ENSP00000334072
MKGLYQAAGRILVTLGILSVCSGVIAFFPVFSYKPWFTGWSVRIACPIWNGALAITTGVLLLLAYREWTQRYLGEATFTFVILSIMGCPLHFAIALESALLGPYCFYSFSGIAGTNYLGYAVTFPYPYAKFPLACVDPPHYEEYHLTLQALDLCLSFTLLCTSLTVFIKLSARLIQNGHINMQLPAGNPNPFSP

SEQ ID NO: 91463 - protein, 150 aa, Homo sapiens
  Payload ID: 18303
  Gene Name: transmembrane protein 212
  ENSP ID: ENSP00000393684
ACPIWNGALAITTGVLLLLAYREWTQRYLGEATFTFVILSIMGCPLHFAIALESALLGPYCFYSFSGIAGTNYLGYAVTFPYPYAKFPLACVDPPHYEEYHLTLQALDLCLSFTLLCTSLTVFIKLSARLIQNGHINMQLPAGNPNPFSP

SEQ ID NO: 91464 - protein, 189 aa, Homo sapiens
  Payload ID: 18303
  Gene Name: transmembrane protein 212
  ENSP ID: ENSP00000410327
  MOD_RES (1)..(1): Any amino acid
XAAGRILVTLGILSVCSGVIAFFPVFSYKPWFTGWSVRIACPIWNGALAITTGVLLLLAYREWTQRYLGEATFTFVILSIMGCPLHFAIALESALLGPYCFYSFSGIAGTNYLGYAVTFPYPYAKFPLACVDPPHYEEYHLTLQALDLCLSFTLLCTSLTVFIKLSARLIQNGHINMQLPAGNPNPFSP

SEQ ID NO: 91465 - protein, 194 aa, Homo sapiens; identical to SEQ ID NO: 91462
  Payload ID: 18303
  Gene Name: transmembrane protein 212
  Uniprot ID: A6NML5
  ENSP ID: ENSP00000484106

SEQ ID NO: 91466 - protein, 106 aa, Homo sapiens
  Payload ID: 18304
  Gene Name: transmembrane protein 213
  Uniprot ID: A2RRL7
  ENSP ID: ENSP00000380727
MQRLPAATRATLILSLAFASLHSACSAASSSNSSSLTAHHPDPGTLEQCLNVDFCPQAARCCRTGVDEYGWIAAAVGWSLWFLTLILLCVDKLMKLTPDEPKDLQA

SEQ ID NO: 91467 - protein, 107 aa, Homo sapiens
  Payload ID: 18304
  Gene Name: transmembrane protein 213
  Uniprot ID: A2RRL7
  ENSP ID: ENSP00000390407
MQRLPAATRATLILSLAFASLHSACSAEASSSNSSSLTAHHPDPGTLEQCLNVDFCPQAARCCRTGVDEYGWIAAAVGWSLWFLTLILLCVDKLMKLTPDEPKDLQA

SEQ ID NO: 91468 - protein, 83 aa, Homo sapiens
  Payload ID: 18304
  Gene Name: transmembrane protein 213
  Uniprot ID: A2RRL7
  ENSP ID: ENSP00000393891
MQRLPAATRATLILSLAFASLHSACSADVDFCPQAARCCRTGVDEYGWIAAAVGWSLWFLTLILLCVDKLMKLTPDEPKDLQA

SEQ ID NO: 91469 - protein, 105 aa, Homo sapiens
  Payload ID: 18304
  Gene Name: transmembrane protein 213
  Uniprot ID: A2RRL7
  ENSP ID: ENSP00000401570
MQRLPAATRATLILSLAFASLHSACSAEASSSNSSSLTAHHPDPGTLEQCLRSGYLANLRGEADQLWKFCTVLCFWESRRSSSRIALMREAEEWPGWRSSVELVG

SEQ ID NO: 91470 - protein, 689 aa, Homo sapiens
  Payload ID: 18305
  Gene Name: transmembrane protein 214
  Uniprot ID: Q6NUQ4
  ENSP ID: ENSP00000238788
MATKTAGVGRWEVVKKGRRPGVGAGAGGRGGGRNRRALGEANGVWKYDLTPAIQTTSTLYERGFENIMKRQNKEQVPPPAVEPKKPGNKKQPKKVATPPNQNQKQGRFRSLEEALKALDVADLQKELDKSQSVFSGNPSIWLKDLASYLNYKLQAPLSEPTLSQHTHDYPYSLVSRELRGIIRGLLAKAAGSLELFFDHCLFTMLQELDKTPGESLHGYRICIQAILQDKPKIATANLGKFLELLRSHQSRPAKCLTIMWALGQAGFANLTEGLKVWLGIMLPVLGIKSLSPFAITYLDRLLLMHPNLTKGFGMIGPKDFFPLLDFAYMPNNSLTPSLQEQLCQLYPRLKVLAFGAKPDSTLHTYFPSFLSRATPSCPPEMKKELLSSLTECLTVDPLSASVWRQLYPKHLSQSSLLLEHLLSSWEQIPKKVQKSLQETIQSLKLTNQELLRKGSSNNQDVVTCDMACKGLLQQVQGPRLPWTRLLLLLLVFAVGFLCHDLRSHSSFQASLTGRLLRSSGFLPASQQACAKLYSYSLQGYSWLGETLPLWGSHLLTVVRPSLQLAWAHTNATVSFLSAHCASHLAWFGDSLTSLSQRLQIQLPDSVNQLLRYLRELPLLFHQNVLLPLWHLLLEALAWAQEHCHEACRGEVTWDCMKTQLSEAVHWTWLCLQDITVAFLDWALALISQQ

SEQ ID NO: 91471 - protein, 689 aa, Homo sapiens; identical to SEQ ID NO: 91470
  Payload ID: 18305
  Gene Name: transmembrane protein 214
  Uniprot ID: Q6NUQ4
  ENSP ID: ENSP00000319469

SEQ ID NO: 91472 - protein, 644 aa, Homo sapiens
  Payload ID: 18305
  Gene Name: transmembrane protein 214
  Uniprot ID: Q6NUQ4
  ENSP ID: ENSP00000384417
MATKTAGVGRWEVVKKGRRPGVGAGAGGRGGGRNRRALGEANGVWKYDLTPAIQTTSTLYERGFENIMKRQNKEQVPPPAVEPKKPGNKKQPKKVATPPNQNQKQGRFRSLEEALKALDVADLQKELDKSQSVFSGNPSIWLKDLASYLNYKLQAPLSEPTLSQHTHGESLHGYRICIQAILQDKPKIATANLGKFLELLRSHQSRPAKCLTIMWALGQAGFANLTEGLKVWLGIMLPVLGIKSLSPFAITYLDRLLLMHPNLTKGFGMIGPKDFFPLLDFAYMPNNSLTPSLQEQLCQLYPRLKVLAFGAKPDSTLHTYFPSFLSRATPSCPPEMKKELLSSLTECLTVDPLSASVWRQLYPKHLSQSSLLLEHLLSSWEQIPKKVQKSLQETIQSLKLTNQELLRKGSSNNQDVVTCDMACKGLLQQVQGPRLPWTRLLLLLLVFAVGFLCHDLRSHSSFQASLTGRLLRSSGFLPASQQACAKLYSYSLQGYSWLGETLPLWGSHLLTVVRPSLQLAWAHTNATVSFLSAHCASHLAWFGDSLTSLSQRLQIQLPDSVNQLLRYLRELPLLFHQNVLLPLWHLLLEALAWAQEHCHEACRGEVTWDCMKTQLSEAVHWTWLCLQDITVAFLDWALALISQQ

SEQ ID NO: 91473 - protein, 140 aa, Homo sapiens
  Payload ID: 18305
  Gene Name: transmembrane protein 214
  ENSP ID: ENSP00000389729
  MOD_RES (1)..(1): Any amino acid
XSLQETIQSLKLTNQELLRKGSSNNQDVVTCDMACKGLLQQVQGPRLPWTRLLLLLLVFAVGFLCHDLRSHSSFQAGWGRHCRSGAPTCSPWCGPACSWPGLTPMPQSASFLPTVPLTLRGLVTVSPVSLRGYRSSSPIP

SEQ ID NO: 91474 - protein, 306 aa, Homo sapiens
  Payload ID: 18305
  Gene Name: transmembrane protein 214
  ENSP ID: ENSP00000392442
KRQHIQGGCAAWMALLTGRGSPLSTPRLCQPHAPSSLSLCRAVQLLSSLTECLTVDPLSASVWRQLYPKHLSQSSLLLEHLLSSWEQIPKKVQKSLQETIQSLKLTNQELLRKGSSNNQDVVTCDMACKGLLQQVQGPRLPWTRLLLLLLVFAVGFLCHDLRSHSSFQASLTGRLLRSSGFLPASQQACAKLYSYSLQGYSWLGETLPLWGSHLLTVVRPSLQLAWAHTNATVSFLSAHCASHLAWFGDSLTSLSQRLQIQLPDSVNQLLRYLRELPLLFHQNVLLPLWHLLLEALAWAQEHCHEA

SEQ ID NO: 91475 - protein, 247 aa, Homo sapiens
  Payload ID: 18305
  Gene Name: transmembrane protein 214
  ENSP ID: ENSP00000393490
  MOD_RES (1)..(1): Any amino acid
XELLRSHQSRPAKCLTIMWALGQAGFANLTEGLKVWLGIMLPVLGIKSLSPFAITYLDRLLLMHPNLTKGFGMIGPKDFFPLLDFAYMPNNSLTPSLQEQLCQLYPRLKVLAFGAKPDSTLHTYFPSFLSRATPSCPPEMKKELPVDSCLPRSLELHPQKMDPKRQHIQLLSSLTECLTVDPLSASVWRQLYPKHLSQSSLLLEHLLSSWEQIPKKVQKSLQETIQSLKLTNQELLRKGSSNNQDVV

SEQ ID NO: 91476 - protein, 225 aa, Homo sapiens
  Payload ID: 18305
  Gene Name: transmembrane protein 214
  ENSP ID: ENSP00000395061
SQHTHDYPYSLVSRELRGIIRGLLAKAAGSLELFFDHCLFTMLQELDKTPGESLHGYRICIQAILQDKPKIATANLGKFLELLRSHQSRPAKCLTIMWALGQAGFANLTEGLKVWLGIMLPVLGIKSLSPFAITYLDRLLLMHPNLTKGFGMIGPKDFFPLLDFAYMPNNSLTPSLQEQLCQLYPRLKVLAFGAKPDSTLHTYFPSFLSRATPSCPPEMKKESPF

SEQ ID NO: 91477 - protein, 235 aa, Homo sapiens
  Payload ID: 18306
  Gene Name: transmembrane protein 215
  Uniprot ID: Q68D42
  ENSP ID: ENSP00000345468
MRPDDINPRTGLVVALVSVFLVFGFMFTVSGMKGETLGNIPLLAIGPAICLPGIAAIALARKTEGCTKWPENELLWVRKLPCFRKPKDKEVVELLRTPSDLESGKGSSDELAKKAGLRGKPPPQSQGEVSVASSINSPTPTEEGECQSLVQNGHQEETSRYLDGYCPSGSSLTYSALDVKCSARDRSECPEPEDSIFFVPQDSIIVCSYKQNSPYDRYCCYINQIQGRWDHETIV

SEQ ID NO: 91478 - protein, 148 aa, Homo sapiens
  Payload ID: 18307
  Gene Name: transmembrane protein 216
  Uniprot ID: Q9P0N5
  ENSP ID: ENSP00000334844
MLPRGLKMAPRGKRLSSTPLEILFFLNGWYNATYFLLELFIFLYKGVLLPYPTANLVLDVVMLLLYLGIEVIRLFFGTKGNLCQRKMPLSISVALTFPSAMMASYYLLLQTYVLRLEAIMNGILLFFCGSELLLEVLTLAAFSSMDRI

SEQ ID NO: 91479 - protein, 84 aa, Homo sapiens
  Payload ID: 18307
  Gene Name: transmembrane protein 216
  ENSP ID: ENSP00000381950
MLLLYLGIEVIRLFFGTKGNLCQRKMPLSISVALTFPSAMMASYYLLLQTYVLRLEAIMNGILLFFCGSELLLEVLTLAAFSRI

SEQ ID NO: 91480 - protein, 145 aa, Homo sapiens
  Payload ID: 18307
  Gene Name: transmembrane protein 216
  Uniprot ID: Q9P0N5
  ENSP ID: ENSP00000440638
MLPRGLKMAPRGKRLSSTPLEILFFLNGWYNATYFLLELFIFLYKGVLLPYPTANLVLDVVMLLLYLGIEVIRLFFGTKGNLCQRKMPLSISVALTFPSAMMASYYLLLQTYVLRLEAIMNGILLFFCGSELLLEVLTLAAFSRI

SEQ ID NO: 91481 - protein, 229 aa, Homo sapiens
  Payload ID: 18308
  Gene Name: transmembrane protein 217
  Uniprot ID: Q8N7C4
  ENSP ID: ENSP00000338164
MKQQQWCGMTAKMGTVLSGVFTIMAVDMYLIFEQKHLGNGSCTEITPKYRGASNIINNFIICWSFKIVLFLSFITILISCFLLYSVYAQIFRGLVIYIVWIFFYETANVVIQILTNNDFDIKEVRIMRWFGLVSRTVMHCFWMFFVINYAHITYKNRSQGNIISYKRRISTAEILHSRNKRLSISSGFSGSHLESQYFERQSFHTSIFTCLSPVPSSAPSTCRYTIDVC

SEQ ID NO: 91482 - protein, 211 aa, Homo sapiens
  Payload ID: 18308
  Gene Name: transmembrane protein 217
  Uniprot ID: Q8N7C4
  ENSP ID: ENSP00000349198
MKQQQWCGMTAKMGTVLSGVFTIMAVDMYLIFEQKHLGNGSCTEITPKYRGASNIINNFIICWSFKIVLFLSFITILISCFLLYSVYAQIFRGLVIYIVWIFFYETANVVIQILTNNDFDIKEVRIMRWFGLVSRTVMHCFWMFFVINYAHITYKNRSQGNIISYKRRISTAEILHSRNKRLSISSGFSGSHLESQYFERQRRCSGKTSIK

SEQ ID NO: 91483 - protein, 115 aa, Homo sapiens
  Payload ID: 18309
  Gene Name: transmembrane protein 218
  Uniprot ID: A2RU14
  ENSP ID: ENSP00000279968
MAGTVLGVGAGVFILALLWVAVLLLCVLLSRASGAARFSVIFLFFGAVIITSVLLLFPRAGEFPAPEVEVKIVDDFFIGRYVLLAFLSAIFLGGLFLVLIHYVLEPIYAKPLHSY

SEQ ID NO: 91484 - protein, 70 aa, Homo sapiens
  Payload ID: 18309
  Gene Name: transmembrane protein 218
  ENSP ID: ENSP00000431411
MAGTVLGVGAGVFILALLWVAVLLLCVLLSRASGAARFSVIFLFFGAVIITSVLLLFPRAGEFPAPEVEV

SEQ ID NO: 91485 - protein, 45 aa, Homo sapiens
  Payload ID: 18309
  Gene Name: transmembrane protein 218
  ENSP ID: ENSP00000432624
MAGTVLGVGAGVFILALLWVAVLLLCVLLSRASGAASSVAFPASW

SEQ ID NO: 91486 - protein, 45 aa, Homo sapiens; identical to SEQ ID NO: 91485
  Payload ID: 18309
  Gene Name: transmembrane protein 218
  ENSP ID: ENSP00000433023

SEQ ID NO: 91487 - protein, 115 aa, Homo sapiens; identical to SEQ ID NO: 91483
  Payload ID: 18309
  Gene Name: transmembrane protein 218
  Uniprot ID: A2RU14
  ENSP ID: ENSP00000433374

SEQ ID NO: 91488 - protein, 70 aa, Homo sapiens; identical to SEQ ID NO: 91484
  Payload ID: 18309
  Gene Name: transmembrane protein 218
  ENSP ID: ENSP00000433996

SEQ ID NO: 91489 - protein, 115 aa, Homo sapiens; identical to SEQ ID NO: 91483
  Payload ID: 18309
  Gene Name: transmembrane protein 218
  Uniprot ID: A2RU14
  ENSP ID: ENSP00000434597

SEQ ID NO: 91490 - protein, 115 aa, Homo sapiens; identical to SEQ ID NO: 91483
  Payload ID: 18309
  Gene Name: transmembrane protein 218
  Uniprot ID: A2RU14
  ENSP ID: ENSP00000435526

SEQ ID NO: 91491 - protein, 52 aa, Homo sapiens
  Payload ID: 18309
  Gene Name: transmembrane protein 218
  ENSP ID: ENSP00000436151
MAGTVLGVGAGVFILALLWVAVLLLCVLLSRASGAARFSVIFLFFGAVIITS

SEQ ID NO: 91492 - protein, 115 aa, Homo sapiens; identical to SEQ ID NO: 91483
  Payload ID: 18309
  Gene Name: transmembrane protein 218
  Uniprot ID: A2RU14
  ENSP ID: ENSP00000436162

SEQ ID NO: 91493 - protein, 115 aa, Homo sapiens; identical to SEQ ID NO: 91483
  Payload ID: 18309
  Gene Name: transmembrane protein 218
  Uniprot ID: A2RU14
  ENSP ID: ENSP00000436177

SEQ ID NO: 91494 - protein, 141 aa, Homo sapiens
  Payload ID: 18309
  Gene Name: transmembrane protein 218
  ENSP ID: ENSP00000436578
MAGTVLGVGAGVFILALLWVAVLLLCVLLSRASGAARNWELPRINGNAPSWYLSRKKDFGMKRFSVIFLFFGAVIITSVLLLFPRAGEFPAPEVEVKIVDDFFIGRYVLLAFLSAIFLGGLFLVLIHYVLEPIYAKPLHSY

SEQ ID NO: 91495 - protein, 115 aa, Homo sapiens; identical to SEQ ID NO: 91483
  Payload ID: 18309
  Gene Name: transmembrane protein 218
  Uniprot ID: A2RU14
  ENSP ID: ENSP00000436596

SEQ ID NO: 91496 - protein, 240 aa, Homo sapiens
  Payload ID: 18310
  Gene Name: transmembrane protein 219
  Uniprot ID: Q86XT9
  ENSP ID: ENSP00000279396
MGNCQAGHNLHLCLAHHPPLVCATLILLLLGLSGLGLGSFLLTHRTGLRSPDIPQDWVSFLRSFGQLTLCPRNGTVTGKWRGSHVVGLLTTLNFGDGPDRNKTRTFQATVLGSQMGLKGSSAGQLVLITARVTTERTAGTCLYFSAVPGILPSSQPPISCSEEGAGNATLSPRMGEECVSVWSHEGLVLTKLLTSEELALCGSRLLVLGSFLLLFCGLLCCVTAMCFHPRRESHWSRTRL

SEQ ID NO: 91497 - protein, 240 aa, Homo sapiens; identical to SEQ ID NO: 91496
  Payload ID: 18310
  Gene Name: transmembrane protein 219
  Uniprot ID: Q86XT9
  ENSP ID: ENSP00000388485

SEQ ID NO: 91498 - protein, 99 aa, Homo sapiens
  Payload ID: 18310
  Gene Name: transmembrane protein 219
  ENSP ID: ENSP00000454443
  MOD_RES (1)..(1): Any amino acid
XRSFGQLTLCPRNGTVTGKWRGSHVVGLLTTLNFGDGPDRNKTRTFQATVLGSQMGLKGGAGSVWLQAAGLGLLPASLLWPSLLCHCYVLPPAPGVPLV

SEQ ID NO: 91499 - protein, 240 aa, Homo sapiens; identical to SEQ ID NO: 91496
  Payload ID: 18310
  Gene Name: transmembrane protein 219
  Uniprot ID: Q86XT9
  ENSP ID: ENSP00000456960

SEQ ID NO: 91500 - protein, 240 aa, Homo sapiens; identical to SEQ ID NO: 91496
  Payload ID: 18310
  Gene Name: transmembrane protein 219
  Uniprot ID: Q86XT9
  ENSP ID: ENSP00000457492

SEQ ID NO: 91501 - protein, 213 aa, Homo sapiens
  Payload ID: 18310
  Gene Name: transmembrane protein 219
  ENSP ID: ENSP00000459732
MGNCQAGHNLHLCLAHHPPLVCATLILLLLGLSGLGLGSFLLTHRTGLRSPDIPQDWVSFLRSFGQLTLCPRNGTVTGKWRGSHVVGLLTTLNFGDGPDRNKTRTFQATVLGSQMGLKGSSAGQLVLITARVTTERTAGTCLYFSAVPGILPSSQPPISCSEEGAGNATLSPRMGEECVSVWSHEGLVLTKLLTSELALCGSRLLVLGSFLLL

SEQ ID NO: 91502 - protein, 231 aa, Homo sapiens
  Payload ID: 18310
  Gene Name: transmembrane protein 219
  ENSP ID: ENSP00000459813
  MOD_RES (1)..(1): Any amino acid
XHLCLAHHPPLVCATLILLLLGLSGLGLGSFLLTHRTGLRSPDIPQDWVSFLRSFGQLTLCPRNGTVTGKWRGSHVVGLLTTLNFGDGPDRNKTRTFQATVLGSQMGLKGSSAGQLVLITARVTTERTAGTCLYFSAVPGILPSSQPPISCSEEGAGNATLSPRMGEECVSVWSHEGLVLTKLLTSEELALCGSRLLVLGSFLLLFCGLLCCVTAMCFHPRRESHWSRTRL

SEQ ID NO: 91503 - protein, 169 aa, Homo sapiens
  Payload ID: 18310
  Gene Name: transmembrane protein 219
  ENSP ID: ENSP00000461124
DWVSFLRSFGQLTLCPRNGTVTGKWRGSHVVGLLTTLNFGDGPDRNKTRTFQATVLGSQMGLKGSSAGQLVLITARVTTERTAGTCLYFSAVPGILPSSQPPISCSEEGAGNATLSPRMGEECVSVWSHEGLVLTKLLTSVRASDGSPGFCRLPADYCILKVPGNNSTL

SEQ ID NO: 91504 - protein, 149 aa, Homo sapiens
  Payload ID: 18310
  Gene Name: transmembrane protein 219
  ENSP ID: ENSP00000473678
MGNCQAGHNLHLCLAHHPPLVCATLILLLLGLSGLGLGSFLLTHRTGLRSPDIPQDWVSFLRSFGQLTLCPRNGTVTGKWRGSHVVGLLTTLNFGDGPDRNKTRTFQATVLGSQMGLKGSSAGQLVLITARVTTERTAGTCLYFSAVPG

SEQ ID NO: 91505 - protein, 160 aa, Homo sapiens
  Payload ID: 18311
  Gene Name: transmembrane protein 220
  Uniprot ID: Q6QAJ8
  ENSP ID: ENSP00000339830
MAPALWRACNGLMAAFFALAALVQVNDPDAEVWVVVYTIPAVLTLLVGLNPEVTGNVIWKSISAIHILFCTVWAVGLASYLLHRTQQNILHEEEGRELSGLVIITAWIILCHSSSKNPVGGRIQLAIAIVITLFPFISWVYIYINKEMRSSWPTHCKTVI

SEQ ID NO: 91506 - protein, 150 aa, Homo sapiens
  Payload ID: 18311
  Gene Name: transmembrane protein 220
  Uniprot ID: Q6QAJ8
  ENSP ID: ENSP00000396973
MAPALWRACNGLMAAFFALAALVQVVYTIPAVLTLLVGLNPEVTGNVIWKSISAIHILFCTVWAVGLASYLLHRTQQNILHEEEGRELSGLVIITAWIILCHSSSKNPVGGRIQLAIAIVITLFPFISWVYIYINKEMRSSWPTHCKTVI

SEQ ID NO: 91507 - protein, 86 aa, Homo sapiens
  Payload ID: 18311
  Gene Name: transmembrane protein 220
  ENSP ID: ENSP00000462490
  MOD_RES (1)..(1): Any amino acid
XNVIWKSISAIHILFCTVWAVGLASYLLHRTQQNILHEEEGRELSGLVIITAWIILCHSSSKGRVLLCCPDWKAVARSQLTAASNS

SEQ ID NO: 91508 - protein, 130 aa, Homo sapiens
  Payload ID: 18311
  Gene Name: transmembrane protein 220
  ENSP ID: ENSP00000462723
MAPALWRACNGLMAAFFALAALVQVVYTIPAVLTLLVGLNPEVTGNVIWKSISAIHILFCTVWAVGLASYLLHRTQQNILHEEEGRNPVGGRIQLAIAIVITLFPFISWVYIYINKEMRSSWPTHCKTVI

SEQ ID NO: 91509 - protein, 117 aa, Homo sapiens
  Payload ID: 18311
  Gene Name: transmembrane protein 220
  ENSP ID: ENSP00000464189
  MOD_RES (1)..(1): Any amino acid
XSISAIHILFCTVWAVGLASYLLHRTQQNILHEEEGRFKLFFCLSLLSSWDYRELSGLVIITAWIILCHSSSKNPVGGRIQLAIAIVITLFPFISWVYIYINKEMRSSWPTHCKTVI

SEQ ID NO: 91510 - protein, 291 aa, Homo sapiens
  Payload ID: 18312
  Gene Name: transmembrane protein 221
  Uniprot ID: A6NGB7
  ENSP ID: ENSP00000342162
MARSYGGRVLAAMTLLGIAAAVLAALGAQLLFQLQAGRAELRGLRAEGLGQELGAGPGLPEDAAGTLLPLAAALAALVLVLGFTCLLLAALCGHLGAELARGPGPRRSDWFLYDCRLLRHVALGLFCCGISVYLAALSIYALLLFEIETGAAAASILGSGTLVLVAVLTHTLLRAARAARRGLHELSPPSFEDDLARPAEVSKASPRAQPQQGIHRRTPYSTCPEPGDPFGSMATATAPAALEGGWESSLPASRMHRTLSAGLGHWDGVTHEMRRMLGHRPGSMGKDSTLV

SEQ ID NO: 91511 - protein, 208 aa, Homo sapiens
  Payload ID: 18313
  Gene Name: transmembrane protein 222
  Uniprot ID: Q9H0R3
  ENSP ID: ENSP00000363189
MAEAEGSSLLLLPPPPPPPRMAEVEAPTAAETDMKQYQGSGGVAMDVERSRFPYCVVWTPIPVLTWFFPIIGHMGICTSTGVIRDFAGPYFVSEDNMAFGKPAKYWKLDPAQVYASGPNAWDTAVHDASEEYKHRMHNLCCDNCHSHVALALNLMRYNNSTNWNMVTLCFFCLLYGKYVSVGAFVKTWLPFILLLGIILTVSLVFNLR

SEQ ID NO: 91512 - protein, 154 aa, Homo sapiens
  Payload ID: 18313
  Gene Name: transmembrane protein 222
  ENSP ID: ENSP00000417603
MKQYQGSGGVAMDVERSRFPYCVVWTPIPVLTWFFPIIGHMGICTSTGVIRDFAGPYFVSEDNMAFGKPAKYWKLDPAQVYASGPNAWDTAVHDASEEYKHRMHNLCCDNCHSHVALALNLMRYNNSTNWNMVTLCFFCLLYGKYVRSLPRQRD

SEQ ID NO: 91513 - protein, 72 aa, Homo sapiens
  Payload ID: 18313
  Gene Name: transmembrane protein 222
  ENSP ID: ENSP00000417720
MKQYQGSGGVAMDVERSRFPYCVVWTPIPVLTWFFPIIGHMGICTSTGVIRDFAGPYFVSDRPGGQCGQKDS

SEQ ID NO: 91514 - protein, 147 aa, Homo sapiens
  Payload ID: 18313
  Gene Name: transmembrane protein 222
  ENSP ID: ENSP00000417853
MKQYQGSGGVAMDVERSRFPYCVVWTPIPVLTWFFPIIGHMGICTSTGVIRDFAGPYFVSEDNMAFGKPAKYWKLDPAQVYASGPNAWDTAVHDASEEYKHRMHNLCCDNCHSHVALALNLMRYNNSTNWNMVTLCFFCLLYGKYVR

SEQ ID NO: 91515 - protein, 199 aa, Homo sapiens
  Payload ID: 18313
  Gene Name: transmembrane protein 222
  ENSP ID: ENSP00000419292
KQYQGSGGVAMDVERSRFPYCVVWTPIPVLTWFFPIIGHMGICTSTGVIRDFAGPYFVSEDNMAFGKPAKCHLQEAFSHPILVRSGCHNKISSIGYWKLDPAQVYASGPNAWDTAVHDASEEYKHRMHNLCCDNCHSHVALALNLMRYNNSTNWNMVTLCFFCLLYGKYVSVGAFVKTWLPFILLLGIILTVSLVFNLR

SEQ ID NO: 91516 - protein, 72 aa, Homo sapiens; identical to SEQ ID NO: 91513
  Payload ID: 18313
  Gene Name: transmembrane protein 222
  ENSP ID: ENSP00000419528

SEQ ID NO: 91517 - protein, 80 aa, Homo sapiens
  Payload ID: 18313
  Gene Name: transmembrane protein 222
  ENSP ID: ENSP00000419878
MKQYQGSGGVAMDVERSRFPYCVVWTPIPVLTWFFPIIGHMGICTSTGVIRDFAGPYFVSEDNMAFGKPAKLTLLPFGNK

SEQ ID NO: 91518 - protein, 175 aa, Homo sapiens
  Payload ID: 18313
  Gene Name: transmembrane protein 222
  ENSP ID: ENSP00000476439
MKQYQGSGGVAMDVERSRFPYCVVWTPIPVLTWFFPIIGHMGICTSTGVIRDFAGPYFVSEDNMAFGKPAKYWKLDPAQVYASGPNAWDTAVHDASEEYKHRMHNLCCDNCHSHVALALNLMRYNNSTNWNMVTLCFFCLLYGKYVSVGAFVKTWLPFILLLGIILTVSLVFNLR

SEQ ID NO: 91519 - protein, 208 aa, Homo sapiens; identical to SEQ ID NO: 91511
  Payload ID: 18313
  Gene Name: transmembrane protein 222
  Uniprot ID: Q9H0R3
  ENSP ID: ENSP00000483276

SEQ ID NO: 91520 - protein, 202 aa, Homo sapiens
  Payload ID: 18314
  Gene Name: transmembrane protein 223
  Uniprot ID: A0PJW6
  ENSP ID: ENSP00000303987
MAAPWRRWPTGLLAVLRPLLTCRPLQGTTLQRDVLLFEHDRGRFFTILGLFCAGQGVFWASMAVAAVSRPPVPVQPLDAEVPNRGPFDLRSALWRYGLAVGCGAIGALVLGAGLLFSLRSVRSVVLRAGGQQVTLTTHAPFGLGAHFTVPLKQVSCMAHRGEVPAMLPLKVKGRRFYFLLDKTGHFPNTKLFDNTVGAYRSL

SEQ ID NO: 91521 - protein, 137 aa, Homo sapiens
  Payload ID: 18314
  Gene Name: transmembrane protein 223
  ENSP ID: ENSP00000431804
  MOD_RES (1)..(1): Any amino acid
XAAPWRRWPTGLLAVLRPLLTCRPLQGTTLQRDVLLFEHDRGRFFTILGLFCAGQGVFWASMAVAAVSRPPVPVQPLDAEVPNRGPFDLRSALWRYGLAVGCGAIGYSTIRNRQKQQLMTHSNNAQHQKARKSNLRG

SEQ ID NO: 91522 - protein, 106 aa, Homo sapiens
  Payload ID: 18314
  Gene Name: transmembrane protein 223
  ENSP ID: ENSP00000436670
MAAPWRRWPTGLLAVLRPLLTCRPLQGTTLQRDVLLFEHDRGRFFTILGLFCAGQGVFWASMAVAAVSRPPVPVQPLDAEVPNRGPFDLRSALWRYGLAVGCGAIA

SEQ ID NO: 91523 - protein, 225 aa, Homo sapiens
  Payload ID: 18315
  Gene Name: transmembrane protein 225
  Uniprot ID: Q6GV28
  ENSP ID: ENSP00000364166
MVHVSNRSIQGMNILFSSWAVVLMVMGITLDKWVELISEDERAKMNHSPWMMCCPALWPEDDLKVVRIMMTSSLGLSFLLNLILGMKFTYLIPQNKYIQLFTTILSFFSGISLLWALILYHNKLKQGQSMHFSSYRITWIMYTAYLNVFFLSVCGVLSLLECKLSTSSCTCLNIHKSDNECKESENSIEDISLPECTAMPRSIVRAHTVNSLNKKVQTRHVTWAL

SEQ ID NO: 91524 - protein, 150 aa, Homo sapiens
  Payload ID: 18315
  Gene Name: transmembrane protein 225
  ENSP ID: ENSP00000431282
MVHVSNRSIQDDLKVVRIMMTSSLGLSFLLNLILGMKFTYLIPQNKYIQLFTTILSFFSGISLLWALILYHNKLKQGQSMHFSSYRITWIMYTAYLNVFFLSVCGVLSLLECKLSTSSCTCLNIHKSDNECKESENSIEDISLPECTAMP

SEQ ID NO: 91525 - protein, 380 aa, Homo sapiens
  Payload ID: 18316
  Gene Name: transmembrane protein 229A
  Uniprot ID: B2RXF0
  ENSP ID: ENSP00000395244
MAGSDVDSEGPARRGGAARRPGAPGGPGSEAAAGCPEPLSTAEAPAESATLPAWMRLYFYGMHGITLDVLVSSARRFARSPDLRMLGFSSPYRCLLHSLTHFALEKVYLQQRRCPNAFVFNFLLYPSAHVGLQTLAGQALLLSLGGGAGVAVAPGALDLALQYVLALYHCQVFLKRFLRLRYGRQRRRQQQQQQQQQQQQRRGALPVPPGARVPTAAGARRRRPRGPRGAGGAPSQGLPDLPRFLFFGMHGFLDEIFFTFFFNVLGQGDGTTSGHTSLWSFFMYGSCSFVVEKLYFHLHYSRGWGTWKRVPIYVIFIYVWELSWGLGLRTCGACSWDYSHYPLNFMGLITLMYLPGWIFLSVYQDLISNVLWRVQYVPAN

SEQ ID NO: 91526 - protein, 167 aa, Homo sapiens
  Payload ID: 18317
  Gene Name: transmembrane protein 229B
  Uniprot ID: Q8NBD8
  ENSP ID: ENSP00000350050
MASAEPLTALSRWYLYAIHGYFCEVMFTAAWEFVVNLNWKFPGVTSVWALFIYGTSILIVERMYLRLRGRCPLLLRCLIYTLWTYLWEFTTGFILRQFNACPWDYSQFDFDFMGLITLEYAVPWFCGALIMEQFIIRNTLRLRFDKDAEPGEPSGALALANGHVKTD

SEQ ID NO: 91527 - protein, 79 aa, Homo sapiens
  Payload ID: 18317
  Gene Name: transmembrane protein 229B
  ENSP ID: ENSP00000450859
MASAEPLTALSRWYLYAIHGYFCEVMFTAAWEFVVNLNWKFPGVTSVWALFIYGTSILIVERMYLRLRGRCPLLLRCLI

SEQ ID NO: 91528 - protein, 167 aa, Homo sapiens; identical to SEQ ID NO: 91526
  Payload ID: 18317
  Gene Name: transmembrane protein 229B
  Uniprot ID: Q8NBD8
  ENSP ID: ENSP00000451774

SEQ ID NO: 91529 - protein, 55 aa, Homo sapiens
  Payload ID: 18317
  Gene Name: transmembrane protein 229B
  ENSP ID: ENSP00000452025
MASAEPLTALSRWYLYAIHGYFCEVMFTAAWEFVVNLNWKFPGVTSVWALFIYGT

SEQ ID NO: 91530 - protein, 56 aa, Homo sapiens
  Payload ID: 18317
  Gene Name: transmembrane protein 229B
  ENSP ID: ENSP00000452144
MASAEPLTALSRWYLYAIHGYFCEVMFTAAWEFVVNLNWKFPGVTSVWALFIYGTS

SEQ ID NO: 91531 - protein, 167 aa, Homo sapiens; identical to SEQ ID NO: 91526
  Payload ID: 18317
  Gene Name: transmembrane protein 229B
  Uniprot ID: Q8NBD8
  ENSP ID: ENSP00000452201

SEQ ID NO: 91532 - protein, 134 aa, Homo sapiens
  Payload ID: 18317
  Gene Name: transmembrane protein 229B
  ENSP ID: ENSP00000452402
MASAEPLTALSRWYLYAIHGYFCEVMFTAAWEFVVNLNWKFPGVTSVWALFIYGTSILIVERMYLRLRGRCPLLLRCLIYTLWTYLWEFTTGFILRQFNACPWDYSQFDFDFMGLITLEYAVPWFCGALIMEQF

SEQ ID NO: 91533 - protein, 120 aa, Homo sapiens
  Payload ID: 18318
  Gene Name: transmembrane protein 230
  Uniprot ID: Q96A57
  ENSP ID: ENSP00000202834
MMPSRTNLATGIPSSKVKYSRLSSTDDGYIDLQFKKTPPKIPYKAIALATVLFLIGAFLIIIGSLLLSGYISKGGADRAVPVLIIGILVFLPGFYHLRIAYYASKGYRGYSYDDIPDFDD

SEQ ID NO: 91534 - protein, 183 aa, Homo sapiens
  Payload ID: 18318
  Gene Name: transmembrane protein 230
  Uniprot ID: Q96A57
  ENSP ID: ENSP00000341364
MQPWALPTVGELWVCGRPGAALRWSLVLSPRLEPSGVISAHCNLHLLASSDSSASASRLCQRVMMPSRTNLATGIPSSKVKYSRLSSTDDGYIDLQFKKTPPKIPYKAIALATVLFLIGAFLIIIGSLLLSGYISKGGADRAVPVLIIGILVFLPGFYHLRIAYYASKGYRGYSYDDIPDFDD

SEQ ID NO: 91535 - protein, 74 aa, Homo sapiens
  Payload ID: 18318
  Gene Name: transmembrane protein 230
  ENSP ID: ENSP00000368578
MMPSRTNLATGIPSSKVKYSRLSSTDDGYIDLQFKKTPPKIPYKAIALATVLFLIGAFLIIIGSLLLSGYISKG

SEQ ID NO: 91536 - protein, 120 aa, Homo sapiens; identical to SEQ ID NO: 91533
  Payload ID: 18318
  Gene Name: transmembrane protein 230
  Uniprot ID: Q96A57
  ENSP ID: ENSP00000368579

SEQ ID NO: 91537 - protein, 120 aa, Homo sapiens; identical to SEQ ID NO: 91533
  Payload ID: 18318
  Gene Name: transmembrane protein 230
  Uniprot ID: Q96A57
  ENSP ID: ENSP00000368581

SEQ ID NO: 91538 - protein, 120 aa, Homo sapiens; identical to SEQ ID NO: 91533
  Payload ID: 18318
  Gene Name: transmembrane protein 230
  Uniprot ID: Q96A57
  ENSP ID: ENSP00000368585

SEQ ID NO: 91539 - protein, 120 aa, Homo sapiens; identical to SEQ ID NO: 91533
  Payload ID: 18318
  Gene Name: transmembrane protein 230
  Uniprot ID: Q96A57
  ENSP ID: ENSP00000368588

SEQ ID NO: 91540 - protein, 120 aa, Homo sapiens; identical to SEQ ID NO: 91533
  Payload ID: 18318
  Gene Name: transmembrane protein 230
  Uniprot ID: Q96A57
  ENSP ID: ENSP00000368601

SEQ ID NO: 91541 - protein, 127 aa, Homo sapiens
  Payload ID: 18318
  Gene Name: transmembrane protein 230
  ENSP ID: ENSP00000478112
MMPSRTNLATGIPSSKVKYSRLSSTDDGYIDLQFKKTPPKIPYKAIALATVLFLIGAFLIIIGSLLLSGYISKGSLESTSREQKKADHKHLPASRGYMMGGISGRSPEGGLSSRLPEGRGTQVSSPD

SEQ ID NO: 91542 - protein, 127 aa, Homo sapiens; identical to SEQ ID NO: 91541
  Payload ID: 18318
  Gene Name: transmembrane protein 230
  ENSP ID: ENSP00000478641

SEQ ID NO: 91543 - protein, 316 aa, Homo sapiens
  Payload ID: 18319
  Gene Name: transmembrane protein 231
  Uniprot ID: Q9H6L2
  ENSP ID: ENSP00000258173
MALYELFSHPVERSYRAGLCSKAALFLLLAAALTYIPPLLVAFRSHGFWLKRSSYEEQPTVRFQHQVLLVALLGPESDGFLAWSTFPAFNRLQGDRLRVPLVSTREEDRNQDGKTDMLHFKLELPLQSTEHVLGVQLILTFSYRLHRMATLVMQSMAFLQSSFPVPGSQLYVNGDLRLQQKQPLSCGGLDARYNISVINGTSPFAYDYDLTHIVAAYQERNVTTVLNDPNPIWLVGRAADAPFVINAIIRYPVEVISYQPGFWEMVKFAWVQYVSILLIFLWVFERIKIFVFQNQVVTTIPVTVTPRGDLCKEHLS

SEQ ID NO: 91544 - protein, 106 aa, Homo sapiens
  Payload ID: 18319
  Gene Name: transmembrane protein 231
  ENSP ID: ENSP00000454582
MALYELFSHPVERSYRAGLCSKAALFLLLAAALTYIPPLLVAFRSHGFWLKRSSYEEQPTVRFQHQVLLVALLGPESDGFLAWSTFPAFNRLQGDRLRVPLVSWRR

SEQ ID NO: 91545 - protein, 193 aa, Homo sapiens
  Payload ID: 18319
  Gene Name: transmembrane protein 231
  ENSP ID: ENSP00000455520
MALYELFSHPVERSYRAGLCSKAALFLLLAAALTYIPPLLVAFRSHGFWLKRSSYEEQPTVRFQHQVLLVALLGPESDGFLAWSTFPAFNRLQGDRLRVPLVSTREEDRNQDGKTDMLHFKLELPLQSTEHVLEDGDPRDAEHGVSPVLLSCPGIPVIRERRPEAAAEAAAELWWPRCPIQHIRDQRDQPLCL

SEQ ID NO: 91546 - protein, 268 aa, Homo sapiens
  Payload ID: 18319
  Gene Name: transmembrane protein 231
  ENSP ID: ENSP00000457254
MALYELFSHPVERSYRAGLCSKAALFLLLAAALTYIPPLLVAFRSHGFWLKRSSYEEQPTVRFQHQVLLVALLGPESDGFLAWSTFPAFNRLQGDRLRVPLVSTREEDRNQDGKTDMLHFKLELPLQSTEHVLGVQLILTFSYRLHISVINGTSPFAYDYDLTHIVAAYQERNVTTVLNDPNPIWLVGRAADAPFVINAIIRYPVEVISYQPGFWEMVKFAWVQYVSILLIFLWVFERIKIFVFQNQVVTTIPVTVTPRGDLCKEHLS

SEQ ID NO: 91547 - protein, 345 aa, Homo sapiens
  Payload ID: 18319
  Gene Name: transmembrane protein 231
  Uniprot ID: Q9H6L2
  ENSP ID: ENSP00000476267
MSSSLTRSSAVTARGSAPKPRCSCCWPLRSRTSRRCWWPSGATVSLPRPLCHEAPRARSARAGLPNRLPTALFNSGFWLKRSSYEEQPTVRFQHQVLLVALLGPESDGFLAWSTFPAFNRLQGDRLRVPLVSTREEDRNQDGKTDMLHFKLELPLQSTEHVLGVQLILTFSYRLHRMATLVMQSMAFLQSSFPVPGSQLYVNGDLRLQQKQPLSCGGLDARYNISVINGTSPFAYDYDLTHIVAAYQERNVTTVLNDPNPIWLVGRAADAPFVINAIIRYPVEVISYQPGFWEMVKFAWVQYVSILLIFLWVFERIKIFVFQNQVVTTIPVTVTPRGDLCKEHLS

SEQ ID NO: 91548 - protein, 54 aa, Homo sapiens
  Payload ID: 18319
  Gene Name: transmembrane protein 231
  ENSP ID: ENSP00000479977
  MOD_RES (1)..(1): Any amino acid
XQHQVLLVALLGPESDGFLAWSTFPAFNRLQGDRLRVPLVSVRGSRLGLGQSRG

SEQ ID NO: 91549 - protein, 657 aa, Homo sapiens
  Payload ID: 18320
  Gene Name: transmembrane protein 232
  Uniprot ID: C9JQI7
  ENSP ID: ENSP00000401477
MNMPVNKSPMINTCGGISSPYHEELWKLNFQHLSGERGHKSRPTFSITKEFILRFNQTQNSKEKEELLELARKIILRCKRKLGLKTLGSGRHVHLPAAWTEVIYLAQCKGEIQDESLNMLYASLDHASFDYDHLPALFFVAESVLYRLCCDASLKTYLYSVEIKLAKIGYLVFLRLFIFFLHGHLESFKQHLLRLQPYLYALSFSGASYHKYPNIFSNVQFILKASEIIGKRELRSESIFRPVEDKKRYENTDSDMGGYEINHLLWHCVAAWSCVQNNSPQLNNVLEHLVFHKTQLQKKCWLDSVLALLVLGEAAKLNMACLKALMDVVRDFVSSIMSVQNQEESCKVDDFSWAWNVVYIYTVILAEICLYAATSDLRKTALIGFCHCKSSQKNILYLDKSVPPELKETSILSLLEYFSSKMSENCDQVVWTGYYGLVYNLVKISWELQGDEEQDGLRNMIWQTLQKTKDYEEDVRIQNAINIAQAELNDPTDPFTRYSTNISSNVGEEVFSKYIGWRIANTLSKLFFPPIEAHFLPLKKPSIKKDQTKYPNKKLESVKKQVLHFTVREHPSVSEIPMFPYPDFFTKADKELAKIIDHHWQEELKIREKEDAICKAQELKDKKLAEKNHFQEVMKKREEKLHKQTKPYELPYRKEVI

SEQ ID NO: 91550 - protein, 164 aa, Homo sapiens
  Payload ID: 18320
  Gene Name: transmembrane protein 232
  ENSP ID: ENSP00000421614
MNMPVNKSPMINTCGGISSPYHEELWKLNFQHLSGERGHKSRPTFSITKEFILRFNQTQNSKEKEELLELARKIILRCKRKLGLKTLGSGRHVHLPAAWTEVIYLAQCKGEIQDESLNMLYASLDHASFDYDHLPALFFVAESVLYRLCCDASLKTYLYSVEIK

SEQ ID NO: 91551 - protein, 247 aa, Homo sapiens
  Payload ID: 18320
  Gene Name: transmembrane protein 232
  ENSP ID: ENSP00000423904
MNMPVNKSPMINTCGGISSPYHEELWKLNFQHLSGERGHKSRPTFSITKEFILRFNQTQNSKEKEELLELARKIILRCKRKLGLKTLGSGRHVHLPAAWTEVIYLAQCKGEIQDESLNMLYASLDHASFDYDHLPALFFVAESVLYRLCCDASLKTYLYSVEIKLAKIGYLVFLRLFIFFLHGHLESFKQHLLRLQPYLYALSFSGASYHKYPNIFSNVQFILKASEIIGKRELRSESIFRPVEDKK

SEQ ID NO: 91552 - protein, 119 aa, Homo sapiens
  Payload ID: 18320
  Gene Name: transmembrane protein 232
  ENSP ID: ENSP00000424807
MNMPVNKSPMINTCGGISSPYHEELWKLNFQHLSGERGHKSRPTFSITKEFILRFNQTQNSKEKEELLELARKIILRCKRKLGLKTLGSGRHVHLPAAWTEVIYLAQCKGEIQDGTYFK

SEQ ID NO: 91553 - protein, 59 aa, Homo sapiens
  Payload ID: 18320
  Gene Name: transmembrane protein 232
  ENSP ID: ENSP00000427785
MNMPVNKSPMINTCGGISSPYHEELWKLNFQHLSGERGHKSRLAIWSSYDFLYFSCMVI

SEQ ID NO: 91554 - protein, 109 aa, Homo sapiens
  Payload ID: 18321
  Gene Name: transmembrane protein 233
  Uniprot ID: B4DJY2
  ENSP ID: ENSP00000403130
MSQYAPSPDFKRALDSSPEANTEDDKTEEDVPMPKNYLWLTIVSCFCPAYPINIVALVFSIMSLNSYNDGDYEGARRLGRNAKWVAIASIIIGLLIIGISCAVHFTRNA

SEQ ID NO: 91555 - protein, 140 aa, Homo sapiens
  Payload ID: 18322
  Gene Name: transmembrane protein 234
  Uniprot ID: Q8WY98
  ENSP ID: ENSP00000309792
MAASLGQVLALVLVAALWGGTQPLLKRASAGLQRVHEPTWAQQLLQEMKTLFLNTEYLMPFLLNQCGSLLYYLTLASTDLTLAVPICNSLAIIFTLIVGKALGEDIGGKRAVAGMVLTVIGISLCITSSVSKTQGQQSTL

SEQ ID NO: 91556 - protein, 164 aa, Homo sapiens
  Payload ID: 18322
  Gene Name: transmembrane protein 234
  Uniprot ID: Q8WY98
  ENSP ID: ENSP00000344021
MAASLGQVLALVLVAALWGGTQPLLKRASAGLQRVHEPTWAQQLLQEMKTLFLNTEYLMPFLLNQCGSLLYYLTLASTDLTLAVPICNSLAIIFTLIVGKALGEDIGGKRAVAGMVLTVIGISLCITSSVPWTAELQLHGKGQLQTLSQKCKREASGTQSERFG

SEQ ID NO: 91557 - protein, 180 aa, Homo sapiens
  Payload ID: 18322
  Gene Name: transmembrane protein 234
  Uniprot ID: Q8WY98
  ENSP ID: ENSP00000362695
MAASLGQVLALVLVAALWGGTQPLLKRASAGLQRVHEPTWAQQLLQEMKTLFLNTEYLMPFLLNQCGSLLYYLTLASTDLTLAVPICNSLAIIFTLIVGKALGEDIGGKRKLDYCECGTQLCGSRHTCVSSFPEPISPEWVRTRPFPILPFPLQLFCFLVAIRVPFPWTVWRKTEAGVWD

SEQ ID NO: 91558 - protein, 67 aa, Homo sapiens
  Payload ID: 18322
  Gene Name: transmembrane protein 234
  ENSP ID: ENSP00000432747
MAASLDLTLAVPICNSLAIIFTLIVGKALGEDIGGKRAVAGMVLTVIGISLCITSSVSKTQGQQSTL

SEQ ID NO: 91559 - protein, 164 aa, Homo sapiens; identical to SEQ ID NO: 91556
  Payload ID: 18322
  Gene Name: transmembrane protein 234
  Uniprot ID: Q8WY98
  ENSP ID: ENSP00000433020

SEQ ID NO: 91560 - protein, 164 aa, Homo sapiens; identical to SEQ ID NO: 91556
  Payload ID: 18322
  Gene Name: transmembrane protein 234
  Uniprot ID: Q8WY98
  ENSP ID: ENSP00000434295

SEQ ID NO: 91561 - protein, 96 aa, Homo sapiens
  Payload ID: 18322
  Gene Name: transmembrane protein 234
  Uniprot ID: Q8WY98
  ENSP ID: ENSP00000435588
MAASLGQVLALVLVAALWGGTQPLLKRASAGLQRVHEPTWAQQLLQEMKTLFLNTEYLMPFLLNQCGSLLYYLTLASTGWSQTSEFRSSCWNPGKH

SEQ ID NO: 91562 - protein, 164 aa, Homo sapiens; identical to SEQ ID NO: 91556
  Payload ID: 18322
  Gene Name: transmembrane protein 234
  Uniprot ID: Q8WY98
  ENSP ID: ENSP00000436631

SEQ ID NO: 91563 - protein, 196 aa, Homo sapiens
  Payload ID: 18323
  Gene Name: transmembrane protein 235
  Uniprot ID: A6NFC5
  ENSP ID: ENSP00000364084
MARLGALLLAAALGALLSFALLAAAVASDYWYILEVADAGNGSAWPGRAELLSSHSGLWRICEVLHRAVIVVLPLSLVLLVCGWICGLLSSLAQSVSLLLFTGCYFLLGSVLTLAGVSIYISYSHLAFAETVQQYGPQHMQGVRVSFGWSMALAWGSCALEAFSGTLLLSAAWTLSLSPPICGHLSPQQVGGRGGD

SEQ ID NO: 91564 - protein, 223 aa, Homo sapiens
  Payload ID: 18323
  Gene Name: transmembrane protein 235
  Uniprot ID: A6NFC5
  ENSP ID: ENSP00000402790
MARLGALLLAAALGALLSFALLAAAVASDYWYILEVADAGNGSAWPGRAELLSSHSGLWRICEGQNGCIPLVDPFASESLDVSTSVQHLILLHRAVIVVLPLSLVLLVCGWICGLLSSLAQSVSLLLFTGCYFLLGSVLTLAGVSIYISYSHLAFAETVQQYGPQHMQGVRVSFGWSMALAWGSCALEAFSGTLLLSAAWTLSLSPPICGHLSPQQVGGRGGD

SEQ ID NO: 91565 - protein, 223 aa, Homo sapiens; identical to SEQ ID NO: 91564
  Payload ID: 18323
  Gene Name: transmembrane protein 235
  Uniprot ID: A6NFC5
  ENSP ID: ENSP00000446514

SEQ ID NO: 91566 - protein, 196 aa, Homo sapiens; identical to SEQ ID NO: 91563
  Payload ID: 18323
  Gene Name: transmembrane protein 235
  Uniprot ID: A6NFC5
  ENSP ID: ENSP00000447766

SEQ ID NO: 91567 - protein, 255 aa, Homo sapiens
  Payload ID: 18323
  Gene Name: transmembrane protein 235
  ENSP ID: ENSP00000466430
  MOD_RES (1)..(1): Any amino acid
XLLLAAALGALLSFALLAAAVASDYWYILEVADAGNGSAWPGRAELLSSHSGLWRICEGQNGCIPLVDPFASESLDVSTSVQHLICSSQLGWILRALQTPGSPFRTRFFQMACCLPGWHLPPVLHRAVIVVLPLSLVLLVCGWICGLLSSLAQSVSLLLFTGCYFLLGSVLTLAGVSIYISYSHLAFAETVQQYGPQHMQGVRVSFGWSMALAWGSCALEAFSGTLLLSAAWTLSLSPPICGHLSPQQVGGRGGD

SEQ ID NO: 91568 - protein, 150 aa, Homo sapiens
  Payload ID: 18323
  Gene Name: transmembrane protein 235
  Uniprot ID: A6NFC5
  ENSP ID: ENSP00000466793
MARLGALLLAAALGALLSFALLAAAVASDYWYILEVADAGNGSAWPGRAELLSSHSGLWRICEGVLTLAGVSIYISYSHLAFAETVQQYGPQHMQGVRVSFGWSMALAWGSCALEAFSGTLLLSAAWTLSLSPPICGHLSPQQVGGRGGD

SEQ ID NO: 91569 - protein, 351 aa, Homo sapiens
  Payload ID: 18324
  Gene Name: transmembrane protein 236
  Uniprot ID: Q5W0B7
  ENSP ID: ENSP00000366715
MASGRLIKFVVFELLEFAAFSIPTLVITEQFATAYQGTRARSDNTHYWLIISCSIAYVALVTLLIWVPVKVILHKKRYIYRKIKGWRPVLMMCVVLTTLPCLTFSIAVTEVQKSINGSADVLPDMLPDLPVSLVLLSLIMVDIIEKLRIYPLRGSQKSSENGHIHSTSLQHIKTVTEQVRQSPENAASPQATNSTQVSQPSGAMTRSQESVFMGPQEPSCDSGILRMMSRRDVRAELFLWSFLLWSDTIEMVRVAGHPNVYKSSWLYPVYIFSFISLLRITFTPQNPLLNSLSVLLQDLPFVFVRLGLIIALGTITPVLGLCKNILVTLSYIYFNYLTRIRIFSAFEMSPF

SEQ ID NO: 91570 - protein, 118 aa, Homo sapiens
  Payload ID: 18325
  Gene Name: transmembrane protein 237
  ENSP ID: ENSP00000286196
MIFHLVVLRKRSPEQKTHQQVLLWKALLRLLVEGPLRAMSHQLKNSKSTQRLLFKEDRKRQGYLLNWRLPPPKRSHLVHLYYEMKMVLMRSQLRRQLFKNLGGRQRKPSQQNYSMPMS

SEQ ID NO: 91571 - protein, 408 aa, Homo sapiens
  Payload ID: 18325
  Gene Name: transmembrane protein 237
  Uniprot ID: Q96Q45
  ENSP ID: ENSP00000386264
MRTDSGARLEEGHLRPPRALPPVPSQDDIPLSRPKKKKPRTKNTPASASLEGLAQTAGRRPSEGNEPSTKELKEHPEAPVQRRQKKTRLPLELETSSTQKKSSSSSLLRNENGIDAEPAEEAVIQKPRRKTKKTQPAELQYANELGVEDEDIITDEQTTVEQQSVFTAPTGISQPVGKVFVEKSRRFQAADRSELIKTTENIDVSMDVKPSWTTRDVALTVHRAFRMIGLFSHGFLAGCAVWNIVVIYVLAGDQLSNLSNLLQQYKTLAYPFQSLLYLLLALSTISAFDRIDFAKISVAIRNFLALDPTALASFLYFTALILSLSQQMTSDRIHLYTPSSVNGSLWEAGIEEQILQPWIVVNLVVALLVGLSWLFLSYRPGMDLSEELMFSSEVEEYPDKEKEIKASS

SEQ ID NO: 91572 - protein, 400 aa, Homo sapiens
  Payload ID: 18325
  Gene Name: transmembrane protein 237
  Uniprot ID: Q96Q45
  ENSP ID: ENSP00000387203
MGKNPVRPPRALPPVPSQDDIPLSRPKKKKPRTKNTPASASLEGLAQTAGRRPSEGNEPSTKELKEHPEAPVQRRQKKTRLPLELETSSTQKKSSSSSLLRNENGIDAEPAEEAVIQKPRRKTKKTQPAELQYANELGVEDEDIITDEQTTVEQQSVFTAPTGISQPVGKVFVEKSRRFQAADRSELIKTTENIDVSMDVKPSWTTRDVALTVHRAFRMIGLFSHGFLAGCAVWNIVVIYVLAGDQLSNLSNLLQQYKTLAYPFQSLLYLLLALSTISAFDRIDFAKISVAIRNFLALDPTALASFLYFTALILSLSQQMTSDRIHLYTPSSVNGSLWEAGIEEQILQPWIVVNLVVALLVGLSWLFLSYRPGMDLSEELMFSSEVEEYPDKEKEIKASS

SEQ ID NO: 91573 - protein, 96 aa, Homo sapiens
  Payload ID: 18325
  Gene Name: transmembrane protein 237
  ENSP ID: ENSP00000402681
MRTDSGARLEEGHLRPPRALPPVPSQDDIPLSRPKKKKPRTKNTPASASLEGLAQTAGRRPSEGNEPSTKELKEHPEAPVQRRQKKTRLPLENGVS

SEQ ID NO: 91574 - protein, 96 aa, Homo sapiens; identical to SEQ ID NO: 91573
  Payload ID: 18325
  Gene Name: transmembrane protein 237
  ENSP ID: ENSP00000413230

SEQ ID NO: 91575 - protein, 400 aa, Homo sapiens [sequence omitted]

SEQ ID NO: 91576 - protein, 176 aa, Homo sapiens
  Payload ID: 18326
  Gene Name: transmembrane protein 238
  Uniprot ID: C9JI98
  ENSP ID: ENSP00000416154
MAAAPAVCASQGSPPGAPSAPAAAPAPAAGLGRCRMALLLAVALDVAGMAALLTGVFAQLQVRGRDFGDLLIYSGALLVFLSLLGWILWYTGNIEISRQELERDYGLRPSALARLARKLSRRWSAPAAAGQRPAPGSRRARRAARAPPPPAAGSRRVRLQLATLEAGPGAAGAGSE

SEQ ID NO: 91577 - protein, 195 aa, Homo sapiens
  Payload ID: 18327
  Gene Name: transmembrane protein 239
  Uniprot ID: Q8WW34
  ENSP ID: ENSP00000354312
MRVGTWICLPGRPGRCRKQHDLGNCPEVPGIFKTLALSPGAPDMMQQPRVETDTIGAGEGPQQAVPWSAWVTRHGWVRWWVSHMPPSWIQWWSTSNWRQPLQRLLWGLEGILYLLLALMLCHALFTTGSHLLSSLWPVVAAVWRHLLPALLLLVLSALPALLFTASFLLLFSTLLSLVGLLTSMTHPGDTQDLDQ

SEQ ID NO: 91578 - protein, 152 aa, Homo sapiens
  Payload ID: 18327
  Gene Name: transmembrane protein 239
  Uniprot ID: Q8WW34
  ENSP ID: ENSP00000369959
MMQQPRVETDTIGAGEGPQQAVPWSAWVTRHGWVRWWVSHMPPSWIQWWSTSNWRQPLQRLLWGLEGILYLLLALMLCHALFTTGSHLLSSLWPVVAAVWRHLLPALLLLVLSALPALLFTASFLLLFSTLLSLVGLLTSMTHPGDTQDLDQ

SEQ ID NO: 91579 - protein, 173 aa, Homo sapiens
  Payload ID: 18328
  Gene Name: transmembrane protein 240
  Uniprot ID: Q5SV17
  ENSP ID: ENSP00000368007
MSMSANTMIFMILGASVVMAIACLMDMNALLDRFHNYILPHLRGEDRVCHCNCGRHHIHYVIPYDGDQSVVDASENYFVTDSVTKQEIDLMLGLLLGFCISWFLVWMDGVLHCAVRAWRAGRRYDGSWTWLPKLCSLRELGRRPHRPFEEAAGNMVHVKQKLYHNGHPSPRHL

SEQ ID NO: 91580 - protein, 173 aa, Homo sapiens; identical to SEQ ID NO: 91579
  Payload ID: 18328
  Gene Name: transmembrane protein 240
  Uniprot ID: Q5SV17
  ENSP ID: ENSP00000400311

SEQ ID NO: 91581 - protein, 55 aa, Homo sapiens
  Payload ID: 18328
  Gene Name: transmembrane protein 240
  ENSP ID: ENSP00000485135
MSMSANTMIFMILGASVVMAIACLMDMNALLDRFHNYILPHLRGEDRVCHCNCGR

SEQ ID NO: 91582 - protein, 296 aa, Homo sapiens
  Payload ID: 18329
  Gene Name: transmembrane protein 241
  Uniprot ID: Q24JQ0
  ENSP ID: ENSP00000372720
MCVRRSLVGLTFCTCYLASYLTNKYVLSVLKFTYPTLFQGWQTLIGGLLLHVSWKLGWVEINSSSRSHVLVWLPASVLFVGIIYAGSRALSRLAIPVFLTLHNVAEVIICGYQKCFQKEKTSPAKICSALLLLAAAGCLPFNDSQFNPDGYFWAIIHLLCVGAYKILQKSQKPSALSDIDQQYLNYIFSVVLLAFASHPTGDLFSVLDFPFLYFYRFHGSCCASGFLGFFLMFSTVKLKNLLAPGQCAAWIFFAKIITAGLSILLFDAILTSATTGCLLLGALGEALLVFSERKSS

SEQ ID NO: 91583 - protein, 159 aa, Homo sapiens
  Payload ID: 18329
  Gene Name: transmembrane protein 241
  Uniprot ID: Q24JQ0
  ENSP ID: ENSP00000431584
MCVRRSLVGLTFCTCYLASYLTNKYVLSVLKFTYPTLFQGWQTLIGGLLLHVSWKLGWVEINSSSRSHVLVWLPASVLFVGIIYAGSRALSRLAIPVFLTLHNVAEVIICGYQKCFQKEKTSPAKICSALLLLAAAGCLPFNDSQGLIKFYRSPRNPVH

SEQ ID NO: 91584 - protein, 76 aa, Homo sapiens
  Payload ID: 18329
  Gene Name: transmembrane protein 241
  ENSP ID: ENSP00000433605
MCVRRSLVGLTFCTCYLASYLTNKYVLSVLKFTYPTLFQGWQTLIGGLLLHVSWKLGWVEINSSSRPFLCFSLCIM

SEQ ID NO: 91585 - protein, 50 aa, Homo sapiens
  Payload ID: 18329
  Gene Name: transmembrane protein 241
  ENSP ID: ENSP00000433795
MCVRRSLVGLTFCTCYLASYLTNKYVLSVLKFTYPTLFQGPFLCFSLCIM

SEQ ID NO: 91586 - protein, 86 aa, Homo sapiens
  Payload ID: 18329
  Gene Name: transmembrane protein 241
  ENSP ID: ENSP00000435139
MCVRRSLVGLTFCTCYLASYLTNKVADAHWWTFASCVLETGLGRDQQQFKISCSCVASCFSAVCGYNLCWVQSIVQTGHSCVSHFA

SEQ ID NO: 91587 - protein, 123 aa, Homo sapiens
  Payload ID: 18329
  Gene Name: transmembrane protein 241
  Uniprot ID: Q24JQ0
  ENSP ID: ENSP00000437280
MCVRRSLVGLTFCTCYLASYLTNKYVLSVLKFTYPTLFQGSHVLVWLPASVLFVGIIYAGSRALSRLAIPVFLTLHNVAEVIICGYQKCFQKEKTSPAKICRLHLERTRQNQTSRLSSCLKGD

SEQ ID NO: 91588 - protein, 149 aa, Homo sapiens
  Payload ID: 18329
  Gene Name: transmembrane protein 241
  ENSP ID: ENSP00000440152
MCVRRSLVGLTFCTCYLASYLTNKYVLSVLKFTYPTLFQGWQTLIGGLLLHVSWKLGWVEINSSSRSHVLVWLPASVLFVGIIYAGSRALSRLAIPVFLTLHNVAEVIICGYQKCFQKEKTSPAKICRLHLERTRQNQTSRLSSCLKGD

SEQ ID NO: 91589 - protein, 76 aa, Homo sapiens; identical to SEQ ID NO: 91584
  Payload ID: 18329
  Gene Name: transmembrane protein 241
  ENSP ID: ENSP00000462199

SEQ ID NO: 91590 - protein, 76 aa, Homo sapiens; identical to SEQ ID NO: 91584
  Payload ID: 18329
  Gene Name: transmembrane protein 241
  ENSP ID: ENSP00000462979

SEQ ID NO: 91591 - protein, 188 aa, Homo sapiens
  Payload ID: 18329
  Gene Name: transmembrane protein 241
  ENSP ID: ENSP00000463348
MCVRRSLVGLTFCTCYLASYLTNKYVLSVLKFTYPTLFQGWQTLIGGLLLHVSWKLGWVEINSSSRSHVLVWLPASVLFVGIIYAGSRALSRLAIPVFLTLHNVAEVIICGYQKCFQKEKTSPAKICSALLLLAAAGCLPFNDSQFNPDGYFWAIIHLLCVGAYKILQKSQKPSALSVVLLAFASHPT

SEQ ID NO: 91592 - protein, 102 aa, Homo sapiens
  Payload ID: 18329
  Gene Name: transmembrane protein 241
  ENSP ID: ENSP00000464008
DVREEVSGRPHLLYLLPGFLPHEQVCAVCLEIYLPYIIPRVADAHWWTFASCVLETGLGRDQQQFKISCSCVASCFSAVCGYNLCWVQSIVQTGHSCVSHFA

SEQ ID NO: 91593 - protein, 196 aa, Homo sapiens
  Payload ID: 18329
  Gene Name: transmembrane protein 241
  ENSP ID: ENSP00000464174
MCVRRSLVGLTFCTCYLASYLTNKYVLSVLKFTYPTLFQGWQTLIGGLLLHVSWKLGWVEINSSSRSHVLVWLPASVLFVGIIYAGSRALSRLAIPVFLTLHNVAEVIICGYQKCFQKEKTSPAKICSALLLLAAAGCLPFNDSQFNPDGYFWAIIHLLCVGDLFSVLDFPFLYFYRFHGSCCASGFLGFFLMFST

SEQ ID NO: 91594 - protein, 128 aa, Homo sapiens
  Payload ID: 18330
  Gene Name: transmembrane protein 242
  ENSP ID: ENSP00000356112
METAGAATGQPASGLEAPGSTNDRLFLVKGGIFLGTVAAAGMLAGFITTLSLAKKKSPEWFNKGSMATAALPESGSSLALRALGWGSLYAWCGVGVISFAVWKALGVHSVSNYCLVPGIYMFILLTVF

SEQ ID NO: 91595 - protein, 141 aa, Homo sapiens
  Payload ID: 18330
  Gene Name: transmembrane protein 242
  Uniprot ID: Q9NWH2
  ENSP ID: ENSP00000383594
METAGAATGQPASGLEAPGSTNDRLFLVKGGIFLGTVAAAGMLAGFITTLSLAKKKSPEWFNKGSMATAALPESGSSLALRALGWGSLYAWCGVGVISFAVWKALGVHSMNDFRSKMQSIFPTIPKNSESAVEWEETLKSK

SEQ ID NO: 91596 - protein, 118 aa, Homo sapiens
  Payload ID: 18331
  Gene Name: transmembrane protein 243, mitochondrial
  Uniprot ID: Q9BU79
  ENSP ID: ENSP00000257637
MEDFATRTYGTSGLDNRPLFGETSAKDRIINLVVGSLTSLLILVTLISAFVFPQLPPKPLNIFFAVCISLSSITACILIYWYRQGDLEPKFRKLIYYIIFSIIMLCICANLYFHDVGR

SEQ ID NO: 91597 - protein, 118 aa, Homo sapiens; identical to SEQ ID NO: 91596
  Payload ID: 18331
  Gene Name: transmembrane protein 243, mitochondrial
  Uniprot ID: Q9BU79
  ENSP ID: ENSP00000398083

SEQ ID NO: 91598 - protein, 5 aa, Homo sapiens
  Payload ID: 18331
  Gene Name: transmembrane protein 243, mitochondrial
  ENSP ID: ENSP00000401897
MEDFA

SEQ ID NO: 91599 - protein, 119 aa, Homo sapiens
  Payload ID: 18331
  Gene Name: transmembrane protein 243, mitochondrial
  ENSP ID: ENSP00000407976
MEDFATRTYGTSGLDNRPLFGETSAKDRIINLVVGSLTSLLILVTLISAFVFPQLPPKPLNIFFAVCISLSSITACILVSTVENLNSVLEGLSCNAQDKNFQPWVYTKGYLLIISSSSP

SEQ ID NO: 91600 - protein, 128 aa, Homo sapiens
  Payload ID: 18332
  Gene Name: transmembrane protein 244
  Uniprot ID: Q5VVB8
  ENSP ID: ENSP00000357125
MALQVRVAPSKVVLQKFLLCVILFYTVYYVSLSMGCVMFEVHELNVLAPFDFKTNPSWLNINYKVLLVSTEVTYFVCGLFFVPVVEEWVWDYAISVTILHVAITSTVMLEFPLTSHWWAALGISKLLV

SEQ ID NO: 91601 - protein, 128 aa, Homo sapiens; identical to SEQ ID NO: 91600
  Payload ID: 18332
  Gene Name: transmembrane protein 244
  Uniprot ID: Q5VVB8
  ENSP ID: ENSP00000403755

SEQ ID NO: 91602 - protein, 879 aa, Homo sapiens [sequence omitted]

SEQ ID NO: 91603 - protein, 472 aa, Homo sapiens
  Payload ID: 18333
  Gene Name: transmembrane protein 245
  ENSP ID: ENSP00000394798
  MOD_RES (1)..(1): Any amino acid
XEKRYHVWWGIIESFLKERQGALAPWPIVGLGKFLLKVDSKMIIWLEKMLDKIISIFIIFLLVIGTLLLALLLTAKVHQESVHMIEVTSNLINETLANHPEWANWLPEAQVVQRALNSAANNVYQYGREWITHKLHKILGDKVNNTAVIEKQVLELWDRLYHSWFVKNVTHSGRHKGQKLHVSRQNSWLGDILDWQDIVSFVHENIETFLSILESLWIVMSRNVSLLFTTVTTLLTILFYSGTALLNFVLSLIIFLTTLFYLLSSSDEYYKPVKWVISLTPLSQPGPSSNIIGQSVEEAIRGVFDASLKMAGFYGLYTWLTHTMFGINIVFIPSALAAILGAVPFLGTYWAAVPAVLDLWLTQGLGCKAILLLIFHLLPTYFVDTAIYSDISGGGHPYLTGLAVAGGAYYLGLEGAIIGPILLCILVVASNIYSAMLVSPTNSVPTPNQTPWPAQPQRTFRDISEDLKSSVG

SEQ ID NO: 91604 - protein, 253 aa, Homo sapiens
  Payload ID: 18333
  Gene Name: transmembrane protein 245
  ENSP ID: ENSP00000417842
MSVGTLYEKQNGKESSGAELPGQVISMAASTLANLAISITGYESSSEDQPSTQPAEAVDRGESAPTLSTSPSPSSPSPTSPSPTLGRRRPEIGTFLRKKKTSDIYFVSLVWAIVVMQIWLNLWIVQLLPVPIAVWILKKLVIHFGVVDFLEKRYHVWWGIIESFLKERQGALAPWPIVGLGKFLLKVDSKMIIWLEKMLDKIISIFIIFLLVIGTLLLALLLTAKVHQESVHMIEVTSNLINETLANHPEWAK

SEQ ID NO: 91605 - protein, 403 aa, Homo sapiens
  Payload ID: 18334
  Gene Name: transmembrane protein 246
  Uniprot ID: Q9BRR3
  ENSP ID: ENSP00000363980
MSTSTSPAAMLLRRLRRLSWGSTAVQLFILTVVTFGLLAPLACHRLLHSYFYLRHWHLNQMSQEFLQQSLKEGEAALHYFEELPSANGSVPIVWQATPRPWLVITIITVDRQPGFHYVLQVVSQFHRLLQQCGPQCEGHQLFLCNVERSVSHFDAKLLSKYVPVANRYEGTEDDYGDDPSTNSFEKEKQDYVYCLESSLQTYNPDYVLMVEDDAVPEEQIFPVLEHLLRARFSEPHLRDALYLKLYHPERLQHYINPEPMRILEWVGVGMLLGPLLTWIYMRFASRPGFSWPVMLFFSLYSMGLVELVGRHYFLELRRLSPSLYSVVPASQCCTPAMLFPAPAARRTLTYLSQVYCHKGFGKDMALYSLLRAKGERAYVVEPNLVKHIGLFSSLRYNFHPSLL

SEQ ID NO: 91606 - protein, 403 aa, Homo sapiens; identical to SEQ ID NO: 91605
  Payload ID: 18334
  Gene Name: transmembrane protein 246
  Uniprot ID: Q9BRR3
  ENSP ID: ENSP00000363981

SEQ ID NO: 91607 - protein, 403 aa, Homo sapiens; identical to SEQ ID NO: 91605
  Payload ID: 18334
  Gene Name: transmembrane protein 246
  Uniprot ID: Q9BRR3
  ENSP ID: ENSP00000363984

SEQ ID NO: 91608 - protein, 219 aa, Homo sapiens
  Payload ID: 18335
  Gene Name: transmembrane protein 247
  Uniprot ID: A6NEH6
  ENSP ID: ENSP00000388684
MAAEDREMMEARGAGESCPTFPKMVPGDSKSEGKPRAYLEAESQKPDSSYDYLEEMEACEDGGCQGPLKSLSPKSCRATKGQAGDGPKPAELPPTPGTERNPEMELEKVRMEFELTRLKYLHEKNQRQRQHEVVMEQLQRERQHEVVMEQLQQEAAPRLFSGGLQNFLLPQNQFAMFLYCFIFIHIIYVTKEMVFFLFAKHYLFCIAAILLCLIKTFWS

SEQ ID NO: 91609 - protein, 314 aa, Homo sapiens
  Payload ID: 18336
  Gene Name: transmembrane protein 248
  Uniprot ID: Q9NWD8
  ENSP ID: ENSP00000340668
MFSINPLENLKVYISSRPPLVVFMISVSAMAIAFLTLGYFFKIKEIKSPEMAEDWNTFLLRFNDLDLCVSENETLKHLTNDTTTPESTMTSGQARASTQSPQALEDSGPVNISVSITLTLDPLKPFGGYSRNVTHLYSTILGHQIGLSGREAHEEINITFTLPTAWSSDDCALHGHCEQVVFTACMTLTASPGVFPVTVQPPHCVPDTYSNATLWYKIFTTARDANTKYAQDYNPFWCYKGAIGKVYHALNPKLTVIVPDDDRSLINLHLMHTSYFLFVMVITMFCYAVIKGRPSKLRQSNPEFCPEKVALAEA

SEQ ID NO: 91610 - protein, 139 aa, Homo sapiens
  Payload ID: 18336
  Gene Name: transmembrane protein 248
  ENSP ID: ENSP00000394507
MFSINPLENLKVYISSRPPLVVFMISVSAMAIAFLTLGYFFKIKEIKSPEMAEDWNTFLLRFNDLDLCVSENETLKHLTNDTTTPESTMTSGQARASTQSPQALEDSGPVNISVSITLTLDPLKPFGGYSRNVTHLYST

SEQ ID NO: 91611 - protein, 203 aa, Homo sapiens
  Payload ID: 18336
  Gene Name: transmembrane protein 248
  Uniprot ID: Q9NWD8
  ENSP ID: ENSP00000405558
MFSINPLENLKVYISSRPPLVVFMISVSAMAIAFLTLGYFFKIKEIKSPEMAEDWNTFLLRFNDLDLCVSENETLKHLTNDTTTPESTMTSGQARASTQSPQALEDSGPVNISVSITLTLDPLKPFGGYSRNVTHLYSTILGHQIGLSGREAHEEINITFTLPTAWSSDDCALHGHCEQVVFTACMTLTASPGVFPVTVMTVH

SEQ ID NO: 91612 - protein, 72 aa, Homo sapiens
  Payload ID: 18336
  Gene Name: transmembrane protein 248
  ENSP ID: ENSP00000410505
MFSINPLENLKVYISSRPPLVVFMISVSAMAIAFLTLGYFFKIKEIKSPEMAEDWNTFLLRFNDLDLCVSEN

SEQ ID NO: 91613 - protein, 94 aa, Homo sapiens
  Payload ID: 18336
  Gene Name: transmembrane protein 248
  ENSP ID: ENSP00000413824
MFSINPLENLKVYISSRPPLVVFMISVSAMAIAFLTLGYFFKIKEIKSPEMAEDWNTFLLRFNDLDLCVSENETLKHLTNDTTTPESTMTSGQA

SEQ ID NO: 91614 - protein, 114 aa, Homo sapiens
  Payload ID: 18336
  Gene Name: transmembrane protein 248
  ENSP ID: ENSP00000475466
MFSINPLENLKVYISSRPPLVVFMISVSAMAIAFLTLGYFFKIKEIKSPEMAEDWNTFLLRFNDLDLCVSENETLKHLTNDTTTPESTMTSGQARASTQSPQALEDSGPVNISV

SEQ ID NO: 91615 - protein, 235 aa, Homo sapiens
  Payload ID: 18337
  Gene Name: transmembrane protein 249
  Uniprot ID: Q2WGJ8
  ENSP ID: ENSP00000454468
MPKGRAGSLPTTSIGWRFQLWFLGLTCPERHLARRLKNNSFYPFVQQEPNVFVLEYYLDTLWKGMLLFIISVVLVSFSSLREVQKQETWVFLVYGVGVGLWLVISSLPRRRLVLNHTRGVYHFSIQGRTVCQGPLHLVYVRLALSSDAHGRCFFHLVLGGHRLEPLVLVQLSEHYEQMEYLGRYIARKLNINYFDYLATSYRHVVRHWPPPGAGTVMGKSPMGHKPSSSQSSLEV

SEQ ID NO: 91616 - protein, 215 aa, Homo sapiens
  Payload ID: 18337
  Gene Name: transmembrane protein 249
  ENSP ID: ENSP00000457580
MPKGRAGSLPTTSIGWRFQLWFLGLTCPERHLARRLKNNSFYPFVQQEPNGAEARDLGLPRVRRGRGPVARDLVAAAAPPGAEPHARRVPLLHPGPHRVPGPLASGLRAPGAQLRCPRKVLLPPGPRRPQVGAPGAGAAVGALRANGILGPLHRPETQHQLLRLPGHLLPARGSPLATPWRWHCDGQEPHGSQAQLLSVQPGGVTLRASPTSGLC

SEQ ID NO: 91617 - protein, 218 aa, Homo sapiens
  Payload ID: 18338
  Gene Name: transmembrane protein 25
  Uniprot ID: Q86YD3
  ENSP ID: ENSP00000278959
MALPPGPAALRHTLLLLPALLSSVKPEIAQVGAKYQEAQGPGLLVVLFALVRANPPANVTWIDQDGPVTVNTSDFLVLDAQNYPWLTNHTVQLQLRSLAHNLSVVATNDVGVTSASLPAPGPSRHPSLISSDSNNLKLNNVRLPRENMSLPSNLQLNDLTPDSRAVKPADRQMAQNNSRPELLDPEPGGLLTSQGFIRLPVLGYIYRVSSVSSDEIWL

SEQ ID NO: 91618 - protein, 366 aa, Homo sapiens
  Payload ID: 18338
  Gene Name: transmembrane protein 25
  Uniprot ID: Q86YD3
  ENSP ID: ENSP00000315635
MALPPGPAALRHTLLLLPALLSSGWGELEPQIDGQTWAERALRENERHAFTCRVAGGPGTPRLAWYLDGQLQEASTSRLLSVGGEAFSGGTSTFTVTAHRAQHELNCSLQDPRSGRSANASVILNVQFKPEIAQVGAKYQEAQGPGLLVVLFALVRANPPANVTWIDQDGPVTVNTSDFLVLDAQNYPWLTNHTVQLQLRSLAHNLSVVATNDVGVTSASLPAPGLLATRVEVPLLGIVVAAGLALGTLVGFSTLVACLVCRKEKKTKGPSRHPSLISSDSNNLKLNNVRLPRENMSLPSNLQLNDLTPDSRAVKPADRQMAQNNSRPELLDPEPGGLLTSQGFIRLPVLGYIYRVSSVSSDEIWL

SEQ ID NO: 91619 - protein, 351 aa, Homo sapiens
  Payload ID: 18338
  Gene Name: transmembrane protein 25
  Uniprot ID: Q86YD3
  ENSP ID: ENSP00000346237
MALPPGPAALRHTLLLLPALLSSGWGELEPQIDGQTWAERALRENERHAFTCRVAGGPGTPRLAWYLDGQLQEASTSRLLSVGGEAFSGGTSTFTVTAHRAQHELNCSLQDPRSGRSANASVILNVQFKPEIAQVGAKYQEAQGPGLLVVLFALVRANPPANVTWIDQDGPVTVNTSDFLVLDAQNYPWLTNHTVQLQLRSLAHNLSVVATNDVGVTSASLPAPGLLATRVEVPLLGIVVAAGLALGTLVGFSTLVACLVCRKEKKTKGPSRHPSLISSDSNNLKLNNVRLPRENMSLPSNLQLNDLTPDSRAVKPADRQMAQNNSRPELLDPEPGGLLTSQGRRNQDKDA

SEQ ID NO: 91620 - protein, 322 aa, Homo sapiens
  Payload ID: 18338
  Gene Name: transmembrane protein 25
  Uniprot ID: Q86YD3
  ENSP ID: ENSP00000352924
MALPPGPAALRHTLLLLPALLSSGWGELEPQIDGQTWAERALRENERHAFTCRVAGGPGTPRLAWYLDGQLQEASTSRLLSVGGEAFSGGTSTFTVTAHRAQHELNCSLQDPRSGRSANASVILNVQFKPEIAQVGAKYQEAQGPGLLVVLFALVRANPPANVTWIDQDGPVTVNTSDFLVLDAQNYPWLTNHTVQLQLRSLAHNLSVVATNDVGVTSASLPAPGPSRHPSLISSDSNNLKLNNVRLPRENMSLPSNLQLNDLTPDSRAVKPADRQMAQNNSRPELLDPEPGGLLTSQGFIRLPVLGYIYRVSSVSSDEIWL

SEQ ID NO: 91621 - protein, 322 aa, Homo sapiens; identical to SEQ ID NO: 91620
  Payload ID: 18338
  Gene Name: transmembrane protein 25
  Uniprot ID: Q86YD3
  ENSP ID: ENSP00000411882

SEQ ID NO: 91622 - protein, 306 aa, Homo sapiens
  Payload ID: 18338
  Gene Name: transmembrane protein 25
  Uniprot ID: Q86YD3
  ENSP ID: ENSP00000416071
MALPPGPAALRHTLLLLPALLSSGWGELEPQIDGQTWAERALRENERHAFTCRVAGGPGTPRLAWYLDGQLQEASTSRLLSVGGEAFSGGTSTFTVTAHRAQHELNCSLQDPRSGRSANASVILNVQFKPEIAQVGAKYQEAQGPGLLVVLFALVRANPPANVTWIDQDGPVTVNTSDFLVLDAQNYPWLTNHTVQLQLRSLAHNLSVVATNDVGVTSASLPAPGPSRHPSLISSDSNNLKLNNVRLPRENMSLPSNLQLNDLTPDSRVKPADRQMAQNNSRPELLDPEPGGLLTSQGRRNQDKDA

SEQ ID NO: 91623 - protein, 200 aa, Homo sapiens
  Payload ID: 18338
  Gene Name: transmembrane protein 25
  ENSP ID: ENSP00000431145
  MOD_RES (1)..(1): Any amino acid
XDQDGPVTVNTSDFLVLDAQNYPWLTNHTVQLQLRSLAHNLSVVATNDVGVTSASLPAPGLLATRVEVPLLGIVVAAGLALGTLVGFSTLVACLVCRKEKKTKGPSRHPSLISSDSNNLKLNNVRLPRENMSLPSNLQLNDLTPDSRVKPADRQMAQNNSRPELLDPEPGGLLTSQGFIRLPVLGYIYRVSSVSSDEIWL

SEQ ID NO: 91624 - protein, 322 aa, Homo sapiens; identical to SEQ ID NO: 91620
  Payload ID: 18338
  Gene Name: transmembrane protein 25
  Uniprot ID: Q86YD3
  ENSP ID: ENSP00000431205

SEQ ID NO: 91625 - protein, 381 aa, Homo sapiens
  Payload ID: 18338
  Gene Name: transmembrane protein 25
  ENSP ID: ENSP00000431548
MALPPGPAALRHTLLLLPALLSSGWGELEPQIDGQTWAERALRENERHAFTCRVAGGPGTPRLAWYLDGQLQEASTSRLLSVGGEAFSGGTSTFTVTAHRAQHELNCSLQDPRSGRSANASVILNVQFKPEIAQVGAKYQEAQGPGLLVVLFALVRANPPANVTWIDQDGPVTVNTSDFLVLDAQNYPWLTNHTVQLQLRSLAHNLSVVATNDVGVTSASLPAPGLLATRVEVPLLGIVVAAGLALGTLVGFSTLVACLVCRKEKKTKGPSRHPSLISSDSNNLKLNNVRLPRENMSLPSNLQLNDLTPDSRVKPADRQMAQNNSRPELLDPEPGGLLTSQACLLHHGTPALTNPWLPHQQEGALPGGWSPQAHNSTVWKL

SEQ ID NO: 91626 - protein, 49 aa, Homo sapiens
  Payload ID: 18338
  Gene Name: transmembrane protein 25
  ENSP ID: ENSP00000431663
MALPPGPAALRHTLLLLPALLSSAQYQPCLSPSQRPPAVFQVGGSWSHK

SEQ ID NO: 91627 - protein, 167 aa, Homo sapiens
  Payload ID: 18338
  Gene Name: transmembrane protein 25
  ENSP ID: ENSP00000432040
MALPPGPAALRHTLLLLPALLSSGWGELEPQIDGQTWAERALRENERHAFTCRVAGGPGTPRLAWYLDGQLQEASTSRLLSVGGEAFSGGTSTFTVTAHRAQHELNCSLQDPRSGRSANASVILNVQWLLATRVEVPLLGIVVAAGLALGTLVGFSTLVACLVCRKE

SEQ ID NO: 91628 - protein, 37 aa, Homo sapiens
  Payload ID: 18338
  Gene Name: transmembrane protein 25
  ENSP ID: ENSP00000432062
MALPPGPAALRHTLLLLPALLSSGPQKWPISQRLCHP

SEQ ID NO: 91629 - protein, 194 aa, Homo sapiens
  Payload ID: 18338
  Gene Name: transmembrane protein 25
  ENSP ID: ENSP00000433059
  MOD_RES (1)..(1): Any amino acid
XLLRRRSGREPVKPEIAQVGAKYQEAQGPGLLVVLFALVRANPPANVTWIDQDGPVTVNTSDFLVLDAQNYPWLTNHTVQLQLRSLAHNLSVVATNDVGVTSASLPAPGPSRHPSLISSDSNNLKLNNVRLPRENMSLPSNLQLNDLTPDSRAVKPADRQMAQNNSRPELLDPEPGGLLTSQGFIRLPVLGYIY

SEQ ID NO: 91630 - protein, 168 aa, Homo sapiens
  Payload ID: 18338
  Gene Name: transmembrane protein 25
  ENSP ID: ENSP00000433906
MALPPGPAALRHTLLLLPALLSSGWGELEPQIDGQTWAERALRENERHAFTCRVAGGPGTPRLAWYLDGQLQEASTSRLLSVGGEAFSGGTSTFTVTAHRAQHELNCSLQDPRSGRSANASVILNVQCPSRHPSLISSDSNNLKLNNVRLPRENMSLPSNLQLNDLTP

SEQ ID NO: 91631 - protein, 170 aa, Homo sapiens
  Payload ID: 18338
  Gene Name: transmembrane protein 25
  ENSP ID: ENSP00000433938
MALPPGPAALRHTLLLLPALLSSGGPGTPRLAWYLDGQLQEASTSRLLSVGGEAFSGGTSTFTVTAHRAQHELNCSLQDPRSGRSANASVILNVQFKPEIAQVGAKYQEAQGPGLLVVLFALVRANPPANVTWIDQDGPVTVNTSDFLVLDAQNYPWLTNHTVQLQLRSL

SEQ ID NO: 91632 - protein, 40 aa, Homo sapiens
  Payload ID: 18338
  Gene Name: transmembrane protein 25
  ENSP ID: ENSP00000435446
MALPPGPAALRHTLLLLPALLSSGGPGTPRLAWYLDGQLQ

SEQ ID NO: 91633 - protein, 138 aa, Homo sapiens
  Payload ID: 18338
  Gene Name: transmembrane protein 25
  ENSP ID: ENSP00000436746
MALPPGPAALRHTLLLLPALLSSGWGELEPQIDGQTWAERALRENERHAFTCRVAGGPGTPRLAWYLDGQLQEASTSRLLSVGGEAFSGGTSTFTVTAHRAQHELNCSLQDPRSGRSANASVILNVQFKPEIAQVGAK

SEQ ID NO: 91634 - protein, 131 aa, Homo sapiens
  Payload ID: 18339
  Gene Name: transmembrane protein 251
  Uniprot ID: Q8N6I4
  ENSP ID: ENSP00000283534
MMNFRQRMGWIGVGLYLLASAAAFYYVFEISETYNRLALEHIQQHPEEPLEGTTWTHSLKAQLLSLPFWVWTVIFLVPYLQMFLFLYSCTRADPKTVGYCIIPICLAVICNRHQAFVKASNQISRLQLIDT

SEQ ID NO: 91635 - protein, 169 aa, Homo sapiens
  Payload ID: 18339
  Gene Name: transmembrane protein 251
  Uniprot ID: Q8N6I4
  ENSP ID: ENSP00000388431
MLAFSEMPKPPDYSELSDSLTLAVGTGRFSGPLHRAWRMMNFRQRMGWIGVGLYLLASAAAFYYVFEISETYNRLALEHIQQHPEEPLEGTTWTHSLKAQLLSLPFWVWTVIFLVPYLQMFLFLYSCTRADPKTVGYCIIPICLAVICNRHQAFVKASNQISRLQLIDT

SEQ ID NO: 91636 - protein, 169 aa, Homo sapiens; identical to SEQ ID NO: 91635
  Payload ID: 18339
  Gene Name: transmembrane protein 251
  Uniprot ID: Q8N6I4
  ENSP ID: ENSP00000478917

SEQ ID NO: 91637 - protein, 131 aa, Homo sapiens; identical to SEQ ID NO: 91634
  Payload ID: 18339
  Gene Name: transmembrane protein 251
  Uniprot ID: Q8N6I4
  ENSP ID: ENSP00000486678

SEQ ID NO: 91638 - protein, 170 aa, Homo sapiens
  Payload ID: 18340
  Gene Name: transmembrane protein 252
  Uniprot ID: Q8N6L7
  ENSP ID: ENSP00000366528
MQNRTGLILCALALLMGFLMVCLGAFFISWGSIFDCQGSLIAAYLLLPLGFVILLSGIFWSNYRQVTESKGVLRHMLRQHLAHGALPVATVDRPDFYPPAYEESLEVEKQSCPAEREASGIPPPLYTETGLEFQDGNDSHPEAPPSYRESIAGLVVTAISEDAQRRGQEC

SEQ ID NO: 91639 - protein, 217 aa, Homo sapiens
  Payload ID: 18341
  Gene Name: transmembrane protein 253
  Uniprot ID: P0C7T8
  ENSP ID: ENSP00000451229
MEDRAGEQEQERHSLRLEKLQHWARHRQSGHLLVLAVSQLWLAVVVVPLAVSVACLNSDCHMATALPLGPGASGLLTGTVTLELRRAPRLWKVRAMMIFNTFNLILGFIVVVVEVMKTALGPAPTASSQHAGLLVLELSAEAFTLGGVLVSVHALFLLSQRKPGCCRSQSLHYQELQEGFSELEEVPGLENGPTVASTGANERVGQREQTRAALLPP

SEQ ID NO: 91640 - protein, 127 aa, Homo sapiens
  Payload ID: 18341
  Gene Name: transmembrane protein 253
  ENSP ID: ENSP00000453121
MEDRAGEQEQERHSLRLEKLQHWARHRQSGHLLVLAGLLTGTVTLELRRAPRLWKVRAMMIFNTFNLILGFIVVVVEVMKTALGPAPTASSQHAGLLVLELSAEAFTLGGVLVSVHALFLLSQRKPG

SEQ ID NO: 91641 - protein, 217 aa, Homo sapiens; identical to SEQ ID NO: 91639
  Payload ID: 18341
  Gene Name: transmembrane protein 253
  Uniprot ID: P0C7T8
  ENSP ID: ENSP00000453962

SEQ ID NO: 91642 - protein, 144 aa, Homo sapiens
  Payload ID: 18342
  Gene Name: transmembrane protein 254
  ENSP ID: ENSP00000361347
  MOD_RES (1)..(1): Any amino acid
XTAGELPANSVSGFFKRMVKSEASNAATAYFRPARPLPSLVTVLGLGYFAWVVFWPQSIPYQNLGPLGPFTQYLVDHHHTLLCNGYWLAWLIHVGESLYAIVLCKHKGITSGRAQLLWFLQTFFFGIASLTILIAYKRKRQKQT

SEQ ID NO: 91643 - protein, 103 aa, Homo sapiens
  Payload ID: 18342
  Gene Name: transmembrane protein 254
  Uniprot ID: Q8TBM7
  ENSP ID: ENSP00000361348
MATAAGATYFQRGSLFWFTVITLSFGYYTWVVFWPQSIPYQNLGPLGPFTQYLVDHHHTLLCNGYWLAWLIHVGESLYAIVLCKQNELRIRIKMRKLILRDSE

SEQ ID NO: 91644 - protein, 84 aa, Homo sapiens
  Payload ID: 18342
  Gene Name: transmembrane protein 254
  Uniprot ID: Q8TBM7
  ENSP ID: ENSP00000361349
MATAAGATYFQRGSLFWFTVITLSFGYYTWVVFWPQSIPYQNLGPLGPFTQYLVDHHHTLLCNGYWLAWLIHVGESLYAIVLCK

SEQ ID NO: 91645 - protein, 103 aa, Homo sapiens; identical to SEQ ID NO: 91643
  Payload ID: 18342
  Gene Name: transmembrane protein 254
  Uniprot ID: Q8TBM7
  ENSP ID: ENSP00000361351

SEQ ID NO: 91646 - protein, 123 aa, Homo sapiens
  Payload ID: 18342
  Gene Name: transmembrane protein 254
  Uniprot ID: Q8TBM7
  ENSP ID: ENSP00000361355
MATAAGATYFQRGSLFWFTVITLSFGYYTWVVFWPQSIPYQNLGPLGPFTQYLVDHHHTLLCNGYWLAWLIHVGESLYAIVLCKHKGITSGRAQLLWFLQTFFFGIASLTILIAYKRKRQKQT

SEQ ID NO: 91647 - protein, 101 aa, Homo sapiens
  Payload ID: 18342
  Gene Name: transmembrane protein 254
  ENSP ID: ENSP00000393450
  MOD_RES (1)..(1): Any amino acid
XEFLRSVWVVFWPQSIPYQNLGPLGPFTQYLVDHHHTLLCNGYWLAWLIHVGESLYAIVLCKHKGITSGRAQLLWFLQTFFFGIASLTILIAYKRKRQKQT

SEQ ID NO: 91648 - protein, 101 aa, Homo sapiens
  Payload ID: 18342
  Gene Name: transmembrane protein 254
  ENSP ID: ENSP00000482766
MATAAGATYFQRGSLFWFTVITLSFGYYTPQQRSETLSKKKERKKIEAKNGDPNDCSEFLRGLSSGLRVSLIRTLGPWAPSLSTWWTTITPSCAMGIGLPG

SEQ ID NO: 91649 - protein, 349 aa, Homo sapiens
  Payload ID: 18343
  Gene Name: transmembrane protein 255A
  Uniprot ID: Q5JRV8
  ENSP ID: ENSP00000310110
MHQSLTQQRSSDMSLPDSMGAFNRRKRNSIYVTVTLLIVSVLILTVGLAATTRTQNVTVGGYYPGVILGFGSFLGIIGSNLIENKRQMLVASIVFISFGVIAAFCCAIVDGVFAARHIDLKPLYANRCHYVPKTSQKEAEEVISSSTKNSPSTRVMRNLTQAAREVNCPHLSREFCTPRIRGNTCFCCDLYNCGNRVEITGGYYEYIDVSSCQDIIHLYHLLWSATILNIVGLFLGIITAAVLGGFKDMNPTLPALNCSVENTHPTVSYYAHPQVASYNTYYHSPPHLPPYSAYDFQHSGVFPSSPPSGLSDEPQSASPSPSYMWSSSAPPRYSPPYYPPFEKPPPYSP

SEQ ID NO: 91650 - protein, 185 aa, Homo sapiens
  Payload ID: 18343
  Gene Name: transmembrane protein 255A
  Uniprot ID: Q5JRV8
  ENSP ID: ENSP00000360403
MVNCPHLSREFCTPRIRGNTCFCCDLYNCGNRVEITGGYYEYIDVSSCQDIIHLYHLLWSATILNIVGLFLGIITAAVLGGFKDMNPTLPALNCSVENTHPTVSYYAHPQVASYNTYYHSPPHLPPYSAYDFQHSGVFPSSPPSGLSDEPQSASPSPSYMWSSSAPPRYSPPYYPPFEKPPPYSP

SEQ ID NO: 91651 - protein, 325 aa, Homo sapiens
  Payload ID: 18343
  Gene Name: transmembrane protein 255A
  Uniprot ID: Q5JRV8
  ENSP ID: ENSP00000360420
MHQSLTQQRSSDMSLPDSMGAFNRRKRNSIYVTVTLLIVSVLILTVGLAATTRTQNVTVGGYYPGVILGFGSFLGIIGSNLIENKRQMLVASIVFISFGVIAAFCCAIVDGVFAARHIDLKPLYANRCHYVPKTSQKEAEEVNCPHLSREFCTPRIRGNTCFCCDLYNCGNRVEITGGYYEYIDVSSCQDIIHLYHLLWSATILNIVGLFLGIITAAVLGGFKDMNPTLPALNCSVENTHPTVSYYAHPQVASYNTYYHSPPHLPPYSAYDFQHSGVFPSSPPSGLSDEPQSASPSPSYMWSSSAPPRYSPPYYPPFEKPPPYSP

SEQ ID NO: 91652 - protein, 241 aa, Homo sapiens
  Payload ID: 18343
  Gene Name: transmembrane protein 255A
  Uniprot ID: Q5JRV8
  ENSP ID: ENSP00000405781
MHQSLTQQRSSDMSLPDSMGAFNRRKRNSIYVTVTLLIVSVLILTVGLAATTRTQNVTVGGYYPGVILGFGSFLGIIGSNLIENKRQMLVASIVFISFGVIAAFCCAIVDGVFAARHIDLKPLYANRCHYVPKTSQKEAEENPTLPALNCSVENTHPTVSYYAHPQVASYNTYYHSPPHLPPYSAYDFQHSGVFPSSPPSGLSDEPQSASPSPSYMWSSSAPPRYSPPYYPPFEKPPPYSP

SEQ ID NO: 91653 - protein, 149 aa, Homo sapiens
  Payload ID: 18343
  Gene Name: transmembrane protein 255A
  ENSP ID: ENSP00000428013
MHQSLTQQRSSDMSLPDSMGAFNRRKRNSIYVTVTLLIVSVLILTVGLAATTRTQNVTVGGYYPGVILGFGSFLGIIGSNLIENKRQMLVASIVFISFGVIAAFCCAIVDGVFAARHIDLKPLYANRCHYVPKTSQKEAEENPTLPALN

SEQ ID NO: 91654 - protein, 326 aa, Homo sapiens
  Payload ID: 18344
  Gene Name: transmembrane protein 255B
  Uniprot ID: Q8WV15
  ENSP ID: ENSP00000364502
MQPPVPGPLGLLDPAEGLSRRKKTSLWFVGSLLLVSVLIVTVGLAATTRTENVTVGGYYPGIILGFGSFLGIIGINLVENRRQMLVAAIVFISFGVVAAFCCAIVDGVFAAQHIEPRPLTTGRCQFYSSGVGYLYDVYQTEVTCHSLDGKCQLKVRSNTCYCCDLYACGSAEPSPAYYEFIGVSGCQDVLHLYRLLWASAVLNVLGLFLGIITAAVLGAFKDMVPLSQLAYGPAVPPQTLYNPAQQILAYAGFRLTPEPVPTCSSYPLPLQPCSRFPVAPSSALASSEDLQPPSPSSSGSGLPGQAPPCYAPTYFPPGEKPPPYAP

SEQ ID NO: 91655 - protein, 166 aa, Homo sapiens
  Payload ID: 18344
  Gene Name: transmembrane protein 255B
  ENSP ID: ENSP00000479391
MQPPVPGPLGLLDPAEGLSRRKKTSLWFVGSLLLVSVLIVTVGLAATTRTENVTVGGYYPGIILGFGSFLGIIGINLVENRRQMLVAAIVFISFGVVAAFCCAIVDGVFAAQHIEPRPLTTGRCQFYSSGVGYLYDVYQTEVSRSTEIHVGFAQLTPPTPRGFPCT

SEQ ID NO: 91656 - protein, 15 aa, Homo sapiens
  Payload ID: 18344
  Gene Name: transmembrane protein 255B
  ENSP ID: ENSP00000488348
MQPPVPGPLGLLDPA

SEQ ID NO: 91657 - protein, 15 aa, Homo sapiens
  Payload ID: 18344
  Gene Name: transmembrane protein 255B
  ENSP ID: ENSP00000488630
MQPPVPGPLGLLDPA

SEQ ID NO: 91658 - protein, 113 aa, Homo sapiens
  Payload ID: 18345
  Gene Name: transmembrane protein 256
  Uniprot ID: Q8N2U0
  ENSP ID: ENSP00000301939
MAGPAAAFRRLGALSGAAALGFASYGAHGAQFPDAYGKELFDKANKHHFLHSLALLGVPHCRKPLWAGLLLASGTTLFCTSFYYQALSGDPSIQTLAPAGGTLLLLGWLALAL

SEQ ID NO: 91659 - protein, 26 aa, Homo sapiens
  Payload ID: 18345
  Gene Name: transmembrane protein 256
  ENSP ID: ENSP00000468314
GAAALGFASYGAHGAQFPDAYGKEVK

SEQ ID NO: 91660 - protein, 111 aa, Homo sapiens
  Payload ID: 18346
  Gene Name: transmembrane protein 257
  Uniprot ID: O96002
  ENSP ID: ENSP00000386149
MYSRLFYLKSSYIIYFEPLFSNAIINILSFINSLASPLTIFCFALSAQALSTIFYFRIFIFIFHSWILLFHFYFTCSFKTYEHQHSKMVPAYRMQSPRALPRTYLYVWPYK

SEQ ID NO: 91661 - protein, 79 aa, Homo sapiens
  Payload ID: 18347
  Gene Name: transmembrane protein 258
  Uniprot ID: P61165
  ENSP ID: ENSP00000257262
MELEAMSRYTSPVNPAVFPHLTVVLLAIGMFFTAWFFVYEVTSTKYTRDIYKELLISLVASLFMGFGVLFLLLWVGIYV

SEQ ID NO: 91662 - protein, 49 aa, Homo sapiens
  Payload ID: 18347
  Gene Name: transmembrane protein 258
  ENSP ID: ENSP00000437809
MELEAMSRYTSPVNPAVFPHLTVVLLAIGMFFTAWFFVYPFTEQPEDQH

SEQ ID NO: 91663 - protein, 49 aa, Homo sapiens; identical to SEQ ID NO: 91662
  Payload ID: 18347
  Gene Name: transmembrane protein 258
  ENSP ID: ENSP00000441836

SEQ ID NO: 91664 - protein, 79 aa, Homo sapiens; identical to SEQ ID NO: 91661
  Payload ID: 18347
  Gene Name: transmembrane protein 258
  Uniprot ID: P61165
  ENSP ID: ENSP00000443216

SEQ ID NO: 91665 - protein, 74 aa, Homo sapiens
  Payload ID: 18347
  Gene Name: transmembrane protein 258
  ENSP ID: ENSP00000443836
MSRYTSPVNPAVFPHLTVVLLAIGMFFTAWFFVYEVTSTKYTRDIYKELLISLVASLFMGFGVLFLLLWVGIYV

SEQ ID NO: 91666 - protein, 49 aa, Homo sapiens; identical to SEQ ID NO: 91662
  Payload ID: 18347
  Gene Name: transmembrane protein 258
  ENSP ID: ENSP00000445404

SEQ ID NO: 91667 - protein, 408 aa, Homo sapiens
  Payload ID: 18348
  Gene Name: transmembrane protein 259
  Uniprot ID: Q4ZIN3
  ENSP ID: ENSP00000331423
MSEHVEPAAPGPGPNGGGGGPAPARGPRTPNLNPNPLINVRDRLFHALFFKMAVTYSRLFPPAFRRLFEFFVLLKALFVLFVLAYIHIVFSRSPINCLEHVRDKWPREGILRVEVRHNSSRAPVFLQFCDSGGRGSFPGLAVEPGSNLDMEDEEEEELTMEMFGNSSIKFELDIEPKVFKPPSSTEALNDSQEFPFPETPTKVWPQDEYIVEYSLEYGFLRLSQATRQRLSIPVMVVTLDPTRDQCFGDRFSRLLLDEFLGYDDILMSSVKGLAENEENKGFLRNVVSGEHYRFVSMWMARTSYLAAFAIMVIFTLSVSMLLRYSHHQIFVFIVDLLQMLEMNMAIAFPAAPLLTVILALVGMEAIMSEFFNDTTTAFYIILIVWLADQYDAICCHTSTSKRHWLRIP

SEQ ID NO: 91668 - protein, 620 aa, Homo sapiens
  Payload ID: 18348
  Gene Name: transmembrane protein 259
  Uniprot ID: Q4ZIN3
  ENSP ID: ENSP00000349087
MSEHVEPAAPGPGPNGGGGGPAPARGPRTPNLNPNPLINVRDRLFHALFFKMAVTYSRLFPPAFRRLFEFFVLLKALFVLFVLAYIHIVFSRSPINCLEHVRDKWPREGILRVEVRHNSSRAPVFLQFCDSGGRGSFPGLAVEPGSNLDMEDEEEEELTMEMFGNSSIKFELDIEPKVFKPPSSTEALNDSQEFPFPETPTKVWPQDEYIVEYSLEYGFLRLSQATRQRLSIPVMVVTLDPTRDQCFGDRFSRLLLDEFLGYDDILMSSVKGLAENEENKGFLRNVVSGEHYRFVSMWMARTSYLAAFAIMVIFTLSVSMLLRYSHHQIFVFIVDLLQMLEMNMAIAFPAAPLLTVILALVGMEAIMSEFFNDTTTAFYIILIVWLADQYDAICCHTSTSKRHWLRFFYLYHFAFYAYHYRFNGQYSSLALVTSWLFIQHSMIYFFHHYELPAILQQVRIQEMLLQAPPLGPGTPTALPDDMNNNSGAPATAPDSAGQPPALGPVSPGASGSPGPVAAAPSSLVAAAASVAAAAGGDLGWMAETAAIITDASFLSGLSASLLERRPASPLGPAGGLPHAPQDSVPPSDSAASDTTPLGAAVGGPSPASMAPTEAPSEVGS

SEQ ID NO: 91669 - protein, 209 aa, Homo sapiens
  Payload ID: 18348
  Gene Name: transmembrane protein 259
  ENSP ID: ENSP00000475219
  MOD_RES (1)..(1): Any amino acid
XFLRNVVSGEHYRFVSMWMARTSYLAAFAIMVIFTLSVSMLLRYSHHQIFVFIAPLLTVILALVGMEAIMSEFFNDTTTAFYIILIVWLADQYDAICCHTSTSKRHWLRFFYLYHFAFYAYHYRFNGQYSSLALVTSWLFIQHSMIYFFHHYELPAILQQVRIQEMLLQAPPLGPGTPTALPDDMNNNSGAPATAPDSAGQPPALGPVS

SEQ ID NO: 91670 - protein, 421 aa, Homo sapiens
  Payload ID: 18348
  Gene Name: transmembrane protein 259
  ENSP ID: ENSP00000475354
MWVPAGEPGSGTGSWSVGDWTTQGMRVAEPGCGQRVARGPWEHLQALFVLFVLAYIHIVFSRSPINCLEHVRDKWPREGILRVEVRHNSSRAPVFLQFCDSGGRGSFPGLAVEPGSNLDMEDEEEEELTMEMFGNSSIKFELDIEPKVFKPPSSTEALNDSQEFPFPETPTKVWPQDEYIVEYSLEYGFLRLSQATRQRLSIPVMVVTLDPTRDQCFGDRFSRLLLDEFLGYDDILMSSVKGLAENEENKGFLRNVVSGEHYRFVSMWMARTSYLAAFAIMVIFTLSVSMLLRYSHHQIFVFIAPLLTVILALVGEDPTRPPPPRAAPRPARFNRRRLSLQGWRPSCRSSSTTPPPPSTSSSSCGSRTSMTPSAATPAPASGIGCGSSISTTSPSMPITTASMGSIAAWPWSPPGSSSSIP

SEQ ID NO: 91671 - protein, 205 aa, Homo sapiens
  Payload ID: 18348
  Gene Name: transmembrane protein 259
  ENSP ID: ENSP00000475704
  MOD_RES (1)..(1): Any amino acid
XVWPQDEYIVEYSLEYGFLRLSQATRQRLSIPVMVVTLDPTRDQCFGDRFSRLLLDEFLGYDDILMSSVKGLAENEENKGFLRNVVSGEHYRFVSMWMARTSYLAAFAIMVIFTLSVSMLLRYSHHQIFVFIVDLLQMLEMNMAIAFPAAPLLTVILALVGMEAIMSEFFNDTTTAFYIILIVWLADQYDAICCHTSTSKRHWLR

SEQ ID NO: 91672 - protein, 139 aa, Homo sapiens
  Payload ID: 18348
  Gene Name: transmembrane protein 259
  ENSP ID: ENSP00000476127
  MOD_RES (1)..(1): Any amino acid
XGRGSFPGLAVEPGSNLDMEDEEEEELTMEMFGNSSIKVPGRPQFELDIEPKVFKPPSSTEALNDSQEFPFPETPTKVWPQDEYIVEYSLEYGFLRLSQATRQRLSIPVMVVTLDPTRDQCFGDRFSRLLLDEFLGYDD

SEQ ID NO: 91673 - protein, 169 aa, Homo sapiens
  Payload ID: 18349
  Gene Name: transmembrane protein 26
  ENSP ID: ENSP00000277749
YCSIQAEGTSQNTSRKEDFNQTLTSNEQTSRADDLIETAKVFVNNLSTVCEKVWTLGLHQTFLLMLIIGRWLLPIGGGITRDQLSQLLLMFVGTAADILEFTSETLEEQNVRNSPALVYAILVIWTWSMLQFPLDLADPCIRTSEDIGAVKIVLIGGPWNPTGLTLIKT

SEQ ID NO: 91674 - protein, 368 aa, Homo sapiens
  Payload ID: 18349
  Gene Name: transmembrane protein 26
  Uniprot ID: Q6ZUK4
  ENSP ID: ENSP00000382237
MEGLVFLNALATRLLFLLHSLVGVWRVTEVKKEPRYWLLALLNLLLFLETALTLKFKRGRGYKWFSPAIFLYLISIVPSLWLLELHHETQYCSIQAEGTSQNTSRKEDFNQTLTSNEQTSRADDLIETAKVFVNNLSTVCEKVWTLGLHQTFLLMLIIGRWLLPIGGGITRDQLSQLLLMFVGTAADILEFTSETLEEQNVRNSPALVYAILVIWTWSMLQFPLDLAVQNVVCPVSVTERGFPSLFFCQYSADLWNIGISVFIQDGPFLVVRLILMTYFKVINQMLVFFAAKNFLVVVLQLYRLVVLALAVRASLRSQSEGLKGEHGCRAQTSESGPSQRDWQNESKEGLAIPLRGSPVTSDDSHHTP

SEQ ID NO: 91675 - protein, 368 aa, Homo sapiens; identical to SEQ ID NO: 91674
  Payload ID: 18349
  Gene Name: transmembrane protein 26
  Uniprot ID: Q6ZUK4
  ENSP ID: ENSP00000425286

SEQ ID NO: 91676 - protein, 223 aa, Homo sapiens
  Payload ID: 18349
  Gene Name: transmembrane protein 26
  Uniprot ID: Q6ZUK4
  ENSP ID: ENSP00000426071
MEGLVFLNALATRLLFLLHSLVGVWRVTEVKKEPRYWLLALLNLLLFLETALTLKFKRGRGYKWFSPAIFLYLISIVPSLWLLELHHETQYCSIQAEGTSQNTSRKEDFNQTLTSNEQTSRADDLIETAKVFVNNLSTVCEKVWTLGLHQTFLLMLIIGRWLLPIGGGITRDQLSQLLLMFVGTAADILEFTSETLEEQNVRLCWKNSTNRRHTNPKWQLVLF

SEQ ID NO: 91677 - protein, 707 aa, Homo sapiens
  Payload ID: 18350
  Gene Name: transmembrane protein 260
  Uniprot ID: Q9NX78
  ENSP ID: ENSP00000261556
MSPHGDGRGQAQGRAVRVGLRRSGGIRGGVAVFAAVAAVFTFTLPPSVPGGDSGELITAAHELGVAHPPGYPLFTLVAKLAITLFPFGSIAYRVNLLCGLFGAVAASLLFFTVFRLSGSSAGGILAAGVFSFSRLTWQWSIAAEVFSLNNLFVGLLMALTVHFEEAATAKERSKVAKIGAFCCGLSLCNQHTIILYVLCIIPWILFQLLKKKELSLGSLLKLSLYFSAGLLPYVHLPISSYLNHARWTWGDQTTLQGFLTHFLREEYGTFSLAKSEIGSSMSEILLSQVTNMRTELSFNIQALAVCANICLATKDRQNPSLVWLFTGMFCIYSLFFAWRANLDISKPLFMGVVERFWMQSNAVVAVLAGIGLAAVVSETNRVLNSNGLQCLEWLSATLFVVYQIYSNYSVCDQRTNYVIDKFAKNLLTSMPHDAIILLRGDLPGNSLRYMHYCEGLRPDISLVDQEMMTYEWYLPKMAKHLPGVNFPGNRWNPVEGILPSGMVTFNLYHFLEVNKQKETFVCIGIHEGDPTWKKNYSLWPWGSCDKLVPLEIVFNPEEWIKLTKSIYNWTEEYGRFDPSSWESVANEEMWQARMKTPFFIFNLAETAHMPSKVKAQLYAQAYDLYKEIVYLQKEHPVNWHKNYAIACERMLRLQARDADPEVLLSETIRHFRLYSQKAPNDPQQADILGALKHLRKELQSLRNRKNV

SEQ ID NO: 91678 - protein, 409 aa, Homo sapiens
  Payload ID: 18350
  Gene Name: transmembrane protein 260
  ENSP ID: ENSP00000441934
MSPHGDGRGQAQGRAVRVGLRRSGGIRGGVAVFAAVAAVFTFTLPPSVPGGDSGELITAAHELGVAHPPGYPLFTLVAKLAITLFPFGSIAYRVNLLCGLFGAVAASLLFFTVFRLSGSSAGGILAAGVFSFSRLTWQWSIAAEVFSLNNLFVGLLMALTVHFEEAATAKERSKVAKIGAFCCGLSLCNQHTIILYVLCIIPWILFQLLKKKELSLGSLLKLSLYFSAGLLPYVHLPISSYLNHARWTWGDQTTLQGFLTHFLREEYGTFSLAKSEIGSSMSEILLSQVTNMRTELSFNIQALAVCANICLATKDRQNPSLVWLFTGMFCIYSLFFAWRANLDISKPLFMGVVERFWMQSNAVVAVLAGIGLAAVVSETNRVLNSNGLQCLEWLSATLFVVYQIYSNYR

SEQ ID NO: 91679 - protein, 324 aa, Homo sapiens
  Payload ID: 18350
  Gene Name: transmembrane protein 260
  ENSP ID: ENSP00000442602
MSPHGDGRGQAQGRAVRVGLRRSGGIRGGVAVFAAVAAVFTFTLPPSVPGGDSGELITAAHELGVAHPPGYPLFTLVAKLAITLFPFGSIAYRVNLLCGLFGAVAASLLFFTVFRLSGSSAGGILAAGVFSFSRLTWQWSIAAEVFSLNNLFVGLLMALTVHFEEAATAKERSKVAKIGAFCCGLSLCNQHTIILYVLCIIPWILFQLLKKKELSLGSLLKLSLYFSAGLLPYVHLPISSYLNHARWTWGDQTTLQGFLTHFLREEYGTFSLAKSEIGSSMSEILLSQVTNMRTELSFNIQALAVCANICLATKWNDSGCRAMQ

SEQ ID NO: 91680 - protein, 253 aa, Homo sapiens
  Payload ID: 18350
  Gene Name: transmembrane protein 260
  ENSP ID: ENSP00000450988
MALTVHFEEAATAKERSKVAKIGAFCCGLSLCNQHTIILYVLCIIPWILFQLLKKKELSLGSLLKLSLYFSAGLLPYVHLPISSYLNHARWTWGDQTTLQGFLTHFLREEYGTFSLAKSEIGSSMSEILLSQVTNMRTELSFNIQALAVCANICLATKDRQNPSLVWLFTGMFCIYSLFFAWRANLDISKPLFMGVVERFWMQSNAVVAVLAGIGLAAVVSETNRVLNSNGLQCLEWLSATLFVVYQIYSNYR

SEQ ID NO: 91681 - protein, 74 aa, Homo sapiens
  Payload ID: 18350
  Gene Name: transmembrane protein 260
  ENSP ID: ENSP00000451677
MNFLRSPPDPAKDHCNGELITAAHELGVAHPPGYPLFTLVAKLAITLFPFGSIAYRVNLLCGLFGAVAASLLFF

SEQ ID NO: 91682 - protein, 41 aa, Homo sapiens
  Payload ID: 18350
  Gene Name: transmembrane protein 260
  ENSP ID: ENSP00000451695
  MOD_RES (1)..(1): Any amino acid
XPFFIFNLAETAHMPSKVKAQLYAQAYDCTDSIKSDKRGFL

SEQ ID NO: 91683 - protein, 115 aa, Homo sapiens
  Payload ID: 18350
  Gene Name: transmembrane protein 260
  ENSP ID: ENSP00000452065
MSPHGDGRGQAQGRAVRVGLRRSGGIRGGVAVFAAVAAVFTFTLPPSVPGGDSGELITAAHELGVAHPPGYPLFTLVAKLAITLFPFGSIAYRVNLLCGLFGAVAASLLFFTVFR

SEQ ID NO: 91684 - protein, 101 aa, Homo sapiens
  Payload ID: 18350
  Gene Name: transmembrane protein 260
  ENSP ID: ENSP00000452441
  MOD_RES (1)..(1): Any amino acid
XYFSAGLLPYVHLPISSYLNHARWTWGDQTTLQGFLTHFLREEYGTFSLAKSEIGSSMSEILLSQVTNMRTELSFNIQALAVCANICLATKWNDSGCRAMQ

SEQ ID NO: 91685 - protein, 20 aa, Homo sapiens
  Payload ID: 18350
  Gene Name: transmembrane protein 260
  ENSP ID: ENSP00000452579
  MOD_RES (1)..(1): Any amino acid
XLCGLFGAVAASLLFFTVFR

SEQ ID NO: 91686 - protein, 112 aa, Homo sapiens
  Payload ID: 18351
  Gene Name: transmembrane protein 261
  Uniprot ID: Q96GE9
  ENSP ID: ENSP00000350961
MGSRLSQPFESYITAPPGTAAAPAKPAPPATPGAPTSPAEHRLLKTCWSCRVLSGLGLMGAGGYVYWVARKPMKMGYPPSPWTITQMVIGLSIATWGIVVMADPKGKAYRVV

SEQ ID NO: 91687 - protein, 116 aa, Homo sapiens
  Payload ID: 18352
  Gene Name: transmembrane protein 262
  Uniprot ID: E9PQX1
  ENSP ID: ENSP00000432459
MWLQDRIATFFFPKGMMLTTAALMLFFLHLGIFIRDVHNFCITYHYDHMSFHYTVVLMFSQVISICWAAMGSLYAEMTENKYVCFSALTILMLNGAMFFNRLSLEFLAIEYREEHH

SEQ ID NO: 91688 - protein, 106 aa, Homo sapiens
  Payload ID: 18352
  Gene Name: transmembrane protein 262
  ENSP ID: ENSP00000435002
MWLQDRIATFFFPKGMMLTTAALMLFFLHLGIFIRDVHNFCITYHYDHMSFHYTVVLMFSQVISICWAAMGSLYAEMTENKYVCFSALTILMLNGAMFFNRLSLEF

SEQ ID NO: 91689 - protein, 112 aa, Homo sapiens
  Payload ID: 18352
  Gene Name: transmembrane protein 262
  ENSP ID: ENSP00000436355
LQDRIATFFFPKGMMLTTAALMLFFLHLGIFIRDVHNFCITYHYDHMSFHYTVVLMFSQVISICWAAMGSLYAEMTENNAQRSHVLQPPVLGVSGHRVPGGAPLRPGESEQG

SEQ ID NO: 91690 - protein, 110 aa, Homo sapiens [sequence omitted]

SEQ ID NO: 91691 - protein, 116 aa, Homo sapiens
  Payload ID: 18353
  Gene Name: transmembrane protein 263
  Uniprot ID: Q8WUH6
  ENSP ID: ENSP00000280756
MNQTDKNQQEIPSYLNDEPPEGSMKDHPQQQPGMLSRVTGGIFSVTKGAVGATIGGVAWIGGKSLEVTKTAVTTVPSMGIGLVKGGVSAVAGGVTAVGSAVVNKVPLTGKKKDKSD

SEQ ID NO: 91692 - protein, 116 aa, Homo sapiens; identical to SEQ ID NO: 91691
  Payload ID: 18353
  Gene Name: transmembrane protein 263
  Uniprot ID: Q8WUH6
  ENSP ID: ENSP00000446537

SEQ ID NO: 91693 - protein, 116 aa, Homo sapiens; identical to SEQ ID NO: 91691
  Payload ID: 18353
  Gene Name: transmembrane protein 263
  Uniprot ID: Q8WUH6
  ENSP ID: ENSP00000446717

SEQ ID NO: 91694 - protein, 116 aa, Homo sapiens; identical to SEQ ID NO: 91691
  Payload ID: 18353
  Gene Name: transmembrane protein 263
  Uniprot ID: Q8WUH6
  ENSP ID: ENSP00000449106

SEQ ID NO: 91695 - protein, 116 aa, Homo sapiens; identical to SEQ ID NO: 91691
  Payload ID: 18353
  Gene Name: transmembrane protein 263
  Uniprot ID: Q8WUH6
  ENSP ID: ENSP00000449785

SEQ ID NO: 91696 - protein, 56 aa, Homo sapiens
  Payload ID: 18353
  Gene Name: transmembrane protein 263
  ENSP ID: ENSP00000450304
MNQTDKNQQEIPSYLNDEPPEESYSVNPGWSAMARSWPTATSASWVQAVLLPQPPK

SEQ ID NO: 91697 - protein, 116 aa, Homo sapiens; identical to SEQ ID NO: 91691
  Payload ID: 18353
  Gene Name: transmembrane protein 263
  Uniprot ID: Q8WUH6
  ENSP ID: ENSP00000450350

SEQ ID NO: 91698 - protein, 108 aa, Homo sapiens
  Payload ID: 18354
  Gene Name: transmembrane protein 265
  Uniprot ID: A0A087WTH1
  ENSP ID: ENSP00000477871
MEDEEKAVEILGNTEAAHPPSPIRCCWLRLRCLAATSIICGCSCLGVMALVFAIKAEERHKAGRSEEAVRWGARARKLILASFAVWLAVLILGPLLLWLLSYAIAQAE

SEQ ID NO: 91699 - protein, 531 aa, Homo sapiens
  Payload ID: 18355
  Gene Name: transmembrane protein 266
  Uniprot ID: Q2M3C6
  ENSP ID: ENSP00000373594
MAVAPSFNMTNPQPAIEGGISEVEIISQQVDEETKSIAPVQLVNFAYRDLPLAAVDLSTAGSQLLSNLDEDYQREGSNWLKPCCGKRAAVWQVFLLSASLNSFLVACVILVVILLTLELLIDIKLLQFSSAFQFAGVIHWISLVILSVFFSETVLRIVVLGIWDYIENKIEVFDGAVIILSLAPMVASTVANGPRSPWDAISLIIMLRIWRVKRVIDAYVLPVKLEMEMVIQQYEKAKVIQDEQLERLTQICQEQGFEIRQLRAHLAQQDLDLAAEREAALQAPHVLSQPRSRFKVLEAGTWDEETAAESVVEELQPSQEATMKDDMNSYISQYYNGPSSDSGVPEPAVCMVTTAAIDIHQPNISSDLFSLDMPLKLGGNGTSATSESASRSSVTRAQSDSSQTLGSSMDCSTAREEPSSEPGPSPPPLPSQQQVEEATVQDLLSSLSEDPCPSQKALDPAPLARPSPAGSAQTSPELEHRVSLFNQKNQEGFTVFQIRPVIHFQPTVPMLEDKFRSLESKEQKLHRVPEA

SEQ ID NO: 91700 - protein, 101 aa, Homo sapiens
  Payload ID: 18355
  Gene Name: transmembrane protein 266
  ENSP ID: ENSP00000435049
MAVAPSFNMTNPQPAIEGGISEVEIISQQVDEETKSIAPVQLVNFAYRDLPLAAVDLSTAGSQLLSNLDEDYQREGSNWLKPCCGKRAAVWQFPAHSSLLA

SEQ ID NO: 91701 - protein, 121 aa, Homo sapiens
  Payload ID: 18355
  Gene Name: transmembrane protein 266
  ENSP ID: ENSP00000453957
MAVAPSFNMTNPQPAIEGGISEVEIISQQVDEETKSIAPVQLVNFAYRDLPLAAVDLSTAGSQLLSNLDEDYQREGFQRIPVCWRDSLDQPGHSVRVLLRDCSTDCGAWDLGLHRKQNRGV

SEQ ID NO: 91702 - protein, 222 aa, Homo sapiens
  Payload ID: 18356
  Gene Name: transmembrane protein 27
  Uniprot ID: Q9HBJ8
  ENSP ID: ENSP00000369699
MLWLLFFLVTAIHAELCQPGAENAFKVRLSIRTALGDKAYAWDTNEEYLFKAMVAFSMRKVPNREATEISHVLLCNVTQRVSFWFVVTDPSKNHTLPAVEVQSAIRMNKNRINNAFFLNDQTLEFLKIPSTLAPPMDPSVPIWIIIFGVIFCIIIVAIALLILSGIWQRRRKNKEPSEVDDAEDKCENMITIENGIPSDPLDMKGGHINDAFMTEDERLTPL

SEQ ID NO: 91703 - protein, 361 aa, Homo sapiens
  Payload ID: 18357
  Gene Name: transmembrane protein 30A
  Uniprot ID: Q9NV96
  ENSP ID: ENSP00000230461
MAMNYNAKDEVDGGPPCAPGGTAKTRRPDNTAFKQQRLPAWQPILTAGTVLPIFFIIGLIFIPIGIGIFVTSNNIREIEIDYTGTEPSSPCNKCLSPDVTPCFCTINFTLEKSFEGNVFMYYGLSNFYQNHRRYVKSRDDSQLNGDSSALLNPSKECEPYRRNEDKPIAPCGAIANSMFNDTLELFLIGNDSYPIPIALKKKGIAWWTDKNVKFRNPPGGDNLEERFKGTTKPVNWLKPVYMLDSDPDNNGFINEDFIVWMRTAALPTFRKLYRLIERKSDLHPTLPAGRYSLNVTYNYPVHYFDGRKRMILSTISWMGGKNPFLGIAYIAVGSISFLLGVVLLVINHKYRNSSNTADITI

SEQ ID NO: 91704 - protein, 242 aa, Homo sapiens
  Payload ID: 18357
  Gene Name: transmembrane protein 30A
  Uniprot ID: Q9NV96
  ENSP ID: ENSP00000359067
MYYGLSNFYQNHRRYVKSRDDSQLNGDSSALLNPSKECEPYRRNEDKPIAPCGAIANSMFNDTLELFLIGNDSYPIPIALKKKGIAWWTDKNVKFRNPPGGDNLEERFKGTTKPVNWLKPVYMLDSDPDNNGFINEDFIVWMRTAALPTFRKLYRLIERKSDLHPTLPAGRYSLNVTYNYPVHYFDGRKRMILSTISWMGGKNPFLGIAYIAVGSISFLLGVVLLVINHKYRNSSNTADITI

SEQ ID NO: 91705 - protein, 77 aa, Homo sapiens
  Payload ID: 18357
  Gene Name: transmembrane protein 30A
  ENSP ID: ENSP00000430270
MYYGLSNFYQNHRRYVKSRDDSQLNGDSSALLNPSKECEPYRRNEDKPIAPCGAIANSMFNDTLELFLIGNDSYPIP

SEQ ID NO: 91706 - protein, 325 aa, Homo sapiens
  Payload ID: 18357
  Gene Name: transmembrane protein 30A
  Uniprot ID: Q9NV96
  ENSP ID: ENSP00000431007
MAMNYNAKDEVDGGPPCAPGGTAKTRRPDNTAFKQQRLPAWQPILTAGTVLPIFFIIGLIFIPIGIGIFVTSNNIREIEGNVFMYYGLSNFYQNHRRYVKSRDDSQLNGDSSALLNPSKECEPYRRNEDKPIAPCGAIANSMFNDTLELFLIGNDSYPIPIALKKKGIAWWTDKNVKFRNPPGGDNLEERFKGTTKPVNWLKPVYMLDSDPDNNGFINEDFIVWMRTAALPTFRKLYRLIERKSDLHPTLPAGRYSLNVTYNYPVHYFDGRKRMILSTISWMGGKNPFLGIAYIAVGSISFLLGVVLLVINHKYRNSSNTADITI

SEQ ID NO: 91707 - protein, 351 aa, Homo sapiens
  Payload ID: 18358
  Gene Name: transmembrane protein 30B
  Uniprot ID: Q3MIR4
  ENSP ID: ENSP00000450842
MTWSATARGAHQPDNTAFTQQRLPAWQPLLSASIALPLFFCAGLAFIGLGLGLYYSSNGIKELEYDYTGDPGTGNCSVCAAAGQGRALPPPCSCAWYFSLPELFQGPVYLYYELTNFYQNNRRYGVSRDDAQLSGLPSALRHPVNECAPYQRSAAGLPIAPCGAIANSLFNDSFSLWHQRQPGGPYVEVPLDRSGIAWWTDYHVKFRNPPLVNGSLALAFQGTAPPPNWRRPVYELSPDPNNTGFINQDFVVWMRTAALPTFRKLYARIRQGNYSAGLPRGAYRVNITYNYPVRAFGGHKLLIFSSISWMGGKNPFLGIAYLVVGSLCILTGFVMLVVYIRYQDQDDDDEE

SEQ ID NO: 91708 - protein, 68 aa, Homo sapiens
  Payload ID: 18359
  Gene Name: transmembrane protein 30C
  ENSP ID: ENSP00000419663
  MOD_RES (1)..(1): Any amino acid
XLCMGIILILSARSTQEIEINYTRICANCAKLRENASNFDKECTCSIPFYLSGKMMVGEIQETRLTLH

SEQ ID NO: 91709 - protein, 168 aa, Homo sapiens
  Payload ID: 18360
  Gene Name: transmembrane protein 31
  Uniprot ID: Q5JXX7
  ENSP ID: ENSP00000316940
MRLTEKSEGEQQLKPNNSNAPNEDQEEEIQQSEQHTPARQRTQRADTQPSRCRLPSRRTPTTSSDRTINLLEVLPWPTEWIFNPYRLPALFELYPEFLLVFKEAFHDISHCLKAQMEKIGLPIILHLFALSTLYFYKFFLPTILSLSFFILLVLLLLLFIIVFILIFF

SEQ ID NO: 91710 - protein, 68 aa, Homo sapiens
  Payload ID: 18361
  Gene Name: transmembrane protein 33
  ENSP ID: ENSP00000264452
MADTTPNGPQGAGAVQFMMTNKLDTAMWLSRLFTVYCSALFVLPLLGEYLPSLVILFASCCHIYEKGP

SEQ ID NO: 91711 - protein, 155 aa, Homo sapiens
  Payload ID: 18361
  Gene Name: transmembrane protein 33
  ENSP ID: ENSP00000421546
  MOD_RES (1)..(1): Any amino acid
XLRLHQRLPHFQLSRAFLAQALLEDSCHYLLYSLIFVNSYPVTMSIFPVLLFSLLHAATYTKKVLDARGSNSLPLLRSVLDKLSANQQNILKFIACNEIFLMPATVFMLFSGQGSLLQPFIYYRFLTLRYSSRRNPYCRLWCPKTVTIVTPKRSP

SEQ ID NO: 91712 - protein, 247 aa, Homo sapiens
  Payload ID: 18361
  Gene Name: transmembrane protein 33
  Uniprot ID: P57088
  ENSP ID: ENSP00000422473
MADTTPNGPQGAGAVQFMMTNKLDTAMWLSRLFTVYCSALFVLPLLGLHEAASFYQRALLANALTSALRLHQRLPHFQLSRAFLAQALLEDSCHYLLYSLIFVNSYPVTMSIFPVLLFSLLHAATYTKKVLDARGSNSLPLLRSVLDKLSANQQNILKFIACNEIFLMPATVFMLFSGQGSLLQPFIYYRFLTLRYSSRRNPYCRTLFNELRIVVEHIIMKPACPLFVRRLCLQSIAFISRLAPTVP

SEQ ID NO: 91713 - protein, 68 aa, Homo sapiens
  Payload ID: 18361
  Gene Name: transmembrane protein 33
  ENSP ID: ENSP00000422517
MADTTPNGPQGAGAVQFMMTNKLDTAMWLSRLFTVYCSALFVLPLLGVQMSCFKKERSSALSILTPVN

SEQ ID NO: 91714 - protein, 222 aa, Homo sapiens
  Payload ID: 18361
  Gene Name: transmembrane protein 33
  ENSP ID: ENSP00000422810
MADTTPNGPQGAGAVQFMMTNKLDTAMWLSRLFTVYCSALFVLPLLGLHEAASFYQRALLANALTSALRLHQRLPHFQLSRAFLAQALLEDSCHYLLYSLIFVNSYPVTMSIFPVLLFSLLHAATYTKKVLDARGSNSLPLLRSVLDKLSANQQNILKFIACNEIFLMPATVFMLFSGQGSLLQPFIYYRFLTLRYSSRRNPYCRTLFNELRIVVEHIIMKP

SEQ ID NO: 91715 - protein, 247 aa, Homo sapiens; identical to SEQ ID NO: 91712
  Payload ID: 18361
  Gene Name: transmembrane protein 33
  Uniprot ID: P57088
  ENSP ID: ENSP00000427006

SEQ ID NO: 91716 - protein, 247 aa, Homo sapiens; identical to SEQ ID NO: 91712
  Payload ID: 18361
  Gene Name: transmembrane protein 33
  Uniprot ID: P57088
  ENSP ID: ENSP00000441455

SEQ ID NO: 91717 - protein, 167 aa, Homo sapiens
  Payload ID: 18362
  Gene Name: transmembrane protein 35
  Uniprot ID: Q53FP2
  ENSP ID: ENSP00000362021
MASPRTVTIVALSVALGLFFVFMGTIKLTPRLSKDAYSEMKRAYKSYVRALPLLKKMGINSILLRKSIGALEVACGIVMTLVPGRPKDVANFFLLLLVLAVLFFHQLVGDPLKRYAHALVFGILLTCRLLIARKPEDRSSEKKPLPGNAEEQPSLYEKAPQGKVKVS

SEQ ID NO: 91718 - protein, 190 aa, Homo sapiens
  Payload ID: 18363
  Gene Name: transmembrane protein 37
  Uniprot ID: Q8WXS4
  ENSP ID: ENSP00000303148
MTAVGVQAQRPLGQRQPRRSFFESFIRTLIITCVALAVVLSSVSICDGHWLLAEDRLFGLWHFCTTTNQTICFRDLGQAHVPGLAVGMGLVRSVGALAVVAAIFGLEFLMVSQLCEDKHSQCKWVMGSILLLVSFVLSSGGLLGFVILLRNQVTLIGFTLMFWCEFTASFLLFLNAISGLHINSITHPWE

SEQ ID NO: 91719 - protein, 202 aa, Homo sapiens
  Payload ID: 18363
  Gene Name: transmembrane protein 37
  ENSP ID: ENSP00000387015
MTRPDCSSDFNSRHFPLGQAQRPLGQRQPRRSFFESFIRTLIITCVALAVVLSSVSICDGHWLLAEDRLFGLWHFCTTTNQTICFRDLGQAHVPGLAVGMGLVRSVGALAVVAAIFGLEFLMVSQLCEDKHSQCKWVMGSILLLVSFVLSSGGLLGFVILLRNQVTLIGFTLMFWCEFTASFLLFLNAISGLHINSITHPWE

SEQ ID NO: 91720 - protein, 66 aa, Homo sapiens
  Payload ID: 18363
  Gene Name: transmembrane protein 37
  ENSP ID: ENSP00000400770
MVARTQTWTRPAGPRGLWAKGSPAGPSLNPSSGPSSSRVWPWLWSCPRSPFVMGTGSWLRTASSGS

SEQ ID NO: 91721 - protein, 299 aa, Homo sapiens
  Payload ID: 18364
  Gene Name: transmembrane protein 38A
  Uniprot ID: Q9H6F2
  ENSP ID: ENSP00000187762
MELLSALSLGELALSFSRVPLFPVFDLSYFIVSILYLKYEPGAVELSRRHPIASWLCAMLHCFGSYILADLLLGEPLIDYFSNNSSILLASAVWYLIFFCPLDLFYKCVCFLPVKLIFVAMKEVVRVRKIAVGIHHAHHHYHHGWFVMIATGWVKGSGVALMSNFEQLLRGVWKPETNEILHMSFPTKASLYGAILFTLQQTRWLPVSKASLIFIFTLFMVSCKVFLTATHSHSSPFDALEGYICPVLFGSACGGDHHHDNHGGSHSGGGPGAQHSAMPAKSKEELSEGSRKKKAKKAD

SEQ ID NO: 91722 - protein, 115 aa, Homo sapiens
  Payload ID: 18364
  Gene Name: transmembrane protein 38A
  ENSP ID: ENSP00000469721
  MOD_RES (1)..(1): Any amino acid
XFSRVPLFPVFDLSYFIVSILYLKYEPGAVELSRRHPIASWLCAMLHCFGSYILADLLLGEPLIDYFSNNSSILLASAVWYLIFFCPLDLFYKCVCFLPVKLIFVAMKEVEVAVS

SEQ ID NO: 91723 - protein, 237 aa, Homo sapiens
  Payload ID: 18365
  Gene Name: transmembrane protein 38B
  ENSP ID: ENSP00000363820
MLHCFGGGILSCLLLAEPPLKFLANHTNILLASSIWYITFFCPHDLVSQGYSYLPVQLLASGMKEVTRTWKIVGGVTHANSYYKNGWIVMIAIGWARGAGGTIITNFERLVKGDWKPEGDEWLKMSYPAKVTLLGSVIFTFQHTQHLAISKHNLMFLYTIFIVATKITMMTTQTSTMTFAPFEDTLSWMLFGWQQPFSSCEKKSEAKSPSNGVGSLASKPVDVASDNVKKKHTKKNE

SEQ ID NO: 91724 - protein, 291 aa, Homo sapiens
  Payload ID: 18365
  Gene Name: transmembrane protein 38B
  Uniprot ID: Q9NVV0
  ENSP ID: ENSP00000363824
MDSPWDELALAFSRTSMFPFFDIAHYLVSVMAVKRQPGAAALAWKNPISSWFTAMLHCFGGGILSCLLLAEPPLKFLANHTNILLASSIWYITFFCPHDLVSQGYSYLPVQLLASGMKEVTRTWKIVGGVTHANSYYKNGWIVMIAIGWARGAGGTIITNFERLVKGDWKPEGDEWLKMSYPAKVTLLGSVIFTFQHTQHLAISKHNLMFLYTIFIVATKITMMTTQTSTMTFAPFEDTLSWMLFGWQQPFSSCEKKSEAKSPSNGVGSLASKPVDVASDNVKKKHTKKNE

SEQ ID NO: 91725 - protein, 35 aa, Homo sapiens
  Payload ID: 18365
  Gene Name: transmembrane protein 38B
  ENSP ID: ENSP00000403026
MLHCFGGGILSCLLLAEPPLKFLANHTNILLASSI

SEQ ID NO: 91726 - protein, 162 aa, Homo sapiens
  Payload ID: 18365
  Gene Name: transmembrane protein 38B
  ENSP ID: ENSP00000410800
  MOD_RES (1)..(1): Any amino acid
XSCLLLAEPPLKFLANHTNILLASSIWYITFFCPHDLVSQGYSYLPVQLLASGMKEVTRTWKIVGGVTHANSYYKNGWIVMIAIGWARGAGGTIITNFERLVKGDWKPEGDEWLKMSYPAKVTLLGSVIFTFQHTQHLAISKHNLMFLYTIFIVATKSLNWR

SEQ ID NO: 91727 - protein, 81 aa, Homo sapiens
  Payload ID: 18365
  Gene Name: transmembrane protein 38B
  ENSP ID: ENSP00000416680
  MOD_RES (1)..(1): Any amino acid
XWIVMIAIGWARGAGGTIITNFERLVKGDWKPEGDEWLKMSYPAKVTLLGSVIFTFQHTQHLAISKHNLMFLYTIFIVATK

SEQ ID NO: 91728 - protein, 488 aa, Homo sapiens
  Payload ID: 18366
  Gene Name: transmembrane protein 39A
  Uniprot ID: Q9NV64
  ENSP ID: ENSP00000326063
MPGGRRGPSRQQLSRSALPSLQTLVGGGCGNGTGLRNRNGSAIGLPVPPITALITPGPVRHCQIPDLPVDGSLLFEFLFFIYLLVALFIQYINIYKTVWWYPYNHPASCTSLNFHLIDYHLAAFITVMLARRLVWALISEATKAGAASMIHYMVLISARLVLLTLCGWVLCWTLVNLFRSHSVLNLLFLGYPFGVYVPLCCFHQDSRAHLLLTDYNYVVQHEAVEESASTVGGLAKSKDFLSLLLESLKEQFNNATPIPTHSCPLSPDLIRNEVECLKADFNHRIKEVLFNSLFSAYYVAFLPLCFVKSTQYYDMRWSCEHLIMVWINAFVMLTTQLLPSKYCDLLHKSAAHLGKWQKLEHGSYSNAPQHIWSENTIWPQGVLVRHSRCLYRAMGPYNVAVPSDVSHARFYFLFHRPLRLLNLLILIEGSVVFYQLYSLLRSEKWNHTLSMALILFCNYYVLFKLLRDRIVLGRAYSYPLNSYELKAN

SEQ ID NO: 91729 - protein, 146 aa, Homo sapiens
  Payload ID: 18366
  Gene Name: transmembrane protein 39A
  Uniprot ID: Q9NV64
  ENSP ID: ENSP00000402149
MPGGRRGPSRQQLSRSALPSLQTLVGGGCGNGTGLRNRNGSAIGLPVPPITALITPGPVRHCQIPDLPVDGSLLFEFLFFIYLLVALFIQYINIYKTVWWYPYNHPASCTSLNFHLIDYHLAAFITVMLARRLVWALISEVCVCKL

SEQ ID NO: 91730 - protein, 46 aa, Homo sapiens
  Payload ID: 18366
  Gene Name: transmembrane protein 39A
  ENSP ID: ENSP00000417233
MPGGRRGPSRQQLSRSALPSLQTLVGGGCGNGTGLRNRSCSSLPNS

SEQ ID NO: 91731 - protein, 191 aa, Homo sapiens
  Payload ID: 18366
  Gene Name: transmembrane protein 39A
  ENSP ID: ENSP00000418796
MPGGRRGPSRQQLSRSALPSLQTLVGGGCGNGTGLRNRNGSAIGLPVPPITALITPGPVRHCQIPDLPVDGSLLFEFLFFIYLLVALFIQYINIYKTVWWYPYNHPASCTSLNFHLIDYHLAAFITVMLARRLVWALISEATKAGAASMIHYMVLISARLVLLTLCGWVLCWTLVNLFRSHSVLNLLFLGY

SEQ ID NO: 91732 - protein, 112 aa, Homo sapiens
  Payload ID: 18366
  Gene Name: transmembrane protein 39A
  ENSP ID: ENSP00000419068
MPGGRRGPSRQQLSRSALPSLQTLVGGGCGNGTGLRNRNGSAIGLPVPPITALITPGPVRHCQIPDLPVDGSLLFEFLFFIYLLVALFIQYINIYKTVWWYPYNHPASCTSL

SEQ ID NO: 91733 - protein, 140 aa, Homo sapiens
  Payload ID: 18366
  Gene Name: transmembrane protein 39A
  ENSP ID: ENSP00000419405
MPGGRRGPSRQQLSRSALPSLQTLVGGGCGNGTGLRNRNGSAIGLPVPPITALITPGPVRHCQIPDLPVDGSLLFEFLFFIYLLVALFIQYINIYKTVWWYPYNHPASCTSLNFHLIDYHLAAFITVMLARRLVWALISE

SEQ ID NO: 91734 - protein, 165 aa, Homo sapiens
  Payload ID: 18366
  Gene Name: transmembrane protein 39A
  ENSP ID: ENSP00000419641
MPGGRRGPSRQQLSRSALPSLQTLVGGGCGNGTGLRNRFGVYVPLCCFHQDSRAHLLLTDYNYVVQHEAVEESASTVGGLAKSKDFLSLLLESLKEQFNNATPIPTHSCPLSPDLIRNEVECLKADFNHRIKEVLFNSLFSAYYVAFLPLCFVKSTQYYDMRWSC

SEQ ID NO: 91735 - protein, 18 aa, Homo sapiens
  Payload ID: 18366
  Gene Name: transmembrane protein 39A
  ENSP ID: ENSP00000420432
SYSNAPQHILAQAFKPRN

SEQ ID NO: 91736 - protein, 492 aa, Homo sapiens
  Payload ID: 18367
  Gene Name: transmembrane protein 39B
  Uniprot ID: Q9GZU3
  ENSP ID: ENSP00000338165
MGGRRGPNRTSYCRNPLCEPGSSGGSSGSHTSSASVTSVRSRTRSSSGTGLSSPPLATQTVVPLQHCKIPELPVQASILFELQLFFCQLIALFVHYINIYKTVWWYPPSHPPSHTSLNFHLIDFNLLMVTTIVLGRRFIGSIVKEASQRGKVSLFRSILLFLTRFTVLTATGWSLCRSLIHLFRTYSFLNLLFLCYPFGMYIPFLQLNCDLRKTSLFNHMASMGPREAVSGLAKSRDYLLTLRETWKQHTRQLYGPDAMPTHACCLSPSLIRSEVEFLKMDFNWRMKEVLVSSMLSAYYVAFVPVWFVKNTHYYDKRWSCELFLLVSISTSVILMQHLLPASYCDLLHKAAAHLGCWQKVDPALCSNVLQHPWTEECMWPQGVLVKHSKNVYKAVGHYNVAIPSDVSHFRFHFFFSKPLRILNILLLLEGAVIVYQLYSLMSSEKWHQTISLALILFSNYYAFFKLLRDRLVLGKAYSYSASPQRDLDHRFS

SEQ ID NO: 91737 - protein, 193 aa, Homo sapiens
  Payload ID: 18367
  Gene Name: transmembrane protein 39B
  ENSP ID: ENSP00000390889
MGGRRGPNRTSYCRNPLCEPGSSGGSSGSHTSSASVTSVRSRTRSSSGTGLSSPPLATQTVVPLQHCKIPELPVQASILFELQLFFCQLIALFVHYINIYKTVWWYPPSHPPSHTSLVWDVHSVPAAELRPPQDKPLQPHGLHGAPGGGQWPGKEPGLPPDTAGDVEAAHKTAVWPGRHAHPCLLPVTQPHPQ

SEQ ID NO: 91738 - protein, 192 aa, Homo sapiens
  Payload ID: 18367
  Gene Name: transmembrane protein 39B
  ENSP ID: ENSP00000414616
MGGRRGPNRTSYCRNPLCEPGSSGGSSGSHTSSASVTSVRSRTRSSSGTGLSSPPLATQTVVPLQHCKIPELPVQASILFELQLFFCQLIALFVHYINIYKTVWWYPPSHPPSHTSLASQRGKVSLFRSILLFLTRFTVLTATGWSLCRSLIHLFRTYSFLNLLFLCYPFGMYIPFLQLNCDLRKTSLFNHM

SEQ ID NO: 91739 - protein, 233 aa, Homo sapiens
  Payload ID: 18368
  Gene Name: transmembrane protein 40
  Uniprot ID: Q8WWA1
  ENSP ID: ENSP00000264728
METSASSSQPQDNSQVHRETEDVDYGETDFHKQDGKAGLFSQEQYERNKSSSSSSSSSSSSSSSSSSSSSESNDEDQQPRATGKHRRSLGAGYPHGNGSPGPGHGEPDVLKDELQLYGDAPGEVVPSGESGLRRRGSDPASGEVEASQLRRLNIKKDDEFFHFVLLCFAIGALLVCYHYYADWFMSLGVGLLTFASLETVGIYFGLVYRIHSVLQGFIPLFQKFRLTGFRKTD

SEQ ID NO: 91740 - protein, 233 aa, Homo sapiens; identical to SEQ ID NO: 91739
  Payload ID: 18368
  Gene Name: transmembrane protein 40
  Uniprot ID: Q8WWA1
  ENSP ID: ENSP00000322837

SEQ ID NO: 91741 - protein, 97 aa, Homo sapiens
  Payload ID: 18368
  Gene Name: transmembrane protein 40
  ENSP ID: ENSP00000392140
LHPGPGHGEPDVLKDELQLYGDEFFHFVLLCFAIGALLVCYHYYADWFMSLGVGLLTFASLETVGIYFGLVYRIHSVLQGFIPLFQKFRLTGFRKTD

SEQ ID NO: 91742 - protein, 157 aa, Homo sapiens
  Payload ID: 18368
  Gene Name: transmembrane protein 40
  Uniprot ID: Q8WWA1
  ENSP ID: ENSP00000396895
METSASSSQPQDNSQVHRETEDVDCPGHGEPDVLKDELQLYGDAPGEVVPSGESGLRRRGSDPASGEVEASQLRRLNIKKDDEFFHFVLLCFAIGALLVCYHYYADWFMSLGVGLLTFASLETVGIYFGLVYRIHSVLQGFIPLFQKFRLTGFRKTD

SEQ ID NO: 91743 - protein, 203 aa, Homo sapiens
  Payload ID: 18368
  Gene Name: transmembrane protein 40
  Uniprot ID: Q8WWA1
  ENSP ID: ENSP00000405740
METSASSSQPQDNSQVHRETEDVDYGETDFHKQDGKAGLFSQEQYERNKSSSSSSSSSSSSSSSSSSSSSGPGHGEPDVLKDELQLYGDAPGEVVPSGESGLRRRGSDPASGEVEASQLRRLNIKKDDEFFHFVLLCFAIGALLVCYHYYADWFMSLGVGLLTFASLETVGIYFGLVYRIHSVLQGFIPLFQKFRLTGFRKTD

SEQ ID NO: 91744 - protein, 92 aa, Homo sapiens
  Payload ID: 18369
  Gene Name: transmembrane protein 41A
  ENSP ID: ENSP00000296254
MRPLLGLLLVFAGCTFALYLLSTRLPRGRRLGSTEEAGGRSLWFPSDLAELRELSEVLREYRKEHQAYVFLLFCGAYLYKQGFAIPGSSFLV

SEQ ID NO: 91745 - protein, 99 aa, Homo sapiens
  Payload ID: 18369
  Gene Name: transmembrane protein 41A
  ENSP ID: ENSP00000371662
MRPLLGLLLVFAGCTFALYLLSTRLPRGRRLGSTEEAGGRSLWFPSDLAELRELSEVLREYRKEHQAYVFLLFCGAYLYKQGFAIPGSSFLGTYDGGPA

SEQ ID NO: 91746 - protein, 264 aa, Homo sapiens
  Payload ID: 18369
  Gene Name: transmembrane protein 41A
  Uniprot ID: Q96HV5
  ENSP ID: ENSP00000406885
MRPLLGLLLVFAGCTFALYLLSTRLPRGRRLGSTEEAGGRSLWFPSDLAELRELSEVLREYRKEHQAYVFLLFCGAYLYKQGFAIPGSSFLNVLAGALFGPWLGLLLCCVLTSVGATCCYLLSSIFGKQLVVSYFPDKVALLQRKVEENRNSLFFFLLFLRLFPMTPNWFLNLSAPILNIPIVQFFFSVLIGLIPYNFICVQTGSILSTLTSLDALFSWDTVFKLLAIAMVALIPGTLIKKFSQKHLQLNETSTANHIHSRKDT

SEQ ID NO: 91747 - protein, 291 aa, Homo sapiens
  Payload ID: 18370
  Gene Name: transmembrane protein 41B
  Uniprot ID: Q5BJD5
  ENSP ID: ENSP00000299596
MAKGRVAERSQLGAHHTTPVGDGAAGTRGLAAPGSRDHQKEKSWVEAGSARMSLLILVSIFLSAAFVMFLVYKNFPQLSEEERVNMKVPRDMDDAKALGKVLSKYKDTFYVQVLVAYFATYIFLQTFAIPGSIFLSILSGFLYPFPLALFLVCLCSGLGASFCYMLSYLVGRPVVYKYLTEKAVKWSQQVERHREHLINYIIFLRITPFLPNWFINITSPVINVPLKVFFIGTFLGVAPPSFVAIKAGTTLYQLTTAGEAVSWNSIFILMILAVLSILPAIFQKKLKQKFE

SEQ ID NO: 91748 - protein, 192 aa, Homo sapiens
  Payload ID: 18370
  Gene Name: transmembrane protein 41B
  Uniprot ID: Q5BJD5
  ENSP ID: ENSP00000431934
MAKGRVAERSQLGAHHTTPVGDGAAGTRGLAAPGSRDHQKEKSWVEAGSARMSLLILVSIFLSAAFVMFLVYKNFPQLSEEERVNMKVPRDMDDAKALGKVLSKYKDTFYVQVLVAYFATYIFYQLANICYSRLYISQYTLRVSLSLSTSLISCLFVFWTWCLFLLYAFLFSWETSCIQIPNRESSKMVTAG

SEQ ID NO: 91749 - protein, 291 aa, Homo sapiens; identical to SEQ ID NO: 91747
  Payload ID: 18370
  Gene Name: transmembrane protein 41B
  Uniprot ID: Q5BJD5
  ENSP ID: ENSP00000433126

SEQ ID NO: 91750 - protein, 196 aa, Homo sapiens
  Payload ID: 18370
  Gene Name: transmembrane protein 41B
  ENSP ID: ENSP00000435685
MAKGRVAERSQLGAHHTTPVGDGAAGTRGLAAPGSRDHQKEKSWVEAGSARMSLLILVSIFLSAAFVMFLVYKNFPQLSEEERVNMKVPRDMDDAKALGKVLSKYKDTFYVQVLVAYFATYIFLQTFAIPGSIFLSILSGFLYPFPLALFLVCLCSGLGASFCYMLSYLVGRPVVYKYLTEKAVKWSQQVSHLLLL

SEQ ID NO: 91751 - protein, 127 aa, Homo sapiens
  Payload ID: 18370
  Gene Name: transmembrane protein 41B
  Uniprot ID: Q5BJD5
  ENSP ID: ENSP00000436480
MAKGRVAERSQLGAHHTTPVGDGAAGTRGLAAPGSRDHQKEKSWVEAGSARMSLLILVSIFLSAAFVMFLVYKNFPQLSEEERVNMKVPRDMDDAKALGKVLSKYKDTFYVQVLVAYFATYILYPFN

SEQ ID NO: 91752 - protein, 291 aa, Homo sapiens; identical to SEQ ID NO: 91747
  Payload ID: 18370
  Gene Name: transmembrane protein 41B
  Uniprot ID: Q5BJD5
  ENSP ID: ENSP00000480141

SEQ ID NO: 91753 - protein, 159 aa, Homo sapiens
  Payload ID: 18371
  Gene Name: transmembrane protein 42
  Uniprot ID: Q69YG0
  ENSP ID: ENSP00000306564
MAERPGPPGGAVSATAYPDTPAEFPPHLQAGAMRRRFWGVFNCLCAGAFGALAAASAKLAFGSEVSMGLCVLGIIVMASTNSLMWTFFSRGLSFSMSSAIASVTVTFSNILSSAFLGYVLYGECQEVLWWGGVFLILCGLTLIHRKLPPTWKPLPHKQQ

SEQ ID NO: 91754 - protein, 159 aa, Homo sapiens; identical to SEQ ID NO: 91753
  Payload ID: 18371
  Gene Name: Transmembrane protein 42
  ENSP ID: ENSP00000486141

SEQ ID NO: 91755 - protein, 400 aa, Homo sapiens
  Payload ID: 18372
  Gene Name: transmembrane protein 43
  Uniprot ID: Q9BTV4
  ENSP ID: ENSP00000303992
MAANYSSTSTRREHVKVKTSSQPGFLERLSETSGGMFVGLMAFLLSFYLIFTNEGRALKTATSLAEGLSLVVSPDSIHSVAPENEGRLVHIIGALRTSKLLSDPNYGVHLPAVKLRRHVEMYQWVETEESREYTEDGQVKKETRYSYNTEWRSEIINSKNFDREIGHKNPSAMAVESFMATAPFVQIGRFFLSSGLIDKVDNFKSLSLSKLEDPHVDIIRRGDFFYHSENPKYPEVGDLRVSFSYAGLSGDDPDLGPAHVVTVIARQRGDQLVPFSTKSGDTLLLLHHGDFSAEEVFHRELRSNSMKTWGLRAAGWMAMFMGLNLMTRILYTLVDWFPVFRDLVNIGLKAFAFCVATSLTLLTVAAGWLFYRPLWALLIAGLALVPILVARTRVPAKKLE

SEQ ID NO: 91756 - protein, 66 aa, Homo sapiens
  Payload ID: 18372
  Gene Name: transmembrane protein 43
  ENSP ID: ENSP00000395617
MAANPKPGSCQDTHPLTNDSAHCGIVINGILLSHEKEQIPDKHHNMNELQKQCSESKKLGRKELVP

SEQ ID NO: 91757 - protein, 113 aa, Homo sapiens
  Payload ID: 18373
  Gene Name: transmembrane protein 44
  ENSP ID: ENSP00000328300
MFILFPVCGSKFKSNSDREARERKRRRQLRASVFALALPLSLGPCWALWVAVPKASATIRGPQRRLLASLLQENTEILGYLLGSVAAFGSWASRIPPLSRIVRPGVGMGLWVT

SEQ ID NO: 91758 - protein, 428 aa, Homo sapiens
  Payload ID: 18373
  Gene Name: transmembrane protein 44
  Uniprot ID: Q2T9K0
  ENSP ID: ENSP00000333355
MGEAPSPAPALWDWDYLDRCFARHRVCISFGLWICASSCWIAAHALLLYLRCAQKPRQDQSALCAACCLLTSLCDTVGALLARQLTIQVFTGAYLAAIDLVNFMFILFPVCGSKFKSNSDREARERKRRRQLRASVFALALPLSLGPCWALWVAVPKASATIRGPQRRLLASLLQENTEILGYLLGSVAAFGSWASRIPPLSRICRGKTFPSIHLWTRLLSALAGLLYASAIVAHDQHPEYLLRATPWFLTSLGRAALDLAIIFLSCVMKSKMRQALGFAKEARESPDTQALLTCAEKEEENQENLDWVPLTTLSHCKSLRTMTAISRYMELTIEPVQQAGCSATRLPGDGQTSAGDASLQDPPSYPPVQVIRARVSSGSSSEVSSINSDLEWDPEDVNLEGSKENVELLGSQVHQDSVRTAHLSDDD

SEQ ID NO: 91759 - protein, 396 aa, Homo sapiens
  Payload ID: 18373
  Gene Name: transmembrane protein 44
  Uniprot ID: Q2T9K0
  ENSP ID: ENSP00000371402
MGEAPSPAPALWDWDYLDRCFARHRVCISFGLWICASSCWIAAHALLLYLRCAQKPRQDQSALCAACCLLTSLCDTVGALLARQLTIQVFTGAYLAAIDLVNFMFILFPVCGSKFKSNSDREARERKRRRQLRASVFALALPLSLGPCWALWVAVPKASATIRGPQRRLLASLLQENTEILGYLLGSVAAFGSWASRIPPLSRICRGKTFPSIHLWTRLLSALAGLLYASAIVAHDQHPEYLLRATPWFLTSLGRAALDLAIIFLSCVMKSKMRQALGFAKEARESPDTQALLTCAEKEEENQENLDWVPLTTLSHCKSLRTMTAISRYMELTIEPVQQAAVPPGCQVTGRRAPEMRPCRTPRRTLPFRSSGPGCLPAAPLRSPPSTPTWSGTLKM

SEQ ID NO: 91760 - protein, 475 aa, Homo sapiens
  Payload ID: 18373
  Gene Name: transmembrane protein 44
  Uniprot ID: Q2T9K0
  ENSP ID: ENSP00000376227
MGEAPSPAPALWDWDYLDRCFARHRVCISFGLWICASSCWIAAHALLLYLRCAQKPRQDQSALCAACCLLTSLCDTVGALLARQLTIQVFTGAYLAAIDLVNFMFILFPVCGSKFKSNSDREARERKRRRQLRASVFALALPLSLGPCWALWVAVPKASATIRGPQRRLLASLLQENTEILGYLLGSVAAFGSWASRIPPLSRIAPPPTLGITTQHEIWRGQMSKPSQSPSRSPSGHWRAAAQRQVLGTEMCRGKTFPSIHLWTRLLSALAGLLYASAIVAHDQHPEYLLRATPWFLTSLGRAALDLAIIFLSCVMKSKMRQALGFAKEARESPDTQALLTCAEKEEENQENLDWVPLTTLSHCKSLRTMTAISRYMELTIEPVQQAGCSATRLPGDGQTSAGDASLQDPPSYPPVQVIRARVSSGSSSEVSSINSDLEWDPEDVNLEGSKENVELLGSQVHQDSVRTAHLSDDD

SEQ ID NO: 91761 - protein, 121 aa, Homo sapiens
  Payload ID: 18373
  Gene Name: transmembrane protein 44
  ENSP ID: ENSP00000390186
MGEAPSPAPALWDWDYLDRCFARHRVCISFGLWICASSCWIAAHALLLYLRCAQKPRQDQSALCAACCLLTSLCDTVGALLARQLTIQSVDPNSSLIQIGKPERGRGGGSSGPVCLPWPCR

SEQ ID NO: 91762 - protein, 119 aa, Homo sapiens
  Payload ID: 18373
  Gene Name: transmembrane protein 44
  ENSP ID: ENSP00000403053
MKSKMRQALGFAKEARESPDTQALLTCAEKEEENQENLDWVPLTTLSHCKSLRTMTAISRYMELTIEPVQQAAVPPGCQVTGRRAPEMRPCRTPRRTLPFRSSGPGCLPAAPLSGTLKM

SEQ ID NO: 91763 - protein, 197 aa, Homo sapiens
  Payload ID: 18373
  Gene Name: transmembrane protein 44
  ENSP ID: ENSP00000409963
LRATPWFLTSLGRAALDLAIIFLSCVMKSKMRQALGFAKEARESPDTQALLTCAEKEEENQENLDWVPLTTLSHCKSLRTMTAISRYMELTIEPVQQAGCSATRLPGDGQTSAGDASLQDPPSYPPVQVIRARVSSGSSSEVSSINSDLEQKYWEALNSEQWDPEDVNLEGSKENVELLGSQVHQDSVRTAHLSDDD

SEQ ID NO: 91764 - protein, 150 aa, Homo sapiens
  Payload ID: 18373
  Gene Name: transmembrane protein 44
  ENSP ID: ENSP00000414077
MFILFPVCGSKFKSNSDREARERKRRRQLRASVFALALPLSLGPCWALWVAVPKASATIRGPQRRLLASLLQENTEILGYLLGSVAAFGSWASRIPPLSRIMESRCVAQAGVQWRDLGSLQPSPPNFKQFSCLSLPSSWDYSCQWSCRSC

SEQ ID NO: 91765 - protein, 261 aa, Homo sapiens
  Payload ID: 18373
  Gene Name: transmembrane protein 44
  ENSP ID: ENSP00000414333
NFMFILFPVCGSKFKSNSDREARERKRRRQLRASVFALALPLSLGPCWALWVAVPKASATIRGPQRRLLASLLQENTEILGYLLGSVAAFGSWASRIPPLSRISKMRQALGFAKEARESPDTQALLTCAEKEEENQENLDWVPLTTLSHCKSLRTMTAISRYMELTIEPVQQAGCSATRLPGDGQTSAGDASLQDPPSYPPVQVIRARVSSGSSSEVSSINSDLEWDPEDVNLEGSKENVELLGSQVHQDSVRTAHLSDDD

SEQ ID NO: 91766 - protein, 438 aa, Homo sapiens
  Payload ID: 18373
  Gene Name: transmembrane protein 44
  Uniprot ID: Q2T9K0
  ENSP ID: ENSP00000418674
MGEAPSPAPALWDWDYLDRCFARHRVCISFGLWICASSCWIAAHALLLYLRCAQKPRQDQSALCAACCLLTSLCDTVGALLARQLTIQVFTGAYLAAIDLVNFMFILFPVCGSKFKSNSDREARERKRRRQLRASVFALALPLSLGPCWALWVAVPKASATIRGPQRRLLASLLQENTEILGYLLGSVAAFGSWASRIPPLSRICRGKTFPSIHLWTRLLSALAGLLYASAIVAHDQHPEYLLRATPWFLTSLGRAALDLAIIFLSCVMKSKMRQALGFAKEARESPDTQALLTCAEKEEENQENLDWVPLTTLSHCKSLRTMTAISRYMELTIEPVQQAGCSATRLPGDGQTSAGDASLQDPPSYPPVQVIRARVSSGSSSEVSSINSDLEKYWEALNSEQWDPEDVNLEGSKENVELLGSQVHQDSVRTAHLSDDD

SEQ ID NO: 91767 - protein, 275 aa, Homo sapiens
  Payload ID: 18374
  Gene Name: transmembrane protein 45A
  Uniprot ID: Q9NWC5
  ENSP ID: ENSP00000319009
MGNFRGHALPGTFFFIIGLWWCTKSILKYICKKQKRTCYLGSKTLFYRLEILEGITIVGMALTGMAGEQFIPGGPHLMLYDYKQGHWNQLLGWHHFTMYFFFGLLGVADILCFTISSLPVSLTKLMLSNALFVEAFIFYNHTHGREMLDIFVHQLLVLVVFLTGLVAFLEFLVRNNVLLELLRSSLILLQGSWFFQIGFVLYPPSGGPAWDLMDHENILFLTICFCWHYAVTIVIVGMNYAFITWLVKSRLKRLCSSEVGLLKNAEREQESEEEM

SEQ ID NO: 91768 - protein, 291 aa, Homo sapiens
  Payload ID: 18374
  Gene Name: transmembrane protein 45A
  ENSP ID: ENSP00000385089
MTNDSEGKMGFKHPKIMGNFRGHALPGTFFFIIGLWWCTKSILKYICKKQKRTCYLGSKTLFYRLEILEGITIVGMALTGMAGEQFIPGGPHLMLYDYKQGHWNQLLGWHHFTMYFFFGLLGVADILCFTISSLPVSLTKLMLSNALFVEAFIFYNHTHGREMLDIFVHQLLVLVVFLTGLVAFLEFLVRNNVLLELLRSSLILLQGSWFFQIGFVLYPPSGGPAWDLMDHENILFLTICFCWHYAVTIVIVGMNYAFITWLVKSRLKRLCSSEVGLLKNAEREQESEEEM

SEQ ID NO: 91769 - protein, 191 aa, Homo sapiens
  Payload ID: 18374
  Gene Name: transmembrane protein 45A
  ENSP ID: ENSP00000405597
MTNDSEGKMGFKHPKIMGNFRGHALPGTFFFIIGLWWCTKSILKYICKKQKRTCYLGSKTLFYRLEILEGITIVGMALTGMAGEQFIPGGPHLMLYDYKQGHWNQLLGWHHFTMYFFFGLLGVADILCFTISSLPVSLTKLMLSNALFVEAFIFYNHTHGREMLDIFVHQLLVLVVFLTGLVAFLEFLVRN

SEQ ID NO: 91770 - protein, 275 aa, Homo sapiens
  Payload ID: 18375
  Gene Name: transmembrane protein 45B
  Uniprot ID: Q96B21
  ENSP ID: ENSP00000281441
MANFKGHALPGSFFLIIGLCWSVKYPLKYFSHTRKNSPLHYYQRLEIVEAAIRTLFSVTGILAEQFVPDGPHLHLYHENHWIKLMNWQHSTMYLFFAVSGIVDMLTYLVSHVPLGVDRLVMAVAVFMEGFLFYYHVHNRPPLDQHIHSLLLYALFGGCVSISLEVIFRDHIVLELFRTSLIILQGTWFWQIGFVLFPPFGTPEWDQKDDANLMFITMCFCWHYLAALSIVAVNYSLVYCLLTRMKRHGRGEIIGIQKLNSDDTYQTALLSGSDEE

SEQ ID NO: 91771 - protein, 275 aa, Homo sapiens; identical to SEQ ID NO: 91770
  Payload ID: 18375
  Gene Name: transmembrane protein 45B
  Uniprot ID: Q96B21
  ENSP ID: ENSP00000436293

SEQ ID NO: 91772 - protein, 181 aa, Homo sapiens
  Payload ID: 18376
  Gene Name: transmembrane protein 47
  Uniprot ID: Q9BQJ4
  ENSP ID: ENSP00000275954
MASAGSGMEEVRVSVLTPLKLVGLVCIFLALCLDLGAVLSPAWVTADHQYYLSLWESCRKPASLDIWHCESTLSSDWQIATLALLLGGAAIILIAFLVGLISICVGSRRRFYRPVAVMLFAAVVLQVCSLVLYPIKFIETVSLKIYHEFNWGYGLAWGATIFSFGGAILYCLNPKNYEDYY

SEQ ID NO: 91773 - protein, 443 aa, Homo sapiens
  Payload ID: 18377
  Gene Name: transmembrane protein 5
  Uniprot ID: Q9Y2B1
  ENSP ID: ENSP00000261234
MRLTRKRLCSFLIALYCLFSLYAAYHVFFGRRRQAPAGSPRGLRKGAAPARERRGREQSTLESEEWNPWEGDEKNEQQHRFKTSLQILDKSTKGKTDLSVQIWGKAAIGLYLWEHIFEGLLDPSDVTAQWREGKSIVGRTQYSFITGPAVIPGYFSVDVNNVVLILNGREKAKIFYATQWLLYAQNLVQIQKLQHLAVVLLGNEHCDNEWINPFLKRNGGFVELLFIIYDSPWINDVDVFQWPLGVATYRNFPVVEASWSMLHDERPYLCNFLGTIYENSSRQALMNILKKDGNDKLCWVSAREHWQPQETNESLKNYQDALLQSDLTLCPVGVNTECYRIYEACSYGSIPVVEDVMTAGNCGNTSVHHGAPLQLLKSMGAPFIFIKNWKELPAVLEKEKTIILQEKIERRKMLLQWYQHFKTELKMKFTNILESSFLMNNKS

SEQ ID NO: 91774 - protein, 183 aa, Homo sapiens
  Payload ID: 18377
  Gene Name: transmembrane protein 5
  ENSP ID: ENSP00000440280
MLHDERPYLCNFLGTIYENSSRQALMNILKKDGNDKLCWVSAREHWQPQETNESLKNYQDALLQSDLTLCPVGVNTECYRIYEACSYGSIPVVEDVMTAGNCGNTSVHHGAPLQLLKSMGAPFIFIKNWKELPAVLEKEKTIILQEKIERRKMLLQWYQHFKTELKMKFTNILESSFLMNNKS

SEQ ID NO: 91775 - protein, 120 aa, Homo sapiens
  Payload ID: 18377
  Gene Name: transmembrane protein 5
  ENSP ID: ENSP00000440845
MRLTRKRLCSFLIALYCLFSLYAAYHVFFGRRRQAPAGSPRGLRKGAAPARERRGREQSTLESEEWNPWEGDEKNEQQHRFKTSLQILDKSTKGKTDLSVQIWGKAAIVQAGSVSAHKTF

SEQ ID NO: 91776 - protein, 157 aa, Homo sapiens
  Payload ID: 18378
  Gene Name: transmembrane protein 50A
  Uniprot ID: O95807
  ENSP ID: ENSP00000363478
MSGFLEGLRCSECIDWGEKRNTIASIAAGVLFFTGWWIIIDAAVIYPTMKDFNHSYHACGVIATIAFLMINAVSNGQVRGDSYSEGCLGQTGARIWLFVGFMLAFGSLIASMWILFGGYVAKEKDIVYPGIAVFFQNAFIFFGGLVFKFGRTEDLWQ

SEQ ID NO: 91777 - protein, 81 aa, Homo sapiens
  Payload ID: 18379
  Gene Name: transmembrane protein 50B
  ENSP ID: ENSP00000387622
MAGFLDNFRWPECECIDWSERRNAVASVVAGILFFTGWWIMIDAAVVYPKPEQLNHAFHTCGVFSTLAFFMINAVSNAQVR

SEQ ID NO: 91778 - protein, 158 aa, Homo sapiens
  Payload ID: 18379
  Gene Name: transmembrane protein 50B
  Uniprot ID: P56557
  ENSP ID: ENSP00000397773
MAGFLDNFRWPECECIDWSERRNAVASVVAGILFFTGWWIMIDAAVVYPKPEQLNHAFHTCGVFSTLAFFMINAVSNAQVRGDSYESGCLGRTGARVWLFIGFMLMFGSLIASMWILFGAYVTQNTDVYPGLAVFFQNALIFFSTLIYKFGRTEELWT

SEQ ID NO: 91779 - protein, 44 aa, Homo sapiens
  Payload ID: 18379
  Gene Name: transmembrane protein 50B
  ENSP ID: ENSP00000398859
MAGFLDNFRWPECECIDWSERRNAVASVVAGILVLEFGFSLVSC

SEQ ID NO: 91780 - protein, 151 aa, Homo sapiens
  Payload ID: 18379
  Gene Name: transmembrane protein 50B
  ENSP ID: ENSP00000409942
MAGFLDNFRWPECECIDWSERRNAVASVVAGILFFTGWWIMIDAAVVYPKPEQLNHAFHTCGVFSTLAFFMINAVSNAQVRGDSYESGCLGRTGARVWLFIGFMLMFGSLIASMWILFGAYVTQMLAIGGKGASYCFLSSFDVARTSNYFD

SEQ ID NO: 91781 - protein, 158 aa, Homo sapiens; identical to SEQ ID NO: 91778
  Payload ID: 18379
  Gene Name: transmembrane protein 50B
  Uniprot ID: P56557
  ENSP ID: ENSP00000439768

SEQ ID NO: 91782 - protein, 158 aa, Homo sapiens; identical to SEQ ID NO: 91778
  Payload ID: 18379
  Gene Name: transmembrane protein 50B
  Uniprot ID: P56557
  ENSP ID: ENSP00000458900

SEQ ID NO: 91783 - protein, 81 aa, Homo sapiens; identical to SEQ ID NO: 91777
  Payload ID: 18379
  Gene Name: transmembrane protein 50B
  ENSP ID: ENSP00000459785

SEQ ID NO: 91784 - protein, 158 aa, Homo sapiens; identical to SEQ ID NO: 91778
  Payload ID: 18379
  Gene Name: transmembrane protein 50B
  Uniprot ID: P56557
  ENSP ID: ENSP00000460121

SEQ ID NO: 91785 - protein, 151 aa, Homo sapiens; identical to SEQ ID NO: 91780
  Payload ID: 18379
  Gene Name: transmembrane protein 50B
  ENSP ID: ENSP00000461292

SEQ ID NO: 91786 - protein, 44 aa, Homo sapiens; identical to SEQ ID NO: 91779
  Payload ID: 18379
  Gene Name: transmembrane protein 50B
  ENSP ID: ENSP00000461339

SEQ ID NO: 91787 - protein, 253 aa, Homo sapiens
  Payload ID: 18380
  Gene Name: transmembrane protein 51
  Uniprot ID: Q9NW97
  ENSP ID: ENSP00000365176
MMAQSKANGSHYALTAIGLGMLVLGVIMAMWNLVPGFSAAEKPTAQGSNKTEVGGGILKSKTFSVAYVLVGAGVMLLLLSICLSIRDKRKQRQGEDLAHVQHPTGAGPHAQEEDSQEEEEEDEEAASRYYVPSYEEVMNTNYSEARGEEQNPRLSISLPSYESLTGLDETTPTSTRADVEASPGNPPDRQNSKLAKRLKPLKVRRIKSEKLHLKDFRINLPDKNVPPPSIEPLTPPPQYDEVQEKAPDTRPPD

SEQ ID NO: 91788 - protein, 253 aa, Homo sapiens; identical to SEQ ID NO: 91787
  Payload ID: 18380
  Gene Name: transmembrane protein 51
  Uniprot ID: Q9NW97
  ENSP ID: ENSP00000365182

SEQ ID NO: 91789 - protein, 253 aa, Homo sapiens; identical to SEQ ID NO: 91787
  Payload ID: 18380
  Gene Name: transmembrane protein 51
  Uniprot ID: Q9NW97
  ENSP ID: ENSP00000383600

SEQ ID NO: 91790 - protein, 253 aa, Homo sapiens; identical to SEQ ID NO: 91787
  Payload ID: 18380
  Gene Name: transmembrane protein 51
  Uniprot ID: Q9NW97
  ENSP ID: ENSP00000394899

SEQ ID NO: 91791 - protein, 135 aa, Homo sapiens
  Payload ID: 18380
  Gene Name: transmembrane protein 51
  ENSP ID: ENSP00000409665
MMAQSKANGSHYALTAIGLGMLVLGVIMAMWNLVPGFSAAEKPTAQGSNKTEVGGGILKSKTFSVAYVLVGAGVMLLLLSICLSIRDKRKQRQGEDLAHVQHPTGAGPHAQEEDRRKKRRMRRLPQGTMFPATRK

SEQ ID NO: 91792 - protein, 121 aa, Homo sapiens
  Payload ID: 18380
  Gene Name: transmembrane protein 51
  ENSP ID: ENSP00000412298
MMAQSKANGSHYALTAIGLGMLVLGVIMAMWNLVPGFSAAEKPTAQGSNKTEVGGGILKSKTFSVAYVLVGAGVMLLLLSICLSIRDKRKQRQGEDLAHVQHPTGAGPHAQEEDSQEEEEE

SEQ ID NO: 91793 - protein, 209 aa, Homo sapiens
  Payload ID: 18381
  Gene Name: transmembrane protein 52
  Uniprot ID: Q8NDY8
  ENSP ID: ENSP00000311122
MARGPLAARGLRLLLPLLPLLPLLPLPQVALGFADGSCDPSDQCPPQARWSSLWHVGLILLAVLLLLLCGVTAGCVRFCCLRKQAQAQPHLPPARQPCDVAVIPMDSDSPVHSTVTSYSSVQYPLGMRLPLPFGELDLDSMAPPAYSLYTPEPPPSYDEAVKMAKPREEGPALSQKPSPLLGASGLETTPVPQESGPNTQLPPCSPGAP

SEQ ID NO: 91794 - protein, 124 aa, Homo sapiens
  Payload ID: 18381
  Gene Name: transmembrane protein 52
  ENSP ID: ENSP00000367861
GGRWPPADCGCCCRSCRSCRSCRCRRWVGRRSLSVRPPRGGSLLGPRPSRAHPCPHRWRWASRTAAATPRTSARPRPAGAACGTWACTPRSLHPPTMKLSRWPSPERKDQHSPRNPALSLGPRA

SEQ ID NO: 91795 - protein, 194 aa, Homo sapiens
  Payload ID: 18381
  Gene Name: transmembrane protein 52
  Uniprot ID: Q8NDY8
  ENSP ID: ENSP00000367865
MERHCLLFILLTCLRWLCHDIPQGAGARWPRVSPVVEPCSPRLILLAVLLLLLCGVTAGCVRFCCLRKQAQAQPHLPPARQPCDVAVIPMDSDSPVHSTVTSYSSVQYPLGMRLPLPFGELDLDSMAPPAYSLYTPEPPPSYDEAVKMAKPREEGPALSQKPSPLLGASGLETTPVPQESGPNTQLPPCSPGAP

SEQ ID NO: 91796 - protein, 103 aa, Homo sapiens
  Payload ID: 18381
  Gene Name: transmembrane protein 52
  ENSP ID: ENSP00000409669
MARGPLAARGLRLLLPLLPLLPLLPLPQVGRAAFSLGSATAGRVPARTTPLPGSPLSPQVALGFADGSCDPSDQCPPQARWSSLWHVGLILLAVLLLLLCGVT

SEQ ID NO: 91797 - protein, 43 aa, Homo sapiens
  Payload ID: 18381
  Gene Name: transmembrane protein 52
  ENSP ID: ENSP00000473350
MARGPLAARGLRLLLPLLPLLPLLPLPQVALGFADGSCDPSDQ

SEQ ID NO: 91798 - protein, 163 aa, Homo sapiens
  Payload ID: 18382
  Gene Name: transmembrane protein 52B
  Uniprot ID: Q4KMG9
  ENSP ID: ENSP00000298530
MSWRPQPCCISSCCLTTDWVHLWYIWLLVVIGALLLLCGLTSLCFRCCCLSRQQNGEDGGPPPCEVTVIAFDHDSTLQSTITSLQSVFGPAARRILAVAHSHSSLGQLPSSLDTLPGYEEALHMSRFTVAMCGQKAPDLPPVPEEKQLPPTEKESTRIVDSWN

SEQ ID NO: 91799 - protein, 183 aa, Homo sapiens
  Payload ID: 18382
  Gene Name: transmembrane protein 52B
  Uniprot ID: Q4KMG9
  ENSP ID: ENSP00000371348
MGVRVHVVAASALLYFILLSGTRCEENCGNPEHCLTTDWVHLWYIWLLVVIGALLLLCGLTSLCFRCCCLSRQQNGEDGGPPPCEVTVIAFDHDSTLQSTITSLQSVFGPAARRILAVAHSHSSLGQLPSSLDTLPGYEEALHMSRFTVAMCGQKAPDLPPVPEEKQLPPTEKESTRIVDSWN

SEQ ID NO: 91800 - protein, 90 aa, Homo sapiens
  Payload ID: 18382
  Gene Name: transmembrane protein 52B
  ENSP ID: ENSP00000445582
MGVRVHVVAASALLYFILLSGTRCEENCGNPEHCLTTDWVHLWYIWLLVVIGALLLLCGLTSLCFRCCCLSRQQNGEDGGPPPCEVTVIA

SEQ ID NO: 91801 - protein, 247 aa, Homo sapiens
  Payload ID: 18383
  Gene Name: transmembrane protein 53
  ENSP ID: ENSP00000361309
MASAELDYTIEIPDQPCWSQKNSPSPGGKEAETRQPVVILLGWGGCKDKNLAKYSAIYHKRKLLELLFDYEIEKEPLLFHVFSNGGVMLYRYVLELLQTRRFCRLRVVGTIFDSAPGDSNLVGALRALAAILERRAAMLRLLLLVAFALVVVLFHVLLAPITALFHTHFYDRLQDAGSRWPELYLYSRADEVVLARDIERMVEARLARRVLARSVDFVSSAHVSHLRDYPTYYTSLCVDFMRNCVRC

SEQ ID NO: 91802 - protein, 277 aa, Homo sapiens
  Payload ID: 18383
  Gene Name: transmembrane protein 53
  Uniprot ID: Q6P2H8
  ENSP ID: ENSP00000361311
MASAELDYTIEIPDQPCWSQKNSPSPGGKEAETRQPVVILLGWGGCKDKNLAKYSAIYHKRGCIVIRYTAPWHMVFFSESLGIPSLRVLAQKLLELLFDYEIEKEPLLFHVFSNGGVMLYRYVLELLQTRRFCRLRVVGTIFDSAPGDSNLVGALRALAAILERRAAMLRLLLLVAFALVVVLFHVLLAPITALFHTHFYDRLQDAGSRWPELYLYSRADEVVLARDIERMVEARLARRVLARSVDFVSSAHVSHLRDYPTYYTSLCVDFMRNCVRC

SEQ ID NO: 91803 - protein, 201 aa, Homo sapiens
  Payload ID: 18383
  Gene Name: transmembrane protein 53
  ENSP ID: ENSP00000361316
MASAELDYTIEIPDQPCWSQKNSPSPGGKEAETRQPVVILLGWGGCKDKNLAKYSAIYHKRGCIVIRYTAPWHMVFFSESLGIPSLRVLAQKLLELLFDYEIEKEPLLFHVFSNGGVMLYRYVLELLQTRRFCRLRVVGTIFDSAPGDSNLVFCMASCLLLSPLLVDGISAGTEGQLTLRPDWAAQVLTRLGCHLQCITRS

SEQ ID NO: 91804 - protein, 111 aa, Homo sapiens
  Payload ID: 18383
  Gene Name: transmembrane protein 53
  ENSP ID: ENSP00000361317
MASAELDYTIEIPDQPCWSQKNSPSPGGKEAETRQPVVILLGWGGCKDKNLAKYSAIYHKRVFCMASCLLLSPLLVDGISAGTEGQLTLRPDWAAQVLTRLGCHLQCITRS

SEQ ID NO: 91805 - protein, 78 aa, Homo sapiens
  Payload ID: 18383
  Gene Name: transmembrane protein 53
  ENSP ID: ENSP00000361318
MASAELDYTIEIPDQPCWSQSLLHGLLLAAFTIAGGWHLCWDRGATHTPARLGSTGANAAWLSPSMHHPKLRAPLRHS

SEQ ID NO: 91806 - protein, 134 aa, Homo sapiens
  Payload ID: 18383
  Gene Name: transmembrane protein 53
  ENSP ID: ENSP00000391576
MASAELDYTIEIPDQPCWSQKNSPSPGGKEAETRQPVVILLGWGGCKDKNLAKYSAIYHKRLLELLFDYEIEKEPLLFHVFSNGGVMLYRYVLELLQTRRFCRLRVVGTIFDSAPGDSNLVGALRALAAILERR

SEQ ID NO: 91807 - protein, 169 aa, Homo sapiens
  Payload ID: 18384
  Gene Name: transmembrane protein 54
  Uniprot ID: Q969K7
  ENSP ID: ENSP00000328630
MCLRLGGLSVGDFRKVLMKTGLVLVVLGHVSFITAALFHGTVLRYVGTPQDAVALQYCVVNILSVTSAIVGKALLAACTFGSSELLALAPDCPFDPTRIYSSSLCLWGIALVLCVAENVFAVRCAQLTHQLLELRPWWGKSSHHMMRENPELVEGRDLLSCTSSEPLTL

SEQ ID NO: 91808 - protein, 222 aa, Homo sapiens
  Payload ID: 18384
  Gene Name: transmembrane protein 54
  Uniprot ID: Q969K7
  ENSP ID: ENSP00000362562
MCLRLGGLSVGDFRKVLMKTGLVLVVLGHVSFITAALFHGTVLRYVGTPQDAVALQYCVVNILSVTSAIVVITSGIAAIVLSRYLPSTPLRWTVFSSSVACALLSLTCALGLLASIAMTFATQGKALLAACTFGSSELLALAPDCPFDPTRIYSSSLCLWGIALVLCVAENVFAVRCAQLTHQLLELRPWWGKSSHHMMRENPELVEGRDLLSCTSSEPLTL

SEQ ID NO: 91809 - protein, 257 aa, Homo sapiens
  Payload ID: 18385
  Gene Name: transmembrane protein 55A
  Uniprot ID: Q8N4L2
  ENSP ID: ENSP00000285419
MAADGVDERSPLLSASHSGNVTPTAPPYLQESSPRAELPPPYTAIASPDASGIPVINCRVCQSLINLDGKLHQHVVKCTVCNEATPIKNPPTGKKYVRCPCNCLLICKDTSRRIGCPRPNCRRIINLGPVMLISEEQPAQPALPIQPEGTRVVCGHCGNTFLWMELRFNTLAKCPHCKKISSVGSALPRRRCCAYITIGMICIFIGVGLTVGTPDFARRFRATYVSWAIAYLLGLICLIRACYWGAIRVSYPEHSFA

SEQ ID NO: 91810 - protein, 250 aa, Homo sapiens
  Payload ID: 18385
  Gene Name: transmembrane protein 55A
  ENSP ID: ENSP00000427974
MAADGVDERSPLLSASHSGNVTPTAPPYLQESSPRVTNIFSAELPPPYTAIASPDASGIPVINCRVCQSLINLDGKLHQHVVKCTVCNEATPIKNPPTGKKYVRCPCNCLLICKDTSRRIGCPRPNCRRIINLGPVMLISEEQPAQPALPIQPEGTRVVCGHCGNTFLWMELRFNTLAKCPHCKKISSVGSALPRRRCCAYITIGMICIFIGVGLTVGTPDFARRFRATYVSWAIAYLLGLICLIRACYW

SEQ ID NO: 91811 - protein, 56 aa, Homo sapiens
  Payload ID: 18385
  Gene Name: transmembrane protein 55A
  ENSP ID: ENSP00000429112
MAADGVDERSPLLSASHSGNVTPTAPPYLQESSPRGLLTVESPELQVPYKRRWSYK

SEQ ID NO: 91812 - protein, 166 aa, Homo sapiens
  Payload ID: 18385
  Gene Name: transmembrane protein 55A
  ENSP ID: ENSP00000429280
MAADGVDERSPLLSASHSGNVTPTAPPYLQESSPRAELPPPYTAIASPDASGIPVINCRVCQSLINLDGKLHQHVVKCTVCNEATPIKNPPTGKKYVRCPCNCLLICKDTSRRIGCPRPNCRRIINLGPVMLISEEQPAQPALPIQPEGTRVVCGHCGNTFLLLSG

SEQ ID NO: 91813 - protein, 57 aa, Homo sapiens
  Payload ID: 18385
  Gene Name: transmembrane protein 55A
  ENSP ID: ENSP00000430707
MAADGVDERSPLLSASHSGNVTPTAPPYLQESSPRVDGTEVQHSGKMPTLQKNLLSG

SEQ ID NO: 91814 - protein, 56 aa, Homo sapiens; identical to SEQ ID NO: 91811
  Payload ID: 18385
  Gene Name: transmembrane protein 55A
  ENSP ID: ENSP00000486788

SEQ ID NO: 91815 - protein, 277 aa, Homo sapiens
  Payload ID: 18386
  Gene Name: transmembrane protein 55B
  Uniprot ID: Q86T03
  ENSP ID: ENSP00000250489
MAADGERSPLLSEPIDGGAGGNGLVGPGGSGAGPGGGLTPSAPPYGAAFPPFPEGHPAVLPGEDPPPYSPLTSPDSGSAPMITCRVCQSLINVEGKMHQHVVKCGVCNEATPIKNAPPGKKYVRCPCNCLLICKVTSQRIACPRPYCKRIINLGPVHPGPLSPEPQPMGVRVICGHCKNTFLWTEFTDRTLARCPHCRKVSSIGRRYPRKRCICCFLLGLLLAVTATGLAFGTWKHARRYGGIYAAWAFVILLAVLCLGRALYWACMKVSHPVQNFS

SEQ ID NO: 91816 - protein, 284 aa, Homo sapiens
  Payload ID: 18386
  Gene Name: transmembrane protein 55B
  Uniprot ID: Q86T03
  ENSP ID: ENSP00000381102
MAADGERSPLLSEPIDGGAGGNGLVGPGGSGAGPGGGLTPSAPPYGAGKHAPPQAFPPFPEGHPAVLPGEDPPPYSPLTSPDSGSAPMITCRVCQSLINVEGKMHQHVVKCGVCNEATPIKNAPPGKKYVRCPCNCLLICKVTSQRIACPRPYCKRIINLGPVHPGPLSPEPQPMGVRVICGHCKNTFLWTEFTDRTLARCPHCRKVSSIGRRYPRKRCICCFLLGLLLAVTATGLAFGTWKHARRYGGIYAAWAFVILLAVLCLGRALYWACMKVSHPVQNFS

SEQ ID NO: 91817 - protein, 112 aa, Homo sapiens
  Payload ID: 18386
  Gene Name: transmembrane protein 55B
  ENSP ID: ENSP00000451014
  MOD_RES (1)..(1): Any amino acid
XSPEPQPMGVRVICGHCKNTFLWTEFTDRTLARCPHCRKVSSIGRRYPRKRCICCFLLGLLLAVTATGLAFGTWKHARRYGGIYAAWAFVILLAVLCLGRALYWACMKGCCV

SEQ ID NO: 91818 - protein, 43 aa, Homo sapiens
  Payload ID: 18386
  Gene Name: transmembrane protein 55B
  ENSP ID: ENSP00000452508
MITCRVCQSLINVEGKMHQHVVKCGVCNEATPIKNAPPGKKYV

SEQ ID NO: 91819 - protein, 263 aa, Homo sapiens
  Payload ID: 18387
  Gene Name: transmembrane protein 56
  Uniprot ID: Q96MV1
  ENSP ID: ENSP00000359222
MEINTKLLISVTCISFFTFQLLFYFVSYWFSAKVSPGFNSLSFKKKIEWNSRVVSTCHSLVVGIFGLYIFLFDEATKADPLWGGPSLANVNIAIASGYLISDLSIIILYWKVIGDKFFIMHHCASLYAYYLVLKNGVLAYIGNFRLLAELSSPFVNQRWFFEALKYPKFSKAIVINGILMTVVFFIVRIASMLPHYGFMYSVYGTEPYIRLGVLIQLSWVISCVVLDVMNVMWMIKISKGCIKVISHIRQEKAKNSLQNGKLD

SEQ ID NO: 91820 - protein, 154 aa, Homo sapiens
  Payload ID: 18387
  Gene Name: transmembrane protein 56
  ENSP ID: ENSP00000395364
MEINTKLLISVTCISFFTFQLLFYFVSYWFSAKVSPGFNSLSFKKKIEWNSRVVSTCHSLVVGIFGLYIFLFDEATKADPLWGGPSLANVNIAIASGYLISDLSIIILYWKVIGDKFFIMHHCASLYAYYLVLKNGVLAYIGNFRLLAELSSPF

SEQ ID NO: 91821 - protein, 143 aa, Homo sapiens
  Payload ID: 18387
  Gene Name: transmembrane protein 56
  ENSP ID: ENSP00000417043
MEINTKLLISVTCISFFTFQLLFYFVSYWFSAKVSPGFNSLSFKKKIEWNSRVVSTCHSLVVGIFGLYIFLFDEATKADPLWGGPSLANVNIAIASGYLISDLSIIILYWKVIGDKFFIMHHCASLYAYYLVLKNGVLAYIGN

SEQ ID NO: 91822 - protein, 664 aa, Homo sapiens
  Payload ID: 18388
  Gene Name: transmembrane protein 57
  Uniprot ID: Q8N5G2
  ENSP ID: ENSP00000363463
MKRRNADCSKLRRPLKRNRITEGIYGSTFLYLKFLVVWALVLLADFVLEFRFEYLWPFWLFIRSVYDSFRYQGLAFSVFFVCVAFTSNIICLLFIPIQWLFFAASTYVWVQYVWHTERGVCLPTVSLWILFVYIEAAIRFKDLKNFHVDLCRPFAAHCIGYPVVTLGFGFKSYVSYKMRLRKQKEVQKENEFYMQLLQQALPPEQQMLQKQEKEAEEAAKGLPDMDSSILIHHNGGIPANKKLSTTLPEIEYREKGKEKDKDAKKHNLGINNNNILQPVDSKIQEIEYMENHINSKRLNNDLVGSTENLLKEDSCTASSKNYKNASGVVNSSPRSHSATNGSIPSSSSKNEKKQKCTSKSPSTHKDLMENCIPNNQLSKPDALVRLEQDIKKLKADLQASRQVEQELRSQISSLSSTERGIRSEMGQLRQENELLQNKLHNAVQMKQKDKQNISQLEKKLKAEQEARSFVEKQLMEEKKRKKLEEATAARAVAFAAASRGECTETLRNRIRELEAEGKKLTMDMKVKEDQIRELELKVQELRKYKENEKDTEVLMSALSAMQDKTQHLENSLSAETRIKLDLFSALGDAKRQLEIAQGQILQKDQEIKDLKQKIAEVMAVMPSITYSAATSPLSPVSPHYSSKFVETSPSGLDPNASVYQPLKK

SEQ ID NO: 91823 - protein, 437 aa, Homo sapiens
  Payload ID: 18388
  Gene Name: transmembrane protein 57
  Uniprot ID: Q8N5G2
  ENSP ID: ENSP00000382668
MKRRNADCSKLRRPLKRNRITEGIYGSTFLYLKFLVVWALVLLADFVLEFRFEYLWPFWLFIRSVYDSFRYQGLAFSVFFVCVAFTSNIICLLFIPIQWLFFAASTYVWVQYVWHTERGVCLPTVSLWILFVYIEAAIRFKDLKNFHVDLCRPFAAHWLEQDIKKLKADLQASRQVEQELRSQISSLSSTERGIRSEMGQLRQENELLQNKLHNAVQMKQKDKQNISQLEKKLKAEQEARSFVEKQLMEEKKRKKLEEATAARAVAFAAASRGECTETLRNRIRELEAEGKKLTMDMKVKEDQIRELELKVQELRKYKENEKDTEVLMSALSAMQDKTQHLENSLSAETRIKLDLFSALGDAKRQLEIAQGQILQKDQEIKDLKQKIAEVMAVMPSITYSAATSPLSPVSPHYSSKFVETSPSGLDPNASVYQPLKK

SEQ ID NO: 91824 - protein, 323 aa, Homo sapiens
  Payload ID: 18389
  Gene Name: transmembrane protein 59
  Uniprot ID: Q9BXS4
  ENSP ID: ENSP00000234831
MAAPKGSLWVRTQLGLPPLLLLTMALAGGSGTASAEAFDSVLGDTASCHRACQLTYPLHTYPKEEELYACQRGCRLFSICQFVDDGIDLNRTKLECESACTEAYSQSDEQYACHLGCQNQLPFAELRQEQLMSLMPKMHLLFPLTLVRSFWSDMMDSAQSFITSSWTFYLQADDGKIVIFQSKPEIQYAPHLEQEPTNLRESSLSKMSYLQMRNSQAHRNFLEDGESDGFLRCLSLNSGWILTTTLVLSVMVLLWICCATVATAVEQYVPSEKLSIYGDLEFMNEQKLNRYPASSLVVVRSKTEDHEEAGPLPTKVNLAHSEI

SEQ ID NO: 91825 - protein, 145 aa, Homo sapiens
  Payload ID: 18389
  Gene Name: transmembrane protein 59
  ENSP ID: ENSP00000360388
MAAPKGSLWVRTQLGLPPLLLLTMALAGGSGTASAEAFDSVLGDTASCHRACQLTYPLHTYPKEEELYACQRGCRLFSICQFVDDGIDLNRTKLECESACTEAYSQSDEQYACHLGCQNQLPFAELRQEQVRNNTAFQTSLLRWH

SEQ ID NO: 91826 - protein, 192 aa, Homo sapiens
  Payload ID: 18389
  Gene Name: transmembrane protein 59
  ENSP ID: ENSP00000360392
MSLMPKMHLLFPLTLVRSFWSDMMDSAQSFITSSWTFYLQADDGKIVIFQSKPEIQYAPHLEQEPTNLRESSLSKMSYLQMRNSQAHRNFLEDGESDGFLRCLSLNSGWILTTTLVLSVMVLLWICCATVATAVEQYVPSEKLSIYGDLEFMNEQKLNRYPASSLVVVRSKTEDHEEAGPLPTKVNLAHSEI

SEQ ID NO: 91827 - protein, 192 aa, Homo sapiens; identical to SEQ ID NO: 91826
  Payload ID: 18389
  Gene Name: transmembrane protein 59
  ENSP ID: ENSP00000360395

SEQ ID NO: 91828 - protein, 192 aa, Homo sapiens; identical to SEQ ID NO: 91826
  Payload ID: 18389
  Gene Name: transmembrane protein 59
  ENSP ID: ENSP00000360399

SEQ ID NO: 91829 - protein, 285 aa, Homo sapiens
  Payload ID: 18389
  Gene Name: transmembrane protein 59
  ENSP ID: ENSP00000397772
MAAPKGSLWVRTQLGLPPLLLLTMALAGGSGTASAEAFDSVLGDTASCHRACQLTYPLHTYPKVSASLYTVDHIEEELYACQRGCRLFSICQFVDDGIDLNRTKLECESACTEAYSQSDEQYACHLGCQNQLPFAELRQEQLMSLMPKMHLLFPLTLVRSFWSDMMDSAQSFITSSWTFYLQADDGKIVIFQSKPEIQYAPHLEQEPTNLRESSLSKMSYLQMRNSQAHRNFLEDGESDGFLRCLSLNSGWILTTTLVLSVMVLLWICCATVATAVEQYVPSEVN

SEQ ID NO: 91830 - protein, 144 aa, Homo sapiens
  Payload ID: 18389
  Gene Name: transmembrane protein 59
  ENSP ID: ENSP00000399761
MSLMPKMHLLFPLTLVRSFWSDMMDSAQSFITSSWTFYLQADDGKIVIFQSKPEIQYAPHLEQEPTNLRESSLSKMSYLQMRNSQAHRNFLEDGESDGFLRCLSLNSGWILTTTLVLSVMVLLWICCATVATAVEQYVPSEVNL

SEQ ID NO: 91831 - protein, 144 aa, Homo sapiens; identical to SEQ ID NO: 91830
  Payload ID: 18389
  Gene Name: transmembrane protein 59
  ENSP ID: ENSP00000413792

SEQ ID NO: 91832 - protein, 342 aa, Homo sapiens
  Payload ID: 18390
  Gene Name: transmembrane protein 59-like
  Uniprot ID: Q9UK28
  ENSP ID: ENSP00000262817
MAAVALMPPPLLLLLLLASPPAASAPSARDPFAPQLGDTQNCQLRCRDRDLGPQPSQAGLEGASESPYDRAVLISACERGCRLFSICRFVARSSKPNATQTECEAACVEAYVKEAEQQACSHGCWSQPAEPEPEQKRKVLEAPSGALSLLDLFSTLCNDLVNSAQGFVSSTWTYYLQTDNGKVVVFQTQPIVESLGFQGGRLQRVEVTWRGSHPEALEVHVDPVGPLDKVRKAKIRVKTSSKAKVESEEPQDNDFLSCMSRRSGLPRWILACCLFLSVLVMLWLSCSTLVTAPGQHLKFQPLTLEQHKGFMMEPDWPLYPPPSHACEDSLPPYKLKLDLTKL

SEQ ID NO: 91833 - protein, 342 aa, Homo sapiens; identical to SEQ ID NO: 91832
  Payload ID: 18390
  Gene Name: transmembrane protein 59-like
  Uniprot ID: Q9UK28
  ENSP ID: ENSP00000470879

SEQ ID NO: 91834 - protein, 134 aa, Homo sapiens
  Payload ID: 18390
  Gene Name: transmembrane protein 59-like
  ENSP ID: ENSP00000471612
  MOD_RES (1)..(1): Any amino acid
XKVLEAPSGALSLLDLFSTLCNDLVNSAQGFVSSTWTYYLQTDNGKVVVFQTQPIVESLGFQGGRLQRVEVTWRGSHPEALEVHVDPVGPLDKVRKAKIRVKTSSKAKALGSASLDPGLLPLPLRAGDAVAELL

SEQ ID NO: 91835 - protein, 133 aa, Homo sapiens
  Payload ID: 18391
  Gene Name: transmembrane protein 60
  Uniprot ID: Q9H2L4
  ENSP ID: ENSP00000257663
MRMSLAQRVLLTWLFTLLFLIMLVLKLDEKAPWNWFLIFIPVWIFDTILLVLLIVKMAGRCKSGFDPRHGSHNIKKKAWYLIAMLLKLAFCLALCAKLEQFTTMNLSYVFIPLWALLAGALTELGYNVFFVRD

SEQ ID NO: 91836 - protein, 210 aa, Homo sapiens
  Payload ID: 18392
  Gene Name: transmembrane protein 61
  Uniprot ID: Q8N0U2
  ENSP ID: ENSP00000360315
MALPQMCDGSHLASTLRYCMTVSGTVVLVAGTLCFAWWSEGDATAQPGQLAPPTEYPVPEGPSPLLRSVSFVCCGAGGLLLLIGLLWSVKASIPGPPRWDPYHLSRDLYYLTVESSEKESCRTPKVVDIPTYEEAVSFPVAEGPPTPPAYPTEEALEPSGSRDALLSTQPAWPPPSYESISLALDAVSAETTPSATRSCSGLVQTARGGS

SEQ ID NO: 91837 - protein, 643 aa, Homo sapiens
  Payload ID: 18393
  Gene Name: transmembrane protein 62
  Uniprot ID: Q0P6H9
  ENSP ID: ENSP00000260403
MAAVLALRVVAGLAAAALVAMLLEHYGLAGQPSPLPRPAPPRRPHPAPGPGDSNIFWGLQISDIHLSRFRDPGRAVDLEKFCSETIDIIQPALVLATGDLTDAKTKEQLGSRQHEVEWQTYQGILKKTRVMEKTKWLDIKGNHDAFNIPSLDSIKNYYRKYSAVRRDGSFHYVHSTPFGNYSFICVDATVNPGPKRPYNFFGILDKKKMEELLLLAKESSRSNHTIWFGHFTTSTILSPSPGIRSIMSSAIAYLCGHLHTLGGLMPVLHTRHFQGTLELEVGDWKDNRRYRIFAFDHDLFSFADLIFGKWPVVLITNPKSLLYSCGEHEPLERLLHSTHIRVLAFSLSSITSVTVKIDGVHLGQAVHVSGPIFVLKWNPRNYSSGTHNIEVIVQDSAGRSKSVHHIFSVQENNHLSFDPLASFILRTDHYIMARVLFVLIVLSQLTILIIFRYRGYPELKEPSGFINLTSFSLHVLSKINIFYYSVLLLTLYTVLGPWFFGEIIDGKFGCCFSFGIFVNGHFLQGSITFIIGILQLAFFNIPLMAYMCWSLLQRCFGHNFRSHLHQRKYLKIMPVHLLMLLLYIWQVYSCYFLYATYGTLAFLFSPLRTWLTLLTPVLIRYVWTLNSTKFGIFMVQLKSHLSS

SEQ ID NO: 91838 - protein, 40 aa, Homo sapiens
  Payload ID: 18393
  Gene Name: transmembrane protein 62
  ENSP ID: ENSP00000454683
MEKTKWLDIKGNHGNILLYVEMALSIMSTVLPLATIRSSV

SEQ ID NO: 91839 - protein, 62 aa, Homo sapiens
  Payload ID: 18393
  Gene Name: transmembrane protein 62
  ENSP ID: ENSP00000455413
MAAVLALRVVAGLAAAALVAMLLEHYGLAGQPSPLPRPAPPRRPHPAPGPGDSNIFWGLQET

SEQ ID NO: 91840 - protein, 129 aa, Homo sapiens
  Payload ID: 18393
  Gene Name: transmembrane protein 62
  ENSP ID: ENSP00000455482
MEKTKWLDIKGNHDAFNIPSLDSIKNYYRKYSAVRRDGSFHYVHSTPFGNYSFICVDATVNPGPKRPYNFFGILDKKKMEELLLLAKESSRSNHTIWFGHFTTSTILSPSPGIRSIMSSAIAYLCGHLH

SEQ ID NO: 91841 - protein, 49 aa, Homo sapiens
  Payload ID: 18393
  Gene Name: transmembrane protein 62
  ENSP ID: ENSP00000456003
AAAALVAMLLEHYGLAGQPSPLPRPAPPRRPHPAPGPGDSNIFWGLQET

SEQ ID NO: 91842 - protein, 21 aa, Homo sapiens
  Payload ID: 18393
  Gene Name: transmembrane protein 62
  ENSP ID: ENSP00000456151
RRPHPAPGPGDSNIFWGLQET

SEQ ID NO: 91843 - protein, 38 aa, Homo sapiens
  Payload ID: 18393
  Gene Name: transmembrane protein 62
  ENSP ID: ENSP00000457314
MEKTKWLDIKGNHDAFNIPSLDSIKNYYRKYSAVRRDG

SEQ ID NO: 91844 - protein, 49 aa, Homo sapiens
  Payload ID: 18393
  Gene Name: transmembrane protein 62
  ENSP ID: ENSP00000457503
  MOD_RES (1)..(1): Any amino acid
XAAALVAMLLEHYGLAGQPSPLPRPAPPRRPHPAPGPGDSNIFWGLQET

SEQ ID NO: 91845 - protein, 540 aa, Homo sapiens
  Payload ID: 18393
  Gene Name: transmembrane protein 62
  ENSP ID: ENSP00000458098
  MOD_RES (1)..(1): Any amino acid
XRDPGRAVDLEKFCSETIDIIQPALVLATGDLTDAKTKEQLGSRQHEVEWQTYQGILKKTRVMEKTKWLDIKGNHDAFNIPSLDSIKNYYRKYSAVRRDGSFHYVHSTPFGNYSFICVDATVNPGPKRPYNFFGILDKKKMEELLLLAKESSRSNHTIWFGHFTTSTILSPSPGIRSIMSSAIAYLCGHLHTLGGLMPVLHTRHFQGTLELEVGDWKDNRRYRIFAFDHDLFSFADLIFGKWPVVLITNPKSLLYSCGEHEPLERLLHSTHIRVLAFSLSSITSVTVKIDGVHLGQAVHVSGPIFVLKWNPRNYSSGTHNIEVIVQDSAGRSKSVHHIFSVQENNHLSFDPLASFILRTDHYIMARVLFVLIVLSQLTILIIFRYRGYPELKGPWFFGEIIDGKFGCCFSFGIFVNGHFLQGSITFIIGILQLAFFNIPLMAYMCWSLLQRCFGHNFRSHLHQRKYLKIMPVHLLMLLLYIWQVYSCYFLYATYGTLAFLFSPLRTWLTLLTPVLIRYVWTLNSTKFGIFMVQLKSHLSS

SEQ ID NO: 91846 - protein, 807 aa, Homo sapiens
  Payload ID: 18394
  Gene Name: transmembrane protein 63A
  Uniprot ID: O94886
  ENSP ID: ENSP00000355800
MMDSPFLELWQSKAVSIREQLGLGDRPNDSYCYNSAKNSTVLQGVTFGGIPTVLLIDVSCFLFLILVFSIIRRRFWDYGRIALVSEADSESRFQRLSSTSSSGQQDFENELGCCPWLTAIFRLHDDQILEWCGEDAIHYLSFQRHIIFLLVVVSFLSLCVILPVNLSGDLLDKDPYSFGRTTIANLQTDNDLLWLHTIFAVIYLFLTVGFMRHHTQSIKYKEENLVRRTLFITGLPRDARKETVESHFRDAYPTCEVVDVQLCYNVAKLIYLCKEKKKTEKSLTYYTNLQVKTGQRTLINPKPCGQFCCCEVLGCEWEDAISYYTRMKDRLLERITEEERHVQDQPLGMAFVTFQEKSMATYILKDFNACKCQSLQCKGEPQPSSHSRELYTSKWTVTFAADPEDICWKNLSIQGLRWWLQWLGINFTLFLGLFFLTTPSIILSTMDKFNVTKPIHALNNPIISQFFPTLLLWSFSALLPSIVYYSTLLESHWTKSGENQIMMTKVYIFLIFMVLILPSLGLTSLDFFFRWLFDKTSSEASIRLECVFLPDQGAFFVNYVIASAFIGNGMELLRLPGLILYTFRMIMAKTAADRRNVKQNQAFQYEFGAMYAWMLCVFTVIVAYSITCPIIAPFGLIYILLKHMVDRHNLYFVYLPAKLEKGIHFAAVNQALAAPILCLFWLYFFSFLRLGMKAPATLFTFLVLLLTILVCLAHTCFGCFKHLSPLNYKTEEPASDKGSEAEAHMPPPFTPYVPRILNGLASERTALSPQQQQQQTYGAIHNISGTIPGQCLAQSATGSVAAAPQEA

SEQ ID NO: 91847 - protein, 118 aa, Homo sapiens
  Payload ID: 18394
  Gene Name: transmembrane protein 63A
  ENSP ID: ENSP00000409002
MMDSPFLELWQSKAVSIREQLGLGDRPNDSYCYNSAKNSTVLQGVTFGGIPTVLLIDVSCFLFLILVFSIIRRRFWDYGRIALVSEADSESRFQRLSSTSSSGQQDFENELGCCPWLT

SEQ ID NO: 91848 - protein, 82 aa, Homo sapiens
  Payload ID: 18394
  Gene Name: transmembrane protein 63A
  ENSP ID: ENSP00000445237
MKDRLLERITEEERHVQDQPLGMAFVTFQEKSMATYILKDFNACKCQSLQCKGEPQPSSHSRELYTSKWTVTFAADPEDICW

SEQ ID NO: 91849 - protein, 832 aa, Homo sapiens
  Payload ID: 18395
  Gene Name: transmembrane protein 63B
  Uniprot ID: Q5T3F8
  ENSP ID: ENSP00000259746
MLPFLLATLGTTALNNSNPKDYCYSARIRSTVLQGLPFGGVPTVLALDFMCFLALLFLFSILRKVAWDYGRLALVTDADRLRRQERDRVEQEYVASAMHGDSHDRYERLTSVSSSVDFDQRDNGFCSWLTAIFRIKDDEIRDKCGGDAVHYLSFQRHIIGLLVVVGVLSVGIVLPVNFSGDLLENNAYSFGRTTIANLKSGNNLLWLHTSFAFLYLLLTVYSMRRHTSKMRYKEDDLVKRTLFINGISKYAESEKIKKHFEEAYPNCTVLEARPCYNVARLMFLDAERKKAERGKLYFTNLQSKENVPTMINPKPCGHLCCCVVRGCEQVEAIEYYTKLEQKLKEDYKREKEKVNEKPLGMAFVTFHNETITAIILKDFNVCKCQGCTCRGEPRPSSCSESLHISNWTVSYAPDPQNIYWEHLSIRGFIWWLRCLVINVVLFILLFFLTTPAIIITTMDKFNVTKPVEYLNNPIITQFFPTLLLWCFSALLPTIVYYSAFFEAHWTRSGENRTTMHKCYTFLIFMVLLLPSLGLSSLDLFFRWLFDKKFLAEAAIRFECVFLPDNGAFFVNYVIASAFIGNAMDLLRIPGLLMYMIRLCLARSAAERRNVKRHQAYEFQFGAAYAWMMCVFTVVMTYSITCPIIVPFGLMYMLLKHLVDRYNLYYAYLPAKLDKKIHSGAVNQVVAAPILCLFWLLFFSTMRTGFLAPTSMFTFVVLVITIVICLCHVCFGHFKYLSAHNYKIEHTETDTVDPRSNGRPPTAAAVPKSAKYIAQVLQDSEVDGDGDGAPGSSGDEPPSSSSQDEELLMPPDALTDTDFQSCEDSLIENEIHQ

SEQ ID NO: 91850 - protein, 832 aa, Homo sapiens; identical to SEQ ID NO: 91849
  Payload ID: 18395
  Gene Name: transmembrane protein 63B
  Uniprot ID: Q5T3F8
  ENSP ID: ENSP00000327154

SEQ ID NO: 91851 - protein, 761 aa, Homo sapiens
  Payload ID: 18395
  Gene Name: transmembrane protein 63B
  ENSP ID: ENSP00000360960
  MOD_RES (1)..(1): Any amino acid
XSILRKVAWDYGRLALVTDADSVASAMHGDSHDRYERLTSVSSSVDFDQRDNGFCSWLTAIFRIKDDEIRDKCGGDAVHYLSFQRHIIGLLVVVGVLSVGIVLPVNFSGDLLENNAYSFGRTTIANLKSGNNLLWLHTSFAFLYLLLTVYSMRRHTSKMRYKEDDLVKRTLFINGISKYAESEKIKKHFEEAYPNCTVLEARPCYNVARLMFLDAERKKAERGKLYFTNLQSKENVPTMINPKPCGHLCCCVVRGCEQVEAIEYYTKLEQKLKEDYKREKEKVNEKPLGMAFVTFHNETITAIILKDFNVCKCQGCTCRGEPRPSSCSESLHISNWTVSYAPDPQNIYWEHLSIRGFIWWLRCLVINVVLFILLFFLTTPAIIITTMDKFNVTKPVEYLNNPIITQFFPTLLLWCFSALLPTIVYYSAFFEAHWTRSGENRTTMHKCYTFLIFMVLLLPSLGLSSLDLFFRWLFDKKFLAEAAIRFECVFLPDNGAFFVNYVIASAFIGNAMDLLRIPGLLMYMIRLCLARSAAERRNVKRHQAYEFQFGAAYAWMMCVFTVVMTYSITCPIIVPFGLMYMLLKHLVDRYNLYYAYLPAKLDKKIHSGAVNQVVAAPILCLFWLLFFSTMRTGFLAPTSMFTFVVLVITIVICLCHVCFGHFKYLSAHNYKIEHTETDTVDPRSNGRPPTAAAVPKSAKYIAQVLQDSEVDGDGDGAPGSSGDEPPSSSSQDEELLMPPDALTDTDFQSCEDSLIENEIHQ

SEQ ID NO: 91852 - protein, 520 aa, Homo sapiens
  Payload ID: 18395
  Gene Name: transmembrane protein 63B
  ENSP ID: ENSP00000432085
  MOD_RES (1)..(1): Any amino acid
XNAYSFGRTTIANLKSGNNLLWLHTSFAFLYLLLTVYSMRRHTSKMRYKEDDLVKRTLFINGISKYAESEKIKKHFEEAYPNCTVLEARPCYNVARLMFLDAERKKAERGKLYFTNLQSKENVPTMINPKPCGHLCCCVVRGCEQVEAIEYYTKLEQKLKEDYKREKEKVNEKPLGMAFVTFHNETITAIILKDFNVCKCQGCTCRGEPRPSSCSESLHISNWTVSYAPDPQNIYWEHLSIRGFIWWLRCLVINVVLFILLFFLTTPAIIITTMDKFNVTKPVEYLNNPIITQFFPTLLLWCFSALLPTIVYYSAFFEAHWTRSGENRTTMHKCYTFLIFMVLLLPSLGLSSLDLFFRWLFDKKFLAEAAIRFECVFLPDNGAFFVNYVIASAFIGNAMDLLRIPGLLMYMIRLCLARSAAERRNVKRHQAYEFQFGAAYAWMMCVFTVVMTYSITCPIIVPFGLMYMLLKHLVDRYNLYYAYLPAKLDKKIHSGAVNQVVAAPILCLFWLLFFSTMRTD

SEQ ID NO: 91853 - protein, 27 aa, Homo sapiens
  Payload ID: 18395
  Gene Name: transmembrane protein 63B
  ENSP ID: ENSP00000433750
  MOD_RES (1)..(1): Any amino acid
XSVSSSVDFDQRDNGFCSWLTAIFRIK

SEQ ID NO: 91854 - protein, 226 aa, Homo sapiens
  Payload ID: 18395
  Gene Name: transmembrane protein 63B
  ENSP ID: ENSP00000437163
MLPFLLATLGTTALNNSNPKDYCYSARIRSTVLQGLPFGGVPTVLALDFMCFLALLFLFSILRKVAWDYGRLALVTDADRLRRQERDRVEQEYVASAMHGDSHDRYERLTSVSSSVDFDQRDNGFCSWLTAIFRIKDDEIRDKCGGDAVHYLSFQRHIIGLLVVVGVLSVGIVLPVNFSGDLLENNAYSFGRTTIANLKSGNNLLWLHTSFAFLYLLLTVYSMRRH

SEQ ID NO: 91855 - protein, 806 aa, Homo sapiens
  Payload ID: 18396
  Gene Name: transmembrane protein 63C
  Uniprot ID: Q9P1W3
  ENSP ID: ENSP00000298351
MSASPDDLSTGGRLQNMTVDECFQSRNTVLQGQPFGGVPTVLCLNIALWVLVLVVYSFLRKAAWDYGRLALLIHNDSLTSLIYGEQSEKTSPSETSLEMERRDKGFCSWFFNSITMKDEDLINKCGDDARIYIVFQYHLIIFVLIICIPSLGIILPINYTGSVLDWSSHFARTTIVNVSTESKLLWLHSLLSFFYFITNFMFMAHHCLGFAPRNSQKVTRTLMITYVPKDIEDPELIIKHFHEAYPGSVVTRVHFCYDVRNLIDLDDQRRHAMRGRLFYTAKAKKTGKVMIRIHPCARLCFCKCWTCFKEVDAEQYYSELEEQLTDEFNAELNRVPLKRLDLIFVTFQDSRMAKRVRKDYKYVQCGVQPQQSSVTTIVKSYYWRVTMAPHPKDIIWKHLSVRRFFWWARFIAINTFLFFLFFFLTTPAIIMNTIDMYNVTRPIEKLQNPIVTQFFPSVMLWGFTVILPLIVYFSAFLEAHWTRSSQNLVMVHKCYIFLVFMVVILPSMGLTSLDVFLRWLFDIYYLEQASIRFQCVFLPDNGAFFVNYVITAALLGTGMELLRLGSLFCYSTRLFFSRSEPERVNIRKNQAIDFQFGREYAWMMNVFSVVMAYSITCPIIVPFGLLYLCMKHLTDRYNMYYSFAPTKLNEQIHMAAVSQAIFAPLLGLFWMLFFSILRLGSLHAITIFSLSTLLIAMVIAFVGIFLGKLRMVADYEPEEEEIQTVFDMEPSSTSSTPTSLLYVATVLQEPELNLTPASSPARHTYGTMNNQPEEGEEESGLRGFARELDSAQFQEGLELEGQNQYH

SEQ ID NO: 91856 - protein, 23 aa, Homo sapiens
  Payload ID: 18396
  Gene Name: transmembrane protein 63C
  ENSP ID: ENSP00000450879
MSASPDDLSTGGRLQNMTVDECF

SEQ ID NO: 91857 - protein, 50 aa, Homo sapiens
  Payload ID: 18396
  Gene Name: transmembrane protein 63C
  ENSP ID: ENSP00000451237
MSASPDDLSTGGRLQNMTVDECFQSRNTVLQGQPFGGVPTVLCLNIALWV

SEQ ID NO: 91858 - protein, 51 aa, Homo sapiens
  Payload ID: 18396
  Gene Name: transmembrane protein 63C
  ENSP ID: ENSP00000451398
MSASPDDLSTGGRLQNMTVDECFQSRNTVLQGQPFGGVPTVLCLNIALWVL

SEQ ID NO: 91859 - protein, 36 aa, Homo sapiens
  Payload ID: 18396
  Gene Name: transmembrane protein 63C
  ENSP ID: ENSP00000451404
MSASPDDLSTGGRLQNMTVDECFQSRNTVLQGQPFG

SEQ ID NO: 91860 - protein, 164 aa, Homo sapiens
  Payload ID: 18396
  Gene Name: transmembrane protein 63C
  ENSP ID: ENSP00000451842
MSASPDDLSTGGRLQNMTVDECFQSRNTVLQGQPFGGVPTVLCLNIALWVLVLVVYSFLRKAAWDYGRLALLIHNDSLTSLIYGEQSEKTSPSETSLEMERRDKGFCSWFFNSITMKDEDLINKCGDDARIYIVFQYHLIIFVLIICIPSLGIILPINYTGSVL

SEQ ID NO: 91861 - protein, 197 aa, Homo sapiens
  Payload ID: 18397
  Gene Name: transmembrane protein 64
  ENSP ID: ENSP00000407617
LCFASLALVRRYLHHLLLWVESLDSLLGVLLFVVGFIVVSFPCGWGYIVLNVAAGYLYGFVLGMGLMMVGVLIGTFIAHVVCKRLLTAWVAARIQSSEKLSAVIRVVEGGSGLKVVALARLTPIPFGLQNAVFSIIISIGLMFYVVHRAQVELNAAIVACEMELKSSLVKGNQPNTSGSSFYNKRTLTFSGGGINVV

SEQ ID NO: 91862 - protein, 328 aa, Homo sapiens
  Payload ID: 18397
  Gene Name: transmembrane protein 64
  Uniprot ID: Q6YI46
  ENSP ID: ENSP00000411951
MRSPGGILLQALPRLLQHAALPGLAELPARWALPRGAGGDGPADRLPRGGGASAAAAAAAASGALLGAYLERHGPPEASELPEPGGALAGGPGSGGGGVVVGVAEVRNWRCCCLGSTCWCRSLVLVCVLAALCFASLALVRRYLHHLLLWVESLDSLLGVLLFVVGFIVVSFPCGWGYIVLNVAAGYLYGFVLGMGLMMVGVLIGTFIAHVVCKRLLTAWVAARIQSSEKLSAVIRVVEGGSGLKVVALARLTPIPFGLQNAVFSIIISIGLMFYVVHRAQVELNAAIVACEMELKSSLVKGNQPNTSGSSFYNKRTLTFSGGGINVV

SEQ ID NO: 91863 - protein, 380 aa, Homo sapiens
  Payload ID: 18397
  Gene Name: transmembrane protein 64
  Uniprot ID: Q6YI46
  ENSP ID: ENSP00000414786
MRSPGGILLQALPRLLQHAALPGLAELPARWALPRGAGGDGPADRLPRGGGASAAAAAAAASGALLGAYLERHGPPEASELPEPGGALAGGPGSGGGGVVVGVAEVRNWRCCCLGSTCWCRSLVLVCVLAALCFASLALVRRYLHHLLLWVESLDSLLGVLLFVVGFIVVSFPCGWGYIVLNVAAGYLYGFVLGMGLMMVGVLIGTFIAHVVCKRLLTAWVAARIQSSEKLSAVIRVVEGGSGLKVVALARLTPIPFGLQNAVFSITDLSLPNYLMASSVGLLPTQLLNSYLGTTLRTMEDVIAEQSVSGYFVFCLQIIISIGLMFYVVHRAQVELNAAIVACEMELKSSLVKGNQPNTSGSSFYNKRTLTFSGGGINVV

SEQ ID NO: 91864 - protein, 119 aa, Homo sapiens
  Payload ID: 18397
  Gene Name: transmembrane protein 64
  Uniprot ID: Q6YI46
  ENSP ID: ENSP00000429832
MPPRITDLSLPNYLMASSVGLLPTQLLNSYLGTTLRTMEDVIAEQSVSGYFVFCLQIIISIGLMFYVVHRAQVELNAAIVACEMELKSSLVKGNQPNTSGSSFYNKRTLTFSGGGINVV

SEQ ID NO: 91865 - protein, 51 aa, Homo sapiens
  Payload ID: 18397
  Gene Name: transmembrane protein 64
  ENSP ID: ENSP00000430689
MPPRITDLSLPNYLMASSVGLLPTQLLNSYLGTTLRTMEDVIAEQSVSGYF

SEQ ID NO: 91866 - protein, 240 aa, Homo sapiens
  Payload ID: 18398
  Gene Name: transmembrane protein 65
  Uniprot ID: Q6PI78
  ENSP ID: ENSP00000297632
MSRLLPLLRSRTARSLRPGPAAAAAPRPPSWCCCGRGLLALAPPGGLPGGPRRLGTHPKKEPMEALNTAQGARDFIYSLHSTERSCLLKELHRFESIAIAQEKLEAPPPTPGQLRYVFIHNAIPFIGFGFLDNAIMIVAGTHIEMSIGIILGISTMAAAALGNLVSDLAGLGLAGYVEALASRLGLSIPDLTPKQVDMWQTRLSTHLGKAVGVTIGCILGMFPLIFFGGGEEDEKLETKS

SEQ ID NO: 91867 - protein, 985 aa, Homo sapiens
  Payload ID: 18399
  Gene Name: transmembrane protein 67
  ENSP ID: ENSP00000314488
MAVWSLLSARAVTAFLLLFLPRFLQAQTFSFPFQQPEKCDNNQYFDISALSCVPCGANQRQDARGTSCVCLPGFQMISNNGGPAIICKKCPENMKGVTEDGWNCISCPSDLTAEGKCHCPIGHILVERDINGTLLSQATCELCDGNENSFMVVNALGDRCVRCEPTFVNTSRSCACSEPNILTGGLCFSSTGNFPLRRISAARYGEVGMSLTSEWFAKYLQSSAAACWVYANLTSCQALGNMCVMNMNSYDFATFDACGLFQFIFENTAGLSTVHSISFWRQNLPWLFYGDQLGLAPQVLSSTSLPTNFSFKGENQNTKLKFVAASYDIRGNFLKWQTLEGGVLQLCPDTETRLNAAYSFGTTYQQNCEIPISKILIDFPTPIFYDVYLEYTDENQHQYILAVPVLNLNLQHNKIFVNQDSNSGKWLLTRRIFLVDAVSGRENDLGTQPRVIRVATQISLSVHLVPNTINGNIYPPLITIAYSDIDIKDANSQSVKVSFSVTYEMDHGEAHVQTDIALGVLGGLAVLASLLKTAGWKRRIGSPMIDLQTVVKFLVYYAGDLANVFFIITVGTGLYWLIFFKAQKSVSVLLPMPIQEERFVTYVGCAFALKALQFLHKLISQITIDVFFIDWERPKGKVLKAVEGEGGVRSATVPVSIWRTYFVANEWNEIQTVRKINSLFQVLTVLFFLEVVGFKNLALMDSSSSLSRNPPSYIAPYSCILRYAVSAALWLAIGIIQVVFFAVFYERFIEDKIRQFVDLCSMSNISVFLLSHKCFGYYIHGRSVHGHADTNMEEMNMNLKREAENLCSQRGLVPNTDGQTFEIAISNQMRQHYDRIHETLIRKNGPARLLSSSASTFEQSIKAYHMMNKFLGSFIDHVHKEMDYFIKDKLLLERILGMEFMEPMEKSIFYNDEGYSFSSVLYYGNEATLLIFDLLFFCVVDLACQNFILASFLTYLQQEIFRYIRNTVGQKNLASKTLVDQRFLI

SEQ ID NO: 91868 - protein, 914 aa, Homo sapiens
  Payload ID: 18399
  Gene Name: transmembrane protein 67
  Uniprot ID: Q5HYA8
  ENSP ID: ENSP00000386966
MSLSHWPYFRLVLNFRPQVICLPQPPKVLGYRLEPPHLTLACTLEGMYNIIEEILERDINGTLLSQATCELCDGNENSFMVVNALGDRCVRCEPTFVNTSRSCACSEPNILTGGLCFSSTGNFPLRRISAARYGEVGMSLTSEWFAKYLQSSAAACWVYANLTSCQALGNMCVMNMNSYDFATFDACGLFQFIFENTAGLSTVHSISFWRQNLPWLFYGDQLGLAPQVLSSTSLPTNFSFKGENQNTKLKFVAASYDIRGNFLKWQTLEGGVLQLCPDTETRLNAAYSFGTTYQQNCEIPISKILIDFPTPIFYDVYLEYTDENQHQYILAVPVLNLNLQHNKIFVNQDSNSGKWLLTRRIFLVDAVSGRENDLGTQPRVIRVATQISLSVHLVPNTINGNIYPPLITIAYSDIDIKDANSQSVKVSFSVTYEMDHGEAHVQTDIALGVLGGLAVLASLLKTAGWKRRIGSPMIDLQTVVKFLVYYAGDLANVFFIITVGTGLYWLIFFKAQKSVSVLLPMPIQEERFVTYVGCAFALKALQFLHKLISQITIDVFFIDWERPKGKVLKAVEGEGGVRSATVPVSIWRTYFVANEWNEIQTVRKINSLFQVLTVLFFLEVVGFKNLALMDSSSSLSRNPPSYIAPYSCILRYAVSAALWLAIGIIQVVFFAVFYERFIEDKIRQFVDLCSMSNISVFLLSHKCFGYYIHGRSVHGHADTNMEEMNMNLKREAENLCSQRGLVPNTDGQTFEIAISNQMRQHYDRIHETLIRKNGPARLLSSSASTFEQSIKAYHMMNKFLGSFIDHVHKEMDYFIKDKLLLERILGMEFMEPMEKSIFYNDEGYSFSSVLYYGNEATLLIFDLLFFCVVDLACQNFILASFLTYLQQEIFRYIRNTVGQKNLASKTLVDQRFLI

SEQ ID NO: 91869 - protein, 397 aa, Homo sapiens
  Payload ID: 18399
  Gene Name: transmembrane protein 67
  ENSP ID: ENSP00000388671
MKGVTEDGWNCISCPSDLTAEGKCHCPIGHILVERDINGTLLSQATCELCDGNENSFMVVNALGDRCVRCEPTFVNTSRSCACSEPNILTGGLCFSSTGNFPLRRISAARYGEVGMSLTSEWFAKYLQSSAAACWVYANLTSCQALGNMCVMNMNSYDFATFDACGLFQFIFENTAGLSTVHSISFWRQNLPWLFYGDQLGLAPQVLSSTSLPTNFSFKGENQNTKLKFVAASYDIRGNFLKWQTLEGGVLQLCPDTETRLNAAYSFGTTYQQNCEIPISKILIDFPTPIFYDVYLEYTDENQHQYILAVPVLNLNLQHNKIFVNQDSNSGKWLLTRRIFLVDAVSGRENDLGTQPRVIRVATQISLSVHLVPNTINGNIYPPLITIAYSDIDIKDA

SEQ ID NO: 91870 - protein, 995 aa, Homo sapiens
  Payload ID: 18399
  Gene Name: transmembrane protein 67
  Uniprot ID: Q5HYA8
  ENSP ID: ENSP00000389998
MATRGGAGVAMAVWSLLSARAVTAFLLLFLPRFLQAQTFSFPFQQPEKCDNNQYFDISALSCVPCGANQRQDARGTSCVCLPGFQMISNNGGPAIICKKCPENMKGVTEDGWNCISCPSDLTAEGKCHCPIGHILVERDINGTLLSQATCELCDGNENSFMVVNALGDRCVRCEPTFVNTSRSCACSEPNILTGGLCFSSTGNFPLRRISAARYGEVGMSLTSEWFAKYLQSSAAACWVYANLTSCQALGNMCVMNMNSYDFATFDACGLFQFIFENTAGLSTVHSISFWRQNLPWLFYGDQLGLAPQVLSSTSLPTNFSFKGENQNTKLKFVAASYDIRGNFLKWQTLEGGVLQLCPDTETRLNAAYSFGTTYQQNCEIPISKILIDFPTPIFYDVYLEYTDENQHQYILAVPVLNLNLQHNKIFVNQDSNSGKWLLTRRIFLVDAVSGRENDLGTQPRVIRVATQISLSVHLVPNTINGNIYPPLITIAYSDIDIKDANSQSVKVSFSVTYEMDHGEAHVQTDIALGVLGGLAVLASLLKTAGWKRRIGSPMIDLQTVVKFLVYYAGDLANVFFIITVGTGLYWLIFFKAQKSVSVLLPMPIQEERFVTYVGCAFALKALQFLHKLISQITIDVFFIDWERPKGKVLKAVEGEGGVRSATVPVSIWRTYFVANEWNEIQTVRKINSLFQVLTVLFFLEVVGFKNLALMDSSSSLSRNPPSYIAPYSCILRYAVSAALWLAIGIIQVVFFAVFYERFIEDKIRQFVDLCSMSNISVFLLSHKCFGYYIHGRSVHGHADTNMEEMNMNLKREAENLCSQRGLVPNTDGQTFEIAISNQMRQHYDRIHETLIRKNGPARLLSSSASTFEQSIKAYHMMNKFLGSFIDHVHKEMDYFIKDKLLLERILGMEFMEPMEKSIFYNDEGYSFSSVLYYGNEATLLIFDLLFFCVVDLACQNFILASFLTYLQQEIFRYIRNTVGQKNLASKTLVDQRFLI

SEQ ID NO: 91871 - protein, 180 aa, Homo sapiens
  Payload ID: 18399
  Gene Name: transmembrane protein 67
  ENSP ID: ENSP00000403035
MATRGGAGVAMAVWSLLSARAVTAFLLLFLPRFLQAQTFSFPFQQPEKCDNNQYFDISALSCVPCGANQRQDARGTSCVCLPGFQMISNNGGPAIICKKCPENMKGVTEDGWNCISCPSDLTAEGKCHCPIGHILDSNSGKWLLTRRIFLVDAVSGRENDLGTQPRVIRVATQISLSVHL

SEQ ID NO: 91872 - protein, 147 aa, Homo sapiens
  Payload ID: 18399
  Gene Name: transmembrane protein 67
  ENSP ID: ENSP00000416339
MATRGGAGVAMAVWSLLSARAVTAFLLLFLPRFLQAQTFSFPFQQPEKCDNNQYFDISALSCVPCGANQRQDARGTSCVCLPGFQMISNNGGPAIICKKCPENMKGVTEDGWNCISCPSDLTAEGKCHCPIGHILGSHSCPGWSVVV

SEQ ID NO: 91873 - protein, 87 aa, Homo sapiens
  Payload ID: 18399
  Gene Name: transmembrane protein 67
  ENSP ID: ENSP00000427947
  MOD_RES (1)..(1): Any amino acid
XTRGGAGVAMAVWSLLSARAVTAFLLLFLPRFLQAQTFSFPFQQPEKCDNNQYFDISALSCVPCGANQRQDARERCYRRWLELHFLP

SEQ ID NO: 91874 - protein, 239 aa, Homo sapiens
  Payload ID: 18399
  Gene Name: transmembrane protein 67
  ENSP ID: ENSP00000428785
  MOD_RES (1)..(1): Any amino acid
XFYDVYLEYTDENQHQYILAVPVLNLNLQHNKIFVNQDSNSGKWLLTRRIFLVDAVSGRENDLGTQPRVIRVATQISLSVHLVPNTINGNIYPPLITIAYSDIDIKDANSQSVKVSFSVTYEMDHGEAHVQTDTEFCTCCPGWSAMARSWLTATSASRVQAILLSQPPEYLGLQIALGVLGGLAVLASLLKTAGWKRRIGSPMIDLQTVVKFLVYYAGDLANVFFIITVGTGLYWLIFF

SEQ ID NO: 91875 - protein, 119 aa, Homo sapiens
  Payload ID: 18399
  Gene Name: transmembrane protein 67
  ENSP ID: ENSP00000429925
MATRGGAGVAMAVWSLLSARAVTAFLLLFLPRFLQAQTFSFPFQQPEKCDNNQYFDISALSCVPCGANQRQDARGTSCVCLPGFQMISNNGGPAIICKKCPENMVLQKMAGTAFLALVT

SEQ ID NO: 91876 - protein, 6 aa, Homo sapiens
  Payload ID: 18399
  Gene Name: transmembrane protein 67
  ENSP ID: ENSP00000430232
MVVNAL

SEQ ID NO: 91877 - protein, 38 aa, Homo sapiens
  Payload ID: 18399
  Gene Name: transmembrane protein 67
  ENSP ID: ENSP00000430289
MVVNALGDRCVRCEPTFVNTSRSCACSEPNILTGGLCF

SEQ ID NO: 91878 - protein, 173 aa, Homo sapiens
  Payload ID: 18399
  Gene Name: transmembrane protein 67
  ENSP ID: ENSP00000430740
  MOD_RES (1)..(1): Any amino acid
XRGGAGVAMAVWSLLSARAVTAFLLLFLPRFLQAQTFSFPFQQPEKCDNNQYFDISALSCVPCGANQRQDARGTSCVCLPGFQMISNNGGPAIICKKCPENMKGVTEDGWNCISCPSDLTAEGKCHCPIGHILVERDINGTLLSQATCELCDGNENSFMVVNALGDRQGDYVS

SEQ ID NO: 91879 - protein, 257 aa, Homo sapiens
  Payload ID: 18400
  Gene Name: transmembrane protein 68
  Uniprot ID: Q96MH6
  ENSP ID: ENSP00000335416
MIDKNQTCGVGQDSVPYMICLIHILEEWFGVEQLEDYLNFANYLLWVFTPLILLILPYFTIFLLYLTIIFLHIYKRKNVLKEAYSHNLWDGARKTVATLWDGHAAVWHGYEVHGMEKIPEDGPALIIFYHGAIPIDFYYFMAKIFIHKGRTCRVVADHFVFKIPGFSLLLDVFCALHGPREKCVEILRSGHLLAISPGGVREALISDETYNIVWGHRRGFAQVAIDAKVTKNAVQALIDKHQRIPGNIMSALLERFH

SEQ ID NO: 91880 - protein, 324 aa, Homo sapiens
  Payload ID: 18400
  Gene Name: transmembrane protein 68
  Uniprot ID: Q96MH6
  ENSP ID: ENSP00000395204
MIDKNQTCGVGQDSVPYMICLIHILEEWFGVEQLEDYLNFANYLLWVFTPLILLILPYFTIFLLYLTIIFLHIYKRKNVLKEAYSHNLWDGARKTVATLWDGHAAVWHGYEVHGMEKIPEDGPALIIFYHGAIPIDFYYFMAKIFIHKGRTCRVVADHFVFKIPGFSLLLDVFCALHGPREKCVEILRSGHLLAISPGGVREALISDETYNIVWGHRRGFAQVAIDAKVPIIPMFTQNIREGFRSLGGTRLFRWLYEKFRYPFAPMYGGFPVKLRTYLGDPIPYDPQITAEELAEKTKNAVQALIDKHQRIPGNIMSALLERFH

SEQ ID NO: 91881 - protein, 2 aa, Homo sapiens
  Payload ID: 18400
  Gene Name: transmembrane protein 68
  ENSP ID: ENSP00000427939
MI

SEQ ID NO: 91882 - protein, 108 aa, Homo sapiens
  Payload ID: 18400
  Gene Name: transmembrane protein 68
  ENSP ID: ENSP00000428236
  MOD_RES (1)..(1): Any amino acid
XLLYLTIIFLHIYKRKNVLKEAYSHNLWDGARKTVATLWDGHAAVWHGYEVHGMEKIPEDGPALIIFYHGAIPIDFYYFMAKIFIHKGRTCRVVADHFVFKIPGLMED

SEQ ID NO: 91883 - protein, 67 aa, Homo sapiens
  Payload ID: 18400
  Gene Name: transmembrane protein 68
  ENSP ID: ENSP00000428318
FCALHGPREKCVEILRSGHLLAISPGGVREALISDETYNIVWGHRRGFAQVAIDAKVALTGMACFHI

SEQ ID NO: 91884 - protein, 143 aa, Homo sapiens
  Payload ID: 18400
  Gene Name: transmembrane protein 68
  ENSP ID: ENSP00000428688
MEKIPEDGPALIIFYHGAIPIDFYYFMAKIFIHKGRTCRVVADHFVFKIPGFSLLLDVFCALHGPREKCVEILRSGHLLAISPGGVREALISDETYNIVWGHRRGFAQVAIDAKVTKNAVQALIDKHQRIPGNIMSALLERFH

SEQ ID NO: 91885 - protein, 144 aa, Homo sapiens
  Payload ID: 18400
  Gene Name: transmembrane protein 68
  ENSP ID: ENSP00000429026
MEKIPEDGPALIIFYHGAIPIDFYYFMAKIFIHKGRTCRVVADHFVFKIPGFSLLLDVFCALHGPREKCVEILRSGHLLAISPGGVREALISDETYNIVWGHRRGFAQVAIDAKVPIIPMFTQNIREGFRSLGGTNEECCSSFD

SEQ ID NO: 91886 - protein, 164 aa, Homo sapiens
  Payload ID: 18400
  Gene Name: transmembrane protein 68
  ENSP ID: ENSP00000429175
MIDKNQTCGVGQDSVPYMICLIHILEEWFGVEQLEDYLNFANYLLWVFTPLILLILPYFTIFLLYLTIIFLHIYKRKNVLKEAYSHNLWDGARKTVATLWDGHAAVWHGYEVHGMEKIPEDGPALIIFYHGAIPIDFYYFMAKIFIHKGRTCRVVADHFVFKIP

SEQ ID NO: 91887 - protein, 135 aa, Homo sapiens
  Payload ID: 18400
  Gene Name: transmembrane protein 68
  Uniprot ID: Q96MH6
  ENSP ID: ENSP00000429210
MIDKNQTCGVGQDSVPYMICLIHILEEWFGVEQLEDYLNFANYLLWVFTPLILLILPYFTIFLLYLTIIFLHIYKRKNVLKEAYSHNLWDGARKTVATLWDGHAAVWHGKQGYFHLCVAIHVCCIGTVLPFHFID

SEQ ID NO: 91888 - protein, 182 aa, Homo sapiens
  Payload ID: 18400
  Gene Name: transmembrane protein 68
  ENSP ID: ENSP00000429667
MEKIPEDGPALIIFYHGAIPIDFYYFMAKIFIHKGRTCRVVADHFVFKIPGFSLLLDVFCALHGPREKCVEILRSGHLLAISPGGVREALISDETYNIVWGHRRGFAQVAIDAKVPIIPMFTQNIREGFRSLGGTRLFRWLYEKFRYPFAPMYGGFPVKLRTYLGDPIPYDPQITAEELAEK

SEQ ID NO: 91889 - protein, 126 aa, Homo sapiens
  Payload ID: 18400
  Gene Name: transmembrane protein 68
  ENSP ID: ENSP00000429758
MIDKNQTCGVGQDSVPYMICLIHILEEWFGVEQLEDYLNFANYLLWVFTPLILLILPYFTIFLLYLTIIFLHIYKRKNVLKEAYSHNLWDGARKTVATLWDGHAAVWHGYEVHGMEKIPEDGPALI

SEQ ID NO: 91890 - protein, 243 aa, Homo sapiens
  Payload ID: 18400
  Gene Name: transmembrane protein 68
  ENSP ID: ENSP00000430542
MIDKNQTCGVGQDSVPYMICLIHILEEWFGVEQLEDYLNFANYLLWVFTPLILLILPYFTIFLLYLTIIFLHIYKRKNVLKEAYSHNLWDGARKTVATLWDGHAAVWHGYEVHGMEKIPEDGPALIIFYHGAIPIDFYYFMAKIFIHKGRTCRVVADHFVFKIPGFSLLLDVFCALHGPREKCVEILRSGHLLAISPGGVREALISDETYNIVWGHRRGFAQVAIDAKVPIIPMFTQNIREGF

SEQ ID NO: 91891 - protein, 144 aa, Homo sapiens
  Payload ID: 18400
  Gene Name: transmembrane protein 68
  ENSP ID: ENSP00000430838
MIDKNQTCGVGQDSVPYMICLIHILEEWFGVEQLEDYLNFANYLLWVFTPLILLILPYFTIFLLYLTIIFLHIYKRKNVLKEAYSHNLWDGARKTVATLWDGHAAVWHGFSLLLDVFCALHGPREKCVEILRSGHLLAISPGGV

SEQ ID NO: 91892 - protein, 134 aa, Homo sapiens
  Payload ID: 18400
  Gene Name: transmembrane protein 68
  ENSP ID: ENSP00000431018
IPEDGPALIIFYHGAIPIDFYYFMAKIFIHKGRTCRVVADHFVFKIPGFSLLLDVFCALHGPREKCVEILRSGHLLAISPGGVREALISDETYNIVWGHRRGFAQVAIDAKVGYLGGFMKNSAIHLLQCMEVFQ

SEQ ID NO: 91893 - protein, 135 aa, Homo sapiens; identical to SEQ ID NO: 91887
  Payload ID: 18400
  Gene Name: transmembrane protein 68
  Uniprot ID: Q96MH6
  ENSP ID: ENSP00000431047

SEQ ID NO: 91894 - protein, 324 aa, Homo sapiens; identical to SEQ ID NO: 91880
  Payload ID: 18400
  Gene Name: transmembrane protein 68
  Uniprot ID: Q96MH6
  ENSP ID: ENSP00000478242

SEQ ID NO: 91895 - protein, 91 aa, Homo sapiens
  Payload ID: 18400
  Gene Name: transmembrane protein 68
  ENSP ID: ENSP00000481143
MFTQNIREGFRSLGGTRLFRWLYEKFRYPFAPMYGGFPVKLRTYLGDPIPYDPQITAEELAEKTKNAVQALIDKHQRIPGNIMSALLERFH

SEQ ID NO: 91896 - protein, 247 aa, Homo sapiens
  Payload ID: 18401
  Gene Name: transmembrane protein 69
  Uniprot ID: Q5SWH9
  ENSP ID: ENSP00000361095
MLRFIQKFSQASSKILKYSFPVGLRTSRTDILSLKMSLQQNFSPCPRPWLSSSFPAYMSKTQCYHTSPCSFKKQQKQALLARPSSTITYLTDSPKPALCVTLAGLIPFVAPPLVMLMTKTYIPILAFTQMAYGASFLSFLGGIRWGFALPEGSPAKPDYLNLASSAAPLFFSWFAFLISERLSEAIVTVIMGMGVAFHLELFLLPHYPNWFKALRIVVTLLATFSFIITLVVKSSFPEKGHKRPGQV

SEQ ID NO: 91897 - protein, 260 aa, Homo sapiens
  Payload ID: 18402
  Gene Name: transmembrane protein 70
  Uniprot ID: Q9BUB7
  ENSP ID: ENSP00000312599
MLFLALGSPWAVELPLCGRRTALCAAAALRGPRASVSRASSSSGPSGPVAGWSTGPSGAARLLRRPGRAQIPVYWEGYVRFLNTPSDKSEDGRLIYTGNMARAVFGVKCFSYSTSLIGLTFLPYIFTQNNAISESVPLPIQIIFYGIMGSFTVITPVLLHFITKGYVIRLYHEATTDTYKAITYNAMLAETSTVFHQNDVKIPDAKHVFTTFYAKTKSLLVNPVLFPNREDYIHLMGYDKEEFILYMEETSEEKRHKDDK

SEQ ID NO: 91898 - protein, 111 aa, Homo sapiens
  Payload ID: 18402
  Gene Name: transmembrane protein 70
  ENSP ID: ENSP00000407695
MLFLALGSPWAVELPLCGRRTALCAAAALRGPRASVSRASSSSGPSGPVAGWSTGPSGAARLLRRPGRAQIPVYWEGYVRFLNTPSDKSEDGRLIYTGNMARAVFGWSAVA

SEQ ID NO: 91899 - protein, 107 aa, Homo sapiens
  Payload ID: 18402
  Gene Name: transmembrane protein 70
  Uniprot ID: Q9BUB7
  ENSP ID: ENSP00000429467
MLFLALGSPWAVELPLCGRRTALCAAAALRGPRASVSRASSSSGPSGPVAGWSTGPSGAARLLRRPGRAQIPVYWEGYVRFLNTPSDKSEDGRLIYTGNMARAVFGK

SEQ ID NO: 91900 - protein, 276 aa, Homo sapiens
  Payload ID: 18403
  Gene Name: transmembrane protein 71
  Uniprot ID: Q6P5X7
  ENSP ID: ENSP00000349296
MYRISQLMSTPVASSSRLEREYAGELSPTCIFPSFTCDSLDGYHSFECGSIDPLTGSHYTCRRSPRLLTNGYYIWTEDSFLCDKDGNITLNPSQTSVMYKENLVSTSKSWLHGSIFGDINSSPSEDNWLKGTRRLDTDHCNGNADDLDCSSLTDDWESGKMNAESVITSSSSHIISQPPGGNSHSLSLQSQLTASERFQENSSDHSETRLLQEVFFQAILLAVCLIISACARWFMGEILASVFTCSLMITVAYVKSLFLSLASYFKTTACARFVKI

SEQ ID NO: 91901 - protein, 232 aa, Homo sapiens
  Payload ID: 18403
  Gene Name: transmembrane protein 71
  Uniprot ID: Q6P5X7
  ENSP ID: ENSP00000367133
MYRISQLMSTPVASSSRLEREYAGELSPTCIFPSFTCDSLDGYHSFECGSIDPLTGSHYTCRRSPRLLTNGYYIWTEDSFLCDKDGNITLNPSQTSVMYKENLVRIFRKKKRICHSFSSLFNLSTSKSWLHGSIFGDINSSPSEDNWLKGTRRLDTDHCNGNETRLLQEVFFQAILLAVCLIISACARWFMGEILASVFTCSLMITVAYVKSLFLSLASYFKTTACARFVKI

SEQ ID NO: 91902 - protein, 313 aa, Homo sapiens
  Payload ID: 18403
  Gene Name: transmembrane protein 71
  ENSP ID: ENSP00000428228
MYRISQLMSTPVASSSRLEREYAGELSPTCIFPSFTCDSLDGYHSFECGSIDPLTGSHYTCRRSPRLLTNGYYIWTEDSFLCDKDGNITLNPSQTSVMYKENLVRIFRKKKRICHSFSSLFNLSTSKSWLHGSIFGDINSSPSEDNWLKGTRRLDTDHCNGNADDLDCSSLTDDWESGKMNAESVITSSSSHIISQPPGGNSHSLSLQSQLTASERFQENSSDHSETRLLQEVFFQAILLAVCLIISACARWFMGEILASVFTCSLMITVACLSKFDNHLGMPSMNVLHLNIWKLSNLQSTWNQVFYWKGVSE

SEQ ID NO: 91903 - protein, 41 aa, Homo sapiens
  Payload ID: 18403
  Gene Name: transmembrane protein 71
  ENSP ID: ENSP00000428397
MYKENLVRIFRKKKRICHSFSSLFNLSTSKSWLHGSIFGDI

SEQ ID NO: 91904 - protein, 100 aa, Homo sapiens
  Payload ID: 18403
  Gene Name: transmembrane protein 71
  ENSP ID: ENSP00000428772
  MOD_RES (1)..(1): Any amino acid
XDDLDCSSLTDDWESGKMNAESVITSSSSHIISQPPGGNSHSLSLQSQLTASERFQENSSDHSETRLLQEVFFQAILLAVCLIISACARNNNANHTMGED

SEQ ID NO: 91905 - protein, 99 aa, Homo sapiens
  Payload ID: 18403
  Gene Name: transmembrane protein 71
  ENSP ID: ENSP00000429873
MYRISQLMSTPVASSSRLEREYAGELSPTCIFPSFTCDSLDGYHSFECGSIDPLTGSHYTCRRSPRLLTNGYYIWTEDSFLCDKDGNITLNPSQTSVMY

SEQ ID NO: 91906 - protein, 91 aa, Homo sapiens
  Payload ID: 18403
  Gene Name: transmembrane protein 71
  ENSP ID: ENSP00000430239
MYRISQLMSTPVASSSRLEREYAGELSPTCIFPSFTCDSLDGYHSFECGSIDPLTGSHYTCRRSPRLLTNGYYIWTEDSFLCDKDGNITLN

SEQ ID NO: 91907 - protein, 63 aa, Homo sapiens
  Payload ID: 18403
  Gene Name: transmembrane protein 71
  ENSP ID: ENSP00000430847
MYKENLVRIFRKKKRICHSFSSLFNLSTSKSWLHGSIFGDINSSPSEDNWLKGTRRLDTDHCN

SEQ ID NO: 91908 - protein, 275 aa, Homo sapiens
  Payload ID: 18404
  Gene Name: transmembrane protein 72
  Uniprot ID: A0PK05
  ENSP ID: ENSP00000374234
MQLQVFWTGLEYTCRLLGITTAAVLIGVGTETFLQGQFKSLAFYLLFTGAAVSICEGAYFVAQLLAICFQCQPGSLADRVREKAHWLGCFQKFLAYLLLSVACFLHPVLVWHVTIPGSMLIITGLAYFLLSKRKKRKAAPEVLASPEQYTDPSSSAVSTTGSGDTEQTYTFHGALKEGPSSLFIHMKSILKGTKKPSALQPPNTLMELSLEPADSLAKKKQVHFEDNLVRIVPSLAEGLDDGDSEPEETTSDTTPIIPPPQAPLFLSSLTATGLF

SEQ ID NO: 91909 - protein, 157 aa, Homo sapiens
  Payload ID: 18404
  Gene Name: transmembrane protein 72
  Uniprot ID: A0PK05
  ENSP ID: ENSP00000439911
MLIITGLAYFLLSKRKKRKAAPEVLASPEQYTDPSSSAVSTTGSGDTEQTYTFHGALKEGPSSLFIHMKSILKGTKKPSALQPPNTLMELSLEPADSLAKKKQVHFEDNLVRIVPSLAEGLDDGDSEPEETTSDTTPIIPPPQAPLFLSSLTATGLF

SEQ ID NO: 91910 - protein, 305 aa, Homo sapiens
  Payload ID: 18405
  Gene Name: transmembrane protein 74
  Uniprot ID: Q96NL1
  ENSP ID: ENSP00000297459
MELHYLAKKSNQADLCDARDWSSRGLPGDQADTAATRAALCCQKQCASTPRATEMEGSKLSSSPASPSSSLQNSTLQPDAFPPGLLHSGNNQITAERKVCNCCSQELETSFTYVDKNINLEQRNRSSPSAKGHNHPGELGWENPNEWSQEAAISLISEEEDDTSSEATSSGKSIDYGFISAILFLVTGILLVIISYIVPREVTVDPNTVAAREMERLEKESARLGAHLDRCVIAGLCLLTLGGVILSCLLMMSMWKGELYRRNRFASSKESAKLYGSFNFRMKTSTNENTLELSLVEEDALAVQS

SEQ ID NO: 91911 - protein, 256 aa, Homo sapiens
  Payload ID: 18406
  Gene Name: transmembrane protein 74B
  Uniprot ID: Q9NUR3
  ENSP ID: ENSP00000371318
MPPAQGYEFAAAKGPRDELGPSFPMASPPGLELKTLSNGPQAPRRSAPLGPVAPTREGVENACFSSEEHETHFQNPGNTRLGSSPSPPGGVSSLPRSQRDDLSLHSEEGPALEPVSRPVDYGFVSALVFLVSGILLVVTAYAIPREARVNPDTVTAREMERLEMYYARLGSHLDRCIIAGLGLLTVGGMLLSVLLMVSLCKGELYRRRTFVPGKGSRKTYGSINLRMRQLNGDGGQALVENEVVQVSETSHTLQRS

SEQ ID NO: 91912 - protein, 154 aa, Homo sapiens
  Payload ID: 18406
  Gene Name: transmembrane protein 74B
  ENSP ID: ENSP00000400552
MPPAQGYEFAAAKGPRDELGPSFPMASPPGLELKTLSNGPQAPRRSAPLGPVAPTREGVENACFSSEEHETHFQNPGNTRLGSSPSPPGGVSSLPRSQRDDLSLHSEEGPALEPVSRPVDYGFVSALVFLVSGILLVVTAYAIPREARVNPDTV

SEQ ID NO: 91913 - protein, 136 aa, Homo sapiens
  Payload ID: 18407
  Gene Name: transmembrane protein 78
  Uniprot ID: Q5T7P6
  ENSP ID: ENSP00000324799
MWLDTRNLGIVISCWKGVCVPQTTTLEMFYNDNDRVEESSNSYQIRREFLLPACLPAFLSFSTSFSFFLSFLPLSLSLFLPFFPSFFLSLSLSPSFLPSFLRQGLALSPRLECDGAIMIHCSLNIPGSSDPPTSAS

SEQ ID NO: 91914 - protein, 394 aa, Homo sapiens
  Payload ID: 18408
  Gene Name: transmembrane protein 79
  Uniprot ID: Q9BSE2
  ENSP ID: ENSP00000295694
MTEQETLALLEVKRSDSPEKSSPQALVPNGRQPEGEGGAESPGAESLRVGSSAGSPTAIEGAEDGLDSTVSEAATLPWGTGPQPSAPFPDPPGWRDIEPEPPESEPLTKLEELPEDDANLLPEKAARAFVPIDLQCIERQPQEDLIVRCEAGEGECRTFMPPRVTHPDPTERKWAEAVVRPPGCSCGGCGSCGDREWLRAVASVGAALILFPCLLYGAYAFLPFDVPRLPTMSSRLIYTLRCGVFATFPIVLGILVYGLSLLCFSALRPFGEPRREVEIHRRYVAQSVQLFILYFFNLAVLSTYLPQDTLKLLPLLTGLFAVSRLIYWLTFAVGRSFRGFGYGLTFLPLLSMLMWNLYYMFVVEPERMLTATESRLDYPDHARSASDYRPRPWG

SEQ ID NO: 91915 - protein, 175 aa, Homo sapiens
  Payload ID: 18408
  Gene Name: transmembrane protein 79
  ENSP ID: ENSP00000350100
MTEQETLALLEVKRDPGVRAEPVMLFCPSALWGATAGGGDPPAICGPVGPALYSLLLQPGRAFHLPAPGYPQTAPSAHWSLCRLPADLLADLCRGPLLPRLRLRPDVSATAVDADVEPLLHVRGGAGAHAHCHREPPGLPGPRPLGLRLQAPPLGLSLSALALGVGGSGLGLTHL

SEQ ID NO: 91916 - protein, 394 aa, Homo sapiens; identical to SEQ ID NO: 91914
  Payload ID: 18408
  Gene Name: transmembrane protein 79
  Uniprot ID: Q9BSE2
  ENSP ID: ENSP00000384748

SEQ ID NO: 91917 - protein, 132 aa, Homo sapiens
  Payload ID: 18408
  Gene Name: transmembrane protein 79
  ENSP ID: ENSP00000394736
MTEQETLALLEVKRDPGVRAEPVMLFCPSALWGATAGGGDPPAICGPVGPALYSLLLQPGRAFHLPAPGYPQTAPSAHWSLCRLPADLLADLCRGPLLPRLRLRPDVSATAVDADVEPLLHVRGGAGAHAHC

SEQ ID NO: 91918 - protein, 216 aa, Homo sapiens
  Payload ID: 18409
  Gene Name: transmembrane protein 80
  ENSP ID: ENSP00000380646
MLPNVGSPPLPFRKCPSGAGRTNRASAVARTSAPETRRGRAPSSGDAKMAEGARARGPRGCRDRDGPAGGAGKMAAPRRGRGSSTVLSSVPLQMLFYLSGTYYALYFLATLLMITYKSQVFSYPHRYLVLDLALLFLMGILEAVRLYLGTRGNLTEAERPLAASLALTAGTALLSAHFLLWQALVLWADWALSATLLALHGLEAVLQVVAIAAFTR

SEQ ID NO: 91919 - protein, 160 aa, Homo sapiens
  Payload ID: 18409
  Gene Name: transmembrane protein 80
  Uniprot ID: Q96HE8
  ENSP ID: ENSP00000380648
MAEGARARGPRGCRDRDGPAGGAGRGSSTVLSSVPLQMLFYLSGTYYALYFLATLLMITYKSQVFSYPHRYLVLDLALLFLMGILEAVRLYLGTRGNLTEAERPLAASLALTAGTALLSAHFLLWQALVLWADWALSATLLALHGLEAVLQVVAIAAFTR

SEQ ID NO: 91920 - protein, 221 aa, Homo sapiens
  Payload ID: 18409
  Gene Name: transmembrane protein 80
  ENSP ID: ENSP00000436199
  MOD_RES (1)..(1): Any amino acid
XRDGPAGGAGKMAAPRRGRGSSTVLSSVPLQMLFYLSGTYYALYFLATLLMITYKSQVFSYPHRYLVLDLALLFLMGILEAVRLYLGTRGNLTEAERPLAASLALTAGTALLSAHFLLWQALVLWADWALSATLLALHGLEAVLQVVAIAAFTSGHGELQDSPEDPLHTPAPERLGPPPSPAPALAEDQLGTPAIWRTQPTNHADQGRTPSLKLETCCLHG

SEQ ID NO: 91921 - protein, 95 aa, Homo sapiens
  Payload ID: 18409
  Gene Name: transmembrane protein 80
  ENSP ID: ENSP00000475039
  MOD_RES (1)..(1): Any amino acid
XPAGGAGKMAAPRRGRGSSTVLSSVPLQMLFYLSGTYYALYFLATLLMITYKSQVFSYPHRYLVLDLALLFLMGILEAVRLYLGEWTVNTVKNLS

SEQ ID NO: 91922 - protein, 129 aa, Homo sapiens
  Payload ID: 18409
  Gene Name: transmembrane protein 80
  ENSP ID: ENSP00000476563
MLPNVGSPPLPFRKCPSGAGRTNRASAVARTSAPETRRGRAPSSGDAKMAEGARARGPRGCRDRDGPAGGAGKMAAPRRGRGSSTVLSSVPLQMLFYLSGTYYALYFLATSASQAGRPGARVDSGFLKQ

SEQ ID NO: 91923 - protein, 255 aa, Homo sapiens
  Payload ID: 18410
  Gene Name: transmembrane protein 81
  Uniprot ID: Q6P7N7
  ENSP ID: ENSP00000356135
MKVLATSFVLGSLGLAFYLPLVVTTPKTLAIPEKLQEAVGKVIINATTCTVTCGLGYKEETVCEVGPDGVRRKCQTRRLECLTNWICGMLHFTILIGKEFELSCLSSDILEFGQEAFRFTWRLARGVISTDDEVFKPFQANSHFVKFKYAQEYDSGTYRCDVQLVKNLRLVKRLYFGLRVLPPNLVNLNFHQSLTEDQKLIDEGLEVNLDSYSKPHHPKWKKKVASALGIGIAIGVVGGVLVRIVLCALRGGLQQ

SEQ ID NO: 91924 - protein, 343 aa, Homo sapiens
  Payload ID: 18411
  Gene Name: transmembrane protein 82
  Uniprot ID: A0PJX8
  ENSP ID: ENSP00000364938
MFSLPSLPSWLPGLPSLEWGSSLLDSLLQGLIGALGVLVLNSLLKVYFFVGCANDPQRRPEKERLRAQWASLETVHLAGLALFLTVVGSRVAALVVLEFSLRAVSTLLSLGKGSQGAAERLQLYLLCQYSLGCGLTCGLSFLQEGAPHRTLNLLLSLGLATLLGLGARRLHRHVCRLYELHSSQRYCGVCLGLLAHAHGLPQLLGRALAIAFAVGDLAAVALINQDFLTTSEAMRFWTPLTICYTLLVIYMQEEQRQHPGLQSQVQTVLVRMGGLFVLLLTVGRWLDLLGILVSLLGELWCLVGVRTLLDLCQIQDFPSQRPPVSTPSQPLPSAPQSQSSAPS

SEQ ID NO: 91925 - protein, 240 aa, Homo sapiens
  Payload ID: 18412
  Gene Name: transmembrane protein 86A
  Uniprot ID: Q8N2M4
  ENSP ID: ENSP00000280734
MVSPVTVVKSEGPKLVPFFKATCVYFVLWLPSSSPSWVSTLIKCLPIFCLWLFLLAHGLGFLLAHPSATRIFVGLVFSAVGDAFLIWQDQGYFVHGLLMFAVTHMFYASAFGMQPLALRTGLVMAALSGLCYALLYPCLSGAFTYLVGVYVALIGFMGWRAMAGLRLAGADWRWTELAAGSGALFFIISDLTIALNKFCFPVPYSRALIMSTYYVAQMLVALSAVESREPVEHYRLTKAN

SEQ ID NO: 91926 - protein, 226 aa, Homo sapiens
  Payload ID: 18413
  Gene Name: transmembrane protein 86B
  Uniprot ID: Q8N661
  ENSP ID: ENSP00000321038
MDAGKAGQTLKTHCSAQRPDVCRWLSPFILSCCVYFCLWIPEDQLSWFAALVKCLPVLCLAGFLWVMSPSGGYTQLLQGALVCSAVGDACLIWPAAFVPGMAAFATAHLLYVWAFGFSPLQPGLLLLIILAPGPYLSLVLQHLEPDMVLPVAAYGLILMAMLWRGLAQGGSAGWGALLFTLSDGVLAWDTFAQPLPHAHLVIMTTYYAAQLLITLSALRSPVPKTD

SEQ ID NO: 91927 - protein, 181 aa, Homo sapiens
  Payload ID: 18414
  Gene Name: transmembrane protein 87A
  Uniprot ID: Q8NBN3
  ENSP ID: ENSP00000305894
MAAAAWLQVLPVILLLLGAHPSPLSFFSAGPATVAAADRSKWHIPIPSGKNYFSFGKILFRNTTIFLKFDGEPCDLSLNITWYLKSADCYNEIYNFKAEEVELYLEKLKEKRGLSGKYQTSSKLFQNCSELFKTQTFSGDFMHRLPLLGEKQEAKENGTNLTFIGDKTIQMPFLKKHFLDC

SEQ ID NO: 91928 - protein, 555 aa, Homo sapiens
  Payload ID: 18414
  Gene Name: transmembrane protein 87A
  Uniprot ID: Q8NBN3
  ENSP ID: ENSP00000374484
MAAAAWLQVLPVILLLLGAHPSPLSFFSAGPATVAAADRSKWHIPIPSGKNYFSFGKILFRNTTIFLKFDGEPCDLSLNITWYLKSADCYNEIYNFKAEEVELYLEKLKEKRGLSGKYQTSSKLFQNCSELFKTQTFSGDFMHRLPLLGEKQEAKENGTNLTFIGDKTAMHEPLQTWQDAPYIFIVHIGISSSKESSKENSLSNLFTMTVEVKGPYEYLTLEDYPLMIFFMVMCIVYVLFGVLWLAWSACYWRDLLRIQFWIGAVIFLGMLEKAVFYAEFQNIRYKGESVQGALILAELLSAVKRSLARTLVIIVSLGYGIVKPRLGVTLHKVVVAGALYLLFSGMEGVLRVTGAQTDLASLAFIPLAFLDTALCWWIFISLTQTMKLLKLRRNIVKLSLYRHFTNTLILAVAASIVFIIWTTMKFRIVTCQSDWRELWVDDAIWRLLFSMILFVIMVLWRPSANNQRFAFSPLSEEEEEDEQKEPMLKESFEGMKMRSTKQEPNGNSKVNKAQEDDLKWVEENVPSSVTDVALPALLDSDEERMITHFERSKME

SEQ ID NO: 91929 - protein, 494 aa, Homo sapiens
  Payload ID: 18414
  Gene Name: transmembrane protein 87A
  Uniprot ID: Q8NBN3
  ENSP ID: ENSP00000405379
MAHSDTVVDGEPCDLSLNITWYLKSADCYNEIYNFKAEEVELYLEKLKEKRGLSGKYQTSSKLFQNCSELFKTQTFSGDFMHRLPLLGEKQEAKENGTNLTFIGDKTAMHEPLQTWQDAPYIFIVHIGISSSKESSKENSLSNLFTMTVEVKGPYEYLTLEDYPLMIFFMVMCIVYVLFGVLWLAWSACYWRDLLRIQFWIGAVIFLGMLEKAVFYAEFQNIRYKGESVQGALILAELLSAVKRSLARTLVIIVSLGYGIVKPRLGVTLHKVVVAGALYLLFSGMEGVLRVTGAQTDLASLAFIPLAFLDTALCWWIFISLTQTMKLLKLRRNIVKLSLYRHFTNTLILAVAASIVFIIWTTMKFRIVTCQSDWRELWVDDAIWRLLFSMILFVIMVLWRPSANNQRFAFSPLSEEEEEDEQKEPMLKESFEGMKMRSTKQEPNGNSKVNKAQEDDLKWVEENVPSSVTDVALPALLDSDEERMITHFERSKME

SEQ ID NO: 91930 - protein, 39 aa, Homo sapiens
  Payload ID: 18414
  Gene Name: transmembrane protein 87A
  ENSP ID: ENSP00000454278
MHRLPLLGEKQEAKENGTNLTFIGDKTAMHEPLQTWQDA

SEQ ID NO: 91931 - protein, 170 aa, Homo sapiens
  Payload ID: 18414
  Gene Name: transmembrane protein 87A
  ENSP ID: ENSP00000454539
MHRLPLLGEKQEAKENGTNLTFIGDKTAMHEPLQTWQDAPYIFIVHIGISSSKESSKENSLSNLFTMTVEVKGPYEYLTLEDYPLMIFFMVMCIVYVLFGVLWLAWSACYWRDLLRIQFWIGAVIFLGMLEKAVFYAEFQNIRYKGESVQGALILAELLSAVKRSLARTL

SEQ ID NO: 91932 - protein, 110 aa, Homo sapiens
  Payload ID: 18414
  Gene Name: transmembrane protein 87A
  ENSP ID: ENSP00000455343
MHRLPLLGEKQEAKENGTNLTFIGDKTAMHEPLQTWQDAPYIFIVHIGISSSKESSKENSLSNLFTMTVEVKGPYEYLTLEDYPLMIFFMVMCIVYVLFGVLWLAWSACY

SEQ ID NO: 91933 - protein, 57 aa, Homo sapiens
  Payload ID: 18414
  Gene Name: transmembrane protein 87A
  ENSP ID: ENSP00000456225
MAAAAWLQVLPVILLLLGAHPSPLSFFSAGPATVAAADRSKWHIPIPSLMENLVTCL

SEQ ID NO: 91934 - protein, 40 aa, Homo sapiens
  Payload ID: 18414
  Gene Name: transmembrane protein 87A
  ENSP ID: ENSP00000456940
MHRLPLLGEKQEAKENGTNLTFIGDKTIQMPFLKKHFLDC

SEQ ID NO: 91935 - protein, 195 aa, Homo sapiens
  Payload ID: 18414
  Gene Name: transmembrane protein 87A
  ENSP ID: ENSP00000457308
  MOD_RES (1)..(1): Any amino acid
XFYAEFQNIRYKGESVQGALILAELLSAVKRSLARTLVIIVSLGYGIVKPRLGVTLHKVVVAGALYLLFSGMEGVLRVTGYFSYPLTLIVNLALSAIDACVILWIFISLTQTMKLLKLRRNIVKLSLYRHFTNTLILAVAASIVFIIWTTMKFRIVTCQSDWRELWVDDAIWRLLFSMILFVIMVLWRPSANNQR

SEQ ID NO: 91936 - protein, 87 aa, Homo sapiens
  Payload ID: 18414
  Gene Name: transmembrane protein 87A
  ENSP ID: ENSP00000457874
MHRLPLLGEKQEAKENGTNLTFIGDKTAMHEPLQTWQDAPYIFIVHIGISSSKESSKENSLSNLFTMTVEVKGPYEYLTLEDYPLMI

SEQ ID NO: 91937 - protein, 555 aa, Homo sapiens
  Payload ID: 18415
  Gene Name: transmembrane protein 87B
  Uniprot ID: Q96K49
  ENSP ID: ENSP00000283206
MVAACRSVAGLLPRRRRCFPARAPLLRVALCLLCWTPAAVRAVPELGLWLETVNDKSGPLIFRKTMFNSTDIKLSVKSFHCSGPVKFTIVWHLKYHTCHNEHSNLEELFQKHKLSVDEDFCHYLKNDNCWTTKNENLDCNSDSQVFPSLNNKELINIRNVSNQERSMDVVARTQKDGFHIFIVSIKTENTDASWNLNVSLSMIGPHGYISASDWPLMIFYMVMCIVYILYGILWLTWSACYWKDILRIQFWIAAVIFLGMLEKAVFYSEYQNISNTGLSTQGLLIFAELISAIKRTLARLLVIIVSLGYGIVKPRLGTVMHRVIGLGLLYLIFAAVEGVMRVIGGSNHLAVVLDDIILAVIDSIFVWFIFISLAQTMKTLRLRKNTVKFSLYRHFKNTLIFAVLASIVFMGWTTKTFRIAKCQSDWMERWVDDAFWSFLFSLILIVIMFLWRPSANNQRYAFMPLIDDSDDEIEEFMVTSENLTEGIKLRASKSVSNGTAKPATSENFDEDLKWVEENIPSSFTDVALPVLVDSDEEIMTRSEMAEKMFSSEKIM

SEQ ID NO: 91938 - protein, 184 aa, Homo sapiens
  Payload ID: 18415
  Gene Name: transmembrane protein 87B
  ENSP ID: ENSP00000393998
  MOD_RES (1)..(1): Any amino acid
XPELGLWLETVNDKSGPLIFRKTMFNSTDIKLSVKSFHCSGPVKFTIVWHLKYHTCHNEHSNLEELFQKHKLSVDEDFCHYLKNDNCWTTKNENLDCNSDSQVFPSLNDVVARTQKDGFHIFIVSIKTENTDASWNLNVSLSMIGPHGYISASDWPLMIFYMVMCIVYILYGILWLTWSACYWK

SEQ ID NO: 91939 - protein, 112 aa, Homo sapiens
  Payload ID: 18415
  Gene Name: transmembrane protein 87B
  ENSP ID: ENSP00000400100
  MOD_RES (1)..(1): Any amino acid
XPELGLWLETVNDKSGPLIFRKTMFNSTDIKLSVKSFHCSGPVKFTIVWHLKYHTCHNEHSNLEELFQKHKLSVDEDFCHYLKNDNCWTTKNENLDCNSDSQVFPSLNFLFL

SEQ ID NO: 91940 - protein, 159 aa, Homo sapiens
  Payload ID: 18416
  Gene Name: transmembrane protein 88
  Uniprot ID: Q6PEY1
  ENSP ID: ENSP00000301599
MADVPGAQRAVPGDGPEPRDPLDCWACAVLVTAQNLLVAAFNLLLLVLVLGTILLPAVTMLGFGFLCHSQFLRSQAPPCTAHLRDPGFTALLVTGFLLLVPLLVLALASYRRLCLRLRLADCLVPYSRALYRRRRAPQPRQIRASPGSQAVPTSGKVWV

SEQ ID NO: 91941 - protein, 126 aa, Homo sapiens
  Payload ID: 18416
  Gene Name: transmembrane protein 88
  ENSP ID: ENSP00000459725
MADVPGAQRAVPGDGPEPRDPLDCWACAVLVTAQNLLVAAFNLLLLVLVLGTILLPAVTMLGFGFLCHSQDLKPGIFRPALPPPLPERSPSIPLGAAASVDPVLRKAPTSRKTHFPFTTHISILNI

SEQ ID NO: 91942 - protein, 163 aa, Homo sapiens
  Payload ID: 18417
  Gene Name: transmembrane protein 88B
  Uniprot ID: A6NKF7
  ENSP ID: ENSP00000455099
MSEQGRETEEEEGGGGASDTAPMLPRGPPDHQASALTCPGWSGPPLLPGRLLAGLLLHLLLPAAAFLLVLLPAAAVVYLGFLCHSRVHPAPGPRCRALFSDRGSAALIVFGLLSLPPLLVLASAVRARLARRLRPLLPPPAGTPGPRRPPGRPDEDEQLCAWV

SEQ ID NO: 91943 - protein, 159 aa, Homo sapiens
  Payload ID: 18418
  Gene Name: transmembrane protein 89
  Uniprot ID: A2RUT3
  ENSP ID: ENSP00000329557
MLHVLASLPLLLLLVTSASTHAWSRPLWYQVGLDLQPWGCQPKSVEGCRGGLSCPGYWLGPGASRIYPVAAVMITTTMLMICRKILQGRRRSQATKGEHPQVTTEPCGPWKRRAPISDHTLLRGVLHMLDALLVHIEGHLRHLATQRQIQIKGTSTQSG

SEQ ID NO: 91944 - protein, 578 aa, Homo sapiens
  Payload ID: 18419
  Gene Name: transmembrane protein 8A
  ENSP ID: ENSP00000250930
MEPDVPLPQTLLSHPSYLKVFVPDYTRELLLELRDCVSNGSLGCPVRLTVGPVTLPSNFQKVLTCTGAPWPCRLLLPSPPWDRWLQVTAESLVGPLGTVAFSAVAALTACRPRSVTIQPLLQSSQNQSFNASSGLLSPSPDHQDLGRSGRVDRSPFCLTNYPVTREDMDVVSVHFQPLDRVSVRVCSDTPSVMRLRLNTGMDSGGSLTISLRANKTEMRNETVVVACVNAASPFLGFNTSLNCTTAFFQGYPLSLSAWSRRANLIIPYPETDNWYLSLQLMCPENAEDCEQAVVHVETTLYLVPCLNDCGPYGQCLLLRRHSYLYASCSCKAGWRGWSCTDNSTAQTVAQQRAATLLLTLSNLMFLAPIAVSVRRFFLVEASVYAYTMFFSTFYHACDQPGEAVLCILSYDTLQYCDFLGSGAAIWVTILCMARLKTVLKYVLFLLGTLVIAMSLQLDRRGMWNMLGPCLFAFVIMASMWAYRCGHRRQCYPTSWQRWAFYLLPGVSMASVGIAIYTSMMTSDNYYYTHSIWHILLAGSAALLLPPPDQPAEPWACSQKFPCHYQICKNDREELYAVT

SEQ ID NO: 91945 - protein, 239 aa, Homo sapiens
  Payload ID: 18419
  Gene Name: transmembrane protein 8A
  ENSP ID: ENSP00000397620
  MOD_RES (1)..(1): Any amino acid
XLVPCLNDCGPYGQCLLLRRHSYLYASCSCKAGWRGWSCTDNSTAQTVAQQRAATLLLTLSNLMFLAPIAVSVRRFFLVEASVYAYTMFFSTFYHACDQPGEAVLCILSYDTLQYCDFLGSGAAIWVTILCMARLKTVLKYAYRCGHRRQCYPTSWQRWAFYLLPGVSMASVGIAIYTSMMTSDNYYYTHSIWHILLAGSAALLLPPPDQPAEPWACSQKFPCHYQICKNDREELYAVT

SEQ ID NO: 91946 - protein, 771 aa, Homo sapiens
  Payload ID: 18419
  Gene Name: transmembrane protein 8A
  Uniprot ID: Q9HCN3
  ENSP ID: ENSP00000401338
MGRAGTGTGGEAVAAVVAGPLLLLLLARPPPASAGYSGKSEVGLVSEHFSQAPQRLSFYSWYGSARLFRFRVPPDAVLLRWLLQVSRESGAACTDAEITVHFRSGAPPVINPLGTSFPDDTAVQPSFQVGVPLSTTPRSNASVNVSHPAPGDWFVAAHLPPSSQKIELKGLAPTCAYVFQPELLVTRVVEISIMEPDVPLPQTLLSHPSYLKVFVPDYTRELLLELRDCVSNGSLGCPVRLTVGPVTLPSNFQKVLTCTGAPWPCRLLLPSPPWDRWLQVTAESLVGPLGTVAFSAVAALTACRPRSVTIQPLLQSSQNQSFNASSGLLSPSPDHQDLGRSGRVDRSPFCLTNYPVTREDMDVVSVHFQPLDRVSVRVCSDTPSVMRLRLNTGMDSGGSLTISLRANKTEMRNETVVVACVNAASPFLGFNTSLNCTTAFFQGYPLSLSAWSRRANLIIPYPETDNWYLSLQLMCPENAEDCEQAVVHVETTLYLVPCLNDCGPYGQCLLLRRHSYLYASCSCKAGWRGWSCTDNSTAQTVAQQRAATLLLTLSNLMFLAPIAVSVRRFFLVEASVYAYTMFFSTFYHACDQPGEAVLCILSYDTLQYCDFLGSGAAIWVTILCMARLKTVLKYVLFLLGTLVIAMSLQLDRRGMWNMLGPCLFAFVIMASMWAYRCGHRRQCYPTSWQRWAFYLLPGVSMASVGIAIYTSMMTSDNYYYTHSIWHILLAGSAALLLPPPDQPAEPWACSQKFPCHYQICKNDREELYAVT

SEQ ID NO: 91947 - protein, 243 aa, Homo sapiens
  Payload ID: 18419
  Gene Name: transmembrane protein 8A
  ENSP ID: ENSP00000401931
RRANLIIPYPETDNWYLSLQLMCPENAEDCEQAVVHVETTLYLVPCLNDCGPYGQCLLLRRHSYLYASCSCKAGWRGWSCTDNSTAQTVAQQRAATLLLTLSNLMFLAPIAVSVRRFFLVEASVYAYTMFFSTFYHACDQPGEAVLCILSYDTLQYCDFLGSGAAIWVTILCMARLKTVLKYVLFLLGTLVIAMSLQLDRRGMWNMLGPCLFAFVIMASMWVRSRAGWHCCPGARRREPGPLL

SEQ ID NO: 91948 - protein, 21 aa, Homo sapiens
  Payload ID: 18419
  Gene Name: transmembrane protein 8A
  ENSP ID: ENSP00000410987
MEPDVPLPQTLLSHPSYLKVF

SEQ ID NO: 91949 - protein, 472 aa, Homo sapiens
  Payload ID: 18420
  Gene Name: transmembrane protein 8B
  Uniprot ID: A6NDV4
  ENSP ID: ENSP00000367227
MNMPQSLGNQPLPPEPPSLGTPAEGPGTTSPPEHCWPVRPTLRNELDTFSVHFYIFFGPSVALPPERPAVFAMRLLPVLDSGGVLSLELQLNASSVRQENVTVFGCLTHEVPLSLGDAAVTCSKESLAGFLLSVSATTRVARLRIPFPQTGTWFLALRSLCGVGPRFVRCRNATAEVRMRTFLSPCVDDCGPYGQCKLLRTHNYLYAACECKAGWRGWGCTDSADALTYGFQLLSTLLLCLSNLMFLPPVVLAIRSRYVLEAAVYTFTMFFSTFYHACDQPGIVVFCIMDYDVLQFCDFLGSLMSVWVTVIAMARLQPVVKQVLYLLGAMLLSMALQLDRHGLWNLLGPSLFALGILATAWTVRSVRRRHCYPPTWRRWLFYLCPGSLIAGSAVLLYAFVETRDNYFYIHSIWHMLIAGSVGFLLPPRAKTDHGVPSGARARGCGYQLCINEQEELGLVGPGGATVSSICAS

SEQ ID NO: 91950 - protein, 472 aa, Homo sapiens; identical to SEQ ID NO: 91949
  Payload ID: 18420
  Gene Name: transmembrane protein 8B
  Uniprot ID: A6NDV4
  ENSP ID: ENSP00000367230

SEQ ID NO: 91951 - protein, 338 aa, Homo sapiens
  Payload ID: 18420
  Gene Name: transmembrane protein 8B
  Uniprot ID: A6NDV4
  ENSP ID: ENSP00000367235
MNMPQSLGNQPLPPEPPSLGTPAEGPGTTSPPEHCWPVRPTLRNELDTFSVHFYIFFGPSVALPPERPAVFAMRLLPVLDSGGVLSLELQLNASSVRQENVTVFGCLTHEVPLSLGDAAVTCSKESLAGFLLSVSATTRVARLRIPFPQTGTWFLALRSLCGVGPRFVRCRNATAEVRMRTFLSPCVDDCGPYGQCKLLRTHNYLYAACECKAGWRGWGCTDSADALTYGFQLLSTLLLCLSNLMFLPPVVLAIRSRYVLEAAVYTFTMFFSTVCGGVCILSLGACAWWWVTVCISTTFSEGLGMSVPSLCLLQTETAVLPKLSCIDNGHFCKTHWSK

SEQ ID NO: 91952 - protein, 338 aa, Homo sapiens; identical to SEQ ID NO: 91951
  Payload ID: 18420
  Gene Name: transmembrane protein 8B
  Uniprot ID: A6NDV4
  ENSP ID: ENSP00000395810

SEQ ID NO: 91953 - protein, 221 aa, Homo sapiens
  Payload ID: 18421
  Gene Name: transmembrane protein 8C
  Uniprot ID: A6NI61
  ENSP ID: ENSP00000419712
MGTLVAKLLLPTLSSLAFLPTVSIAAKRRFHMEAMVYLFTLFFVALHHACNGPGLSVLCFMRHDILEYFSVYGTALSMWVSLMALADFDEPKRSTFVMFGVLTIAVRIYHDRWGYGVYSGPIGTAILIIAAKWLQKMKEKKGLYPDKSVYTQQIGPGLCFGALALMLRFFFEDWDYTYVHSFYHCALAMSFVLLLPKVNKKAGSPGTPAKLDCSTLCCACV

SEQ ID NO: 91954 - protein, 183 aa, Homo sapiens
  Payload ID: 18422
  Gene Name: transmembrane protein 9
  Uniprot ID: Q9P0T7
  ENSP ID: ENSP00000356299
MKLLSLVAVVGCLLVPPAEANKSSEDIRCKCICPPYRNISGHIYNQNVSQKDCNCLHVVEPMPVPGHDVEAYCLLCECRYEERSTTTIKVIIVIYLSVVGALLLYMAFLMLVDPLIRKPDAYTEQLHNEEENEDARSMAAAAASLGGPRANTVLERVEGAQQRWKLQVQEQRKTVFDRHKMLS

SEQ ID NO: 91955 - protein, 186 aa, Homo sapiens
  Payload ID: 18422
  Gene Name: transmembrane protein 9
  ENSP ID: ENSP00000356301
MKLLSLVAVVGCLLVPPAEANKVRESSEDIRCKCICPPYRNISGHIYNQNVSQKDCNCLHVVEPMPVPGHDVEAYCLLCECRYEERSTTTIKVIIVIYLSVVGALLLYMAFLMLVDPLIRKPDAYTEQLHNEEENEDARSMAAAAASLGGPRANTVLERVEGAQQRWKLQVQEQRKTVFDRHKMLS

SEQ ID NO: 91956 - protein, 183 aa, Homo sapiens; identical to SEQ ID NO: 91954
  Payload ID: 18422
  Gene Name: transmembrane protein 9
  Uniprot ID: Q9P0T7
  ENSP ID: ENSP00000356302

SEQ ID NO: 91957 - protein, 183 aa, Homo sapiens; identical to SEQ ID NO: 91954
  Payload ID: 18422
  Gene Name: transmembrane protein 9
  Uniprot ID: Q9P0T7
  ENSP ID: ENSP00000356303

SEQ ID NO: 91958 - protein, 138 aa, Homo sapiens
  Payload ID: 18422
  Gene Name: transmembrane protein 9
  ENSP ID: ENSP00000390184
MKLLSLVAVVGCLLVPPAEANKSSEDIRCKCICPPYRNISGHIYNQNVSQKDCNCLHVVEPMPVPGHDVEAYCLLCECRYEERSTTTIKVIIVIYLSVVGALLLYMAFLMLVDPLIRKPDAYTEQLHNEEENEDARSM

SEQ ID NO: 91959 - protein, 163 aa, Homo sapiens
  Payload ID: 18422
  Gene Name: transmembrane protein 9
  ENSP ID: ENSP00000398557
MKLLSLVAVVGCLLVPPAEANKVREVSLQHLVTTTVHGHPVYRADSESSEDIRCKCICPPYRNISGHIYNQNVSQKDCNCLHVVEPMPVPGHDVEAYCLLCECRYEERSTTTIKVIIVIYLSVVGALLLYMAFLMLVDPLIRKPDAYTEQLHNEEENEDARSM

SEQ ID NO: 91960 - protein, 151 aa, Homo sapiens
  Payload ID: 18422
  Gene Name: transmembrane protein 9
  ENSP ID: ENSP00000405329
MKLLSLVAVVGCLLVPPAEANKSSEDIRCKCICPPYRNISGHIYNQNVSQKDCPVSLCCSNCLHVVEPMPVPGHDVEAYCLLCECRYEERSTTTIKVIIVIYLSVVGALLLYMAFLMLVDPLIRKPDAYTEQLHNEEENEDARSMAAAAAS

SEQ ID NO: 91961 - protein, 98 aa, Homo sapiens
  Payload ID: 18422
  Gene Name: transmembrane protein 9
  ENSP ID: ENSP00000437181
MKLLSLVAVVGCLLVPPAEANKSSEDIRCKCICPPYRNISGHIYNQNVSQKDCNCLHVVEPMPVPGHDVEAYCLLCECRSSLSSTCPWWVPCCSTWPS

SEQ ID NO: 91962 - protein, 183 aa, Homo sapiens; identical to SEQ ID NO: 91954
  Payload ID: 18422
  Gene Name: transmembrane protein 9
  Uniprot ID: Q9P0T7
  ENSP ID: ENSP00000476893

SEQ ID NO: 91963 - protein, 122 aa, Homo sapiens
  Payload ID: 18423
  Gene Name: transmembrane protein 91
  ENSP ID: ENSP00000345589
MDSPSLRELQQPLLEGTECETPAQKPGRHELGSPLREIAFAESLRGLQFLSPPLPSVSAGLGEPRPPDVEDMSSSDSDSDWDGGSRLSPFLPHDHLGLAVFSMLCCFWPVGIAAFCLAQKTN

SEQ ID NO: 91964 - protein, 139 aa, Homo sapiens
  Payload ID: 18423
  Gene Name: transmembrane protein 91
  Uniprot ID: Q6ZNR0
  ENSP ID: ENSP00000348750
MDSPSLRELQQPLLEGTECETPAQKPGRHELGSPLREIAFAESLRGLQFLSPPLPSVSAGLGEPRPPDVEDMSSSDSDSDWDGGSRLSPFLPHDHLGLAVFSMLCCFWPVGIAAFCLAQKHPQCLTYSRCYVSAFGIHA

SEQ ID NO: 91965 - protein, 172 aa, Homo sapiens
  Payload ID: 18423
  Gene Name: transmembrane protein 91
  Uniprot ID: Q6ZNR0
  ENSP ID: ENSP00000375859
MDSPSLRELQQPLLEGTECETPAQKPGRHELGSPLREIAFAESLRGLQFLSPPLPSVSAGLGEPRPPDVEDMSSSDSDSDWDGGSRLSPFLPHDHLGLAVFSMLCCFWPVGIAAFCLAQKTNKAWAKGDIQGAGAASRRAFLLGVLAVGLGVCTYAAALVTLAAYLASRDPP

SEQ ID NO: 91966 - protein, 127 aa, Homo sapiens
  Payload ID: 18423
  Gene Name: transmembrane protein 91
  Uniprot ID: Q6ZNR0
  ENSP ID: ENSP00000405647
MDSPSLRELQQPLLEGTECETPAQKPGRHELGSPLREIAFAESLRGLQFLSPPLPSVSAGLGEPRPPDVEDMSSSDSDSDWDGGSRLSPFLPHDHLGLAVFSMLCCFWPVGIAAFCLAQKLPLQPSL

SEQ ID NO: 91967 - protein, 123 aa, Homo sapiens
  Payload ID: 18423
  Gene Name: transmembrane protein 91
  Uniprot ID: Q6ZNR0
  ENSP ID: ENSP00000407003
MDSPSLRELQQPLLEGTECETPAQKPGRHELGSPLREIAFAESLRGLQFLSPPLPSVSAGLGEPRPPDVEDMSSSDSDSDWDGGSRLSPFLPHDHLGLAVFSMLCCFWPVGIAAFCLAQKPSL

SEQ ID NO: 91968 - protein, 133 aa, Homo sapiens
  Payload ID: 18423
  Gene Name: transmembrane protein 91
  Uniprot ID: Q6ZNR0
  ENSP ID: ENSP00000413192
MDSPSLRELQQPLLEGTECETPAQKPGRHELGSPLREIAFAESLRGLQFLSPPLPSVSAGLGEPRPPDVEDMSSSDSDSDWDGGSRLSPFLPHDHLGLAVFSMLCCFWPVGIAAFCLAQKTRPSCPYSPHCEP

SEQ ID NO: 91969 - protein, 133 aa, Homo sapiens; identical to SEQ ID NO: 91968
  Payload ID: 18423
  Gene Name: transmembrane protein 91
  Uniprot ID: Q6ZNR0
  ENSP ID: ENSP00000437779

SEQ ID NO: 91970 - protein, 114 aa, Homo sapiens
  Payload ID: 18423
  Gene Name: transmembrane protein 91
  ENSP ID: ENSP00000437868
MDSPSLRELQQPLLEGTECETPAQKPGRHELGSPLREIAFAESLRGLQFLSPPLPSVSAGLGEPRPPDVEDMSSSDSDSDWDGGSRLSPFLPHDHLGLAVFSMLCCFWPVGIAA

SEQ ID NO: 91971 - protein, 132 aa, Homo sapiens
  Payload ID: 18423
  Gene Name: transmembrane protein 91
  ENSP ID: ENSP00000440225
MDSPSLRELQQPLLEGTECETPAQKPGRHELGSPLREIAFAESLRGLQFLSPPLPSVSAGLGEPRPPDVEDMSSSDSDSDWDGGSRLSPFLPHDHLGLAVFSMLCCFWPVGIAAFCLAQKVSLCVGLGGDWA

SEQ ID NO: 91972 - protein, 63 aa, Homo sapiens
  Payload ID: 18423
  Gene Name: transmembrane protein 91
  ENSP ID: ENSP00000440752
EGTECETPAQKPGRHELGSPLREIAFAESLRGLQFLSPPLPSVSAGLGEPRPPDVELPLQPSL

SEQ ID NO: 91973 - protein, 87 aa, Homo sapiens
  Payload ID: 18423
  Gene Name: transmembrane protein 91
  ENSP ID: ENSP00000441729
  MOD_RES (1)..(1): Any amino acid
XLPSVSAGLGEPRPPDVEDMSSSDSDSDWDGGSRLSPFLPHDHLGLAVFSMLCCFWPVGIAAFCLAQKHPQCLTYSRCYVSAFGIHA

SEQ ID NO: 91974 - protein, 132 aa, Homo sapiens; identical to SEQ ID NO: 91971
  Payload ID: 18423
  Gene Name: transmembrane protein 91
  ENSP ID: ENSP00000441900

SEQ ID NO: 91975 - protein, 60 aa, Homo sapiens
  Payload ID: 18423
  Gene Name: transmembrane protein 91
  ENSP ID: ENSP00000443375
  MOD_RES (1)..(1): Any amino acid
XWDGGSRLSPFLPHDHLGLAVFSMLCCFWPVGIAAFCLAQKHPQCLTYSRCYVSAFGIHA

SEQ ID NO: 91976 - protein, 190 aa, Homo sapiens
  Payload ID: 18423
  Gene Name: transmembrane protein 91
  ENSP ID: ENSP00000474871
MRCGFAGGVGHQRKRTRRRRLNPGDETQGSRPEEGDPERKESQAGKQGNPSWSFPKAMDSPSLRELQQPLLEGTECETPAQKPGRHELGSPLREIAFAESLRGLQFLSPPLPSVSAGLGEPRPPDVEDMSSSDSDSDWDGGSRLSPFLPHDHLGLAVFSMLCCFWPVGIAAFCLAQKTRPSCPYSPHCEP

SEQ ID NO: 91977 - protein, 159 aa, Homo sapiens
  Payload ID: 18424
  Gene Name: transmembrane protein 92
  Uniprot ID: Q6UXU6
  ENSP ID: ENSP00000300433
MSQAWVPGLAPTLLFSLLAGPQKIAAKCGLILACPKGFKCCGDSCCQENELFPGPVRIFVIIFLVILSVFCICGLAKCFCRNCREPEPDSPVDCRGPLELPSIIPPERVRVSLSAPPPPYSEVILKPSLGPTPTEPPPPYSFRPEEYTGDQRGIDNPAF

SEQ ID NO: 91978 - protein, 159 aa, Homo sapiens; identical to SEQ ID NO: 91977
  Payload ID: 18424
  Gene Name: transmembrane protein 92
  Uniprot ID: Q6UXU6
  ENSP ID: ENSP00000425144

SEQ ID NO: 91979 - protein, 1356 aa, Homo sapiens
  Payload ID: 18425
  Gene Name: transmembrane protein 94
  Uniprot ID: Q12767
  ENSP ID: ENSP00000313885
MDLKEKHLGEPPSALGLSTRKALSVLKEQLEAVLEGHLRERKKCLTWKEVWRSSFLHHSNRCSCFHWPGASLMLLAVLLLLGCCGGQPAGSRGVGLVNASALFLLLLLNLVLIGRQDRLKRREVERRLRGIIDQIQDALRDGREIQWPSAMYPDLHMPFAPSWSLHWAYRDGHLVNLPVSLLVEGDIIALRPGQESFASLRGIKDDEHIVLEPGDLFPPFSPPPSPRGEVERGPQSPQQHRLFRVLETPVIDNIRWCLDMALSRPVTALDNERFTVQSVMLHYAVPVVLAGFLITNALRFIFSAPGVTSWQYTLLQLQVNGVLPILPLLFPVLWVLATACGEARVLAQMSKASPSSLLAKFSEDTLSSYTEAVSSQEMLRCIWGHFLRVLGGTSPTLSHSSSLLHSLGSVTVLCCVDKQGILSWPNPSPETVLFFSGKVEPPHSSHEDLTDGLSTRSFCHPEPHERDALLAGSLNNTLHLSNEQERGDWPGEAPKPPEPYSHHKAHGRSKHPSGSNVSFSRDTEGGEEEPSKTQPGMESDPYEAEDFVCDYHLEMLSLSQDQQNPSCIQFDDSNWQLHLTSLKPLGLNVLLNLCDASVTERLCRFSDHLCNIALQESHSAVLPVHVPWGLCELARLIGFTPGAKELFKQENHLALYRLPSAETMKETSLGRLSCVTKRRPPLSHMISLFIKDTTTSTEQMLSHGTADVVLEACTDFWDGADIYPLSGSDRKKVLDFYQRACLSGYCSAFAYKPMNCALSSQLNGKCIELVQVPGQSSIFTMCELPSTIPIKQNARRSSWSSDEGIGEVLEKEDCMQALSGQIFMGMVSSQYQARLDIVRLIDGLVNACIRFVYFSLEDELKSKVFAEKMGLETGWNCHISLTPNGDMPGSEIPPSSPSHAGSLHDDLNQVSRDDAEGLLLMEEEGHSDLISFQPTDSDIPSFLEDSNRAKLPRGIHQVRPHLQNIDNVPLLVPLFTDCTPETMCEMIKIMQEYGEVTCCLGSSANLRNSCLFLQSDISIALDPLYPSRCSWETFGYATSISMAQASDGLSPLQLSGQLNSLPCSLTFRQEETISIIRLIEQARHATYGIRKCFLFLLQCQLTLVVIQFLSCLVQLPPLLSTTDILWLSCFCYPLLSISLLGKPPHSSIMSMATGKNLQSIPKKTQHYFLLCFLLKFSLTISSCLICFGFTLQSFCDSSRDRNLTNCSSVMLPSNDDRAPAWFEDFANGLLSAQKLTAALIVLHTVFISITHVHRTKPLWRKSPLTNLWWAVTVPVVLLGQVVQTAVDLQLWTHRDSHVHFGLEDVPLLTWLLGCLSLVLVVVTNEIVKLHEIRVRVRYQKRQKLQFETKLGMNSPF

SEQ ID NO: 91980 - protein, 1366 aa, Homo sapiens
  Payload ID: 18425
  Gene Name: transmembrane protein 94
  ENSP ID: ENSP00000364397
MLFKQAELWMPHQGKGNKGEPPSALGLSTRKALSVLKEQLEAVLEGHLRERKKCLTWKEVWRSSFLHHSNRCSCFHWPGASLMLLAVLLLLGCCGGQPAGSRGVGLVNASALFLLLLLNLVLIGRQDRLKRREVERRLRGIIDQIQDALRDGREIQWPSAMYPDLHMPFAPSWSLHWAYRDGHLVNLPVSLLVEGDIIALRPGQESFASLRGIKDDEHIVLEPGDLFPPFSPPPSPRGEVERGPQSPQQHRLFRVLETPVIDNIRWCLDMALSRPVTALDNERFTVQSVMLHYAVPVVLAGFLITNALRFIFSAPGVTSWQYTLLQLQVNGVLPILPLLFPVLWVLATACGEARVLAQMSKASPSSLLAKFSEDTLSSYTEAVSSQEMLRCIWGHFLRVLGGTSPTLSHSSSLLHSLGSVTVLCCVDKQGILSWPNPSPETVLFFSGKVEPPHSSHEDLTDGLSTRSFCHPEPHERDALLAGSLNNTLHLSNEQERGDWPGEAPKPPEPYSHHKAHGRSKHPSGSNVSFSRDTEGGEEEPSKTQPGMESDPYEAEDFVCDYHLEMLSLSQDQQNPSCIQFDDSNWQLHLTSLKPLGLNVLLNLCDASVTERLCRFSDHLCNIALQESHSAVLPVHVPWGLCELARLIGFTPGAKELFKQENHLALYRLPSAETMKETSLGRLSCVTKRRPPLSHMISLFIKDTTTSTEQMLSHGTADVVLEACTDFWDGADIYPLSGSDRKKVLDFYQRACLSGYCSAFAYKPMNCALSSQLNGKCIELVQVPGQSSIFTMCELPSTIPIKQNARRSSWSSDEGIGEVLEKEDCMQALSGQIFMGMVSSQYQARLDIVRLIDGLVNACIRFVYFSLEDELKSKVFAEKMGLETGWNCHISLTPNGDMPGSEIPPSSPSHAGSLHDDLNQVSRDDAEGLLLMEEEGHSDLISFQPTDSDIPSFLEDSNRAKLPRGIHQVRPHLQNIDNVPLLVPLFTDCTPETMCEMIKIMQEYGEVTCCLGSSANLRNSCLFLQSDISIALDPLYPSRCSWETFGYATSISMAQASDGLSPLQLSGQLNSLPCSLTFRQEETISIIRLIEQARHATYGIRKCFLFLLQCQLTLVVIQFLSCLVQLPPLLSTTDILWLSCFCYPLLSISLLGKPPHSSIMSMATGKNLQSIPKKTQHYFLLCFLLKFSLTISSCLICFGFTLQSFCDSSRDRNLTNCSSVMLPSNDDRAPAWFEDFANGLLSAQKLTAALIVLHTVFISITHVHRTKPLWRKSPLTNLWWAVTVPVVLLGQVVQTAVDLQLWTHRDSHVHFGLEDVPLLTWLLGCLSLVLVVVTNEIVKLHEIRVRVRYQKRQKLQFETKLGMNSPF

SEQ ID NO: 91981 - protein, 128 aa, Homo sapiens
  Payload ID: 18425
  Gene Name: transmembrane protein 94
  ENSP ID: ENSP00000462084
PHSSIMSMATGKNLQSIPKKTQHYFLLCFLLKFSLTISSCLICFGFTLQSFCDSSRDRNLTNCSSVMLPRAPAWFEDFANGLLSAQKLTAALIVLHTVFISITHVHRTKPLWRKSPLTNLWWAVTVPV

SEQ ID NO: 91982 - protein, 57 aa, Homo sapiens
  Payload ID: 18425
  Gene Name: transmembrane protein 94
  ENSP ID: ENSP00000462170
MDLKEKHLGEPPSALGLSTRKALSVLKEQLEAVLEGHLRERKKCLTWKEVWRSSFLH

SEQ ID NO: 91983 - protein, 162 aa, Homo sapiens
  Payload ID: 18425
  Gene Name: transmembrane protein 94
  ENSP ID: ENSP00000462344
MLFKQAELWMPHQGKGNKGEPPSALGLSTRKALSVLKEQLEAVLEGHLRERKKCLTWKEVWRSSFLHHSNRCSCFHWPGASLMLLAVLLLLGCCGGQPAGSRGVGLVNASALFLLLLLNLVLIGRQDRLKRREVERRLRGIIDQIQASSLPPHSDAETTHQS

SEQ ID NO: 91984 - protein, 35 aa, Homo sapiens
  Payload ID: 18425
  Gene Name: transmembrane protein 94
  ENSP ID: ENSP00000462821
MLLAVLLLLGCCGGQPAGSRGVGLVNASALFLLLL

SEQ ID NO: 91985 - protein, 176 aa, Homo sapiens
  Payload ID: 18425
  Gene Name: transmembrane protein 94
  ENSP ID: ENSP00000463046
  MOD_RES (1)..(1): Any amino acid
XWLSCFCYPLLSISLLGKPPHSSIMSMATGKNLQSIPKKSFCDSSRDRNLTNCSSVMLPSNDDRAPAWFEDFANGLLSAQKLTAALIVLHTVFISITHVHRTKPLWRKSPLTNLWWAVTVPVVLLGQVVQTAVDLQLWTHRDSHVHFGLEDVPLLTWLLGCLSLVLVVVTNEIVKL

SEQ ID NO: 91986 - protein, 302 aa, Homo sapiens
  Payload ID: 18425
  Gene Name: transmembrane protein 94
  ENSP ID: ENSP00000463487
  MOD_RES (1)..(1): Any amino acid
XGKVEPPHSSHEDLTDGLSTRSFCHPEPHERDALLAGSLNNTLHLSNEQERGDWPGEAPKPPEPYSHHKAHGRSKHPSGSNTQPGMESDPYEAEDFVCDYHLEMLSLSQDQQNPSCIQFDDSNWQLHLTSLKPLGLNVLLNLCDASVTERLCRFSDHLCNIALQESHSAVLPVHVPWGLCELARLIGFTPGAKELFKQENHLALYRLPSAETMKETSLGRLSCVTKRRPPLSHMISLFIKDTTTSTEQMLSHGTADVVLEACTDFWDGADIYPLSGSDRKKVLDFYQRACLSGYCSAFAYKP

SEQ ID NO: 91987 - protein, 125 aa, Homo sapiens
  Payload ID: 18425
  Gene Name: transmembrane protein 94
  ENSP ID: ENSP00000463620
MDLKEKHLGEPPSALGLSTRKALSVLKEQLEAVLEGHLRERKKCLTWKEVWRSSFLHHSNRCSCFHWPGASLMLLAVLLLLGCCGGQPAGSRGVGLVNASALFLLLLLNLVLIGRQDRLKRREVE

SEQ ID NO: 91988 - protein, 1007 aa, Homo sapiens [sequence omitted]

SEQ ID NO: 91989 - protein, 88 aa, Homo sapiens
  Payload ID: 18425
  Gene Name: transmembrane protein 94
  ENSP ID: ENSP00000464370
MSKASPSSLLAKFSEDTLSSYTEAVSSQEMLRCIWGHFLRVLGGTSPTLSHSSSLLHSLGSVTVLCCVDKQGILSWPNPSPETVLFFS

SEQ ID NO: 91990 - protein, 73 aa, Homo sapiens
  Payload ID: 18425
  Gene Name: transmembrane protein 94
  ENSP ID: ENSP00000464375
  MOD_RES (1)..(1): Any amino acid
XRDALLAGSLNNTLHLSNEQERGDWPGEAPKPPEPYSHHKAHGRSKHPSGSNVSFSRDTEGGEEEPSKLLPVS

SEQ ID NO: 91991 - protein, 295 aa, Homo sapiens
  Payload ID: 18425
  Gene Name: transmembrane protein 94
  ENSP ID: ENSP00000464437
YATSISMAQASDGLSPLQLSGQLNSLPCSLTFRQEETISIIRLIEQFLSCLVQLPPLLSTTDILWLSCFCYPLLSISLLGKPPHSSIMSMATGKNLQSIPKKTQHYFLLCFLLKFSLTISSCLICFGFTLQSFCDSSRDRNLTNCSSVMLPSNDDRAPAWFEDFANGLLSAQKLTAALIVLHTVFISITHVHRTKPLWRKSPLTNLWWAVTVPVVLLGQVVQTAVDLQLWTHRDSHVHFGLEDVPLLTWLLGCLSLVLVVVTNEIVKLHEIRVRVRYQKRQKLQFETKLGMNSPF

SEQ ID NO: 91992 - protein, 121 aa, Homo sapiens
  Payload ID: 18425
  Gene Name: transmembrane protein 94
  ENSP ID: ENSP00000464479
MDLKEKHLGEPPSALGLSTRKALSVLKEQLEAVLEGHLRERKKCLTWKEVWRSSFLHHSNRCSCFHWPGASLMLLAVLLLLGCCGGQPAGSRGVGLVNASALFLLLLLNLVLIGRQDRLKR

SEQ ID NO: 91993 - protein, 56 aa, Homo sapiens
  Payload ID: 18425
  Gene Name: transmembrane protein 94
  ENSP ID: ENSP00000464491
  MOD_RES (1)..(1): Any amino acid
XLLLNLVLIGRQDRLKRREVERRLRGIIDQIQDGAWTWPCPDQSLPWTMSGSQCSR

SEQ ID NO: 91994 - protein, 256 aa, Homo sapiens
  Payload ID: 18425
  Gene Name: transmembrane protein 94
  ENSP ID: ENSP00000464679
EMLRCIWGHFLRVLGGTSPTLSHSSSLLHSLGSVTVLCCVDKQGILSWPNPSPETVLFFSGKVEPPHSSHEDLTDGLSTRSFCHPEVEEEPHERDALLAGSLNNTLHLSNEQERGDWPGEAPKPPEPYSHHKAHGRSKHPSGSNVSFSRDTEGGEEEPSKTQPGMESDPYEAEDFVCDYHLEMLSLSQDQQNPSCIQFDDSNWQLHLTSLKPLGLNVLLNLCDASVTERLCRFSDHLCNIALQESHSAVLPVHVPW

SEQ ID NO: 91995 - protein, 184 aa, Homo sapiens
  Payload ID: 18426
  Gene Name: transmembrane protein 95
  Uniprot ID: Q3KNT9
  ENSP ID: ENSP00000331466
MWRLALGGVFLAAAQACVFCRLPAHDLSGRLARLCSQMEARQKECGASPDFSAFALDEVSMNKVTEKTHRVLRVMEIKEAVSSLPSYWSWLRKTKLPEYTREALCPPACPLPLLSPAGGSTTLYNCSTCKGTEVSCWPRKRCFPGSQDLWEAKILLLSIFGAFLLLGVLSLLVESHHLQAKSGL

SEQ ID NO: 91996 - protein, 203 aa, Homo sapiens
  Payload ID: 18426
  Gene Name: transmembrane protein 95
  Uniprot ID: Q3KNT9
  ENSP ID: ENSP00000374632
MWRLALGGVFLAAAQACVFCRLPAHDLSGRLARLCSQMEARQKECGASPDFSAFALDEVSMNKVTEKTHRVLRVMEIKEAVSSLPSYWSWLRKTKLPEYTREALCPPACRGSTTLYNCSTCKGTEVSCWPRKRCFPGSLGSQDSAPLHLRSFPASGCSEPPGGVPPPPSKKWLVKTLKTSQPPALRGMHSQLPHPLEGNQSAP

SEQ ID NO: 91997 - protein, 176 aa, Homo sapiens
  Payload ID: 18426
  Gene Name: transmembrane protein 95
  Uniprot ID: Q3KNT9
  ENSP ID: ENSP00000460828
MWRLALGGVFLAAAQACVFCRLPAHDLSGRLARLCSQMEARQKECGASPDFSAFALDEVSMNKVTEKTHRVLRVMEIKEAVSSLPSYWSWLRKTKLPEYTREALCPPACRGSTTLYNCSTCKGTEVSCWPRKRCFPGSQDLWEAKILLLSIFGAFLLLGVLSLLVESHHLQAKSGL

SEQ ID NO: 91998 - protein, 176 aa, Homo sapiens
  Payload ID: 18427
  Gene Name: transmembrane protein 97
  Uniprot ID: Q5BJF2
  ENSP ID: ENSP00000226230
MGAPATRRCVEWLLGLYFLSHIPITLFMDLQAVLPRELYPVEFRNLLKWYAKEFKDPLLQEPPAWFKSFLFCELVFQLPFFPIATYAFLKGSCKWIRTPAIIYSVHTMTTLIPILSTFLFEDFSKASGFKGQRPETLHERLTLVSVYAPYLLIPFILLIFMLRSPYYKYEEKRKKK

SEQ ID NO: 91999 - protein, 92 aa, Homo sapiens
  Payload ID: 18427
  Gene Name: transmembrane protein 97
  ENSP ID: ENSP00000462827
MGAPATRRCVEWLLGLYFLSHIPITLFMDLQAVLPRELYPVEFRNLLKWYAKEFKDPLLQEPPAWFKSFLFCELVFQLPFFPIATYAFLKGW

SEQ ID NO: 92000 - protein, 118 aa, Homo sapiens
  Payload ID: 18427
  Gene Name: transmembrane protein 97
  ENSP ID: ENSP00000462924
GVAAGPLLPQPHPHHPVHGPAGGAAARALPSRGSCKWIRTPAIIYSVHTMTTLIPILSTFLFEDFSKASGFKGQRPETLHERLTLVSVYAPYLLIPFILLIFMLRSPYYKYEEKRKKK

SEQ ID NO: 92001 - protein, 69 aa, Homo sapiens
  Payload ID: 18427
  Gene Name: transmembrane protein 97
  ENSP ID: ENSP00000466211
MTTLIPILSTFLFEDFSKASGFKGQRPETLHERLTLVSVYAPYLLIPFILLIFMLRSPYYKYEEKRKKK

SEQ ID NO: 92002 - protein, 69 aa, Homo sapiens; identical to SEQ ID NO: 92001
  Payload ID: 18427
  Gene Name: transmembrane protein 97
  ENSP ID: ENSP00000466987

SEQ ID NO: 92003 - protein, 201 aa, Homo sapiens
  Payload ID: 18428
  Gene Name: transmembrane protein 98
  ENSP ID: ENSP00000261713
METVVIVAIGVLATIFLASFAALVLVCRQRYCRPRDLLQRYDSKPIVDLIGAMETQSEPSELELDDVVITNPHIEAILENEDWIEDASGLMSHCIAILKICHTLTEKLVAMTMGSGAKMKTSASVSDIIVVAKRISPRTTALLLSVSHLVLVTRNACHLTGGLDWIDQSLSAAEEHLEVLREAALASEPDKGLPGPEGFLQ

SEQ ID NO: 92004 - protein, 226 aa, Homo sapiens
  Payload ID: 18428
  Gene Name: transmembrane protein 98
  Uniprot ID: Q9Y2Y6
  ENSP ID: ENSP00000378138
METVVIVAIGVLATIFLASFAALVLVCRQRYCRPRDLLQRYDSKPIVDLIGAMETQSEPSELELDDVVITNPHIEAILENEDWIEDASGLMSHCIAILKICHTLTEKLVAMTMGSGAKMKTSASVSDIIVVAKRISPRVDDVVKSMYPPLDPKLLDARTTALLLSVSHLVLVTRNACHLTGGLDWIDQSLSAAEEHLEVLREAALASEPDKGLPGPEGFLQEQSAI

SEQ ID NO: 92005 - protein, 137 aa, Homo sapiens
  Payload ID: 18428
  Gene Name: transmembrane protein 98
  ENSP ID: ENSP00000398446
METVVIVAIGVLATIFLASFAALVLVCRQRYCRPRDLLQRYDSKPIVDLIGAMETQSEPSELELDDVVITNPHIEAILENEDWIEDASGLMSHCIAILKICHTLTEKLVAMTMGSGAKMKTSASVSDIIVVAKRISP

SEQ ID NO: 92006 - protein, 222 aa, Homo sapiens
  Payload ID: 18428
  Gene Name: transmembrane protein 98
  ENSP ID: ENSP00000406394
METVVIVAIGVLATIFLASFAALVLVCRQRYCRPRDLLQRYDSKPIVDLIGAMETQSEPSELELDDVVITNPHIEAILENEDWIEDASGLMSHCIAILKICHTLTEKLVAMTMGSGAKMKTSASVSDIIVVAKRISPRVDDVVKSMYPPLDPKLLDARTTALLLSVSHLVLVTRNACHLTGGLDWIDQSLSAAEEHLEVLREAALASEPDKGLPGPEGFLQE

SEQ ID NO: 92007 - protein, 226 aa, Homo sapiens; identical to SEQ ID NO: 92004
  Payload ID: 18428
  Gene Name: transmembrane protein 98
  Uniprot ID: Q9Y2Y6
  ENSP ID: ENSP00000463245

SEQ ID NO: 92008 - protein, 93 aa, Homo sapiens
  Payload ID: 18428
  Gene Name: transmembrane protein 98
  ENSP ID: ENSP00000463539
METVVIVAIGVLATIFLASFAALVLVCRQRYCRPRDLLQRYDSKPIVDLIGAMETQSEPSELELDDVVITNPHIEAILENEDWIEDASGLMSH

SEQ ID NO: 92009 - protein, 138 aa, Homo sapiens
  Payload ID: 18428
  Gene Name: transmembrane protein 98
  ENSP ID: ENSP00000464537
METVVIVAIGVLATIFLASFAALVLVCRQRYCRPRDLLQRYDSKPIVDLIGAMETQSEPSELELDDVVITNPHIEAILENEDWIEDASGLMSHCIAILKICHTLTEKLVAMTMGSGAKMKTSASVSDIIVVAKRISPR

SEQ ID NO: 92010 - protein, 258 aa, Homo sapiens
  Payload ID: 18429
  Gene Name: transmembrane protein 99
  Uniprot ID: Q8N816
  ENSP ID: ENSP00000301665
MVGILPLCCSGCVPSLCCSSYVPSVAPTAAHSVRVPHSAGHCGQRVLACSLPQVFLKPWIFVEHFSSWLSLELFSFLRYLGTLLCACGHRLREGLLLPCLLGVGSWLLFNNWTGGSWFSLHLQQVSLSQGSHVAAFLPEAIGPGVPVPVSGESTSAQQSHAGWQLSAEADACPSVLYSEVLEWNKNINTYTSFHDFCLILGIFLFCFVLAVIGLPYIKPGLSLSVALLWQSLILLSSLVQQDSQVHTWGCLFSTFTST

SEQ ID NO: 92011 - protein, 189 aa, Homo sapiens
  Payload ID: 18429
  Gene Name: transmembrane protein 99
  Uniprot ID: Q8N816
  ENSP ID: ENSP00000390036
MVGILPLCCSGCVPSLCCSSYVPSVAPTAAHSVRVPHSAGHCGQRVLACSLPQVFLKPWIFVEHFSSWLSLELFSFLRYLGTLLCACGHRLREGLLLPCLLGVGSWLLFNNWTGGSWFSLHLQQVSLSQGSHVAAFLPEAIGPGVPVPVSGESTSAQQSHAGWQLSAEADACPSVLYSEVLEWNKNINT

SEQ ID NO: 92012 - protein, 258 aa, Homo sapiens; identical to SEQ ID NO: 92010
  Payload ID: 18429
  Gene Name: transmembrane protein 99
  Uniprot ID: Q8N816
  ENSP ID: ENSP00000482364

SEQ ID NO: 92013 - protein, 380 aa, Homo sapiens
  Payload ID: 18430
  Gene Name: transmembrane protein with EGF-like and two follistatin-like domains 1
  Uniprot ID: Q8IYR6
  ENSP ID: ENSP00000364013
MGAAAAEAPLRLPAAPPLAFCCYTSVLLLFAFSLPGSRASNQPPGGGGGSGGDCPGGKGKSINCSELNVRESDVRVCDESSCKYGGVCKEDGDGLKCACQFQCHTNYIPVCGSNGDTYQNECFLRRAACKHQKEITVIARGPCYSDNGSGSGEGEEEGSGAEVHRKHSKCGPCKYKAECDEDAENVGCVCNIDCSGYSFNPVCASDGSSYNNPCFVREASCIKQEQIDIRHLGHCTDTDDTSLLGKKDDGLQYRPDVKDASDQREDVYIGNHMPCPENLNGYCIHGKCEFIYSTQKASCRCESGYTGQHCEKTDFSILYVVPSRQKLTHVLIAAIIGAVQIAIIVAIVMCITRKCPKNNRGRRQKQNLGHFTSDTSSRMV

SEQ ID NO: 92014 - protein, 374 aa, Homo sapiens
  Payload ID: 18431
  Gene Name: transmembrane protein with EGF-like and two follistatin-like domains 2
  Uniprot ID: Q9UIK5
  ENSP ID: ENSP00000272771
MVLWESPRQCSSWTLCEGFCWLLLLPVMLLIVARPVKLAAFPTSLSDCQTPTGWNCSGYDDRENDLFLCDTNTCKFDGECLRIGDTVTCVCQFKCNNDYVPVCGSNGESYQNECYLRQAACKQQSEILVVSEGSCATDAGSGSGDGVHEGSGETSQKETSTCDICQFGAECDEDAEDVWCVCNIDCSQTNFNPLCASDGKSYDNACQIKEASCQKQEKIEVMSLGRCQDNTTTTTKSEDGHYARTDYAENANKLEESAREHHIPCPEHYNGFCMHGKCEHSINMQEPSCRCDAGYTGQHCEKKDYSVLYVVPGPVRFQYVLIAAVIGTIQIAVICVVVLCITRKCPRSNRIHRQKQNTGHYSSDNTTRASTRLI

SEQ ID NO: 92015 - protein, 346 aa, Homo sapiens
  Payload ID: 18431
  Gene Name: transmembrane protein with EGF-like and two follistatin-like domains 2
  Uniprot ID: Q9UIK5
  ENSP ID: ENSP00000376128
MVLWESPRQCSSWTLCEGFCWLLLLPVMLLIVARPVKLAAFPTSLSDCQTPTGWNCSGYDDRENDLFLCDTNTCKFDGECLRIGDTVTCVCQFKCNNDYVPVCGSNGESYQNECYLRQAACKQQSEILVVSEGSCATDAGSGSGDGVHEGSGETSQKETSTCDICQFGAECDEDAEDVWCVCNIDCSQTNFNPLCASDGKSYDNACQIKEASCQKQEKIEVMSLGRCQDNTTTTTKSEDGHYARTDYAENANKLEESAREHHIPCPEHYNGFCMHGKCEHSINMQEPSCRCDAGYTGQHCEKKDYSVLYVVPGPVRFQYVLIAAVIGTIQIAVICVVVLCITRAKL

SEQ ID NO: 92016 - protein, 175 aa, Homo sapiens
  Payload ID: 18431
  Gene Name: transmembrane protein with EGF-like and two follistatin-like domains 2
  Uniprot ID: Q9UIK5
  ENSP ID: ENSP00000386871
MVLWESPRQCSSWTLCEGFCWLLLLPVMLLIVARPVKLAAFPTSLSDCQTPTGWNCSGYDDRENDLFLCDTNTCKFDGECLRIGDTVTCVCQFKCNNDYVPVCGSNGESYQNECYLRQAACKQQSEILVVSEGSCATDAGSGSGDGGRSCLFTYLKIYWWILLCIFTYVCSISDI

SEQ ID NO: 92017 - protein, 453 aa, Homo sapiens
  Payload ID: 18432
  Gene Name: transmembrane protein with metallophosphoesterase domain
  Uniprot ID: Q6ZT21
  ENSP ID: ENSP00000343398
MAIFRQLSLGAKATLAAVTVFVSMIASRSYLAESLELRAWRWLLRLQLALFVNSLLLIGSLYIWRSTVSNLCHSPAAESTCFQLWKVVVLAFLALAHSSFFTMFFLVAEEPYLFSLAAYSCLGAYIIMLFFLFILSGMEQAYQLLAWRSGRVVGSLEKTRKLVLRPALAVGVTAVLSVAGILNAAQPPAVKTVEVPIHQLPASMNNLKIVLLSDIHLGPTVGRTKMEMFVRMVNVLEPDITVIVGDLSDSEASVLRTAVAPLGQLHSHLGAYFVTGNHEYYTSDVSNWFALLESLHVQPLHNENVKISATRAQRGGGGSGSGSEDEDWICLAGVDDIEADILHYSGHGMDLDKALEGCSPDHTIILLAHQPLAAKRALQARPDINLILSGHTHAGQIFPLNVAAYLLNPFFAGLYQVAQATFVYVSPGTAYYGIPMRLGSRAEITELILQRSP

SEQ ID NO: 92018 - protein, 316 aa, Homo sapiens
  Payload ID: 18432
  Gene Name: transmembrane protein with metallophosphoesterase domain
  Uniprot ID: Q6ZT21
  ENSP ID: ENSP00000400715
MEQAYQLLAWRSGRVVGSLEKTRKLVLRPALAVGVTAVLSVAGILNAAQPPAVKTVEVPIHQLPASMNNLKIVLLSDIHLGPTVGRTKMEMFVRMVNVLEPDITVIVGDLSDSEASVLRTAVAPLGQLHSHLGAYFVTGNHEYYTSDVSNWFALLESLHVQPLHNENVKISATRAQRGGGGSGSGSEDEDWICLAGVDDIEADILHYSGHGMDLDKALEGCSPDHTIILLAHQPLAAKRALQARPDINLILSGHTHAGQIFPLNVAAYLLNPFFAGLYQVAQATFVYVSPGTAYYGIPMRLGSRAEITELILQRSP

SEQ ID NO: 92019 - protein, 293 aa, Homo sapiens
  Payload ID: 18433
  Gene Name: transmembrane protein, adipocyte asscociated 1
  Uniprot ID: Q86W33
  ENSP ID: ENSP00000296210
MDTLEEVTWANGSTALPPPLAPNISVPHRCLLLLYEDIGTSRVRYWDLLLLIPNVLFLIFLLWKLPSARAKIRITSSPIFITFYILVFVVALVGIARAVVSMTVSTSNAATVADKILWEITRFFLLAIELSVIILGLAFGHLESKSSIKRVLAITTVLSLAYSVTQGTLEILYPDAHLSAEDFNIYGHGGRQFWLVSSCFFFLLCRCHNLPVLQLLRSAHLRGFPPGLLRLGAQDPLLLQMPSGRDRGARCTPTPALRCGPAGGPGGCRGCWGLSCQLLEHAVRLCRRGGLPG

SEQ ID NO: 92020 - protein, 373 aa, Homo sapiens
  Payload ID: 18433
  Gene Name: transmembrane protein, adipocyte asscociated 1
  Uniprot ID: Q86W33
  ENSP ID: ENSP00000347748
MDTLEEVTWANGSTALPPPLAPNISVPHRCLLLLYEDIGTSRVRYWDLLLLIPNVLFLIFLLWKLPSARAKIRITSSPIFITFYILVFVVALVGIARAVVSMTVSTSNAATVADKILWEITRFFLLAIELSVIILGLAFGHLESKSSIKRVLAITTVLSLAYSVTQGTLEILYPDAHLSAEDFNIYGHGGRQFWLVSSCFFFLVYSLVVILPKTPLKERISLPSRRSFYVYAGILALLNLLQGLGSVLLCFDIIEGLCCVDATTFLYFSFFAPLIYVAFLRGFFGSEPKILFSYKCQVDETEEPDVHLPQPYAVARREGLEAAGAAGASAASYSSTQFDSAGGVAYLDDIASMPCHTGSINSTDSERWKAINA

SEQ ID NO: 92021 - protein, 239 aa, Homo sapiens
  Payload ID: 18433
  Gene Name: transmembrane protein, adipocyte asscociated 1
  Uniprot ID: Q86W33
  ENSP ID: ENSP00000377056
MDTLEEVTWANGSTALPPPLAPNISVPHRCLLLLYEDIGTSRVRYWDLLLLIPNVLFLIFLLWKLPSARAKIRITSSPIFITFYILVFVVALVGIARAVVSMTVSTSNAATVADKILWEITRFFLLAIELSVIILGLAFGHLESKSSIKRVLAITTVLSLAYSVTQGTLEILYPDAHLSAEDFNIYGHGGRQFWLVSSCFFFLLGGASTCMRASWHCSTYCRGWGVCCCASTSSRGSAV

SEQ ID NO: 92022 - protein, 373 aa, Homo sapiens; identical to SEQ ID NO: 92020
  Payload ID: 18433
  Gene Name: transmembrane protein, adipocyte asscociated 1
  Uniprot ID: Q86W33
  ENSP ID: ENSP00000413428

SEQ ID NO: 92023 - protein, 203 aa, Homo sapiens
  Payload ID: 18433
  Gene Name: transmembrane protein, adipocyte asscociated 1
  ENSP ID: ENSP00000417113
MDTLEEVTWANGSTALPPPLAPNISVPHRCLLLLYEDIGTSRVRYWDLLLLIPNVLFLIFLLWKLPSARAKIRITSSPIFITFYILVFVVALVGIARAVVSMTVSTSNAATVADKILWEITRFFLLAIELSVIILGLAFGHLESKSSIKRVLAITTVLSLAYSVTQGTLEILYPDAHLSAEDFNIYGHGGRQFWLVSSCFFFL

SEQ ID NO: 92024 - protein, 373 aa, Homo sapiens; identical to SEQ ID NO: 92020
  Payload ID: 18433
  Gene Name: transmembrane protein, adipocyte asscociated 1
  Uniprot ID: Q86W33
  ENSP ID: ENSP00000418298

SEQ ID NO: 92025 - protein, 225 aa, Homo sapiens
  Payload ID: 18433
  Gene Name: transmembrane protein, adipocyte asscociated 1
  ENSP ID: ENSP00000418827
MDTLEEVTWANGSTALPPPLAPNISVPHRCLLLLYEDIGTSRVRYWDLLLLIPNVLFLIFLLWKLPSARAKIRITSSPIFITFYILVFVVALVGIARAVVSMTVSTSNAATVADKILWEITRFFLLAIELSVIILGLAFGHLESKSSIKRVLAITTVLSLAYSVTQGTLEILYPDAHLSAEDFNIYGHGGRQFWLVSSCFFFLVYSLVVILPKTPLKERISLPSV

SEQ ID NO: 92026 - protein, 41 aa, Homo sapiens
  Payload ID: 18433
  Gene Name: transmembrane protein, adipocyte asscociated 1
  ENSP ID: ENSP00000419299
MDTLEEVTWANGSTALPPPLAPNISVPHRCLLLLYEDIGTS

SEQ ID NO: 92027 - protein, 203 aa, Homo sapiens; identical to SEQ ID NO: 92023
  Payload ID: 18433
  Gene Name: transmembrane protein, adipocyte asscociated 1
  ENSP ID: ENSP00000419533

SEQ ID NO: 92028 - protein, 166 aa, Homo sapiens
  Payload ID: 18433
  Gene Name: transmembrane protein, adipocyte asscociated 1
  ENSP ID: ENSP00000419822
MDTLEEVTWANGSTALPPPLAPNISVPHRCLLLLYEDIGTSRVRYWDLLLLIPNVLFLIFLLWKLPSARAKIRITSSPIFITFYILVFVVALVGIARAVVSMTVSTSNAATVADKILWEITRFFLLAIELSVIILGLAFGHLESKSSIKRVLAITTVLSLAYSVTQ

SEQ ID NO: 92029 - protein, 276 aa, Homo sapiens
  Payload ID: 18434
  Gene Name: transport and golgi organization 2 homolog
  Uniprot ID: Q6ICL3
  ENSP ID: ENSP00000332721
MCIIFFKFDPRPVSKNAYRLILAANRDEFYSRPSKLADFWGNNNEILSGLDMEEGKEGGTWLGISTRGKLAALTNYLQPQLDWQARGRGELVTHFLTTDVDSLSYLKKVSMEGHLYNGFNLIAADLSTAKGDVICYYGNRGEPDPIVLTPGTYGLSNALLETPWRKLCFGKQLFLEAVERSQALPKDVLIASLLDVLNNEEAQLPDPAIEDQGGEYVQPMLSKYAAVCVRCPGYGTRTNTIILVDADGHVTFTERSMMDKDLSHWETRTYEFTLQS

SEQ ID NO: 92030 - protein, 214 aa, Homo sapiens
  Payload ID: 18434
  Gene Name: transport and golgi organization 2 homolog
  Uniprot ID: Q6ICL3
  ENSP ID: ENSP00000381122
MCIIFFKFDPRPVSKNAYRLILAANRDEFYSRPSKLADFWGNNNEILSGLDMEEGKEGGTWLGISTRGKLAALTNYLQPQLDWQARGRGTYGLSNALLETPWRKLCFGKQLFLEAVERSQALPKDVLIASLLDVLNNEEAQLPDPAIEDQGGEYVQPMLSKYAAVCVRCPGYGTRTNTIILVDADGHVTFTERSMMDKDLSHWETRTYEFTLQS

SEQ ID NO: 92031 - protein, 150 aa, Homo sapiens
  Payload ID: 18434
  Gene Name: transport and golgi organization 2 homolog
  ENSP ID: ENSP00000382706
MPPKLLCAGRCVGQDGAAQAWHCPPGQGHSVWDAVRMPLGAGTPVNVQRREDSATEGSHRLILAANRDEFYSRPSKLADFWGNNNEILSGLDMEEGKEGGTWLGISTRGKLAALTNYLQPQLDWQARGRAQQRETSFATMGTEGSLILSF

SEQ ID NO: 92032 - protein, 317 aa, Homo sapiens
  Payload ID: 18434
  Gene Name: transport and golgi organization 2 homolog
  Uniprot ID: Q6ICL3
  ENSP ID: ENSP00000384827
MPPKLLCAGRCVGQDGAAQAWHCPPGQGHSVWDAVRMPLGAGTPVNVQRREDSATEGSHRLILAANRDEFYSRPSKLADFWGNNNEILSGLDMEEGKEGGTWLGISTRGKLAALTNYLQPQLDWQARGRGELVTHFLTTDVDSLSYLKKVSMEGHLYNGFNLIAADLSTAKGDVICYYGNRGEPDPIVLTPGTYGLSNALLETPWRKLCFGKQLFLEAVERSQALPKDVLIASLLDVLNNEEAQLPDPAIEDQGGEYVQPMLSKYAAVCVRCPGYGTRTNTIILVDADGHVTFTERSMMDKDLSHWETRTYEFTLQS

SEQ ID NO: 92033 - protein, 214 aa, Homo sapiens; identical to SEQ ID NO: 92030
  Payload ID: 18434
  Gene Name: transport and golgi organization 2 homolog
  Uniprot ID: Q6ICL3
  ENSP ID: ENSP00000385662

SEQ ID NO: 92034 - protein, 201 aa, Homo sapiens
  Payload ID: 18434
  Gene Name: transport and golgi organization 2 homolog
  ENSP ID: ENSP00000389797
MCIIFFKFDPRPVSKNAYRLILAANRDEFYSRPSKLADFWGNNNEILSGLDMEEGKEGGTWLGISTRGKLAALTNYLQPQLDWQARGRGELVTHFLTTDVDSLSYLKKVSMEGHLYNGFNLIAADLRQLPDPAIEDQGGEYVQPMLSKYAAVCVRCPGYGTRTNTIILVDADGHVTFTERSMMDKDLSHWETRTYEFTLQS

SEQ ID NO: 92035 - protein, 198 aa, Homo sapiens
  Payload ID: 18434
  Gene Name: transport and golgi organization 2 homolog
  Uniprot ID: Q6ICL3
  ENSP ID: ENSP00000391262
MPPKLLCAGRCVGQDGAAQAWHCPPGQGHSVWDAVRMPLGAGTPVNVQRREDSATEGSHRLILAANRDEFYSRPSKLADFWGNNNEILSGLDMEEGKEGGTWLGISTRGKLAALTNYLQPQLDWQARGRGELVTHFLTTDVDSLSYLKKVSMEGHLYNGFNLIAADLSTAKGDVICYYGNRGEPDPIVLTPEPTLSSW

SEQ ID NO: 92036 - protein, 109 aa, Homo sapiens
  Payload ID: 18434
  Gene Name: transport and golgi organization 2 homolog
  ENSP ID: ENSP00000395816
MCIIFFKFDPRPVSKNAYRLILAANRDEFYSRPSKLADFWGNNNEILSGLDMEEGKEGGTWLGISTRGKLAALTNYLQPQLDWQARGRAQQRETSFATMGTEGSLILSF

SEQ ID NO: 92037 - protein, 107 aa, Homo sapiens
  Payload ID: 18434
  Gene Name: transport and golgi organization 2 homolog
  ENSP ID: ENSP00000396182
MCIIFFKFDPRPVSKNAYRLILAANRDEFYSRPSKLADFWGNNNEILSGLDMEEGKEGGTWLGISTRGKLAALTNYLQPQLDWQARGRGSCQTRPSRTRVGSTCSPC

SEQ ID NO: 92038 - protein, 178 aa, Homo sapiens
  Payload ID: 18434
  Gene Name: transport and golgi organization 2 homolog
  Uniprot ID: Q6ICL3
  ENSP ID: ENSP00000402926
MAGHQHTWQAGSTHQLPAAAAGLAGPRASTAKGDVICYYGNRGEPDPIVLTPGTYGLSNALLETPWRKLCFGKQLFLEAVERSQALPKDVLIASLLDVLNNEEAQLPDPAIEDQGGEYVQPMLSKYAAVCVRCPGYGTRTNTIILVDADGHVTFTERSMMDKDLSHWETRTYEFTLQS

SEQ ID NO: 92039 - protein, 121 aa, Homo sapiens
  Payload ID: 18434
  Gene Name: transport and golgi organization 2 homolog
  ENSP ID: ENSP00000402966
MCIIFFKFDPRPVSKNAYRLILAANRDEFYSRPSKLADFWGNNNEILSGLDMEEGKEGGTWLGISTRGKLAALTNYLQPQLDWQARGRGGPISVFLGEEHMPAAVDTASVPCLQVNLSPTF

SEQ ID NO: 92040 - protein, 109 aa, Homo sapiens; identical to SEQ ID NO: 92036
  Payload ID: 18434
  Gene Name: transport and golgi organization 2 homolog
  ENSP ID: ENSP00000403432

SEQ ID NO: 92041 - protein, 317 aa, Homo sapiens; identical to SEQ ID NO: 92032
  Payload ID: 18434
  Gene Name: transport and golgi organization 2 homolog
  Uniprot ID: Q6ICL3
  ENSP ID: ENSP00000403645

SEQ ID NO: 92042 - protein, 226 aa, Homo sapiens
  Payload ID: 18434
  Gene Name: transport and golgi organization 2 homolog
  ENSP ID: ENSP00000411602
MCIIFFKFDPRPVSKNAYRLILAANRDEFYSRPSKLADFWGNNNEILSGLDMEEGKEGGTWLGISTRGKLAALTNYLQPQLDWQARGRGELVTHFLTTDVDSLSYLKKVSMEGHLYNGFNLIAADLSTAKGDVICYYGNRGEPDPIVLTPGTYGLSNALLETPWRKLCFGKQLFLEAVERSQALPKDVLIASLLDVLNNEEAQLPDPAIEDQGGEYVQPMLSKYAA

SEQ ID NO: 92043 - protein, 88 aa, Homo sapiens
  Payload ID: 18434
  Gene Name: transport and golgi organization 2 homolog
  ENSP ID: ENSP00000413850
MCIIFFKFDPRPVSKNAYRLILAANRDEFYSRPSKLADFWGNNNEILSGLDMEEGKEGGTWLGISTRGKLAALTNYLQPQLDWQARGR

SEQ ID NO: 92044 - protein, 165 aa, Homo sapiens
  Payload ID: 18434
  Gene Name: transport and golgi organization 2 homolog
  ENSP ID: ENSP00000415450
MCIIFFKFDPRPVSKNAYRLILAANRDEFYSRPSKLADFWGNNNEILSGLDMEEGKEGGTWLGISTRGKLAALTNYLQPQLDWQARGRGELVTHFLTTDVDSLSYLKKVSMEGHLYNGFNLIAADLSTAKGDVICYYGNRGEPDPIVLTPGTYGLSNALLETPWR

SEQ ID NO: 92045 - protein, 1094 aa, Homo sapiens
  Payload ID: 18435
  Gene Name: transport and golgi organization 6 homolog
  Uniprot ID: Q9C0B7
  ENSP ID: ENSP00000261778
MAARQAVGSGAQETCGLDRILEALKLLLSPGGSGSSSLQVTKHDVLLATLKSNLSALEDKFLKDPQWKNLKLLRDEIADKAEWPQNSVDVTWSFTSQTLLLLLCLKETMIRLAANFNPGKPNPRTPEVAPALSPDALSISQQKTVQFVLQFVVTLGICPYLMPGVGVPLRYRTEFGAVVQDVVCFDAAPDATRRLYTSCKALLNVAQHTSLGSLIFCHHFGDIAAGLCQLGFCPTKRKLLTPAEEVLTEEERTLSRGALRDMLDQVYQPLAVRELLILQGGPPQSCTDVKTQMRCRAPAWLRRLCGQLLSERLMRPNGVQAVVRGILEGAGAGAAGGSDAEVTAADWKKCDLIAKILASCPQQSLSPENYYRDICPQVLDLFHFQDKLTARQFQRVATTTFITLSRERPHLAAKYLLQPVLAPLHRCLNTAELSESDMVPGTILVTEEELSRCIEDVFKVYVVGNEPLTVLMDSLLPVLGVLFLLYCFTKQSVSHIRSLCQEILLWILGKLERKKAIASLKGFAGLDKAVPSLHSLCQFRVATQGGIMITIKEAISDEDEDEALYQKVSSEQGRVEHLGDLLSHCQECGLAGDFFIFCLKELTHVASENETELKTEPFSSKSLLELEQHQTLLVEGQERKLLVLQLMAVLCERMSEQIFTNVTQVVDFVAATLQRACASLAHQAESTVESQTLSMSMGLVAVMLGGAVQLKSSDFAVLKQLLPLLEKVSNTYPDPVIQELAVDLRITISTHGAFATEAVSMAAQSTLNRKDLEGKIEEQQQTSHERPTDVAHSHLEQQQSHETAPQTGLQSNAPIIPQGVNEPSTTTSQKSGSVTTEQLQEVLLSAYDPQIPTRAAALRTLSHWIEQREAKALEMQEKLLKIFLENLEHEDTFVYLSAIQGVALLSDVYPEKILPDLLAQYDSSKDKHTPETRMKVGEVLMRIVRALGDMVSKYREPLIHTFLRGVRDPDGAHRASSLANLGELCQRLDFLLGSVVHEVTACLIAVAKTDGEVQVRRAAIHVVVLLLRGLSQKATEVLSAVLKDLYHLLKHVVCLEPDDVAKLHAQLALEELDDIMKNFLFPPQKLEKKIMVLP

SEQ ID NO: 92046 - protein, 37 aa, Homo sapiens
  Payload ID: 18435
  Gene Name: transport and golgi organization 6 homolog
  ENSP ID: ENSP00000462846
  MOD_RES (1)..(1): Any amino acid
XILASCPQQSLSPENYYRDICPQFFCRFWIYFTFKIN

SEQ ID NO: 92047 - protein, 27 aa, Homo sapiens
  Payload ID: 18435
  Gene Name: transport and golgi organization 6 homolog
  ENSP ID: ENSP00000463426
  MOD_RES (1)..(1): Any amino acid
XIFTNVTQVSSCHILDRSLFFFPKNKV

SEQ ID NO: 92048 - protein, 808 aa, Homo sapiens
  Payload ID: 18436
  Gene Name: transporter 1, ATP-binding cassette, sub-family B (MDR/TAP)
  Uniprot ID: Q03518
  ENSP ID: ENSP00000346206
MAELLASAGSACSWDFPRAPPSFPPPAASRGGLGGTRSFRPHRGAESPRPGRDRDGVRVPMASSRCPAPRGCRCLPGASLAWLGTVLLLLADWVLLRTALPRIFSLLVPTALPLLRVWAVGLSRWAVLWLGACGVLRATVGSKSENAGAQGWLAALKPLAAALGLALPGLALFRELISWGAPGSADSTRLLHWGSHPTAFVVSYAAALPAAALWHKLGSLWVPGGQGGSGNPVRRLLGCLGSETRRLSLFLVLVVLSSLGEMAIPFFTGRLTDWILQDGSADTFTRNLTLMSILTIASAVLEFVGDGIYNNTMGHVHSHLQGEVFGAVLRQETEFFQQNQTGNIMSRVTEDTSTLSDSLSENLSLFLWYLVRGLCLLGIMLWGSVSLTMVTLITLPLLFLLPKKVGKWYQLLEVQVRESLAKSSQVAIEALSAMPTVRSFANEEGEAQKFREKLQEIKTLNQKEAVAYAVNSWTTSISGMLLKVGILYIGGQLVTSGAVSSGNLVTFVLYQMQFTQAVEVLLSIYPRVQKAVGSSEKIFEYLDRTPRCPPSGLLTPLHLEGLVQFQDVSFAYPNRPDVLVLQGLTFTLRPGEVTALVGPNGSGKSTVAALLQNLYQPTGGQLLLDGKPLPQYEHRYLHRQVAAVGQEPQVFGRSLQENIAYGLTQKPTMEEITAAAVKSGAHSFISGLPQGYDTEVDEAGSQLSGGQRQAVALARALIRKPCVLILDDATSALDANSQLQVEQLLYESPERYSRSVLLITQHLSLVEQADHILFLEGGAIREGGTHQQLMEKKGCYWAMVQAPADAPE

SEQ ID NO: 92049 - protein, 808 aa, Homo sapiens; identical to SEQ ID NO: 92048
  Payload ID: 18436
  Gene Name: transporter 1, ATP-binding cassette, sub-family B (MDR/TAP)
  Uniprot ID: Q03518
  ENSP ID: ENSP00000372722

SEQ ID NO: 92050 - protein, 808 aa, Homo sapiens; identical to SEQ ID NO: 92048
  Payload ID: 18436
  Gene Name: transporter 1, ATP-binding cassette, sub-family B (MDR/TAP)
  Uniprot ID: Q03518
  ENSP ID: ENSP00000401149

SEQ ID NO: 92051 - protein, 808 aa, Homo sapiens; identical to SEQ ID NO: 92048
  Payload ID: 18436
  Gene Name: transporter 1, ATP-binding cassette, sub-family B (MDR/TAP)
  Uniprot ID: Q03518
  ENSP ID: ENSP00000402316

SEQ ID NO: 92052 - protein, 808 aa, Homo sapiens; identical to SEQ ID NO: 92048
  Payload ID: 18436
  Gene Name: transporter 1, ATP-binding cassette, sub-family B (MDR/TAP)
  Uniprot ID: Q03518
  ENSP ID: ENSP00000405356

SEQ ID NO: 92053 - protein, 808 aa, Homo sapiens
  Payload ID: 18436
  Gene Name: transporter 1, ATP-binding cassette, sub-family B (MDR/TAP)
  ENSP ID: ENSP00000412933
MAELLASAGSACSWDFPRAPPSFPPPAASRGGLGGTRSFRPHRGAESPRPGRDRDGVRVPMASSRCPAPRGCRCLPGASLAWLGTVLLLLADWVLLRTALPRIFSLLVPTALPLLRVWAVGLSRWAVLWLGACGVLRATGGSKSENAGAQGWLAALKPLAAALGLALPGLALFRELISWGAPGSADSTRLLHWGSHPTAFVVSYAAALPAAALWHKLGSLWVPGGQGGSGNPVRRLLGCLGSETRRLSLFLVLVVLSSLGEMAIPFFTGRLTDWILQDGSADTFTRNLTLMSILTIASAVLEFVGDGIYNNTMGHVHSHLQGEVFGAVLRQETEFFQQNQTGNIMSRVTEDTSTLSDSLSENLSLFLWYLVRGLCLLGIMLWGSVSLTMVTLITLPLLFLLPKKVGKWYQLLEVQVRESLAKSSQVAIEALSAMPTVRSFANEEGEAQKFREKLQEIKTLNQKEAVAYAVNSWTTSISGMLLKVGILYIGGQLVTSGAVSSGNLVTFVLYQMQFTQAVEVLLSIYPRVQKAVGSSEKIFEYLDRTPRCPPSGLLTPLHLEGLVQFQDVSFAYPNRPDVLVLQGLTFTLRPGEVTALVGPNGSGKSTVAALLQNLYQPTGGQLLLDGKPLPQYEHRYLHRQVAAVGQEPQVFGRSLQENIAYGLTQKPTMEEITAAAVKSGAHSFISGLPQGYDTEVDEAGSQLSGGQRQAVALARALIRKPCVLILDDATSALDANSQLQVEQLLYESPERYSRSVLLITQHLSLVEQADHILFLEGGAIREGGTHQQLMEKKGCYWAMVQAPADAPE

SEQ ID NO: 92054 - protein, 808 aa, Homo sapiens; identical to SEQ ID NO: 92048
  Payload ID: 18436
  Gene Name: transporter 1, ATP-binding cassette, sub-family B (MDR/TAP)
  Uniprot ID: Q03518
  ENSP ID: ENSP00000413080

SEQ ID NO: 92055 - protein, 808 aa, Homo sapiens; identical to SEQ ID NO: 92048
  Payload ID: 18436
  Gene Name: transporter 1, ATP-binding cassette, sub-family B (MDR/TAP)
  Uniprot ID: Q03518
  ENSP ID: ENSP00000415660

SEQ ID NO: 92056 - protein, 686 aa, Homo sapiens
  Payload ID: 18437
  Gene Name: transporter 2, ATP-binding cassette, sub-family B (MDR/TAP)
  Uniprot ID: Q03519
  ENSP ID: ENSP00000364032
MRLPDLRPWTSLLLVDAALLWLLQGPLGTLLPQGLPGLWLEGTLRLGGLWGLLKLRGLLGFVGTLLLPLCLATPLTVSLRALVAGASRAPPARVASAPWSWLLVGYGAAGLSWSLWAVLSPPGAQEKEQDQVNNKVLMWRLLKLSRPDLPLLVAAFFFLVLAVLGETLIPHYSGRVIDILGGDFDPHAFASAIFFMCLFSFGSSLSAGCRGGCFTYTMSRINLRIREQLFSSLLRQDLGFFQETKTGELNSRLSSDTTLMSNWLPLNANVLLRSLVKVVGLYGFMLSISPRLTLLSLLHMPFTIAAEKVYNTRHQEVLREIQDAVARAGQVVREAVGGLQTVRSFGAEEHEVCRYKEALEQCRQLYWRRDLERALYLLVRRVLHLGVQMLMLSCGLQQMQDGELTQGSLLSFMIYQESVGSYVQTLVYIYGDMLSNVGAAEKVFSYMDRQPNLPSPGTLAPTTLQGVVKFQDVSFAYPNRPDRPVLKGLTFTLRPGEVTALVGPNGSGKSTVAALLQNLYQPTGGQVLLDEKPISQYEHCYLHSQVVSVGQEPVLFSGSVRNNIAYGLQSCEDDKVMAAAQAAHADDFIQEMEHGIYTDVGEKGSQLAAGQKQRLAIARALVRDPRVLILDEATSALDVQCEQALQDWNSRGDRTVLVIAHRLQTVQRAHQILVLQEGKLQKLAQL

SEQ ID NO: 92057 - protein, 653 aa, Homo sapiens
  Payload ID: 18437
  Gene Name: transporter 2, ATP-binding cassette, sub-family B (MDR/TAP)
  Uniprot ID: Q03519
  ENSP ID: ENSP00000364034
MRLPDLRPWTSLLLVDAALLWLLQGPLGTLLPQGLPGLWLEGTLRLGGLWGLLKLRGLLGFVGTLLLPLCLATPLTVSLRALVAGASRAPPARVASAPWSWLLVGYGAAGLSWSLWAVLSPPGAQEKEQDQVNNKVLMWRLLKLSRPDLPLLVAAFFFLVLAVLGETLIPHYSGRVIDILGGDFDPHAFASAIFFMCLFSFGSSLSAGCRGGCFTYTMSRINLRIREQLFSSLLRQDLGFFQETKTGELNSRLSSDTTLMSNWLPLNANVLLRSLVKVVGLYGFMLSISPRLTLLSLLHMPFTIAAEKVYNTRHQEVLREIQDAVARAGQVVREAVGGLQTVRSFGAEEHEVCRYKEALEQCRQLYWRRDLERALYLLVRRVLHLGVQMLMLSCGLQQMQDGELTQGSLLSFMIYQESVGSYVQTLVYIYGDMLSNVGAAEKVFSYMDRQPNLPSPGTLAPTTLQGVVKFQDVSFAYPNRPDRPVLKGLTFTLRPGEVTALVGPNGSGKSTVAALLQNLYQPTGGQVLLDEKPISQYEHCYLHSQVVSVGQEPVLFSGSVRNNIAYGLQSCEDDKVMAAAQAAHADDFIQEMEHGIYTDVGEKGSQLAAGQKQRLAIARALVRDPRVLILDEATSALDVQCEQAKTLWKFMIF

SEQ ID NO: 92058 - protein, 686 aa, Homo sapiens; identical to SEQ ID NO: 92056
  Payload ID: 18437
  Gene Name: transporter 2, ATP-binding cassette, sub-family B (MDR/TAP)
  Uniprot ID: Q03519
  ENSP ID: ENSP00000372599

SEQ ID NO: 92059 - protein, 653 aa, Homo sapiens; identical to SEQ ID NO: 92057
  Payload ID: 18437
  Gene Name: transporter 2, ATP-binding cassette, sub-family B (MDR/TAP)
  Uniprot ID: Q03519
  ENSP ID: ENSP00000372600

SEQ ID NO: 92060 - protein, 686 aa, Homo sapiens; identical to SEQ ID NO: 92056
  Payload ID: 18437
  Gene Name: transporter 2, ATP-binding cassette, sub-family B (MDR/TAP)
  Uniprot ID: Q03519
  ENSP ID: ENSP00000372726

SEQ ID NO: 92061 - protein, 653 aa, Homo sapiens; identical to SEQ ID NO: 92057
  Payload ID: 18437
  Gene Name: transporter 2, ATP-binding cassette, sub-family B (MDR/TAP)
  Uniprot ID: Q03519
  ENSP ID: ENSP00000372727

SEQ ID NO: 92062 - protein, 653 aa, Homo sapiens; identical to SEQ ID NO: 92057
  Payload ID: 18437
  Gene Name: transporter 2, ATP-binding cassette, sub-family B (MDR/TAP)
  Uniprot ID: Q03519
  ENSP ID: ENSP00000387553

SEQ ID NO: 92063 - protein, 686 aa, Homo sapiens
  Payload ID: 18437
  Gene Name: transporter 2, ATP-binding cassette, sub-family B (MDR/TAP)
  Uniprot ID: Q03519
  ENSP ID: ENSP00000390013
MRLPDLRPWTSLLLVDAALLWLLQGPLGTLLPQGLPGLWLEGTLRLGGLWGLLKLRGLLGFVGTLLLPLCLATPLTVSLRALVAGASRAPPARVASAPWSWLLVGYGAAGLSWSLWAVLSPPGAQEKEQDQVNNKVLMWRLLKLSRPDLPLLVAAFFFLVLAVLGETLIPHYSGRVIDILGGDFDPHAFASAIFFMCLFSFGSSLSAGCRGGCFTYTMSRINLRIREQLFSSLLRQDLGFFQETKTGELNSRLSSDTTLMSNWLPLNANVLLRSLVKVVGLYGFMLSISPRLTLLSLLHMPFTIAAEKVYNTRHQEVLREIQDAVARAGQVVREAVGGLQTVRSFGAEEHEVCRYKEALEQCRQLYWRRDLERALYLLIRRVLHLGVQMLMLSCGLQQMQDGELTQGSLLSFMIYQESVGSYVQTLVYIYGDMLSNVGAAEKVFSYMDRQPNLPSPGTLAPTTLQGVVKFQDVSFAYPNRPDRPVLKGLTFTLRPGEVTALVGPNGSGKSTVAALLQNLYQPTGGQVLLDEKPISQYEHCYLHSQVVSVGQEPVLFSGSVRNNITYGLQSCEDDKVMAAAQAAHADDFIQEMEHGIYTDVGEKGSQLAAGQKQRLAIARALVRDPRVLILDEATSALDVQCEQALQDWNSRGDRTVLVIAHRLQTVQRAHQILVLQEGKLQKLAQL

SEQ ID NO: 92064 - protein, 653 aa, Homo sapiens; identical to SEQ ID NO: 92057
  Payload ID: 18437
  Gene Name: transporter 2, ATP-binding cassette, sub-family B (MDR/TAP)
  Uniprot ID: Q03519
  ENSP ID: ENSP00000392172

SEQ ID NO: 92065 - protein, 703 aa, Homo sapiens
  Payload ID: 18437
  Gene Name: transporter 2, ATP-binding cassette, sub-family B (MDR/TAP)
  ENSP ID: ENSP00000393580
MRLPDLRPWTSLLLVDAALLWLLQGPLGTLLPQGLPGLWLEGTLRLGGLWGLLKLRGLLGFVGTLLLPLCLATPLTVSLRALVAGASRAPPARVASAPWSWLLVGYGAAGLSWSLWAVLSPPGAQEKEQDQVNNKVLMWRLLKLSRPDLPLLVAAFFFLVLAVLGETLIPHYSGRVIDILGGDFDPHAFASAIFFMCLFSFGSSLSAGCRGGCFTYTMSRINLRIREQLFSSLLRQDLGFFQETKTGELNSRLSSDTTLMSNWLPLNANVLLRSLVKVVGLYGFMLSISPRLTLLSLLHMPFTIAAEKVYNTRHQEVLREIQDAVARAGQVVREAVGGLQTVRSFGAEEHEVCRYKEALEQCRQLYWRRDLERALYLLVRRVLHLGVQMLMLSCGLQQMQDGELTQGSLLSFMIYQESVGSYVQTLVYIYGDMLSNVGAAEKVFSYMDRQPNLPSPGTLAPTTLQGVVKFQDVSFAYPNRPDRPVLKGLTFTLRPGEVTALVGPNGSGKSTVAALLQNLYQPTGGQVLLDEKPISQYEHCYLHSQVVSVGQEPVLFSGSVRNNIAYGLQSCEDDKVMAAAQAAHADDFIQEMEHGIYTDVGEKGSQLAAGQKQRLAIARALVRDPRVLILDEATSALDVQCEQALQDWNSRGDRTVLVIAHRLQAVQRAHQILVLQEGKLQKLAQLQEGQDLYSRLVQQRLMD

SEQ ID NO: 92066 - protein, 686 aa, Homo sapiens; identical to SEQ ID NO: 92056
  Payload ID: 18437
  Gene Name: transporter 2, ATP-binding cassette, sub-family B (MDR/TAP)
  Uniprot ID: Q03519
  ENSP ID: ENSP00000394101

SEQ ID NO: 92067 - protein, 653 aa, Homo sapiens; identical to SEQ ID NO: 92057
  Payload ID: 18437
  Gene Name: transporter 2, ATP-binding cassette, sub-family B (MDR/TAP)
  Uniprot ID: Q03519
  ENSP ID: ENSP00000396156

SEQ ID NO: 92068 - protein, 653 aa, Homo sapiens; identical to SEQ ID NO: 92057
  Payload ID: 18437
  Gene Name: transporter 2, ATP-binding cassette, sub-family B (MDR/TAP)
  Uniprot ID: Q03519
  ENSP ID: ENSP00000401377

SEQ ID NO: 92069 - protein, 703 aa, Homo sapiens; identical to SEQ ID NO: 92065
  Payload ID: 18437
  Gene Name: transporter 2, ATP-binding cassette, sub-family B (MDR/TAP)
  ENSP ID: ENSP00000406540

SEQ ID NO: 92070 - protein, 653 aa, Homo sapiens
  Payload ID: 18437
  Gene Name: transporter 2, ATP-binding cassette, sub-family B (MDR/TAP)
  ENSP ID: ENSP00000411622
MRLPDLRPWTSLLLVDAALLWLLQGPLGTLLPQGLPGLWLEGTLRLGGLWGLLKLRGLLGFVGTLLLPLCLATPLTVSLRALVAGASRAPPARVASAPWSWLLVGYGAAGLSWSLWAVLSPPGAQEKEQDQVNNKVLMWRLLKLSRPDLPLLVAAFFFLVLAVLGETLIPHYSGRVIDILGGDFDPHAFASAIFFMCLFSFGSSLSAGCRGGCFTYTMSRINLRIREQLFSSLLRQDLGFFQETKTGELNSRLSSDTTLMSNWLPLNANVLLRSLVKVVGLYGFMLSISPRLTLLSLLHMPFTIAAEKVYNTRHQEVLREIQDAVARAGQVVREAVGGLQTVRSFGAEEHEVCRYKEALEQCRQLYWRRDLERALYLLIRRVLHLGVQMLMLSCGLQQMQDGELTQGSLLSFMIYQESVGSYVQTLVYIYGDMLSNVGAAEKVFSYMDRQPNLPSPGTLAPTTLQGVVKFQDVSFAYPNRPDRPVLKGLTFTLRPGEVTALVGPNGSGKSTVAALLQNLYQPTGGQVLLDEKPISQYEHCYLHSQVVSVGQEPVLFSGSVRNNITYGLQSCEDDKVMAAAQAAHADDFIQEMEHGIYTDVGEKGSQLAAGQKQRLAIARALVRDPRVLILDEATSALDVQCEQAKTLWKFMIF

SEQ ID NO: 92071 - protein, 703 aa, Homo sapiens; identical to SEQ ID NO: 92065
  Payload ID: 18437
  Gene Name: transporter 2, ATP-binding cassette, sub-family B (MDR/TAP)
  ENSP ID: ENSP00000416471

SEQ ID NO: 92072 - protein, 702 aa, Homo sapiens
  Payload ID: 18437
  Gene Name: transporter 2, ATP-binding cassette, sub-family B (MDR/TAP)
  ENSP ID: ENSP00000478007
MRLPDLRPWTSLLLVDAALLWLLQGPLGTLLPQGLPGLWLEGTLRLGGLWGLLKLRGLLGFVGTLLLPLCLATPLTVSLRALVAGASRAPPARVASAPWSWLLVGYGAAGLSWSLWAVLSPPGAQEKEQDQVNNKVLMWRLLKLSRPDLPLLVAAFFFLVLAVLGETLIPHYSGRVIDILGGDFDPHAFASAIFFMCLFSFGSSLSAGCRGGCFTYTMSRINLRIREQLFSSLLRQDLGFFQETKTGELNSRLSSDTTLMSNWLPLNANVLLRSLVKVVGLYGFMLSISPRLTLLSLLHMPFTIAAEKVYNTRHQEVLREIQDAVARAGQVVREAVGGLQTVRSFGAEEHEVCRYKEALEQCRQLYWRRDLERALYLLIRRVLHLGVQMLMLSCGLQQMQDGELTQGSLLSFMIYQESVGSYVQTLVYIYGDMLSNVGAAEKVFSYMDRQPNLPSPGTLAPTTLQGVVKFQDVSFAYPNRPDRPVLKGLTFTLRPGEVTALVGPNGSGKSTVAALLQNLYQPTGGQVLLDEKPISQYEHCYLHSQVVSVGQEPVLFSGSVRNNITYGLQSCEDDKVMAAAQAAHADDFIQEMEHGIYTDVGEKGSQLAAGQKQRLAIARALVRDPRVLILDEATSALDVQCEQALQDWNSRGDRTVLVIAHRLQTVQRAHQILVLQEGKLQKLAQLEGQDLYSRLVQQRLMD

SEQ ID NO: 92073 - protein, 702 aa, Homo sapiens
  Payload ID: 18437
  Gene Name: transporter 2, ATP-binding cassette, sub-family B (MDR/TAP)
  ENSP ID: ENSP00000479290
MRLPDLRPWTSLLLVDAALLWLLQGPLGTLLPQGLPGLWLEGTLRLGGLWGLLKLRGLLGFVGTLLLPLCLATPLTVSLRALVAGASRAPPARVASAPWSWLLVGYGAAGLSWSLWAVLSPPGAQEKEQDQVNNKVLMWRLLKLSRPDLPLLVAAFFFLVLAVLGETLIPHYSGRVIDILGGDFDPHAFASAIFFMCLFSFGSSLSAGCRGGCFTYTMSRINLRIREQLFSSLLRQDLGFFQETKTGELNSRLSSDTTLMSNWLPLNANVLLRSLVKVVGLYGFMLSISPRLTLLSLLHMPFTIAAEKVYNTRHQEVLREIQDAVARAGQVVREAVGGLQTVRSFGAEEHEVCRYKEALEQCRQLYWRRDLERALYLLVRRVLHLGVQMLMLSCGLQQMQDGELTQGSLLSFMIYQESVGSYVQTLVYIYGDMLSNVGAAEKVFSYMDRQPNLPSPGTLAPTTLQGVVKFQDVSFAYPNRPDRPVLKGLTFTLRPGEVTALVGPNGSGKSTVAALLQNLYQPTGGQVLLDEKPISQYEHCYLHSQVVSVGQEPVLFSGSVRNNIAYGLQSCEDDKVMAAAQAAHADDFIQEMEHGIYTDVGEKGSQLAAGQKQRLAIARALVRDPRVLILDEATSALDVQCEQALQDWNSRGDRTVLVIAHRLQTVQRAHQILVLQEGKLQKLAQLEGQDLYSRLVQQRLMD

SEQ ID NO: 92074 - protein, 702 aa, Homo sapiens; identical to SEQ ID NO: 92073
  Payload ID: 18437
  Gene Name: transporter 2, ATP-binding cassette, sub-family B (MDR/TAP)
  ENSP ID: ENSP00000479683

SEQ ID NO: 92075 - protein, 702 aa, Homo sapiens; identical to SEQ ID NO: 92073
  Payload ID: 18437
  Gene Name: transporter 2, ATP-binding cassette, sub-family B (MDR/TAP)
  ENSP ID: ENSP00000480952

SEQ ID NO: 92076 - protein, 702 aa, Homo sapiens; identical to SEQ ID NO: 92073
  Payload ID: 18437
  Gene Name: transporter 2, ATP-binding cassette, sub-family B (MDR/TAP)
  ENSP ID: ENSP00000481712

SEQ ID NO: 92077 - protein, 898 aa, Homo sapiens
  Payload ID: 18438
  Gene Name: transportin 1
  Uniprot ID: Q92973
  ENSP ID: ENSP00000336712
MVWDRQTKMEYEWKPDEQGLQQILQLLKESQSPDTTIQRTVQQKLEQLNQYPDFNNYLIFVLTKLKSEDEPTRSLSGLILKNNVKAHFQNFPNGVTDFIKSECLNNIGDSSPLIRATVGILITTIASKGELQNWPDLLPKLCSLLDSEDYNTCEGAFGALQKICEDSAEILDSDVLDRPLNIMIPKFLQFFKHSSPKIRSHAVACVNQFIISRTQALMLHIDSFIENLFALAGDEEPEVRKNVCRALVMLLEVRMDRLLPHMHNIVEYMLQRTQDQDENVALEACEFWLTLAEQPICKDVLVRHLPKLIPVLVNGMKYSDIDIILLKGDVEEDETIPDSEQDIRPRFHRSRTVAQQHDEDGIEEEDDDDDEIDDDDTISDWNLRKCSAAALDVLANVYRDELLPHILPLLKELLFHHEWVVKESGILVLGAIAEGCMQGMIPYLPELIPHLIQCLSDKKALVRSITCWTLSRYAHWVVSQPPDTYLKPLMTELLKRILDSNKRVQEAACSAFATLEEEACTELVPYLAYILDTLVFAFSKYQHKNLLILYDAIGTLADSVGHHLNKPEYIQMLMPPLIQKWNMLKDEDKDLFPLLECLSSVATALQSGFLPYCEPVYQRCVNLVQKTLAQAMLNNAQPDQYEAPDKDFMIVALDLLSGLAEGLGGNIEQLVARSNILTLMYQCMQDKMPEVRQSSFALLGDLTKACFQHVKPCIADFMPILGTNLNPEFISVCNNATWAIGEISIQMGIEMQPYIPMVLHQLVEIINRPNTPKTLLENTAITIGRLGYVCPQEVAPMLQQFIRPWCTSLRNIRDNEEKDSAFRGICTMISVNPSGVIQDFIFFCDAVASWINPKDDLRDMFCKILHGFKNQVGDENWRRFSDQFPLPLKERLAAFYGV

SEQ ID NO: 92078 - protein, 890 aa, Homo sapiens
  Payload ID: 18438
  Gene Name: transportin 1
  Uniprot ID: Q92973
  ENSP ID: ENSP00000425118
MEYEWKPDEQGLQQILQLLKESQSPDTTIQRTVQQKLEQLNQYPDFNNYLIFVLTKLKSEDEPTRSLSGLILKNNVKAHFQNFPNGVTDFIKSECLNNIGDSSPLIRATVGILITTIASKGELQNWPDLLPKLCSLLDSEDYNTCEGAFGALQKICEDSAEILDSDVLDRPLNIMIPKFLQFFKHSSPKIRSHAVACVNQFIISRTQALMLHIDSFIENLFALAGDEEPEVRKNVCRALVMLLEVRMDRLLPHMHNIVEYMLQRTQDQDENVALEACEFWLTLAEQPICKDVLVRHLPKLIPVLVNGMKYSDIDIILLKGDVEEDETIPDSEQDIRPRFHRSRTVAQQHDEDGIEEEDDDDDEIDDDDTISDWNLRKCSAAALDVLANVYRDELLPHILPLLKELLFHHEWVVKESGILVLGAIAEGCMQGMIPYLPELIPHLIQCLSDKKALVRSITCWTLSRYAHWVVSQPPDTYLKPLMTELLKRILDSNKRVQEAACSAFATLEEEACTELVPYLAYILDTLVFAFSKYQHKNLLILYDAIGTLADSVGHHLNKPEYIQMLMPPLIQKWNMLKDEDKDLFPLLECLSSVATALQSGFLPYCEPVYQRCVNLVQKTLAQAMLNNAQPDQYEAPDKDFMIVALDLLSGLAEGLGGNIEQLVARSNILTLMYQCMQDKMPEVRQSSFALLGDLTKACFQHVKPCIADFMPILGTNLNPEFISVCNNATWAIGEISIQMGIEMQPYIPMVLHQLVEIINRPNTPKTLLENTAITIGRLGYVCPQEVAPMLQQFIRPWCTSLRNIRDNEEKDSAFRGICTMISVNPSGVIQDFIFFCDAVASWINPKDDLRDMFCKILHGFKNQVGDENWRRFSDQFPLPLKERLAAFYGV

SEQ ID NO: 92079 - protein, 848 aa, Homo sapiens
  Payload ID: 18438
  Gene Name: transportin 1
  Uniprot ID: Q92973
  ENSP ID: ENSP00000428899
MVWDRQTKMEYEWKPDEQGLQQILQLLKESQSPDTTIQRTVQQKLEQLNQYPDFNNYLIFVLTKLKSEGILITTIASKGELQNWPDLLPKLCSLLDSEDYNTCEGAFGALQKICEDSAEILDSDVLDRPLNIMIPKFLQFFKHSSPKIRSHAVACVNQFIISRTQALMLHIDSFIENLFALAGDEEPEVRKNVCRALVMLLEVRMDRLLPHMHNIVEYMLQRTQDQDENVALEACEFWLTLAEQPICKDVLVRHLPKLIPVLVNGMKYSDIDIILLKGDVEEDETIPDSEQDIRPRFHRSRTVAQQHDEDGIEEEDDDDDEIDDDDTISDWNLRKCSAAALDVLANVYRDELLPHILPLLKELLFHHEWVVKESGILVLGAIAEGCMQGMIPYLPELIPHLIQCLSDKKALVRSITCWTLSRYAHWVVSQPPDTYLKPLMTELLKRILDSNKRVQEAACSAFATLEEEACTELVPYLAYILDTLVFAFSKYQHKNLLILYDAIGTLADSVGHHLNKPEYIQMLMPPLIQKWNMLKDEDKDLFPLLECLSSVATALQSGFLPYCEPVYQRCVNLVQKTLAQAMLNNAQPDQYEAPDKDFMIVALDLLSGLAEGLGGNIEQLVARSNILTLMYQCMQDKMPEVRQSSFALLGDLTKACFQHVKPCIADFMPILGTNLNPEFISVCNNATWAIGEISIQMGIEMQPYIPMVLHQLVEIINRPNTPKTLLENTAITIGRLGYVCPQEVAPMLQQFIRPWCTSLRNIRDNEEKDSAFRGICTMISVNPSGVIQDFIFFCDAVASWINPKDDLRDMFCKILHGFKNQVGDENWRRFSDQFPLPLKERLAAFYGV

SEQ ID NO: 92080 - protein, 136 aa, Homo sapiens
  Payload ID: 18438
  Gene Name: transportin 1
  ENSP ID: ENSP00000430312
MVWDRQTKMEYEWKPDEQGLQQILQLLKESQSPDTTIQRTVQQKLEQLNQYPDFNNYLIFVLTKLKSEDEPTRSLSGLILKNNVKAHFQNFPNGVTDFIKSECLNNIGDSSPLIRATVGLTLLHVSISLSSVGLKL

SEQ ID NO: 92081 - protein, 193 aa, Homo sapiens
  Payload ID: 18438
  Gene Name: transportin 1
  ENSP ID: ENSP00000474059
CFQHVKPCIADFMPILGTNLNPEFISVCNNATWAIGEISIQMGIEMQPYIPMVLHQLVEIINRPNTPKTLLENTAITIGRLGYVCPQEVAPMLQQFIRPWCTSLRNIRDNEEKDSAFRGICTMISVNPSGVIQDFIFFCDAVASWINPKDDLRDMFCKILHGFKNQVGDENWRRFSDQFPLPLKERLAAFYGV

SEQ ID NO: 92082 - protein, 887 aa, Homo sapiens
  Payload ID: 18439
  Gene Name: transportin 2
  Uniprot ID: O14787
  ENSP ID: ENSP00000349321
MDWQPDEQGLQQVLQLLKDSQSPNTATQRIVQDKLKQLNQFPDFNNYLIFVLTRLKSEDEPTRSLSGLILKNNVKAHYQSFPPPVADFIKQECLNNIGDASSLIRATIGILITTIASKGELQMWPELLPQLCNLLNSEDYNTCEGAFGALQKICEDSSELLDSDALNRPLNIMIPKFLQFFKHCSPKIRSHAIACVNQFIMDRAQALMDNIDTFIEHLFALAVDDDPEVRKNVCRALVMLLEVRIDRLIPHMHSIIQYMLQRTQDHDENVALEACEFWLTLAEQPICKEVLASHLVQLIPILVNGMKYSEIDIILLKGDVEEDEAVPDSEQDIKPRFHKSRTVTLPHEAERPDGSEDAEDDDDDDALSDWNLRKCSAAALDVLANVFREELLPHLLPLLKGLLFHPEWVVKESGILVLGAIAEGCMQGMVPYLPELIPHLIQCLSDKKALVRSIACWTLSRYAHWVVSQPPDMHLKPLMTELLKRILDGNKRVQEAACSAFATLEEEACTELVPYLSYILDTLVFAFGKYQHKNLLILYDAIGTLADSVGHHLNQPEYIQKLMPPLIQKWNELKDEDKDLFPLLECLSSVATALQSGFLPYCEPVYQRCVTLVQKTLAQAMMYTQHPEQYEAPDKDFMIVALDLLSGLAEGLGGHVEQLVARSNIMTLLFQCMQDSMPEVRQSSFALLGDLTKACFIHVKPCIAEFMPILGTNLNPEFISVCNNATWAIGEICMQMGAEMQPYVQMVLNNLVEIINRPNTPKTLLENTAITIGRLGYVCPQEVAPMLQQFIRPWCTSLRNIRDNEEKDSAFRGICMMIGVNPGGVVQDFIFFCDAVASWVSPKDDLRDMFYKILHGFKDQVGEDNWQQFSEQFPPLLKERLAAFYGV

SEQ ID NO: 92083 - protein, 887 aa, Homo sapiens; identical to SEQ ID NO: 92082
  Payload ID: 18439
  Gene Name: transportin 2
  Uniprot ID: O14787
  ENSP ID: ENSP00000397379

SEQ ID NO: 92084 - protein, 897 aa, Homo sapiens
  Payload ID: 18439
  Gene Name: transportin 2
  Uniprot ID: O14787
  ENSP ID: ENSP00000407182
MDWQPDEQGLQQVLQLLKDSQSPNTATQRIVQDKLKQLNQFPDFNNYLIFVLTRLKSEDEPTRSLSGLILKNNVKAHYQSFPPPVADFIKQECLNNIGDASSLIRATIGILITTIASKGELQMWPELLPQLCNLLNSEDYNTCEGAFGALQKICEDSSELLDSDALNRPLNIMIPKFLQFFKHCSPKIRSHAIACVNQFIMDRAQALMDNIDTFIEHLFALAVDDDPEVRKNVCRALVMLLEVRIDRLIPHMHSIIQYMLQRTQDHDENVALEACEFWLTLAEQPICKEVLASHLVQLIPILVNGMKYSEIDIILLKGDVEEDEAVPDSEQDIKPRFHKSRTVTLPHEAERPDGSEDAEDDDDDDALSDWNLRKCSAAALDVLANVFREELLPHLLPLLKGLLFHPEWVVKESGILVLGAIAEGCMQGMVPYLPELIPHLIQCLSDKKALVRSIACWTLSRYAHWVVSQPPDMHLKPLMTELLKRILDGNKRVQEAACSAFATLEEEACTELVPYLSYILDTLVFAFGKYQHKNLLILYDAIGTLADSVGHHLNQPEYIQKLMPPLIQKWNELKDEDKDLFPLLECLSSVATALQSGFLPYCEPVYQRCVTLVQKTLAQAMMYTQHPEQYEAPDKDFMIVALDLLSGLAEGLGGHVEQLVARSNIMTLLFQCMQDSMPEVRQSSFALLGDLTKACFIHVKPCIAEFMPILGTNLNPEFISVCNNATWAIGEICMQMGAEMQPYVQMVLNNLVEIINRPNTPKTLLENTGRLTSPSAIPAITIGRLGYVCPQEVAPMLQQFIRPWCTSLRNIRDNEEKDSAFRGICMMIGVNPGGVVQDFIFFCDAVASWVSPKDDLRDMFYKILHGFKDQVGEDNWQQFSEQFPPLLKERLAAFYGV

SEQ ID NO: 92085 - protein, 887 aa, Homo sapiens; identical to SEQ ID NO: 92082
  Payload ID: 18439
  Gene Name: transportin 2
  Uniprot ID: O14787
  ENSP ID: ENSP00000465625

SEQ ID NO: 92086 - protein, 119 aa, Homo sapiens
  Payload ID: 18439
  Gene Name: transportin 2
  ENSP ID: ENSP00000466011
  MOD_RES (1)..(1): Any amino acid
XWVVSQPPDMHLKPLMTELLKRILDGNKRVQEAACSAFATLEEEACTELVPYLSYILDTLVFAFGKYQHKNLLILYDAIGTLADSVGHHLNQPVPESQSATPTQGAPISCSLSRNTSRS

SEQ ID NO: 92087 - protein, 56 aa, Homo sapiens
  Payload ID: 18439
  Gene Name: transportin 2
  ENSP ID: ENSP00000466421
MDWQPDEQGLQQVLQLLKDSQSPNTATQRIVQDKLKQLNQFPDFNNYLIFVLTRLK

SEQ ID NO: 92088 - protein, 109 aa, Homo sapiens
  Payload ID: 18439
  Gene Name: transportin 2
  ENSP ID: ENSP00000466446
MDWQPDEQGLQQVLQLLKDSQSPNTATQRIVQDKLKQLNQFPDFNNYLIFVLTRLKSEDEPTRSLSGLILKNNVKAHYQSFPPPVADFIKQECLNNIGDASSLIRATIG

SEQ ID NO: 92089 - protein, 85 aa, Homo sapiens
  Payload ID: 18439
  Gene Name: transportin 2
  ENSP ID: ENSP00000467115
MDWQPDEQGLQQVLQLLKDSQSPNTATQRIVQDKLKQLNQFPDFNNYLIFVLTRLKSEDEPTRSLSGLILKNNVKAHYQSFPPPV

SEQ ID NO: 92090 - protein, 766 aa, Homo sapiens
  Payload ID: 18439
  Gene Name: transportin 2
  ENSP ID: ENSP00000468101
MDWQPDEQGLQQVLQLLKDSQSPNTATQRIVQDKLKQLNQFPDFNNYLIFVLTRLKSEDEPTRSLSGLILKNNVKAHYQSFPPPVADFIKQECLNNIGDASSLIRATIGILITTIASKGELQMWPELLPQLCNLLNSEDYNTCEGAFGALQKICEDSSELLDSDALNRPLNIMIPKFLQFFKHCSPKIRSHAIACVNQFIMDRAQALMDNIDTFIEHLFALAVDDDPEVRKNVCRALVMLLEVRIDRLIPHMHSIIQYMLQRTQDHDENVALEACEFWLTLAEQPICKEVLASHLVQLIPILVNGMKYSEIDIILLKGDVEEDEAVPDSEQDIKPRFHKSRTVTLPHEAERPDGSEDAEDDDDDDALSDWNLRKCSAAALDVLANVFREELLPHLLPLLKGLLFHPEWVVKESGILVLGAIAEGCMQGMVPYLPELIPHLIQCLSDKKALVRSIACWTLSRYAHWVVSQPPDMHLKPLMTELLKRILDGNKRVQEAACSAFATLEEEACTELVPYLSYILDTLVFAFGKYQHKNLLILYDAIGTLADSVGHHLNQPEYIQKLMPPLIQKWNELKDEDKDLFPLLECLSSVATALQSGFLPYCEPVYQRCVTLVQKTLAQAMMYTQHPEQYEAPDKDFMIVALDLLSGLAEGLGGHVEQLVARSNIMTLLFQCMQDSMPEVRQSSFALLGDLTKACFIHVKPCIAEFMPILGTNLNPEFISVCNNATWAIGEICMQMGAEMQPYVQMVLNNLVEIINRPNTPKTLLE

SEQ ID NO: 92091 - protein, 897 aa, Homo sapiens; identical to SEQ ID NO: 92084
  Payload ID: 18439
  Gene Name: transportin 2
  Uniprot ID: O14787
  ENSP ID: ENSP00000468434

SEQ ID NO: 92092 - protein, 109 aa, Homo sapiens; identical to SEQ ID NO: 92088
  Payload ID: 18439
  Gene Name: transportin 2
  ENSP ID: ENSP00000468642

SEQ ID NO: 92093 - protein, 117 aa, Homo sapiens
  Payload ID: 18439
  Gene Name: transportin 2
  ENSP ID: ENSP00000468698
QDTAGKHSHHHRPLGLRVPPGGGTHAAAVHPALVHVPQEHQGQRGEGLSLPRHLHDDRCQPGGRCAASWVSPKDDLRDMFYKILHGFKDQVGEDNWQQFSEQFPPLLKERLAAFYGV

SEQ ID NO: 92094 - protein, 51 aa, Homo sapiens
  Payload ID: 18439
  Gene Name: transportin 2
  ENSP ID: ENSP00000468739
GKYQHKNLLILYDAIGTLADSVGHHLNQPGRGRDLDRQTDRPGPALALLPV

SEQ ID NO: 92095 - protein, 923 aa, Homo sapiens
  Payload ID: 18440
  Gene Name: transportin 3
  Uniprot ID: Q9Y5L0
  ENSP ID: ENSP00000265388
MEGAKPTLQLVYQAVQALYHDPDPSGKERASFWLGELQRSVHAWEISDQLLQIRQDVESCYFAAQTMKMKIQTSFYELPTDSHASLRDSLLTHIQNLKDLSPVIVTQLALAIADLALQMPSWKGCVQTLVEKYSNDVTSLPFLLEILTVLPEEVHSRSLRIGANRRTEIIEDLAFYSSTVVSLLMTCVEKAGTDEKMLMKVFRCLGSWFNLGVLDSNFMANNKLLALLFEVLQQDKTSSNLHEAASDCVCSALYAIENVETNLPLAMQLFQGVLTLETAYHMAVAREDLDKVLNYCRIFTELCETFLEKIVCTPGQGLGDLRTLELLLICAGHPQYEVVEISFNFWYRLGEHLYKTNDEVIHGIFKAYIQRLLHALARHCQLEPDHEGVPEETDDFGEFRMRVSDLVKDLIFLIGSMECFAQLYSTLKEGNPPWEVTEAVLFIMAAIAKSVDPENNPTLVEVLEGVVRLPETVHTAVRYTSIELVGEMSEVVDRNPQFLDPVLGYLMKGLCEKPLASAAAKAIHNICSVCRDHMAQHFNGLLEIARSLDSFLLSPEAAVGLLKGTALVLARLPLDKITECLSELCSVQVMALKKLLSQEPSNGISSDPTVFLDRLAVIFRHTNPIVENGQTHPCQKVIQEIWPVLSETLNKHRADNRIVERCCRCLRFAVRCVGKGSAALLQPLVTQMVNVYHVHQHSCFLYLGSILVDEYGMEEGCRQGLLDMLQALCIPTFQLLEQQNGLQNHPDTVDDLFRLATRFIQRSPVTLLRSQVVIPILQWAIASTTLDHRDANCSVMRFLRDLIHTGVANDHEEDFELRKELIGQVMNQLGQQLVSQLLHTCCFCLPPYTLPDVAEVLWEIMQVDRPTFCRWLENSLKGLPKETTVGAVTVTHKQLTDFHKQVTSAEECKQVCWALRDFTRLFR

SEQ ID NO: 92096 - protein, 957 aa, Homo sapiens
  Payload ID: 18440
  Gene Name: transportin 3
  ENSP ID: ENSP00000418267
MEGAKPTLQLVYQAVQALYHDPDPSGKERASFWLGELQRSVHAWEISDQLLQIRQDVESCYFAAQTMKMKIQTSFYELPTDSHASLRDSLLTHIQNLKDLSPVIVTQLALAIADLALQMPSWKGCVQTLVEKYSNDVTSLPFLLEILTVLPEEVHSRSLRIGANRRTEIIEDLAFYSSTVVSLLMTCVEKAGTDEKMLMKVFRCLGSWFNLGVLDSNFMANNKLLALLFEVLQQDKTSSNLHEAASDCVCSALYAIENVETNLPLAMQLFQGVLTLETAYHMAVAREDLDKVLNYCRIFTELCETFLEKIVCTPGQGLGDLRTLELLLICAGHPQYEVVEISFNFWYRLGEHLYKTNDEVIHGIFKAYIQRLLHALARHCQLEPDHEGVPEETDDFGEFRMRVSDLVKDLIFLIGSMECFAQLYSTLKEGNPPWEVTEAVLFIMAAIAKSVDPKKPFSNAVCRHSLLFGQNITSEISNCEYLPPVLRENNPTLVEVLEGVVRLPETVHTAVRYTSIELVGEMSEVVDRNPQFLDPVLGYLMKGLCEKPLASAAAKAIHNICSVCRDHMAQHFNGLLEIARSLDSFLLSPEAAVGLLKGTALVLARLPLDKITECLSELCSVQVMALKKLLSQEPSNGISSDPTVFLDRLAVIFRHTNPIVENGQTHPCQKVIQEIWPVLSETLNKHRADNRIVERCCRCLRFAVRCVGKGSAALLQPLVTQMVNVYHVHQHSCFLYLGSILVDEYGMEEGCRQGLLDMLQALCIPTFQLLEQQNGLQNHPDTVDDLFRLATRFIQRSPVTLLRSQVVIPILQWAIASTTLDHRDANCSVMRFLRDLIHTGVANDHEEDFELRKELIGQVMNQLGQQLVSQLLHTCCFCLPPYTLPDVAEVLWEIMQVDRPTFCRWLENSLKGLPKETTVGAVTVTHKQLTDFHKQVTSAEECKQVCWALRDFTRLFR

SEQ ID NO: 92097 - protein, 859 aa, Homo sapiens
  Payload ID: 18440
  Gene Name: transportin 3
  Uniprot ID: Q9Y5L0
  ENSP ID: ENSP00000418646
MEGAKPTLQLVYQAVQALYHDPDPSGKERASFWLGELQRSVHAWEISDQLLQIRQDVESCYFAAQTMKMKIQTSFYELPTDSHASLRDSLLTHIQNLKDLSPVIVTQLALAIADLALQMPSWKGCVQTLVEKYSNDVTSLPFLLEILTVLPEEVHSRSLRIGANRRTEIIEDLAFYSSTVVSLLMTCVEKAGTDEKMLMKVFRCLGSWFNLGVLDSNFMANNKLLALLFEVLQQDKTSSNLHEAASDCVCSALYAIENVETNLPLAMQLFQGVLTLETAYHMAVAREDLDKVLNYCRIFTELCETFLEKIVCTPGQGLGDLRTLELLLICAGHPQYEVVEISFNFWYRLGEHLYKTNDEVIHGIFKAYIQRLLHALARHCQLEPDHEGVPEETDDFGEFRMRVSDLVKDLIFLIGSMECFAQLYSTLKEGNPPWEVTEAVLFIMAAIAKSVDPENNPTLVEVLEGVVRLPETVHTAVRYTSIELVGEMSEVVDRNPQFLGTALVLARLPLDKITECLSELCSVQVMALKKLLSQEPSNGISSDPTVFLDRLAVIFRHTNPIVENGQTHPCQKVIQEIWPVLSETLNKHRADNRIVERCCRCLRFAVRCVGKGSAALLQPLVTQMVNVYHVHQHSCFLYLGSILVDEYGMEEGCRQGLLDMLQALCIPTFQLLEQQNGLQNHPDTVDDLFRLATRFIQRSPVTLLRSQVVIPILQWAIASTTLDHRDANCSVMRFLRDLIHTGVANDHEEDFELRKELIGQVMNQLGQQLVSQLLHTCCFCLPPYTLPDVAEVLWEIMQVDRPTFCRWLENSLKGLPKETTVGAVTVTHKQLTDFHKQVTSAEECKQVCWALRDFTRLFR

SEQ ID NO: 92098 - protein, 857 aa, Homo sapiens
  Payload ID: 18440
  Gene Name: transportin 3
  ENSP ID: ENSP00000420089
MKMKIQTSFYELPTDSHASLRDSLLTHIQNLKDLSPVIVTQLALAIADLALQMPSWKGCVQTLVEKYSNDVTSLPFLLEILTVLPEEVHSRSLRIGANRRTEIIEDLAFYSSTVVSLLMTCVEKAGTDEKMLMKVFRCLGSWFNLGVLDSNFMANNKLLALLFEVLQQDKTSSNLHEAASDCVCSALYAIENVETNLPLAMQLFQGVLTLETAYHMAVAREDLDKVLNYCRIFTELCETFLEKIVCTPGQGLGDLRTLELLLICAGHPQYEVVEISFNFWYRLGEHLYKTNDEVIHGIFKAYIQRLLHALARHCQLEPDHEGVPEETDDFGEFRMRVSDLVKDLIFLIGSMECFAQLYSTLKEGNPPWEVTEAVLFIMAAIAKSVDPENNPTLVEVLEGVVRLPETVHTAVRYTSIELVGEMSEVVDRNPQFLDPVLGYLMKGLCEKPLASAAAKAIHNICSVCRDHMAQHFNGLLEIARSLDSFLLSPEAAVGLLKGTALVLARLPLDKITECLSELCSVQVMALKKLLSQEPSNGISSDPTVFLDRLAVIFRHTNPIVENGQTHPCQKVIQEIWPVLSETLNKHRADNRIVERCCRCLRFAVRCVGKGSAALLQPLVTQMVNVYHVHQHSCFLYLGSILVDEYGMEEGCRQGLLDMLQALCIPTFQLLEQQNGLQNHPDTVDDLFRLATRFIQRSPVTLLRSQVVIPILQWAIASTTLDHRDANCSVMRFLRDLIHTGVANDHEEDFELRKELIGQVMNQLGQQLVSQLLHTCCFCLPPYTLPDVAEVLWEIMQVDRPTFCRWLENSLKGLPKETTVGAVTVTHKQLTDFHKQVTSAEECKQVCWALRDFTRLFR

SEQ ID NO: 92099 - protein, 957 aa, Homo sapiens; identical to SEQ ID NO: 92096
  Payload ID: 18440
  Gene Name: transportin 3
  ENSP ID: ENSP00000487231

SEQ ID NO: 92100 - protein, 147 aa, Homo sapiens
  Payload ID: 18441
  Gene Name: transthyretin
  Uniprot ID: P02766
  ENSP ID: ENSP00000237014
MASHRLLLLCLAGLVFVSEAGPTGTGESKCPLMVKVLDAVRGSPAINVAVHVFRKAADDTWEPFASGKTSESGELHGLTTEEEFVEGIYKVEIDTKSYWKALGISPFHEHAEVVFTANDSGPRRYTIAALLSPYSYSTTAVVTNPKE

SEQ ID NO: 92101 - protein, 185 aa, Homo sapiens
  Payload ID: 18441
  Gene Name: transthyretin
  ENSP ID: ENSP00000477599
MASHRLLLLCLAGLVFVSEAGPTGTGESKCPLMVKVLDAVRGSPAINVAVHVFRKAADDTWEPFASGKTSESGELHGLTTEEEFVEGIYKVEIDTKSYWKALGISPFHEHAEVSIQTFESFETDGCHGNRIQTCSSWSELQTSGFHQNVDVVFTANDSGPRRYTIAALLSPYSYSTTAVVTNPKE

SEQ ID NO: 92102 - protein, 139 aa, Homo sapiens
  Payload ID: 18441
  Gene Name: transthyretin
  ENSP ID: ENSP00000479174
MASHRLLLLCLAGLVFVSEAGPTGTGESKCPLMVKVLDAVRGSPAINVAVHVFRKAADDTWEPFASGKTSESGELHGLTTEEEFVEGIYKVEIDTKSYWKALGISPFHEHAEVVFTANDSGPRRYYSYSTTAVVTNPKE

SEQ ID NO: 92103 - protein, 1411 aa, Homo sapiens
  Payload ID: 18442
  Gene Name: Treacher Collins-Franceschetti syndrome 1
  Uniprot ID: Q13428
  ENSP ID: ENSP00000325223
MAEARKRRELLPLIYHHLLRAGYVRAAREVKEQSGQKCFLAQPVTLLDIYTHWQQTSELGRKRKAEEDAALQAKKTRVSDPISTSESSEEEEEAEAETAKATPRLASTNSSVLGADLPSSMKEKAKAETEKAGKTGNSMPHPATGKTVANLLSGKSPRKSAEPSANTTLVSETEEEGSVPAFGAAAKPGMVSAGQADSSSEDTSSSSDETDVEVKASEKILQVRAASAPAKGTPGKGATPAPPGKAGAVASQTKAGKPEEDSESSSEESSDSEEETPAAKALLQAKASGKTSQVGAASAPAKESPRKGAAPAPPGKTGPAVAKAQAGKREEDSQSSSEESDSEEEAPAQAKPSGKAPQVRAASAPAKESPRKGAAPAPPRKTGPAAAQVQVGKQEEDSRSSSEESDSDREALAAMNAAQVKPLGKSPQVKPASTMGMGPLGKGAGPVPPGKVGPATPSAQVGKWEEDSESSSEESSDSSDGEVPTAVAPAQEKSLGNILQAKPTSSPAKGPPQKAGPVAVQVKAEKPMDNSESSEESSDSADSEEAPAAMTAAQAKPALKIPQTKACPKKTNTTASAKVAPVRVGTQAPRKAGTATSPAGSSPAVAGGTQRPAEDSSSSEESDSEEEKTGLAVTVGQAKSVGKGLQVKAASVPVKGSLGQGTAPVLPGKTGPTVTQVKAEKQEDSESSEEESDSEEAAASPAQVKTSVKKTQAKANPAAARAPSAKGTISAPGKVVTAAAQAKQRSPSKVKPPVRNPQNSTVLARGPASVPSVGKAVATAAQAQTGPEEDSGSSEEESDSEEEAETLAQVKPSGKTHQIRAALAPAKESPRKGAAPTPPGKTGPSAAQAGKQDDSGSSSEESDSDGEAPAAVTSAQVIKPPLIFVDPNRSPAGPAATPAQAQAASTPRKARASESTARSSSSESEDEDVIPATQCLTPGIRTNVVTMPTAHPRIAPKASMAGASSSKESSRISDGKKQEGPATQVSKKNPASLPLTQAALKVLAQKASEAQPPVARTQPSSGVDSAVGTLPATSPQSTSVQAKGTNKLRKPKLPEVQQATKAPESSDDSEDSSDSSSGSEEDGEGPQGAKSAHTLGPTPSRTETLVEETAAESSEDDVVAPSQSLLSGYMTPGLTPANSQASKATPKLDSSPSVSSTLAAKDDPDGKQEAKPQQAAGMLSPKTGGKEAASGTTPQKSRKPKKGAGNPQASTLALQSNITQCLLGQPWPLNEAQVQASVVKVLTELLEQERKKVVDTTKESSRKGWESRKRKLSGDQPAARTPRSKKKKKLGAGEGGEASVSPEKTSTTSKGKAKRDKASGDVKEKKGKGSLGSQGAKDEPEEELQKGMGTVEGGDQSNPKSKKEKKKSDKRKKDKEKKEKKKKAKKASTKDSESPSQKKKKKKKKTAEQTV

SEQ ID NO: 92104 - protein, 1488 aa, Homo sapiens
  Payload ID: 18442
  Gene Name: Treacher Collins-Franceschetti syndrome 1
  Uniprot ID: Q13428
  ENSP ID: ENSP00000367028
MAEARKRRELLPLIYHHLLRAGYVRAAREVKEQSGQKCFLAQPVTLLDIYTHWQQTSELGRKRKAEEDAALQAKKTRVSDPISTSESSEEEEEAEAETAKATPRLASTNSSVLGADLPSSMKEKAKAETEKAGKTGNSMPHPATGKTVANLLSGKSPRKSAEPSANTTLVSETEEEGSVPAFGAAAKPGMVSAGQADSSSEDTSSSSDETDVEGKPSVKPAQVKASSVSTKESPARKAAPAPGKVGDVTPQVKGGALPPAKRAKKPEEESESSEEGSESEEEAPAGTRSQVKASEKILQVRAASAPAKGTPGKGATPAPPGKAGAVASQTKAGKPEEDSESSSEESSDSEEETPAAKALLQAKASGKTSQVGAASAPAKESPRKGAAPAPPGKTGPAVAKAQAGKREEDSQSSSEESDSEEEAPAQAKPSGKAPQVRAASAPAKESPRKGAAPAPPRKTGPAAAQVQVGKQEEDSRSSSEESDSDREALAAMNAAQVKPLGKSPQVKPASTMGMGPLGKGAGPVPPGKVGPATPSAQVGKWEEDSESSSEESSDSSDGEVPTAVAPAQEKSLGNILQAKPTSSPAKGPPQKAGPVAVQVKAEKPMDNSESSEESSDSADSEEAPAAMTAAQAKPALKIPQTKACPKKTNTTASAKVAPVRVGTQAPRKAGTATSPAGSSPAVAGGTQRPAEDSSSSEESDSEEEKTGLAVTVGQAKSVGKGLQVKAASVPVKGSLGQGTAPVLPGKTGPTVTQVKAEKQEDSESSEEESDSEEAAASPAQVKTSVKKTQAKANPAAARAPSAKGTISAPGKVVTAAAQAKQRSPSKVKPPVRNPQNSTVLARGPASVPSVGKAVATAAQAQTGPEEDSGSSEEESDSEEEAETLAQVKPSGKTHQIRAALAPAKESPRKGAAPTPPGKTGPSAAQAGKQDDSGSSSEESDSDGEAPAAVTSAQVIKPPLIFVDPNRSPAGPAATPAQAQAASTPRKARASESTARSSSSESEDEDVIPATQCLTPGIRTNVVTMPTAHPRIAPKASMAGASSSKESSRISDGKKQEGPATQVSKKNPASLPLTQAALKVLAQKASEAQPPVARTQPSSGVDSAVGTLPATSPQSTSVQAKGTNKLRKPKLPEVQQATKAPESSDDSEDSSDSSSGSEEDGEGPQGAKSAHTLGPTPSRTETLVEETAAESSEDDVVAPSQSLLSGYMTPGLTPANSQASKATPKLDSSPSVSSTLAAKDDPDGKQEAKPQQAAGMLSPKTGGKEAASGTTPQKSRKPKKGAGNPQASTLALQSNITQCLLGQPWPLNEAQVQASVVKVLTELLEQERKKVVDTTKESSRKGWESRKRKLSGDQPAARTPRSKKKKKLGAGEGGEASVSPEKTSTTSKGKAKRDKASGDVKEKKGKGSLGSQGAKDEPEEELQKGMGTVEGGDQSNPKSKKEKKKSDKRKKDKEKKEKKKKAKKASTKDSESPSQKKKKKKKKTAEQTV

SEQ ID NO: 92105 - protein, 958 aa, Homo sapiens
  Payload ID: 18442
  Gene Name: Treacher Collins-Franceschetti syndrome 1
  Uniprot ID: Q13428
  ENSP ID: ENSP00000377811
MAEARKRRELLPLIYHHLLRAGYVRAAREVKEQSGQKCFLAQPVTLLDIYTHWQQTSELGRKRKAEEDAALQAKKTRVSDPISTSESSEEEEEAEAETAKATPRLASTNSSVLGADLPSSMKEKAKAETEKAGKTGNSMPHPATGKTVANLLSGKSPRKSAEPSANTTLVSETEEEGSVPAFGAAAKPGMVSAGQADSSSEDTSSSSDETDVEGKPSVKPAQVKASSVSTKESPARKAAPAPGKVGDVTPQVKGGALPPAKRAKKPEEESESSEEGSESEEEAPAGTRSQVKASEKILQVRAASAPAKGTPGKGATPAPPGKAGAVASQTKAGKPEEDSESSSEESSDSEEETPAAKALLQAKASGKTSQVGAASAPAKESPRKGAAPAPPGKTGPAVAKAQAGKREEDSQSSSEESDSEEEAPAQAKPSGKAPQVRAASAPAKESPRKGAAPAPPRKTGPAAAQVQVGKQEEDSRSSSEESDSDREALAAMNAAQVKPLGKSPQVKPASTMGMGPLGKGAGPVPPGKVGPATPSAQVGKWEEDSESSSEESSDSSDGEVPTAVAPAQEKSLGNILQAKPTSSPAKGPPQKAGPVAVQVKAEKPMDNSESSEESSDSADSEEAPAAMTAAQAKPALKIPQTKACPKKTNTTASAKVAPVRVGTQAPRKAGTATSPAGSSPAVAGGTQRPAEDSSSSEESDSEEEKTGLAVTVGQAKSVGKGLQVKAASVPVKGSLGQGTAPVLPGKTGPTVTQVKAEKQEDSESSEEESDSEEAAASPAQVKTSVKKTQAKANPAAARAPSAKGTISAPGKVVTAAAQAKQRSPSKVKPPVRNPQNSTVLARGPASVPSVGKAVATAAQAQTGPEEDSGSSEEESDSEEEAETLAQVKPSGKTHQIRAALAPAKESPRKGAAPTPPGKTGPSAAQAGKQDDSGSSSEESDSDGEAPAAVTSAQDQESS

SEQ ID NO: 92106 - protein, 1414 aa, Homo sapiens
  Payload ID: 18442
  Gene Name: Treacher Collins-Franceschetti syndrome 1
  ENSP ID: ENSP00000390717
MAEARKRRELLPLIYHHLLRAGYVRAAREVKEQSGQKCFLAQPVTLLDIYTHWQQTSELGRKRKAEEDAALQAKKTRVSDPISTSESSEEEEEAEAETAKATPRLASTNSSVLGADLPSSMKEKAKAETEKAGKTGNSMPHPATGKTVANLLSGKSPRKSAEPSANTTLVSETEEEGSVPAFGAAAKPGMVSAGQADSSSEDTSSSSDETDVEGKPSVKPAQVKASSVSTKESPARKAAPAPGKVGDVTPQVKGGALPPAKRAKKPEEESESSEEGSESEEEAPAGTRSQVKASEKILQVRAASAPAKGTPGKGATPAPPGKAGAVASQTKAGKPEEDSESSSEESSDSEEETPAAKALLQAKASGKTSQVGAASAPAKESPRKGAAPAPPGKTGPAVAKAQAGKREEDSQSSSEESDSEEEAPAQAKPSGKAPQVRAASAPAKESPRKGAAPAPPRKTGPAAAQVQVGKQEEDSRSSSEESDSDREALAAMNAAQVKPLGKSPQVKPASTMGMGPLGKGAGPVPPGKVGPATPSAQVGKWEEDSESSSEESSDSSDGEVPTAVAPAQEKSLGNILQAKPTSSPAKGPPQKAGPVAVQVKAEKPMDNSESSEESSDSADSEEAPAAMTAAQAKPALKIPQTKACPKKTNTTASAKVAPVRVGTQAPRKAGTATSPAGSSPAVAGGTQRPAEDSSSSEESDSEEEKTGLAVTVGQAKSVGKGLQVKAASVPVKGSLGQGTAPVLPGKTGPTVTQVKAEKQEDSESSEEESDSEEAAASPAQVKTSVKKTQAKANPAAARAPSAKGTISAPGKVVTAAAQAKQRSPSKVKPPVRNPQNSTVLARGPASVPSVGKAVATAAQAQTGPEEDSGSSEEESDSEEEAETLAQVKPSGKTHQIRAALAPAKESPRKGAAPTPPGKTGPSAAQAGKQDDSGSSSEESDSDGEAPAAVTSAQVIKPPLIFVDPNRSPAGPAATPAQAQAASTPRKARASESTARSSSSESEDEDVIPATQCLTPGIRTNVVTMPTAHPRIAPKASMAGASSSKESSRISDGKKQEGPATQVDSAVGTLPATSPQSTSVQAKGTNKLRKPKLPEVQQATKAPESSDDSEDSSDSSSGSEEDGEGPQGAKSAHTLGPTPSRTETLVEETAAESSEDDVVAPSQSLLSGYMTPGLTPANSQASKATPKLDSSPSVSSTLAAKDDPDGKQEAKPQQAAGMLSPKTGGKEAASGTTPQKSRKPKKGAGNPQASTLALQSNITQCLLGQPWPLNEAQVQASVVKVLTELLEQERKKVVDTTKESSRKGWESRKRKLSGDQPAARTPRSKKKKKLGAGEGGEASVSPEKTSTTSKGKAKRDKASGDVKEKKGKGSLGSQGAKDEPEEELQKGMGTVEGGDQSNPKSKKEKKKSDKRKKDK

SEQ ID NO: 92107 - protein, 1451 aa, Homo sapiens
  Payload ID: 18442
  Gene Name: Treacher Collins-Franceschetti syndrome 1
  Uniprot ID: Q13428
  ENSP ID: ENSP00000406888
MAEARKRRELLPLIYHHLLRAGYVRAAREVKEQSGQKCFLAQPVTLLDIYTHWQQTSELGRKRKAEEDAALQAKKTRVSDPISTSESSEEEEEAEAETAKATPRLASTNSSVLGADLPSSMKEKAKAETEKAGKTGNSMPHPATGKTVANLLSGKSPRKSAEPSANTTLVSETEEEGSVPAFGAAAKPGMVSAGQADSSSEDTSSSSDETDVEGKPSVKPAQVKASSVSTKESPARKAAPAPGKVGDVTPQVKGGALPPAKRAKKPEEESESSEEGSESEEEAPAGTRSQVKASEKILQVRAASAPAKGTPGKGATPAPPGKAGAVASQTKAGKPEEDSESSSEESSDSEEETPAAKALLQAKASGKTSQVGAASAPAKESPRKGAAPAPPGKTGPAVAKAQAGKREEDSQSSSEESDSEEEAPAQAKPSGKAPQVRAASAPAKESPRKGAAPAPPRKTGPAAAQVQVGKQEEDSRSSSEESDSDREALAAMNAAQVKPLGKSPQVKPASTMGMGPLGKGAGPVPPGKVGPATPSAQVGKWEEDSESSSEESSDSSDGEVPTAVAPAQEKSLGNILQAKPTSSPAKGPPQKAGPVAVQVKAEKPMDNSESSEESSDSADSEEAPAAMTAAQAKPALKIPQTKACPKKTNTTASAKVAPVRVGTQAPRKAGTATSPAGSSPAVAGGTQRPAEDSSSSEESDSEEEKTGLAVTVGQAKSVGKGLQVKAASVPVKGSLGQGTAPVLPGKTGPTVTQVKAEKQEDSESSEEESDSEEAAASPAQVKTSVKKTQAKANPAAARAPSAKGTISAPGKVVTAAAQAKQRSPSKVKPPVRNPQNSTVLARGPASVPSVGKAVATAAQAQTGPEEDSGSSEEESDSEEEAETLAQVKPSGKTHQIRAALAPAKESPRKGAAPTPPGKTGPSAAQAGKQDDSGSSSEESDSDGEAPAAVTSAQVIKPPLIFVDPNRSPAGPAATPAQAQAASTPRKARASESTARSSSSESEDEDVIPATQCLTPGIRTNVVTMPTAHPRIAPKASMAGASSSKESSRISDGKKQEGPATQVDSAVGTLPATSPQSTSVQAKGTNKLRKPKLPEVQQATKAPESSDDSEDSSDSSSGSEEDGEGPQGAKSAHTLVGPTPSRTETLVEETAAESSEDDVVAPSQSLLSGYMTPGLTPANSQASKATPKLDSSPSVSSTLAAKDDPDGKQEAKPQQAAGMLSPKTGGKEAASGTTPQKSRKPKKGAGNPQASTLALQSNITQCLLGQPWPLNEAQVQASVVKVLTELLEQERKKVVDTTKESSRKGWESRKRKLSGDQPAARTPRSKKKKKLGAGEGGEASVSPEKTSTTSKGKAKRDKASGDVKEKKGKGSLGSQGAKDEPEEELQKGMGTVEGGDQSNPKSKKEKKKSDKRKKDKEKKEKKKKAKKASTKDSESPSQKKKKKKKKTAEQTV

SEQ ID NO: 92108 - protein, 1412 aa, Homo sapiens
  Payload ID: 18442
  Gene Name: Treacher Collins-Franceschetti syndrome 1
  Uniprot ID: Q13428
  ENSP ID: ENSP00000409944
MAEARKRRELLPLIYHHLLRAGYVRAAREVKEQSGQKCFLAQPVTLLDIYTHWQQTSELGRKRKAEEDAALQAKKTRVSDPISTSESSEEEEEAEAETAKATPRLASTNSSVLGADLPSSMKEKAKAETEKAGKTGNSMPHPATGKTVANLLSGKSPRKSAEPSANTTLVSETEEEGSVPAFGAAAKPGMVSAGQADSSSEDTSSSSDETDVEVKASEKILQVRAASAPAKGTPGKGATPAPPGKAGAVASQTKAGKPEEDSESSSEESSDSEEETPAAKALLQAKASGKTSQVGAASAPAKESPRKGAAPAPPGKTGPAVAKAQAGKREEDSQSSSEESDSEEEAPAQAKPSGKAPQVRAASAPAKESPRKGAAPAPPRKTGPAAAQVQVGKQEEDSRSSSEESDSDREALAAMNAAQVKPLGKSPQVKPASTMGMGPLGKGAGPVPPGKVGPATPSAQVGKWEEDSESSSEESSDSSDGEVPTAVAPAQEKSLGNILQAKPTSSPAKGPPQKAGPVAVQVKAEKPMDNSESSEESSDSADSEEAPAAMTAAQAKPALKIPQTKACPKKTNTTASAKVAPVRVGTQAPRKAGTATSPAGSSPAVAGGTQRPAEDSSSSEESDSEEEKTGLAVTVGQAKSVGKGLQVKAASVPVKGSLGQGTAPVLPGKTGPTVTQVKAEKQEDSESSEEESDSEEAAASPAQVKTSVKKTQAKANPAAARAPSAKGTISAPGKVVTAAAQAKQRSPSKVKPPVRNPQNSTVLARGPASVPSVGKAVATAAQAQTGPEEDSGSSEEESDSEEEAETLAQVKPSGKTHQIRAALAPAKESPRKGAAPTPPGKTGPSAAQAGKQDDSGSSSEESDSDGEAPAAVTSAQVIKPPLIFVDPNRSPAGPAATPAQAQAASTPRKARASESTARSSSSESEDEDVIPATQCLTPGIRTNVVTMPTAHPRIAPKASMAGASSSKESSRISDGKKQEGPATQVSKKNPASLPLTQAALKVLAQKASEAQPPVARTQPSSGVDSAVGTLPATSPQSTSVQAKGTNKLRKPKLPEVQQATKAPESSDDSEDSSDSSSGSEEDGEGPQGAKSAHTLVGPTPSRTETLVEETAAESSEDDVVAPSQSLLSGYMTPGLTPANSQASKATPKLDSSPSVSSTLAAKDDPDGKQEAKPQQAAGMLSPKTGGKEAASGTTPQKSRKPKKGAGNPQASTLALQSNITQCLLGQPWPLNEAQVQASVVKVLTELLEQERKKVVDTTKESSRKGWESRKRKLSGDQPAARTPRSKKKKKLGAGEGGEASVSPEKTSTTSKGKAKRDKASGDVKEKKGKGSLGSQGAKDEPEEELQKGMGTVEGGDQSNPKSKKEKKKSDKRKKDKEKKEKKKKAKKASTKDSESPSQKKKKKKKKTAEQTV

SEQ ID NO: 92109 - protein, 1488 aa, Homo sapiens; identical to SEQ ID NO: 92104
  Payload ID: 18442
  Gene Name: Treacher Collins-Franceschetti syndrome 1
  Uniprot ID: Q13428
  ENSP ID: ENSP00000421655

SEQ ID NO: 92110 - protein, 67 aa, Homo sapiens
  Payload ID: 18442
  Gene Name: Treacher Collins-Franceschetti syndrome 1
  ENSP ID: ENSP00000422567
  MOD_RES (1)..(1): Any amino acid
XQDDSGSSSEESDSDGEAPAAVTSAQDSNSKPARSKTLAPAPPERNTEGSSESSEEELPLTQDQESS

SEQ ID NO: 92111 - protein, 188 aa, Homo sapiens
  Payload ID: 18442
  Gene Name: Treacher Collins-Franceschetti syndrome 1
  ENSP ID: ENSP00000426471
LIYHHLLRAGYVRAAREVKEQSGQKCFLAQPVTLLDIYTHWQQTSELGRKRKAEEDAALQAKKTRVSDPISTSESSEEEEEAEAETAKATPRLASTNSSVLGADLPSSMKEKAKDEPEEELQKGMGTVEGGDQSNPKSKKEKKKSDKRKKDKEKKEKKKKAKKASTKDSESPSQKKKKKKKKTAEQTV

SEQ ID NO: 92112 - protein, 148 aa, Homo sapiens
  Payload ID: 18442
  Gene Name: Treacher Collins-Franceschetti syndrome 1
  ENSP ID: ENSP00000426587
  MOD_RES (1)..(1): Any amino acid
XGPASVPSVGKAVATAAQAQTGPEEDSGSSEEESDSEEEAETLAQVKPSGKTHQIRAALAPAKESPRKGAAPTPPGKTGPSAAQAGKQDDSGSSSEESDSDGEAPAAVTSAQSSWPSCYTRTSPGCKHPEEGPSLGEHSQELLLRERG

SEQ ID NO: 92113 - protein, 1488 aa, Homo sapiens
  Payload ID: 18442
  Gene Name: Treacher Collins-Franceschetti syndrome 1
  ENSP ID: ENSP00000427484
MAEARKRRELLPLIYHHLLRAGYVRAAREVKEQSGQKCFLAQPVTLLDIYTHWQQTSELGRKRKAEEDAALQAKKTRVSDPISTSESSEEEEEAEAETAKATPRLASTNSSVLGADLPSSMKEKAKAETEKAGKTGNSMPHPATGKTVANLLSGKSPRKSAEPSANTTLVSETEEEGSVPAFGAAAKPGMVSAGQADSSSEDTSSSSDETDVEGKPSVKPAQVKASSVSTKESPARKAAPAPGKVGDVTPQVKGGALPPAKRAKKPEEESESSEEGSESEEEAPAGTRSQVKASEKILQVRAASAPAKGTPGKGATPAPPGKAGAVASQTKAGKPEEDSESSSEESSDSEEETPAAKALLQAKASGKTSQVGAASAPAKESPRKGAAPAPPGKTGPAVAKAQAGKREEDSQSSSEESDSEEEAPAQAKPSGKAPQVRAASAPAKESPRKGAAPAPPRKTGPAAAQVQVGKQEEDSRSSSEESDSDREALAAMNAAQVKPLGKSPQVKPASTMGMGPLGKGAGPVPPGKVGPATPSAQVGKWEEDSESSSEESSDSSDGEVPTAVAPAQEKSLGNILQAKPTSSPAKGPPQKAGPVAVQVKAEKPMDNSESSEESSDSADSEEAPAAMTAAQAKPALKIPQTKACPKKTNTTASAKVAPVRVGTQAPRKAGTATSPAGSSPAVAGGTQRPAEDSSSSEESDSEEEKTGLAVTVGQAKSVGKGLQVKAASVPVKGSLGQGTAPVLPGKTGPTVTQVKAEKQEDSESSEEESDSEEAAASPAQVKTSVKKTQAKANPAAARAPSAKGTISAPGKVVTAAAQAKQRSPSKVKPPVRNPQNSTVLARGPASVPSVGKAVATAAQAQTGPEEDSGSSEEESDSEEEAETLAQVKPSGKTHQIRAALAPAKESPRKGAAPTPPGKTGPSAAQAGKQDDSGSSSEESDSDGEAPAAVTSAQKDSNSKPARSKTLAPAPPERNTEGSSESSEEELPLTQVIKPPLIFVDPNRSPAGPAATPAQAQAASTPRKARASESTARSSSSESEDEDVIPATQCLTPGIRTNVVTMPTAHPRIAPKASMAGASSSKESSRISDGKKQEGPATQVDSAVGTLPATSPQSTSVQAKGTNKLRKPKLPEVQQATKAPESSDDSEDSSDSSSGSEEDGEGPQGAKSAHTLVGPTPSRTETLVEETAAESSEDDVVAPSQSLLSGYMTPGLTPANSQASKATPKLDSSPSVSSTLAAKDDPDGKQEAKPQQAAGMLSPKTGGKEAASGTTPQKSRKPKKGAGNPQASTLALQSNITQCLLGQPWPLNEAQVQASVVKVLTELLEQERKKVVDTTKESSRKGWESRKRKLSGDQPAARTPRSKKKKKLGAGEGGEASVSPEKTSTTSKGKAKRDKASGDVKEKKGKGSLGSQGAKDEPEEELQKGMGTVEGGDQSNPKSKKEKKKSDKRKKDKEKKEKKKKAKKASTKDSESPSQKKKKKKKKTAEQTV

SEQ ID NO: 92114 - protein, 84 aa, Homo sapiens
  Payload ID: 18443
  Gene Name: trefoil factor 1
  Uniprot ID: P04155
  ENSP ID: ENSP00000291527
MATMENKVICALVLVSMLALGTLAEAQTETCTVAPRERQNCGFPGVTPSQCANKGCCFDDTVRGVPWCFYPNTIDVPPEEECEF

SEQ ID NO: 92115 - protein, 129 aa, Homo sapiens
  Payload ID: 18444
  Gene Name: trefoil factor 2
  Uniprot ID: Q03403
  ENSP ID: ENSP00000291526
MGRRDAQLLAALLVLGLCALAGSEKPSPCQCSRLSPHNRTNCGFPGITSDQCFDNGCCFDSSVTGVPWCFHPLPKQESDQCVMEVSDRRNCGYPGISPEECASRKCCFSNFIFEVPWCFFPKSVEDCHY

SEQ ID NO: 92116 - protein, 74 aa, Homo sapiens [sequence omitted]

SEQ ID NO: 92117 - protein, 125 aa, Homo sapiens
  Payload ID: 18445
  Gene Name: trefoil factor 3 (intestinal)
  ENSP ID: ENSP00000381462
  MOD_RES (1)..(1): Any amino acid
XALLSSSSAEEYVGLSQQGLWQLTGLCLGQLQTSVPCQPRTGWTAATPMSPPRSATTGAAALTPGSLECLGVSSPCRKQNAPSEAPPAAPGRGMRGSEHPCPAVIAARHCSSQLFCPFAPGKRFC

SEQ ID NO: 92118 - protein, 94 aa, Homo sapiens
  Payload ID: 18445
  Gene Name: trefoil factor 3 (intestinal)
  ENSP ID: ENSP00000430690
MKRVLSCVPEPTVVMAARALCMLGLVLALLSSSSAEEYVGLSANQCAVPAKDRVDCGYPHVTPKECNNRGCCFDSRIPGVPWCFKPLQEAECTF

SEQ ID NO: 92119 - protein, 583 aa, Homo sapiens
  Payload ID: 18446
  Gene Name: trehalase (brush-border membrane glycoprotein)
  Uniprot ID: O43280
  ENSP ID: ENSP00000264029
MPGRTWELCLLLLLGLGLGSQEALPPPCESEIYCHGELLNQVQMAKLYQDDKQFVDMPLSIAPEQVLQTFTELSRDHNHSIPREQLQAFVHEHFQAKGQELQPWTPADWKDSPQFLQKISDAKLRAWAGQLHQLWKKLGKKMKPEVLSHPERFSLIYSEHPFIVPGGRFVEFYYWDSYWVMEGLLLSEMAETVKGMLQNFLDLVKTYGHVPNGGRVYYLQRSQPPLLTLMMDCYLTHTNDTAFLQENIETLALELDFWTKNRTVSVSLEGKNYLLNRYYVPYGGPRPESYSKDVELADTLPEGDREALWAELKAGAESGWDFSSRWLIGGPNPNSLSGIRTSKLVPVDLNAFLCQAEELMSNFYSRLGNDSQATKYRILRSQRLAALNTVLWDEQTGAWFDYDLEKKKKNREFYPSNLTPLWAGCFSDPGVADKALKYLEDNRILTYQYGIPTSLQKTGQQWDFPNAWAPLQDLVIRGLAKAPLRRAQEVAFQLAQNWIRTNFDVYSQKSAMYEKYDVSNGGQPGGGGEYEVQEGFGWTNGVVLMLLDRYGDRLTSGAKLAFLEPHCLAATLLPSLLLSLLPW

SEQ ID NO: 92120 - protein, 552 aa, Homo sapiens
  Payload ID: 18446
  Gene Name: trehalase (brush-border membrane glycoprotein)
  Uniprot ID: O43280
  ENSP ID: ENSP00000381020
MPGRTWELCLLLLLGLGLGSQEALPPPCESEIYCHGELLNQVQMAKLYQDDKQFVDMPLSIAPEQVLQTFTELSRDHNHSIPREQLQAFVHEHFQAKGQELQPWTPADWKDSPQFLQKISDAKLRAWAGQLHQLWKKLGKKMKPEVLSHPERFSLIYSEHPFIVPGGRFVEFYYCYGHVPNGGRVYYLQRSQPPLLTLMMDCYLTHTNDTAFLQENIETLALELDFWTKNRTVSVSLEGKNYLLNRYYVPYGGPRPESYSKDVELADTLPEGDREALWAELKAGAESGWDFSSRWLIGGPNPNSLSGIRTSKLVPVDLNAFLCQAEELMSNFYSRLGNDSQATKYRILRSQRLAALNTVLWDEQTGAWFDYDLEKKKKNREFYPSNLTPLWAGCFSDPGVADKALKYLEDNRILTYQYGIPTSLQKTGQQWDFPNAWAPLQDLVIRGLAKAPLRRAQEVAFQLAQNWIRTNFDVYSQKSAMYEKYDVSNGGQPGGGGEYEVQEGFGWTNGVVLMLLDRYGDRLTSGAKLAFLEPHCLAATLLPSLLLSLLPW

SEQ ID NO: 92121 - protein, 37 aa, Homo sapiens
  Payload ID: 18446
  Gene Name: trehalase (brush-border membrane glycoprotein)
  ENSP ID: ENSP00000477923
MPGRTWELCLLLLLGLGLGSQEALPPPCERTSPADLH

SEQ ID NO: 92122 - protein, 729 aa, Homo sapiens
  Payload ID: 18447
  Gene Name: triadin
  Uniprot ID: Q13061
  ENSP ID: ENSP00000333984
MTEITAEGNASTTTTVIDSKNGSVPKSPGKVLKRTVTEDIVTTFSSPAAWLLVIALIITWSAVAIVMFDLVDYKNFSASSIAKIGSDPLKLVRDAMEETTDWIYGFFSLLSDIISSEDEEDDDGDEDTDKGEIDEPPLRKKEIHKDKTEKQEKPERKIQTKVTHKEKEKGKEKVREKEKPEKKATHKEKIEKKEKPETKTLAKEQKKAKTAEKSEEKTKKEVKGGKQEKVKQTAAKVKEVQKTPSKPKEKEDKEKAAVSKHEQKDQYAFCRYMIDIFVHGDLKPGQSPAIPPPLPTEQASRPTPASPALEEKEGEKKKAEKKVTSETKKKEKEDIKKKSEKETAIDVEKKEPGKASETKQGTVKIAAQAAAKKDEKKEDSKKTKKPAEVEQPKGKKQEKKEKHVEPAKSPKKEHSVPSDKQVKAKTERAKEEIGAVSIKKAVPGKKEEKTTKTVEQEIRKEKSGKTSSILKDKEPIKGKEEKVPASLKEKEPETKKDEKMSKAGKEVKPKPPQLQGKKEEKPEPQIKKEAKPAISEKVQIHKQDIVKPEKTVSHGKPEEKVLKQVKAVTIEKTAKPKPTKKAEHREREPPSIKTDKPKPTPKGTSEVTESGKKKTEISEKESKEKADMKHLREEKVSTRKESLQLHNVTKAEKPARVSKDVEDVPASKKAKEGTEDVSPTKQKSPISFFQCVYLDGYNGYGFQFPFTPADRPGESSGQANSPGQKQQGQ

SEQ ID NO: 92123 - protein, 151 aa, Homo sapiens
  Payload ID: 18447
  Gene Name: triadin
  ENSP ID: ENSP00000354307
  MOD_RES (1)..(1): Any amino acid
XTHKEKEKGKEKVREKEKPEKKATHKEKIEKKEKPETKTLAKEQKKAKTAEKSEEKTKKEVKGGKQEKVKQTAAKVKEVQKTPSKPKEKEDKEKAAVSKHEQKGFPGPGIRNSSYYCQYIKGQINAWNDLRTSLLPIPYLSCGKMCSNFNN

SEQ ID NO: 92124 - protein, 44 aa, Homo sapiens
  Payload ID: 18447
  Gene Name: triadin
  ENSP ID: ENSP00000406768
  MOD_RES (1)..(1): Any amino acid
XIHKDKTEKQEKPERKIQTKDWSANSSTIRTLKLTQLKPIYICT

SEQ ID NO: 92125 - protein, 167 aa, Homo sapiens
  Payload ID: 18447
  Gene Name: triadin
  Uniprot ID: Q13061
  ENSP ID: ENSP00000437684
MTEITAEGNASTTTTVIDSKNGSVPKSPGKVLKRTVTEDIVTTFSSPAAWLLVIALIITWSAVAIVMFDLVDYKNFSASSIAKIGSDPLKLVRDAMEETTDWIYGFFSLLSDIISSEDEEDDDGDEDTDKGEIDEPPLRKKEIHKDKTEKQEKPERKIQTKEVGHSS

SEQ ID NO: 92126 - protein, 286 aa, Homo sapiens
  Payload ID: 18447
  Gene Name: triadin
  ENSP ID: ENSP00000439281
MTEITAEGNASTTTTVIDSKNGSVPKSPGKVLKRTVTEDIVTTFSSPAAWLLVIALIITWSAVAIVMFDLVDYKNFSASSIAKIGSDPLKLVRDAMEETTDWIYGFFSLLSDIISSEDEEDDDGDEDTDKGEIDEPPLRKKEIHKDKTEKQEKPERKIQTKVTHKEKEKGKEKVREKEKPEKKATHKEKIEKKEKPETKTLAKEQKKAKTAEKSEEKTKKEVKGGKQEKVKQTAAKVKEVQKTPSKPKEKEDKEKAAVSKHEQKGKHSEQEAAGGSKRILGKKHMQ

SEQ ID NO: 92127 - protein, 297 aa, Homo sapiens
  Payload ID: 18447
  Gene Name: triadin
  Uniprot ID: Q13061
  ENSP ID: ENSP00000486095
MTEITAEGNASTTTTVIDSKNGSVPKSPGKVLKRTVTEDIVTTFSSPAAWLLVIALIITWSAVAIVMFDLVDYKNFSASSIAKIGSDPLKLVRDAMEETTDWIYGFFSLLSDIISSEDEEDDDGDEDTDKGEIDEPPLRKKEIHKDKTEKQEKPERKIQTKVTHKEKEKGKEKVREKEKPEKKATHKEKIEKKEKPETKTLAKEQKKAKTAEKSEEKTKKEVKGGKQEKVKQTAAKVKEVQKTPSKPKEKEDKEKAAVSKHEQKGQSPAIPPPLPTEQASRPTPASPALEGKYFFFS

SEQ ID NO: 92128 - protein, 372 aa, Homo sapiens
  Payload ID: 18448
  Gene Name: tribbles pseudokinase 1
  Uniprot ID: Q96RU8
  ENSP ID: ENSP00000312150
MRVGPVRSAMSGASQPRGPALLFPATRGVPAKRLLDADDAAAVAAKCPRLSECSSPPDYLSPPGSPCSPQPPPAAPGAGGGSGSAPGPSRIADYLLLPLAEREHVSRALCIHTGRELRCKVFPIKHYQDKIRPYIQLPSHSNITGIVEVILGETKAYVFFEKDFGDMHSYVRSRKRLREEEAARLFKQIVSAVAHCHQSAIVLGDLKLRKFVFSTEERTQLRLESLEDTHIMKGEDDALSDKHGCPAYVSPEILNTTGTYSGKAADVWSLGVMLYTLLVGRYPFHDSDPSALFSKIRRGQFCIPEHISPKARCLIRSLLRREPSERLTAPEILLHPWFESVLEPGYIDSEIGTSDQIVPEYQEDSDISSFFC

SEQ ID NO: 92129 - protein, 141 aa, Homo sapiens
  Payload ID: 18448
  Gene Name: tribbles pseudokinase 1
  ENSP ID: ENSP00000428879
MKGEDDALSDKHGCPAYVSPEILNTTGTYSGKAADVWSLGVMLYTLLVGRYPFHDSDPSALFSKIRRGQFCIPEHISPKARCLIRSLLRREPSERLTAPEILLHPWFESVLEPGYIDSEIGTSDQIVPEYQEDSDISSFFC

SEQ ID NO: 92130 - protein, 206 aa, Homo sapiens
  Payload ID: 18448
  Gene Name: tribbles pseudokinase 1
  Uniprot ID: Q96RU8
  ENSP ID: ENSP00000429063
MHSYVRSRKRLREEEAARLFKQIVSAVAHCHQSAIVLGDLKLRKFVFSTEERTQLRLESLEDTHIMKGEDDALSDKHGCPAYVSPEILNTTGTYSGKAADVWSLGVMLYTLLVGRYPFHDSDPSALFSKIRRGQFCIPEHISPKARCLIRSLLRREPSERLTAPEILLHPWFESVLEPGYIDSEIGTSDQIVPEYQEDSDISSFFC

SEQ ID NO: 92131 - protein, 343 aa, Homo sapiens
  Payload ID: 18449
  Gene Name: tribbles pseudokinase 2
  Uniprot ID: Q92519
  ENSP ID: ENSP00000155926
MNIHRSTPITIARYGRSRNKTQDFEELSSIRSAEPSQSFSPNLGSPSPPETPNLSHCVSCIGKYLLLEPLEGDHVFRAVHLHSGEELVCKVFDISCYQESLAPCFCLSAHSNINQITEIILGETKAYVFFERSYGDMHSFVRTCKKLREEEAARLFYQIASAVAHCHDGGLVLRDLKLRKFIFKDEERTRVKLESLEDAYILRGDDDSLSDKHGCPAYVSPEILNTSGSYSGKAADVWSLGVMLYTMLVGRYPFHDIEPSSLFSKIRRGQFNIPETLSPKAKCLIRSILRREPSERLTSQEILDHPWFSTDFSVSNSAYGAKEVSDQLVPDVNMEENLDPFFN

SEQ ID NO: 92132 - protein, 207 aa, Homo sapiens
  Payload ID: 18449
  Gene Name: tribbles pseudokinase 2
  ENSP ID: ENSP00000370874
MHSFVRTCKKLREEEAARLFYQIASAVAHCHDGGLVLRDLKLRKFIFKDEERTRVKLESLEDAYILRGDDDSLSDKHGCPAYVSPEILNTSGSYSGKAADVWSLGVMLYTMLVGRYPFHDIEPSSLFSKIRRGQFNIPETLSPKAKCLIRSILRREPSERLTSQEILDHPWFSTDFSVSNSAYGAKEVSDQLVPDVNMEENLDPFFN

SEQ ID NO: 92133 - protein, 252 aa, Homo sapiens
  Payload ID: 18449
  Gene Name: tribbles pseudokinase 2
  ENSP ID: ENSP00000384260
MNIHRSTPITIARYGRSRNKTQDFEELSSIRSAEPSQSFSPNLGSPSPPETPNLSHCVSCIGKYLLLEPLEGDHVFRAVHLHSGEELVCKVFDISCYQESLAPCFCLSAHSNINQITEIILGETKAYVFFERSYGDMHSFVRTCKKLREEEAARLFYQIASAVAHCHDGGLVLRDLKLRKFIFKDEERCLCPWSLEMFPLVLPSIPSVILDWSFVCFHPPPTSLIFLLLLPSVCCIGSKVFSINNKLVYVLL

SEQ ID NO: 92134 - protein, 358 aa, Homo sapiens
  Payload ID: 18450
  Gene Name: tribbles pseudokinase 3
  Uniprot ID: Q96RU7
  ENSP ID: ENSP00000217233
MRATPLAAPAGSLSRKKRLELDDNLDTERPVQKRARSGPQPRLPPCLLPLSPPTAPDRATAVATASRLGPYVLLEPEEGGRAYQALHCPTGTEYTCKVYPVQEALAVLEPYARLPPHKHVARPTEVLAGTQLLYAFFTRTHGDMHSLVRSRHRIPEPEAAVLFRQMATALAHCHQHGLVLRDLKLCRFVFADRERKKLVLENLEDSCVLTGPDDSLWDKHACPAYVGPEILSSRASYSGKAADVWSLGVALFTMLAGHYPFQDSEPVLLFGKIRRGAYALPAGLSAPARCLVRCLLRREPAERLTATGILLHPWLRQDPMPLAPTRSHLWEAAQVVPDGLGLDEAREEEGDREVVLYG

SEQ ID NO: 92135 - protein, 271 aa, Homo sapiens
  Payload ID: 18450
  Gene Name: tribbles pseudokinase 3
  ENSP ID: ENSP00000391873
MRATPLAAPAGSLSRKKRLELDDNLDTERPVQKRARSGPQPRLPPCLLPLSPPTAPDRATAVATASRLGPYVLLEPEEGGRAYQALHCPTGTEYTCKVYPVQEALAVLEPYARLPPHKHVARPTEVLAGTQLLYAFFTRTHGDMHSLVRSRHRIPEPEAAVLFRQMATALAHCHQHGLVLRDLKLCRFVFADRERKKLVLENLEDSCVLTGPDDSLWDKHACPAYVGPEILSSRASYSGKAADVWSLGVALFTMLAGHYPFQDSEPVLLFG

SEQ ID NO: 92136 - protein, 385 aa, Homo sapiens
  Payload ID: 18450
  Gene Name: tribbles pseudokinase 3
  ENSP ID: ENSP00000415416
MVLMHLAVKNNRMSANNDHFLTPTWQQMRATPLAAPAGSLSRKKRLELDDNLDTERPVQKRARSGPQPRLPPCLLPLSPPTAPDRATAVATASRLGPYVLLEPEEGGRAYQALHCPTGTEYTCKVYPVQEALAVLEPYARLPPHKHVARPTEVLAGTQLLYAFFTRTHGDMHSLVRSRHRIPEPEAAVLFRQMATALAHCHQHGLVLRDLKLCRFVFADRERKKLVLENLEDSCVLTGPDDSLWDKHACPAYVGPEILSSRASYSGKAADVWSLGVALFTMLAGHYPFQDSEPVLLFGKIRRGAYALPAGLSAPARCLVRCLLRREPAERLTATGILLHPWLRQDPMPLAPTRSHLWEAAQVVPDGLGLDEAREEEGDREVVLYG

SEQ ID NO: 92137 - protein, 130 aa, Homo sapiens
  Payload ID: 18450
  Gene Name: tribbles pseudokinase 3
  ENSP ID: ENSP00000478194
MRATPLAAPAGSLSRKKRLELDDNLDTERPVQKRARSGPQPRLPPCLLPLSPPTAPDRATAVATASRLGPYVLLEPEEGGRAYQALHCPTGTEYTCKVYPVQEALAVLEPYARLPPHKHVARPTEVLAGT

SEQ ID NO: 92138 - protein, 1943 aa, Homo sapiens
  Payload ID: 18451
  Gene Name: trichohyalin
  Uniprot ID: Q07283
  ENSP ID: ENSP00000357794
MSPLLRSICDITEIFNQYVSHDCDGAALTKKDLKNLLEREFGAVLRRPHDPKTVDLILELLDLDSNGRVDFNEFLLFIFKVAQACYYALGQATGLDEEKRARCDGKESLLQDRRQEEDQRRFEPRDRQLEEEPGQRRRQKRQEQERELAEGEEQSEKQERLEQRDRQRRDEELWRQRQEWQEREERRAEEEQLQSCKGHETEEFPDEEQLRRRELLELRRKGREEKQQQRRERQDRVFQEEEEKEWRKRETVLRKEEEKLQEEEPQRQRELQEEEEQLRKLERQELRRERQEEEQQQQRLRREQQLRRKQEEERREQQEERREQQERREQQEERREQQLRREQEERREQQLRREQEEERREQQLRREQEEERREQQLRREQQLRREQQLRREQQLRREQQLRREQQLRREQQLRREQQLRREQQLRREQEEERHEQKHEQERREQRLKREQEERRDWLKREEETERHEQERRKQQLKRDQEEERRERWLKLEEEERREQQERREQQLRREQEERREQRLKRQEEEERLQQRLRSEQQLRREQEERREQLLKREEEKRLEQERREQRLKREQEERRDQLLKREEERRQQRLKREQEERLEQRLKREEVERLEQEERREQRLKREEPEEERRQQLLKSEEQEERRQQQLRREQQERREQRLKREEEEERLEQRLKREHEEERREQELAEEEQEQARERIKSRIPKWQWQLESEADARQSKVYSRPRKQEGQRRRQEQEEKRRRRESELQWQEEERAHRQQQEEEQRRDFTWQWQAEEKSERGRQRLSARPPLREQRERQLRAEERQQREQRFLPEEEEKEQRRRQRREREKELQFLEEEEQLQRRERAQQLQEEEDGLQEDQERRRSQEQRRDQKWRWQLEEERKRRRHTLYAKPALQEQLRKEQQLLQEEEEELQREEREKRRRQEQERQYREEEQLQQEEEQLLREEREKRRRQERERQYRKDKKLQQKEEQLLGEEPEKRRRQEREKKYREEEELQQEEEQLLREEREKRRRQEWERQYRKKDELQQEEEQLLREEREKRRLQERERQYREEEELQQEEEQLLGEERETRRRQELERQYRKEEELQQEEEQLLREEPEKRRRQERERQCREEEELQQEEEQLLREEREKRRRQELERQYREEEEVQQEEEQLLREEPEKRRRQELERQYREEEELQQEEEQLLREEQEKRRQERERQYREEEELQRQKRKQRYRDEDQRSDLKWQWEPEKENAVRDNKVYCKGRENEQFRQLEDSQLRDRQSQQDLQHLLGEQQERDREQERRRWQQRDRHFPEEEQLEREEQKEAKRRDRKSQEEKQLLREEREEKRRRQETDRKFREEEQLLQEREEQPLRRQERDRKFREEELRHQEQGRKFLEEEQRLRRQERERKFLKEEQQLRCQEREQQLRQDRDRKFREEEQQLSRQERDRKFREEEQQVRRQERERKFLEEEQQLRQERHRKFREEEQLLQEREEQQLHRQERDRKFLEEEQQLRRQERDRKFREQELRSQEPERKFLEEEQQLHRQQRQRKFLQEEQQLRRQERGQQRRQDRDRKFREEEQLRQEREEQQLSRQERDRKFRLEEQKVRRQEQERKFMEDEQQLRRQEGQQQLRQERDRKFREDEQLLQEREEQQLHRQERDRKFLEEEPQLRRQEREQQLRHDRDRKFREEEQLLQEGEEQQLRRQERDRKFREEEQQLRRQERERKFLQEEQQLRRQELERKFREEEQLRQETEQEQLRRQERYRKILEEEQLRPEREEQQLRRQERDRKFREEEQLRQEREEQQLRSQESDRKFREEEQLRQEREEQQLRPQQRDGKYRWEEEQLQLEEQEQRLRQERDRQYRAEEQFATQEKSRREEQELWQEEEQKRRQERERKLREEHIRRQQKEEQRHRQVGEIKSQEGKGHGRLLEPGTHQFASVPVRSSPLYEYIQEQRSQYRP

SEQ ID NO: 92139 - protein, 1943 aa, Homo sapiens; identical to SEQ ID NO: 92138
  Payload ID: 18451
  Gene Name: trichohyalin
  Uniprot ID: Q07283
  ENSP ID: ENSP00000480484

SEQ ID NO: 92140 - protein, 904 aa, Homo sapiens
  Payload ID: 18452
  Gene Name: trichohyalin-like 1
  Uniprot ID: Q5QJ38
  ENSP ID: ENSP00000357796
MPQLLRNVLCVIETFHKYASEDSNGATLTGRELKQLIQGEFGDFFQPCVLHAVEKNSNLLNIDSNGIISFDEFVLAIFNLLNLCYLDIKSLLSSELRQVTKPEKEKLDDVDVQATTGDGQWTVGTSPTQEKRMLPSGMASSSQLIPEESGAVGNNRVDPWREAKTHNFPGEASEHNDPKNKHLEGDEQSQEVAQDIQTTEDNEGQLKTNKPMAGSKKTSSPTERKGQDKEISQEGDEPAREQSVSKIRDQFGEQEGNLATQSSPPKEATQRPCEDQEVRTEKEKHSNIQEPPLQREDEPSSQHADLPEQAAARSPSQTQKSTDSKDVCRMFDTQEPGKDADQTPAKTKNLGEPEDYGRTSETQEKECETKDLPVQYGSRNGSETSDMRDERKERRGPEAHGTAGQKERDRKTRPLVLETQTQDGKYQELQGLSKSKDAEKGSETQYLSSEGGDQTHPELEGTAVSGEEAEHTKEGTAEAFVNSKNAPAAERTLGARERTQDLAPLEKQSVGENTRVTKTHDQPVEEEDGYQGEDPESPFTQSDEGSSETPNSLASEEGNSSSETGELPVQGDSQSQGDQHGESVQGGHNNNPDTQRQGTPGEKNRALEAVVPAVRGEDVQLTEDQEQPARGEHKNQGPGTKGPGAAVEPNGHPEAQESTAGDENRKSLEIEITGALDEDFTDQLSLMQLPGKGDSRNELKVQGPSSKEEKGRATEAQNTLLESLDEDNSASLKIQLETKEPVTSEEEDESPQELAGEGGDQKSPAKKEHNSSVPWSSLEKQMQRDQEPCSVERGAVYSSPLYQYLQEKILQQTNVTQEEHQKQVQIAQASGPELCSVSLTSEISDCSVFFNYSQASQPYTRGLPLDESPAGAQETPAPQALEDKQGHPQRERLVLQREASTTKQ

SEQ ID NO: 92141 - protein, 498 aa, Homo sapiens
  Payload ID: 18453
  Gene Name: trichoplein, keratin filament binding
  Uniprot ID: Q9BT92
  ENSP ID: ENSP00000324404
MALPTLPSYWCSQQRLNQQLARQREQEARLRQQWEQNSRYFRMSDICSSKQAEWSSKTSYQRSMHAYQREKMKEEKRRSLEARREKLRQLMQEEQDLLARELEELRLSMNLQERRIREQHGKLKSAKEEQRKLIAEQLLYEHWKKNNPKLREMELDLHQKHVVNSWEMQKEEKKQQEATAEQENKRYENEYERARREALERMKAEEERRQLEDKLQAEALLQQMEELKLKEVEATKLKKEQENLLKQRWELERLEEERKQMEAFRQKAELGRFLRHQYNAQLSRRTQQIQEELEADRRILQALLEKEDESQRLHLARREQVMADVAWMKQAIEEQLQLERAREAELQMLLREEAKEMWEKREAEWARERSARDRLMSEVLTGRQQQIQEKIEQNRRAQEESLKHREQLIRNLEEVRELARREKEESEKLKSARKQELEAQVAERRLQAWEADQQEEEEEEEARRVEQLSDALLQQEAETMAEQGYRPKPYGHPKIAWN

SEQ ID NO: 92142 - protein, 498 aa, Homo sapiens; identical to SEQ ID NO: 92141
  Payload ID: 18453
  Gene Name: trichoplein, keratin filament binding
  Uniprot ID: Q9BT92
  ENSP ID: ENSP00000384520

SEQ ID NO: 92143 - protein, 498 aa, Homo sapiens; identical to SEQ ID NO: 92141
  Payload ID: 18453
  Gene Name: trichoplein, keratin filament binding
  Uniprot ID: Q9BT92
  ENSP ID: ENSP00000440838

SEQ ID NO: 92144 - protein, 174 aa, Homo sapiens
  Payload ID: 18453
  Gene Name: trichoplein, keratin filament binding
  ENSP ID: ENSP00000441835
MALPTLPSYWCSQQRLNQQLARQREQEARLRQQWEQNSRYFRMSDICSSKQAEWSSKTSYQRSMHAYQREKMKEEKRRSLEARREKLRQLMQEEQDLLARELEELRLSMNLQERRIREQHGKLKSAKEEQRKLIAEQLLYEHWKKNNPKLREMELDLHQKHVVNSWEMQKEEKK

SEQ ID NO: 92145 - protein, 1281 aa, Homo sapiens
  Payload ID: 18454
  Gene Name: trichorhinophalangeal syndrome I
  Uniprot ID: Q9UHF7
  ENSP ID: ENSP00000220888
MVRKKNPPLRNVASEGEGQILEPIGTESKVSGKNKEFSADQMSENTDQSDAAELNHKEEHSLHVQDPSSSSKKDLKSAVLSEKAGFNYESPSKGGNFPSFPHDEVTDRNMLAFSSPAAGGVCEPLKSPQRAEADDPQDMACTPSGDSLETKEDQKMSPKATEETGQAQSGQANCQGLSPVSVASKNPQVPSDGGVRLNKSKTDLLVNDNPDPAPLSPELQDFKCNICGYGYYGNDPTDLIKHFRKYHLGLHNRTRQDAELDSKILALHNMVQFSHSKDFQKVNRSVFSGVLQDINSSRPVLLNGTYDVQVTSGGTFIGIGRKTPDCQGNTKYFRCKFCNFTYMGNSSTELEQHFLQTHPNKIKASLPSSEVAKPSEKNSNKSIPALQSSDSGDLGKWQDKITVKAGDDTPVGYSVPIKPLDSSRQNGTEATSYYWCKFCSFSCESSSSLKLLEHYGKQHGAVQSGGLNPELNDKLSRGSVINQNDLAKSSEGETMTKTDKSSSGAKKKDFSSKGAEDNMVTSYNCQFCDFRYSKSHGPDVIVVGPLLRHYQQLHNIHKCTIKHCPFCPRGLCSPEKHLGEITYPFACRKSNCSHCALLLLHLSPGAAGSSRVKHQCHQCSFTTPDVDVLLFHYESVHESQASDVKQEANHLQGSDGQQSVKESKEHSCTKCDFITQVEEEISRHYRRAHSCYKCRQCSFTAADTQSLLEHFNTVHCQEQDITTANGEEDGHAISTIKEEPKIDFRVYNLLTPDSKMGEPVSESVVKREKLEEKDGLKEKVWTESSSDDLRNVTWRGADILRGSPSYTQASLGLLTPVSGTQEQTKTLRDSPNVEAAHLARPIYGLAVETKGFLQGAPAGGEKSGALPQQYPASGENKSKDESQSLLRRRRGSGVFCANCLTTKTSLWRKNANGGYVCNACGLYQKLHSTPRPLNIIKQNNGEQIIRRRTRKRLNPEALQAEQLNKQQRGSNEEQVNGSPLERRSEDHLTESHQREIPLPSLSKYEAQGSLTKSHSAQQPVLVSQTLDIHKRMQPLHIQIKSPQESTGDPGNSSSVSEGKGSSERGSPIEKYMRPAKHPNYSPPGSPIEKYQYPLFGLPFVHNDFQSEADWLRFWSKYKLSVPGNPHYLSHVPGLPNPCQNYVPYPTFNLPPHFSAVGSDNDIPLDLAIKHSRPGPTANGASKEKTKAPPNVKNEGPLNVVKTEKVDRSTQDELSTKCVHCGIVFLDEVMYALHMSCHGDSGPFQCSICQHLCTDKYDFTTHIQRGLHRNNAQVEKNGKPKE

SEQ ID NO: 92146 - protein, 117 aa, Homo sapiens
  Payload ID: 18454
  Gene Name: trichorhinophalangeal syndrome I
  ENSP ID: ENSP00000379063
MPYEVNAGYDFTNMVRKKNPPLRNVASEGEGQILEPIGTESKVSGKNKEFSADQMSENTDQSDAAELNHKEEHSLHVQDPSSSSKKDLKSAVLSEKAGFNYESPSKGGNFPSFPHDE

SEQ ID NO: 92147 - protein, 1294 aa, Homo sapiens
  Payload ID: 18454
  Gene Name: trichorhinophalangeal syndrome I
  Uniprot ID: Q9UHF7
  ENSP ID: ENSP00000379065
MPYEVNAGYDFTNMVRKKNPPLRNVASEGEGQILEPIGTESKVSGKNKEFSADQMSENTDQSDAAELNHKEEHSLHVQDPSSSSKKDLKSAVLSEKAGFNYESPSKGGNFPSFPHDEVTDRNMLAFSSPAAGGVCEPLKSPQRAEADDPQDMACTPSGDSLETKEDQKMSPKATEETGQAQSGQANCQGLSPVSVASKNPQVPSDGGVRLNKSKTDLLVNDNPDPAPLSPELQDFKCNICGYGYYGNDPTDLIKHFRKYHLGLHNRTRQDAELDSKILALHNMVQFSHSKDFQKVNRSVFSGVLQDINSSRPVLLNGTYDVQVTSGGTFIGIGRKTPDCQGNTKYFRCKFCNFTYMGNSSTELEQHFLQTHPNKIKASLPSSEVAKPSEKNSNKSIPALQSSDSGDLGKWQDKITVKAGDDTPVGYSVPIKPLDSSRQNGTEATSYYWCKFCSFSCESSSSLKLLEHYGKQHGAVQSGGLNPELNDKLSRGSVINQNDLAKSSEGETMTKTDKSSSGAKKKDFSSKGAEDNMVTSYNCQFCDFRYSKSHGPDVIVVGPLLRHYQQLHNIHKCTIKHCPFCPRGLCSPEKHLGEITYPFACRKSNCSHCALLLLHLSPGAAGSSRVKHQCHQCSFTTPDVDVLLFHYESVHESQASDVKQEANHLQGSDGQQSVKESKEHSCTKCDFITQVEEEISRHYRRAHSCYKCRQCSFTAADTQSLLEHFNTVHCQEQDITTANGEEDGHAISTIKEEPKIDFRVYNLLTPDSKMGEPVSESVVKREKLEEKDGLKEKVWTESSSDDLRNVTWRGADILRGSPSYTQASLGLLTPVSGTQEQTKTLRDSPNVEAAHLARPIYGLAVETKGFLQGAPAGGEKSGALPQQYPASGENKSKDESQSLLRRRRGSGVFCANCLTTKTSLWRKNANGGYVCNACGLYQKLHSTPRPLNIIKQNNGEQIIRRRTRKRLNPEALQAEQLNKQQRGSNEEQVNGSPLERRSEDHLTESHQREIPLPSLSKYEAQGSLTKSHSAQQPVLVSQTLDIHKRMQPLHIQIKSPQESTGDPGNSSSVSEGKGSSERGSPIEKYMRPAKHPNYSPPGSPIEKYQYPLFGLPFVHNDFQSEADWLRFWSKYKLSVPGNPHYLSHVPGLPNPCQNYVPYPTFNLPPHFSAVGSDNDIPLDLAIKHSRPGPTANGASKEKTKAPPNVKNEGPLNVVKTEKVDRSTQDELSTKCVHCGIVFLDEVMYALHMSCHGDSGPFQCSICQHLCTDKYDFTTHIQRGLHRNNAQVEKNGKPKE

SEQ ID NO: 92148 - protein, 9 aa, Homo sapiens
  Payload ID: 18454
  Gene Name: trichorhinophalangeal syndrome I
  ENSP ID: ENSP00000400360
MPYEVNAGY

SEQ ID NO: 92149 - protein, 61 aa, Homo sapiens
  Payload ID: 18454
  Gene Name: trichorhinophalangeal syndrome I
  ENSP ID: ENSP00000405028
MPYEVNAGYDFTNMVRKKNPPLRNVASEGEGQILEPIGTESKVSGKNKEFSADQMSENTDQ

SEQ ID NO: 92150 - protein, 271 aa, Homo sapiens
  Payload ID: 18454
  Gene Name: trichorhinophalangeal syndrome I
  ENSP ID: ENSP00000428121
  MOD_RES (1)..(1): Any amino acid
XKSTVTPLILPKRRRGSGVFCANCLTTKTSLWRKNANGGYVCNACGLYQKLHSTPRPLNIIKQNNGEQIIRRRTRKRLNPEALQAEQLNKQQRGSNEEQVNGSPLERRSEDHLTESHQREIPLPSLSKYEAQGSLTKSHSAQQPVLVSQTLDIHKRMQPLHIQIKSPQESTGDPGNSSSVSEGKGSSERGSPIEKYMRPAKHPNYSPPGSPIEKYQYPLFGLPFVHNDFQSEADWLRFWSKYKLSVPGNPHYLSHVPGLPNPCQNYVPYPT

SEQ ID NO: 92151 - protein, 1285 aa, Homo sapiens
  Payload ID: 18454
  Gene Name: trichorhinophalangeal syndrome I
  Uniprot ID: Q9UHF7
  ENSP ID: ENSP00000428680
MQSNMVRKKNPPLRNVASEGEGQILEPIGTESKVSGKNKEFSADQMSENTDQSDAAELNHKEEHSLHVQDPSSSSKKDLKSAVLSEKAGFNYESPSKGGNFPSFPHDEVTDRNMLAFSSPAAGGVCEPLKSPQRAEADDPQDMACTPSGDSLETKEDQKMSPKATEETGQAQSGQANCQGLSPVSVASKNPQVPSDGGVRLNKSKTDLLVNDNPDPAPLSPELQDFKCNICGYGYYGNDPTDLIKHFRKYHLGLHNRTRQDAELDSKILALHNMVQFSHSKDFQKVNRSVFSGVLQDINSSRPVLLNGTYDVQVTSGGTFIGIGRKTPDCQGNTKYFRCKFCNFTYMGNSSTELEQHFLQTHPNKIKASLPSSEVAKPSEKNSNKSIPALQSSDSGDLGKWQDKITVKAGDDTPVGYSVPIKPLDSSRQNGTEATSYYWCKFCSFSCESSSSLKLLEHYGKQHGAVQSGGLNPELNDKLSRGSVINQNDLAKSSEGETMTKTDKSSSGAKKKDFSSKGAEDNMVTSYNCQFCDFRYSKSHGPDVIVVGPLLRHYQQLHNIHKCTIKHCPFCPRGLCSPEKHLGEITYPFACRKSNCSHCALLLLHLSPGAAGSSRVKHQCHQCSFTTPDVDVLLFHYESVHESQASDVKQEANHLQGSDGQQSVKESKEHSCTKCDFITQVEEEISRHYRRAHSCYKCRQCSFTAADTQSLLEHFNTVHCQEQDITTANGEEDGHAISTIKEEPKIDFRVYNLLTPDSKMGEPVSESVVKREKLEEKDGLKEKVWTESSSDDLRNVTWRGADILRGSPSYTQASLGLLTPVSGTQEQTKTLRDSPNVEAAHLARPIYGLAVETKGFLQGAPAGGEKSGALPQQYPASGENKSKDESQSLLRRRRGSGVFCANCLTTKTSLWRKNANGGYVCNACGLYQKLHSTPRPLNIIKQNNGEQIIRRRTRKRLNPEALQAEQLNKQQRGSNEEQVNGSPLERRSEDHLTESHQREIPLPSLSKYEAQGSLTKSHSAQQPVLVSQTLDIHKRMQPLHIQIKSPQESTGDPGNSSSVSEGKGSSERGSPIEKYMRPAKHPNYSPPGSPIEKYQYPLFGLPFVHNDFQSEADWLRFWSKYKLSVPGNPHYLSHVPGLPNPCQNYVPYPTFNLPPHFSAVGSDNDIPLDLAIKHSRPGPTANGASKEKTKAPPNVKNEGPLNVVKTEKVDRSTQDELSTKCVHCGIVFLDEVMYALHMSCHGDSGPFQCSICQHLCTDKYDFTTHIQRGLHRNNAQVEKNGKPKE

SEQ ID NO: 92152 - protein, 1035 aa, Homo sapiens
  Payload ID: 18454
  Gene Name: trichorhinophalangeal syndrome I
  ENSP ID: ENSP00000428910
MVRKKNPPLRNVASEGEGQILEPIGTESKVSGKNKEFSADQMSENTDQSDAAELNHKEEHSLHVQDPSSSTAGGVCEPLKSPQRAEADDPQDMACTPSGDSLETKEDQKMSPKATEETGQAQSGQANCQGLSPVSVASKNPQVPSDGGVRLNKSKTDLLVNDNPDPAPLSPELQDFKCNICGYGYYGNDPTDLIKHFRKYHLGLHNRTRQDAELDSKILALHNMVQFSHSKDFQKVNRSVFSGVLQDINSSRPVLLNGTYDVQVTSGGTFIGIGRKTPDCQGNTKYFRCKFCNFTYMGNSSTELEQHFLQTHPNKIKASLPSSEVAKPSEKNSNKSIPALQSSDSGDLGKWQDKITVKAGDDTPVGYSVPIKPLDSSRQNDVLLFHYESVHESQASDVKQEANHLQGSDGQQSVKESKEHSCTKCDFITQVEEEISRHYRRAHSCYKCRQCSFTAADTQSLLEHFNTVHCQEQDITTANGEEDGHAISTIKEEPKIDFRVYNLLTPDSKMGEPVSESVVKREKLEEKDGLKEKVWTESSSDDLRNVTWRGADILRGSPSYTQASLGLLTPVSGTQEQTKTLRDSPNVEAAHLARPIYGLAVETKGFLQGAPAGGEKSGALPQQYPASGENKSKDESQSLLRRRRGSGVFCANCLTTKTSLWRKNANGGYVCNACGLYQKLHSTPRPLNIIKQNNGEQIIRRRTRKRLNPEALQAEQLNKQQRGSNEEQVNGSPLERRSEDHLTESHQREIPLPSLSKYEAQGSLTKSHSAQQPVLVSQTLDIHKRMQPLHIQIKSPQESTGDPGNSSSVSEGKGSSERGSPIEKYMRPAKHPNYSPPGSPIEKYQYPLFGLPFVHNDFQSEADWLRFWSKYKLSVPGNPHYLSHVPGLPNPCQNYVPYPTFNLPPHFSAVGSDNDIPLDLAIKHSRPGPTANGASKEKTKAPPNVKNEGPLNVVKTEKVDRSTQDELSTKCVHCGIVFLDEVMYALHMSCHGDSGPFQCSICQHLCTDKYDFTTHIQRGLHRNNAQVEKNGKPKE

SEQ ID NO: 92153 - protein, 902 aa, Homo sapiens
  Payload ID: 18454
  Gene Name: trichorhinophalangeal syndrome I
  ENSP ID: ENSP00000429174
MVRKKNPPLRNVASEGEGQILEPIGTESKVSGKNKEFSADQMSENTDQSDAAELNHKEEHSLHVQDPSSSSKKDLKSAVLSEKAGFNYESPSKGGNFPSFPHDEVTDRNMLAFSSPAAGGVCEPLKSPQRAEADDPQDMACTPSGDSLETKEDQKMSPKATEETGQAQSGQANCQGLSPVSVASKNPQVPSDGGVRLNKSKTDLLVNDNPDPAPLSPELQDFKCNICGYGYYGNDPTDLIKHFRKYHLGLHNRTRQDAELDSKILALHNMVQFSHSKDFQKVNRSVFSGVLQDINSSRPVLLNGTYDVQVTSGGTFIGIGRKTPDCQGNTKYFRCKFCNFTYMGNSSTELEQHFLQTHPNKIKASLPSSEVAKPSEKNSNKSIPALQSSDSGDLGKWQDKITVKAGDDTPVGYSVPIKPLDSSRQNGTEATSYYWCKFCSFSCESSSSLKLLEHYGKQHGAVQSGGLNPELNDKLSRGSVINQNDLAKSSEGETMTKTDKSSSGAKKKDFSSKGAEDNMVTSYNCQFCDFRYSKSHGPDVIVVGPLLRHYQQLHNIHKCTIKHCPFCPRGLCSPEKHLGEITYPFACRKSNCSHCALLLLHLSPGAAGSSRVKHQCHQCSFTTPDVDVLLFHYESVHESQASDVKQEANHLQGSDGQQSVKESKEHSCTKCDFITQVEEEISRHYRRAHSCYKCRQCSFTAADTQSLLEHFNTVHCQEQDITTANGEEDGHAISTIKEEPKIDFRVYNLLTPDSKMGEPVSESVVKREKLEEKDGLKEKVWTESSSDDLRNVTWRGADILRGSPSYTQASLGLLTPVSGTQEQTKTLRDSPNVEAAHLARPIYGLAVETKGFLQGAPAGGEKSGALPQQYPASGENKSKDESQSLLRVFESAWMTPEEQFSL

SEQ ID NO: 92154 - protein, 108 aa, Homo sapiens
  Payload ID: 18454
  Gene Name: trichorhinophalangeal syndrome I
  ENSP ID: ENSP00000430383
MPYEVNAGYDFTNMVRKKNPPLRNVASEGEGQILEPIGTESKVSGKNKEFSADQMSENTDQSDAAELNHKEEHSLHVQDPSSSSKKDLKSAVLSEKAGFNYESPSKGG

SEQ ID NO: 92155 - protein, 691 aa, Homo sapiens
  Payload ID: 18454
  Gene Name: trichorhinophalangeal syndrome I
  ENSP ID: ENSP00000430803
MQSNMVRKKNPPLRNVASEGEGQILEPIGTESKVSGKNKEFSADQMSENTDQSDAAELNHKEEHSLHVQDPSSSSKKDLKSAVLSEKAGFNYESPSKGGNFPSFPHDEVTDRNMLAFSSPAAGGVCEPLKSPQRAEADDPQDMACTPSGDSLETKEDQKMSPKATEETGQAQSGQANCQGLSPVSVASKNPQVPSDGGVRLNKSKTDLLVNDNPDPAPLSPELQDFKCNICGYGYYGNDPTDLIKHFRKYHLGLHNRTRQDAELDSKILALHNMVQFSHSKDFQKVNRSVFSGVLQDINSSRPVLLNGTYDVQVTSGGTFIGIGRKTPDCQGNTKYFRCKFCNFTYMGNSSTELEQHFLQTHPNKIKASLPSSEVAKPSEKNSNKSIPALQSSDSGDLGKWQDKITVKAGDDTPVGYSVPIKPLDSSRQNDVLLFHYESVHESQASDVKQEANHLQGSDGQQSVKESKEHSCTKCDFITQVEEEISRHYRRAHSCYKCRQCSFTAADTQSLLEHFNTVHCQEQDITTANGEEDGHAISTIKEEPKIDFRVYNLLTPDSKMGEPVSESVVKREKLEEKDGLKEKVWTESSSDDLRNVTWRGADILRGSPSYTQASLGLLTPVSGTQEQTKTLRDSPNVEAAHLARPIYGLAVETKGFLQGAPAGGEKSGALPQQYPASGENKSKDESQSLLR

SEQ ID NO: 92156 - protein, 234 aa, Homo sapiens
  Payload ID: 18455
  Gene Name: triggering receptor expressed on myeloid cells 1
  Uniprot ID: Q9NP99
  ENSP ID: ENSP00000244709
MRKTRLWGLLWMLFVSELRAATKLTEEKYELKEGQTLDVKCDYTLEKFASSQKAWQIIRDGEMPKTLACTERPSKNSHPVQVGRIILEDYHDHGLLRVRMVNLQVEDSGLYQCVIYQPPKEPHMLFDRIRLVVTKGFSGTPGSNENSTQNVYKIPPTTTKALCPLYTSPRTVTQAPPKSTADVSTPDSEINLTNVTDIIRVPVFNIVILLAGGFLSKSLVFSVLFAVTLRSFVP

SEQ ID NO: 92157 - protein, 150 aa, Homo sapiens
  Payload ID: 18455
  Gene Name: triggering receptor expressed on myeloid cells 1
  Uniprot ID: Q9NP99
  ENSP ID: ENSP00000334284
MRKTRLWGLLWMLFVSELRAATKLTEEKYELKEGQTLDVKCDYTLEKFASSQKAWQIIRDGEMPKTLACTERPSKNSHPVQVGRIILEDYHDHGLLRVRMVNLQVEDSGLYQCVIYQPPKEPHMLFDRIRLVVTKGFRCSTLSFSWLVDS

SEQ ID NO: 92158 - protein, 225 aa, Homo sapiens
  Payload ID: 18455
  Gene Name: triggering receptor expressed on myeloid cells 1
  Uniprot ID: Q9NP99
  ENSP ID: ENSP00000465345
MRKTRLWGLLWMLFVSELRAATKLTEEKYELKEGQTLDVKCDYTLEKFASSQKAWQIIRDGEMPKTLACTERPSKNSHPVQVGRIILEDYHDHGLLRVRMVNLQVEDSGLYQCVIYQPPKEPHMLFDRIRLVVTKGFSGTPGSNENSTQNVYKIPPTTTKALCPLYTSPRTVTQAPPKSTADVSTPDSEINLTNVTDIIRYSFQVPGPLVWTLSPLFPSLCAERM

SEQ ID NO: 92159 - protein, 250 aa, Homo sapiens
  Payload ID: 18455
  Gene Name: triggering receptor expressed on myeloid cells 1
  ENSP ID: ENSP00000465688
MRKTRLWGLLWMLFVSELRAATKLTEEKYELKEGQTLDVKCDYTLEKFASSQKAWQIIRDGEMPKTLACTERPSKNSHPVQVGRIILEDYHDHGLLRVRMVNLQVEDSGLYQCVIYQPPKEPHMLFDRIRLVVTKGFSGTPGSNENSTQNVYKIPPTTTKALCPLYTSPRTVTQAPPKSTADVSTPDSEINLTNVTDIIREKSMTFGIRRLDVESHPLPPLHTGHFRISQFFSQAGTQSLHSCYKGKPTP

SEQ ID NO: 92160 - protein, 219 aa, Homo sapiens
  Payload ID: 18456
  Gene Name: triggering receptor expressed on myeloid cells 2
  Uniprot ID: Q9NZC2
  ENSP ID: ENSP00000342651
MEPLRLLILLFVTELSGAHNTTVFQGVAGQSLQVSCPYDSMKHWGRRKAWCRQLGEKGPCQRVVSTHNLWLLSFLRRWNGSTAITDDTLGGTLTITLRNLQPHDAGLYQCQSLHGSEADTLRKVLVEVLADPLDHRDAGDLWFPGESESFEDAHVEHSISRAERHVKEDDGRKSPGEVPPGTSPACILATWPPGLLVLLWQETTLPEHCFSWTLEAGTG

SEQ ID NO: 92161 - protein, 230 aa, Homo sapiens
  Payload ID: 18456
  Gene Name: triggering receptor expressed on myeloid cells 2
  Uniprot ID: Q9NZC2
  ENSP ID: ENSP00000362205
MEPLRLLILLFVTELSGAHNTTVFQGVAGQSLQVSCPYDSMKHWGRRKAWCRQLGEKGPCQRVVSTHNLWLLSFLRRWNGSTAITDDTLGGTLTITLRNLQPHDAGLYQCQSLHGSEADTLRKVLVEVLADPLDHRDAGDLWFPGESESFEDAHVEHSISRSLLEGEIPFPPTSILLLLACIFLIKILAASALWAAAWHGQKPGTHPPSELDCGHDPGYQLQTLPGLRDT

SEQ ID NO: 92162 - protein, 222 aa, Homo sapiens
  Payload ID: 18456
  Gene Name: triggering receptor expressed on myeloid cells 2
  Uniprot ID: Q9NZC2
  ENSP ID: ENSP00000362214
MEPLRLLILLFVTELSGAHNTTVFQGVAGQSLQVSCPYDSMKHWGRRKAWCRQLGEKGPCQRVVSTHNLWLLSFLRRWNGSTAITDDTLGGTLTITLRNLQPHDAGLYQCQSLHGSEADTLRKVLVEVLADPLDHRDAGDLWFPGESESFEDAHVEHSISRPSQGSHLPSCLSKEPLGRRNPLPTHFHPSPPGLHLSHQDSSSQRPLGCSLAWTEARDTSTQ

SEQ ID NO: 92163 - protein, 199 aa, Homo sapiens
  Payload ID: 18457
  Gene Name: triggering receptor expressed on myeloid cells-like 1
  Uniprot ID: Q86YW5
  ENSP ID: ENSP00000362219
MGLTLLLLLLLGLEGQGIVGSLPEVLQAPVGSSILVQCHYRLQDVKAQKVWCRFLPEGCQPLVSSAVDRRAPAGRRTFLTDLGGGLLQVEMVTLQEEDAGEYGCMVDGARGPQILHRVSLNILPPEEEEETHKIGSLAENAFSDPAGSANPLEPSQDEKSIPLIWGAVLLVGLLVAAVVLFAVMAKRKQESLLSGPPRQ

SEQ ID NO: 92164 - protein, 200 aa, Homo sapiens
  Payload ID: 18457
  Gene Name: triggering receptor expressed on myeloid cells-like 1
  Uniprot ID: Q86YW5
  ENSP ID: ENSP00000400405
MGLTLLLLLLLGLEEEEEETHKIGSLAENAFSDPAGSANPLEPSQDEKSIPLIWGAVLLVGLLVAAVVLFAVMAKRKQGNRLGVCGRFLSSRVSGMNPSSVVHHVSDSGPAAELPLDVPHIRLDSPPSFDNTTYTSLPLDSPSGKPSLPAPSSLPPLPPKVLVCSKPVTYATVIFPGGNKGGGTSCGPAQNPPNNQTPSS

SEQ ID NO: 92165 - protein, 311 aa, Homo sapiens
  Payload ID: 18457
  Gene Name: triggering receptor expressed on myeloid cells-like 1
  Uniprot ID: Q86YW5
  ENSP ID: ENSP00000402855
MGLTLLLLLLLGLEGQGIVGSLPEVLQAPVGSSILVQCHYRLQDVKAQKVWCRFLPEGCQPLVSSAVDRRAPAGRRTFLTDLGGGLLQVEMVTLQEEDAGEYGCMVDGARGPQILHRVSLNILPPEEEEETHKIGSLAENAFSDPAGSANPLEPSQDEKSIPLIWGAVLLVGLLVAAVVLFAVMAKRKQGNRLGVCGRFLSSRVSGMNPSSVVHHVSDSGPAAELPLDVPHIRLDSPPSFDNTTYTSLPLDSPSGKPSLPAPSSLPPLPPKVLVCSKPVTYATVIFPGGNKGGGTSCGPAQNPPNNQTPSS

SEQ ID NO: 92166 - protein, 321 aa, Homo sapiens
  Payload ID: 18458
  Gene Name: triggering receptor expressed on myeloid cells-like 2
  Uniprot ID: Q5T2D2
  ENSP ID: ENSP00000418767
MAPAFLLLLLLWPQGCVSGPSADSVYTKVRLLEGETLSVQCSYKGYKNRVEGKVWCKIRKKKCEPGFARVWVKGPRYLLQDDAQAKVVNITMVALKLQDSGRYWCMRNTSGILYPLMGFQLDVSPAPQTERNIPFTHLDNILKSGTVTTGQAPTSGPDAPFTTGVMVFTPGLITLPRLLASTRPASKTGYSFTATSTTSQGPRRTMGSQTVTASPSNARDSSAGPESISTKSGDLSTRSPTTGLCLTSRSLLNRLPSMPSIRHQDVYSTVLGVVLTLLVLMLIMVYGFWKKRHMASYSMCSDPSTRDPPGRPEPYVEVYLI

SEQ ID NO: 92167 - protein, 200 aa, Homo sapiens
  Payload ID: 18459
  Gene Name: triggering receptor expressed on myeloid cells-like 4
  Uniprot ID: Q6UXN2
  ENSP ID: ENSP00000342570
MAWGGVHTCCFHLCCCCSWPQGAVPEELHKHPGQTLLLQCQYSPKRGPYQPKSWCQQTSPSRCTLLVTSSKPWTAVQKSHYTIWDKPNAGFFNITMIQLTQNDSGFYWCGIYNASENIITVLRNISLVVSPAPTTSPMWTLPWLPTSTVLITSPEGTSGHPSINGSETRKSRAPACLGSGGPRFLVLVLCGLLLAKGLML

SEQ ID NO: 92168 - protein, 200 aa, Homo sapiens; identical to SEQ ID NO: 92167
  Payload ID: 18459
  Gene Name: triggering receptor expressed on myeloid cells-like 4
  Uniprot ID: Q6UXN2
  ENSP ID: ENSP00000418078

SEQ ID NO: 92169 - protein, 71 aa, Homo sapiens
  Payload ID: 18459
  Gene Name: triggering receptor expressed on myeloid cells-like 4
  ENSP ID: ENSP00000418480
  MOD_RES (1)..(1): Any amino acid
XDSGFYWCGIYNASENIITVLRNISLVVSPAPTTSPMWTLPWLPTSTVLITSPEGTSGHPSINGSETRNGS

SEQ ID NO: 92170 - protein, 503 aa, Homo sapiens
  Payload ID: 18460
  Gene Name: TRIM39-RPP21 readthrough
  ENSP ID: ENSP00000485378
MAETSLLEAGASAASTAAALENLQVEASCSVCLEYLKEPVIIECGHNFCKACITRWWEDLERDFPCPVCRKTSRYRSLRPNRQLGSMVEIAKQLQAVKRKIRDESLCPQHHEALSLFCYEDQEAVCLICAISHTHRAHTVVPLDDATQEYKEKLQKCLEPLEQKLQEITRCKSSEEKKPGELKRLVESRRQQILREFEELHRRLDEEQQVLLSRLEEEEQDILQRLRENAAHLGDKRRDLAHLAAEVEGKCLQSGFEMLKDVKSTLEKCEKVKTMEVTSVSIELEKNFSNFPRQYFALRKILKQLIADVTLDPETAHPNLVLSEDRKSVKFVETRLRDLPDTPRRFTFYPCVLATEGFTSGRHYWEVEAAHCVLAQDPENQALARFYCYTERTIAKRLVLRRDPSVKRTLCRGCSSLLVPGLTCTQRQRRCRGQRWTVQTCLTCQRSQRFLNDPGHLLWGDRPEAQLGSQADSKPLQPLPNTAHSISDRLPEEKMQTQGSSNQ

SEQ ID NO: 92171 - protein, 842 aa, Homo sapiens
  Payload ID: 18461
  Gene Name: TRIM6-TRIM34 readthrough
  ENSP ID: ENSP00000346916
MCGSERILQAGNILEIRVGQAGARRVATMTSPVLVDIREEVTCPICLELLTEPLSIDCGHSFCQACITPNGRESVIGQEGERSCPVCQTSYQPGNLRPNRHLANIVRRLREVVLGPGKQLKAVLCADHGEKLQLFCQEDGKVICWLCERSQEHRGHHTFLVEEVAQEYQEKFQESLKKLKNEEQEAEKLTAFIREKKTSWKNQMEPERCRIQTEFNQLRNILDRVEQRELKKLEQEEKKGLRIIEEAENDLVHQTQSLRELISDLERRCQGSTMELLQDVSDVTERSEFWTLRKPEALPTKLRSMFRAPDLKRMLRVCRELTDVQSYWAIQGSLTRRERRASGVRTRRSQGSSAMASKILLNVQEEVTCPICLELLTEPLSLDCGHSLCRACITVSNKEAVTSMGGKSSCPVCGISYSFEHLQANQHLANIVERLKEVKLSPDNGKKRDLCDHHGEKLLLFCKEDRKVICWLCERSQEHRGHHTVLTEEVFKECQEKLQAVLKRLKKEEEEAEKLEADIREEKTSWKYQVQTERQRIQTEFDQLRSILNNEEQRELQRLEEEEKKTLDKFAEAEDELVQQKQLVRELISDVECRSQWSTMELLQDMSGIMKWSEIWRLKKPKMVSKKLKTVFHAPDLSRMLQMFRELTAVRCYWVDVTLNSVNLNLNLVLSEDQRQVISVPIWPFQCYNYGVLGSQYFSSGKHYWEVDVSKKTAWILGVYCRTYSRHMKYVVRRCANRQNLYTKYRPLFGYWVIGLQNKCKYGVFEESLSSDPEVLTLSMAVPPCRVGVFLDYEAGIVSFFNVTSHGSLIYKFSKCCFSQPVYPYFNPWNCPAPMTLCPPSS

SEQ ID NO: 92172 - protein, 853 aa, Homo sapiens
  Payload ID: 18462
  Gene Name: trimethylguanosine synthase 1
  Uniprot ID: Q96RS0
  ENSP ID: ENSP00000260129
MCCEKWSRVAEMFLFIEEREDCKILCLCSRAFVEDRKLYNLGLKGYYIRDSGNNSGDQATEEEEGGYSCGTAESHDSKGIGLDESELDSEAELMRSMGLPLQFGRITAHKDFEVSMNTRNKVKIKKKKHQKKYLDEIVQESWRKEYEEDDILASDDPSSIEQYENTRTYELQSKKDTETENPPVENTLSPKLEITEKWEKYWNEYGGGLLWQSWQEKHPGQALSSEPWNFPDTKEEWEQHYSQLYWYYLEQFQYWEAQGWTFDASQSCDTDTYTSKTEADDKNDEKCMKVDLVSFPSSPIMVDNDSSGTSDKDHSEILDGISNIKLNSEEVTQSQLDSCTSHDGHQQLSEVSSKRECPASGQSEPRNGGTNEESNSSGNTNTDPPAEDSQKSSGANTSKDRPHASGTDGDESEEDPPEHKPSKLKRSHELDIDENPASDFDDSGSLLGFKYGSGQKYGGIPNFSHRQVRYLEKNVKLKSKYLDMRRQIKMKNKHIFFTKESEKPFFKKSKILSKVEKFLTWVNKPMDEEASQESSSHDNVHDASTSSDSEEQDMSVKKGDDLLETNNPEPEKCQSVSSAGELETENYERDSLLATVPDEQDCVTQEVPDSRQAETEAEVKKKKNKKKNKKVNGLPPEIAAVPELAKYWAQRYRLFSRFDDGIKLDREGWFSVTPEKIAEHIAGRVSQSFKCDVVVDAFCGVGGNTIQFALTGMRVIAIDIDPVKIALARNNAEVYGIADKIEFICGDFLLLASFLKADVVFLSPPWGGPDYATAETFDIRTMMSPDGFEIFRLSKKITNNIVYFLPRNADIDQVASLAGPGGQVEIEQNFLNNKLKTITAYFGDLIRRPASET

SEQ ID NO: 92173 - protein, 53 aa, Homo sapiens
  Payload ID: 18462
  Gene Name: trimethylguanosine synthase 1
  ENSP ID: ENSP00000430467
MCCEKWSRVAEMFLFIEEREDCKILCLCSRAFVERPGDRRRGRWLFLWYCRIT

SEQ ID NO: 92174 - protein, 421 aa, Homo sapiens
  Payload ID: 18463
  Gene Name: trimethyllysine hydroxylase, epsilon
  Uniprot ID: Q9NVH6
  ENSP ID: ENSP00000335261
MWYHRLSHLHSRLQDLLKGGVIYPALPQPNFKSLLPLAVHWHHTASKSLTCAWQQHEDHFELKYANTVMRFDYVWLRDHCRSASCYNSKTHQRSLDTASVDLCIKPKTIRLDETTLFFTWPDGHVTKYDLNWLVKNSYEGQKQKVIQPRILWNAEIYQQAQVPSVDCQSFLETNEGLKKFLQNFLLYGIAFVENVPPTQEHTEKLAERISLIRETIYGRMWYFTSDFSRGDTAYTKLALDRHTDTTYFQEPCGIQVFHCLKHEGTGGRTLLVDGFYAAEQVLQKAPEEFELLSKVPLKHEYIEDVGECHNHMIGIGPVLNIYPWNKELYLIRYNNYDRAVINTVPYDVVHRWYTAHRTLTIELRRPENEFWVKLKPGRVLFIDNWRVLHGRECFTGYRQLCGCYLTRDDVLNTARLLGLQA

SEQ ID NO: 92175 - protein, 376 aa, Homo sapiens
  Payload ID: 18463
  Gene Name: trimethyllysine hydroxylase, epsilon
  Uniprot ID: Q9NVH6
  ENSP ID: ENSP00000358447
MWYHRLSHLHSRLQDLLKGGVIYPALPQPNFKSLLPLAVHWHHTASKSLTCAWQQHEDHFELKYANTVMRFDYVWLRDHCRSASCYNSKTHQRSLDTASVDLCIKPKTIRLDETTLFFTWPDGHVTKYDLNWLVKNSYEGQKQKVIQPRILWNAEIYQQAQVPSVDCQSFLETNEGLKKFLQNFLLYGIAFVENVPPTQEHTEKLAERISLIRETIYGRMWYFTSDFSRGDTAYTKLALDRHTDTTYFQEPCGIQVFHCLKHEGTGGRTLLVDGFYAAEQVLQKAPEEFELLSKVPLKHEYIEDVGECHNHMIGIGPVLNIYPWNKELYLIRLFKEKQNTVNRQWNSSLQCDIPERILTYRHFVSGTSIEHRGSLI

SEQ ID NO: 92176 - protein, 407 aa, Homo sapiens
  Payload ID: 18464
  Gene Name: trinucleotide repeat containing 18
  ENSP ID: ENSP00000329902
  MOD_RES (1)..(1): Any amino acid
XYRVVVEGERGNRPHIYCLEQLLQEAIIDVRPASTRFLPQGTRIAAYWSQQYRCLYPGTVVRGLLDLEDDGDLITVEFDDGDTGRIPLSHIRLLPPDYKIQCAEPSPALLVPSAKRRSRKTSKDTGEGKDGGTAGSEEPGAKARGRGRKPSAKAKGDRAATLEEGNPTDEVPSTPLALEPSSTPGSKKSPPEPVDKRAKAPKARPAPPQPSPAPPAFTSCPAPEPFAELPAPATSLAPAPLITMPATRPKPKKARAAEESGAKGPRRPGEEAELLVKLDHEGVTSPKSKKAKEALLLREDPGAGGWQEPKSLLSLGSYPPAAGSSEPKAPWPKATDGDLAQEPGPGLTFEDSGNPKSPDKAQAEQDGAEESESSSSSSSGSSSSSSSSSSSGSETEGEEEGDKNGDG

SEQ ID NO: 92177 - protein, 130 aa, Homo sapiens
  Payload ID: 18464
  Gene Name: trinucleotide repeat containing 18
  ENSP ID: ENSP00000382364
MGPSASSHGSPVPLPSDLSFRSPTPSNLPMVQLWAAHAHEGFSHLPSGLYPSYLHLNHLEPPSSGSPLLSQLGQPSIFDTQKGQGPGGGKTGVRGWGWHRGLLRGFWGLWQHPGSPQLCPGCWLFFFFFF

SEQ ID NO: 92178 - protein, 2968 aa, Homo sapiens
  Payload ID: 18464
  Gene Name: trinucleotide repeat containing 18
  ENSP ID: ENSP00000382452
MDGRDFGPQRSVHGPPPPLLSGLAMDSHRVGAATAGRLPASGLPGPLPPGKYMAGLNLHPHPGEAFLGSFVASGMGPSASSHGSPVPLPSDLSFRSPTPSNLPMVQLWAAHAHEGFSHLPSGLYPSYLHLNHLEPPSSGSPLLSQLGQPSIFDTQKGQGPGGDGFYLPTAGAPGSLHSHAPSARTPGGGHSSGAPAKGSSSRDGPAKERAGRGGEPPPLFGKKDPRARGEEASGPRGVVDLTQEARAEGRQDRGPPRLAERLSPFLAESKTKNAALQPSVLTMCNGGAGDVGLPALVAEAGRGGAKEAARQDEGARLLRRTETLLPGPRPCPSPLPPPPAPPKGPPAPPAATPAGVYTVFREQGREHRVVAPTFVPSVEAFDERPGPIQIASQARDARAREREAGRPGVLQAPPGSPRPLDRPEGLREKNSVIRSLKRPPPADAPTVRATRASPDPRAYVPAKELLKPEADPRPCERAPRGPAGPAAQQAAKLFGLEPGRPPPTGPEHKWKPFELGNFAATQMAVLAAQHHHSRAEEEAAVVAASSSKKAYLDPGAVLPRSAATCGRPVADMHSAAHGSGEASAMQSLIKYSGSFARDAVAVRPGGCGKKSPFGGLGTMKPEPAPTSAGASRAQARLPHSGGPAAGGGRQLKRDPERPESAKAFGREGSGAQGEAEVRHPPVGIAVAVARQKDSGGSGRLGPGLVDQERSLSLSNVKGHGRADEDCVDDRARHREERLLGARLDRDQEKLLRESKELADLARLHPTSCAPNGLNPNLMVTGGPALAGSGRWSADPAAHLATHPWLPRSGNASMWLAGHPYGLGPPSLHQGMAPAFPPGLGGSLPSAYQFVRDPQSGQLVVIPSDHLPHFAELMERATVPPLWPALYPPGRSPLHHAQQLQLFSQQHFLRQQEFLYLQQQAAQALELQRSAQLVQERLKAQEHRAEMEEKGSKRGLEAAGKAGLATAGPGLLPRKPPGLAAGPAGTYGKAVSPPPSPRASPVAALKAKVIQKLEDVSKPPAYAYPATPSSHPTSPPPASPPPTPGITRKEEAPENVVEKKDLELEKEAPSPFQALFSDIPPRYPFQALPPHYGRPYPFLLQPTAAADADGLAPDVPLPADGPERLALSPEDKPIRLSPSKITEPLREGPEEEPLAEREVKAEVEDMDEGPTELPPLESPLPLPAAEAMATPSPAGGCGGGLLEAQALSATGQSCAEPSECPDFVEGPEPRVDSPGRTEPCTAALDLGVQLTPETLVEAKEEPVEVPVAVPVVEAVPEEGLAQVAPSESQPTLEMSDCDVPAGEGQCPSLEPQEAVPVLGSTCFLEEASSDQFLPSLEDPLAGMNALAAAAELPQARPLPSPGAAGAQALEKLEAAESLVLEQSFLHGITLLSEIAELELERRSQEMGGAERALVARPSLESLLAAGSHMLREVLDGPVVDPLKNLRLPRELKPNKKYSWMRKKEERMYAMKSSLEDMDALELDFRMRLAEVQRQYKEKQRELVKLQRRRDSEDRREEPHRSLARRGPGRPRKRTHAPSALSPPRKRGKSGHSSGKLSSKSLLTSDDYELGAGIRKRHKGSEEEHDALIGMGKARGRNQTWDEHEASSDFISQLKIKKKKMASDQEQLASKLDKALSLTKQDKLKSPFKFSDSAGGKSKTSGGCGRYLTPYDSLLGKNRKALAKGLGLSLKSSREGKHKRAAKTRKMEVGFKARGQPKSAHSPFASEVSSYSYNTDSEEDEEFLKDEWPAQGPSSSKLTPSLLCSMVAKNSKAAGGPKLTKRGLAAPRTLKPKPATSRKQPFCLLLREAEARSSFSDSSEESFDQDESSEEEDEEEELEEEDEASGGGYRLGARERALSPGLEESGLGLLARFAASALPSPTVGPSLSVVQLEAKQKARKKEERQSLLGTEFEYTDSESEVKVRKRSPAGLLRPKKGLGEPGPSLAAPTPGARGPDPSSPDKAKLAVEKGRKARKLRGPKEPGFEAGPEASDDDLWTRRRSERIFLHDASAAAPAPVSTAPATKTSRCAKGGPLSPRKDAGRAKDRKDPRKKKKGKEAGPGAGLPPPRAPALPSEARAPHASSLTAAKRSKAKAKGKEVKKENRGKGGAVSKLMESMAAEEDFEPNQDSSFSEDEHLPRGGAVERPLTPAPRSCIIDKDELKDGLRVLIPMDDKLLYAGHVQTVHSPDIYRVVVEGERGNRPHIYCLEQLLQEAIIDVRPASTRFLPQGTRIAAYWSQQYRCLYPGTVVRGLLDLEDDGDLITVEFDDGDTGRIPLSHIRLLPPDYKIQCAEPSPALLVPSAKRRSRKTSKDTGEGKDGGTAGSEEPGAKARGRGRKPSAKAKGGRAATLEEGNPTDEVPSTPLALEPSSTPGSKKSPPEPVDKRAKAPKARPAPPQPSPAPPAFTSCPAPEPFAELPAPATSLAPAPLITMPATRPKPKKARAAEESGAKGPRRPGEEAELLVKLDHEGVTSPKSKKAKEALLLREDPGAGGWQEPKSLLSLGSYPPAAGSSEPKAPWPKATDGDLAQEPGPGLTFEDSGNPKSPDKAQAEQDGAEESESSSSSSSGSSSSSSSSSSSGSETEGEEEGDKNGDGGCGTGGRNCSAASSRAASPASSSSSSSSSSSSSSSSSSSSSSSSSSSSSSSSSSSSSSSSSSSSSSSSSSSSSSSSSSTTDEDSSCSSDDEAAPAPTAGPSAQAALPTKATKQAGKARPSAHSPGKKTPAPQPQAPPPQPTQPLQPKAQAGAKSRPKKREGVHLPTTKELAKRQRLPSVENRPKIAAFLPARQLWKWFGKPTQRRGMKGKARKLFYKAIVRGKEMIRIGDCAVFLSAGRPNLPYIGRIQSMWESWGNNMVVRVKWFYHPEETSPGKQFHQGQHWDQKSSRSLPAALRVSSQRKDFMERALYQSSHVDENDVQTVSHKCLVVGLEQYEQMLKTKKYQDSEGLYYLAGTYEPTTGMIFSTDGVPVLC

SEQ ID NO: 92179 - protein, 2968 aa, Homo sapiens
  Payload ID: 18464
  Gene Name: trinucleotide repeat containing 18
  Uniprot ID: O15417
  ENSP ID: ENSP00000395538
MDGRDFGPQRSVHGPPPPLLSGLAMDSHRVGAATAGRLPASGLPGPLPPGKYMAGLNLHPHPGEAFLGSFVASGMGPSASSHGSPVPLPSDLSFRSPTPSNLPMVQLWAAHAHEGFSHLPSGLYPSYLHLNHLEPPSSGSPLLSQLGQPSIFDTQKGQGPGGDGFYLPTAGAPGSLHSHAPSARTPGGGHSSGAPAKGSSSRDGPAKERAGRGGEPPPLFGKKDPRARGEEASGPRGVVDLTQEARAEGRQDRGPPRLAERLSPFLAESKTKNAALQPSVLTMCNGGAGDVGLPALVAEAGRGGAKEAARQDEGARLLRRTETLLPGPRPCPSPLPPPPAPPKGPPAPPAATPAGVYTVFREQGREHRVVAPTFVPSVEAFDERPGPIQIASQARDARAREREAGRPGVLQAPPGSPRPLDRPEGLREKNSVIRSLKRPPPADAPTVRATRASPDPRAYVPAKELLKPEADPRPCERAPRGPAGPAAQQAAKLFGLEPGRPPPTGPEHKWKPFELGNFAATQMAVLAAQHHHSRAEEEAAVVAASSSKKAYLDPGAVLPRSAATCGRPVADMHSAAHGSGEASAMQSLIKYSGSFARDAVAVRPGGCGKKSPFGGLGTMKPEPAPTSAGASRAQARLPHSGGPAAGGGRQLKRDPERPESAKAFGREGSGAQGEAEVRHPPVGIAVAVARQKDSGGSGRLGPGLVDQERSLSLSNVKGHGRADEDCVDDRARHREERLLGARLDRDQEKLLRESKELADLARLHPTSCAPNGLNPNLMVTGGPALAGSGRWSADPAAHLATHPWLPRSGNASMWLAGHPYGLGPPSLHQGMAPAFPPGLGGSLPSAYQFVRDPQSGQLVVIPSDHLPHFAELMERATVPPLWPALYPPGRSPLHHAQQLQLFSQQHFLRQQEFLYLQQQAAQALELQRSAQLVQERLKAQEHRAEMEEKGSKRGLEAAGKAGLATAGPGLLPRKPPGLAAGPAGTYGKAVSPPPSPRASPVAALKAKVIQKLEDVSKPPAYAYPATPSSHPTSPPPASPPPTPGITRKEEAPENVVEKKDLELEKEAPSPFQALFSDIPPRYPFQALPPHYGRPYPFLLQPTAAADADGLAPDVPLPADGPERLALSPEDKPIRLSPSKITEPLREGPEEEPLAEREVKAEVEDMDEGPTELPPLESPLPLPAAEAMATPSPAGGCGGGLLEAQALSATGQSCAEPSECPDFVEGPEPRVDSPGRTEPCTAALDLGVQLTPETLVEAKEEPVEVPVAVPVVEAVPEEGLAQVAPSESQPTLEMSDCDVPAGEGQCPSLEPQEAVPVLGSTCFLEEASSDQFLPSLEDPLAGMNALAAAAELPQARPLPSPGAAGAQALEKLEAAESLVLEQSFLHGITLLSEIAELELERRSQEMGGAERALVARPSLESLLAAGSHMLREVLDGPVVDPLKNLRLPRELKPNKKYSWMRKKEERMYAMKSSLEDMDALELDFRMRLAEVQRQYKEKQRELVKLQRRRDSEDRREEPHRSLARRGPGRPRKRTHAPSALSPPRKRGKSGHSSGKLSSKSLLTSDDYELGAGIRKRHKGSEEEHDALIGMGKARGRNQTWDEHEASSDFISQLKIKKKKMASDQEQLASKLDKALSLTKQDKLKSPFKFSDSAGGKSKTSGGCGRYLTPYDSLLGKNRKALAKGLGLSLKSSREGKHKRAAKTRKMEVGFKARGQPKSAHSPFASEVSSYSYNTDSEEDEEFLKDEWPAQGPSSSKLTPSLLCSMVAKNSKAAGGPKLTKRGLAAPRTLKPKPATSRKQPFCLLLREAEARSSFSDSSEESFDQDESSEEEDEEEELEEEDEASGGGYRLGARERALSPGLEESGLGLLARFAASALPSPTVGPSLSVVQLEAKQKARKKEERQSLLGTEFEYTDSESEVKVRKRSPAGLLRPKKGLGEPGPSLAAPTPGARGPDPSSPDKAKLAVEKGRKARKLRGPKEPGFEAGPEASDDDLWTRRRSERIFLHDASAAAPAPVSTAPATKTSRCAKGGPLSPRKDAGRAKDRKDPRKKKKGKEAGPGAGLPPPRAPALPSEARAPHASSLTAAKRSKAKAKGKEVKKENRGKGGAVSKLMESMAAEEDFEPNQDSSFSEDEHLPRGGAVERPLTPAPRSCIIDKDELKDGLRVLIPMDDKLLYAGHVQTVHSPDIYRVVVEGERGNRPHIYCLEQLLQEAIIDVRPASTRFLPQGTRIAAYWSQQYRCLYPGTVVRGLLDLEDDGDLITVEFDDGDTGRIPLSHIRLLPPDYKIQCAEPSPALLVPSAKRRSRKTSKDTGEGKDGGTAGSEEPGAKARGRGRKPSAKAKGDRAATLEEGNPTDEVPSTPLALEPSSTPGSKKSPPEPVDKRAKAPKARPAPPQPSPAPPAFTSCPAPEPFAELPAPATSLAPAPLITMPATRPKPKKARAAEESGAKGPRRPGEEAELLVKLDHEGVTSPKSKKAKEALLLREDPGAGGWQEPKSLLSLGSYPPAAGSSEPKAPWPKATDGDLAQEPGPGLTFEDSGNPKSPDKAQAEQDGAEESESSSSSSSGSSSSSSSSSSSGSETEGEEEGDKNGDGGCGTGGRNCSAASSRAASPASSSSSSSSSSSSSSSSSSSSSSSSSSSSSSSSSSSSSSSSSSSSSSSSSSSSSSSSSSTTDEDSSCSSDDEAAPAPTAGPSAQAALPTKATKQAGKARPSAHSPGKKTPAPQPQAPPPQPTQPLQPKAQAGAKSRPKKREGVHLPTTKELAKRQRLPSVENRPKIAAFLPARQLWKWFGKPTQRRGMKGKARKLFYKAIVRGKEMIRIGDCAVFLSAGRPNLPYIGRIQSMWESWGNNMVVRVKWFYHPEETSPGKQFHQGQHWDQKSSRSLPAALRVSSQRKDFMERALYQSSHVDENDVQTVSHKCLVVGLEQYEQMLKTKKYQDSEGLYYLAGTYEPTTGMIFSTDGVPVLC

SEQ ID NO: 92180 - protein, 252 aa, Homo sapiens
  Payload ID: 18464
  Gene Name: trinucleotide repeat containing 18
  ENSP ID: ENSP00000395990
AMKSSLEDMDALELDFRMRLAEVQRQYKEKQRELVKLQRRRDSELSSKSLLTSDDYELGAGIRKRHKGSEEEHDALIGMGKARGRNQTWDEHEASSDFISQLKIKKKKMASDQEQLASKLDKALSLTKQDKLKSPFKFSDSAGGKSKTSGGCGRYLTPYDSLLGKNRKALAKGLGLSLKSSREGKHKRAAKTRKMEVGFKARGQPKSAHSPFASEVSSYSYNTDSEEDEEFLKDEWPAQGPSSSKLTPSLLC

SEQ ID NO: 92181 - protein, 192 aa, Homo sapiens
  Payload ID: 18464
  Gene Name: trinucleotide repeat containing 18
  ENSP ID: ENSP00000398809
  MOD_RES (1)..(1): Any amino acid
XVEKGRKARKLRGPKEPGFEAGPEASDDDLWTRRRSERIFLHDASAAAPAPVSTAPATKTSRCAKGGPLSPRKDAGRAKDRKDPRKVPATVSKGRHWKKKGKEAGPGAGLPPPRAPALPSEARAPHASSLTAAKRSKAKAKGKEVKKENRGKGGAVSKLMESMAAEEDFEPNQDSSFSEDEHLPRGGAVERP

SEQ ID NO: 92182 - protein, 99 aa, Homo sapiens
  Payload ID: 18464
  Gene Name: trinucleotide repeat containing 18
  ENSP ID: ENSP00000410856
MGPSASSHGSPVPLPSDLSFRSPTPSNLPMVQLWAAHAHEGFSHLPSGLYPSYLHLNHLEPPSSGSPLLSQLGQPSIFDTQKGQGPGGDGFYLPTAGAP

SEQ ID NO: 92183 - protein, 308 aa, Homo sapiens
  Payload ID: 18464
  Gene Name: trinucleotide repeat containing 18
  ENSP ID: ENSP00000413911
AVAVRPGGCGKKSPFGGLGTMKPEPAPTSAGASRAQARLPHSGGPAAGGGRQLKRDPERPESAKAFGREGSGAQGEAEVRHPPVGIAVAVARQKDSGGSGRLGPGLVDQERSLSLSNVKGHGRADEDCVDDRARHREERLLGARLDRDQEKLLRESKELADLARLHPTSCAPNGLNPNLMVTGGPALAGSGRWSADPAAHLATHPWLPRSGNASMWLAGHPYGLGPPSLHQGMAPAFPPGLGGSLPSAYQFVRDPQSGQLVVIPSDHLPHFAELMERATVPPLWPALYPPGRSPLHHAQQLQLFSQQH

SEQ ID NO: 92184 - protein, 1913 aa, Homo sapiens
  Payload ID: 18465
  Gene Name: trinucleotide repeat containing 6A
  Uniprot ID: Q8NDV7
  ENSP ID: ENSP00000326900
MRELEAKATKDVERNLSRDLVQEEEQLMEEKKKKKDDKKKKEAAQKKATEQKIKVPEQIKPSVSQPQPANSNNGTSTATSTNNNAKRATANNQQPQQQQQQQQPQQQQPQQQPQPQPQQQQPQQQPQALPRYPREVPPRFRHQEHKQLLKRGQHFPVIAANLGSAVKVLNSQSESSALTNQQPQNNGEVQNSKNQSDINHSTSGSHYENSQRGPVSSTSDSSTNCKNAVVSDLSEKEAWPSAPGSDPELASECMDADSASSSESERNITIMASGNTGGEKDGLRNSTGLGSQNKFVVGSSSNNVGHGSSTGPWGFSHGAIISTCQVSVDAPESKSESSNNRMNAWGTVSSSSNGGLNPSTLNSASNHGAWPVLENNGLALKGPVGSGSSGINIQCSTIGQMPNNQSINSKVSGGSTHGTWGSLQETCESEVSGTQKVSFSGQPQNITTEMTGPNNTTNFMTSSLPNSGSVQNNELPSSNTGAWRVSTMNHPQMQAPSGMNGTSLSHLSNGESKSGGSYGTTWGAYGSNYSGDKCSGPNGQANGDTVNATLMQPGVNGPMGTNFQVNTNKGGGVWESGAANSQSTSWGSGNGANSGGSRRGWGTPAQNTGTNLPSVEWNKLPSNQHSNDSANGNGKTFTNGWKSTEEEDQGSATSQTNEQSSVWAKTGGTVESDGSTESTGRLEEKGTGESQSRDRRKIDQHTLLQSIVNRTDLDPRVLSNSGWGQTPIKQNTAWDTETSPRGERKTDNGTEAWGSSATQTFNSGACIDKTSPNGNDTSSVSGWGDPKPALRWGDSKGSNCQGGWEDDSAATGMVKSNQWGNCKEEKAAWNDSQKNKQGWGDGQKSSQGWSVSASDNWGETSRNNHWGEANKKSSSGGSDSDRSVSGWNELGKTSSFTWGNNINPNNSSGWDESSKPTPSQGWGDPPKSNQSLGWGDSSKPVSSPDWNKQQDIVGSWGIPPATGKPPGTGWLGGPIPAPAKEEEPTGWEEPSPESIRRKMEIDDGTSAWGDPSKYNYKNVNMWNKNVPNGNSRSDQQAQVHQLLTPASAISNKEASSGSGWGEPWGEPSTPATTVDNGTSAWGKPIDSGPSWGEPIAAASSTSTWGSSSVGPQALSKSGPKSMQDGWCGDDMPLPGNRPTGWEEEEDVEIGMWNSNSSQELNSSLNWPPYTKKMSSKGLSGKKRRRERGMMKGGNKQEEAWINPFVKQFSNISFSRDSPEENVQSNKMDLSGGMLQDKRMEIDKHSLNIGDYNRTVGKGPGSRPQISKESSMERNPYFDKNGNPSMFGVGNTAAQPRGMQQPPAQPLSSSQPNLRAQVPPPLLSPQVPVSLLKYAPNNGGLNPLFGPQQVAMLNQLSQLNQLSQISQLQRLLAQQQRAQSQRSVPSGNRPQQDQQGRPLSVQQQMMQQSRQLDPNLLVKQQTPPSQQQPLHQPAMKSFLDNVMPHTTPELQKGPSPINAFSNFPIGLNSNLNVNMDMNSIKEPQSRLRKWTTVDSISVNTSLDQNSSKHGAISSGFRLEESPFVPYDFMNSSTSPASPPGSIGDGWPRAKSPNGSSSVNWPPEFRPGEPWKGYPNIDPETDPYVTPGSVINNLSINTVREVDHLRDRNSGSSSSLNTTLPSTSAWSSIRASNYNVPLSSTAQSTSARNSDSKLTWSPGSVTNTSLAHELWKVPLPPKNITAPSRPPPGLTGQKPPLSTWDNSPLRIGGGWGNSDARYTPGSSWGESSSGRITNWLVLKNLTPQIDGSTLRTLCMQHGPLITFHLNLPHGNALVRYSSKEEVVKAQKSLHMCVLGNTTILAEFASEEEISRFFAQSQSLTPSPGWQSLGSSQSRLGSLDCSHSFSSRTDLNHWNGAGLSGTNCGDLHGTSLWGTPHYSTSLWGPPSSSDPRGISSPSPINAFLSVDHLGGGGESM

SEQ ID NO: 92185 - protein, 1962 aa, Homo sapiens
  Payload ID: 18465
  Gene Name: trinucleotide repeat containing 6A
  Uniprot ID: Q8NDV7
  ENSP ID: ENSP00000379144
MRELEAKATKDVERNLSRDLVQEEEQLMEEKKKKKDDKKKKEAAQKKATEQKIKVPEQIKPSVSQPQPANSNNGTSTATSTNNNAKRATANNQQPQQQQQQQQPQQQQPQQQPQPQPQQQQPQQQPQALPRYPREVPPRFRHQEHKQLLKRGQHFPVIAANLGSAVKVLNSQSESSALTNQQPQNNGEVQNSKNQSDINHSTSGSHYENSQRGPVSSTSDSSTNCKNAVVSDLSEKEAWPSAPGSDPELASECMDADSASSSESERNITIMASGNTGGEKDGLRNSTGLGSQNKFVVGSSSNNVGHGSSTGPWGFSHGAIISTCQVSVDAPESKSESSNNRMNAWGTVSSSSNGGLNPSTLNSASNHGAWPVLENNGLALKGPVGSGSSGINIQCSTIGQMPNNQSINSKVSGGSTHGTWGSLQETCESEVSGTQKVSFSGQPQNITTEMTGPNNTTNFMTSSLPNSGSVQNNELPSSNTGAWRVSTMNHPQMQAPSGMNGTSLSHLSNGESKSGGSYGTTWGAYGSNYSGDKCSGPNGQANGDTVNATLMQPGVNGPMGTNFQVNTNKGGGVWESGAANSQSTSWGSGNGANSGGSRRGWGTPAQNTGTNLPSVEWNKLPSNQHSNDSANGNGKTFTNGWKSTEEEDQGSATSQTNEQSSVWAKTGGTVESDGSTESTGRLEEKGTGESQSRDRRKIDQHTLLQSIVNRTDLDPRVLSNSGWGQTPIKQNTAWDTETSPRGERKTDNGTEAWGSSATQTFNSGACIDKTSPNGNDTSSVSGWGDPKPALRWGDSKGSNCQGGWEDDSAATGMVKSNQWGNCKEEKAAWNDSQKNKQGWGDGQKSSQGWSVSASDNWGETSRNNHWGEANKKSSSGGSDSDRSVSGWNELGKTSSFTWGNNINPNNSSGWDESSKPTPSQGWGDPPKSNQSLGWGDSSKPVSSPDWNKQQDIVGSWGIPPATGKPPGTGWLGGPIPAPAKEEEPTGWEEPSPESIRRKMEIDDGTSAWGDPSKYNYKNVNMWNKNVPNGNSRSDQQAQVHQLLTPASAISNKEASSGSGWGEPWGEPSTPATTVDNGTSAWGKPIDSGPSWGEPIAAASSTSTWGSSSVGPQALSKSGPKSMQDGWCGDDMPLPGNRPTGWEEEEDVEIGMWNSNSSQELNSSLNWPPYTKKMSSKGLSGKKRRRERGMMKGGNKQEEAWINPFVKQFSNISFSRDSPEENVQSNKMDLSGGMLQDKRMEIDKHSLNIGDYNRTVGKGPGSRPQISKESSMERNPYFDKDGIVADESQNMQFMSSQSMKLPPSNSALPNQALGSIAGLGMQNLNSVRQNGNPSMFGVGNTAAQPRGMQQPPAQPLSSSQPNLRAQVPPPLLSPQVPVSLLKYAPNNGGLNPLFGPQQVAMLNQLSQLNQLSQISQLQRLLAQQQRAQSQRSVPSGNRPQQDQQGRPLSVQQQMMQQSRQLDPNLLVKQQTPPSQQQPLHQPAMKSFLDNVMPHTTPELQKGPSPINAFSNFPIGLNSNLNVNMDMNSIKEPQSRLRKWTTVDSISVNTSLDQNSSKHGAISSGFRLEESPFVPYDFMNSSTSPASPPGSIGDGWPRAKSPNGSSSVNWPPEFRPGEPWKGYPNIDPETDPYVTPGSVINNLSINTVREVDHLRDRNSGSSSSLNTTLPSTSAWSSIRASNYNVPLSSTAQSTSARNSDSKLTWSPGSVTNTSLAHELWKVPLPPKNITAPSRPPPGLTGQKPPLSTWDNSPLRIGGGWGNSDARYTPGSSWGESSSGRITNWLVLKNLTPQIDGSTLRTLCMQHGPLITFHLNLPHGNALVRYSSKEEVVKAQKSLHMCVLGNTTILAEFASEEEISRFFAQSQSLTPSPGWQSLGSSQSRLGSLDCSHSFSSRTDLNHWNGAGLSGTNCGDLHGTSLWGTPHYSTSLWGPPSSSDPRGISSPSPINAFLSVDHLGGGGESM

SEQ ID NO: 92186 - protein, 906 aa, Homo sapiens
  Payload ID: 18465
  Gene Name: trinucleotide repeat containing 6A
  ENSP ID: ENSP00000404278
QQDIVGSWGIPPATGKPPGTGWLGGPIPAPAKEEEPTGWEEPSPESIRRKMEIDDGTSAWGDPSKYNYKNVNMWNKNVPNGNSRSDQQAQVHQLLTPASAISNKEASSGSGPKSMQDGWCGDDMPLPGNRPTGWEEEEDVEIGMWNSNSSQELNSSLNWPPYTKKMSSKGLSGKKRRRERGMMKGGNKQEEAWINPFVKQFSNISFSRDSPEENVQSNKMDLSGGMLQDKRMEIDKHSLNIGDYNRTVGKGPGSRPQISKESSMERNPYFDKNGNPSMFGVGNTAAQPRGMQQPPAQPLSSSQPNLRAQVPPPLLSPQVPVSLLKYAPNNGGLNPLFGPQQVAMLNQLSQLNQLSQISQLQRLLAQQQRAQSQRSVPSGNRPQQDQQGRPLSVQQQMMQQSRQLDPNLLVKQQTPPSQQQPLHQPAMKSFLDNVMPHTTPELQKGPSPINAFSNFPIGLNSNLNVNMDMNSIKEPQSRLRKWTTVDSISVNTSLDQNSSKHGAISSGFRLEESPFVPYDFMNSSTSPASPPGSIGDGWPRAKSPNGSSSVNWPPEFRPGEPWKGYPNIDPETDPYVTPGSVINNLSINTVREVDHLRDRNSGSSSSLNTTLPSTSAWSSIRASNYNVPLSSTAQSTSARNSDSKLTWSPGSVTNTSLAHELWKVPLPPKNITAPSRPPPGLTGQKPPLSTWDNSPLRIGGGWGNSDARYTPGSSWGESSSGRITNWLVLKNLTPQIDGSTLRTLCMQHGPLITFHLNLPHGNALVRYSSKEEVVKAQKSLHMCVLGNTTILAEFASEEEISRFFAQSQSLTPSPGWQSLGSSQSRLGSLDCSHSFSSRTDLNHWNGAGLSGTNCGDLHGTSLWGTPHYSTSLWGPPSSSDPRGISSPSPINAFLSVDHLGGGGESM

SEQ ID NO: 92187 - protein, 160 aa, Homo sapiens
  Payload ID: 18465
  Gene Name: trinucleotide repeat containing 6A
  ENSP ID: ENSP00000456394
STAQSTSARNSDSKLTWSPGSVTNTSLAHELWKVPLPPKNITAPSRPPPGLTGQKPPLSTWDNSPLRIGGGWGNSDARYTPGSSWGESSSGRITNWLVLKNLTPQIDGSTLRTLCMQHGPLITFHLNLPHGNALVRYSSKEEVVKAQKSLHISDLFLLTL

SEQ ID NO: 92188 - protein, 203 aa, Homo sapiens
  Payload ID: 18465
  Gene Name: trinucleotide repeat containing 6A
  ENSP ID: ENSP00000457273
  MOD_RES (1)..(1): Any amino acid
XQDGIVADESQNMQFMSSQSMKLPPSNSALPNQALGSIAGLGMQNLNSVRQNGNPSMFGVGNTAAQPRGMQQPPAQPLSSSQPNLRAQVPPPLLSPQVAMLNQLSQLNQLSQISQLQRLLAQQQRAQSQRSVPSGNRPQQDQQGRPLSVQQQMMQQSRQLDPNLLVKQQTPPSQQQPLHQPAMKSFLDNVMPHTTPELQKGPS

SEQ ID NO: 92189 - protein, 96 aa, Homo sapiens
  Payload ID: 18465
  Gene Name: trinucleotide repeat containing 6A
  ENSP ID: ENSP00000459297
  MOD_RES (1)..(1): Any amino acid
XHTTPELQKGPSPINAFSNFPIGLNSNLNVNMDMNSIKEPQSRLRKWTTVDSISVNTSLDQNSSKHGFVTSGLTTDVAQIGVLRLTCADEKECRSD

SEQ ID NO: 92190 - protein, 40 aa, Homo sapiens
  Payload ID: 18465
  Gene Name: trinucleotide repeat containing 6A
  ENSP ID: ENSP00000460688
  MOD_RES (1)..(1): Any amino acid
XNLGSAVKVLNSQSESSALTNQQPQNNGEVQNSKNQSVNK

SEQ ID NO: 92191 - protein, 1029 aa, Homo sapiens
  Payload ID: 18466
  Gene Name: trinucleotide repeat containing 6B
  Uniprot ID: Q9UPQ9
  ENSP ID: ENSP00000306759
MQTNEGEVSEESSSKVEQEDFVMEGHGKTPPPGEESKQEKEQEREEQLMEDKKRKKEDKKKKEATQKVTEQKTKVPEVTKPSLSQPTAASPIGSSPSPPVNGGNNAKRVAVPNGQPPSAARYMPREVPPRFRCQQDHKVLLKRGQPPPPSCMLLGGGAGPPPCTAPGANPNNAQVTGALLQSESGTAPVWSKSTPPAPDNGTSAWGEPNESSPGWGEMDDTGASTTGWGNTPANAPNAMKPNSKSMQDGWGESDGPVTGARHPSWEEEEDGGVWNTTGSQGSASSHNSASWGQGGKKQMKCSLKGGNNDSWMNPLAKQFSNMGLLSQTEDNPSSKMDLSVGSLSDKKFDVDKRAMNLGDFNDIMRKDRSGFRPPNSKDMGTTDSGPYFEKGGSHGLFGNSTAQSRGLHTPVQPLNSSPSLRAQVPPQFISPQVSASMLKQFPNSGLSPGLFNVGPQLSPQQIAMLSQLPQIPQFQLACQLLLQQQQQQQLLQNQRKISQAVRQQQEQQLARMVSALQQQQQQQQRQPGMKHSPSHPVGPKPHLDNMVPNALNVGLPDLQTKGPIPGYGSGFSSGGMDYGMVGGKEAGTESRFKQWTSMMEGLPSVATQEANMHKNGAIVAPGKTRGGSPYNQFDIIPGDTLGGHTGPAGDSWLPAKSPPTNKIGSKSSNASWPPEFQPGVPWKGIQNIDPESDPYVTPGSVLGGTATSPIVDTDHQLLRDNTTGSNSSLNTSLPSPGAWPYSASDNSFTNVHSTSAKFPDYKSTWSPDPIGHNPTHLSNKMWKNHISSRNTTPLPRPPPGLTNPKPSSPWSSTAPRSVRGWGTQDSRLASASTWSDGGSVRPSYWLVLHNLTPQIDGSTLRTICMQHGPLLTFHLNLTQGTALIRYSTKQEAAKAQTALHMCVLGNTTILAEFATDDEVSRFLAQAQPPTPAATPSAPAAGWQSLETGQNQSDPVGPALNLFGGSTGLGQWSSSAGGSSGADLAGASLWGPPNYSSSLWGVPTVEDPHRMGSPAPLLPGDLLGGGSDSI

SEQ ID NO: 92192 - protein, 1723 aa, Homo sapiens
  Payload ID: 18466
  Gene Name: trinucleotide repeat containing 6B
  Uniprot ID: Q9UPQ9
  ENSP ID: ENSP00000338371
MREKEQEREEQLMEDKKRKKEDKKKKEATQKVTEQKTKVPEVTKPSLSQPTAASPIGSSPSPPVNGGNNAKRVAVPNGQPPSAARYMPREVPPRFRCQQDHKVLLKRGQPPPPSCMLLGGGAGPPPCTAPGANPNNAQVTGALLQSESGTAPDSTLGGAAASNYANSTWGSGASSNNGTSPNPIHIWDKVIVDGSDMEEWPCIASKDTESSSENTTDNNSASNPGSEKSTLPGSTTSNKGKGSQCQSASSGNECNLGVWKSDPKAKSVQSSNSTTENNNGLGNWRNVSGQDRIGPGSGFSNFNPNSNPSAWPALVQEGTSRKGALETDNSNSSAQVSTVGQTSREQQSKMENAGVNFVVSGREQAQIHNTDGPKNGNTNSLNLSSPNPMENKGMPFGMGLGNTSRSTDAPSQSTGDRKTGSVGSWGAARGPSGTDTVSGQSNSGNNGNNGKEREDSWKGASVQKSTGSKNDSWDNNNRSTGGSWNFGPQDSNDNKWGEGNKMTSGVSQGEWKQPTGSDELKIGEWSGPNQPNSSTGAWDNQKGHPLPENQGNAQAPCWGRSSSSTGSEVGGQSTGSNHKAGSSDSHNSGRRSYRPTHPDCQAVLQTLLSRTDLDPRVLSNTGWGQTQIKQDTVWDIEEVPRPEGKSDKGTEGWESAATQTKNSGGWGDAPSQSNQMKSGWGELSASTEWKDPKNTGGWNDYKNNNSSNWGGGRPDEKTPSSWNENPSKDQGWGGGRQPNQGWSSGKNGWGEEVDQTKNSNWESSASKPVSGWGEGGQNEIGTWGNGGNASLASKGGWEDCKRSPAWNETGRQPNSWNKQHQQQQPPQQPPPPQPEASGSWGGPPPPPPGNVRPSNSSWSSGPQPATPKDEEPSGWEEPSPQSISRKMDIDDGTSAWGDPNSYNYKNVNLWDKNSQGGPAPREPNLPTPMTSKSASDSKSMQDGWGESDGPVTGARHPSWEEEEDGGVWNTTGSQGSASSHNSASWGQGGKKQMKCSLKGGNNDSWMNPLAKQFSNMGLLSQTEDNPSSKMDLSVGSLSDKKFDVDKRAMNLGDFNDIMRKDRSGFRPPNSKDMGTTDSGPYFEKGGSHGLFGNSTAQSRGLHTPVQPLNSSPSLRAQVPPQFISPQVSASMLKQFPNSGLSPGLFNVGPQLSPQQIAMLSQLPQIPQFQLACQLLLQQQQQQQLLQNQRKISQAVRQQQEQQLARMVSALQQQQQQQQRQPGMKHSPSHPVGPKPHLDNMVPNALNVGLPDLQTKGPIPGYGSGFSSGGMDYGMVGGKEAGTESRFKQWTSMMEGLPSVATQEANMHKNGAIVAPGKTRGGSPYNQFDIIPGDTLGGHTGPAGDSWLPAKSPPTNKIGSKSSNASWPPEFQPGVPWKGIQNIDPESDPYVTPGSVLGGTATSPIVDTDHQLLRDNTTGSNSSLNTSLPSPGAWPYSASDNSFTNVHSTSAKFPDYKSTWSPDPIGHNPTHLSNKMWKNHISSRNTTPLPRPPPGLTNPKPSSPWSSTAPRSVRGWGTQDSRLASASTWSDGGSVRPSYWLVLHNLTPQIDGSTLRTICMQHGPLLTFHLNLTQGTALIRYSTKQEAAKAQTALHMCVLGNTTILAEFATDDEVSRFLAQAQPPTPAATPSAPAAGWQSLETGQNQSDPVGPALNLFGGSTGLGQWSSSAGGSSGADLAGASLWGPPNYSSSLWGVPTVEDPHRMGSPAPLLPGDLLGGGSDSI

SEQ ID NO: 92193 - protein, 1029 aa, Homo sapiens; identical to SEQ ID NO: 92191
  Payload ID: 18466
  Gene Name: trinucleotide repeat containing 6B
  Uniprot ID: Q9UPQ9
  ENSP ID: ENSP00000384795

SEQ ID NO: 92194 - protein, 37 aa, Homo sapiens
  Payload ID: 18466
  Gene Name: trinucleotide repeat containing 6B
  ENSP ID: ENSP00000397491
MQTNEGEVSEESSSKVEQEDFVMEGHGKTPPPGEESK

SEQ ID NO: 92195 - protein, 1833 aa, Homo sapiens
  Payload ID: 18466
  Gene Name: trinucleotide repeat containing 6B
  Uniprot ID: Q9UPQ9
  ENSP ID: ENSP00000401946
MREKEQEREEQLMEDKKRKKEDKKKKEATQKVTEQKTKVPEVTKPSLSQPTAASPIGSSPSPPVNGGNNAKRVAVPNGQPPSAARYMPREVPPRFRCQQDHKVLLKRGQPPPPSCMLLGGGAGPPPCTAPGANPNNAQVTGALLQSESGTAPDSTLGGAAASNYANSTWGSGASSNNGTSPNPIHIWDKVIVDGSDMEEWPCIASKDTESSSENTTDNNSASNPGSEKSTLPGSTTSNKGKGSQCQSASSGNECNLGVWKSDPKAKSVQSSNSTTENNNGLGNWRNVSGQDRIGPGSGFSNFNPNSNPSAWPALVQEGTSRKGALETDNSNSSAQVSTVGQTSREQQSKMENAGVNFVVSGREQAQIHNTDGPKNGNTNSLNLSSPNPMENKGMPFGMGLGNTSRSTDAPSQSTGDRKTGSVGSWGAARGPSGTDTVSGQSNSGNNGNNGKEREDSWKGASVQKSTGSKNDSWDNNNRSTGGSWNFGPQDSNDNKWGEGNKMTSGVSQGEWKQPTGSDELKIGEWSGPNQPNSSTGAWDNQKGHPLPENQGNAQAPCWGRSSSSTGSEVGGQSTGSNHKAGSSDSHNSGRRSYRPTHPDCQAVLQTLLSRTDLDPRVLSNTGWGQTQIKQDTVWDIEEVPRPEGKSDKGTEGWESAATQTKNSGGWGDAPSQSNQMKSGWGELSASTEWKDPKNTGGWNDYKNNNSSNWGGGRPDEKTPSSWNENPSKDQGWGGGRQPNQGWSSGKNGWGEEVDQTKNSNWESSASKPVSGWGEGGQNEIGTWGNGGNASLASKGGWEDCKRSPAWNETGRQPNSWNKQHQQQQPPQQPPPPQPEASGSWGGPPPPPPGNVRPSNSSWSSGPQPATPKDEEPSGWEEPSPQSISRKMDIDDGTSAWGDPNSYNYKNVNLWDKNSQGGPAPREPNLPTPMTSKSASVWSKSTPPAPDNGTSAWGEPNESSPGWGEMDDTGASTTGWGNTPANAPNAMKPNSKSMQDGWGESDGPVTGARHPSWEEEEDGGVWNTTGSQGSASSHNSASWGQGGKKQMKCSLKGGNNDSWMNPLAKQFSNMGLLSQTEDNPSSKMDLSVGSLSDKKFDVDKRAMNLGDFNDIMRKDRSGFRPPNSKDMGTTDSGPYFEKLTLPFSNQDGCLGDEAPCSPFSPSPSYKLSPSGSTLPNVSLGAIGTGLNPQNFAARQGGSHGLFGNSTAQSRGLHTPVQPLNSSPSLRAQVPPQFISPQVSASMLKQFPNSGLSPGLFNVGPQLSPQQIAMLSQLPQIPQFQLACQLLLQQQQQQQLLQNQRKISQAVRQQQEQQLARMVSALQQQQQQQQRQPGMKHSPSHPVGPKPHLDNMVPNALNVGLPDLQTKGPIPGYGSGFSSGGMDYGMVGGKEAGTESRFKQWTSMMEGLPSVATQEANMHKNGAIVAPGKTRGGSPYNQFDIIPGDTLGGHTGPAGDSWLPAKSPPTNKIGSKSSNASWPPEFQPGVPWKGIQNIDPESDPYVTPGSVLGGTATSPIVDTDHQLLRDNTTGSNSSLNTSLPSPGAWPYSASDNSFTNVHSTSAKFPDYKSTWSPDPIGHNPTHLSNKMWKNHISSRNTTPLPRPPPGLTNPKPSSPWSSTAPRSVRGWGTQDSRLASASTWSDGGSVRPSYWLVLHNLTPQIDGSTLRTICMQHGPLLTFHLNLTQGTALIRYSTKQEAAKAQTALHMCVLGNTTILAEFATDDEVSRFLAQAQPPTPAATPSAPAAGWQSLETGQNQSDPVGPALNLFGGSTGLGQWSSSAGGSSGADLAGASLWGPPNYSSSLWGVPTVEDPHRMGSPAPLLPGDLLGGGSDSI

SEQ ID NO: 92196 - protein, 1391 aa, Homo sapiens
  Payload ID: 18466
  Gene Name: trinucleotide repeat containing 6B
  ENSP ID: ENSP00000409429
  MOD_RES (1)..(1): Any amino acid
XWKSDPKAKSVQSSNSTTENNNGLGNWRNVSGQDRIGPGSGFSNFNPNSNPSAWPALVQEGTSRKGALETDNSNSSAQVSTVGQTSREQQSKMENAGVNFVVSGREQAQIHNTDGPKNGNTNSLNLSSPNPMENKGMPFGMGLGNTSRSTDAPSQSTGDRKTGSVGSWGAARGPSGTDTVSGQSNSGNNGNNGKEREDSWKGASVQKSTGSKNDSWDNNNRSTGGSWNFGPQDSNDNKWGEGNKMTSGVSQGEWKQPTGSDELKIGEWSGPNQPNSSTGAWDNQKGHPLPENQGNAQAPCWGRSSSSTGSEVGGQSTGSNHKAGSSDSHNSGRRSYRPTHPDCQAVLQTLLSRTDLDPRVLSNTGWGQTQIKQDTVWDIEEVPRPEGKSDKGTEGWESAATQTKNSGGWGDAPSQSNQMKSGWGELSASTEWKDPKNTGGWNDYKNNNSSNWGGGRPDEKTPSSWNENPSKDQGWGGGRQPNQGWSSGKNGWGEEVDQTKNSNWESSASKPVSGWGEGGQNEIGTWGNGGNASLASKGGWEDCKRSPAWNETGRQPNSWNKQHQQQQPPQQPPPPQPEASGSWGGPPPPPPGNVRPSNSSWSSGPQPATPKDEEPSGWEEPSPQSISRKMDIDDGTSAWGDPNSYNYKNVNLWDKNSQGGPAPREPNLPTPMTSKSASVWSKSTPPAPDNGTSAWGEPNESSPGWGEMDDTGASTTGWGNTPANAPNAMKPNSKSMQDGWGESDGPVTGARHPSWEEEEDGGVWNTTGSQGSASSHNSASWGQGGKKQMKCSLKGGNNDSWMNPLAKQFSNMGLLSQTEDNPSSKMDLSVGSLSDKKFDVDKRAMNLGDFNDIMRKDRSGFRPPNSKDMGTTDSGPYFEKGGSHGLFGNSTAQSRGLHTPVQPLNSSPSLRAQVPPQFISPQVSASMLKQFPNSGLSPGLFNVGPQLSPQQIAMLSQLPQIPQFQLACQLLLQQQQQQQLLQNQRKISQAVRQQQEQQLARMVSALQQQQQQQQRQPGMKHSPSHPVGPKPHLDNMVPNALNVGLPDLQTKGPIPGYGSGFSSGGMDYGMVGGKEAGTESRFKQWTSMMEGLPSVATQEANMHKNGAIVAPGKTRGGSPYNQFDIIPGDTLGGHTGPAGDSWLPAKSPPTNKIGSKSSNASWPPEFQPGVPWKGIQNIDPESDPYVTPGSVLGGTATSPIVDTDHQLLRDNTTGSNSSLNTSLPSPGAWPYSASDNSFTNVHSTSAKFPDYKSTWSPDPIGHNPTHLSNKMWKNHISSRNTTPLPRPPPGLTNPKPSSPWSSTAPRSVRGWGTQDSRLASASTWSDGGSVRPSYWLVLHNLTPQIDGSTLRTICMQHGPLLTFHLNLTQGTALIRYSTKQEAAKAQTALHM

SEQ ID NO: 92197 - protein, 1690 aa, Homo sapiens
  Payload ID: 18467
  Gene Name: trinucleotide repeat containing 6C
  Uniprot ID: Q9HCJ0
  ENSP ID: ENSP00000301624
MATGSAQGNFTGHTKKTNGNNGTNGALVQSPSNQSALGAGGANSNGSAARVWGVATGSSSGLAHCSVSGGDGKMDTMIGDGRSQNCWGASNSNAGINLNLNPNANPAAWPVLGHEGTVATGNPSSICSPVSAIGQNMGNQNGNPTGTLGAWGNLLPQESTEPQTSTSQNVSFSAQPQNLNTDGPNNTNPMNSSPNPINAMQTNGLPNWGMAVGMGAIIPPHLQGLPGANGSSVSQVSGGSAEGISNSVWGLSPGNPATGNSNSGFSQGNGDTVNSALSAKQNGSSSAVQKEGSGGNAWDSGPPAGPGILAWGRGSGNNGVGNIHSGAWGHPSRSTSNGVNGEWGKPPNQHSNSDINGKGSTGWESPSVTSQNPTVQPGGEHMNSWAKAASSGTTASEGSSDGSGNHNEGSTGREGTGEGRRRDKGIIDQGHIQLPRNDLDPRVLSNTGWGQTPVKQNTAWEFEESPRSERKNDNGTEAWGCAATQASNSGGKNDGSIMNSTNTSSVSGWVNAPPAAVPANTGWGDSNNKAPSGPGVWGDSISSTAVSTAAAAKSGHAWSGAANQEDKSPTWGEPPKPKSQHWGDGQRSNPAWSAGGGDWADSSSVLGHLGDGKKNGSGWDADSNRSGSGWNDTTRSGNSGWGNSTNTKANPGTNWGETLKPGPQQNWASKPQDNNVSNWGGAASVKQTGTGWIGGPVPVKQKDSSEATGWEEPSPPSIRRKMEIDDGTSAWGDPSNYNNKTVNMWDRNNPVIQSSTTTNTTTTTTTTTSNTTHRVETPPPHQAGTQLNRSPLLGPGRKVSSGWGEMPNVHSKTENSWGEPSSPSTLVDNGTAAWGKPPSSGSGWGDHPAEPPVAFGRAGAPVAASALCKPASKSMQEGWGSGGDEMNLSTSQWEDEEGDVWNNAASQESTSSCSSWGNAPKKGLQKGMKTSGKQDEAWIMSRLIKQLTDMGFPREPAEEALKSNNMNLDQAMSALLEKKVDVDKRGLGVTDHNGMAAKPLGCRPPISKESSVDRPTFLDKDGGLVEEPTPSPFLPSPSLKLPLSHSALPSQALGGIASGLGMQNLNSSRQIPSGNLGMFGNSGAAQARTMQQPPQPPVQPLNSSQPSLRAQVPQFLSPQVQAQLLQFAAKNIGLNPALLTSPINPQHMTMLNQLYQLQLAYQRLQIQQQMLQAQRNVSGSMRQQEQQVARTITNLQQQIQQHQRQLAQALLVKQPPPPPPPPHLSLHPSAGKSAMDSFPSHPQTPGLPDLQTKEQQSSPNTFAPYPLAGLNPNMNVNSMDMTGGLSVKDPSQSQSRLPQWTHPNSMDNLPSAASPLEQNPSKHGAIPGGLSIGPPGKSSIDDSYGRYDLIQNSESPASPPVAVPHSWSRAKSDSDKISNGSSINWPPEFHPGVPWKGLQNIDPENDPDVTPGSVPTGPTINTTIQDVNRYLLKSGGKLSDIKSTWSSGPTSHTQASLSHELWKVPRNSTAPTRPPPGLTNPKPSSTWGASPLGWTSSYSSGSAWSTDTSGRTSSWLVLRNLTPQIDGSTLRTLCLQHGPLITFHLNLTQGNAVVRYSSKEEAAKAQKSLHMCVLGNTTILAEFAGEEEVNRFLAQGQALPPTSSWQSSSASSQPRLSAAGSSHGLVRSDAGHWNAPCLGGKGSSELLWGGVPQYSSSLWGPPSADDSRVIGSPTPLTTLLPGDLLSGESL

SEQ ID NO: 92198 - protein, 1726 aa, Homo sapiens
  Payload ID: 18467
  Gene Name: trinucleotide repeat containing 6C
  Uniprot ID: Q9HCJ0
  ENSP ID: ENSP00000336783
MATGSAQGNFTGHTKKTNGNNGTNGALVQSPSNQSALGAGGANSNGSAARVWGVATGSSSGLAHCSVSGGDGKMDTMIGDGRSQNCWGASNSNAGINLNLNPNANPAAWPVLGHEGTVATGNPSSICSPVSAIGQNMGNQNGNPTGTLGAWGNLLPQESTEPQTSTSQNVSFSAQPQNLNTDGPNNTNPMNSSPNPINAMQTNGLPNWGMAVGMGAIIPPHLQGLPGANGSSVSQVSGGSAEGISNSVWGLSPGNPATGNSNSGFSQGNGDTVNSALSAKQNGSSSAVQKEGSGGNAWDSGPPAGPGILAWGRGSGNNGVGNIHSGAWGHPSRSTSNGVNGEWGKPPNQHSNSDINGKGSTGWESPSVTSQNPTVQPGGEHMNSWAKAASSGTTASEGSSDGSGNHNEGSTGREGTGEGRRRDKGIIDQGHIQLPRNDLDPRVLSNTGWGQTPVKQNTAWEFEESPRSERKNDNGTEAWGCAATQASNSGGKNDGSIMNSTNTSSVSGWVNAPPAAVPANTGWGDSNNKAPSGPGVWGDSISSTAVSTAAAAKSGHAWSGAANQEDKSPTWGEPPKPKSQHWGDGQRSNPAWSAGGGDWADSSSVLGHLGDGKKNGSGWDADSNRSGSGWNDTTRSGNSGWGNSTNTKANPGTNWGETLKPGPQQNWASKPQDNNVSNWGGAASVKQTGTGWIGGPVPVKQKDSSEATGWEEPSPPSIRRKMEIDDGTSAWGDPSNYNNKTVNMWDRNNPVIQSSTTTNTTTTTTTTTSNTTHRVETPPPHQAGTQLNRSPLLGPVSSGWGEMPNVHSKTENSWGEPSSPSTLVDNGTAAWGKPPSSGSGWGDHPAEPPVAFGRAGAPVAASALCKPASKSMQEGWGSGGDEMNLSTSQWEDEEGDVWNNAASQESTSSCSSWGNAPKKGLQKGMKTSGKQDEAWIMSRLIKQLTDMGFPREPAEEALKSNNMNLDQAMSALLEKKVDVDKRGLGVTDHNGMAAKPLGCRPPISKESSVDRPTFLDKDGGLVEEPTPSPFLPSPSLKLPLSHSALPSQALGGIASGLGMQNLNSSRQIPSGNLGMFGNSGAAQARTMQQPPQPPVQPLNSSQPSLRAQVPQFLSPQVQAQLLQFAAKNIGLNPALLTSPINPQHMTMLNQLYQLQLAYQRLQIQQQMLQAQRNVSGSMRQQEQQVARTITNLQQQIQQHQRQLAQALLVKQPPPPPPPPHLSLHPSAGKSAMDSFPSHPQTPGLPDLQTKEQQSSPNTFAPYPLAGLNPNMNVNSMDMTGGLSVKDPSQSQSRLPQWTHPNSMDNLPSAASPLEQNPSKHGAIPGGLSIGPPGKSSIDDSYGRYDLIQNSESPASPPVAVPHSWSRAKSDSDKISNGSSINWPPEFHPGVPWKGLQNIDPENDPDVTPGSVPTGPTINTTIQDVNRYLLKSGGSSPPSSQNATLPSSSAWPLSASGYSSSFSSIASAPSVAGKLSDIKSTWSSGPTSHTQASLSHELWKVPRNSTAPTRPPPGLTNPKPSSTWGASPLGWTSSYSSGSAWSTDTSGRTSSWLVLRNLTPQIDGSTLRTLCLQHGPLITFHLNLTQGNAVVRYSSKEEAAKAQKSLHMCVLGNTTILAEFAGEEEVNRFLAQGQALPPTSSWQSSSASSQPRLSAAGSSHGLVRSDAGHWNAPCLGGKGSSELLWGGVPQYSSSLWGPPSADDSRVIGSPTPLTTLLPGDLLSGESL

SEQ ID NO: 92199 - protein, 95 aa, Homo sapiens
  Payload ID: 18467
  Gene Name: trinucleotide repeat containing 6C
  ENSP ID: ENSP00000465707
MATGSAQGNFTGHTKKTNGNNGTNGALVQSPSNQSALGAGGANSNGSAARVWGVATGSSSGLAHCSVSGGDGKMDTMIGDGRSQNCWGASNSNAG

SEQ ID NO: 92200 - protein, 116 aa, Homo sapiens
  Payload ID: 18467
  Gene Name: trinucleotide repeat containing 6C
  ENSP ID: ENSP00000466277
MPNVHSKTENSWGEPSSPSTLVDNGTAAWGKPPSSGSGWGDHPAEPPVAFGRAGAPVAASALCKPASKSMQEGWGSGGDEMNLSTSQWEDEEGDVWNNAASQESTSSCSSWGNAPK

SEQ ID NO: 92201 - protein, 1726 aa, Homo sapiens; identical to SEQ ID NO: 92198
  Payload ID: 18467
  Gene Name: trinucleotide repeat containing 6C
  Uniprot ID: Q9HCJ0
  ENSP ID: ENSP00000467154

SEQ ID NO: 92202 - protein, 1690 aa, Homo sapiens; identical to SEQ ID NO: 92197
  Payload ID: 18467
  Gene Name: trinucleotide repeat containing 6C
  Uniprot ID: Q9HCJ0
  ENSP ID: ENSP00000468647

SEQ ID NO: 92203 - protein, 104 aa, Homo sapiens
  Payload ID: 18468
  Gene Name: TRIO and F-actin binding protein
  ENSP ID: ENSP00000340312
MEEVPGDALCEHFEANILTQNRCQNCFHPEEAHGARYQELRSPSGAEVPYCDLPRCPPAPEDPLSASTSGCQSVVDPGLRPGPKRTGTLLRGRRRRPPAGTSSQ

SEQ ID NO: 92204 - protein, 431 aa, Homo sapiens
  Payload ID: 18468
  Gene Name: TRIO and F-actin binding protein
  Uniprot ID: Q9H2D6
  ENSP ID: ENSP00000383913
MGGWKGPGQRRGKEGPEARRRAAERGGGGGGGGVPAPRSPAREPRPRSCLLLPPPWGAAMTPDLLNFKKGWMSILDEPGEPPSPSLTTTSTSQWKKHWFVLTDSSLKYYRDSTAEEADELDGEIDLRSCTDVTEYAVQRNYGFQIHTKDAVYTLSAMTSGIRRNWIEALRKTVRPTSAPDVTKLSDSNKENALHSYSTQKGPLKAGEQRAGSEVISRGGPRKADGQRQALDYVELSPLTQASPQRARTPARTPDRLAKQEELERDLAQRSEERRKWFEATDSRTPEVPAGEGPRRGLGAPLTEDQQNRLSEEIEKKWQELEKLPLRENKRVPLTALLNQSRGERRGPPSDGHEALEKEVQALRAQLEAWRLQGEAPQSALRSQEDGHIPPGYISQLVGVITVPVLQTRPLSSERLCDLPKVTPPAGLKGGI

SEQ ID NO: 92205 - protein, 2365 aa, Homo sapiens
  Payload ID: 18468
  Gene Name: TRIO and F-actin binding protein
  Uniprot ID: Q9H2D6
  ENSP ID: ENSP00000384312
MEEVPGDALCEHFEANILTQNRCQNCFHPEEAHGARYQELRSPSGAEVPYCDLPRCPPAPEDPLSASTSGCQSVVDPGLRPGPKRGPSPSAGLPEEGPTAAPRSRSRELEAVPYLEGLTTSLCGSCNEDPGSDPTSSPDSATPDDTSNSSSVDWDTVERQEEEAPSWDELAVMIPRRPREGPRADSSQRAPSLLTRSPVGGDAAGQKKEDTGGGGRSAGQHWARLRGESGLSLERHRSTLTQASSMTPHSGPRSTTSQASPAQRDTAQAASTREIPRASSPHRITQRDTSRASSTQQEISRASSTQQETSRASSTQEDTPRASSTQEDTPRASSTQWNTPRASSPSRSTQLDNPRTSSTQQDNPQTSFPTCTPQRENPRTPCVQQDDPRASSPNRTTQRENSRTSCAQRDNPKASRTSSPNRATRDNPRTSCAQRDNPRASSPSRATRDNPTTSCAQRDNPRASRTSSPNRATRDNPRTSCAQRDNPRASSPSRATRDNPTTSCAQRDNPRASRTSSPNRATRDNPRTSCAQRDNPRASSPNRAARDNPTTSCAQRDNPRASRTSSPNRATRDNPRTSCAQRDNPRASSPNRATRDNPTTSCAQRDNPRASRTSSPNRATRDNPRTSCAQRDNPRASSPNRTTQQDSPRTSCARRDDPRASSPNRTIQQENPRTSCALRDNPRASSPSRTIQQENPRTSCAQRDDPRASSPNRTTQQENPRTSCARRDNPRASSRNRTIQRDNPRTSCAQRDNPRASSPNRTIQQENLRTSCTRQDNPRTSSPNRATRDNPRTSCAQRDNLRASSPIRATQQDNPRTCIQQNIPRSSSTQQDNPKTSCTKRDNLRPTCTQRDRTQSFSFQRDNPGTSSSQCCTQKENLRPSSPHRSTQWNNPRNSSPHRTNKDIPWASFPLRPTQSDGPRTSSPSRSKQSEVPWASIALRPTQGDRPQTSSPSRPAQHDPPQSSFGPTQYNLPSRATSSSHNPGHQSTSRTSSPVYPAAYGAPLTSPEPSQPPCAVCIGHRDAPRASSPPRYLQHDPFPFFPEPRAPESEPPHHEPPYIPPAVCIGHRDAPRASSPPRHTQFDPFPFLPDTSDAEHQCQSPQHEPLQLPAPVCIGYRDAPRASSPPRQAPEPSLLFQDLPRASTESLVPSMDSLHECPHIPTPVCIGHRDAPSFSSPPRQAPEPSLFFQDPPGTSMESLAPSTDSLHGSPVLIPQVCIGHRDAPRASSPPRHPPSDLAFLAPSPSPGSSGGSRGSAPPGETRHNLEREEYTVLADLPPPRRLAQRQPGPQAQCSSGGRTHSPGRAEVERLFGQERRKSEAAGAFQAQDEGRSQQPSQGQSQLLRRQSSPAPSRQVTMLPAKQAELTRRSQAEPPHPWSPEKRPEGDRQLQGSPLPPRTSARTPERELRTQRPLESGQAGPRQPLGVWQSQEEPPGSQGPHRHLERSWSSQEGGLGPGGWWGCGEPSLGAAKAPEGAWGGTSREYKESWGQPEAWEEKPTHELPRELGKRSPLTSPPENWGGPAESSQSWHSGTPTAVGWGAEGACPYPRGSERRPELDWRDLLGLLRAPGEGVWARVPSLDWEGLLELLQARLPRKDPAGHRDDLARALGPELGPPGTNDVPEQESHSQPEGWAEATPVNGHSPALQSQSPVQLPSPACTSTQWPKIKVTRGPATATLAGLEQTGPLGSRSTAKGPSLPELQFQPEEPEESEPSRGQDPLTDQKQADSADKRPAEGKAGSPLKGRLVTSWRMPGDRPTLFNPFLLSLGVLRWRRPDLLNFKKGWMSILDEPGEPPSPSLTTTSTSQWKKHWFVLTDSSLKYYRDSTAEEADELDGEIDLRSCTDVTEYAVQRNYGFQIHTKDAVYTLSAMTSGIRRNWIEALRKTVRPTSAPDVTKLSDSNKENALHSYSTQKGPLKAGEQRAGSEVISRGGPRKADGQRQALDYVELSPLTQASPQRARTPARTPDRLAKQEELERDLAQRSEERRKWFEATDSRTPEVPAGEGPRRGLGAPLTEDQQNRLSEEIEKKWQELEKLPLRENKRVPLTALLNQSRGERRGPPSDGHEALEKEVQALRAQLEAWRLQGEAPQSALRSQEDGHIPPGYISQEACERSLAEMESSHQQVMEELQRHHERELQRLQQEKEWLLAEETAATASAIEAMKKAYQEELSRELSKTRSLQQGPDGLRKQHQSDVEALKRELQVLSEQYSQKCLEIGALMRQAEEREHTLRRCQQEGQELLRHNQELHGRLSEEIDQLRGFIASQGMGNGCGRSNERSSCELEVLLRVKENELQYLKKEVQCLRDELQMMQKDKRFTSGKYQDVYVELSHIKTRSEREIEQLKEHLRLAMAALQEKESMRNSLAE

SEQ ID NO: 92206 - protein, 652 aa, Homo sapiens
  Payload ID: 18468
  Gene Name: TRIO and F-actin binding protein
  Uniprot ID: Q9H2D6
  ENSP ID: ENSP00000386026
MGGWKGPGQRRGKEGPEARRRAAERGGGGGGGGVPAPRSPAREPRPRSCLLLPPPWGAAMTPDLLNFKKGWMSILDEPGEPPSPSLTTTSTSQWKKHWFVLTDSSLKYYRDSTAEEADELDGEIDLRSCTDVTEYAVQRNYGFQIHTKDAVYTLSAMTSGIRRNWIEALRKTVRPTSAPDVTKLSDSNKENALHSYSTQKGPLKAGEQRAGSEVISRGGPRKADGQRQALDYVELSPLTQASPQRARTPARTPDRLAKQEELERDLAQRSEERRKWFEATDSRTPEVPAGEGPRRGLGAPLTEDQQNRLSEEIEKKWQELEKLPLRENKRVPLTALLNQSRGERRGPPSDGHEALEKEVQALRAQLEAWRLQGEAPQSALRSQEDGHIPPGYISQEACERSLAEMESSHQQVMEELQRHHERELQRLQQEKEWLLAEETAATASAIEAMKKAYQEELSRELSKTRSLQQGPDGLRKQHQSDVEALKRELQVLSEQYSQKCLEIGALMRQAEEREHTLRRCQQEGQELLRHNQELHGRLSEEIDQLRGFIASQGMGNGCGRSNERSSCELEVLLRVKENELQYLKKEVQCLRDELQMMQKDKRFTSGKYQDVYVELSHIKTRSEREIEQLKEHLRLAMAALQEKESMRNSLAE

SEQ ID NO: 92207 - protein, 256 aa, Homo sapiens
  Payload ID: 18468
  Gene Name: TRIO and F-actin binding protein
  ENSP ID: ENSP00000387881
MSILDEPGEPPSPSLTTTSTSQWKKHWFVLTDSSLKYYRDSTAEEADELDGEIDLRSCTDVTEYAVQRNYGFQIHTKDAVYTLSAMTSGIRRNWIEALRKTVRPTSAPDVTKLSDSNKENALHSYSTQKGPLKAGEQRAGSEVISRGGPRKADGQRQALDYVELSPLTQASPQRARTPARTPDRLAKQEELERDLAQRSEERRKWFEATDSRTPEVPAGEGPRRGLGAPLTEDQQNRLSEEIEKKWQELEKLPLRE

SEQ ID NO: 92208 - protein, 265 aa, Homo sapiens
  Payload ID: 18468
  Gene Name: TRIO and F-actin binding protein
  ENSP ID: ENSP00000396946
MLQLVAPRPRGCAPLGGTQKPDLLNFKKGWMSILDEPGEPPSPSLTTTSTSQWKKHWFVLTDSSLKYYRDSTAEEADELDGEIDLRSCTDVTEYAVQRNYGFQIHTKDAVYTLSAMTSGIRRNWIEALRKTVRPTSAPDVTKLSDSNKENALHSYSTQKGPLKAGEQRAGSEVISRGGPRKADGQRQALDYVELSPLTQASPQRARTPARTPDRLAKQEELERDLAQRSEERRKWFEATDSRTPEVPAGEGPRRGLGAPLTEDQQ

SEQ ID NO: 92209 - protein, 311 aa, Homo sapiens
  Payload ID: 18468
  Gene Name: TRIO and F-actin binding protein
  ENSP ID: ENSP00000399006
  MOD_RES (1)..(1): Any amino acid
XGKEGPEARRRAAERGGGGGGGGVPAPRSPAREPRPRSCLLLPPPWGAAMTPDLLNFKKGWMSILDEPGEADELDGEIDLRSCTDVTEYAVQRNYGFQIHTKDAVYTLSAMTSGIRRNWIEALRKTVRPTSAPDVTKLSDSNKENALHSYSTQKGPLKAGEQRAGSEVISRGGPRKADGQRQALDYVELSPLTQASPQRARTPARTPDRLAKQEELERDLAQRSEERRKWFEATDSRTPEVPAGEGPRRGLGAPLTEDQQNRLSEEIEKKWQELEKLPLRENKRVPLTALLNQSRGERRGPPSDGHEALEK

SEQ ID NO: 92210 - protein, 102 aa, Homo sapiens
  Payload ID: 18468
  Gene Name: TRIO and F-actin binding protein
  ENSP ID: ENSP00000400680
GGGGGVPAPRSPAREPRPRSCLLLPPPWGAAMTVYREGLGCQPTGSPDCGCGRFWIFSCPKPRPICSTSRRDGCRSWTSLESLPPPRSPPPLLRSGRNIGLC

SEQ ID NO: 92211 - protein, 83 aa, Homo sapiens
  Payload ID: 18468
  Gene Name: TRIO and F-actin binding protein
  ENSP ID: ENSP00000407542
MSILDEPGEPPSPSLTTTSTSQWKKHWFVLTDSSLKYYRDSTAEEADELDGEIDLRSCTDVTEYAVQRNYGFQIHTKDAVYTL

SEQ ID NO: 92212 - protein, 596 aa, Homo sapiens
  Payload ID: 18469
  Gene Name: trio Rho guanine nucleotide exchange factor
  Uniprot ID: O75962
  ENSP ID: ENSP00000339291
MLPSQAQGLLWWVFPLFPASSLSYPPVSYRADGLARNTFLKACSESSSSSNISTMLVTHDYTAVKEDEINVYQGEVVQILASNQQNMFLVFRAATDQCPAAEGWIPGFVLGHTSAVIVENPDGTLKKSTSWHTALRLRKKSEKKDKDGKREGKLENGYRKSREGLSNKVSVKLLNPNYIYDVPPEFVIPLSEVTCETGETVVLRCRVCGRPKASITWKGPEHNTLNNDGHYSISYSDLGEATLKIVGVTTEDDGIYTCIAVNDMGSASSSASLRVLGPGMDGIMVTWKDNFDSFYSEVAELGRGRFSVVKKCDQKGTKRAVATKFVNKKLMKRDQVTHELGILQSLQHPLLVGLLDTFETPTSYILVLEMADQGRLLDCVVRWGSLTEGKIRAHLGEVLEAVRYLHNCRIAHLDLKPENILVDESLAKPTIKLADFGDAVQLNTTYYIHQLLGNPEFAAPEIILGNPVSLTSDTWSVGVLTYVLLSGVSPFLDDSVEETCLNICRLDFSFPDDYFKGVSQKAKEFVCFLLQEDPAKRPSAALALQEQWLQAGNGRSTGVLDTSRLTSFIERRKHQNDVRPIRSIKNFLQSRLLPRV

SEQ ID NO: 92213 - protein, 3097 aa, Homo sapiens
  Payload ID: 18469
  Gene Name: trio Rho guanine nucleotide exchange factor
  Uniprot ID: O75962
  ENSP ID: ENSP00000339299
MSGSSGGAAAPAASSGPAAAASAAGSGCGGGAGEGAEEAAKDLADIAAFFRSGFRKNDEMKAMDVLPILKEKVAYLSGGRDKRGGPILTFPARSNHDRIRQEDLRRLISYLACIPSEEVCKRGFTVIVDMRGSKWDSIKPLLKILQESFPCCIHVALIIKPDNFWQKQRTNFGSSKFEFETNMVSLEGLTKVVDPSQLTPEFDGCLEYNHEEWIEIRVAFEDYISNATHMLSRLEELQDILAKKELPQDLEGARNMIEEHSQLKKKVIKAPIEDLDLEGQKLLQRIQSSESFPKKNSGSGNADLQNLLPKVSTMLDRLHSTRQHLHQMWHVRKLKLDQCFQLRLFEQDAEKMFDWITHNKGLFLNSYTEIGTSHPHAMELQTQHNHFAMNCMNVYVNINRIMSVANRLVESGHYASQQIRQIASQLEQEWKAFAAALDERSTLLDMSSIFHQKAEKYMSNVDSWCKACGEVDLPSELQDLEDAIHHHQGIYEHITLAYSEVSQDGKSLLDKLQRPLTPGSSDSLTASANYSKAVHHVLDVIHEVLHHQRQLENIWQHRKVRLHQRLQLCVFQQDVQQVLDWIENHGEAFLSKHTGVGKSLHRARALQKRHEDFEEVAQNTYTNADKLLEAAEQLAQTGECDPEEIYQAAHQLEDRIQDFVRRVEQRKILLDMSVSFHTHVKELWTWLEELQKELLDDVYAESVEAVQDLIKRFGQQQQTTLQVTVNVIKEGEDLIQQLRDSAISSNKTPHNSSINHIETVLQQLDEAQSQMEELFQERKIKLELFLQLRIFERDAIDIISDLESWNDELSQQMNDFDTEDLTIAEQRLQHHADKALTMNNLTFDVIHQGQDLLQYVNEVQASGVELLCDRDVDMATRVQDLLEFLHEKQQELDLAAEQHRKHLEQCVQLRHLQAEVKQVLGWIRNGESMLNAGLITASSLQEAEQLQREHEQFQHAIEKTHQSALQVQQKAEAMLQANHYDMDMIRDCAEKVASHWQQLMLKMEDRLKLVNASVAFYKTSEQVCSVLESLEQEYKREEDWCGGADKLGPNSETDHVTPMISKHLEQKEAFLKACTLARRNADVFLKYLHRNSVNMPGMVTHIKAPEQQVKNILNELFQRENRVLHYWTMRKRRLDQCQQYVVFERSAKQALEWIHDNGEFYLSTHTSTGSSIQHTQELLKEHEEFQITAKQTKERVKLLIQLADGFCEKGHAHAAEIKKCVTAVDKRYRDFSLRMEKYRTSLEKALGISSDSNKSSKSLQLDIIPASIPGSEVKLRDAAHELNEEKRKSARRKEFIMAELIQTEKAYVRDLRECMDTYLWEMTSGVEEIPPGIVNKELIIFGNMQEIYEFHNNIFLKELEKYEQLPEDVGHCFVTWADKFQMYVTYCKNKPDSTQLILEHAGSYFDEIQQRHGLANSISSYLIKPVQRITKYQLLLKELLTCCEEGKGEIKDGLEVMLSVPKRANDAMHLSMLEGFDENIESQGELILQESFQVWDPKTLIRKGRERHLFLFEMSLVFSKEVKDSSGRSKYLYKSKLFTSELGVTEHVEGDPCKFALWVGRTPTSDNKIVLKASSIENKQDWIKHIREVIQERTIHLKGALKEPIHIPKTAPATRQKGRRDGEDLDSQGDGSSQPDTISIASRTSQNTLDSDKLSGGCELTVVIHDFTACNSNELTIRRGQTVEVLERPHDKPDWCLVRTTDRSPAAEGLVPCGSLCIAHSRSSMEMEGIFNHKDSLSVSSNDASPPASVASLQPHMIGAQSSPGPKRPGNTLRKWLTSPVRRLSSGKADGHVKKLAHKHKKSREVRKSADAGSQKDSDDSAATPQDETVEERGRNEGLSSGTLSKSSSSGMQSCGEEEGEEGADAVPLPPPMAIQQHSLLQPDSQDDKASSRLLVRPTSSETPSAAELVSAIEELVKSKMALEDRPSSLLVDQGDSSSPSFNPSDNSLLSSSSPIDEMEERKSSSLKRRHYVLQELVETERDYVRDLGYVVEGYMALMKEDGVPDDMKGKDKIVFGNIHQIYDWHRDFFLGELEKCLEDPEKLGSLFVKHERRLHMYIAYCQNKPKSEHIVSEYIDTFFEDLKQRLGHRLQLTDLLIKPVQRIMKYQLLLKDFLKYSKKASLDTSELERAVEVMCIVPRRCNDMMNVGRLQGFDGKIVAQGKLLLQDTFLVTDQDAGLLPRCRERRIFLFEQIVIFSEPLDKKKGFSMPGFLFKNSIKVSCLCLEENVENDPCKFALTSRTGDVVETFILHSSSPSVRQTWIHEINQILENQRNFLNALTSPIEYQRNHSGGGGGGGSGGSGGGGGSGGGGAPSGGSGHSGGPSSCGGAPSTSRSRPSRIPQPVRHHPPVLVSSAASSQAEADKMSGTSTPGPSLPPPGAAPEAGPSAPSRRPPGADAEGSEREAEPIPKMKVLESPRKGAANASGSSPDAPAKDARASLGTLPLGKPRAGAASPLNSPLSSAVPSLGKEPFPPSSPLQKGGSFWSSIPASPASRPGSFTFPGDSDSLQRQTPRHAAPGKDTDRMSTCSSASEQSVQSTQSNGSESSSSSNISTMLVTHDYTAVKEDEINVYQGEVVQILASNQQNMFLVFRAATDQCPAAEGWIPGFVLGHTSAVIVENPDGTLKKSTSWHTALRLRKKSEKKDKDGKREGKLENGYRKSREGLSNKVSVKLLNPNYIYDVPPEFVIPLSEVTCETGETVVLRCRVCGRPKASITWKGPEHNTLNNDGHYSISYSDLGEATLKIVGVTTEDDGIYTCIAVNDMGSASSSASLRVLGPGMDGIMVTWKDNFDSFYSEVAELGRGRFSVVKKCDQKGTKRAVATKFVNKKLMKRDQVTHELGILQSLQHPLLVGLLDTFETPTSYILVLEMADQGRLLDCVVRWGSLTEGKIRAHLGEVLEAVRYLHNCRIAHLDLKPENILVDESLAKPTIKLADFGDAVQLNTTYYIHQLLGNPEFAAPEIILGNPVSLTSDTWSVGVLTYVLLSGVSPFLDDSVEETCLNICRLDFSFPDDYFKGVSQKAKEFVCFLLQEDPAKRPSAALALQEQWLQAGNGRSTGVLDTSRLTSFIERRKHQNDVRPIRSIKNFLQSRLLPRV

SEQ ID NO: 92214 - protein, 2309 aa, Homo sapiens
  Payload ID: 18469
  Gene Name: trio Rho guanine nucleotide exchange factor
  ENSP ID: ENSP00000421555
MKAMDVLPILKEKVAYLSGGRDKRGGPILTFPARSNHDRIRQEDLRRLISYLACIPSEEVCKRGFTVIVDMRGSKWDSIKPLLKILQESFPCCIHVALIIKPDNFWQKQRTNFGSSKFEFETNMVSLEGLTKVVDPSQLTPEFDGCLEYNHEEWIEIRVAFEDYISNATHMLSRLEELQDILAKKELPQDLEGARNMIEEHSQLKKKVIKAPIEDLDLEGQKLLQRIQSSESFPKKNSGSGNADLQNLLPKVSTMLDRLHSTRQHLHQMWHVRKLKLDQCFQLRLFEQDAEKMFDWITHNKGLFLNSYTEIGTSHPHAMELQTQHNHFAMNCMNVYVNINRIMSVANRLVESGHYASQQIRQIASQLEQEWKAFAAALDERSTLLDMSSIFHQKAEKYMSNVDSWCKACGEVDLPSELQDLEDAIHHHQGIYEHITLAYSEVSQDGKSLLDKLQRPLTPGSSDSLTASANYSKAVHHVLDVIHEVLHHQRQLENIWQHRKVRLHQRLQLCVFQQDVQQVLDWIENHGEAFLSKHTGVGKSLHRARALQKRHEDFEEVAQNTYTNADKLLEAAEQLAQTGECDPEEIYQAAHQLEDRIQDFVRRVEQRKILLDMSVSFHTHVKELWTWLEELQKELLDDVYAESVEAVQDLIKRFGQQQQTTLQVTVNVIKEGEDLIQQLRDSAISSNKTPHNSSINHIETVLQQLDEAQSQMEELFQERKIKLELFLQLRIFERDAIDIISDLESWNDELSQQMNDFDTEDLTIAEQRLQHHADKALTMNNLTFDVIHQGQDLLQYVNEVQASGVELLCDRDVDMATRVQDLLEFLHEKQQELDLAAEQHRKHLEQCVQLRHLQAEVKQVLGWIRNGESMLNAGLITASSLQEAEQLQREHEQFQHAIEKTHQSALQVQQKAEAMLQANHYDMDMIRDCAEKVASHWQQLMLKMEDRLKLVNASVAFYKTSEQVCSVLESLEQEYKREEDWCGGADKLGPNSETDHVTPMISKHLEQKEAFLKACTLARRNADVFLKYLHRNSVNMPGMVTHIKAPEQQVKNILNELFQRENRVLHYWTMRKRRLDQCQQYVVFERSAKQALEWIHDNGEFYLSTHTSTGSSIQHTQELLKEHEEFQITAKQTKERVKLLIQLADGFCEKGHAHAAEIKKCVTAVDKRYRDFSLRMEKYRTSLEKALGISSDSNKSSKSLQLDIIPASIPGSEVKLRDAAHELNEEKRKSARRKEFIMAELIQTEKAYVRDLRECMDTYLWEMTSGVEEIPPGIVNKELIIFGNMQEIYEFHNNIFLKELEKYEQLPEDVGHCFVTWADKFQMYVTYCKNKPDSTQLILEHAGSYFDEIQQRHGLANSISSYLIKPVQRITKYQLLLKELLTCCEEGKGEIKDGLEVMLSVPKRANDAMHLSMLEGFDENIESQGELILQESFQVWDPKTLIRKGRERHLFLFEMSLVFSKEVKDSSGRSKYLYKSKLFTSELGVTEHVEGDPCKFALWVGRTPTSDNKIVLKASSIENKQDWIKHIREVIQERTIHLKGALKEPIHIPKTAPATRQKGRRDGEDLDSQGDGSSQPDTISIASRTSQNTLDSDKLSGGCELTVVIHDFTACNSNELTIRRGQTVEVLERPHDKPDWCLVRTTDRSPAAEGLVPCGSLCIAHSRSSMEMEGIFNHKDSLSVSSNDASPPASVASLQPHMIGAQSSPGPKRPGNTLRKWLTSPVRRLSSGKADGHVKKLAHKHKKSREVRKSADAGSQKDSDDSAATPQDETVEERGRNEGLSSGTLSKSSSSGMQSCGEEEGEEGADAVPLPPPMAIQQHSLLQPDSQDDKASSRLLVRPTSSETPSAAELVSAIEELVKSKMALEDRPSSLLVDQGDSSSPSFNPSDNSLLSSSSPIDEMEERKSSSLKRRHYVLQELVETERDYVRDLGYVVEGYMALMKEDGVPDDMKGKDKIVFGNIHQIYDWHRDFFLGELEKCLEDPEKLGSLFVKHERRLHMYIAYCQNKPKSEHIVSEYIDTFFEDLKQRLGHRLQLTDLLIKPVQRIMKYQLLLKDFLKYSKKASLDTSELERAVEVMCIVPRRCNDMMNVGRLQGFDGKIVAQGKLLLQDTFLVTDQDAGLLPRCRERRIFLFEQIVIFSEPLDKKKGFSMPGFLFKNSIKVSCLCLEENVENDPCKFALTSRTGDVVETFILHSSSPSVRQTWIHEINQILENQRNFLNALTSPIEYQRNHSGGGGGGGSGGSGGGGGSGGGGAPSGGSGHSGGPSSCGGAPSTSRSRPSRIPQPVRHHPPVLVSSAASSQAEADKMSE

SEQ ID NO: 92215 - protein, 2546 aa, Homo sapiens
  Payload ID: 18469
  Gene Name: trio Rho guanine nucleotide exchange factor
  ENSP ID: ENSP00000426342
IKAPIEDLDLEGQKLLQRIQSSESFPKKNSGSGNADLQNLLPKVSTMLDRLHSTRQHLHQMWHVRKLKLDQCFQLRLFEQDAEKMFDWITHNKGLFLNSYTEIGTSHPHAMELQTQHNHFAMNCMNVYVNINRIMSVANRLVESGHYASQQIRQIASQLEQEWKAFAAALDERSTLLDMSSIFHQKAEKYMSNVDSWCKACGEVDLPSELQDLEDAIHHHQGIYEHITLAYSEVSQDGKSLLDKLQRPLTPGSSDSLTASANYSKAVHHVLDVIHEVLHHQRQLENIWQHRKVRLHQRLQLCVFQQDVQQVLDWIENHGEAFLSKHTGVGKSLHRARALQKRHEDFEEVAQNTYTNADKLLEAAEQLAQTGECDPEEIYQAAHQLEDRIQDFVRRVEQRKILLDMSVSFHTHVKELWTWLEELQKELLDDVYAESVEAVQDLIKRFGQQQQTTLQVTVNVIKEGEDLIQQLRDSAISSNKTPHNSSINHIETVLQQLDEAQSQMEELFQERKIKLELFLQLRIFERDAIDIISDLESWNDELSQQMNDFDTEDLTIAEQRLQHHADKALTMNNLTFDVIHQGQDLLQYVNEVQASGVELLCDRDVDMATRVQDLLEFLHEKQQELDLAAEQHRKHLEQCVQLRHLQAEVKQVLGWIRNGESMLNAGLITASSLQEAEQLQREHEQFQHAIEKTHQSALQVQQKAEAMLQANHYDMDMIRDCAEKVASHWQQLMLKMEDRLKLVNASVAFYKTSEQVCSVLESLEQEYKREEDWCGGADKLGPNSETDHVTPMISKHLEQKEAFLKACTLARRNADVFLKYLHRNSVNMPGMVTHIKAPEQQVKNILNELFQRENRVLHYWTMRKRRLDQCQQYVVFERSAKQALEWIHDNGEFYLSTHTSTGSSIQHTQELLKEHEEFQITAKQTKERVKLLIQLADGFCEKGHAHAAEIKKCVTAVDKRYRDFSLRMEKYRTSLEKALGISSDSNKSSKSLQLDIIPASIPGSEVKLRDAAHELNEEKRKSARRKEFIMAELIQTEKAYVRDLRECMDTYLWEMTSGVEEIPPGIVNKELIIFGNMQEIYEFHNNIFLKELEKYEQLPEDVGHCFVTWADKFQMYVTYCKNKPDSTQLILEHAGSYFDEIQQRHGLANSISSYLIKPVQRITKYQLLLKELLTCCEEGKGEIKDGLEVMLSVPKRANDAMHLSMLEGFDENIESQGELILQESFQVWDPKTLIRKGRERHLFLFEMSLVFSKEVKDSSGRSKYLYKSKLFTSELGVTEHVEGDPCKFALWVGRTPTSDNKIVLKASSIENKQDWIKHIREVIQERTIHLKGALKEPIHIPKTAPATRQKGRRDGEDLDSQGDGSSQPDTISIASRTSQNTLDSDKLSGGCELTVVIHDFTACNSNELTIRRGQTVEVLERPHDKPDWCLVRTTDRSPAAEGLVPCGSLCIAHSRSSMEMEGIFNHKDSLSVSSNDASPPASVASLQPHMIGAQSSPGPKRPGNTLRKWLTSPVRRLSSGKADGHVKKLAHKHKKSREVRKSADAGSQKDSDDSAATPQDETVEERGRNEGLSSGTLSKSSSSGMQSCGEEEGEEGADAVPLPPPMAIQQHSLLQPDSQDDKASSRLLVRPTSSETPSAAELVSAIEELVKSKMALEDRPSSLLVDQGDSSSPSFNPSDNSLLSSSSPIDEMEERKSSSLKRRHYVLQELVETERDYVRDLGYVVEGYMALMKEDGVPDDMKGKDKIVFGNIHQIYDWHRDFFLGELEKCLEDPEKLGSLFVKHERRLHMYIAYCQNKPKSEHIVSEYIDTFFEDLKQRLGHRLQLTDLLIKPVQRIMKYQLLLKDFLKYSKKASLDTSELERAVEVMCIVPRRCNDMMNVGRLQGFDGKIVAQGKLLLQDTFLVTDQDAGLLPRCRERRIFLFEQIVIFSEPLDKKKGFSMPGFLFKNSIKVSCLCLEENVENDPCKFALTSRTGDVVETFILHSSSPSVRQTWIHEINQILENQRNFLNALTSPIEYQRNHSGGGGGGGSGGSGGGGGSGGGGAPSGGSGHSGGPSSCGGAPSTSRSRPSRIPQPVRHHPPVLVSSAASSQAEADKMSGTSTPGPSLPPPGAAPEAGPSAPSRRPPGADAEGSEREAEPIPKMKVLESPRKGAANASGSSPDAPAKDARASLGTLPLGKPRAGAASPLNSPLSSAVPSLGKEPFPPSSPLQKGGSFWSSIPASPASRPGSFTFPGDSDSLQRQTPRHAAPGKDTDRMSTCSSASEQSVQSTQSNGSESSSSSNISTMLVTHDYTAVKEDEINVYQGEVVQILASNQQNMFLVFRAATDQCPAAEGWIPGFVLGHTSAVIVENPDGTLKKSTSWHTALRLRKKSEKKDKDGKREGKLENGYRKSREGLSNKVSVKLLNPNYIYDVPPEFVIPLSEVTCETGETVVLRCRVCGRPKASITWKGPEHNTLNNDGHYSISYSDLGEATLKIVGVTTEDDGIYTCIAVNDMGSASSSASLRVLGPGMDGIMVTWKDNFDSFYSEVAELGRANWNNWSPY

SEQ ID NO: 92216 - protein, 1508 aa, Homo sapiens
  Payload ID: 18469
  Gene Name: trio Rho guanine nucleotide exchange factor
  ENSP ID: ENSP00000445592
MAEGFRKNDEMKAMDVLPILKEKVAYLSGGRDKRGGPILTFPARSNHDRIRQEDLRRLISYLACIPSEEVCKRGFTVIVDMRGSKWDSIKPLLKILQESFPCCIHVALIIKPDNFWQKQRTNFGSSKFEFETNMVSLEGLTKVVDPSQLTPEFDGCLEYNHEEWIEIRVAFEDYISNATHMLSRLEELQDILAKKELPQDLEGARNMIEEHSQLKKKVIKAPIEDLDLEGQKLLQRIQSSESFPKKNSGSGNADLQNLLPKVSTMLDRLHSTRQHLHQMWHVRKLKLDQCFQLRLFEQDAEKMFDWITHNKGLFLNSYTEIGTSHPHAMELQTQHNHFAMNCMNVYVNINRIMSVANRLVESGHYASQQIRQIASQLEQEWKAFAAALDERSTLLDMSSIFHQKAEKYMSNVDSWCKACGEVDLPSELQDLEDAIHHHQGIYEHITLAYSEVSQDGKSLLDKLQRPLTPGSSDSLTASANYSKAVHHVLDVIHEVLHHQRQLENIWQHRKVRLHQRLQLCVFQQDVQQVLDWIENHGEAFLSKHTGVGKSLHRARALQKRHEDFEEVAQNTYTNADKLLEAAEQLAQTGECDPEEIYQAAHQLEDRIQDFVRRVEQRKILLDMSVSFHTHVKELWTWLEELQKELLDDVYAESVEAVQDLIKRFGQQQQTTLQVTVNVIKEGEDLIQQLRDSAISSNKTPHNSSINHIETVLQQLDEAQSQMEELFQERKIKLELFLQLRIFERDAIDIISDLESWNDELSQQMNDFDTEDLTIAEQRLQHHADKALTMNNLTFDVIHQGQDLLQYVNEVQASGVELLCDRDVDMATRVQDLLEFLHEKQQELDLAAEQHRKHLEQCVQLRHLQAEVKQVLGWIRNGESMLNAGLITASSLQEAEQLQREHEQFQHAIEKTHQSALQVQQKAEAMLQANHYDMDMIRDCAEKVASHWQQLMLKMEDRLKLVNASVAFYKTSEQVCSVLESLEQEYKREEDWCGGADKLGPNSETDHVTPMISKHLEQKEAFLKACTLARRNADVFLKYLHRNSVNMPGMVTHIKAPEQQVKNILNELFQRENRVLHYWTMRKRRLDQCQQYVVFERSAKQALEWIHDNGEFYLSTHTSTGSSIQHTQELLKEHEEFQITAKQTKERVKLLIQLADGFCEKGHAHAAEIKKCVTAVDKRYRDFSLRMEKYRTSLEKALGISSDSNKSSKSLQLDIIPASIPGSEVKLRDAAHELNEEKRKSARRKEFIMAELIQTEKAYVRDLRECMDTYLWEMTSGVEEIPPGIVNKELIIFGNMQEIYEFHNNIFLKELEKYEQLPEDVGHCFVTWADKFQMYVTYCKNKPDSTQLILEHAGSYFDEIQQRHGLANSISSYLIKPVQRITKYQLLLKELLTCCEEGKGEIKDGLEVMLSVPKRANDAMHLSMLEGFDENIESQGELILQESFQVWDPKTLIRKGRERHLFLFEMSLVFSKEVKDSSGRSKYLYKSKLFVSIGVQNCKSKGNTIAVFL

SEQ ID NO: 92217 - protein, 255 aa, Homo sapiens
  Payload ID: 18469
  Gene Name: trio Rho guanine nucleotide exchange factor
  ENSP ID: ENSP00000483869
MALEDRPSSLLVDQGDSSSPSFNPSDNSLLSSSSPIDEMEERKSSSLKRRHYVLQELVETERDYVRDLGYVVEGYMALMKEDGVPDDMKGKDKIVFGNIHQIYDWHRDFFLGELEKCLEDPEKLGSLFVKHERRLHMYIAYCQNKPKSEHIVSEYIDTFFEDLKQRLGHRLQLTDLLIKPVQRIMKYQLLLKDFLKYSKKASLDTSELERAVEVMCIVPRRCNDMMNVGRLQGFDGRVVALCHRFKETFREICWF

SEQ ID NO: 92218 - protein, 575 aa, Homo sapiens
  Payload ID: 18470
  Gene Name: triokinase/FMN cyclase
  Uniprot ID: Q3LXA3
  ENSP ID: ENSP00000378360
MTSKKLVNSVAGCADDALAGLVACNPNLQLLQGHRVALRSDLDSLKGRVALLSGGGSGHEPAHAGFIGKGMLTGVIAGAVFTSPAVGSILAAIRAVAQAGTVGTLLIVKNYTGDRLNFGLAREQARAEGIPVEMVVIGDDSAFTVLKKAGRRGLCGTVLIHKVAGALAEAGVGLEEIAKQVNVVAKAMGTLGVSLSSCSVPGSKPTFELSADEVELGLGIHGEAGVRRIKMATADEIVKLMLDHMTNTTNASHVPVQPGSSVVMMVNNLGGLSFLELGIIADATVRSLEGRGVKIARALVGTFMSALEMPGISLTLLLVDEPLLKLIDAETTAAAWPNVAAVSITGRKRSRVAPAEPQEAPDSTAAGGSASKRMALVLERVCSTLLGLEEHLNALDRAAGDGDCGTTHSRAARAIQEWLKEGPPPASPAQLLSKLSVLLLEKMGGSSGALYGLFLTAAAQPLKAKTSLPAWSAAMDAGLEAMQKYGKAAPGDRTMLDSLWAAGQELQAWKSPGADLLQVLTKAVKSAEAAAEATKNMEAGAGRASYISSARLEQPDPGAVAAAAILRAILEVLQS

SEQ ID NO: 92219 - protein, 162 aa, Homo sapiens
  Payload ID: 18470
  Gene Name: triokinase/FMN cyclase
  ENSP ID: ENSP00000431844
MTSKKLVNSVAGCADDALAGLVACNPNLQLLQGHRVALRSDLDSLKGRVALLSGGGSGHEPAHAGFIGKGMLTGVIAGAVFTSPAVGSILAAIRAVAQAGTVGTLLIVKNYTGDRLNFGLAREQARAEGIPVEMVVIGDDSAFTVLKKAGRRGLCGTVLIHK

SEQ ID NO: 92220 - protein, 533 aa, Homo sapiens
  Payload ID: 18470
  Gene Name: triokinase/FMN cyclase
  ENSP ID: ENSP00000432539
TSKKLVNSVAGCADDALAGLVACNPNLQLLQGHRVALRSDLDSLKGRVALLSGGGSGHEPAHAGFIGKGMLTGVIAGAVFTSPAVGSILAAIRAVAQAGTVGTLLIVKNYTGDRLNFGLAREQARAEGIPVEMVVIGDDSAFTVLKKAGRRGLCGTVLIHKVAGALAEAGVGLEEIAKQVNVVAKAMGTLGVSLSSCSVPGSKPTFELSADEVELGLGIHGEAGVRRIKMATADEIVKLMLDHMTNTTNASHVPVQPGSSVVMMVNNLGGLSFLELGIIADATVRSLEGRGVKIARALVGTFMSALEMPGISLTLLLVDEPLLKLIDAETTAAAWPNVAAVSITGRKRSRVAPAEPQEAPDSTAAGGSASKRMALVLERVCSTLLGLEEHLNALDRAAGDGDCGTTHSRAARAIQEWLKEGPPPASPAQLLSKLSVLLLEKMGGSSGALYGLFLTAAAQPLKAKTSLPAWSAAMDAGLEAMQKYGKAAPGDRTMLDSLWAAGQELQAWKSPGADLLQVLTKAVKEGGGLVICP

SEQ ID NO: 92221 - protein, 57 aa, Homo sapiens
  Payload ID: 18470
  Gene Name: triokinase/FMN cyclase
  ENSP ID: ENSP00000434405
MTSKKLVNSVAGCADDALAGLVACNPNLQLLQGHRVALRSDLDSLKGRVALLSGGGS

SEQ ID NO: 92222 - protein, 219 aa, Homo sapiens
  Payload ID: 18470
  Gene Name: triokinase/FMN cyclase
  ENSP ID: ENSP00000459382
SRVAPAEPQEAPDSTAAGGSASKRMALVLERVCSTLLGLEEHLNALDRAAGDGDCGTTHSRAARAIQEWLKEGPPPASPAQLLSKLSVLLLEKMGGSSGALYGLFLTAAAQPLKAKTSLPAWSAAMDAGLEAMQKYGKAAPGDRTMLDSLWAAGQELQAWKSPGADLLQVLTKAVKIRSGPNPKISPPLGESCDHRVYLLKTLFPPLHLRVGDPTALTN

SEQ ID NO: 92223 - protein, 576 aa, Homo sapiens
  Payload ID: 18470
  Gene Name: triokinase/FMN cyclase
  ENSP ID: ENSP00000478735
LQTSKKLVNSVAGCADDALAGLVACNPNLQLLQGHRVALRSDLDSLKGRVALLSGGGSGHEPAHAGFIGKGMLTGVIAGAVFTSPAVGSILAAIRAVAQAGTVGTLLIVKNYTGDRLNFGLAREQARAEGIPVEMVVIGDDSAFTVLKKAGRRGLCGTVLIHKVAGALAEAGVGLEEIAKQVNVVAKAMGTLGVSLSSCSVPGSKPTFELSADEVELGLGIHGEAGVRRIKMATADEIVKLMLDHMTNTTNASHVPVQPGSSVVMMVNNLGGLSFLELGIIADATVRSLEGRGVKIARALVGTFMSALEMPGISLTLLLVDEPLLKLIDAETTAAAWPNVAAVSITGRKRSRVAPAEPQEAPDSTAAGGSASKRMALVLERVCSTLLGLEEHLNALDRAAGDGDCGTTHSRAARAIQEWLKEGPPPASPAQLLSKLSVLLLEKMGGSSGALYGLFLTAAAQPLKAKTSLPAWSAAMDAGLEAMQKYGKAAPGDRTMLDSLWAAGQELQAWKSPGADLLQVLTKAVKSAEAAAEATKNMEAGAGRASYISSARLEQPDPGAVAAAAILRAILEVLQS

SEQ ID NO: 92224 - protein, 286 aa, Homo sapiens
  Payload ID: 18471
  Gene Name: triosephosphate isomerase 1
  Uniprot ID: P60174
  ENSP ID: ENSP00000229270
MAEDGEEAEFHFAALYISGQWPRLRADTDLQRLGSSAMAPSRKFFVGGNWKMNGRKQSLGELIGTLNAAKVPADTEVVCAPPTAYIDFARQKLDPKIAVAAQNCYKVTNGAFTGEISPGMIKDCGATWVVLGHSERRHVFGESDELIGQKVAHALAEGLGVIACIGEKLDEREAGITEKVVFEQTKVIADNVKDWSKVVLAYEPVWAIGTGKTATPQQAQEVHEKLRGWLKSNVSDAVAQSTRIIYGGSVTGATCKELASQPDVDGFLVGGASLKPEFVDIINAKQ

SEQ ID NO: 92225 - protein, 249 aa, Homo sapiens
  Payload ID: 18471
  Gene Name: triosephosphate isomerase 1
  Uniprot ID: P60174
  ENSP ID: ENSP00000379933
MAPSRKFFVGGNWKMNGRKQSLGELIGTLNAAKVPADTEVVCAPPTAYIDFARQKLDPKIAVAAQNCYKVTNGAFTGEISPGMIKDCGATWVVLGHSERRHVFGESDELIGQKVAHALAEGLGVIACIGEKLDEREAGITEKVVFEQTKVIADNVKDWSKVVLAYEPVWAIGTGKTATPQQAQEVHEKLRGWLKSNVSDAVAQSTRIIYGGSVTGATCKELASQPDVDGFLVGGASLKPEFVDIINAKQ

SEQ ID NO: 92226 - protein, 167 aa, Homo sapiens
  Payload ID: 18471
  Gene Name: triosephosphate isomerase 1
  Uniprot ID: P60174
  ENSP ID: ENSP00000443599
MIKDCGATWVVLGHSERRHVFGESDELIGQKVAHALAEGLGVIACIGEKLDEREAGITEKVVFEQTKVIADNVKDWSKVVLAYEPVWAIGTGKTATPQQAQEVHEKLRGWLKSNVSDAVAQSTRIIYGGSVTGATCKELASQPDVDGFLVGGASLKPEFVDIINAKQ

SEQ ID NO: 92227 - protein, 38 aa, Homo sapiens
  Payload ID: 18471
  Gene Name: triosephosphate isomerase 1
  ENSP ID: ENSP00000475184
MIKDCGATWVVLGHSERRHVFGESDELIGQKVAHALAE

SEQ ID NO: 92228 - protein, 113 aa, Homo sapiens
  Payload ID: 18471
  Gene Name: triosephosphate isomerase 1
  ENSP ID: ENSP00000475364
MIKDCGATWVVLGHSERRHVFGESDELIGQKVAHALAEGLGVIACIGEKLDEREAGITEKVVFEQTKVIADNVKDWSKVVLAYEPVWAIGTGKTATPQQAQEVHEKLRGWLKS

SEQ ID NO: 92229 - protein, 167 aa, Homo sapiens; identical to SEQ ID NO: 92226
  Payload ID: 18471
  Gene Name: triosephosphate isomerase 1
  Uniprot ID: P60174
  ENSP ID: ENSP00000475620

SEQ ID NO: 92230 - protein, 98 aa, Homo sapiens
  Payload ID: 18471
  Gene Name: triosephosphate isomerase 1
  ENSP ID: ENSP00000475829
MIKDCGATWVVLGHSERRHVFGESDELIGQKVAHALAEGLGVIACIGEKLDEREAGITEKVVFEQTKVIADNVKDWSKVVLAYEPVWAIGTGKTATPQ

SEQ ID NO: 92231 - protein, 286 aa, Homo sapiens; identical to SEQ ID NO: 92224
  Payload ID: 18471
  Gene Name: triosephosphate isomerase 1
  Uniprot ID: P60174
  ENSP ID: ENSP00000484435

SEQ ID NO: 92232 - protein, 395 aa, Homo sapiens
  Payload ID: 18472
  Gene Name: tripartite motif containing 10
  Uniprot ID: Q9UDY6
  ENSP ID: ENSP00000259941
MASAASVTSLADEVNCPICQGTLREPVTIDCGHNFCRACLTRYCEIPGPDLEESPTCPLCKEPFRPGSFRPNWQLANVVENIERLQLVSTLGLGEEDVCQEHGEKIYFFCEDDEMQLCVVCREAGEHATHTMRFLEDAAAPYREQIHKCLKCLRKEREEIQEIQSRENKRMQVLLTQVSTKRQQVISEFAHLRKFLEEQQSILLAQLESQDGDILRQRDEFDLLVAGEICRFSALIEELEEKNERPARELLTDIRSTLIRCETRKCRKPVAVSPELGQRIRDFPQQALPLQREMKMFLEKLCFELDYEPAHISLDPQTSHPKLLLSEDHQRAQFSYKWQNSPDNPQRFDRATCVLAHTGITGGRHTWVWMARVPGDSGCCQFCSPPSVLGTEVAA

SEQ ID NO: 92233 - protein, 481 aa, Homo sapiens
  Payload ID: 18472
  Gene Name: tripartite motif containing 10
  Uniprot ID: Q9UDY6
  ENSP ID: ENSP00000343695
MASAASVTSLADEVNCPICQGTLREPVTIDCGHNFCRACLTRYCEIPGPDLEESPTCPLCKEPFRPGSFRPNWQLANVVENIERLQLVSTLGLGEEDVCQEHGEKIYFFCEDDEMQLCVVCREAGEHATHTMRFLEDAAAPYREQIHKCLKCLRKEREEIQEIQSRENKRMQVLLTQVSTKRQQVISEFAHLRKFLEEQQSILLAQLESQDGDILRQRDEFDLLVAGEICRFSALIEELEEKNERPARELLTDIRSTLIRCETRKCRKPVAVSPELGQRIRDFPQQALPLQREMKMFLEKLCFELDYEPAHISLDPQTSHPKLLLSEDHQRAQFSYKWQNSPDNPQRFDRATCVLAHTGITGGRHTWVVSIDLAHGGSCTVGVVSEDVQRKGELRLRPEEGVWAVRLAWGFVSALGSFPTRLTLKEQPRQVRVSLDYEVGWVTFTNAVTREPIYTFTASFTRKVIPFFGLWGRGSSFSLSS

SEQ ID NO: 92234 - protein, 395 aa, Homo sapiens; identical to SEQ ID NO: 92232
  Payload ID: 18472
  Gene Name: tripartite motif containing 10
  Uniprot ID: Q9UDY6
  ENSP ID: ENSP00000365894

SEQ ID NO: 92235 - protein, 481 aa, Homo sapiens; identical to SEQ ID NO: 92233
  Payload ID: 18472
  Gene Name: tripartite motif containing 10
  Uniprot ID: Q9UDY6
  ENSP ID: ENSP00000390497

SEQ ID NO: 92236 - protein, 481 aa, Homo sapiens; identical to SEQ ID NO: 92233
  Payload ID: 18472
  Gene Name: tripartite motif containing 10
  Uniprot ID: Q9UDY6
  ENSP ID: ENSP00000391445

SEQ ID NO: 92237 - protein, 395 aa, Homo sapiens; identical to SEQ ID NO: 92232
  Payload ID: 18472
  Gene Name: tripartite motif containing 10
  Uniprot ID: Q9UDY6
  ENSP ID: ENSP00000393576

SEQ ID NO: 92238 - protein, 395 aa, Homo sapiens; identical to SEQ ID NO: 92232
  Payload ID: 18472
  Gene Name: tripartite motif containing 10
  Uniprot ID: Q9UDY6
  ENSP ID: ENSP00000393787

SEQ ID NO: 92239 - protein, 395 aa, Homo sapiens; identical to SEQ ID NO: 92232
  Payload ID: 18472
  Gene Name: tripartite motif containing 10
  Uniprot ID: Q9UDY6
  ENSP ID: ENSP00000393976

SEQ ID NO: 92240 - protein, 481 aa, Homo sapiens; identical to SEQ ID NO: 92233
  Payload ID: 18472
  Gene Name: tripartite motif containing 10
  Uniprot ID: Q9UDY6
  ENSP ID: ENSP00000395598

SEQ ID NO: 92241 - protein, 481 aa, Homo sapiens; identical to SEQ ID NO: 92233
  Payload ID: 18472
  Gene Name: tripartite motif containing 10
  Uniprot ID: Q9UDY6
  ENSP ID: ENSP00000397073

SEQ ID NO: 92242 - protein, 481 aa, Homo sapiens; identical to SEQ ID NO: 92233
  Payload ID: 18472
  Gene Name: tripartite motif containing 10
  Uniprot ID: Q9UDY6
  ENSP ID: ENSP00000397440

SEQ ID NO: 92243 - protein, 395 aa, Homo sapiens; identical to SEQ ID NO: 92232
  Payload ID: 18472
  Gene Name: tripartite motif containing 10
  Uniprot ID: Q9UDY6
  ENSP ID: ENSP00000398404

SEQ ID NO: 92244 - protein, 481 aa, Homo sapiens; identical to SEQ ID NO: 92233
  Payload ID: 18472
  Gene Name: tripartite motif containing 10
  Uniprot ID: Q9UDY6
  ENSP ID: ENSP00000399446

SEQ ID NO: 92245 - protein, 395 aa, Homo sapiens; identical to SEQ ID NO: 92232
  Payload ID: 18472
  Gene Name: tripartite motif containing 10
  Uniprot ID: Q9UDY6
  ENSP ID: ENSP00000405578

SEQ ID NO: 92246 - protein, 481 aa, Homo sapiens; identical to SEQ ID NO: 92233
  Payload ID: 18472
  Gene Name: tripartite motif containing 10
  Uniprot ID: Q9UDY6
  ENSP ID: ENSP00000410849

SEQ ID NO: 92247 - protein, 395 aa, Homo sapiens; identical to SEQ ID NO: 92232
  Payload ID: 18472
  Gene Name: tripartite motif containing 10
  Uniprot ID: Q9UDY6
  ENSP ID: ENSP00000412370

SEQ ID NO: 92248 - protein, 468 aa, Homo sapiens
  Payload ID: 18473
  Gene Name: tripartite motif containing 11
  Uniprot ID: Q96F44
  ENSP ID: ENSP00000284551
MAAPDLSTNLQEEATCAICLDYFTDPVMTDCGHNFCRECIRRCWGQPEGPYACPECRELSPQRNLRPNRPLAKMAEMARRLHPPSPVPQGVCPAHREPLAAFCGDELRLLCAACERSGEHWAHRVRPLQDAAEDLKAKLEKSLEHLRKQMQDALLFQAQADETCVLWQKMVESQRQNVLGEFERLRRLLAEEEQQLLQRLEEEELEVLPRLREGAAHLGQQSAHLAELIAELEGRCQLPALGLLQDIKDALRRVQDVKLQPPEVVPMELRTVCRVPGLVETLRRFRGDVTLDPDTANPELILSEDRRSVQRGDLRQALPDSPERFDPGPCVLGQERFTSGRHYWEVEVGDRTSWALGVCRENVNRKEKGELSAGNGFWILVFLGSYYNSSERALAPLRDPPRRVGIFLDYEAGHLSFYSATDGSLLFIFPEIPFSGTLRPLFSPLSSSPTPMTICRPKGGSGDTLAPQ

SEQ ID NO: 92249 - protein, 385 aa, Homo sapiens
  Payload ID: 18473
  Gene Name: tripartite motif containing 11
  Uniprot ID: Q96F44
  ENSP ID: ENSP00000355660
MAAPDLSTNLQEEATCAICLDYFTDPVMTDCGHNFCRECIRRCWGQPEGPYACPECRELSPQRNLRPNRPLAKMAEMARRLHPPSPVPQGVCPAHREPLAAFCGDELRLLCAACERSGEHWAHRVRPLQDAAEDLKAKLEKSLEHLRKQMQDALLFQAQADETCVLWQKMVESQRQNVLGEFERLRRLLAEEEQQLLQRLEEEELEVLPRLREGAAHLGQQSAHLAELIAELEGRCQLPALGLLQDIKDALRRVQDVKLQPPEVVPMELRTVCRVPGLVETLRRFRGRCGGPRWGDDSRRGPAKDLGSQPRVLCPATASSKLTVSWWWVVGKTSSAHTSDISCVGIFTPNNSSTSGNELGIQGFHSALNRIASADTTGVSTDPTD

SEQ ID NO: 92250 - protein, 343 aa, Homo sapiens
  Payload ID: 18473
  Gene Name: tripartite motif containing 11
  ENSP ID: ENSP00000473360
MSHGPAWPLPQAKLEKSLEHLRKQMQDALLFQAQADETCVLWQKMVESQRQNVLGEFERLRRLLAEEEQQLLQRLEEEELEVLPRLREGAAHLGQQSAHLAELIAELEGRCQLPALGLLQDIKDALRRVQDVKLQPPEVVPMELRTVCRVPGLVETLRRFRGDVTLDPDTANPELILSEDRRSVQRGDLRQALPDSPERFDPGPCVLGQERFTSGRHYWEVEVGDRTSWALGVCRENVNRKEKGELSAGNGFWILVFLGSYYNSSERALAPLRDPPRRVGIFLDYEAGHLSFYSATDGSLLFIFPEIPFSGTLRPLFSPLSSSPTPMTICRPKGGSGDTLAPQ

SEQ ID NO: 92251 - protein, 228 aa, Homo sapiens
  Payload ID: 18473
  Gene Name: tripartite motif containing 11
  ENSP ID: ENSP00000473574
  MOD_RES (1)..(1): Any amino acid
XRPLQDAAEDLKAKLEKSLEHLRKQMQDALLFQAQADETCVLWQDIKDALRRVQDVKLQPPEVVPMELRTVCRVPGLVETLRRFRGDVTLDPDTANPELILSEDRRSVQRGDLRQALPDSPERFDPGPCVLGQERFTSGRHYWEVEVGDRTSWALGVCRENVNRKEKGELSAGNGFWILVFLGSYYNSSERALAPLRDPPRRVGIFLDYEAGHLSFYSATDGSLLFIF

SEQ ID NO: 92252 - protein, 54 aa, Homo sapiens
  Payload ID: 18473
  Gene Name: tripartite motif containing 11
  ENSP ID: ENSP00000473579
RPLQDAAEDLKDIKDALRRYEPSLSWRGGRREWGGTQLLAMATTPGLSPLGSRM

SEQ ID NO: 92253 - protein, 410 aa, Homo sapiens
  Payload ID: 18474
  Gene Name: tripartite motif containing 13
  Uniprot ID: O60858
  ENSP ID: ENSP00000348299
MDVMELLEEDLTCPICCSLFDDPRVLPCSHNFCKKCLEGILEGSVRNSLWRPAPFKCPTCRKETSATGINSLQVNYSLKGIVEKYNKIKISPKMPVCKGHLGQPLNIFCLTDMQLICGICATRGEHTKHVFCSIEDAYAQERDAFESLFQSFETWRRGDALSRLDTLETSKRKSLQLLTKDSDKVKEFFEKLQHTLDQKKNEILSDFETMKLAVMQAYDPEINKLNTILQEQRMAFNIAEAFKDVSEPIVFLQQMQEFREKIKVIKETPLPPSNLPASPLMKNFDTSQWEDIKLVDVDKLSLPQDTGTFISKIPWSFYKLFLLILLLGLVIVFGPTMFLEWSLFDDLATWKGCLSNFSSYLTKTADFIEQSVFYWEQVTDGFFIFNERFKNFTLVVLNNVAEFVCKYKLL

SEQ ID NO: 92254 - protein, 407 aa, Homo sapiens
  Payload ID: 18474
  Gene Name: tripartite motif containing 13
  Uniprot ID: O60858
  ENSP ID: ENSP00000367424
MELLEEDLTCPICCSLFDDPRVLPCSHNFCKKCLEGILEGSVRNSLWRPAPFKCPTCRKETSATGINSLQVNYSLKGIVEKYNKIKISPKMPVCKGHLGQPLNIFCLTDMQLICGICATRGEHTKHVFCSIEDAYAQERDAFESLFQSFETWRRGDALSRLDTLETSKRKSLQLLTKDSDKVKEFFEKLQHTLDQKKNEILSDFETMKLAVMQAYDPEINKLNTILQEQRMAFNIAEAFKDVSEPIVFLQQMQEFREKIKVIKETPLPPSNLPASPLMKNFDTSQWEDIKLVDVDKLSLPQDTGTFISKIPWSFYKLFLLILLLGLVIVFGPTMFLEWSLFDDLATWKGCLSNFSSYLTKTADFIEQSVFYWEQVTDGFFIFNERFKNFTLVVLNNVAEFVCKYKLL

SEQ ID NO: 92255 - protein, 266 aa, Homo sapiens
  Payload ID: 18474
  Gene Name: tripartite motif containing 13
  ENSP ID: ENSP00000367425
MELLEEDLTCPICCSLFDDPRVLPCSHNFCKKCLEGILEGSVRNSLWRPAPFKCPTCRKETSATGINSLQVNYSLKGIVEKYNKIKISPKMPVCKGHLGQPLNIFCLTDMQLICGICATRGEHTKHVFCSIEDAYAQERDAFESLFQSFETWRRGDALSRLDTLETSKRKSLQLLTKDSDKVKEFFEKLQHTLDQKKNEILSDFETMKLAVMQAYDPEINKLNTILQEQRMAFNIAEAFKDVSEPIVFLQQMQEFREKIKVIKETP

SEQ ID NO: 92256 - protein, 407 aa, Homo sapiens; identical to SEQ ID NO: 92254
  Payload ID: 18474
  Gene Name: tripartite motif containing 13
  Uniprot ID: O60858
  ENSP ID: ENSP00000399206

SEQ ID NO: 92257 - protein, 129 aa, Homo sapiens
  Payload ID: 18474
  Gene Name: tripartite motif containing 13
  ENSP ID: ENSP00000404586
MELLEEDLTCPICCSLFDDPRVLPCSHNFCKKCLEGILEGSVRNSLWRPAPFKCPTCRKETSATGINSLQVNYSLKGIVEKYNKIKISPKMPVCKGHLGQPLNIFCLTDMQLICGICATRGEHTKHVFC

SEQ ID NO: 92258 - protein, 407 aa, Homo sapiens; identical to SEQ ID NO: 92254
  Payload ID: 18474
  Gene Name: tripartite motif containing 13
  Uniprot ID: O60858
  ENSP ID: ENSP00000412943

SEQ ID NO: 92259 - protein, 442 aa, Homo sapiens
  Payload ID: 18475
  Gene Name: tripartite motif containing 14
  Uniprot ID: Q14142
  ENSP ID: ENSP00000343990
MAGAATGSRTPGRSELVEGCGWRCPEHGDRVAELFCRRCRRCVCALCPVLGAHRGHPVGLALEAAVHVQKLSQECLKQLAIKKQQHIDNITQIEDATEKLKANAESSKTWLKGKFTELRLLLDEEEALAKKFIDKNTQLTLQVYREQADSCREQLDIMNDLSNRVWSISQEPDPVQRLQAYTATEQEMQQQMSLGELCHPVPLSFEPVKSFFKGLVEAVESTLQTPLDIRLKESINCQLSDPSSTKPGTLLKTSPSPERSLLLKYARTPTLDPDTMHARLRLSADRLTVRCGLLGSLGPVPVLRFDALWQVLARDCFATGRHYWEVDVQEAGAGWWVGAAYASLRRRGASAAARLGCNRQSWCLKRYDLEYWAFHDGQRSRLRPRDDLDRLGVFLDYEAGVLAFYDVTGGMSHLHTFRATFQEPLYPALRLWEGAISIPRLP

SEQ ID NO: 92260 - protein, 442 aa, Homo sapiens; identical to SEQ ID NO: 92259
  Payload ID: 18475
  Gene Name: tripartite motif containing 14
  Uniprot ID: Q14142
  ENSP ID: ENSP00000344208

SEQ ID NO: 92261 - protein, 442 aa, Homo sapiens; identical to SEQ ID NO: 92259
  Payload ID: 18475
  Gene Name: tripartite motif containing 14
  Uniprot ID: Q14142
  ENSP ID: ENSP00000364239

SEQ ID NO: 92262 - protein, 110 aa, Homo sapiens
  Payload ID: 18475
  Gene Name: tripartite motif containing 14
  ENSP ID: ENSP00000428805
MAGAATGSRTPGRSELVEGCGWRCPEHGDRVAELFCRRCRRCVCALCPVLGAHRGHPVGLALEAAVHVQGLEYQPGARSCPEASGIHGHRAGDAAADEPRGAVPSRAPLL

SEQ ID NO: 92263 - protein, 465 aa, Homo sapiens [sequence omitted]

SEQ ID NO: 92264 - protein, 115 aa, Homo sapiens
  Payload ID: 18476
  Gene Name: tripartite motif containing 15
  Uniprot ID: Q9C019
  ENSP ID: ENSP00000365878
MPATPSLKVVHELPACTLCAGPLEDAVTIPCGHTFCRLCLPALSQMGAQSSGKILLCPLCQEEEQAETPMAPVPLGPLGETYCEEHGEKIYFFCENDAEFLCTSECRTTDGFGCA

SEQ ID NO: 92265 - protein, 465 aa, Homo sapiens [sequence omitted]

SEQ ID NO: 92266 - protein, 164 aa, Homo sapiens
  Payload ID: 18476
  Gene Name: tripartite motif containing 15
  ENSP ID: ENSP00000389858
  MOD_RES (1)..(1): Any amino acid
XKKHQVETAFERLQQELEQQRCLLLARLRELEQQIWKERDEYITKVSEEVTRLGAQVKELEEKCQQPASELLQDVRVNQSRCEMKTFVSPEAISPDLVKKIRDFHRKILTLPEMMRMFSENLAHHLEIDSDRQPEPGSLGRQEVSEVHPAEEEPARQPPALRRP

SEQ ID NO: 92267 - protein, 164 aa, Homo sapiens; identical to SEQ ID NO: 92266
  Payload ID: 18476
  Gene Name: tripartite motif containing 15
  ENSP ID: ENSP00000391673
  MOD_RES (1)..(1): Any amino acid

SEQ ID NO: 92268 - protein, 164 aa, Homo sapiens; identical to SEQ ID NO: 92266
  Payload ID: 18476
  Gene Name: tripartite motif containing 15
  ENSP ID: ENSP00000392768
  MOD_RES (1)..(1): Any amino acid

SEQ ID NO: 92269 - protein, 465 aa, Homo sapiens
  Payload ID: 18476
  Gene Name: tripartite motif containing 15
  ENSP ID: ENSP00000398224
MPATPSLKVVHELPACTLCAGPLEDAVTIPCGHTFCRLCLPALSQMGAQSSGKILLCPLCQEEEQAETPMAPVPLGPLGETYCEEHGEKIYFFCENDAEFLCVFCREGPTHQAHTVGFLDEAIQPYRDRLRSRLEALSTERDEIEDVKCQEDQKLQVLLTQIESKKHQVETAFERLQQELEQQRCLLLARLRELEQQIWKERDEYITKVSEEVTRLGAQVKELEEKCQQPASELLQDVRVNQSRCEMKTFVSPEAISPDLVKKIRDFHRKILTLPEMMRMFSENLAHHLEIDSGVITLDPQTASRSLVLSEDRKSVRYTRQKKNLPDSPLRFDGLPAVLGFPGFSSGRHRWQVDLQLGDGGGCTVGVAGEGVRRKGEMGLSAEDGVWAVIISHQQCWASTSPGTDLPLSEIPRGVRVALDYEAGQVTLHNAQTQEPIFTFTASFSGKVFPFFAVWKKGSCLTLKG

SEQ ID NO: 92270 - protein, 164 aa, Homo sapiens; identical to SEQ ID NO: 92266
  Payload ID: 18476
  Gene Name: tripartite motif containing 15
  ENSP ID: ENSP00000398285
  MOD_RES (1)..(1): Any amino acid

SEQ ID NO: 92271 - protein, 164 aa, Homo sapiens; identical to SEQ ID NO: 92266
  Payload ID: 18476
  Gene Name: tripartite motif containing 15
  ENSP ID: ENSP00000400174
  MOD_RES (1)..(1): Any amino acid

SEQ ID NO: 92272 - protein, 164 aa, Homo sapiens; identical to SEQ ID NO: 92266
  Payload ID: 18476
  Gene Name: tripartite motif containing 15
  ENSP ID: ENSP00000402326
  MOD_RES (1)..(1): Any amino acid

SEQ ID NO: 92273 - protein, 465 aa, Homo sapiens [sequence omitted]

SEQ ID NO: 92274 - protein, 164 aa, Homo sapiens; identical to SEQ ID NO: 92266
  Payload ID: 18476
  Gene Name: tripartite motif containing 15
  ENSP ID: ENSP00000403836
  MOD_RES (1)..(1): Any amino acid

SEQ ID NO: 92275 - protein, 465 aa, Homo sapiens; identical to SEQ ID NO: 92269
  Payload ID: 18476
  Gene Name: tripartite motif containing 15
  ENSP ID: ENSP00000409605

SEQ ID NO: 92276 - protein, 465 aa, Homo sapiens [sequence omitted]

SEQ ID NO: 92277 - protein, 164 aa, Homo sapiens; identical to SEQ ID NO: 92266
  Payload ID: 18476
  Gene Name: tripartite motif containing 15
  ENSP ID: ENSP00000412755
  MOD_RES (1)..(1): Any amino acid

SEQ ID NO: 92278 - protein, 465 aa, Homo sapiens [sequence omitted]

SEQ ID NO: 92279 - protein, 465 aa, Homo sapiens [sequence omitted]

SEQ ID NO: 92280 - protein, 396 aa, Homo sapiens
  Payload ID: 18476
  Gene Name: tripartite motif containing 15
  ENSP ID: ENSP00000447004
MAPVPLGPLGETYCEEHGEKIYFFCENDAEFLCVFCREGPTHQAHTVGFLDEAIQPYRDRLRSRLEALSTERDEIEDVKCQEDQKLQVLLTQIESKKHQVETAFERLQQELEQQRCLLLARLRELEQQIWKERDEYITKVSEEVTRLGAQVKELEEKCQQPASELLQDVRGTIVTCEMKTFVSPEAISPDLVKKIRDFHRKILTLPEMMRMFSENLAHHLEIDSGVITLDPQTASRSLVLSEDRKSVRYTRQKKNLPDSPLRFDGLPAVLGFPGFSSGRHRWQVDLQLGDGGGCTVGVAGEGVRRKGEMGLSAEDGVWAVIISHQQCWASTSPGTDLPLSEIPRGVRVALDYEAGQVTLHNAQTQEPIFTFTASFSGKVFPFFAVWKKGSCLTLKG

SEQ ID NO: 92281 - protein, 396 aa, Homo sapiens
  Payload ID: 18476
  Gene Name: tripartite motif containing 15
  ENSP ID: ENSP00000447232
MAPVPLGPLGETYCEEHGEKIYFFCENDAEFLCVFCREGPTHQAHTVGFLDEAIQPYRDRLRSRLEALSTERDEIEDVKCQEDQKLQVLLTQIESKKHQVETAFERLQQELEQQRCLLLARLRELEQQIWKERDEYITKVSEEVTRLGAQVKELEEKCQQPASELLQDVRGTIVTCEMKTFVSPEAISPDLVKKIRDFHRKILTLPEMMRMFSENLAHHLEIDSGVITLDPQTASRSLVLSEDRKSVRYTRQKKSLPDSPLRFDGLPAVLGFPGFSSGRHRWQVDLQLGDGGGCTVGVAGEGVRRKGEMGLSAEDGVWAVIISHQQCWASTSPGTDLPLSEIPRGVRVALDYEAGQVTLHNAQTQEPIFTFTASFSGKVFPFFAVWKKGSCLTLKG

SEQ ID NO: 92282 - protein, 115 aa, Homo sapiens; identical to SEQ ID NO: 92264
  Payload ID: 18476
  Gene Name: tripartite motif containing 15
  Uniprot ID: Q9C019
  ENSP ID: ENSP00000447500

SEQ ID NO: 92283 - protein, 396 aa, Homo sapiens; identical to SEQ ID NO: 92281
  Payload ID: 18476
  Gene Name: tripartite motif containing 15
  ENSP ID: ENSP00000447725

SEQ ID NO: 92284 - protein, 396 aa, Homo sapiens; identical to SEQ ID NO: 92281
  Payload ID: 18476
  Gene Name: tripartite motif containing 15
  ENSP ID: ENSP00000448307

SEQ ID NO: 92285 - protein, 396 aa, Homo sapiens; identical to SEQ ID NO: 92280
  Payload ID: 18476
  Gene Name: tripartite motif containing 15
  ENSP ID: ENSP00000448772

SEQ ID NO: 92286 - protein, 396 aa, Homo sapiens; identical to SEQ ID NO: 92281
  Payload ID: 18476
  Gene Name: tripartite motif containing 15
  ENSP ID: ENSP00000449583

SEQ ID NO: 92287 - protein, 115 aa, Homo sapiens; identical to SEQ ID NO: 92264
  Payload ID: 18476
  Gene Name: tripartite motif containing 15
  Uniprot ID: Q9C019
  ENSP ID: ENSP00000449617

SEQ ID NO: 92288 - protein, 115 aa, Homo sapiens; identical to SEQ ID NO: 92264
  Payload ID: 18476
  Gene Name: tripartite motif containing 15
  Uniprot ID: Q9C019
  ENSP ID: ENSP00000449686

SEQ ID NO: 92289 - protein, 396 aa, Homo sapiens; identical to SEQ ID NO: 92281
  Payload ID: 18476
  Gene Name: tripartite motif containing 15
  ENSP ID: ENSP00000450011

SEQ ID NO: 92290 - protein, 396 aa, Homo sapiens; identical to SEQ ID NO: 92281
  Payload ID: 18476
  Gene Name: tripartite motif containing 15
  ENSP ID: ENSP00000484001

SEQ ID NO: 92291 - protein, 564 aa, Homo sapiens
  Payload ID: 18477
  Gene Name: tripartite motif containing 16
  Uniprot ID: O95361
  ENSP ID: ENSP00000338989
MAELDLMAPGPLPRATAQPPAPLSPDSGSPSPDSGSASPVEEEDVGSSEKLGRETEEQDSDSAEQGDPAGEGKEVLCDFCLDDTRRVKAVKSCLTCMVNYCEEHLQPHQVNIKLQSHLLTEPVKDHNWRYCPAHHSPLSAFCCPDQQCICQDCCQEHSGHTIVSLDAARRDKEAELQCTQLDLERKLKLNENAISRLQANQKSVLVSVSEVKAVAEMQFGELLAAVRKAQANVMLFLEEKEQAALSQANGIKAHLEYRSAEMEKSKQELERMAAISNTVQFLEEYCKFKNTEDITFPSVYVGLKDKLSGIRKVITESTVHLIQLLENYKKKLQEFSKEEEYDIRTQVSAVVQRKYWTSKPEPSTREQFLQYAYDITFDPDTAHKYLRLQEENRKVTNTTPWEHPYPDLPSRFLHWRQVLSQQSLYLHRYYFEVEIFGAGTYVGLTCKGIDRKGEERNSCISGNNFSWSLQWNGKEFTAWYSDMETPLKAGPFRRLGVYIDFPGGILSFYGVEYDTMTLVHKFACKFSEPVYAAFWLSKKENAIRIVDLGEEPEKPAPSLVGTAP

SEQ ID NO: 92292 - protein, 434 aa, Homo sapiens
  Payload ID: 18477
  Gene Name: tripartite motif containing 16
  ENSP ID: ENSP00000399918
MIMEDWTCKLQNRVLPSEDPALSQKGYLKKENMAALCRTAESQAELQCTQLDLERKLKLNENAISRLQANQKSVLVSVSEVKAVAEMQFGELLAAVRKAQANVMLFLEEKEQAALSQANGIKAHLEYRSAEMEKSKQELERMAAISNTVQFLEEYCKFKNTEDITFPSVYVGLKDKLSGIRKVITESTVHLIQLLENYKKKLQEFSKEEEYDIRTQVSAVVQRKYWTSKPEPSTREQFLQYAYDITFDPDTAHKYLRLQEENRKVTNTTPWEHPYPDLPSRFLHWRQVLSQQSLYLHRYYFEVEIFGAGTYVGLTCKGIDRKGEERNSCISGNNFSWSLQWNGKEFTAWYSDMETPLKAGPFRRLGVYIDFPGGILSFYGVEYDTMTLVHKFACKFSEPVYAAFWLSKKENAIRIVDLGEEPEKPAPSLVGTAP

SEQ ID NO: 92293 - protein, 348 aa, Homo sapiens
  Payload ID: 18477
  Gene Name: tripartite motif containing 16
  Uniprot ID: O95361
  ENSP ID: ENSP00000462903
MQFGELLAAVRKAQANVMLFLEEKEQAALSQANGIKAHLEYRSAEMEKSKQELERMAAISNTVQFLEEYCKFKNTEDITFPSVYVGLKDKLSGIRKVITESTVHLIQLLENYKKKLQEFSKEEEYDIRTQVSAVVQRKYWTSKPEPSTREQFLQYAYDITFDPDTAHKYLRLQEENRKVTNTTPWEHPYPDLPSRFLHWRQVLSQQSLYLHRYYFEVEIFGAGTYVGLTCKGIDRKGEERNSCISGNNFSWSLQWNGKEFTAWYSDMETPLKAGPFRRLGVYIDFPGGILSFYGVEYDTMTLVHKFACKFSEPVYAAFWLSKKENAIRIVDLGEEPEKPAPSLVGTAP

SEQ ID NO: 92294 - protein, 564 aa, Homo sapiens; identical to SEQ ID NO: 92291
  Payload ID: 18477
  Gene Name: tripartite motif containing 16
  Uniprot ID: O95361
  ENSP ID: ENSP00000463188

SEQ ID NO: 92295 - protein, 115 aa, Homo sapiens
  Payload ID: 18477
  Gene Name: tripartite motif containing 16
  ENSP ID: ENSP00000463293
MQFGELLAAVRKAQANVMLFLEEKEQAALSQANGIKAHLEYRSAEMEKSKQELERMAAISNTVQFLEEYCKFKNTEDITFPSVYVGLKDKLSGIRKVITESTVHLIQLLENYKKK

SEQ ID NO: 92296 - protein, 96 aa, Homo sapiens
  Payload ID: 18477
  Gene Name: tripartite motif containing 16
  ENSP ID: ENSP00000463360
MIMEDWTCKLQNRVLPSEDPALSQKGYLKKENMAALCRTAESQAELQCTQLDLERKLKLNENAISRLQANQKSVLVSVSEVKAVAEMQFGELLAAV

SEQ ID NO: 92297 - protein, 140 aa, Homo sapiens
  Payload ID: 18477
  Gene Name: tripartite motif containing 16
  ENSP ID: ENSP00000463639
MQFGELLAAVRKAQANVMLFLEEKEQAALSQANGIKAHLEYRSAEMEKSKQELERMAAISNTVQFLEMRMTSRLTRTQHTSISGCRRRTARSPTPRPGSIPTRTSPAGSCTGGRCCPSRVCTCTGTILRWRSSGQAPMLA

SEQ ID NO: 92298 - protein, 111 aa, Homo sapiens
  Payload ID: 18477
  Gene Name: tripartite motif containing 16
  ENSP ID: ENSP00000464072
MQFGELLAAVRKAQANVMLFLEEKEQAALSQANGIKAHLEYRSAEMEKSKQELERMAAISNTVQFLERSMTSELKCLPLFSANIGLPNLSPAPGNSSSNMRMTSRLTRTQH

SEQ ID NO: 92299 - protein, 55 aa, Homo sapiens
  Payload ID: 18477
  Gene Name: tripartite motif containing 16
  ENSP ID: ENSP00000465169
GYLKKENMAALCRTAESQNPMQVFQGFMSFKDVAVNFTRKNGENWTLLRESCTGM

SEQ ID NO: 92300 - protein, 184 aa, Homo sapiens
  Payload ID: 18477
  Gene Name: tripartite motif containing 16
  ENSP ID: ENSP00000465907
LSQKGYLKKENMAALCRTAESQEKDRAGDQFADSDPKPESSLGLHLQAELQCTQLDLERKLKLNENAISRLQANQKSVLVSVSEVKAVAEMQFGELLAAVRKAQANVMLFLEEKEQAALSQANGIKAHLEYRSAEMEKSKQELERMAAISNTVQFLEEYCKFKNTEDITFPSVYVGLKDKLSGI

SEQ ID NO: 92301 - protein, 232 aa, Homo sapiens
  Payload ID: 18477
  Gene Name: tripartite motif containing 16
  ENSP ID: ENSP00000467031
ANGIKAHLEYRSAEMEKSKQELERMAAISNTVQFLEEYCKFKNTEDITFPSVYVGLKDKLSGIRKVITESTVHLIQLLENYKKKLQEFSKEEEYDIRTQVSAVVQRKYWTSKPEPSTREQFLQYAYDITFDPDTAHKYLRLQEENRKVTNTTPWEHPYPDLPSRFLHWRQVLSQQSLYLHRYYFEVEIFGAGTYVGLTCKGIDRKGEERNSCISGNNFSWSLQWNGKEFTAW

SEQ ID NO: 92302 - protein, 348 aa, Homo sapiens
  Payload ID: 18478
  Gene Name: tripartite motif containing 16-like
  Uniprot ID: Q309B1
  ENSP ID: ENSP00000379030
MQFGELLAAVRKAQANVMLFLEEKEQAALSQANGIKAHLEYRSAEMEKSKQELETMAAISNTVQFLEEYCKFKNTEDITFPSVYIGLKDKLSGIRKVITESTVHLIQLLENYKKKLQEFSKEEEYDIRTQVSAIVQRKYWTSKPEPSTREQFLQYVHDITFDPDTAHKYLRLQEENRKVTNTTPWEHPYPDLPSRFLHWRQVLSQQSLYLHRYYFEVEIFGAGTYVGLTCKGIDQKGEERSSCISGNNFSWSLQWNGKEFTAWYSDMETPLKAGPFWRLGVYIDFPGGILSFYGVEYDSMTLVHKFACKFSEPVYAAFWLSKKENAIRIVDLGEEPEKPAPSLVGTAP

SEQ ID NO: 92303 - protein, 114 aa, Homo sapiens
  Payload ID: 18478
  Gene Name: tripartite motif containing 16-like
  ENSP ID: ENSP00000399959
MQFGELLAAVRKAQANVMLFLEEKEQAALSQANGIKAHLEYRSAEMEKSKQELETMAAISNTVQFLERSMTSELKCLPLFSANIGLPNLSPAPGNSSSNMCMTSRSTRTQHTSI

SEQ ID NO: 92304 - protein, 140 aa, Homo sapiens
  Payload ID: 18478
  Gene Name: tripartite motif containing 16-like
  Uniprot ID: Q309B1
  ENSP ID: ENSP00000403648
MQFGELLAAVRKAQANVMLFLEEKEQAALSQANGIKAHLEYRSAEMEKSKQELETMAAISNTVQFLEMCMTSRSTRTQHTSISGCRRRTARSPTPRPGSIPTRTSPAGSCTGGRCCPSRVCTCTGTILRWRSSGQAPMLA

SEQ ID NO: 92305 - protein, 115 aa, Homo sapiens
  Payload ID: 18478
  Gene Name: tripartite motif containing 16-like
  ENSP ID: ENSP00000459199
MQFGELLAAVRKAQANVMLFLEEKEQAALSQANGIKAHLEYRSAEMEKSKQELETMAAISNTVQFLEEYCKFKNTEDITFPSVYIGLKDKLSGIRKVITESTVHLIQLLENYKKK

SEQ ID NO: 92306 - protein, 232 aa, Homo sapiens
  Payload ID: 18478
  Gene Name: tripartite motif containing 16-like
  ENSP ID: ENSP00000459623
ANGIKAHLEYRSAEMEKSKQELETMAAISNTVQFLEEYCKFKNTEDITFPSVYIGLKDKLSGIRKVITESTVHLIQLLENYKKKLQEFSKEEEYDIRTQVSAIVQRKYWTSKPEPSTREQFLQYVHDITFDPDTAHKYLRLQEENRKVTNTTPWEHPYPDLPSRFLHWRQVLSQQSLYLHRYYFEVEIFGAGTYVGLTCKGIDQKGEERSSCISGNNFSWSLQWNGKEFTAW

SEQ ID NO: 92307 - protein, 348 aa, Homo sapiens; identical to SEQ ID NO: 92302
  Payload ID: 18478
  Gene Name: tripartite motif containing 16-like
  Uniprot ID: Q309B1
  ENSP ID: ENSP00000460272

SEQ ID NO: 92308 - protein, 224 aa, Homo sapiens
  Payload ID: 18478
  Gene Name: tripartite motif containing 16-like
  ENSP ID: ENSP00000460537
MQFGELLAAVRKAQANVMLFLEEKEQAALSQANGIKAHLEYRSAEMEKSKQELETMAAISNTVQFLEEYCKFKNTEDITFPSVYIGLKDKLSGIRKVITESTVHLIQLLENYKKKLQEFSKEEEYDIRTQVSAIVQRKYWTSKPEPSTREQFLQYVHDITFDPDTAHKYLRLQEENRKVTNTTPWEHPYPDLPSRFLHWRQVLSQQSLYLHRYYFEVEIFGAGT

SEQ ID NO: 92309 - protein, 348 aa, Homo sapiens; identical to SEQ ID NO: 92302
  Payload ID: 18478
  Gene Name: tripartite motif containing 16-like
  Uniprot ID: Q309B1
  ENSP ID: ENSP00000461386

SEQ ID NO: 92310 - protein, 53 aa, Homo sapiens
  Payload ID: 18478
  Gene Name: tripartite motif containing 16-like
  ENSP ID: ENSP00000462695
MQFGELLAAVRKAQANVMLFLEEKEQAALSQANGIKAHLEYRSAEMEKRVLQV

SEQ ID NO: 92311 - protein, 348 aa, Homo sapiens; identical to SEQ ID NO: 92302
  Payload ID: 18478
  Gene Name: tripartite motif containing 16-like
  Uniprot ID: Q309B1
  ENSP ID: ENSP00000463750

SEQ ID NO: 92312 - protein, 477 aa, Homo sapiens
  Payload ID: 18479
  Gene Name: tripartite motif containing 17
  Uniprot ID: Q9Y577
  ENSP ID: ENSP00000295033
MEAVELARKLQEEATCSICLDYFTDPVMTTCGHNFCRACIQLSWEKARGKKGRRKRKGSFPCPECREMSPQRNLLPNRLLTKVAEMAQQHPGLQKQDLCQEHHEPLKLFCQKDQSPICVVCRESREHRLHRVLPAEEAVQGYKLKLEEDMEYLREQITRTGNLQAREEQSLAEWQGKVKERRERIVLEFEKMNLYLVEEEQRLLQALETEEEETASRLRESVACLDRQGHSLELLLLQLEERSTQGPLQMLQDMKEPLSRKNNVSVQCPEVAPPTRPRTVCRVPGQIEVLRGFLEDVVPDATSAYPYLLLYESRQRRYLGSSPEGSGFCSKDRFVAYPCAVGQTAFSSGRHYWEVGMNITGDALWALGVCRDNVSRKDRVPKCPENGFWVVQLSKGTKYLSTFSALTPVMLMEPPSHMGIFLDFEAGEVSFYSVSDGSHLHTYSQATFPGPLQPFFCLGAPKSGQMVISTVTMWVKG

SEQ ID NO: 92313 - protein, 175 aa, Homo sapiens
  Payload ID: 18479
  Gene Name: tripartite motif containing 17
  ENSP ID: ENSP00000347794
MEAVELARKLQEEATCSICLDYFTDPVMTTCGHNFCRACIQLSWEKARGKKGRRKRKGSFPCPECREMSPQRNLLPNRLLTKVAEMAQQHPGLQKQDLCQEHHEPLKLFCQKDQSPICVVCRESREHRLHRVLPAEEAVQGYKLKLEEDMEYLREQITRTGNLQAREEQSLAEWQ

SEQ ID NO: 92314 - protein, 477 aa, Homo sapiens; identical to SEQ ID NO: 92312
  Payload ID: 18479
  Gene Name: tripartite motif containing 17
  Uniprot ID: Q9Y577
  ENSP ID: ENSP00000355658

SEQ ID NO: 92315 - protein, 477 aa, Homo sapiens; identical to SEQ ID NO: 92312
  Payload ID: 18479
  Gene Name: tripartite motif containing 17
  Uniprot ID: Q9Y577
  ENSP ID: ENSP00000355659

SEQ ID NO: 92316 - protein, 30 aa, Homo sapiens
  Payload ID: 18479
  Gene Name: tripartite motif containing 17
  ENSP ID: ENSP00000397688
MTTCGHNFCRACIQLSWEKARGKKGRRKRK

SEQ ID NO: 92317 - protein, 343 aa, Homo sapiens
  Payload ID: 18479
  Gene Name: tripartite motif containing 17
  Uniprot ID: Q9Y577
  ENSP ID: ENSP00000403312
MEAVELARKLQEEATCSICLDYFTDPVMTTCGHNFCRACIQLSWEKARGKKGRRKRKGSFPCPECREMSPQRNLLPNRLLTKVAEMAQQHPGLQKQDLCQEHHEPLKLFCQKDQSPICVVCRESREHRLHRVLPAEEAVQGYKLKLEEDMEYLREQITRTGNLQAREEQSLAEWQGKVKERRERIVLEFEKMNLYLVEEEQRLLQALETEEEETASRLRESVACLDRQGHSLELLLLQLEERSTQGPLQMLQDMKEPLSRKNNVSVQCPEVAPPTRPRTVCRVPGQIEVLRGFLGKWAPRARTSDPGSLGDAPLYPLASEATNGGGSTSALPGDGHWLFTVPS

SEQ ID NO: 92318 - protein, 50 aa, Homo sapiens
  Payload ID: 18479
  Gene Name: tripartite motif containing 17
  ENSP ID: ENSP00000429555
MEAVELARKLQEEATCSICLDYFTDPVMTTCGHNFCRACIQLSWEKARGK

SEQ ID NO: 92319 - protein, 267 aa, Homo sapiens
  Payload ID: 18479
  Gene Name: tripartite motif containing 17
  ENSP ID: ENSP00000430468
MTTCGHNFCRACIQLSWEKARGKKGRRKRKGSFPCPECREMSPQRNLLPNRLLTKVAEMAQQHPGLQKQDLCQEHHEPLKLFCQKDQSPICVVCRESREHRLHRVLPAEEAVQGYKLKLEEDMEYLREQITRTGNLQAREEQSLAEWQGKVKERRERIVLEFEKMNLYLVEEEQRLLQALETEEEETASRLRESVACLDRQGHSLELLLLQLEERSTQGPLQMLQDMKEPLSRKNNVSVQCPEVAPPTRPRTVCRVPGQIEVLRGFL

SEQ ID NO: 92320 - protein, 771 aa, Homo sapiens
  Payload ID: 18480
  Gene Name: tripartite motif containing 2
  Uniprot ID: Q9C040
  ENSP ID: ENSP00000339659
MHRSGRYGTQQQRAGSKTAGPPCQWSRMASEGTNIPSPVVRQIDKQFLICSICLERYKNPKVLPCLHTFCERCLQNYIPAHSLTLSCPVCRQTSILPEKGVAALQNNFFITNLMDVLQRTPGSNAEESSILETVTAVAAGKPLSCPNHDGNVMEFYCQSCETAMCRECTEGEHAEHPTVPLKDVVEQHKASLQVQLDAVNKRLPEIDSALQFISEIIHQLTNQKASIVDDIHSTFDELQKTLNVRKSVLLMELEVNYGLKHKVLQSQLDTLLQGQESIKSCSNFTAQALNHGTETEVLLVKKQMSEKLNELADQDFPLHPRENDQLDFIVETEGLKKSIHNLGTILTTNAVASETVATGEGLRQTIIGQPMSVTITTKDKDGELCKTGNAYLTAELSTPDGSVADGEILDNKNGTYEFLYTVQKEGDFTLSLRLYDQHIRGSPFKLKVIRSADVSPTTEGVKRRVKSPGSGHVKQKAVKRPASMYSTGKRKENPIEDDLIFRVGTKGRNKGEFTNLQGVAASTNGKILIADSNNQCVQIFSNDGQFKSRFGIRGRSPGQLQRPTGVAVHPSGDIIIADYDNKWVSIFSSDGKFKTKIGSGKLMGPKGVSVDRNGHIIVVDNKACCVFIFQPNGKIVTRFGSRGNGDRQFAGPHFAAVNSNNEIIITDFHNHSVKVFNQEGEFMLKFGSNGEGNGQFNAPTGVAVDSNGNIIVADWGNSRIQVFDGSGSFLSYINTSADPLYGPQGLALTSDGHVVVADSGNHCFKVYRYLQ

SEQ ID NO: 92321 - protein, 110 aa, Homo sapiens
  Payload ID: 18480
  Gene Name: tripartite motif containing 2
  ENSP ID: ENSP00000400375
MDVLQRTPGSNAEESSILETVTAVAAGKPLSCPNHDGNVMEFYCQSCETAMCRECTEGEHAEHPTVPLKDVVEQHKASLQVQLDAVNKRLPEIDSALQFISEIIHQLTNQ

SEQ ID NO: 92322 - protein, 138 aa, Homo sapiens
  Payload ID: 18480
  Gene Name: tripartite motif containing 2
  ENSP ID: ENSP00000400879
MASEGTNIPSPVVRQIDKQFLICSICLERYKNPKVLPCLHTFCERCLQNYIPAHSLTLSCPVCRQTSILPEKGVAALQNNFFITNLMDVLQRTPGSNAEESSILETVTAVAAGKPLSCPNHDGNVMEFYCQSCETAMC

SEQ ID NO: 92323 - protein, 744 aa, Homo sapiens
  Payload ID: 18480
  Gene Name: tripartite motif containing 2
  Uniprot ID: Q9C040
  ENSP ID: ENSP00000415812
MASEGTNIPSPVVRQIDKQFLICSICLERYKNPKVLPCLHTFCERCLQNYIPAHSLTLSCPVCRQTSILPEKGVAALQNNFFITNLMDVLQRTPGSNAEESSILETVTAVAAGKPLSCPNHDGNVMEFYCQSCETAMCRECTEGEHAEHPTVPLKDVVEQHKASLQVQLDAVNKRLPEIDSALQFISEIIHQLTNQKASIVDDIHSTFDELQKTLNVRKSVLLMELEVNYGLKHKVLQSQLDTLLQGQESIKSCSNFTAQALNHGTETEVLLVKKQMSEKLNELADQDFPLHPRENDQLDFIVETEGLKKSIHNLGTILTTNAVASETVATGEGLRQTIIGQPMSVTITTKDKDGELCKTGNAYLTAELSTPDGSVADGEILDNKNGTYEFLYTVQKEGDFTLSLRLYDQHIRGSPFKLKVIRSADVSPTTEGVKRRVKSPGSGHVKQKAVKRPASMYSTGKRKENPIEDDLIFRVGTKGRNKGEFTNLQGVAASTNGKILIADSNNQCVQIFSNDGQFKSRFGIRGRSPGQLQRPTGVAVHPSGDIIIADYDNKWVSIFSSDGKFKTKIGSGKLMGPKGVSVDRNGHIIVVDNKACCVFIFQPNGKIVTRFGSRGNGDRQFAGPHFAAVNSNNEIIITDFHNHSVKVFNQEGEFMLKFGSNGEGNGQFNAPTGVAVDSNGNIIVADWGNSRIQVFDGSGSFLSYINTSADPLYGPQGLALTSDGHVVVADSGNHCFKVYRYLQ

SEQ ID NO: 92324 - protein, 136 aa, Homo sapiens
  Payload ID: 18480
  Gene Name: tripartite motif containing 2
  ENSP ID: ENSP00000487750
MASEGTNIPSPVVRQIDKQFLICSICLERYKNPKVLPCLHTFCERCLQNYIPAHSLTLSCPVCRQTSILPEKGVAALQNNFFITNLMDVLQRTPGSNAEESSILETVTAVAAGKPLSCPNHDGNVSGWDGRYCPGA

SEQ ID NO: 92325 - protein, 136 aa, Homo sapiens; identical to SEQ ID NO: 92324
  Payload ID: 18480
  Gene Name: tripartite motif containing 2
  ENSP ID: ENSP00000487836

SEQ ID NO: 92326 - protein, 526 aa, Homo sapiens
  Payload ID: 18480
  Gene Name: tripartite motif containing 2
  ENSP ID: ENSP00000488229
MASEGTNIPSPVVRQIDKQFLICSICLERYKNPKVLPCLHTFCERCLQNYIPAHSLTLSCPVCRQTSILPEKGVAALQNNFFITNLMDVLQRTPGSNAEESSILETVTAVAAGKPLSCPNHDGNVMEFYCQSCETAMCRECTEGEHAEHPTVPLKDVVEQHKASLQVQLDAVNKRLPEIDSALQFISEIIHQLTNQKASIVDDIHSTFDELQKTLNVRKSVLLMELEVNYGLKHKVLQSQLDTLLQGQESIKSCSNFTAQALNHGTETEVLLVKKQMSEKLNELADQDFPLHPRENDQLDFIVETEGLKKSIHNLGTILTTNAVASETVATGEGLRQTIIGQPMSVTITTKDKDGELCKTGNAYLTAELSTPDGSVADGEILDNKNGTYEFLYTVQKEGDFTLSLRLYDQHIRGSPFKLKVIRSADVSPTTEGVKRRVKSPGSGHVKQKAVKRPASMYSTGKRKENPIEDDLIFRVDGVLQAEVQWHDLSPLQPLPPGFKQFSCLGLLSSWDYRHAPPCSANFLYF

SEQ ID NO: 92327 - protein, 44 aa, Homo sapiens
  Payload ID: 18480
  Gene Name: tripartite motif containing 2
  ENSP ID: ENSP00000488602
MASEGTNIPSPVVRQIDKQFLICSICLERYKNPKVLPCLHTFCE

SEQ ID NO: 92328 - protein, 114 aa, Homo sapiens
  Payload ID: 18480
  Gene Name: tripartite motif containing 2
  ENSP ID: ENSP00000488751
  MOD_RES (1)..(1): Any amino acid
XKIGSGKLMGPKGVSVDRNGHIIVVDNKACCVFIFQPNGKIVTRFGSRGNGDRQFAGPHFAAVNSNNEIIITDFHNHSVKVLQAHELLLTFNCFYGEIGLRENNAILTYGTKGS

SEQ ID NO: 92329 - protein, 475 aa, Homo sapiens [sequence omitted]

SEQ ID NO: 92330 - protein, 90 aa, Homo sapiens
  Payload ID: 18481
  Gene Name: tripartite motif containing 21
  ENSP ID: ENSP00000434053
  MOD_RES (1)..(1): Any amino acid
XGLKKMLRTCAVHITLDPDTANPWLILSEDRRQVRLGDTQQSIPGNEERFDSYPMVLGAQHFHSGKHYWEDLCGPSSVLVSMMEEKTQPL

SEQ ID NO: 92331 - protein, 498 aa, Homo sapiens
  Payload ID: 18482
  Gene Name: tripartite motif containing 22
  Uniprot ID: Q8IYM9
  ENSP ID: ENSP00000369299
MDFSVKVDIEKEVTCPICLELLTEPLSLDCGHSFCQACITAKIKESVIISRGESSCPVCQTRFQPGNLRPNRHLANIVERVKEVKMSPQEGQKRDVCEHHGKKLQIFCKEDGKVICWVCELSQEHQGHQTFRINEVVKECQEKLQVALQRLIKEDQEAEKLEDDIRQERTAWKNYIQIERQKILKGFNEMRVILDNEEQRELQKLEEGEVNVLDNLAAATDQLVQQRQDASTLISDLQRRLRGSSVEMLQDVIDVMKRSESWTLKKPKSVSKKLKSVFRVPDLSGMLQVLKELTDVQYYWVDVMLNPGSATSNVAISVDQRQVKTVRTCTFKNSNPCDFSAFGVFGCQYFSSGKYYWEVDVSGKIAWILGVHSKISSLNKRKSSGFAFDPSVNYSKVYSRYRPQYGYWVIGLQNTCEYNAFEDSSSSDPKVLTLFMAVPPCRIGVFLDYEAGIVSFFNVTNHGALIYKFSGCRFSRPAYPYFNPWNCLVPMTVCPPSS

SEQ ID NO: 92332 - protein, 143 aa, Homo sapiens
  Payload ID: 18482
  Gene Name: tripartite motif containing 22
  ENSP ID: ENSP00000388994
  MOD_RES (1)..(1): Any amino acid
XGQKRDVCEHHGKKLQIFCKEDGKVICWVCELSQEHQGHQTFRINEVVKECQEKLQVALQRLIKEDQEAEKLEDDIRQERTAWKNYIQIERQKILKGFNEMRVILDNEEQRELQKLEEGCQHAHLRSPAEVEGIVSRDAAGCD

SEQ ID NO: 92333 - protein, 305 aa, Homo sapiens
  Payload ID: 18482
  Gene Name: tripartite motif containing 22
  ENSP ID: ENSP00000393250
MDFSVKVDIEKEVTCPICLELLTEPLSLDCGHSFCQACITAKIKESVIISRGESSCPVCQTRFQPGNLRPNRHLANIVERVKEVKMSPQEGQKRDVCEHHGKKLQIFCKEDGKVICWVCELSQEHQGHQTFRINEVVKECQNYIQIERQKILKGFNEMRVILDNEEQRELQKLEEGEVNVLDNLAAATDQLVQQRQDASTLISDLQRRLRGSSVEMLQDVIDVMKRSESWTLKKPKSVSKKLKSVFRVPDLSGMLQVLKELTDVQYYWVDVMLNPGSATSNVAISVDQRQVKTVRTCTFKNSNPC

SEQ ID NO: 92334 - protein, 227 aa, Homo sapiens
  Payload ID: 18482
  Gene Name: tripartite motif containing 22
  ENSP ID: ENSP00000396849
MDFSVKVDIEKEVTCPICLELLTEPLSLDCGHSFCQACITAKIKESVIISRGESSCPVCQTRFQPGNLRPNRHLANIVERVKEVKMSPQEGQKRDVCEHHGKKLQIFCKEDGKVICWVCELSQEHQGHQTFRINEVVKECQEKLQVALQRLIKEDQEAEKLEDDIRQERTAWKNYIQIERQKILKGFNEMRVILDNEEQRELQKLEEGEVNVLDNLAAATDQLVQQR

SEQ ID NO: 92335 - protein, 203 aa, Homo sapiens
  Payload ID: 18482
  Gene Name: tripartite motif containing 22
  ENSP ID: ENSP00000400417
MDFSVKVDIEKEVTCPICLELLTEPLSLDCGHSFCQACITAKIKESVIISRGESSCPVCQTRFQPGNLRPNRHLANIVERVKEVKMSPQEGQKRDVCEHHGKKLQIFCKEDGKVICWVCELSQEHQGHQTFRINEVVKECQEKLQVALQRLIKEDQEAEKLEDDIRQERTAWKNYIQIERQKILKGFNEMRVILDNEEQRELQ

SEQ ID NO: 92336 - protein, 38 aa, Homo sapiens
  Payload ID: 18482
  Gene Name: tripartite motif containing 22
  ENSP ID: ENSP00000404204
  MOD_RES (1)..(1): Any amino acid
XSKKLKSVFRVPDLSGMLQVLKELTDVQYYWVENFCHA

SEQ ID NO: 92337 - protein, 63 aa, Homo sapiens
  Payload ID: 18482
  Gene Name: tripartite motif containing 22
  ENSP ID: ENSP00000406412
DVIDVMKRSESWTLKKPKSVSKKLKSVFRVPDLSGMLQVLKELTDVQYYWVYHQRILQTPLWK

SEQ ID NO: 92338 - protein, 37 aa, Homo sapiens
  Payload ID: 18482
  Gene Name: tripartite motif containing 22
  ENSP ID: ENSP00000409991
  MOD_RES (1)..(1): Any amino acid
XSKKLKSVFRVPDLSGMLQVLKELTDVQYYWENFCHA

SEQ ID NO: 92339 - protein, 574 aa, Homo sapiens
  Payload ID: 18483
  Gene Name: tripartite motif containing 23
  Uniprot ID: P36406
  ENSP ID: ENSP00000231524
MATLVVNKLGAGVDSGRQGSRGTAVVKVLECGVCEDVFSLQGDKVPRLLLCGHTVCHDCLTRLPLHGRAIRCPFDRQVTDLGDSGVWGLKKNFALLELLERLQNGPIGQYGAAEESIGISGESIIRCDEDEAHLASVYCTVCATHLCSECSQVTHSTKTLAKHRRVPLADKPHEKTMCSQHQVHAIEFVCLEEGCQTSPLMCCVCKEYGKHQGHKHSVLEPEANQIRASILDMAHCIRTFTEEISDYSRKLVGIVQHIEGGEQIVEDGIGMAHTEHVPGTAENARSCIRAYFYDLHETLCRQEEMALSVVDAHVREKLIWLRQQQEDMTILLSEVSAACLHCEKTLQQDDCRVVLAKQEITRLLETLQKQQQQFTEVADHIQLDASIPVTFTKDNRVHIGPKMEIRVVTLGLDGAGKTTILFKLKQDEFMQPIPTIGFNVETVEYKNLKFTIWDVGGKHKLRPLWKHYYLNTQAVVFVVDSSHRDRISEAHSELAKLLTEKELRDALLLIFANKQDVAGALSVEEITELLSLHKLCCGRSWYIQGCDARSGMGLYEGLDWLSRQLVAAGVLDVA

SEQ ID NO: 92340 - protein, 546 aa, Homo sapiens
  Payload ID: 18483
  Gene Name: tripartite motif containing 23
  Uniprot ID: P36406
  ENSP ID: ENSP00000274327
MATLVVNKLGAGVDSGRQGSRGTAVVKVLECGVCEDVFSLQGDKVPRLLLCGHTVCHDCLTRLPLHGRAIRCPFDRQVTDLGDSGVWGLKKNFALLELLERLQNGPIGQYGAAEESIGISGESIIRCDEDEAHLASVYCTVCATHLCSECSQVTHSTKTLAKHRRVPLADKPHEKTMCSQHQVHAIEFVCLEEGCQTSPLMCCVCKEYGKHQGHKHSVLEPEANQIRASILDMAHCIRTFTEEISDYSRKLVGIVQHIEGGEQIVEDGIGMAHTEHVPGTAENARSCIRAYFYDLHETLCRQEEMALSVVDAHVREKLIWLRQQQEDMTILLSEVSAACLHCEKTLQQDDCRVVLAKQEITRLLETLQKQQQQFTEVADHIQLDASIPVTFTKDNRVHIGPKMEIRVVTLGLDGAGKTTILFKLKQDEFMQPIPTIGFNVETVEYKNLKFTIWDVGGKHKLRPLWKHYYLNTQAVVFVVDSSHRDRISEAHSELAKLLTEKELRDALLLIFANKQDVAGALSVEEITELLSLHKLCCGRSCFSDNM

SEQ ID NO: 92341 - protein, 569 aa, Homo sapiens
  Payload ID: 18483
  Gene Name: tripartite motif containing 23
  Uniprot ID: P36406
  ENSP ID: ENSP00000370406
MATLVVNKLGAGVDSGRQGSRGTAVVKVLECGVCEDVFSLQGDKVPRLLLCGHTVCHDCLTRLPLHGRAIRCPFDRQVTDLGDSGVWGLKKNFALLELLERLQNGPIGQYGAAEESIGISGESIIRCDEDEAHLASVYCTVCATHLCSECSQVTHSTKTLAKHRRVPLADKPHEKTMCSQHQVHAIEFVCLEEGCQTSPLMCCVCKEYGKHQGHKHSVLEPEANQIRASILDMAHCIRTFTEEISDYSRKLVGIVQHIEGGEQIVEDGIGMAHTEHVPGTAENARSCIRAYFYDLHETLCRQEEMALSVVDAHVREKLIWLRQQQEDMTILLSEVSAACLHCEKTLQQDDCRVVLAKQEITRLLETLQKQQQQFTEVADHIQLDASIPVTFTKDNRVHIGPKMEIRVVTLGLDGAGKTTILFKLKQDEFMQPIPTIGFNVETVEYKNLKFTIWDVGGKHKLRPLWKHYYLNTQAVVFVVDSSHRDRISEAHSELAKLLTEKELRDALLLIFANKQDVAGALSVEEITELLSLHKLCCGRSWYIQGCDARSVFQIICDQYTGKEVVTEKG

SEQ ID NO: 92342 - protein, 35 aa, Homo sapiens
  Payload ID: 18483
  Gene Name: tripartite motif containing 23
  ENSP ID: ENSP00000422144
MATLVVNKLGAGVDSGRQGSRGTAVVKVLECGVCE

SEQ ID NO: 92343 - protein, 126 aa, Homo sapiens
  Payload ID: 18483
  Gene Name: tripartite motif containing 23
  ENSP ID: ENSP00000424044
MATLVVNKLGAGVDSGRQGSRGTAVVKVLECGVCEDVFSLQGDKVPRLLLCGHTVCHDCLTRLPLHGRAIRCPFDRQVTDLGDSGVWGLKKNFALLELLERLQNGPIGQYGAAEESIGISGEFYQE

SEQ ID NO: 92344 - protein, 34 aa, Homo sapiens
  Payload ID: 18483
  Gene Name: tripartite motif containing 23
  ENSP ID: ENSP00000427103
MATLVVNKLGAGVDSGRQGSRGTAVVKVIQVSGD

SEQ ID NO: 92345 - protein, 1050 aa, Homo sapiens
  Payload ID: 18484
  Gene Name: tripartite motif containing 24
  Uniprot ID: O15164
  ENSP ID: ENSP00000340507
MEVAVEKAVAAAAAASAAASGGPSAAPSGENEAESRQGPDSERGGEAARLNLLDTCAVCHQNIQSRAPKLLPCLHSFCQRCLPAPQRYLMLPAPMLGSAETPPPVPAPGSPVSGSSPFATQVGVIRCPVCSQECAERHIIDNFFVKDTTEVPSSTVEKSNQVCTSCEDNAEANGFCVECVEWLCKTCIRAHQRVKFTKDHTVRQKEEVSPEAVGVTSQRPVFCPFHKKEQLKLYCETCDKLTCRDCQLLEHKEHRYQFIEEAFQNQKVIIDTLITKLMEKTKYIKFTGNQIQNRIIEVNQNQKQVEQDIKVAIFTLMVEINKKGKALLHQLESLAKDHRMKLMQQQQEVAGLSKQLEHVMHFSKWAVSSGSSTALLYSKRLITYRLRHLLRARCDASPVTNNTIQFHCDPSFWAQNIINLGSLVIEDKESQPQMPKQNPVVEQNSQPPSGLSSNQLSKFPTQISLAQLRLQHMQQQVMAQRQQVQRRPAPVGLPNPRMQGPIQQPSISHQQPPPRLINFQNHSPKPNGPVLPPHPQQLRYPPNQNIPRQAIKPNPLQMAFLAQQAIKQWQISSGQGTPSTTNSTSSTPSSPTITSAAGYDGKAFGSPMIDLSSPVGGSYNLPSLPDIDCSSTIMLDNIVRKDTNIDHGQPRPPSNRTVQSPNSSVPSPGLAGPVTMTSVHPPIRSPSASSVGSRGSSGSSSKPAGADSTHKVPVVMLEPIRIKQENSGPPENYDFPVVIVKQESDEESRPQNANYPRSILTSLLLNSSQSSTSEETVLRSDAPDSTGDQPGLHQDNSSNGKSEWLDPSQKSPLHVGETRKEDDPNEDWCAVCQNGGELLCCEKCPKVFHLSCHVPTLTNFPSGEWICTFCRDLSKPEVEYDCDAPSHNSEKKKTEGLVKLTPIDKRKCERLLLFLYCHEMSLAFQDPVPLTVPDYYKIIKNPMDLSTIKKRLQEDYSMYSKPEDFVADFRLIFQNCAEFNEPDSEVANAGIKLENYFEELLKNLYPEKRFPKPEFRNESEDNKFSDDSDDDFVQPRKKRLKSIEERQLLK

SEQ ID NO: 92346 - protein, 1016 aa, Homo sapiens
  Payload ID: 18484
  Gene Name: tripartite motif containing 24
  Uniprot ID: O15164
  ENSP ID: ENSP00000390829
MEVAVEKAVAAAAAASAAASGGPSAAPSGENEAESRQGPDSERGGEAARLNLLDTCAVCHQNIQSRAPKLLPCLHSFCQRCLPAPQRYLMLPAPMLGSAETPPPVPAPGSPVSGSSPFATQVGVIRCPVCSQECAERHIIDNFFVKDTTEVPSSTVEKSNQVCTSCEDNAEANGFCVECVEWLCKTCIRAHQRVKFTKDHTVRQKEEVSPEAVGVTSQRPVFCPFHKKEQLKLYCETCDKLTCRDCQLLEHKEHRYQFIEEAFQNQKVIIDTLITKLMEKTKYIKFTGNQIQNRIIEVNQNQKQVEQDIKVAIFTLMVEINKKGKALLHQLESLAKDHRMKLMQQQQEVAGLSKQLEHVMHFSKWAVSSGSSTALLYSKRLITYRLRHLLRARCDASPVTNNTIQFHCDPSFWAQNIINLGSLVIEDKESQPQMPKQNPVVEQNSQPPSGLSSNQLSKFPTQISLAQLRLQHMQQQQPPPRLINFQNHSPKPNGPVLPPHPQQLRYPPNQNIPRQAIKPNPLQMAFLAQQAIKQWQISSGQGTPSTTNSTSSTPSSPTITSAAGYDGKAFGSPMIDLSSPVGGSYNLPSLPDIDCSSTIMLDNIVRKDTNIDHGQPRPPSNRTVQSPNSSVPSPGLAGPVTMTSVHPPIRSPSASSVGSRGSSGSSSKPAGADSTHKVPVVMLEPIRIKQENSGPPENYDFPVVIVKQESDEESRPQNANYPRSILTSLLLNSSQSSTSEETVLRSDAPDSTGDQPGLHQDNSSNGKSEWLDPSQKSPLHVGETRKEDDPNEDWCAVCQNGGELLCCEKCPKVFHLSCHVPTLTNFPSGEWICTFCRDLSKPEVEYDCDAPSHNSEKKKTEGLVKLTPIDKRKCERLLLFLYCHEMSLAFQDPVPLTVPDYYKIIKNPMDLSTIKKRLQEDYSMYSKPEDFVADFRLIFQNCAEFNEPDSEVANAGIKLENYFEELLKNLYPEKRFPKPEFRNESEDNKFSDDSDDDFVQPRKKRLKSIEERQLLK

SEQ ID NO: 92347 - protein, 1012 aa, Homo sapiens
  Payload ID: 18484
  Gene Name: tripartite motif containing 24
  ENSP ID: ENSP00000484482
MEVAVEKAVAAAARLGCPPGGPRGSGENEAESRQGPDSERGGEAARLNLLDTCAVCHQNIQSRAPKLLPCLHSFCQRCLPAPQRYLMLPAPMLGSAETPPPVPAPARRSASSPFATQVGVIRCPVCSQECAERHIIDNFFVKDTTEVPSSTVEKSNQVCTSCEDNAEANGFCVECVEWLCKTCIRAHQRVKFTKDHTVRQKEEVSPEAVGVTSQRPVFCPFHKKEQLKLYCETCDKLTCRDCQLLEHKEHRYQFIEEAFQNQKVIIDTLITKLMEKTKYIKFTGNQIQNRIIEVNQNQKQVEQDIKVAIFTLMVEINKKGKALLHQLESLAKDHRMKLMQQQQEVAGLSKQLEHVMHFSKWAVSSGSSTALLYSKRLITYRLRHLLRARCDASPVTNNTIQFHCDPSFWAQNIINLGSLVIEDKESQPQMPKQNPVVEQNSQPPSGLSSNQLSKFPTQISLAQLRLQHMQQQQPPPRLINFQNHSPKPNGPVLPPHPQQLRYPPNQNIPRQAIKPNPLQMAFLAQQAIKQWQISSGQGTPSTTNSTSSTPSSPTITSAAGYDGKAFGSPMIDLSSPVGGSYNLPSLPDIDCSSTIMLDNIVRKDTNIDHGQPRPPSNRTVQSPNSSVPSPGLAGPVTMTSVHPPIRSPSASSVGSRGSSGSSSKPAGADSTHKVPVVMLEPIRIKQENSGPPENYDFPVVIVKQESDEESRPQNANYPRSILTSLLLNSSQSSTSEETVLRSDAPDSTGDQPGLHQDNSSNGKSEWLDPSQKSPLHVGETRKEDDPNEDWCAVCQNGGELLCCEKCPKVFHLSCHVPTLTNFPSGEWICTFCRDLSKPEVEYDCDAPSHNSEKKKTEGLVKLTPIDKRKCERLLLFLYCHEMSLAFQDPVPLTVPDYYKIIKNPMDLSTIKKRLQEDYSMYSKPEDFVADFRLIFQNCAEFNEPDSEVANAGIKLENYFEELLKNLYPEKRFPKPEFRNESEDNKFSDDSDDDFVQPRKKRLKSIEERQLLK

SEQ ID NO: 92348 - protein, 630 aa, Homo sapiens
  Payload ID: 18485
  Gene Name: tripartite motif containing 25
  Uniprot ID: Q14258
  ENSP ID: ENSP00000323889
MAELCPLAEELSCSICLEPFKEPVTTPCGHNFCGSCLNETWAVQGSPYLCPQCRAVYQARPQLHKNTVLCNVVEQFLQADLAREPPADVWTPPARASAPSPNAQVACDHCLKEAAVKTCLVCMASFCQEHLQPHFDSPAFQDHPLQPPVRDLLRRKCSQHNRLREFFCPEHSECICHICLVEHKTCSPASLSQASADLEATLRHKLTVMYSQINGASRALDDVRNRQQDVRMTANRKVEQLQQEYTEMKALLDASETTSTRKIKEEEKRVNSKFDTIYQILLKKKSEIQTLKEEIEQSLTKRDEFEFLEKASKLRGISTKPVYIPEVELNHKLIKGIHQSTIDLKNELKQCIGRLQEPTPSSGDPGEHDPASTHKSTRPVKKVSKEEKKSKKPPPVPALPSKLPTFGAPEQLVDLKQAGLEAAAKATSSHPNSTSLKAKVLETFLAKSRPELLEYYIKVILDYNTAHNKVALSECYTVASVAEMPQNYRPHPQRFTYCSQVLGLHCYKKGIHYWEVELQKNNFCGVGICYGSMNRQGPESRLGRNSASWCVEWFNTKISAWHNNVEKTLPSTKATRVGVLLNCDHGFVIFFAVADKVHLMYKFRVDFTEALYPAFWVFSAGATLSICSPK

SEQ ID NO: 92349 - protein, 630 aa, Homo sapiens; identical to SEQ ID NO: 92348
  Payload ID: 18485
  Gene Name: tripartite motif containing 25
  Uniprot ID: Q14258
  ENSP ID: ENSP00000445961

SEQ ID NO: 92350 - protein, 43 aa, Homo sapiens
  Payload ID: 18485
  Gene Name: tripartite motif containing 25
  ENSP ID: ENSP00000459980
ECICHICLVEHKTCSPASLSQASADLEHLQGEQDPSSCCQRRQ

SEQ ID NO: 92351 - protein, 539 aa, Homo sapiens
  Payload ID: 18486
  Gene Name: tripartite motif containing 26
  Uniprot ID: Q12899
  ENSP ID: ENSP00000331131
MATSAPLRSLEEEVTCSICLDYLRDPVTIDCGHVFCRSCTTDVRPISGSRPVCPLCKKPFKKENIRPVWQLASLVENIERLKVDKGRQPGEVTREQQDAKLCERHREKLHYYCEDDGKLLCVMCRESREHRPHTAVLMEKAAQPHREKILNHLSTLRRDRDKIQGFQAKGEADILAALKKLQDQRQYIVAEFEQGHQFLREREEHLLEQLAKLEQELTEGREKFKSRGVGELARLALVISELEGKAQQPAAELMQDTRDFLNRYPRKKFWVGKPIARVVKKKTGEFSDKLLSLQRGLREFQGKLLRDLEYKTVSVTLDPQSASGYLQLSEDWKCVTYTSLYKSAYLHPQQFDCEPGVLGSKGFTWGKVYWEVEVEREGWSEDEEEGDEEEEGEEEEEEEEAGYGDGYDDWETDEDEESLGDEEEEEEEEEEEVLESCMVGVARDSVKRKGDLSLRPEDGVWALRLSSSGIWANTSPEAELFPALRPRRVGIALDYEGGTVTFTNAESQELIYTFTATFTRRLVPFLWLKWPGTRLLLRP

SEQ ID NO: 92352 - protein, 539 aa, Homo sapiens; identical to SEQ ID NO: 92351
  Payload ID: 18486
  Gene Name: tripartite motif containing 26
  Uniprot ID: Q12899
  ENSP ID: ENSP00000373102

SEQ ID NO: 92353 - protein, 539 aa, Homo sapiens; identical to SEQ ID NO: 92351
  Payload ID: 18486
  Gene Name: tripartite motif containing 26
  Uniprot ID: Q12899
  ENSP ID: ENSP00000379806

SEQ ID NO: 92354 - protein, 157 aa, Homo sapiens
  Payload ID: 18486
  Gene Name: tripartite motif containing 26
  ENSP ID: ENSP00000387530
MATSAPLRSLEEEVTCSICLDYLRDPVTIDCGHVFCRSCTTDVRPISGSRPVCPLCKKPFKKENIRPVWQLASLVENIERLKVDKGRQPGEVTREQQDAKLCERHREKLHYYCEDDGKLLCVMCRESREHRPHTAVLMEKAAQPHREKILNHLSTLR

SEQ ID NO: 92355 - protein, 122 aa, Homo sapiens
  Payload ID: 18486
  Gene Name: tripartite motif containing 26
  ENSP ID: ENSP00000388005
MATSAPLRSLEEEVTCSICLDYLRDPVTIDCGHVFCRSCTTDVRPISGSRPVCPLCKKPFKKENIRPVWQLASLVENIERLKVDKGRQPGEVTREQQDAKLCERHREKLHYYCEDDGKLLCV

SEQ ID NO: 92356 - protein, 539 aa, Homo sapiens; identical to SEQ ID NO: 92351
  Payload ID: 18486
  Gene Name: tripartite motif containing 26
  Uniprot ID: Q12899
  ENSP ID: ENSP00000389203

SEQ ID NO: 92357 - protein, 248 aa, Homo sapiens
  Payload ID: 18486
  Gene Name: tripartite motif containing 26
  ENSP ID: ENSP00000389386
MATSAPLRSLEEEVTCSICLDYLRDPVTIDCGHVFCRSCTTDVRPISGSRPVCPLCKKPFKKENIRPVWQLASLVENIERLKVDKGRQPGEVTREQQDAKLCERHREKLHYYCEDDGKLLCVMCRESREHRPHTAVLMEKAAQPHREKILNHLSTLRRDRDKIQGFQAKGEADILAALKKLQDQRQYIVAEFEQGHQFLREREEHLLEQLAKLEQELTEGREKFKSRGVGELARLALVISELEGKAQQ

SEQ ID NO: 92358 - protein, 539 aa, Homo sapiens; identical to SEQ ID NO: 92351
  Payload ID: 18486
  Gene Name: tripartite motif containing 26
  Uniprot ID: Q12899
  ENSP ID: ENSP00000390258

SEQ ID NO: 92359 - protein, 248 aa, Homo sapiens; identical to SEQ ID NO: 92357
  Payload ID: 18486
  Gene Name: tripartite motif containing 26
  ENSP ID: ENSP00000390908

SEQ ID NO: 92360 - protein, 157 aa, Homo sapiens; identical to SEQ ID NO: 92354
  Payload ID: 18486
  Gene Name: tripartite motif containing 26
  ENSP ID: ENSP00000391031

SEQ ID NO: 92361 - protein, 248 aa, Homo sapiens; identical to SEQ ID NO: 92357
  Payload ID: 18486
  Gene Name: tripartite motif containing 26
  ENSP ID: ENSP00000391602

SEQ ID NO: 92362 - protein, 539 aa, Homo sapiens; identical to SEQ ID NO: 92351
  Payload ID: 18486
  Gene Name: tripartite motif containing 26
  Uniprot ID: Q12899
  ENSP ID: ENSP00000391879

SEQ ID NO: 92363 - protein, 539 aa, Homo sapiens; identical to SEQ ID NO: 92351
  Payload ID: 18486
  Gene Name: tripartite motif containing 26
  Uniprot ID: Q12899
  ENSP ID: ENSP00000392805

SEQ ID NO: 92364 - protein, 539 aa, Homo sapiens; identical to SEQ ID NO: 92351
  Payload ID: 18486
  Gene Name: tripartite motif containing 26
  Uniprot ID: Q12899
  ENSP ID: ENSP00000393011

SEQ ID NO: 92365 - protein, 159 aa, Homo sapiens
  Payload ID: 18486
  Gene Name: tripartite motif containing 26
  ENSP ID: ENSP00000393753
MATSAPLRSLEEEVTCSICLDYLRDPVTIDCGHVFCRSCTTDVRPISGSRPVCPLCKKPFKKENIRPVWQLEKILNHLSTLRRDRDKIQGFQAKGEADILAALKKLQDQRQYIVAEFEQGHQFLREREEHLLEQLAKLEQELTEGREKFKSRGVGELAR

SEQ ID NO: 92366 - protein, 122 aa, Homo sapiens; identical to SEQ ID NO: 92355
  Payload ID: 18486
  Gene Name: tripartite motif containing 26
  ENSP ID: ENSP00000393827

SEQ ID NO: 92367 - protein, 539 aa, Homo sapiens; identical to SEQ ID NO: 92351
  Payload ID: 18486
  Gene Name: tripartite motif containing 26
  Uniprot ID: Q12899
  ENSP ID: ENSP00000394371

SEQ ID NO: 92368 - protein, 539 aa, Homo sapiens; identical to SEQ ID NO: 92351
  Payload ID: 18486
  Gene Name: tripartite motif containing 26
  Uniprot ID: Q12899
  ENSP ID: ENSP00000394421

SEQ ID NO: 92369 - protein, 539 aa, Homo sapiens; identical to SEQ ID NO: 92351
  Payload ID: 18486
  Gene Name: tripartite motif containing 26
  Uniprot ID: Q12899
  ENSP ID: ENSP00000395491

SEQ ID NO: 92370 - protein, 248 aa, Homo sapiens; identical to SEQ ID NO: 92357
  Payload ID: 18486
  Gene Name: tripartite motif containing 26
  ENSP ID: ENSP00000395820

SEQ ID NO: 92371 - protein, 122 aa, Homo sapiens; identical to SEQ ID NO: 92355
  Payload ID: 18486
  Gene Name: tripartite motif containing 26
  ENSP ID: ENSP00000396089

SEQ ID NO: 92372 - protein, 539 aa, Homo sapiens; identical to SEQ ID NO: 92351
  Payload ID: 18486
  Gene Name: tripartite motif containing 26
  Uniprot ID: Q12899
  ENSP ID: ENSP00000396188

SEQ ID NO: 92373 - protein, 248 aa, Homo sapiens; identical to SEQ ID NO: 92357
  Payload ID: 18486
  Gene Name: tripartite motif containing 26
  ENSP ID: ENSP00000397048

SEQ ID NO: 92374 - protein, 539 aa, Homo sapiens; identical to SEQ ID NO: 92351
  Payload ID: 18486
  Gene Name: tripartite motif containing 26
  Uniprot ID: Q12899
  ENSP ID: ENSP00000398545

SEQ ID NO: 92375 - protein, 159 aa, Homo sapiens; identical to SEQ ID NO: 92365
  Payload ID: 18486
  Gene Name: tripartite motif containing 26
  ENSP ID: ENSP00000400655

SEQ ID NO: 92376 - protein, 122 aa, Homo sapiens; identical to SEQ ID NO: 92355
  Payload ID: 18486
  Gene Name: tripartite motif containing 26
  ENSP ID: ENSP00000400920

SEQ ID NO: 92377 - protein, 248 aa, Homo sapiens; identical to SEQ ID NO: 92357
  Payload ID: 18486
  Gene Name: tripartite motif containing 26
  ENSP ID: ENSP00000402135

SEQ ID NO: 92378 - protein, 539 aa, Homo sapiens; identical to SEQ ID NO: 92351
  Payload ID: 18486
  Gene Name: tripartite motif containing 26
  Uniprot ID: Q12899
  ENSP ID: ENSP00000402395

SEQ ID NO: 92379 - protein, 159 aa, Homo sapiens; identical to SEQ ID NO: 92365
  Payload ID: 18486
  Gene Name: tripartite motif containing 26
  ENSP ID: ENSP00000402684

SEQ ID NO: 92380 - protein, 157 aa, Homo sapiens; identical to SEQ ID NO: 92354
  Payload ID: 18486
  Gene Name: tripartite motif containing 26
  ENSP ID: ENSP00000402990

SEQ ID NO: 92381 - protein, 159 aa, Homo sapiens; identical to SEQ ID NO: 92365
  Payload ID: 18486
  Gene Name: tripartite motif containing 26
  ENSP ID: ENSP00000403395

SEQ ID NO: 92382 - protein, 122 aa, Homo sapiens; identical to SEQ ID NO: 92355
  Payload ID: 18486
  Gene Name: tripartite motif containing 26
  ENSP ID: ENSP00000403765

SEQ ID NO: 92383 - protein, 122 aa, Homo sapiens; identical to SEQ ID NO: 92355
  Payload ID: 18486
  Gene Name: tripartite motif containing 26
  ENSP ID: ENSP00000403887

SEQ ID NO: 92384 - protein, 122 aa, Homo sapiens; identical to SEQ ID NO: 92355
  Payload ID: 18486
  Gene Name: tripartite motif containing 26
  ENSP ID: ENSP00000405526

SEQ ID NO: 92385 - protein, 157 aa, Homo sapiens; identical to SEQ ID NO: 92354
  Payload ID: 18486
  Gene Name: tripartite motif containing 26
  ENSP ID: ENSP00000405710

SEQ ID NO: 92386 - protein, 159 aa, Homo sapiens; identical to SEQ ID NO: 92365
  Payload ID: 18486
  Gene Name: tripartite motif containing 26
  ENSP ID: ENSP00000405791

SEQ ID NO: 92387 - protein, 122 aa, Homo sapiens; identical to SEQ ID NO: 92355
  Payload ID: 18486
  Gene Name: tripartite motif containing 26
  ENSP ID: ENSP00000405923

SEQ ID NO: 92388 - protein, 539 aa, Homo sapiens; identical to SEQ ID NO: 92351
  Payload ID: 18486
  Gene Name: tripartite motif containing 26
  Uniprot ID: Q12899
  ENSP ID: ENSP00000406707

SEQ ID NO: 92389 - protein, 157 aa, Homo sapiens; identical to SEQ ID NO: 92354
  Payload ID: 18486
  Gene Name: tripartite motif containing 26
  ENSP ID: ENSP00000407035

SEQ ID NO: 92390 - protein, 539 aa, Homo sapiens; identical to SEQ ID NO: 92351
  Payload ID: 18486
  Gene Name: tripartite motif containing 26
  Uniprot ID: Q12899
  ENSP ID: ENSP00000407294

SEQ ID NO: 92391 - protein, 539 aa, Homo sapiens; identical to SEQ ID NO: 92351
  Payload ID: 18486
  Gene Name: tripartite motif containing 26
  Uniprot ID: Q12899
  ENSP ID: ENSP00000407876

SEQ ID NO: 92392 - protein, 539 aa, Homo sapiens; identical to SEQ ID NO: 92351
  Payload ID: 18486
  Gene Name: tripartite motif containing 26
  Uniprot ID: Q12899
  ENSP ID: ENSP00000408233

SEQ ID NO: 92393 - protein, 539 aa, Homo sapiens; identical to SEQ ID NO: 92351
  Payload ID: 18486
  Gene Name: tripartite motif containing 26
  Uniprot ID: Q12899
  ENSP ID: ENSP00000409182

SEQ ID NO: 92394 - protein, 539 aa, Homo sapiens; identical to SEQ ID NO: 92351
  Payload ID: 18486
  Gene Name: tripartite motif containing 26
  Uniprot ID: Q12899
  ENSP ID: ENSP00000410446

SEQ ID NO: 92395 - protein, 157 aa, Homo sapiens; identical to SEQ ID NO: 92354
  Payload ID: 18486
  Gene Name: tripartite motif containing 26
  ENSP ID: ENSP00000412165

SEQ ID NO: 92396 - protein, 157 aa, Homo sapiens; identical to SEQ ID NO: 92354
  Payload ID: 18486
  Gene Name: tripartite motif containing 26
  ENSP ID: ENSP00000412641

SEQ ID NO: 92397 - protein, 248 aa, Homo sapiens; identical to SEQ ID NO: 92357
  Payload ID: 18486
  Gene Name: tripartite motif containing 26
  ENSP ID: ENSP00000412838

SEQ ID NO: 92398 - protein, 248 aa, Homo sapiens; identical to SEQ ID NO: 92357
  Payload ID: 18486
  Gene Name: tripartite motif containing 26
  ENSP ID: ENSP00000413673

SEQ ID NO: 92399 - protein, 539 aa, Homo sapiens; identical to SEQ ID NO: 92351
  Payload ID: 18486
  Gene Name: tripartite motif containing 26
  Uniprot ID: Q12899
  ENSP ID: ENSP00000414248

SEQ ID NO: 92400 - protein, 539 aa, Homo sapiens; identical to SEQ ID NO: 92351
  Payload ID: 18486
  Gene Name: tripartite motif containing 26
  Uniprot ID: Q12899
  ENSP ID: ENSP00000415328

SEQ ID NO: 92401 - protein, 539 aa, Homo sapiens; identical to SEQ ID NO: 92351
  Payload ID: 18486
  Gene Name: tripartite motif containing 26
  Uniprot ID: Q12899
  ENSP ID: ENSP00000415755

SEQ ID NO: 92402 - protein, 159 aa, Homo sapiens; identical to SEQ ID NO: 92365
  Payload ID: 18486
  Gene Name: tripartite motif containing 26
  ENSP ID: ENSP00000416276

SEQ ID NO: 92403 - protein, 157 aa, Homo sapiens; identical to SEQ ID NO: 92354
  Payload ID: 18486
  Gene Name: tripartite motif containing 26
  ENSP ID: ENSP00000416664

SEQ ID NO: 92404 - protein, 539 aa, Homo sapiens; identical to SEQ ID NO: 92351
  Payload ID: 18486
  Gene Name: tripartite motif containing 26
  Uniprot ID: Q12899
  ENSP ID: ENSP00000416737

SEQ ID NO: 92405 - protein, 358 aa, Homo sapiens
  Payload ID: 18487
  Gene Name: tripartite motif containing 27
  Uniprot ID: P14373
  ENSP ID: ENSP00000366399
MASGSVAECLQQETTCPVCLQYFAEPMMLDCGHNICCACLARCWGTAETNVSCPQCRETFPQRHMRPNRHLANVTQLVKQLRTERPSGPGGEMGVCEKHREPLKLYCEEDQMPICVVCDRSREHRGHSVLPLEEAVEGFKEQIQNQLDHLKRVKDLKKRRRAQGEQARAELLSLTQMEREKIVWEFEQLYHSLKEHEYRLLARLEELDLAIYNSINGAITQFSCNISHLSSLIAQLEEKQQQPTRELLQDIGDTLSRAERIRIPEPWITPPDLQEKIHIFAQKCLFLTESLKQFTEKMQSDMEKIQELREAQLYSVDVTLDPDTAYPSLILSDNLRQVRYSYLQQDLPDNPERSPSTT

SEQ ID NO: 92406 - protein, 513 aa, Homo sapiens
  Payload ID: 18487
  Gene Name: tripartite motif containing 27
  Uniprot ID: P14373
  ENSP ID: ENSP00000366404
MASGSVAECLQQETTCPVCLQYFAEPMMLDCGHNICCACLARCWGTAETNVSCPQCRETFPQRHMRPNRHLANVTQLVKQLRTERPSGPGGEMGVCEKHREPLKLYCEEDQMPICVVCDRSREHRGHSVLPLEEAVEGFKEQIQNQLDHLKRVKDLKKRRRAQGEQARAELLSLTQMEREKIVWEFEQLYHSLKEHEYRLLARLEELDLAIYNSINGAITQFSCNISHLSSLIAQLEEKQQQPTRELLQDIGDTLSRAERIRIPEPWITPPDLQEKIHIFAQKCLFLTESLKQFTEKMQSDMEKIQELREAQLYSVDVTLDPDTAYPSLILSDNLRQVRYSYLQQDLPDNPERFNLFPCVLGSPCFIAGRHYWEVEVGDKAKWTIGVCEDSVCRKGGVTSAPQNGFWAVSLWYGKEYWALTSPMTALPLRTPLQRVGIFLDYDAGEVSFYNVTERCHTFTFSHATFCGPVRPYFSLSYSGGKSAAPLIICPMSGIDGFSGHVGNHGHSMETSP

SEQ ID NO: 92407 - protein, 513 aa, Homo sapiens; identical to SEQ ID NO: 92406
  Payload ID: 18487
  Gene Name: tripartite motif containing 27
  Uniprot ID: P14373
  ENSP ID: ENSP00000383555

SEQ ID NO: 92408 - protein, 358 aa, Homo sapiens; identical to SEQ ID NO: 92405
  Payload ID: 18487
  Gene Name: tripartite motif containing 27
  Uniprot ID: P14373
  ENSP ID: ENSP00000388622

SEQ ID NO: 92409 - protein, 513 aa, Homo sapiens; identical to SEQ ID NO: 92406
  Payload ID: 18487
  Gene Name: tripartite motif containing 27
  Uniprot ID: P14373
  ENSP ID: ENSP00000392787

SEQ ID NO: 92410 - protein, 248 aa, Homo sapiens
  Payload ID: 18487
  Gene Name: tripartite motif containing 27
  ENSP ID: ENSP00000396425
  MOD_RES (1)..(1): Any amino acid
XLKQFTEKMQSDMEKIQESADSLEGGILDLGSVLSHILPVSELREAQLYSVDVTLDPDTAYPSLILSDNLRQVRYSYLQQDLPDNPERFNLFPCVLGSPCFIAGRHYWEVEVGDKAKWTIGVCEDSVCRKGGVTSAPQNGFWAVSLWYGKEYWALTSPMTALPLRTPLQRVGIFLDYDAGEVSFYNVTERCHTFTFSHATFCGPVRPYFSLSYSGGKSAAPLIICPMSGIDGFSGHVGNHGHSMETSP

SEQ ID NO: 92411 - protein, 249 aa, Homo sapiens
  Payload ID: 18487
  Gene Name: tripartite motif containing 27
  ENSP ID: ENSP00000396844
MASGSVAECLQQETTCPVCLQYFAEPMMLDCGHNICCACLARCWGTAETNVSCPQCRETFPQRHMRPNRHLANVTQLVKQLRTERPSGPGGEMGVCEKHREPLKLYCEEDQMPICVVCDRSREHRGHSVLPLEEAVEGFKEQIQNQLDHLKRVKDLKKRRRAQGEQARAELLSLTQMEREKIVWEFEQLYHSLKEHEYRLLARLEELDLAIYNSINGAITQFSCNISHLSSLIAQLEEKQQQPTRELLQ

SEQ ID NO: 92412 - protein, 248 aa, Homo sapiens; identical to SEQ ID NO: 92410
  Payload ID: 18487
  Gene Name: tripartite motif containing 27
  ENSP ID: ENSP00000398020
  MOD_RES (1)..(1): Any amino acid

SEQ ID NO: 92413 - protein, 207 aa, Homo sapiens
  Payload ID: 18487
  Gene Name: tripartite motif containing 27
  ENSP ID: ENSP00000398968
  MOD_RES (1)..(1): Any amino acid
XLREAQLYSVDVTLDPDTAYPSLILSDNLRQVRYSYLQQDLPDNPERFNLFPCVLGSPCFIAGRHYWEVEVGDKAKWTIGVCEDSVCRKGGVTSAPQNGFWAVSLWYGKEYWALTSPMTALPLRTPLQRVGIFLDYDAGEVSFYNVTERCHTFTFSHATFCGPVRPYFSLSYSGGKSAAPLIICPMSGIDGFSGHVGNHGHSMETSP

SEQ ID NO: 92414 - protein, 248 aa, Homo sapiens; identical to SEQ ID NO: 92410
  Payload ID: 18487
  Gene Name: tripartite motif containing 27
  ENSP ID: ENSP00000400058
  MOD_RES (1)..(1): Any amino acid

SEQ ID NO: 92415 - protein, 248 aa, Homo sapiens; identical to SEQ ID NO: 92410
  Payload ID: 18487
  Gene Name: tripartite motif containing 27
  ENSP ID: ENSP00000401490
  MOD_RES (1)..(1): Any amino acid

SEQ ID NO: 92416 - protein, 249 aa, Homo sapiens; identical to SEQ ID NO: 92411
  Payload ID: 18487
  Gene Name: tripartite motif containing 27
  ENSP ID: ENSP00000403398

SEQ ID NO: 92417 - protein, 513 aa, Homo sapiens; identical to SEQ ID NO: 92406
  Payload ID: 18487
  Gene Name: tripartite motif containing 27
  Uniprot ID: P14373
  ENSP ID: ENSP00000405229

SEQ ID NO: 92418 - protein, 231 aa, Homo sapiens
  Payload ID: 18487
  Gene Name: tripartite motif containing 27
  ENSP ID: ENSP00000407693
  MOD_RES (1)..(1): Any amino acid
XSADSLEGGILDLGSVLSHILPVSELREAQLYSVDVTLDPDTAYPSLILSDNLRQVRYSYLQQDLPDNPERFNLFPCVLGSPCFIAGRHYWEVEVGDKAKWTIGVCEDSVCRKGGVTSAPQNGFWAVSLWYGKEYWALTSPMTALPLRTPLQRVGIFLDYDAGEVSFYNVTERCHTFTFSHATFCGPVRPYFSLSYSGGKSAAPLIICPMSGIDGFSGHVGNHGHSMETSP

SEQ ID NO: 92419 - protein, 249 aa, Homo sapiens; identical to SEQ ID NO: 92411
  Payload ID: 18487
  Gene Name: tripartite motif containing 27
  ENSP ID: ENSP00000407959

SEQ ID NO: 92420 - protein, 52 aa, Homo sapiens
  Payload ID: 18487
  Gene Name: tripartite motif containing 27
  ENSP ID: ENSP00000410163
  MOD_RES (1)..(1): Any amino acid
XLREAQLYSVDVTLDPDTAYPSLILSDNLRQVRYSYLQQDLPDNPERSPSTT

SEQ ID NO: 92421 - protein, 358 aa, Homo sapiens; identical to SEQ ID NO: 92405
  Payload ID: 18487
  Gene Name: tripartite motif containing 27
  Uniprot ID: P14373
  ENSP ID: ENSP00000411026

SEQ ID NO: 92422 - protein, 358 aa, Homo sapiens; identical to SEQ ID NO: 92405
  Payload ID: 18487
  Gene Name: tripartite motif containing 27
  Uniprot ID: P14373
  ENSP ID: ENSP00000412445

SEQ ID NO: 92423 - protein, 513 aa, Homo sapiens; identical to SEQ ID NO: 92406
  Payload ID: 18487
  Gene Name: tripartite motif containing 27
  Uniprot ID: P14373
  ENSP ID: ENSP00000414793

SEQ ID NO: 92424 - protein, 247 aa, Homo sapiens
  Payload ID: 18487
  Gene Name: tripartite motif containing 27
  ENSP ID: ENSP00000414955
LKQFTEKMQSDMEKIQESADSLEGGILDLGSVLSHILPVSELREAQLYSVDVTLDPDTAYPSLILSDNLRQVRYSYLQQDLPDNPERFNLFPCVLGSPCFIAGRHYWEVEVGDKAKWTIGVCEDSVCRKGGVTSAPQNGFWAVSLWYGKEYWALTSPMTALPLRTPLQRVGIFLDYDAGEVSFYNVTERCHTFTFSHATFCGPVRPYFSLSYSGGKSAAPLIICPMSGIDGFSGHVGNHGHSMETSP

SEQ ID NO: 92425 - protein, 358 aa, Homo sapiens; identical to SEQ ID NO: 92405
  Payload ID: 18487
  Gene Name: tripartite motif containing 27
  Uniprot ID: P14373
  ENSP ID: ENSP00000416281

SEQ ID NO: 92426 - protein, 249 aa, Homo sapiens; identical to SEQ ID NO: 92411
  Payload ID: 18487
  Gene Name: tripartite motif containing 27
  ENSP ID: ENSP00000416983

SEQ ID NO: 92427 - protein, 835 aa, Homo sapiens
  Payload ID: 18488
  Gene Name: tripartite motif containing 28
  Uniprot ID: Q13263
  ENSP ID: ENSP00000253024
MAASAAAASAAAASAASGSPGPGEGSAGGEKRSTAPSAAASASASAAASSPAGGGAEALELLEHCGVCRERLRPEREPRLLPCLHSACSACLGPAAPAAANSSGDGGAAGDGTVVDCPVCKQQCFSKDIVENYFMRDSGSKAATDAQDANQCCTSCEDNAPATSYCVECSEPLCETCVEAHQRVKYTKDHTVRSTGPAKSRDGERTVYCNVHKHEPLVLFCESCDTLTCRDCQLNAHKDHQYQFLEDAVRNQRKLLASLVKRLGDKHATLQKSTKEVRSSIRQVSDVQKRVQVDVKMAILQIMKELNKRGRVLVNDAQKVTEGQQERLERQHWTMTKIQKHQEHILRFASWALESDNNTALLLSKKLIYFQLHRALKMIVDPVEPHGEMKFQWDLNAWTKSAEAFGKIVAERPGTNSTGPAPMAPPRAPGPLSKQGSGSSQPMEVQEGYGFGSGDDPYSSAEPHVSGVKRSRSGEGEVSGLMRKVPRVSLERLDLDLTADSQPPVFKVFPGSTTEDYNLIVIERGAAAAATGQPGTAPAGTPGAPPLAGMAIVKEEETEAAIGAPPTATEGPETKPVLMALAEGPGAEGPRLASPSGSTSSGLEVVAPEGTSAPGGGPGTLDDSATICRVCQKPGDLVMCNQCEFCFHLDCHLPALQDVPGEEWSCSLCHVLPDLKEEDGSLSLDGADSTGVVAKLSPANQRKCERVLLALFCHEPCRPLHQLATDSTFSLDQPGGTLDLTLIRARLQEKLSPPYSSPQEFAQDVGRMFKQFNKLTEDKADVQSIIGLQRFFETRMNEAFGDTKFSAVLVEPPPMSLPGAGLSSQELSGGPGDGP

SEQ ID NO: 92428 - protein, 753 aa, Homo sapiens
  Payload ID: 18488
  Gene Name: tripartite motif containing 28
  Uniprot ID: Q13263
  ENSP ID: ENSP00000342232
MAASAAAASAAAASAASGSPGPGEGSAGGEKRSTAPSAAASASASAAASSPAGGGAEALELLEHCGVCRERLRPEREPRLLPCLHSACSACLGPAAPAAANSSGDGGAAGDGTGPAKSRDGERTVYCNVHKHEPLVLFCESCDTLTCRDCQLNAHKDHQYQFLEDAVRNQRKLLASLVKRLGDKHATLQKSTKEVRSSIRQVSDVQKRVQVDVKMAILQIMKELNKRGRVLVNDAQKVTEGQQERLERQHWTMTKIQKHQEHILRFASWALESDNNTALLLSKKLIYFQLHRALKMIVDPVEPHGEMKFQWDLNAWTKSAEAFGKIVAERPGTNSTGPAPMAPPRAPGPLSKQGSGSSQPMEVQEGYGFGSGDDPYSSAEPHVSGVKRSRSGEGEVSGLMRKVPRVSLERLDLDLTADSQPPVFKVFPGSTTEDYNLIVIERGAAAAATGQPGTAPAGTPGAPPLAGMAIVKEEETEAAIGAPPTATEGPETKPVLMALAEGPGAEGPRLASPSGSTSSGLEVVAPEGTSAPGGGPGTLDDSATICRVCQKPGDLVMCNQCEFCFHLDCHLPALQDVPGEEWSCSLCHVLPDLKEEDGSLSLDGADSTGVVAKLSPANQRKCERVLLALFCHEPCRPLHQLATDSTFSLDQPGGTLDLTLIRARLQEKLSPPYSSPQEFAQDVGRMFKQFNKLTEDKADVQSIIGLQRFFETRMNEAFGDTKFSAVLVEPPPMSLPGAGLSSQELSGGPGDGP

SEQ ID NO: 92429 - protein, 61 aa, Homo sapiens
  Payload ID: 18488
  Gene Name: tripartite motif containing 28
  ENSP ID: ENSP00000470503
MRDSGSKAATDAQDANQCCTSCEDNAPATSYCVECSEPLCETCVEAHQRVKYTKDHTVRST

SEQ ID NO: 92430 - protein, 460 aa, Homo sapiens
  Payload ID: 18488
  Gene Name: tripartite motif containing 28
  ENSP ID: ENSP00000471303
IYFQLHRALKMIVDPVEPHGEMKFQWDLNAWTKSAEAFGKIVAERPGTNSTGPAPMAPPRAPGPLSKQGSGSSQPMEVQEGYGFGSEPHVSGVKRSRSGEGEVSGLMRKVPRVSLERLDLDLTADSQPPVFKVFPGSTTEDYNLIVIERGAAAAATGQPGTAPAGTPGAPPLAGMAIVKEEETEAAIGAPPTATEGPETKPVLMALAEGPGAEGPRLASPSGSTSSGLEVVAPEGTSAPGGGPGTLDDSATICRVCQKPGDLVMCNQCEFCFHLDCHLPALQDVPGEEWSCSLCHVLPDLKEEDGSLSLDGADSTGVVAKLSPANQRKCERVLLALFCHEPCRPLHQLATDSTFSLDQPGGTLDLTLIRARLQEKLSPPYSSPQEFAQDVGRMFKQFNKLTEDKADVQSIIGLQRFFETRMNEAFGDTKFSAVLVEPPPMSLPGAGLSSQELSGGPGDGP

SEQ ID NO: 92431 - protein, 162 aa, Homo sapiens
  Payload ID: 18488
  Gene Name: tripartite motif containing 28
  ENSP ID: ENSP00000472586
MRLGAQRPASVWSGGGAERGITLYKVVDCPVCKQQCFSKDIVENYFMRDSGSKAATDAQDANQCCTSCEDNAPATSYCVECSEPLCETCVEAHQRVKYTKDHTVRSTGPAKSRDGERTVYCNVHKHEPLVLFCESCDTLTCRDCQLNAHKDHQYQFLEDAVR

SEQ ID NO: 92432 - protein, 178 aa, Homo sapiens
  Payload ID: 18488
  Gene Name: tripartite motif containing 28
  ENSP ID: ENSP00000473126
MRDSGSKAATDAQDANQCCTSCEDNAPATSYCVECSEPLCETCVEAHQRVKYTKDHTVRSTGPAKSRDGERTVYCNVHKHEPLVLFCESCDTLTCRDCQLNAHKDHQYQFLEDAVRNQRKLLASLVKRLGDKHATLQKSTKEVRSSIRQVSDVQKRVQVDVKMAILQIMKELNKRGRV

SEQ ID NO: 92433 - protein, 588 aa, Homo sapiens
  Payload ID: 18489
  Gene Name: tripartite motif containing 29
  Uniprot ID: Q14134
  ENSP ID: ENSP00000343129
MEAADASRSNGSSPEARDARSPSGPSGSLENGTKADGKDAKTTNGHGGEAAEGKSLGSALKPGEGRSALFAGNEWRRPIIQFVESGDDKNSNYFSMDSMEGKRSPYAGLQLGAAKKPPVTFAEKGELRKSIFSESRKPTVSIMEPGETRRNSYPRADTGLFSRSKSGSEEVLCDSCIGNKQKAVKSCLVCQASFCELHLKPHLEGAAFRDHQLLEPIRDFEARKCPVHGKTMELFCQTDQTCICYLCMFQEHKNHSTVTVEEAKAEKETELSLQKEQLQLKIIEIEDEAEKWQKEKDRIKSFTTNEKAILEQNFRDLVRDLEKQKEEVRAALEQREQDAVDQVKVIMDALDERAKVLHEDKQTREQLHSISDSVLFLQEFGALMSNYSLPPPLPTYHVLLEGEGLGQSLGNFKDDLLNVCMRHVEKMCKADLSRNFIERNHMENGGDHRYVNNYTNSFGGEWSAPDTMKRYSMYLTPKGGVRTSYQPSSPGRFTKETTQKNFNNLYGTKGNYTSRVWEYSSSIQNSDNDLPVVQGSSSFSLKGYPSLMRSQSPKAQPQTWKSGKQTMLSHYRPFYVNKGNGIGSNEAP

SEQ ID NO: 92434 - protein, 38 aa, Homo sapiens
  Payload ID: 18489
  Gene Name: tripartite motif containing 29
  ENSP ID: ENSP00000433084
MEAADASRSNGSSPEARDARSPSGPSGSLENGTKADGK

SEQ ID NO: 92435 - protein, 119 aa, Homo sapiens
  Payload ID: 18489
  Gene Name: tripartite motif containing 29
  ENSP ID: ENSP00000433122
  MOD_RES (1)..(1): Any amino acid
XNYTNSFGGEWSAPDTMKRYSMYLTPKGGVRTSYQPSSPGRFTKETTQKNFNNLYGTKGNYTSRVWEYSSSIQNSDNDLPVVQGSSSFSLKGYPSLMRSQSPKAQPQTWKSGKQTMLVV

SEQ ID NO: 92436 - protein, 95 aa, Homo sapiens
  Payload ID: 18489
  Gene Name: tripartite motif containing 29
  ENSP ID: ENSP00000433324
MEAADASRSNGSSPEARDARSPSGPSGSLENGTKADGKDAKTTNGHGGEAAEGKSLGSALKPGEGRSALFAGNEWRRPIIQFVESGDDKNSNYFS

SEQ ID NO: 92437 - protein, 169 aa, Homo sapiens
  Payload ID: 18489
  Gene Name: tripartite motif containing 29
  ENSP ID: ENSP00000433779
MEAADASRSNGSSPEARDARSPSGPSGSLENGTKADGKDAKTTNGHGGEAAEGKSLGSALKPGEEATRYLCRKGRAAQVHFLGVPEAHGVHHGARGDPAEQLPPGRHGPFFTVQVRLRGGAVRLLHRQQAEGGQVLPGVPGLLLRAASQAPPGGRRLPRPPAARAHPGL

SEQ ID NO: 92438 - protein, 97 aa, Homo sapiens
  Payload ID: 18489
  Gene Name: tripartite motif containing 29
  ENSP ID: ENSP00000435600
MEAADASRSNGSSPEARDARSPSGPSGSLENGTKADGKDAKTTNGHGGEAAEGKSLGSALKPGEGRSALFAGNEWRRPIIQFVESGDDKNSNYFSMD

SEQ ID NO: 92439 - protein, 121 aa, Homo sapiens
  Payload ID: 18489
  Gene Name: tripartite motif containing 29
  ENSP ID: ENSP00000435696
MKRYSMYLTPKGGVRTSYQPSSPGRFTKETTQKNFNNLYGTKGNYTSRVWEYSSSIQNSDNDLPVVQGSSSFSLKGYPSLMRSQSPKAQPQTWKSGKQTMLSHYRPFYVNKGNGIGSNEAP

SEQ ID NO: 92440 - protein, 327 aa, Homo sapiens
  Payload ID: 18489
  Gene Name: tripartite motif containing 29
  ENSP ID: ENSP00000436015
MVPGISETELSLQKEQLQLKIIEIEDEAEKWQKEKDRIKSFTTNEKAILEQNFRDLVRDLEKQKEEVRAALEQREQDAVDQVKVIMDALDERAKVLHEDKQTREQLHSISDSVLFLQEFGALMSNYSLPPPLPTYHVLLEGEGLGQSLGNFKDDLLNVCMRHVEKMCKADLSRNFIERNHMENGGDHRYVNNYTNSFGGEWSAPDTMKRYSMYLTPKGGVRTSYQPSSPGRFTKETTQKNFNNLYGTKGNYTSRVWEYSSSIQNSDNDLPVVQGSSSFSLKGYPSLMRSQSPKAQPQTWKSGKQTMLSHYRPFYVNKGNGIGSNEAP

SEQ ID NO: 92441 - protein, 94 aa, Homo sapiens
  Payload ID: 18489
  Gene Name: tripartite motif containing 29
  ENSP ID: ENSP00000436279
MSDPKDFSQWWNPGGVRTSYQPSSPGRFTKETTQKNFNNLYGTKGNYTSRVWEYSSSIQNSDNDLPVVQGSSSFSLKGYPSLMRSQSPKAQPQT

SEQ ID NO: 92442 - protein, 89 aa, Homo sapiens
  Payload ID: 18489
  Gene Name: tripartite motif containing 29
  ENSP ID: ENSP00000436567
MEAADASRSNGSSPEARDARSPSGPSGSLENGTKADGKDAKTTNGHGGEAAEGKSLGSALKPGEGRSALFAGNEWRRPIIQFVESGDDK

SEQ ID NO: 92443 - protein, 169 aa, Homo sapiens
  Payload ID: 18489
  Gene Name: tripartite motif containing 29
  ENSP ID: ENSP00000437078
NYTNSFGGEWSAPDTMKRYSMYLTPKGGVRTSYQPSSPGRFTKETTQKNFNNLYGTKGNYTSRVWEYSSSIQNSDNDLPVVQGSSSFSLKGTGKTPYQFTTLGQATAEFSKPLGRSGLSKNNPGYPSLMRSQSPKAQPQTWKSGKQTMLSHYRPFYVNKGNGIGSNEAP

SEQ ID NO: 92444 - protein, 169 aa, Homo sapiens; identical to SEQ ID NO: 92437
  Payload ID: 18489
  Gene Name: tripartite motif containing 29
  ENSP ID: ENSP00000485773

SEQ ID NO: 92445 - protein, 744 aa, Homo sapiens
  Payload ID: 18490
  Gene Name: tripartite motif containing 3
  Uniprot ID: O75382
  ENSP ID: ENSP00000340797
MAKREDSPGPEVQPMDKQFLVCSICLDRYQCPKVLPCLHTFCERCLQNYIPAQSLTLSCPVCRQTSILPEQGVSALQNNFFISSLMEAMQQAPDGAHDPEDPHPLSVVAGRPLSCPNHEGKTMEFYCEACETAMCGECRAGEHREHGTVLLRDVVEQHKAALQRQLEAVRGRLPQLSAAIALVGGISQQLQERKAEALAQISAAFEDLEQALQQRKQALVSDLETICGAKQKVLQSQLDTLRQGQEHIGSSCSFAEQALRLGSAPEVLLVRKHMRERLAALAAQAFPERPHENAQLELVLEVDGLRRSVLNLGALLTTSATAHETVATGEGLRQALVGQPASLTVTTKDKDGRLVRTGSAELRAEITGPDGTRLPVPVVDHKNGTYELVYTARTEGELLLSVLLYGQPVRGSPFRVRALRPGDLPPSPDDVKRRVKSPGGPGSHVRQKAVRRPSSMYSTGGKRKDNPIEDELVFRVGSRGREKGEFTNLQGVSAASSGRIVVADSNNQCIQVFSNEGQFKFRFGVRGRSPGQLQRPTGVAVDTNGDIIVADYDNRWVSIFSPEGKFKTKIGAGRLMGPKGVAVDRNGHIIVVDNKSCCVFTFQPNGKLVGRFGGRGATDRHFAGPHFVAVNNKNEIVVTDFHNHSVKVYSADGEFLFKFGSHGEGNGQFNAPTGVAVDSNGNIIVADWGNSRIQVFDSSGSFLSYINTSAEPLYGPQGLALTSDGHVVVADAGNHCFKAYRYLQ

SEQ ID NO: 92446 - protein, 744 aa, Homo sapiens; identical to SEQ ID NO: 92445
  Payload ID: 18490
  Gene Name: tripartite motif containing 3
  Uniprot ID: O75382
  ENSP ID: ENSP00000352508

SEQ ID NO: 92447 - protein, 260 aa, Homo sapiens
  Payload ID: 18490
  Gene Name: tripartite motif containing 3
  ENSP ID: ENSP00000433070
MAKREDSPGPEVQPMDKQFLVCSICLDRYQCPKVLPCLHTFCERCLQNYIPAQSLTLSCPVCRQTSILPEQGVSALQNNFFISSLMEAMQQAPDGAHDPEDPHPLSVVAGRPLSCPNHEGKTMEFYCEACETAMCGECRAGEHREHGTVLLRDVVEQHKAALQRQLEAVRGRLPQLSAAIALVGGISQQLQERKAEALAQISAAFEDLEQALQQRKQALVSDLETICGAKQKVLQSQLDTLRQGQEHIGSSCSFAEQALR

SEQ ID NO: 92448 - protein, 744 aa, Homo sapiens; identical to SEQ ID NO: 92445
  Payload ID: 18490
  Gene Name: tripartite motif containing 3
  Uniprot ID: O75382
  ENSP ID: ENSP00000433102

SEQ ID NO: 92449 - protein, 96 aa, Homo sapiens
  Payload ID: 18490
  Gene Name: tripartite motif containing 3
  ENSP ID: ENSP00000437283
MAKREDSPGPEVQPMDKQFLVCSICLDRYQCPKVLPCLHTFCERCLQNYIPAQSLTLSCPVCRQTSILPEQGVSALQNNFFISSLMEAMQQAPDGA

SEQ ID NO: 92450 - protein, 625 aa, Homo sapiens
  Payload ID: 18490
  Gene Name: tripartite motif containing 3
  Uniprot ID: O75382
  ENSP ID: ENSP00000445460
MKTMEFYCEACETAMCGECRAGEHREHGTVLLRDVVEQHKAALQRQLEAVRGRLPQLSAAIALVGGISQQLQERKAEALAQISAAFEDLEQALQQRKQALVSDLETICGAKQKVLQSQLDTLRQGQEHIGSSCSFAEQALRLGSAPEVLLVRKHMRERLAALAAQAFPERPHENAQLELVLEVDGLRRSVLNLGALLTTSATAHETVATGEGLRQALVGQPASLTVTTKDKDGRLVRTGSAELRAEITGPDGTRLPVPVVDHKNGTYELVYTARTEGELLLSVLLYGQPVRGSPFRVRALRPGDLPPSPDDVKRRVKSPGGPGSHVRQKAVRRPSSMYSTGGKRKDNPIEDELVFRVGSRGREKGEFTNLQGVSAASSGRIVVADSNNQCIQVFSNEGQFKFRFGVRGRSPGQLQRPTGVAVDTNGDIIVADYDNRWVSIFSPEGKFKTKIGAGRLMGPKGVAVDRNGHIIVVDNKSCCVFTFQPNGKLVGRFGGRGATDRHFAGPHFVAVNNKNEIVVTDFHNHSVKVYSADGEFLFKFGSHGEGNGQFNAPTGVAVDSNGNIIVADWGNSRIQVFDSSGSFLSYINTSAEPLYGPQGLALTSDGHVVVADAGNHCFKAYRYLQ

SEQ ID NO: 92451 - protein, 425 aa, Homo sapiens [sequence omitted]

SEQ ID NO: 92452 - protein, 425 aa, Homo sapiens
  Payload ID: 18491
  Gene Name: tripartite motif containing 31
  Uniprot ID: Q9BZY9
  ENSP ID: ENSP00000365924
MASGQFVNKLQEEVICPICLDILQKPVTIDCGHNFCLKCITQIGETSCGFFKCPLCKTSVRKNAIRFNSLLRNLVEKIQALQASEVQSKRKEATCPRHQEMFHYFCEDDGKFLCFVCRESKDHKSHNVSLIEEAAQNYQGQIQEQIQVLQQKEKETVQVKAQGVHRVDVFTDQVEHEKQRILTEFELLHQVLEEEKNFLLSRIYWLGHEGTEAGKHYVASTEPQLNDLKKLVDSLKTKQNMPPRQLLEDIKVVLCRSEEFQFLNPTPVPLELEKKLSEAKSRHDSITGSLKKFKDQLQADRKKDENRFFKSMNKNDMKSWGLLQKNNHKMNKTSEPGSSSAGGRTTSGPPNHHSSAPSHSLFRASSAGKVTFPVCLLASYDEISGQGASSQDTKTFDVALSEELHAALSEWLTAIRAWFCEVPSS

SEQ ID NO: 92453 - protein, 425 aa, Homo sapiens [sequence omitted]

SEQ ID NO: 92454 - protein, 425 aa, Homo sapiens; identical to SEQ ID NO: 92452
  Payload ID: 18491
  Gene Name: tripartite motif containing 31
  Uniprot ID: Q9BZY9
  ENSP ID: ENSP00000391685

SEQ ID NO: 92455 - protein, 425 aa, Homo sapiens; identical to SEQ ID NO: 92452
  Payload ID: 18491
  Gene Name: tripartite motif containing 31
  Uniprot ID: Q9BZY9
  ENSP ID: ENSP00000398677

SEQ ID NO: 92456 - protein, 248 aa, Homo sapiens
  Payload ID: 18491
  Gene Name: tripartite motif containing 31
  ENSP ID: ENSP00000404933
MASGQFVNKLQEEVICPICLDILQKPVTIDCGHNFCLKCITQIGETSCGFFKCPLCKTSVRKNAIRFNSLLRNLVEKIQALQASEVQSKRKEATCPRHQEMFHYFCEDDGKFLCFVCRESKDHKSHNVSLIEEAAQNYQGQIQEQIQVLQQKEKETVQVKAQGVHRVDVFTDQVEHEKQRILTEFELLHQVLEEEKNFLLSRIYWLGHEGTEAGKHYVASTEPQLNDLKKLVDSLKTKQNMPPRQLLE

SEQ ID NO: 92457 - protein, 425 aa, Homo sapiens; identical to SEQ ID NO: 92452
  Payload ID: 18491
  Gene Name: tripartite motif containing 31
  Uniprot ID: Q9BZY9
  ENSP ID: ENSP00000409501

SEQ ID NO: 92458 - protein, 425 aa, Homo sapiens
  Payload ID: 18491
  Gene Name: tripartite motif containing 31
  ENSP ID: ENSP00000411879
MASGQFVNKLQEEVICPICLDILQKPVTIDCGHNFCLKCITQIGETSCGFFKCPLCKTSVRKNAIRFNSLLRNLVEKIQALQASEVQSKRKEATCPRHQEMFHYFCEDDGKFLCFVCRESKDHKSHNVSLIEEAAQNYQGQIQEQIQVLQQKEKETVQVKAQGVHRVDVFTDQVEHEKQRILTEFELLHQVLEEEKNFLLSRIYWLGHEGTEAGKHYVASTEPQLNDLKKLIDSLKTKQNMPPRQLLEDIKVVLCRSEEFQFLNPTPVPLELEKKLSEAKSRHDSITGSLKKFKDQLQADRKKDENRFFKSMNKNDMKSWGLLQKNNHKMNKTSEPGSSSAGGRTTSGPPNHHSSAPSHSLFRASSAGKVTFPVCLLASYDEISGQGASSQDTKTFDVALSEELHAALSEWLTAIRAWFCKVPSS

SEQ ID NO: 92459 - protein, 653 aa, Homo sapiens
  Payload ID: 18492
  Gene Name: tripartite motif containing 32
  Uniprot ID: Q13049
  ENSP ID: ENSP00000363095
MAAAAASHLNLDALREVLECPICMESFTEEQLRPKLLHCGHTICRQCLEKLLASSINGVRCPFCSKITRITSLTQLTDNLTVLKIIDTAGLSEAVGLLMCRSCGRRLPRQFCRSCGLVLCEPCREADHQPPGHCTLPVKEAAEERRRDFGEKLTRLRELMGELQRRKAALEGVSKDLQARYKAVLQEYGHEERRVQDELARSRKFFTGSLAEVEKSNSQVVEEQSYLLNIAEVQAVSRCDYFLAKIKQADVALLEETADEEEPELTASLPRELTLQDVELLKVGHVGPLQIGQAVKKPRTVNVEDSWAMEATASAASTSVTFREMDMSPEEVVASPRASPAKQRGPEAASNIQQCLFLKKMGAKGSTPGMFNLPVSLYVTSQGEVLVADRGNYRIQVFTRKGFLKEIRRSPSGIDSFVLSFLGADLPNLTPLSVAMNCQGLIGVTDSYDNSLKVYTLDGHCVACHRSQLSKPWGITALPSGQFVVTDVEGGKLWCFTVDRGSGVVKYSCLCSAVRPKFVTCDAEGTVYFTQGLGLNLENRQNEHHLEGGFSIGSVGPDGQLGRQISHFFSENEDFRCIAGMCVDARGDLIVADSSRKEILHFPKGGGYSVLIREGLTCPVGIALTPKGQLLVLDCWDHCIKIYSYHLRRYSTP

SEQ ID NO: 92460 - protein, 653 aa, Homo sapiens; identical to SEQ ID NO: 92459
  Payload ID: 18492
  Gene Name: tripartite motif containing 32
  Uniprot ID: Q13049
  ENSP ID: ENSP00000408292

SEQ ID NO: 92461 - protein, 172 aa, Homo sapiens
  Payload ID: 18492
  Gene Name: tripartite motif containing 32
  ENSP ID: ENSP00000412603
MAAAAASHLNLDALREVLECPICMESFTEEQLRPKLLHCGHTICRQCLEKLLASSINGVRCPFCSKITRITSLTQLTDNLTVLKIIDTAGLSEAVGLLMCRSCGRRLPRQFCRSCGLVLCEPCREADHQPPGHCTLPVKEAAEERRRDFGEKLTRLRELMGELQRRKAALEG

SEQ ID NO: 92462 - protein, 1127 aa, Homo sapiens
  Payload ID: 18493
  Gene Name: tripartite motif containing 33
  Uniprot ID: Q9UPN9
  ENSP ID: ENSP00000351250
MAENKGGGEAESGGGGSGSAPVTAGAAGPAAQEAEPPLTAVLVEEEEEEGGRAGAEGGAAGPDDGGVAAASSGSAQAASSPAASVGTGVAGGAVSTPAPAPASAPAPGPSAGPPPGPPASLLDTCAVCQQSLQSRREAEPKLLPCLHSFCLRCLPEPERQLSVPIPGGSNGDIQQVGVIRCPVCRQECRQIDLVDNYFVKDTSEAPSSSDEKSEQVCTSCEDNASAVGFCVECGEWLCKTCIEAHQRVKFTKDHLIRKKEDVSESVGASGQRPVFCPVHKQEQLKLFCETCDRLTCRDCQLLEHKEHRYQFLEEAFQNQKGAIENLLAKLLEKKNYVHFAATQVQNRIKEVNETNKRVEQEIKVAIFTLINEINKKGKSLLQQLENVTKERQMKLLQQQNDITGLSRQVKHVMNFTNWAIASGSSTALLYSKRLITFQLRHILKARCDPVPAANGAIRFHCDPTFWAKNVVNLGNLVIESKPAPGYTPNVVVGQVPPGTNHISKTPGQINLAQLRLQHMQQQVYAQKHQQLQQMRMQQPPAPVPTTTTTTQQHPRQAAPQMLQQQPPRLISVQTMQRGNMNCGAFQAHQMRLAQNAARIPGIPRHSGPQYSMMQPHLQRQHSNPGHAGPFPVVSVHNTTINPTSPTTATMANANRGPTSPSVTAIELIPSVTNPENLPSLPDIPPIQLEDAGSSSLDNLLSRYISGSHLPPQPTSTMNPSPGPSALSPGSSGLSNSHTPVRPPSTSSTGSRGSCGSSGRTAEKTSLSFKSDQVKVKQEPGTEDEICSFSGGVKQEKTEDGRRSACMLSSPESSLTPPLSTNLHLESELDALASLENHVKIEPADMNESCKQSGLSSLVNGKSPIRSLMHRSARIGGDGNNKDDDPNEDWCAVCQNGGDLLCCEKCPKVFHLTCHVPTLLSFPSGDWICTFCRDIGKPEVEYDCDNLQHSKKGKTAQGLSPVDQRKCERLLLYLYCHELSIEFQEPVPASIPNYYKIIKKPMDLSTVKKKLQKKHSQHYQIPDDFVADVRLIFKNCERFNEMMKVVQVYADTQEINLKADSEVAQAGKAVALYFEDKLTEIYSDRTFAPLPEFEQEEDDGEVTEDSDEDFIQPRRKRLKSDERPVHIK

SEQ ID NO: 92463 - protein, 1110 aa, Homo sapiens
  Payload ID: 18493
  Gene Name: tripartite motif containing 33
  Uniprot ID: Q9UPN9
  ENSP ID: ENSP00000358556
MAENKGGGEAESGGGGSGSAPVTAGAAGPAAQEAEPPLTAVLVEEEEEEGGRAGAEGGAAGPDDGGVAAASSGSAQAASSPAASVGTGVAGGAVSTPAPAPASAPAPGPSAGPPPGPPASLLDTCAVCQQSLQSRREAEPKLLPCLHSFCLRCLPEPERQLSVPIPGGSNGDIQQVGVIRCPVCRQECRQIDLVDNYFVKDTSEAPSSSDEKSEQVCTSCEDNASAVGFCVECGEWLCKTCIEAHQRVKFTKDHLIRKKEDVSESVGASGQRPVFCPVHKQEQLKLFCETCDRLTCRDCQLLEHKEHRYQFLEEAFQNQKGAIENLLAKLLEKKNYVHFAATQVQNRIKEVNETNKRVEQEIKVAIFTLINEINKKGKSLLQQLENVTKERQMKLLQQQNDITGLSRQVKHVMNFTNWAIASGSSTALLYSKRLITFQLRHILKARCDPVPAANGAIRFHCDPTFWAKNVVNLGNLVIESKPAPGYTPNVVVGQVPPGTNHISKTPGQINLAQLRLQHMQQQVYAQKHQQLQQMRMQQPPAPVPTTTTTTQQHPRQAAPQMLQQQPPRLISVQTMQRGNMNCGAFQAHQMRLAQNAARIPGIPRHSGPQYSMMQPHLQRQHSNPGHAGPFPVVSVHNTTINPTSPTTATMANANRGPTSPSVTAIELIPSVTNPENLPSLPDIPPIQLEDAGSSSLDNLLSRYISGSHLPPQPTSTMNPSPGPSALSPGSSGLSNSHTPVRPPSTSSTGSRGSCGSSGRTAEKTSLSFKSDQVKVKQEPGTEDEICSFSGGVKQEKTEDGRRSACMLSSPESSLTPPLSTNLHLESELDALASLENHVKIEPADMNESCKQSGLSSLVNGKSPIRSLMHRSARIGGDGNNKDDDPNEDWCAVCQNGGDLLCCEKCPKVFHLTCHVPTLLSFPSGDWICTFCRDIGKPEVEYDCDNLQHSKKGKTAQGLSPVDQRKCERLLLYLYCHELSIEFQEPVPASIPNYYKIIKKPMDLSTVKKKLQKKHSQHYQIPDDFVADVRLIFKNCERFNEADSEVAQAGKAVALYFEDKLTEIYSDRTFAPLPEFEQEEDDGEVTEDSDEDFIQPRRKRLKSDERPVHIK

SEQ ID NO: 92464 - protein, 888 aa, Homo sapiens
  Payload ID: 18493
  Gene Name: tripartite motif containing 33
  ENSP ID: ENSP00000402333
  MOD_RES (1)..(1): Any amino acid
XSVGASGQRPVFCPVHKQEQLKLFCETCDRLTCRDCQLLEHKEHRYQFLEEAFQNQKGAIENLLAKLLEKKNYVHFAATQVQNRIKEVNETNKRVEQEIKVAIFTLINEINKKGKSLLQQLENVTKERQMKLLQQQNDITGLSRQVKHVMNFTNWAIASGSSTALLYSKRLITFQLRHILKARCDPVPAANGAIRFHCDPTFWAKNVVNLGNLVIESKPAPGYTPNVVVGQVPPGTNHISKTPGQINLAQLRLQHMQQQVYAQKHQQLQQMRMQQPPAPVPTTTTTTQQHPRQAAPQMLQQQPPRLISVQTMQRGNMNCGAFQAHQMRLAQNAARIPGIPRHSGPQYSMMQPHLQRQHSNPGHAGPFPVVSVHNTTINPTSPTTATMANANRGPTSPSVTAIELIPSVTNPENLPSLPDIPPIQANVVPMMHSWYEFGAREKTQDQNVLEDAGSSSLDNLLSRYISGSHLPPQPTSTMNPSPGPSALSPGSSGLSNSHTPVRPPSTSSTGSRGSCGSSGRTAEKTSLSFKSDQVKVKQEPGTEDEICSFSGGVKQEKTEDGRRSACMLSSPESSLTPPLSTNLHLESELDALASLENHVKIEPADMNESCKQSGLSSLVNGKSPIRSLMHRSARIGGDGNNKDDDPNEDWCAVCQNGGDLLCCEKCPKVFHLTCHVPTLLSFPSGDWICTFCRDIGKPEVEYDCDNLQHSKKGKTAQGLSPVDQRKCERLLLYLYCHELSIEFQEPVPASIPNYYKIIKKPMDLSTVKKKLQKKHSQHYQIPDDFVADVRLIFKNCERFNEMMKVVQVYADTQEINLKADSEVAQAGKAVALYFEDKLTEIYSDRTFAPLPEFEQEEDDGEVTEDSDEDFIQPRRKRLKSDERPVHIK

SEQ ID NO: 92465 - protein, 1119 aa, Homo sapiens
  Payload ID: 18493
  Gene Name: tripartite motif containing 33
  ENSP ID: ENSP00000412077
MAENKGGGEAESGGGGSGSAPVTAGAAGPAAQEAEPPLTAVLVEEEEEEGGRAGAEGGAAGPDDGGVAAASSGSAQAASSPAASVGTGVAGGAVSTPAPAPASAPAPGPSAGPPPGPPASLLDTCAVCQQSLQSRREAEPKLLPCLHSFCLRCLPEPERQLSVPIPGGSNGDIQQVGVIRCPVCRQECRQIDLVDNYFVKDTSEAPSSSDEKSEQVCTSCEDNASAVGFCVECGEWLCKTCIEAHQRVKFTKDHLIRKKEDVSESVGASGQRPVFCPVHKQEQLKLFCETCDRLTCRDCQLLEHKEHRYQFLEEAFQNQKGAIENLLAKLLEKKNYVHFAATQVQNRIKEVNETNKRVEQEIKVAIFTLINEINKKGKSLLQQLENVTKERQMKLLQQQNDITGLSRQVKHVMNFTNWAIASGSSTALLYSKRLITFQLRHILKARCDPVPAANGAIRFHCDPTFWAKNVVNLGNLVIESKPAPGYTPNVVVGQVPPGTNHISKTPGQINLAQLRLQHMQQQVYAQKHQQLQQMRMQQPPAPVPTTTTTTQQHPRQAAPQMLQQQPPRLISVQTMQRGNMNCGAFQAHQMRLAQNAARIPGIPRHSGPQYSMMQPHLQRQHSNPGHAGPFPVVSVHNTTINPTSPTTATMANANRGPTSPSVTAIELIPSVTNPENLPSLPDIPPIQLEDAGSSSLDNLLSRYISGSHLPPQPTSTMNPSPGPSALSPGSSGLSNSHTPVRPPSTSSTGSRGSCGSSGRTAEKTSLSFKSDQVKVKQEPGTEDEICSFSGGVKQEKTEDGRRSACMLSSPESSLTPPLSTNLHLESELDALASLENHVKIEPADMNESCKQSGLSSLVNGKSPIRSLMHRSARIGGDGNNKDDDPNEDWCAVCQNGGDLLCCEKCPKVFHLTCHVPTLLSFPSGDWICTFCRDIGKPEVEYDCDNLQHSKKGKTAQGLSPVDQRKCERLLLYLYCHELSIEFQEPVPASIPNYYKIIKKPMDLSTVKKKLQKKHSQHYQIPDDFVADVRLIFKNCERFNEMMKVVQVYADTQEINLKADSEVAQAGKAVALYFEDKLTEIYSDRTFAPLPEFEQEEDDGEVTEDSDEDFIQPRRTPKVR

SEQ ID NO: 92466 - protein, 488 aa, Homo sapiens
  Payload ID: 18494
  Gene Name: tripartite motif containing 34
  Uniprot ID: Q9BYJ4
  ENSP ID: ENSP00000402595
MASKILLNVQEEVTCPICLELLTEPLSLDCGHSLCRACITVSNKEAVTSMGGKSSCPVCGISYSFEHLQANQHLANIVERLKEVKLSPDNGKKRDLCDHHGEKLLLFCKEDRKVICWLCERSQEHRGHHTVLTEEVFKECQEKLQAVLKRLKKEEEEAEKLEADIREEKTSWKYQVQTERQRIQTEFDQLRSILNNEEQRELQRLEEEEKKTLDKFAEAEDELVQQKQLVRELISDVECRSQWSTMELLQDMSGIMKWSEIWRLKKPKMVSKKLKTVFHAPDLSRMLQMFRELTAVRCYWVDVTLNSVNLNLNLVLSEDQRQVISVPIWPFQCYNYGVLGSQYFSSGKHYWEVDVSKKTAWILGVYCRTYSRHMKYVVRRCANRQNLYTKYRPLFGYWVIGLQNKCKYGVFEESLSSDPEVLTLSMAVPPCRVGVFLDYEAGIVSFFNVTSHGSLIYKFSKCCFSQPVYPYFNPWNCPAPMTLCPPSS

SEQ ID NO: 92467 - protein, 488 aa, Homo sapiens; identical to SEQ ID NO: 92466
  Payload ID: 18494
  Gene Name: tripartite motif containing 34
  Uniprot ID: Q9BYJ4
  ENSP ID: ENSP00000422947

SEQ ID NO: 92468 - protein, 493 aa, Homo sapiens
  Payload ID: 18495
  Gene Name: tripartite motif containing 35
  Uniprot ID: Q9UPQ4
  ENSP ID: ENSP00000301924
MERSPDVSPGPSRSFKEELLCAVCYDPFRDAVTLRCGHNFCRGCVSRCWEVQVSPTCPVCKDRASPADLRTNHTLNNLVEKLLREEAEGARWTSYRFSRVCRLHRGQLSLFCLEDKELLCCSCQADPRHQGHRVQPVKDTAHDFRAKCRNMEHALREKAKAFWAMRRSYEAIAKHNQVEAAWLEGRIRQEFDKLREFLRVEEQAILDAMAEETRQKQLLADEKMKQLTEETEVLAHEIERLQMEMKEDDVSFLMKHKSRKRRLFCTMEPEPVQPGMLIDVCKYLGSLQYRVWKKMLASVESVPFSFDPNTAAGWLSVSDDLTSVTNHGYRVQVENPERFSSAPCLLGSRVFSQGSHAWEVALGGLQSWRVGVVRVRQDSGAEGHSHSCYHDTRSGFWYVCRTQGVEGDHCVTSDPATSPLVLAIPRRLRVELECEEGELSFYDAERHCHLYTFHARFGEVRPYFYLGGARGAGPPEPLRICPLHISVKEELDG

SEQ ID NO: 92469 - protein, 266 aa, Homo sapiens
  Payload ID: 18495
  Gene Name: tripartite motif containing 35
  ENSP ID: ENSP00000428770
MERSPDVSPGPSRSFKEELLCAVCYDPFRDAVTLRCGHNFCRGCVSRCWEVQVSPTCPVCKDRASPADLRTNHTLNNLVEKLLREEAEGARWTSYRFSRVCRLHRGQLSLFCLEDKELLCCSCQADPRHQGHRVQPVKDTAHDFRVEAAWLEGRIRQEFDKLREFLRVEEQAILDAMAEETRQKQLLADEKMKQLTEETEVLAHEIERLQMEMKEDDVSFLMTLLHHGARASPARHAYRCLQVPGLPAVPRLEEDACICGICTLQL

SEQ ID NO: 92470 - protein, 100 aa, Homo sapiens
  Payload ID: 18495
  Gene Name: tripartite motif containing 35
  ENSP ID: ENSP00000429356
  MOD_RES (1)..(1): Any amino acid
XEIERLQMEMKEDDVSFLMKHKSRKRRLFCTMEPEPVQPGMLIDVCKYLGSLQYRVWKKMLASVESVPFSFDPNTAAGWLSVSDDLTSVTNHGYRVQEQC

SEQ ID NO: 92471 - protein, 728 aa, Homo sapiens
  Payload ID: 18496
  Gene Name: tripartite motif containing 36
  Uniprot ID: Q9NQ86
  ENSP ID: ENSP00000282369
MSESGEMSEFGYIMELIAKGKVTIKNIERELICPACKELFTHPLILPCQHSICHKCVKELLLTLDDSFNDVGSDNSNQSSPRLRLPSPSMDKIDRINRPGWKRNSLTPRTTVFPCPGCEHDVDLGERGINGLFRNFTLETIVERYRQAARAATAIMCDLCKPPPQESTKSCMDCSASYCNECFKIHHPWGTIKAQHEYVGPTTNFRPKILMCPEHETERINMYCELCRRPVCHLCKLGGNHANHRVTTMSSAYKTLKEKLSKDIDYLIGKESQVKSQISELNLLMKETECNGERAKEEAITHFEKLFEVLEERKSSVLKAIDSSKKLRLDKFQTQMEEYQGLLENNGLVGYAQEVLKETDQSCFVQTAKQLHLRIQKATESLKSFRPAAQTSFEDYVVNTSKQTELLGELSFFSSGIDVPEINEEQSKVYNNALINWHHPEKDKADSYVLEYRKINRDDEMSWNEIEVCGTSKIIQDLENSSTYAFRVRAYKGSICSPCSRELILHTPPAPVFSFLFDEKCGYNNEHLLLNLKRDRVESRAGFNLLLAAERIQVGYYTSLDYIIGDTGITKGKHFWAFRVEPYSYLVKVGVASSDKLQEWLRSPRDAVSPRYEQDSGHDSGSEDACFDSSQPFTLVTIGMQKFFIPKSPTSSNEPENRVLPMPTSIGIFLDCDKGKVDFYDMDQMKCLYERQVDCSHTLYPAFALMGSGGIQLEEPITAKYLEYQEDM

SEQ ID NO: 92472 - protein, 61 aa, Homo sapiens
  Payload ID: 18496
  Gene Name: tripartite motif containing 36
  Uniprot ID: Q9NQ86
  ENSP ID: ENSP00000368937
MSESGEMSEFGYIMELIAKGKASAMGLQQTHEHSRLTSKGGEARCPFEISEVGKQSLPRRT

SEQ ID NO: 92473 - protein, 60 aa, Homo sapiens
  Payload ID: 18496
  Gene Name: tripartite motif containing 36
  Uniprot ID: Q9NQ86
  ENSP ID: ENSP00000368938
MSESGEMSEFGYIMELIAKGKMPDWRRGYRCRQGCGKTTELATATDFSQTGNKSGKHFKT

SEQ ID NO: 92474 - protein, 716 aa, Homo sapiens
  Payload ID: 18496
  Gene Name: tripartite motif containing 36
  Uniprot ID: Q9NQ86
  ENSP ID: ENSP00000423934
MEGDGSDSPVTIKNIERELICPACKELFTHPLILPCQHSICHKCVKELLLTLDDSFNDVGSDNSNQSSPRLRLPSPSMDKIDRINRPGWKRNSLTPRTTVFPCPGCEHDVDLGERGINGLFRNFTLETIVERYRQAARAATAIMCDLCKPPPQESTKSCMDCSASYCNECFKIHHPWGTIKAQHEYVGPTTNFRPKILMCPEHETERINMYCELCRRPVCHLCKLGGNHANHRVTTMSSAYKTLKEKLSKDIDYLIGKESQVKSQISELNLLMKETECNGERAKEEAITHFEKLFEVLEERKSSVLKAIDSSKKLRLDKFQTQMEEYQGLLENNGLVGYAQEVLKETDQSCFVQTAKQLHLRIQKATESLKSFRPAAQTSFEDYVVNTSKQTELLGELSFFSSGIDVPEINEEQSKVYNNALINWHHPEKDKADSYVLEYRKINRDDEMSWNEIEVCGTSKIIQDLENSSTYAFRVRAYKGSICSPCSRELILHTPPAPVFSFLFDEKCGYNNEHLLLNLKRDRVESRAGFNLLLAAERIQVGYYTSLDYIIGDTGITKGKHFWAFRVEPYSYLVKVGVASSDKLQEWLRSPRDAVSPRYEQDSGHDSGSEDACFDSSQPFTLVTIGMQKFFIPKSPTSSNEPENRVLPMPTSIGIFLDCDKGKVDFYDMDQMKCLYERQVDCSHTLYPAFALMGSGGIQLEEPITAKYLEYQEDM

SEQ ID NO: 92475 - protein, 573 aa, Homo sapiens
  Payload ID: 18496
  Gene Name: tripartite motif containing 36
  ENSP ID: ENSP00000424259
MCDLCKPPPQESTKSCMDCSASYCNECFKIHHPWGTIKAQHEYVGPTTNFRPKILMCPEHETERINMYCELCRRPVCHLCKLGGNHANHRVTTMSSAYKTLKEKLSKDIDYLIGKESQVKSQISELNLLMKETECNGERAKEEAITHFEKLFEVLEERKSSVLKAIDSSKKLRLDKFQTQMEEYQGLLENNGLVGYAQEVLKETDQSCFVQTAKQLHLRIQKATESLKSFRPAAQTSFEDYVVNTSKQTELLGELSFFSSGIDVPEINEEQSKVYNNALINWHHPEKDKADSYVLEYRKINRDDEMSWNEIEVCGTSKIIQDLENSSTYAFRVRAYKGSICSPCSRELILHTPPAPVFSFLFDEKCGYNNEHLLLNLKRDRVESRAGFNLLLAAERIQVGYYTSLDYIIGDTGITKGKHFWAFRVEPYSYLVKVGVASSDKLQEWLRSPRDAVSPRYEQDSGHDSGSEDACFDSSQPFTLVTIGMQKFFIPKSPTSSNEPENRVLPMPTSIGIFLDCDKGKVDFYDMDQMKCLYERQVDCSHTLYPAFALMGSGGIQLEEPITAKYLEYQEDM

SEQ ID NO: 92476 - protein, 170 aa, Homo sapiens
  Payload ID: 18496
  Gene Name: tripartite motif containing 36
  ENSP ID: ENSP00000424743
MEGDGSDSPVTIKNIERELICPACKELFTHPLILPCQHSICHKCVKELLLTLDDSFNDVGSDNSNQSSPRLRLPSPSMDKIDRINRPASQRRSVGWRGWKRNSLTPRTTVFPCPGCEHDVDLGERGINGLFRNFTLETIVERYRQAARAATAIMCDLCKPPPQESTKSCM

SEQ ID NO: 92477 - protein, 964 aa, Homo sapiens
  Payload ID: 18497
  Gene Name: tripartite motif containing 37
  Uniprot ID: O94972
  ENSP ID: ENSP00000262294
MDEQSVESIAEVFRCFICMEKLRDARLCPHCSKLCCFSCIRRWLTEQRAQCPHCRAPLQLRELVNCRWAEEVTQQLDTLQLCSLTKHEENEKDKCENHHEKLSVFCWTCKKCICHQCALWGGMHGGHTFKPLAEIYEQHVTKVNEEVAKLRRRLMELISLVQEVERNVEAVRNAKDERVREIRNAVEMMIARLDTQLKNKLITLMGQKTSLTQETELLESLLQEVEHQLRSCSKSELISKSSEILMMFQQVHRKPMASFVTTPVPPDFTSELVPSYDSATFVLENFSTLRQRADPVYSPPLQVSGLCWRLKVYPDGNGVVRGYYLSVFLELSAGLPETSKYEYRVEMVHQSCNDPTKNIIREFASDFEVGECWGYNRFFRLDLLANEGYLNPQNDTVILRFQVRSPTFFQKSRDQHWYITQLEAAQTSYIQQINNLKERLTIELSRTQKSRDLSPPDNHLSPQNDDALETRAKKSACSDMLLEGGPTTASVREAKEDEEDEEKIQNEDYHHELSDGDLDLDLVYEDEVNQLDGSSSSASSTATSNTEENDIDEETMSGENDVEYNNMELEEGELMEDAAAAGPAGSSHGYVGSSSRISRRTHLCSAATSSLLDIDPLILIHLLDLKDRSSIENLWGLQPRPPASLLQPTASYSRKDKDQRKQQAMWRVPSDLKMLKRLKTQMAEVRCMKTDVKNTLSEIKSSSAASGDMQTSLFSADQAALAACGTENSGRLQDLGMELLAKSSVANCYIRNSTNKKSNSPKPARSSVAGSLSLRRAVDPGENSRSKGDCQTLSEGSPGSSQSGSRHSSPRALIHGSIGDILPKTEDRQCKALDSDAVVVAVFSGLPAVEKRRKMVTLGANAKGGHLEGLQMTDLENNSETGELQPVLPEGASAAPEEGMSSDSDIECDTENEEQEEHTSVGGFHDSFMVMTQPPDEDTHSSFPDGEQIGPEDLSFNTDENSGR

SEQ ID NO: 92478 - protein, 930 aa, Homo sapiens
  Payload ID: 18497
  Gene Name: tripartite motif containing 37
  Uniprot ID: O94972
  ENSP ID: ENSP00000376784
MDEQSVERWLTEQRAQCPHCRAPLQLRELVNCRWAEEVTQQLDTLQLCSLTKHEENEKDKCENHHEKLSVFCWTCKKCICHQCALWGGMHGGHTFKPLAEIYEQHVTKVNEEVAKLRRRLMELISLVQEVERNVEAVRNAKDERVREIRNAVEMMIARLDTQLKNKLITLMGQKTSLTQETELLESLLQEVEHQLRSCSKSELISKSSEILMMFQQVHRKPMASFVTTPVPPDFTSELVPSYDSATFVLENFSTLRQRADPVYSPPLQVSGLCWRLKVYPDGNGVVRGYYLSVFLELSAGLPETSKYEYRVEMVHQSCNDPTKNIIREFASDFEVGECWGYNRFFRLDLLANEGYLNPQNDTVILRFQVRSPTFFQKSRDQHWYITQLEAAQTSYIQQINNLKERLTIELSRTQKSRDLSPPDNHLSPQNDDALETRAKKSACSDMLLEGGPTTASVREAKEDEEDEEKIQNEDYHHELSDGDLDLDLVYEDEVNQLDGSSSSASSTATSNTEENDIDEETMSGENDVEYNNMELEEGELMEDAAAAGPAGSSHGYVGSSSRISRRTHLCSAATSSLLDIDPLILIHLLDLKDRSSIENLWGLQPRPPASLLQPTASYSRKDKDQRKQQAMWRVPSDLKMLKRLKTQMAEVRCMKTDVKNTLSEIKSSSAASGDMQTSLFSADQAALAACGTENSGRLQDLGMELLAKSSVANCYIRNSTNKKSNSPKPARSSVAGSLSLRRAVDPGENSRSKGDCQTLSEGSPGSSQSGSRHSSPRALIHGSIGDILPKTEDRQCKALDSDAVVVAVFSGLPAVEKRRKMVTLGANAKGGHLEGLQMTDLENNSETGELQPVLPEGASAAPEEGMSSDSDIECDTENEEQEEHTSVGGFHDSFMVMTQPPDEDTHSSFPDGEQIGPEDLSFNTDENSGR

SEQ ID NO: 92479 - protein, 964 aa, Homo sapiens; identical to SEQ ID NO: 92477
  Payload ID: 18497
  Gene Name: tripartite motif containing 37
  Uniprot ID: O94972
  ENSP ID: ENSP00000376785

SEQ ID NO: 92480 - protein, 67 aa, Homo sapiens
  Payload ID: 18497
  Gene Name: tripartite motif containing 37
  ENSP ID: ENSP00000462340
MDEQSVESIAEVFRCFICMEKLRDARLCPHCSKLCCFSCIRRWLTEQRAQCPHCRVSLCRPGRSAMA

SEQ ID NO: 92481 - protein, 54 aa, Homo sapiens
  Payload ID: 18497
  Gene Name: tripartite motif containing 37
  ENSP ID: ENSP00000462778
  MOD_RES (1)..(1): Any amino acid
XTDLENNSETGELQPVLPEGASAAPEEDTHSSFPDGEQIGPEDLSFNTDENSGR

SEQ ID NO: 92482 - protein, 194 aa, Homo sapiens
  Payload ID: 18497
  Gene Name: tripartite motif containing 37
  ENSP ID: ENSP00000462863
VNEEVAKLRRRLMELISLVQEVERNVEAVRNAKDERVREIRNAVEMMIARLDTQLKNKLITLMGQKTSLTQETELLESLLQEVEHQGASCFWKKWCQGRIYTLRSCSKSELISKSSEILMMFQQVHRKPMASFVTTPVPPDFTSELVPSYDSATFVLENFSTLRQRADPVYSPPLQVSGLCWRLKVYPDGNGVV

SEQ ID NO: 92483 - protein, 103 aa, Homo sapiens
  Payload ID: 18497
  Gene Name: tripartite motif containing 37
  ENSP ID: ENSP00000464263
MDEQSVESIAEVFRCFICMEKLRDARLCPHCSKLCCFSCIRRWLTEQRAQCPHCRAPLQLRELVNCRWAEEVTQQLDTLQLCSLTKHEENEKDKYVLNFFVQY

SEQ ID NO: 92484 - protein, 58 aa, Homo sapiens
  Payload ID: 18497
  Gene Name: tripartite motif containing 37
  ENSP ID: ENSP00000464590
MDEQSVESIAEVFRCFICMEKLRDARLCPHCSKLCCFSCIRRWLTEQRAQCPHCRKGM

SEQ ID NO: 92485 - protein, 117 aa, Homo sapiens
  Payload ID: 18497
  Gene Name: tripartite motif containing 37
  ENSP ID: ENSP00000464666
TLGANAKGGHLEGLQMTDLENNSETGELQPVLPEGASAAPEEETCSPSFLPGMSSDSDIECDTENEEQEEHTSVGGFHDSFMVMTQPPDEDTHSSFPDGEQIGPEDLSFNTDENSGR

SEQ ID NO: 92486 - protein, 113 aa, Homo sapiens
  Payload ID: 18497
  Gene Name: tripartite motif containing 37
  ENSP ID: ENSP00000464688
  MOD_RES (1)..(1): Any amino acid
XDEQSVESIAEVFRCFICMEKLRDARLCPHCSKLCCFSCIRRWLTEQRAQCPHCRAPLQLRELVNCRWAEEVTQQLDTLQLCSLTKHEENEKDNMADIPLNLWQKFMSNTSLK

SEQ ID NO: 92487 - protein, 67 aa, Homo sapiens; identical to SEQ ID NO: 92480
  Payload ID: 18497
  Gene Name: tripartite motif containing 37
  ENSP ID: ENSP00000485901

SEQ ID NO: 92488 - protein, 465 aa, Homo sapiens
  Payload ID: 18498
  Gene Name: tripartite motif containing 38
  Uniprot ID: O00635
  ENSP ID: ENSP00000349596
MASTTSTKKMMEEATCSICLSLMTNPVSINCGHSYCHLCITDFFKNPSQKQLRQETFCCPQCRAPFHMDSLRPNKQLGSLIEALKETDQEMSCEEHGEQFHLFCEDEGQLICWRCERAPQHKGHTTALVEDVCQGYKEKLQKAVTKLKQLEDRCTEQKLSTAMRITKWKEKVQIQRQKIRSDFKNLQCFLHEEEKSYLWRLEKEEQQTLSRLRDYEAGLGLKSNELKSHILELEEKCQGSAQKLLQNVNDTLSRSWAVKLETSEAVSLELHTMCNVSKLYFDVKKMLRSHQVSVTLDPDTAHHELILSEDRRQVTRGYTQENQDTSSRRFTAFPCVLGCEGFTSGRRYFEVDVGEGTGWDLGVCMENVQRGTGMKQEPQSGFWTLRLCKKKGYVALTSPPTSLHLHEQPLLVGIFLDYEAGVVSFYNGNTGCHIFTFPKASFSDTLRPYFQVYQYSPLFLPPPGD

SEQ ID NO: 92489 - protein, 518 aa, Homo sapiens
  Payload ID: 18499
  Gene Name: tripartite motif containing 39
  Uniprot ID: Q9HCM9
  ENSP ID: ENSP00000365844
MAETSLLEAGASAASTAAALENLQVEASCSVCLEYLKEPVIIECGHNFCKACITRWWEDLERDFPCPVCRKTSRYRSLRPNRQLGSMVEIAKQLQAVKRKIRDESLCPQHHEALSLFCYEDQEAVCLICAISHTHRAHTVVPLDDATQEYKEKLQKCLEPLEQKLQEITRCKSSEEKKPGELKRLVESRRQQILREFEELHRRLDEEQQVLLSRLEEEEQDILQRLRENAAHLGDKRRDLAHLAAEVEGKCLQSGFEMLKDVKSTLEKNIPRKFGGSLSTICPRDHKALLGLVKEINRCEKVKTMEVTSVSIELEKNFSNFPRQYFALRKILKQLIADVTLDPETAHPNLVLSEDRKSVKFVETRLRDLPDTPRRFTFYPCVLATEGFTSGRHYWEVEVGDKTHWAVGVCRDSVSRKGELTPLPETGYWRVRLWNGDKYAATTTPFTPLHIKVKPKRVGIFLDYEAGTLSFYNVTDRSHIYTFTDTFTEKLWPLFYPGIRAGRKNAAPLTIRPPTDWE

SEQ ID NO: 92490 - protein, 488 aa, Homo sapiens
  Payload ID: 18499
  Gene Name: tripartite motif containing 39
  Uniprot ID: Q9HCM9
  ENSP ID: ENSP00000365847
MAETSLLEAGASAASTAAALENLQVEASCSVCLEYLKEPVIIECGHNFCKACITRWWEDLERDFPCPVCRKTSRYRSLRPNRQLGSMVEIAKQLQAVKRKIRDESLCPQHHEALSLFCYEDQEAVCLICAISHTHRAHTVVPLDDATQEYKEKLQKCLEPLEQKLQEITRCKSSEEKKPGELKRLVESRRQQILREFEELHRRLDEEQQVLLSRLEEEEQDILQRLRENAAHLGDKRRDLAHLAAEVEGKCLQSGFEMLKDVKSTLEKCEKVKTMEVTSVSIELEKNFSNFPRQYFALRKILKQLIADVTLDPETAHPNLVLSEDRKSVKFVETRLRDLPDTPRRFTFYPCVLATEGFTSGRHYWEVEVGDKTHWAVGVCRDSVSRKGELTPLPETGYWRVRLWNGDKYAATTTPFTPLHIKVKPKRVGIFLDYEAGTLSFYNVTDRSHIYTFTDTFTEKLWPLFYPGIRAGRKNAAPLTIRPPTDWE

SEQ ID NO: 92491 - protein, 488 aa, Homo sapiens; identical to SEQ ID NO: 92490
  Payload ID: 18499
  Gene Name: tripartite motif containing 39
  Uniprot ID: Q9HCM9
  ENSP ID: ENSP00000373095

SEQ ID NO: 92492 - protein, 518 aa, Homo sapiens; identical to SEQ ID NO: 92489
  Payload ID: 18499
  Gene Name: tripartite motif containing 39
  Uniprot ID: Q9HCM9
  ENSP ID: ENSP00000373096

SEQ ID NO: 92493 - protein, 488 aa, Homo sapiens; identical to SEQ ID NO: 92490
  Payload ID: 18499
  Gene Name: tripartite motif containing 39
  Uniprot ID: Q9HCM9
  ENSP ID: ENSP00000373097

SEQ ID NO: 92494 - protein, 518 aa, Homo sapiens; identical to SEQ ID NO: 92489
  Payload ID: 18499
  Gene Name: tripartite motif containing 39
  Uniprot ID: Q9HCM9
  ENSP ID: ENSP00000379796

SEQ ID NO: 92495 - protein, 488 aa, Homo sapiens; identical to SEQ ID NO: 92490
  Payload ID: 18499
  Gene Name: tripartite motif containing 39
  Uniprot ID: Q9HCM9
  ENSP ID: ENSP00000379797

SEQ ID NO: 92496 - protein, 488 aa, Homo sapiens; identical to SEQ ID NO: 92490
  Payload ID: 18499
  Gene Name: tripartite motif containing 39
  Uniprot ID: Q9HCM9
  ENSP ID: ENSP00000379800

SEQ ID NO: 92497 - protein, 488 aa, Homo sapiens; identical to SEQ ID NO: 92490
  Payload ID: 18499
  Gene Name: tripartite motif containing 39
  Uniprot ID: Q9HCM9
  ENSP ID: ENSP00000383486

SEQ ID NO: 92498 - protein, 488 aa, Homo sapiens; identical to SEQ ID NO: 92490
  Payload ID: 18499
  Gene Name: tripartite motif containing 39
  Uniprot ID: Q9HCM9
  ENSP ID: ENSP00000387445

SEQ ID NO: 92499 - protein, 227 aa, Homo sapiens
  Payload ID: 18499
  Gene Name: tripartite motif containing 39
  ENSP ID: ENSP00000388149
  MOD_RES (1)..(1): Any amino acid
XTSRYRSLRPNRQLGSMVEIAKQLQAVKRKIRDESLCPQHHEALSLFCYEDQEAVCLICAISHTHRAHTVVPLDDATQEYKEKLQKCLEPLEQKLQEITRCKSSEEKKPGELKRLVESRRQQILREFEELHRRLDEEQQVLLSRLEEEEQDILQRLRENAAHLGDKRRDLAHLAAEVEGKCLQSGFEMLKDVKSTLEKCEKVKTMEVTSTTPCTSLHSEINDNVRGR

SEQ ID NO: 92500 - protein, 227 aa, Homo sapiens; identical to SEQ ID NO: 92499
  Payload ID: 18499
  Gene Name: tripartite motif containing 39
  ENSP ID: ENSP00000388224
  MOD_RES (1)..(1): Any amino acid

SEQ ID NO: 92501 - protein, 48 aa, Homo sapiens
  Payload ID: 18499
  Gene Name: tripartite motif containing 39
  ENSP ID: ENSP00000388852
MAETSLLEAGASAASTAAALENLQVEASCSVCLEYLKEPVIIECGHNF

SEQ ID NO: 92502 - protein, 260 aa, Homo sapiens
  Payload ID: 18499
  Gene Name: tripartite motif containing 39
  ENSP ID: ENSP00000388969
MAETSLLEAGASAASTAAALENLQVEASCSVCLEYLKEPVIIECGHNFCKACITRWWEDLERDFPCPVCRKTSRYRSLRPNRQLGSMVEIAKQLQAVKRKIRDESLCPQHHEALSLFCYEDQEAVCLICAISHTHRAHTVVPLDDATQEYKEKLQKCLEPLEQKLQEITRCKSSEEKKPGELKRLVESRRQQILREFEELHRRLDEEQQVLLSRLEEEEQDILQRLRENAAHLGDKRRDLAHLAAEVEGKCLQSGFEMLK

SEQ ID NO: 92503 - protein, 488 aa, Homo sapiens; identical to SEQ ID NO: 92490
  Payload ID: 18499
  Gene Name: tripartite motif containing 39
  Uniprot ID: Q9HCM9
  ENSP ID: ENSP00000389198

SEQ ID NO: 92504 - protein, 260 aa, Homo sapiens; identical to SEQ ID NO: 92502
  Payload ID: 18499
  Gene Name: tripartite motif containing 39
  ENSP ID: ENSP00000389389

SEQ ID NO: 92505 - protein, 74 aa, Homo sapiens
  Payload ID: 18499
  Gene Name: tripartite motif containing 39
  ENSP ID: ENSP00000389675
MAETSLLEAGASAASTAAALENLQVEASCSVCLEYLKEPVIIECGHNFCKACITRWWEDLERDFPCPVCRKTSR

SEQ ID NO: 92506 - protein, 488 aa, Homo sapiens; identical to SEQ ID NO: 92490
  Payload ID: 18499
  Gene Name: tripartite motif containing 39
  Uniprot ID: Q9HCM9
  ENSP ID: ENSP00000389852

SEQ ID NO: 92507 - protein, 227 aa, Homo sapiens; identical to SEQ ID NO: 92499
  Payload ID: 18499
  Gene Name: tripartite motif containing 39
  ENSP ID: ENSP00000390947
  MOD_RES (1)..(1): Any amino acid

SEQ ID NO: 92508 - protein, 59 aa, Homo sapiens
  Payload ID: 18499
  Gene Name: tripartite motif containing 39
  ENSP ID: ENSP00000391222
MAETSLLEAGASAASTAAALENLQVEASCSVCLEYLKEPVIIECGHNFCKACITRWWED

SEQ ID NO: 92509 - protein, 518 aa, Homo sapiens; identical to SEQ ID NO: 92489
  Payload ID: 18499
  Gene Name: tripartite motif containing 39
  Uniprot ID: Q9HCM9
  ENSP ID: ENSP00000391917

SEQ ID NO: 92510 - protein, 488 aa, Homo sapiens; identical to SEQ ID NO: 92490
  Payload ID: 18499
  Gene Name: tripartite motif containing 39
  Uniprot ID: Q9HCM9
  ENSP ID: ENSP00000392130

SEQ ID NO: 92511 - protein, 59 aa, Homo sapiens; identical to SEQ ID NO: 92508
  Payload ID: 18499
  Gene Name: tripartite motif containing 39
  ENSP ID: ENSP00000393186

SEQ ID NO: 92512 - protein, 488 aa, Homo sapiens; identical to SEQ ID NO: 92490
  Payload ID: 18499
  Gene Name: tripartite motif containing 39
  Uniprot ID: Q9HCM9
  ENSP ID: ENSP00000394353

SEQ ID NO: 92513 - protein, 144 aa, Homo sapiens
  Payload ID: 18499
  Gene Name: tripartite motif containing 39
  ENSP ID: ENSP00000394599
MAETSLLEAGASAASTAAALENLQVEASCSVCLEYLKEPVIIECGHNFCKACITRWWEDLERDFPCPVCRKTSRYRSLRPNRQLGSMVEIAKQLQAVKRKIRDESLCPQHHEALSLFCYEDQEAVCLICAISHTHRAHTVVPLD

SEQ ID NO: 92514 - protein, 74 aa, Homo sapiens; identical to SEQ ID NO: 92505
  Payload ID: 18499
  Gene Name: tripartite motif containing 39
  ENSP ID: ENSP00000394768

SEQ ID NO: 92515 - protein, 74 aa, Homo sapiens; identical to SEQ ID NO: 92505
  Payload ID: 18499
  Gene Name: tripartite motif containing 39
  ENSP ID: ENSP00000395224

SEQ ID NO: 92516 - protein, 488 aa, Homo sapiens; identical to SEQ ID NO: 92490
  Payload ID: 18499
  Gene Name: tripartite motif containing 39
  Uniprot ID: Q9HCM9
  ENSP ID: ENSP00000396986

SEQ ID NO: 92517 - protein, 518 aa, Homo sapiens; identical to SEQ ID NO: 92489
  Payload ID: 18499
  Gene Name: tripartite motif containing 39
  Uniprot ID: Q9HCM9
  ENSP ID: ENSP00000397043

SEQ ID NO: 92518 - protein, 59 aa, Homo sapiens; identical to SEQ ID NO: 92508
  Payload ID: 18499
  Gene Name: tripartite motif containing 39
  ENSP ID: ENSP00000397665

SEQ ID NO: 92519 - protein, 48 aa, Homo sapiens; identical to SEQ ID NO: 92501
  Payload ID: 18499
  Gene Name: tripartite motif containing 39
  ENSP ID: ENSP00000397952

SEQ ID NO: 92520 - protein, 518 aa, Homo sapiens; identical to SEQ ID NO: 92489
  Payload ID: 18499
  Gene Name: tripartite motif containing 39
  Uniprot ID: Q9HCM9
  ENSP ID: ENSP00000398355

SEQ ID NO: 92521 - protein, 48 aa, Homo sapiens; identical to SEQ ID NO: 92501
  Payload ID: 18499
  Gene Name: tripartite motif containing 39
  ENSP ID: ENSP00000398442

SEQ ID NO: 92522 - protein, 59 aa, Homo sapiens; identical to SEQ ID NO: 92508
  Payload ID: 18499
  Gene Name: tripartite motif containing 39
  ENSP ID: ENSP00000398453

SEQ ID NO: 92523 - protein, 488 aa, Homo sapiens; identical to SEQ ID NO: 92490
  Payload ID: 18499
  Gene Name: tripartite motif containing 39
  Uniprot ID: Q9HCM9
  ENSP ID: ENSP00000398956

SEQ ID NO: 92524 - protein, 74 aa, Homo sapiens; identical to SEQ ID NO: 92505
  Payload ID: 18499
  Gene Name: tripartite motif containing 39
  ENSP ID: ENSP00000399106

SEQ ID NO: 92525 - protein, 227 aa, Homo sapiens; identical to SEQ ID NO: 92499
  Payload ID: 18499
  Gene Name: tripartite motif containing 39
  ENSP ID: ENSP00000399123
  MOD_RES (1)..(1): Any amino acid

SEQ ID NO: 92526 - protein, 227 aa, Homo sapiens; identical to SEQ ID NO: 92499
  Payload ID: 18499
  Gene Name: tripartite motif containing 39
  ENSP ID: ENSP00000400222
  MOD_RES (1)..(1): Any amino acid

SEQ ID NO: 92527 - protein, 144 aa, Homo sapiens; identical to SEQ ID NO: 92513
  Payload ID: 18499
  Gene Name: tripartite motif containing 39
  ENSP ID: ENSP00000400243

SEQ ID NO: 92528 - protein, 260 aa, Homo sapiens; identical to SEQ ID NO: 92502
  Payload ID: 18499
  Gene Name: tripartite motif containing 39
  ENSP ID: ENSP00000400264

SEQ ID NO: 92529 - protein, 488 aa, Homo sapiens; identical to SEQ ID NO: 92490
  Payload ID: 18499
  Gene Name: tripartite motif containing 39
  Uniprot ID: Q9HCM9
  ENSP ID: ENSP00000401071

SEQ ID NO: 92530 - protein, 74 aa, Homo sapiens; identical to SEQ ID NO: 92505
  Payload ID: 18499
  Gene Name: tripartite motif containing 39
  ENSP ID: ENSP00000401123

SEQ ID NO: 92531 - protein, 488 aa, Homo sapiens; identical to SEQ ID NO: 92490
  Payload ID: 18499
  Gene Name: tripartite motif containing 39
  Uniprot ID: Q9HCM9
  ENSP ID: ENSP00000401184

SEQ ID NO: 92532 - protein, 74 aa, Homo sapiens; identical to SEQ ID NO: 92505
  Payload ID: 18499
  Gene Name: tripartite motif containing 39
  ENSP ID: ENSP00000401848

SEQ ID NO: 92533 - protein, 48 aa, Homo sapiens; identical to SEQ ID NO: 92501
  Payload ID: 18499
  Gene Name: tripartite motif containing 39
  ENSP ID: ENSP00000403073

SEQ ID NO: 92534 - protein, 59 aa, Homo sapiens; identical to SEQ ID NO: 92508
  Payload ID: 18499
  Gene Name: tripartite motif containing 39
  ENSP ID: ENSP00000404333

SEQ ID NO: 92535 - protein, 488 aa, Homo sapiens; identical to SEQ ID NO: 92490
  Payload ID: 18499
  Gene Name: tripartite motif containing 39
  Uniprot ID: Q9HCM9
  ENSP ID: ENSP00000404340

SEQ ID NO: 92536 - protein, 488 aa, Homo sapiens; identical to SEQ ID NO: 92490
  Payload ID: 18499
  Gene Name: tripartite motif containing 39
  Uniprot ID: Q9HCM9
  ENSP ID: ENSP00000404904

SEQ ID NO: 92537 - protein, 48 aa, Homo sapiens; identical to SEQ ID NO: 92501
  Payload ID: 18499
  Gene Name: tripartite motif containing 39
  ENSP ID: ENSP00000405274

SEQ ID NO: 92538 - protein, 59 aa, Homo sapiens; identical to SEQ ID NO: 92508
  Payload ID: 18499
  Gene Name: tripartite motif containing 39
  ENSP ID: ENSP00000405498

SEQ ID NO: 92539 - protein, 144 aa, Homo sapiens; identical to SEQ ID NO: 92513
  Payload ID: 18499
  Gene Name: tripartite motif containing 39
  ENSP ID: ENSP00000405928

SEQ ID NO: 92540 - protein, 260 aa, Homo sapiens; identical to SEQ ID NO: 92502
  Payload ID: 18499
  Gene Name: tripartite motif containing 39
  ENSP ID: ENSP00000406019

SEQ ID NO: 92541 - protein, 144 aa, Homo sapiens; identical to SEQ ID NO: 92513
  Payload ID: 18499
  Gene Name: tripartite motif containing 39
  ENSP ID: ENSP00000406034

SEQ ID NO: 92542 - protein, 227 aa, Homo sapiens; identical to SEQ ID NO: 92499
  Payload ID: 18499
  Gene Name: tripartite motif containing 39
  ENSP ID: ENSP00000406770
  MOD_RES (1)..(1): Any amino acid

SEQ ID NO: 92543 - protein, 74 aa, Homo sapiens; identical to SEQ ID NO: 92505
  Payload ID: 18499
  Gene Name: tripartite motif containing 39
  ENSP ID: ENSP00000406918

SEQ ID NO: 92544 - protein, 144 aa, Homo sapiens; identical to SEQ ID NO: 92513
  Payload ID: 18499
  Gene Name: tripartite motif containing 39
  ENSP ID: ENSP00000406984

SEQ ID NO: 92545 - protein, 48 aa, Homo sapiens; identical to SEQ ID NO: 92501
  Payload ID: 18499
  Gene Name: tripartite motif containing 39
  ENSP ID: ENSP00000407661

SEQ ID NO: 92546 - protein, 260 aa, Homo sapiens; identical to SEQ ID NO: 92502
  Payload ID: 18499
  Gene Name: tripartite motif containing 39
  ENSP ID: ENSP00000407903

SEQ ID NO: 92547 - protein, 227 aa, Homo sapiens; identical to SEQ ID NO: 92499
  Payload ID: 18499
  Gene Name: tripartite motif containing 39
  ENSP ID: ENSP00000409819
  MOD_RES (1)..(1): Any amino acid

SEQ ID NO: 92548 - protein, 518 aa, Homo sapiens; identical to SEQ ID NO: 92489
  Payload ID: 18499
  Gene Name: tripartite motif containing 39
  Uniprot ID: Q9HCM9
  ENSP ID: ENSP00000409902

SEQ ID NO: 92549 - protein, 144 aa, Homo sapiens; identical to SEQ ID NO: 92513
  Payload ID: 18499
  Gene Name: tripartite motif containing 39
  ENSP ID: ENSP00000411500

SEQ ID NO: 92550 - protein, 488 aa, Homo sapiens; identical to SEQ ID NO: 92490
  Payload ID: 18499
  Gene Name: tripartite motif containing 39
  Uniprot ID: Q9HCM9
  ENSP ID: ENSP00000411582

SEQ ID NO: 92551 - protein, 518 aa, Homo sapiens; identical to SEQ ID NO: 92489
  Payload ID: 18499
  Gene Name: tripartite motif containing 39
  Uniprot ID: Q9HCM9
  ENSP ID: ENSP00000411949

SEQ ID NO: 92552 - protein, 488 aa, Homo sapiens; identical to SEQ ID NO: 92490
  Payload ID: 18499
  Gene Name: tripartite motif containing 39
  Uniprot ID: Q9HCM9
  ENSP ID: ENSP00000412743

SEQ ID NO: 92553 - protein, 59 aa, Homo sapiens; identical to SEQ ID NO: 92508
  Payload ID: 18499
  Gene Name: tripartite motif containing 39
  ENSP ID: ENSP00000413846

SEQ ID NO: 92554 - protein, 488 aa, Homo sapiens; identical to SEQ ID NO: 92490
  Payload ID: 18499
  Gene Name: tripartite motif containing 39
  Uniprot ID: Q9HCM9
  ENSP ID: ENSP00000414525

SEQ ID NO: 92555 - protein, 488 aa, Homo sapiens; identical to SEQ ID NO: 92490
  Payload ID: 18499
  Gene Name: tripartite motif containing 39
  Uniprot ID: Q9HCM9
  ENSP ID: ENSP00000415259

SEQ ID NO: 92556 - protein, 260 aa, Homo sapiens; identical to SEQ ID NO: 92502
  Payload ID: 18499
  Gene Name: tripartite motif containing 39
  ENSP ID: ENSP00000415414

SEQ ID NO: 92557 - protein, 144 aa, Homo sapiens; identical to SEQ ID NO: 92513
  Payload ID: 18499
  Gene Name: tripartite motif containing 39
  ENSP ID: ENSP00000415671

SEQ ID NO: 92558 - protein, 48 aa, Homo sapiens; identical to SEQ ID NO: 92501
  Payload ID: 18499
  Gene Name: tripartite motif containing 39
  ENSP ID: ENSP00000415953

SEQ ID NO: 92559 - protein, 260 aa, Homo sapiens; identical to SEQ ID NO: 92502
  Payload ID: 18499
  Gene Name: tripartite motif containing 39
  ENSP ID: ENSP00000416850

SEQ ID NO: 92560 - protein, 503 aa, Homo sapiens; identical to SEQ ID NO: 92170
  Payload ID: 18499
  Gene Name: tripartite motif containing 39
  ENSP ID: ENSP00000446632

SEQ ID NO: 92561 - protein, 503 aa, Homo sapiens; identical to SEQ ID NO: 92170
  Payload ID: 18499
  Gene Name: tripartite motif containing 39
  ENSP ID: ENSP00000446993

SEQ ID NO: 92562 - protein, 503 aa, Homo sapiens
  Payload ID: 18499
  Gene Name: tripartite motif containing 39
  ENSP ID: ENSP00000447432
MAETSLLEAGASAASTAAALENLQVEASCSVCLEYLKEPVIIECGHNFCKACITRWWEDLERDFPCPVCRKTSRYRSLRPNRQLGSMVEIAKQLQAVKRKIRDESLCPQHHEALSLFCYEDQEAVCLICAISHTHRAHTVVPLDDATQEYKEKLQKCLEPLEQKLQEITRCKSSEEKKPGELKRLVESRRQQILREFEELHRRLDEEQQVLLSRLEEEEQDILQRLRENAAHLGDKRRDLAHLAAEVEGKCLQSGFEMLKDVKSTLEKCEKVKTMEVTSVSIELEKNFSNFPRQYFALRKILKQLIADVTLDPETAHPNLVLSEDRKSVKFVETRLRDLPDTPRRFTFYPCVLATEGFTSGRHYWEVEAAHCVLAQDPENQALARFYCYTERTIAKRLVLRRDPSVKRTLCRGCSSLLVPGLTCTHRQRRCRGQRWTVQTCLTCQRSQRFLNDPGHLLWGDRPEAQLGSQADSKPLQPLPNTAHSISDRLPEEKMQTQGSSNQ

SEQ ID NO: 92563 - protein, 518 aa, Homo sapiens; identical to SEQ ID NO: 92489
  Payload ID: 18499
  Gene Name: tripartite motif containing 39
  Uniprot ID: Q9HCM9
  ENSP ID: ENSP00000447835

SEQ ID NO: 92564 - protein, 503 aa, Homo sapiens; identical to SEQ ID NO: 92562
  Payload ID: 18499
  Gene Name: tripartite motif containing 39
  ENSP ID: ENSP00000448191

SEQ ID NO: 92565 - protein, 518 aa, Homo sapiens; identical to SEQ ID NO: 92489
  Payload ID: 18499
  Gene Name: tripartite motif containing 39
  Uniprot ID: Q9HCM9
  ENSP ID: ENSP00000448462

SEQ ID NO: 92566 - protein, 503 aa, Homo sapiens
  Payload ID: 18499
  Gene Name: tripartite motif containing 39
  ENSP ID: ENSP00000448485
MAETSLLEAGASAASTAAALENLQVEASCSVCLEYLKEPVIIECGHNFCKACITRWWEDLERDFPCPVCRKTSRYRSLRPNRQLGSMVEIAKQLQAVKRKIRDESLCPQHHEALSLFCYEDQEAVCLICAISHTHRAHTVVPLDDATQEYKEKLQKCLEPLEQKLQEITRCKSSEEKKPGELKRLVESRRQQILREFEELHRRLDEEQQVLLSRLEEEEQDILQRLRENAAHLGDKRRDLAHLAAEVEGKCLQSGFEMLKDVKSTLEKCEKVKTMEVTSVSIELEKNFSNFPRQYFALRKILKQLIADVTLDPETAHPNLVLSEDRKSVKFVETRLRDLPDTPRRFTFYPCVLATEGFTSGRHYWEVEAAHCVLAQDPENQALARFYCYTERTIAKRLVLRRDPSVKRTLCRGCSSLLVPGLTCTQRQRRCRGQRWTVQTCLTCQRSQRFLNDPGHLLWGDRPEAQLGSQADSKPLQPLPNTAHSISDRLPEEKMQTKGSSNQ

SEQ ID NO: 92567 - protein, 518 aa, Homo sapiens; identical to SEQ ID NO: 92489
  Payload ID: 18499
  Gene Name: tripartite motif containing 39
  Uniprot ID: Q9HCM9
  ENSP ID: ENSP00000448572

SEQ ID NO: 92568 - protein, 518 aa, Homo sapiens; identical to SEQ ID NO: 92489
  Payload ID: 18499
  Gene Name: tripartite motif containing 39
  Uniprot ID: Q9HCM9
  ENSP ID: ENSP00000449272

SEQ ID NO: 92569 - protein, 503 aa, Homo sapiens; identical to SEQ ID NO: 92562
  Payload ID: 18499
  Gene Name: tripartite motif containing 39
  ENSP ID: ENSP00000449807

SEQ ID NO: 92570 - protein, 518 aa, Homo sapiens; identical to SEQ ID NO: 92489
  Payload ID: 18499
  Gene Name: tripartite motif containing 39
  Uniprot ID: Q9HCM9
  ENSP ID: ENSP00000449847

SEQ ID NO: 92571 - protein, 518 aa, Homo sapiens; identical to SEQ ID NO: 92489
  Payload ID: 18499
  Gene Name: tripartite motif containing 39
  Uniprot ID: Q9HCM9
  ENSP ID: ENSP00000450288

SEQ ID NO: 92572 - protein, 474 aa, Homo sapiens
  Payload ID: 18500
  Gene Name: tripartite motif containing 4
  Uniprot ID: Q9C037
  ENSP ID: ENSP00000275736
MEAEDIQEELTCPICLDYFQDPVSIECGHNFCRGCLHRNWAPGGGPFPCPECRHPSAPAALRPNWALARLTEKTQRRRLGPVPPGLCGRHWEPLRLFCEDDQRPVCLVCRESQEHQTHAMAPIDEAFESYREKLLKSQRNLVAKMKKVMHLQDVEVKNATQWKDKIKSQRMRISTEFSKLHNFLVEEEDLFLQRLNKEEEETKKKLNENTLKLNQTIASLKKLILEVGEKSQAPTLELLQNPKEVLTRSEIQDVNYSLEAVKVKTVCQIPLMKEMLKRFQVAVNLAEDTAHPKLVFSQEGRYVKNTASASSWPVFSSAWNYFAGWRNPQKTAFVERFQHLPCVLGKNVFTSGKHYWEVESRDSLEVAVGVCREDVMGITDRSKMSPDVGIWAIYWSAAGYWPLIGFPGTPTQQEPALHRVGVYLDRGTGNVSFYSAVDGVHLHTFSCSSVSRLRPFFWLSPLASLVIPPVTDRK

SEQ ID NO: 92573 - protein, 294 aa, Homo sapiens
  Payload ID: 18500
  Gene Name: tripartite motif containing 4
  Uniprot ID: Q9C037
  ENSP ID: ENSP00000346186
MEAEDIQEELTCPICLDYFQDPVSIECGHNFCRGCLHRNWAPGGGPFPCPECRHPSAPAALRPNWALARLTEKTQRRRLGPVPPGLCGRHWEPLRLFCEDDQRPVCLVCRESQEHQTHAMAPIDEAFESYREKLLKSQRNLVAKMKKVMHLQDVEVKNATQWKDKIKSQRMRISTEFSKLHNFLVEEEDLFLQRLNKEEEETKKKLNENTLKLNQTIASLKKLILEVGEKSQAPTLELLQNPKEVLTRSEIQDVNYSLEAVKVKTVCQIPLMKEMLKRFQATKIKTQKQNRHNM

SEQ ID NO: 92574 - protein, 500 aa, Homo sapiens
  Payload ID: 18500
  Gene Name: tripartite motif containing 4
  Uniprot ID: Q9C037
  ENSP ID: ENSP00000348216
MEAEDIQEELTCPICLDYFQDPVSIECGHNFCRGCLHRNWAPGGGPFPCPECRHPSAPAALRPNWALARLTEKTQRRRLGPVPPGLCGRHWEPLRLFCEDDQRPVCLVCRESQEHQTHAMAPIDEAFESYRTGNFDIHVDEWKRRLIRLLLYHFKQEEKLLKSQRNLVAKMKKVMHLQDVEVKNATQWKDKIKSQRMRISTEFSKLHNFLVEEEDLFLQRLNKEEEETKKKLNENTLKLNQTIASLKKLILEVGEKSQAPTLELLQNPKEVLTRSEIQDVNYSLEAVKVKTVCQIPLMKEMLKRFQVAVNLAEDTAHPKLVFSQEGRYVKNTASASSWPVFSSAWNYFAGWRNPQKTAFVERFQHLPCVLGKNVFTSGKHYWEVESRDSLEVAVGVCREDVMGITDRSKMSPDVGIWAIYWSAAGYWPLIGFPGTPTQQEPALHRVGVYLDRGTGNVSFYSAVDGVHLHTFSCSSVSRLRPFFWLSPLASLVIPPVTDRK

SEQ ID NO: 92575 - protein, 202 aa, Homo sapiens
  Payload ID: 18500
  Gene Name: tripartite motif containing 4
  ENSP ID: ENSP00000396229
  MOD_RES (1)..(1): Any amino acid
XDDQRPVCLVCRESQEHQTHAMAPIDEAFESYREKLLKSQRNLVAKMKKVMHLQDVEVKNATQWKDKIKSQRMRISTEFSKLHNFLVEEEDLFLQRLNKEEEETKKKLNENTLKLNQTIASLKKLILEVGEKSQAPTLELLQNPKEVLTRSEIQDVNYSLEAVKVKTVCQIPLMKEMLKRFQGIEKGDNVAEESDLSGRLHP

SEQ ID NO: 92576 - protein, 229 aa, Homo sapiens
  Payload ID: 18501
  Gene Name: tripartite motif containing 40
  Uniprot ID: Q6P9F5
  ENSP ID: ENSP00000308310
MIPLQKDNQEEGVCPICQESLKEAVSTNCGHLFCRVCLTQHVEKASASGVFCCPLCRKPCSEEVLGTGYICPNHQKRVCRFCEESRLLLCVECLVSPEHMSHHELTIENALSHYKERLNRRSRKLRKDIAELQRLKAQQEKKLQALQQWLGQLEHMPAEAARILDISRAVTQLRSLVIDLERTAKELDTNTLKNAGDLLNRSAPQKLEVIYPQLEKGVSELLLQPPQKL

SEQ ID NO: 92577 - protein, 258 aa, Homo sapiens
  Payload ID: 18501
  Gene Name: tripartite motif containing 40
  Uniprot ID: Q6P9F5
  ENSP ID: ENSP00000365914
MIPLQKDNQEEGVCPICQESLKEAVSTNCGHLFCRVCLTQHVEKASASGVFCCPLCRKPCSEEVLGTGYICPNHQKRVCRFCEESRLLLCVECLVSPEHMSHHELTIENALSHYKERLNRRSRKLRKDIAELQRLKAQQEKKLQALQFQVDHGNHRLEAGPESQHQTREQLGALPQQWLGQLEHMPAEAARILDISRAVTQLRSLVIDLERTAKELDTNTLKNAGDLLNRSAPQKLEVIYPQLEKGVSELLLQPPQKL

SEQ ID NO: 92578 - protein, 258 aa, Homo sapiens; identical to SEQ ID NO: 92577
  Payload ID: 18501
  Gene Name: tripartite motif containing 40
  Uniprot ID: Q6P9F5
  ENSP ID: ENSP00000373105

SEQ ID NO: 92579 - protein, 258 aa, Homo sapiens; identical to SEQ ID NO: 92577
  Payload ID: 18501
  Gene Name: tripartite motif containing 40
  Uniprot ID: Q6P9F5
  ENSP ID: ENSP00000379826

SEQ ID NO: 92580 - protein, 229 aa, Homo sapiens; identical to SEQ ID NO: 92576
  Payload ID: 18501
  Gene Name: tripartite motif containing 40
  Uniprot ID: Q6P9F5
  ENSP ID: ENSP00000383492

SEQ ID NO: 92581 - protein, 258 aa, Homo sapiens; identical to SEQ ID NO: 92577
  Payload ID: 18501
  Gene Name: tripartite motif containing 40
  Uniprot ID: Q6P9F5
  ENSP ID: ENSP00000388460

SEQ ID NO: 92582 - protein, 258 aa, Homo sapiens; identical to SEQ ID NO: 92577
  Payload ID: 18501
  Gene Name: tripartite motif containing 40
  Uniprot ID: Q6P9F5
  ENSP ID: ENSP00000389607

SEQ ID NO: 92583 - protein, 229 aa, Homo sapiens; identical to SEQ ID NO: 92576
  Payload ID: 18501
  Gene Name: tripartite motif containing 40
  Uniprot ID: Q6P9F5
  ENSP ID: ENSP00000393674

SEQ ID NO: 92584 - protein, 229 aa, Homo sapiens
  Payload ID: 18501
  Gene Name: tripartite motif containing 40
  ENSP ID: ENSP00000394748
MIPLQKDNQEEGVCPICQESLKEAVSTNCGHLFCRVCLTQHVEKASASGVFCCPLCRKPCSEEVLGTGYICPNHQKRVCRFCEESRLLLCVECLVSPEHMSHHELTIENALSHYKERLNRRSRKLRKDIAELQRLKAQQEKKLQALQQWLGQLEHMPAEAARILDISRAVTQLRSLVIDLERMAKELDTNTLKNAGDLLNRSAPQKLEVIYPQLKKGVSELLLQPPQKL

SEQ ID NO: 92585 - protein, 229 aa, Homo sapiens
  Payload ID: 18501
  Gene Name: tripartite motif containing 40
  ENSP ID: ENSP00000399450
MIPLQKDNQEEGVCPICQESLKEAVSTNCGHLFCRVCLTQHVEKASASGVFCCPLCRKPCSEEVLGTGYICPNHQKRVCRFCEESRLLLCVECLVSPEHMSHHELTIENALSHCKERLNRRSRKLRKDIAELQRLKAQQEKKLQALQQWLGQLEHMPAEAARILDISRAVTQLRSLVIDLERTAKELDTNTLKNAGDLLNRSAPQKLEVIYPQLEKGVSELLLQPPQKL

SEQ ID NO: 92586 - protein, 258 aa, Homo sapiens
  Payload ID: 18501
  Gene Name: tripartite motif containing 40
  ENSP ID: ENSP00000402617
MIPLQKDNQEEGVCPICQESLKEAVSTNCGHLFCRVCLTQHVEKASASGVFCCPLCRKPCSEEVLGTGYICPNHQKRVCRFCEESRLLLCVECLVSPEHMSHHELTIENALSHCKERLNRRSRKLRKDIAELQRLKAQQEKKLQALQFQVDHGNHRLEAGPESQHQTREQLGALPQQWLGQLEHMPAEAARILDISRAVTQLRSLVIDLERTAKELDTNTLKNAGDLLNRSAPQKLEVIYPQLEKGVSELLLQPPQKL

SEQ ID NO: 92587 - protein, 229 aa, Homo sapiens; identical to SEQ ID NO: 92576
  Payload ID: 18501
  Gene Name: tripartite motif containing 40
  Uniprot ID: Q6P9F5
  ENSP ID: ENSP00000403025

SEQ ID NO: 92588 - protein, 258 aa, Homo sapiens
  Payload ID: 18501
  Gene Name: tripartite motif containing 40
  ENSP ID: ENSP00000414258
MIPLQKDNQEEGVCPICQESLKEAVSTNCGHLFCRVCLTQHVEKASASGVFCCPLCRKPCSEEVLGTGYICPNHQKRVCRFCEESRLLLCVECLVSPEHMSHHELTIENALSHYKERLNRRSRKLRKDIAELQRLKAQQEKKLQALQFQVDHGNHRLEAGPESQHQTREQLGALPQQWLGQLEHMPAEAARILDISRAVTQLRSLVIDLERMAKELDTNTLKNAGDLLNRSAPQKLEVIYPQLKKGVSELLLQPPQKL

SEQ ID NO: 92589 - protein, 258 aa, Homo sapiens; identical to SEQ ID NO: 92588
  Payload ID: 18501
  Gene Name: tripartite motif containing 40
  ENSP ID: ENSP00000414769

SEQ ID NO: 92590 - protein, 229 aa, Homo sapiens; identical to SEQ ID NO: 92584
  Payload ID: 18501
  Gene Name: tripartite motif containing 40
  ENSP ID: ENSP00000415169

SEQ ID NO: 92591 - protein, 229 aa, Homo sapiens; identical to SEQ ID NO: 92576
  Payload ID: 18501
  Gene Name: tripartite motif containing 40
  Uniprot ID: Q6P9F5
  ENSP ID: ENSP00000416663

SEQ ID NO: 92592 - protein, 258 aa, Homo sapiens; identical to SEQ ID NO: 92577
  Payload ID: 18501
  Gene Name: tripartite motif containing 40
  Uniprot ID: Q6P9F5
  ENSP ID: ENSP00000416950

SEQ ID NO: 92593 - protein, 258 aa, Homo sapiens; identical to SEQ ID NO: 92577
  Payload ID: 18501
  Gene Name: tripartite motif containing 40
  Uniprot ID: Q6P9F5
  ENSP ID: ENSP00000446663

SEQ ID NO: 92594 - protein, 258 aa, Homo sapiens; identical to SEQ ID NO: 92577
  Payload ID: 18501
  Gene Name: tripartite motif containing 40
  Uniprot ID: Q6P9F5
  ENSP ID: ENSP00000447016

SEQ ID NO: 92595 - protein, 258 aa, Homo sapiens; identical to SEQ ID NO: 92586
  Payload ID: 18501
  Gene Name: tripartite motif containing 40
  ENSP ID: ENSP00000448384

SEQ ID NO: 92596 - protein, 258 aa, Homo sapiens; identical to SEQ ID NO: 92577
  Payload ID: 18501
  Gene Name: tripartite motif containing 40
  Uniprot ID: Q6P9F5
  ENSP ID: ENSP00000448967

SEQ ID NO: 92597 - protein, 258 aa, Homo sapiens; identical to SEQ ID NO: 92588
  Payload ID: 18501
  Gene Name: tripartite motif containing 40
  ENSP ID: ENSP00000479007

SEQ ID NO: 92598 - protein, 258 aa, Homo sapiens; identical to SEQ ID NO: 92588
  Payload ID: 18501
  Gene Name: tripartite motif containing 40
  ENSP ID: ENSP00000480009

SEQ ID NO: 92599 - protein, 258 aa, Homo sapiens; identical to SEQ ID NO: 92577
  Payload ID: 18501
  Gene Name: tripartite motif containing 40
  Uniprot ID: Q6P9F5
  ENSP ID: ENSP00000483120

SEQ ID NO: 92600 - protein, 630 aa, Homo sapiens
  Payload ID: 18502
  Gene Name: tripartite motif containing 41
  Uniprot ID: Q8WV44
  ENSP ID: ENSP00000320869
MAAVAMTPNPVQTLQEEAVCAICLDYFTDPVSIGCGHNFCRVCVTQLWGGEDEEDRDELDREEEEEDGEEEEVEAVGAGAGWDTPMRDEDYEGDMEEEVEEEEEGVFWTSGMSRSSWDNMDYVWEEEDEEEDLDYYLGDMEEEDLRGEDEEDEEEVLEEVEEEDLDPVTPLPPPPAPRRCFTCPQCRKSFPRRSFRPNLQLANMVQVIRQMHPTPGRGSRVTDQGICPKHQEALKLFCEVDEEAICVVCRESRSHKQHSVVPLEEVVQEYKAKLQGHVEPLRKHLEAVQKMKAKEERRVTELKSQMKSELAAVASEFGRLTRFLAEEQAGLERRLREMHEAQLGRAGAAASRLAEQAAQLSRLLAEAQERSQQGGLRLLQDIKETFNRCEEVQLQPPEVWSPDPCQPHSHDFLTDAIVRKMSRMFCQAARVDLTLDPDTAHPALMLSPDRRGVRLAERRQEVADHPKRFSADCCVLGAQGFRSGRHYWEVEVGGRRGWAVGAARESTHHKEKVGPGGSSVGSGDASSSRHHHRRRRLHLPQQPLLQREVWCVGTNGKRYQAQSSTEQTLLSPSEKPRRFGVYLDYEAGRLGFYNAETLAHVHTFSAAFLGERVFPFFRVLSKGTRIKLCP

SEQ ID NO: 92601 - protein, 518 aa, Homo sapiens
  Payload ID: 18502
  Gene Name: tripartite motif containing 41
  Uniprot ID: Q8WV44
  ENSP ID: ENSP00000336749
MAAVAMTPNPVQTLQEEAVCAICLDYFTDPVSIGCGHNFCRVCVTQLWGGEDEEDRDELDREEEEEDGEEEEVEAVGAGAGWDTPMRDEDYEGDMEEEVEEEEEGVFWTSGMSRSSWDNMDYVWEEEDEEEDLDYYLGDMEEEDLRGEDEEDEEEVLEEVEEEDLDPVTPLPPPPAPRRCFTCPQCRKSFPRRSFRPNLQLANMVQVIRQMHPTPGRGSRVTDQGICPKHQEALKLFCEVDEEAICVVCRESRSHKQHSVVPLEEVVQEYKAKLQGHVEPLRKHLEAVQKMKAKEERRVTELKSQMKSELAAVASEFGRLTRFLAEEQAGLERRLREMHEAQLGRAGAAASRLAEQAAQLSRLLAEAQERSQQGGLRLLQDIKETFNRCEEVQLQPPEVWSPDPCQPHSHDFLTDAIVRKMSRMFCQAARVDLTLDPDTAHPALMLSPDRRGVRLAERRQEVADHPKRFSADCCVLGAQGFRSGRHYWEEPKEPSWPPAQPSLTYYVCPTDRPEFSFT

SEQ ID NO: 92602 - protein, 362 aa, Homo sapiens
  Payload ID: 18502
  Gene Name: tripartite motif containing 41
  ENSP ID: ENSP00000424979
  MOD_RES (1)..(1): Any amino acid
XAICLDYFTDPVSIGCGHNFCRVCVTQLWGGEDEEDRDELDREEEEEDGEEEEVEAVGAGAGWDTPMRDEDYEGDMEEEVEEEEEGVFWTSGMSRSSWDNMDYVWEEEDEEEDLDYYLGDMEEEDLRGEDEEDEEEVLEEVEEEDLDPVTPLPPPPAPRRCFTCPQCRKSFPRRSFRPNLQLANMVQVIRQMHPTPGRGSRVTDQGICPKHQEALKLFCEVDEEAICVVCRESRSHKQHSVVPLEEVVQEYKAKLQGHVEPLRKHLEAVQKMKAKEERRVTELKSQMKSELAAVASEFGRLTRFLAEEQAGLERRLREMHEAQLGRAGAAASRLAEQAAQLSRLLAEAQERSQQGGLRLLQV

SEQ ID NO: 92603 - protein, 116 aa, Homo sapiens
  Payload ID: 18502
  Gene Name: tripartite motif containing 41
  ENSP ID: ENSP00000426790
  MOD_RES (1)..(1): Any amino acid
XQDIKETFNRCEEVQLQPPEVWSPDPCQPHSHDFLTDAIVRKMSRMFCQAARVDLTLDPDTAHPALMLSPDRRGVRLAERRQEVADHPKRFSADCCVLGAQGFRSGRHYWEVCMGP

SEQ ID NO: 92604 - protein, 191 aa, Homo sapiens
  Payload ID: 18502
  Gene Name: tripartite motif containing 41
  ENSP ID: ENSP00000426803
MKAKEERRVTELKSQMKSELAAVASEFGRLTRFLAEEQAGLERRLREMHEAQLGRAGAAASRLAEQAAQLSRLLAEAQERSQQGGLRLLQDIKETFNRCEEVQLQPPEVWSPDPCQPHSHDFLTDAIVRKMSRMFCQAARVDLTLDPDTAHPALMLSPDRRGVRLAERRQEVADHPKRFSADCCVLGAQGF

SEQ ID NO: 92605 - protein, 150 aa, Homo sapiens
  Payload ID: 18502
  Gene Name: tripartite motif containing 41
  ENSP ID: ENSP00000483672
LQEEAVCAICLDYFTDPVSIGCGHNFCRVCVTQLWGRRGGGSGGYPVTPLPPPPAPRRCFTCPQCRKSFPRRSFRPNLQLANMVQVIRQMHPTPGRGSRVTDQGICPKHQEALKLFCEVDEEAICVVCRESRSHKQHSVVPLEEVVQEYK

SEQ ID NO: 92606 - protein, 723 aa, Homo sapiens
  Payload ID: 18503
  Gene Name: tripartite motif containing 42
  Uniprot ID: Q8IWZ5
  ENSP ID: ENSP00000286349
METAMCVCCPCCTWQRCCPQLCSCLCCKFIFTSERNCTCFPCPYKDERNCQFCHCTCSESPNCHWCCCSWANDPNCKCCCTASSNLNCYYYESRCCRNTIITFHKGRLRSIHTSSKTALRTGSSDTQVDEVKSIPANSHLVNHLNCPMCSRLRLHSFMLPCNHSLCEKCLRQLQKHAEVTENFFILICPVCDRSHCMPYSNKMQLPENYLHGRLTKRYMQEHGYLKWRFDRSSGPILCQVCRNKRIAYKRCITCRLNLCNDCLKAFHSDVAMQDHVFVDTSAEEQDEKICIHHPSSRIIEYCRNDNKLLCTFCKFSFHNGHDTISLIDACSERAASLFSAIAKFKAVRYEIDNDLMEFNILKNSFKADKEAKRKEIRNGFLKLRSILQEKEKIIMEQIENLEVSRQKEIEKYVYVTTMKVNEMDGLIAYSKEALKETGQVAFLQSAKILVDQIEDGIQTTYRPDPQLRLHSINYVPLDFVELSSAIHELFPTGPKKVRSSGDSLPSPYPVHSETMIARKVTFSTHSLGNQHIYQRSSSMLSFSNTDKKAKVGLEACGRAQSATPAKPTDGLYTYWSAGADSQSVQNSSSFHNWYSFNDGSVKTPGPIVIYQTLVYPRAAKVYWTCPAEDVDSFEMEFYEVITSPPNNVQMELCGQIRDIMQQNLELHNLTPNTEYVFKVRAINDNGPGQWSDICKVVTPDGHGKNRAKWGLLKNIQSALQKHF

SEQ ID NO: 92607 - protein, 446 aa, Homo sapiens
  Payload ID: 18504
  Gene Name: tripartite motif containing 43
  Uniprot ID: Q96BQ3
  ENSP ID: ENSP00000272395
MDSDFSHAFQKELTCVICLNYLVDPVTICCGHSFCRPCLCLSWEEAQSPANCPACREPSPKMDFKTNILLKNLVTIARKASLWQFLSSEKQICGTHRQTKKMFCDMDKSLLCLLCSNSQEHGAHKHHPIEEAAEEHREKLLKQMRILWKKIQENQRNLYEEGRTAFLWRGNVVLRAQMIRNEYRKLHPVLHKEEKQHLERLNKEYQEIFQQLQRSWVKMDQKSKHLKEMYQELMEMCHKPDVELLQDLGDIVARSESVLLHMPQPVNPELTAGPITGLVYRLNRFRVEISFHFEVTNHNIRLFEDVRSWMFRRGPLNSDRSDYFAAWGARVFSFGKHYWELDVDNSCDWALGVCNNSWIRKNSTMVNSEDIFLLLCLKVDNHFNLLTTSPVFPHYIEKPLGRVGVFLDFESGSVSFLNVTKSSLIWSYPAGSLTFPVRPFFYTGHR

SEQ ID NO: 92608 - protein, 344 aa, Homo sapiens
  Payload ID: 18505
  Gene Name: tripartite motif containing 44
  Uniprot ID: Q96DX7
  ENSP ID: ENSP00000299413
MASGVGAAFEELPHDGTCDECEPDEAPGAEEVCRECGFCYCRRHAEAHRQKFLSHHLAEYVHGSQAWTPPADGEGAGKEEAEVKVEQEREIESEAGEESESEEESESEEESETEEESEDESDEESEEDSEEEMEDEQESEAEEDNQEEGESEAEGETEAESEFDPEIEMEAERVAKRKCPDHGLDLSTYCQEDRQLICVLCPVIGAHQGHQLSTLDEAFEELRSKDSGGLKAAMIELVERLKFKSSDPKVTRDQMKMFIQQEFKKVQKVIADEEQKALHLVDIQEAMATAHVTEILADIQSHMDRLMTQMAQAKEQLDTSNESAEPKAEGDEEGPSGASEEEDT

SEQ ID NO: 92609 - protein, 580 aa, Homo sapiens
  Payload ID: 18506
  Gene Name: tripartite motif containing 45
  Uniprot ID: Q9H8W5
  ENSP ID: ENSP00000256649
MSENRKPLLGFVSKLTSGTALGNSGKTHCPLCLGLFKAPRLLPCLHTVCTTCLEQLEPFSVVDIRGGDSDTSSEGSIFQELKPRSLQSQIGILCPVCDAQVDLPMGGVKALTIDHLAVNDVMLESLRGEGQGLVCDLCNDREVEKRCQTCKANLCHFCCQAHRRQKKTTYHTMVDLKDLKGYSRIGKPILCPVHPAEELRLFCEFCDRPVCQDCVVGEHREHPCDFTSNVIHKHGDSVWELLKGTQPHVEALEEALAQIHIINSALQKRVEAVAADVRTFSEGYIKAIEEHRDKLLKQLEDIRAQKENSLQLQKAQLEQLLADMRTGVEFTEHLLTSGSDLEILITKRVVVERLRKLNKVQYSTRPGVNDKIRFCPQEKAGQCRGYEIYGTINTKEVDPAKCVLQGEDLHRAREKQTASFTLLCKDAAGEIMGRGGDNVQVAVVPKDKKDSPVRTMVQDNKDGTYYISYTPKEPGVYTVWVCIKEQHVQGSPFTVMVRRKHRPHSGVFHCCTFCSSGGQKTARCACGGTMPGGYLGCGHGHKGHPGHPHWSCCGKFNEKSECTWTGGQSAPRSLLRTVAL

SEQ ID NO: 92610 - protein, 523 aa, Homo sapiens
  Payload ID: 18506
  Gene Name: tripartite motif containing 45
  ENSP ID: ENSP00000358473
MLSGVTLEGGGARSGEGRRSRTELKPRSLQSQIGILCPVCDAQVDLPMGGVKALTIDHLAVNDVMLESLRGEGQGLVCDLCNDREVEKRCQTCKANLCHFCCQAHRRQKKTTYHTMVDLKDLKGYSRIGKPILCPVHPAEELRLFCEFCDRPVCQDCVVGEHREHPCDFTSNVIHKHGDSVWELLKGTQPHVEALEEALAQIHIINSALQKRVEAVAADVRTFSEGYIKAIEEHRDKLLKQLEDIRAQKENSLQLQKAQLEQLLADMRTGVEFTEHLLTSGSDLEILITKRVVVERLRKLNKVQYSTRPGVNDKIRFCPQEKAGQCRGYEIYGTINTKEVDPAKCVLQGEDLHRAREKQTASFTLLCKDAAGEIMGRGGDNVQVAVVPKDKKDSPVRTMVQDNKDGTYYISYTPKEPGVYTVWVCIKEQHVQGSPFTVMVRRKHRPHSGVFHCCTFCSSGGQKTARCACGGTMPGGYLGCGHGHKGHPGHPHWSCCGKFNEKSECTWTGGQSAPRSLLRTVAL

SEQ ID NO: 92611 - protein, 562 aa, Homo sapiens
  Payload ID: 18506
  Gene Name: tripartite motif containing 45
  Uniprot ID: Q9H8W5
  ENSP ID: ENSP00000358476
MSENRKPLLGFVSKLTSGTALGNSGKTHCPLCLGLFKAPRLLPCLHTVCTTCLEQLEPFSVVDIRGGDSDTSSEGSIFQELKPRSLQSQIGILCPVCDAQVDLPMGGVKALTIDHLAVNDVMLESLRGEGQGLVCDLCNDREVEKRCQTCKANLCHFCCQAHRRQKKTTYHTMVDLKDLKGYSRIGKPILCPVHPAEELRLFCEFCDRPVCQDCVVGEHREHPCDFTSNVIHKHGDSVWELLKGTQPHVEALEEALAQIHIINSALQKRVEAVAADVRTFSEGYIKAIEEHRDKLLKQLEDIRAQKENSLQLQKAQLEQLLADMRTGVEFTEHLLTSGSDLEILITKRVVVERLRKLNKVQYSTRPGVNDKIRFCPQEKAGQCRGYEIYDLHRAREKQTASFTLLCKDAAGEIMGRGGDNVQVAVVPKDKKDSPVRTMVQDNKDGTYYISYTPKEPGVYTVWVCIKEQHVQGSPFTVMVRRKHRPHSGVFHCCTFCSSGGQKTARCACGGTMPGGYLGCGHGHKGHPGHPHWSCCGKFNEKSECTWTGGQSAPRSLLRTVAL

SEQ ID NO: 92612 - protein, 104 aa, Homo sapiens
  Payload ID: 18506
  Gene Name: tripartite motif containing 45
  ENSP ID: ENSP00000431261
  MOD_RES (1)..(1): Any amino acid
XTVWVCIKEQHVQGSPFTVMVRRKHRPHSGVFHCCTFCSSGGQKTARCACGGTMPGGYLGCGHGHKGHPGHPHWSCCGKFNEKSECTWTGGQSAPRSLLRTVAL

SEQ ID NO: 92613 - protein, 303 aa, Homo sapiens
  Payload ID: 18506
  Gene Name: tripartite motif containing 45
  ENSP ID: ENSP00000474935
MGGVKALTIDHLAVNDVMLESLRGEGQGLVCDLCNDREVEKRCQTCKANLCHFCCQAHRRQKKTTYHTMVDLKDLKGYSRIGKPILCPVHPAEELRLFCEFCDRPVCQDCVVGEHREHPCDFTSNVIHKHGDSVWELLKGTQPHVEALEEALAQIHIINSALQKRVEAVAADVRTFSEGYIKAIEEHRDKLLKQLEDIRAQKENSLQLQKAQLEQLLADMRTGVEFTEHLLTSGSDLEILITKRVVVERLRKLNKVQYSTRPGVNDKIRFCPQEKAGQCRGYEIYGTINTKEVDPAKCVLQGE

SEQ ID NO: 92614 - protein, 759 aa, Homo sapiens
  Payload ID: 18507
  Gene Name: tripartite motif containing 46
  Uniprot ID: Q7Z4K8
  ENSP ID: ENSP00000334657
MAEGEDMQTFTSIMDALVRISTSMKNMEKELLCPVCQEMYKQPLVLPCTHNVCQACAREVLGQQGYIGHGGDPSSEPTSPASTPSTRSPRLSRRTLPKPDRLDRLLKSGFGTYPGRKRGALHPQVIMFPCPACQGDVELGERGLAGLFRNLTLERVVERYRQSVSVGGAILCQLCKPPPLEATKGCTECRATFCNECFKLFHPWGTQKAQHEPTLPTLSFRPKGLMCPDHKEEVTHYCKTCQRLVCQLCRVRRTHSGHKITPVLSAYQALKDKLTKSLTYILGNQDTVQTQICELEEAVRHTEVSGQQAKEEVSQLVRGLGAVLEEKRASLLQAIEECQQERLARLSAQIQEHRSLLDGSGLVGYAQEVLKETDQPCFVQAAKQLHNRIARATEALQTFRPAASSSFRHCQLDVGREMKLLTELNFLRVPEAPVIDTQRTFAYDQIFLCWRLPPHSPPAWHYTVEFRRTDVPAQPGPTRWQRREEVRGTSALLENPDTGSVYVLRVRGCNKAGYGEYSEDVHLHTPPAPVLHFFLDSRWGASRERLAISKDQRAVRSVPGLPLLLAADRLLTGCHLSVDVVLGDVAVTQGRSYWACAVDPASYLVKVGVGLESKLQESFQGAPDVISPRYDPDSGHDSGAEDATVEASPPFAFLTIGMGKILLGSGASSNAGLTGRDGPTAGCTVPLPPRLGICLDYERGRVSFLDAVSFRGLLECPLDCSGPVCPAFCFIGGGAVQLQEPVGTKPERKVTIGGFAKLD

SEQ ID NO: 92615 - protein, 736 aa, Homo sapiens
  Payload ID: 18507
  Gene Name: tripartite motif containing 46
  Uniprot ID: Q7Z4K8
  ENSP ID: ENSP00000357366
MKNMEKELLCPVCQEMYKQPLVLPCTHNVCQACAREVLGQQGYIGHGGDPSSEPTSPASTPSTRSPRLSRRTLPKPDRLDRLLKSGFGTYPGRKRGALHPQVIMFPCPACQGDVELGERGLAGLFRNLTLERVVERYRQSVSVGGAILCQLCKPPPLEATKGCTECRATFCNECFKLFHPWGTQKAQHEPTLPTLSFRPKGLMCPDHKEEVTHYCKTCQRLVCQLCRVRRTHSGHKITPVLSAYQALKDKLTKSLTYILGNQDTVQTQICELEEAVRHTEVSGQQAKEEVSQLVRGLGAVLEEKRASLLQAIEECQQERLARLSAQIQEHRSLLDGSGLVGYAQEVLKETDQPCFVQAAKQLHNRIARATEALQTFRPAASSSFRHCQLDVGREMKLLTELNFLRVPEAPVIDTQRTFAYDQIFLCWRLPPHSPPAWHYTVEFRRTDVPAQPGPTRWQRREEVRGTSALLENPDTGSVYVLRVRGCNKAGYGEYSEDVHLHTPPAPVLHFFLDSRWGASRERLAISKDQRAVRSVPGLPLLLAADRLLTGCHLSVDVVLGDVAVTQGRSYWACAVDPASYLVKVGVGLESKLQESFQGAPDVISPRYDPDSGHDSGAEDATVEASPPFAFLTIGMGKILLGSGASSNAGLTGRDGPTAGCTVPLPPRLGICLDYERGRVSFLDAVSFRGLLECPLDCSGPVCPAFCFIGGGAVQLQEPVGTKPERKVTIGGFAKLD

SEQ ID NO: 92616 - protein, 644 aa, Homo sapiens
  Payload ID: 18507
  Gene Name: tripartite motif containing 46
  ENSP ID: ENSP00000357367
MAEGEDMQTFTSIMDALVRISTSMKNMEKELLCPVCQEMYKQPLVLPCTHNVCQACAREVLGQQGYIGHGGDPSSEPTSPASTPSTRSPRLSRRTLPKPDRLDRLLKSGFGTYPGRKRGALHPQVIMFPCPACQGDVELGERGLAGLFRNLTLERVVERYRQSVSVGGAILCQLCKPPPLEATKGCTECRATFCNECFKLFHPWGTQKAQHEPTLPTLSFRPKGLMCPDHKEEVTHYCKTCQRLVCQLCRVRRTHSGHKITPVLSAYQALKDKLTKSLTYILGNQDTVQTQICELEEAVRHTEVSGQQAKEEVSQLVRGLGAVLEEKRASLLQAIEECQQERLARLSAQIQEHRSLLDGSGLVGYAQEVLKETDQPCFVQAAKQLHNRIARATEALQTFRPAASSSFRHCQLDVGREMKLLTELNFLRVPEAPVIDTQRTFAYDQIFLCWRLPPHSPPAWHYTVEFRRTDVPAQPGPTRWQRREEVRGTSALLENPDTGSVYVLRVRGCNKAGYGEYSEDVHLHTPPAPVLHFFLDSRWGASRERLAISKDQRAVRSVPGLPLLLAADRLLTGCHLSVDVVLGDVAVTQGRSYWACAVDPASYLVKVGVGLESKLQESFQGAPDVISPRSDPSGRDGVWGSWWE

SEQ ID NO: 92617 - protein, 551 aa, Homo sapiens
  Payload ID: 18507
  Gene Name: tripartite motif containing 46
  Uniprot ID: Q7Z4K8
  ENSP ID: ENSP00000357369
MAEGEDMQTFTSIMDALVRISTSMKNMEKELLCPVCQEMYKQPLVLPCTHNVCQACAREVLGQQGYIGHGGDPSSEPTSPASTPSTRSPRLSRRTLPKPDRLDRLLKSGFGTYPGRKRGALHPQVIMFPCPACQGDVELGERGLAGLFRNLTLERVVERYRQSVSVGGAILCQLCKPPPLEATKGCTECRATFCNECFKLFHPWGTQKAQHEPTLPTLSFRPKGLMCPDHKEEVTHYCKTCQRLVCQLCRVRRTHSGHKITPVLSAYQALKDKLTKSLTYILGNQDTVQTQICELEEAVRHTEVSGQQAKEEVSQLVRGLGAVLEEKRASLLQAIEECQQERLARLSAQIQEHRSLLDGSGLVGYAQEVLKETDQPCFVQAAKQLHNRIARATEALQTFRPAASSSFRHCQLDVGREMKLLTELNFLRVPEAPVIDTQRTFAYDQIFLCWRLPPHSPPAWHYTVEFRRTDVPAQPGPTRWQRREEVRGTSALLENPDTGSVYVLRVRGCNKAGYGEYSEDVHLHTPPAPGIQNLARRGGACLQFQLLGRLR

SEQ ID NO: 92618 - protein, 717 aa, Homo sapiens
  Payload ID: 18507
  Gene Name: tripartite motif containing 46
  ENSP ID: ENSP00000376245
MAAKRGTKTSMKNMEKELLCPVCQEMYKQPLVLPCTHNVCQACAREVLGQQGYIGHGGDPSSEPTSPASTPSTRSPRLSRRTLPKPDRLDRLLKSGFGTYPGRKRGALHPQVIMFPCPACQGDVELGERGLAGLFRNLTLERVVERYRQSVSVGGAILCQLCKPPPLEATKGCTECRATFCNECFKLFHPWGTQKAQHEPTLPTLSFRPKGLMCPDHKEEVTHYCKTCQRLVCQLCRVRRTHSGHKITPVLSAYQALKDKLTKSLTYILGNQDTVQTQICELEEKRASLLQAIEECQQERLARLSAQIQEHRSLLDGSGLVGYAQEVLKETDQPCFVQAAKQLHNRIARATEALQTFRPAASSSFRHCQLDVGREMKLLTELNFLRVPEAPVIDTQRTFAYDQIFLCWRLPPHSPPAWHYTVEFRRTDVPAQPGPTRWQRREEVRGTSALLENPDTGSVYVLRVRGCNKAGYGEYSEDVHLHTPPAPVLHFFLDSRWGASRERLAISKDQRAVRSVPGLPLLLAADRLLTGCHLSVDVVLGDVAVTQGRSYWACAVDPASYLVKVGVGLESKLQESFQGAPDVISPRYDPDSGHDSGAEDATVEASPPFAFLTIGMGKILLGSGASSNAGLTGRDGPTAGCTVPLPPRLGICLDYERGRVSFLDAVSFRGLLECPLDCSGPVCPAFCFIGGGAVQLQEPVGTKPERKVTIGGFAKLD

SEQ ID NO: 92619 - protein, 633 aa, Homo sapiens
  Payload ID: 18507
  Gene Name: tripartite motif containing 46
  ENSP ID: ENSP00000440254
MFPCPACQGDVELGERGLAGLFRNLTLERVVERYRQSVSVGGAILCQLCKPPPLEATKGCTECRATFCNECFKLFHPWGTQKAQHEPTLPTLSFRPKGLMCPDHKEEVTHYCKTCQRLVCQLCRVRRTHSGHKITPVLSAYQALKDKLTKSLTYILGNQDTVQTQICELEEAVRHTEVSGQQAKEEVSQLVRGLGAVLEEKRASLLQAIEECQQERLARLSAQIQEHRSLLDGSGLVGYAQEVLKETDQPCFVQAAKQLHNRIARATEALQTFRPAASSSFRHCQLDVGREMKLLTELNFLRVPEAPVIDTQRTFAYDQIFLCWRLPPHSPPAWHYTVEFRRTDVPAQPGPTRWQRREEVRGTSALLENPDTGSVYVLRVRGCNKAGYGEYSEDVHLHTPPAPVLHFFLDSRWGASRERLAISKDQRAVRSVPGLPLLLAADRLLTGCHLSVDVVLGDVAVTQGRSYWACAVDPASYLVKVGVGLESKLQESFQGAPDVISPRYDPDSGHDSGAEDATVEASPPFAFLTIGMGKILLGSGASSNAGLTGRDGPTAGCTVPLPPRLGICLDYERGRVSFLDAVSFRGLLECPLDCSGPVCPAFCFIGGGAVQLQEPVGTKPERKVTIGGFAKLD

SEQ ID NO: 92620 - protein, 498 aa, Homo sapiens
  Payload ID: 18507
  Gene Name: tripartite motif containing 46
  Uniprot ID: Q7Z4K8
  ENSP ID: ENSP00000442719
MAEGEDMQTFTSIMDALVRISTSMKNMEKELLCPVCQEMYKQPLVLPCTHNVCQACAREVLGQQGYIGHGGDPSSEPTSPASTPSTRSPRLSRRTLPKPDRLDRLLKSGFGTYPGRKRGALHPQVIMFPCPACQGDVELGERGLAGLFRNLTLERVVERYRQSVSVGGAILCQLCKPPPLEATKGCTECRATFCNECFKLFHPWGTQKAQHEPTLPTLSFRPKGLMCPDHKEEVTHYCKTCQRLVCQLCRVRRTHSGHKITPVLSAYQALKDKLTKSLTYILGNQDTVQTQICELEEAVRHTEVSGQQAKEEVSQLVRGLGAVLEEKRASLLQAIEECQQERLARLSAQIQEHRSLLDGSGLVGYAQEVLKETDQPCFVQAAKQLHNRIARATEALQTFRPAASSSFRHCQLDVGREMKLLTELNFLRGCGHRGLCSGAPQCLRPPSLTPSAPLPMIRSSCAGGCPPIHHLPGTIPLSSGARMCLLSQAPPAGSGGRR

SEQ ID NO: 92621 - protein, 746 aa, Homo sapiens
  Payload ID: 18507
  Gene Name: tripartite motif containing 46
  ENSP ID: ENSP00000478669
MGAKGNGLTSMKNMEKELLCPVCQEMYKQPLVLPCTHNVCQACAREVLGQQGYIGHGGDPSSEPTSPASTPSTRSPRLSRRTLPKPDRLDRLLKSGFGTYPGRKRGALHPQVIMFPCPACQGDVELGERGLAGLFRNLTLERVVERYRQSVSVGGAILCQLCKPPPLEATKGCTECRATFCNECFKLFHPWGTQKAQHEPTLPTLSFRPKGLMCPDHKEEVTHYCKTCQRLVCQLCRVRRTHSGHKITPVLSAYQALKDKLTKSLTYILGNQDTVQTQICELEEAVRHTEVSGQQAKEEVSQLVRGLGAVLEEKRASLLQAIEECQQERLARLSAQIQEHRSLLDGSGLVGYAQEVLKETDQPCFVQAAKQLHNRIARATEALQTFRPAASSSFRHCQLDVGREMKLLTELNFLRVPEAPVIDTQRTFAYDQIFLCWRLPPHSPPAWHYTVEFRRTDVPAQPGPTRWQRREEVRGTSALLENPDTGSVYVLRVRGCNKAGYGEYSEDVHLHTPPAPVLHFFLDSRWGASRERLAISKDQRAVRSVPGLPLLLAADRLLTGCHLSVDVVLGDVAVTQGRSYWACAVDPASYLVKVGVGLESKLQESFQGAPDVISPRYDPDSGHDSGAEDATVEASPPFAFLTIGMGKILLGSGASSNAGLTGRDGPTAGCTVPLPPRLGICLDYERGRVSFLDAVSFRGLLECPLDCSGPVCPAFCFIGGGAVQLQEPVGTKPERKVTIGGFAKLD

SEQ ID NO: 92622 - protein, 638 aa, Homo sapiens
  Payload ID: 18508
  Gene Name: tripartite motif containing 47
  Uniprot ID: Q96LD4
  ENSP ID: ENSP00000254816
MDGSGPFSCPICLEPLREPVTLPCGHNFCLACLGALWPHRGASGAGGPGGAARCPLCQEPFPDGLQLRKNHTLSELLQLRQGSGPGSGPGPAPALAPEPSAPSALPSVPEPSAPCAPEPWPAGEEPVRCDACPEGAALPAALSCLSCLASFCPAHLGPHERSPALRGHRLVPPLRRLEESLCPRHLRPLERYCRAERVCLCEACAAQEHRGHELVPLEQERALQEAEQSKVLSAVEDRMDELGAGIAQSRRTVALIKSAAVAERERVSRLFADAAAALQGFQTQVLGFIEEGEAAMLGRSQGDLRRQEEQRSRLSRARQNLSQVPEADSVSFLQELLALRLALEDGCGPGPGPPRELSFTKSSQAVRAVRDMLAVACVNQWEQLRGPGGNEDGPQKLDSEADAEPQDLESTNLLESEAPRDYFLKFAYIVDLDSDTADKFLQLFGTKGVKRVLCPINYPLSPTRFTHCEQVLGEGALDRGTYYWEVEIIEGWVSMGVMAEDFSPQEPYDRGRLGRNAHSCCLQWNGRSFSVWFHGLEAPLPHPFSPTVGVCLEYADRALAFYAVRDGKMSLLRRLKASRPRRGGIPASPIDPFQSRLDSHFAGLFTHRLKPAFFLESVDAHLQIGPLKKSCISVLKRR

SEQ ID NO: 92623 - protein, 122 aa, Homo sapiens
  Payload ID: 18508
  Gene Name: tripartite motif containing 47
  ENSP ID: ENSP00000465010
  MOD_RES (1)..(1): Any amino acid
XPWPAGEEPVRCDACPEGAALPAALSCLSCLASFCPAHLGPHERSPALRGHRLVPPLRRLEESLCPRHLRPLERYCRAERVCLCEACAAQEHRGHELVPLEQERALQEVGSGGTLGLSSPKS

SEQ ID NO: 92624 - protein, 38 aa, Homo sapiens
  Payload ID: 18508
  Gene Name: tripartite motif containing 47
  ENSP ID: ENSP00000465038
MDELGAGIAQSRRTVALIKSAAVAERERVSRLFADAAA

SEQ ID NO: 92625 - protein, 183 aa, Homo sapiens
  Payload ID: 18508
  Gene Name: tripartite motif containing 47
  ENSP ID: ENSP00000467645
  MOD_RES (1)..(1): Any amino acid
XPQEPYDRGRLGRNAHSCCLQWNGRSFSVWFHGLEAPLPHPFSPTVGVCLEYADRALAFYATQACLLPGECGRPLADRAPQEVLHIRAEEEVMPGTGAPAAVSAPGSCLLWALSFVWEGTSMSPTHPAFSFLEASTFLYTQPSLSQAGGPPDPVPLQTSLLGDRATAGTAPSYPNPSFPRFLE

SEQ ID NO: 92626 - protein, 224 aa, Homo sapiens
  Payload ID: 18509
  Gene Name: tripartite motif containing 48
  Uniprot ID: Q8IWZ4
  ENSP ID: ENSP00000402414
MSRRIIVGTLQRTQRNMNSGISQVFQRELTCPICMNYFIDPVTIDCGHSFCRPCFYLNWQDIPILTQCFECIKTIQQRNLKTNIRLKKMASLARKASLWLFLSSEEQMCGIHRETKKMFCEVDRSLLCLLCSSSQEHRYHRHCPAEWAAEEHWEKLLKKMQSLWEKACENQRNLNVETTRISHWKAFGDILYRSESVLLHMPQPLNLALRAGPITGLRDRLNQF

SEQ ID NO: 92627 - protein, 452 aa, Homo sapiens
  Payload ID: 18510
  Gene Name: tripartite motif containing 49
  Uniprot ID: P0CI25
  ENSP ID: ENSP00000327604
MNSGILQVFQGELICPLCMNYFIDPVTIDCGHSFCRPCFYLNWQDIPFLVQCSECTKSTEQINLKTNIHLKKMASLARKVSLWLFLSSEEQMCGTHRETKKIFCEVDRSLLCLLCSSSQEHRYHRHRPIEWAAEEHREKLLQKMQSLWEKACENHRNLNVETTRTRCWKDYVNLRLEAIRAEYQKMPAFHHEEEKHNLEMLKKKGKEIFHRLHLSKAKMAHRMEILRGMYEELNEMCHKPDVELLQAFGDILHRSESVLLHMPQPLNPELSAGPITGLRDRLNQFRVHITLHHEEANNDIFLYEILRSMCIGCDHQDVPYFTATPRSFLAWGVQTFTSGKYYWEVHVGDSWNWAFGVCNMYRKEKNQNEKIDGKAGLFLLGCVKNDIQCSLFTTSPLMLQYIPKPTSRVGLFLDCEAKTVSFVDVNQSSLIYTIPNCSFSPPLRPIFCCIHF

SEQ ID NO: 92628 - protein, 375 aa, Homo sapiens
  Payload ID: 18510
  Gene Name: tripartite motif containing 49
  ENSP ID: ENSP00000431618
MNSGILQVFQGELICPLCMNYFIDPVTIDCGHSFCRPCFYLNWQDIPFLVQCSECTKSTEQINLKTNIHLKKMASLARKVSLWLFLSSEEQMCGTHRETKKIFCEVDRSLLCLLCSSSQEHRYHRHRPIEWAAEEHREKLLQKMQSLWEKACENHRNLNVETTRTRCWKAFGDILHRSESVLLHMPQPLNPELSAGPITGLRDRLNQFRVHITLHHEEANNDIFLYEILRSMCIGCDHQDVPYFTATPRSFLAWGVQTFTSGKYYWEVHVGDSWNWAFGVCNMYRKEKNQNEKIDGKAGLFLLGCVKNDIQCSLFTTSPLMLQYIPKPTSRVGLFLDCEAKTVSFVDVNQSSLIYTIPNCSFSPPLRPIFCCIHF

SEQ ID NO: 92629 - protein, 452 aa, Homo sapiens
  Payload ID: 18511
  Gene Name: tripartite motif containing 49B
  Uniprot ID: A6NDI0
  ENSP ID: ENSP00000330216
MNSGILQVFQRELICPICMNYFIDPVTIDCGHSFCRPCFYLNWKDSPFLVQCSECTKSTGQINLKTNIHFKKMASLARKVSLWLFLSSEEQMCGTHRETKKMFCEVDRSLLCLLCSSSQEHRDHRHCPIESAAEEHQEKLLQKMQSLWEKACENHRNLNVETTRTRCWKDYVNLRLEAIRAEYQKMPAFHHEEEKHNLEMLKKKGKDIFHRLHLSKAKMAHRREILRGMYEELNEMCHKPDVELLQAFGDILHRSESVLLHMPQPLNPELSAGPITGLRDRLNQFRVHITLHHEEANSDIFLCEILRSMCIGCDHQDVPYFTATPRSFLAWGAQTFTSGKYYWEVHVGDSWNWAFGVCNMYWKEKNQNEKIDGEDGLFLLGCVKNDIQRSLFTTSPLLLQYIPRPTSRVGLFLDCEAKTVSFVDVNQSSLIYTIPNCSFSPPLRPIFCCIHF

SEQ ID NO: 92630 - protein, 452 aa, Homo sapiens; identical to SEQ ID NO: 92629
  Payload ID: 18511
  Gene Name: tripartite motif containing 49B
  Uniprot ID: A6NDI0
  ENSP ID: ENSP00000481457

SEQ ID NO: 92631 - protein, 452 aa, Homo sapiens
  Payload ID: 18512
  Gene Name: tripartite motif containing 49C
  Uniprot ID: P0CI26
  ENSP ID: ENSP00000388299
MNSGILQVFQGELICPLCMNYFIDPVTIDCGHSFCRPCFYLNWQDIPFLVQCSECTKSTEQINLKTNIHLKKMASLARKVSLWLFLSSEEQMCGTHRETKKIFCEVDRSLLCLLCSSSQEHRYHRHRPIEWAAEEHREKLLQKMQSLWEKACENHRNLNVETTRTRCWKDYVNLRLEAIRAEYQKMPAFHHEEEKHNLEMLKKKGKEIFHRLHLSKAKMAHRMEILRGMYEELNEMCHKPDVELLQAFGDILHRSESVLLHMPQPLNPELSAGPITGLRDRLNQFRVHITLHHEEANSDIFLYEILRSMCIGCDHQDVPYFTATPRSFLAWGVQTFTSGKYYWEVHVGDSWNWAFGVCNMYRKEKNQNEKIDGKEGLFLLGCIKNDIQCSLFTTSPLMLQYIPKPTSRVGLFLDCEAKTVSFVDVNQSSLIYTIPNCSFSPPLRPIFCCIHF

SEQ ID NO: 92632 - protein, 452 aa, Homo sapiens
  Payload ID: 18513
  Gene Name: tripartite motif containing 49D1
  Uniprot ID: C9J1S8
  ENSP ID: ENSP00000474678
MNSGISQVFQRELTCPICLNYFIDPVTIDCGHSFCRPCFYLNWQDIPILTQCFECLKTTQQRNLKTNIRLKKMASRARKASLWLFLSSEEQMCGTHRETKKIFCEVDRSLLCLLCSSSLEHRYHRHCPAEWAAEEHREKLLKKMQSLWEKVCENQRNLNVETTRISHWKDYVNVRLEAIRAEYQKMPAFHHEEEKHNLEMLKKKGKDIFHRLHLSKAKMAHRREILRGTYAELMKMCHKPDVELLQAFGDILHRSESVLLHMPQPLNLELRAGPITGLRDRLNQFRVDITLPHNEANSHIFRRGDLRSICIGCDRQNAPHITATPTSFLAWGAQTFTSGKYYWEVHVGDSWNWAFGVCNKYWKGTNQNGNIHGEEGLFSLGCVKNDIQCSLFTTSPLTLQYVPRPTNHVGLFLDCEARTVSFVDVNQSSPIHTIPNCSFSPPLRPIFCCVHL

SEQ ID NO: 92633 - protein, 452 aa, Homo sapiens; identical to SEQ ID NO: 92632
  Payload ID: 18513
  Gene Name: tripartite motif containing 49D1
  Uniprot ID: C9J1S8
  ENSP ID: ENSP00000474850

SEQ ID NO: 92634 - protein, 375 aa, Homo sapiens
  Payload ID: 18513
  Gene Name: tripartite motif containing 49D1
  ENSP ID: ENSP00000479562
MNSGISQVFQRELTCPICLNYFIDPVTIDCGHSFCRPCFYLNWQDIPILTQCFECLKTTQQRNLKTNIRLKKMASRARKASLWLFLSSEEQMCGTHRETKKIFCEVDRSLLCLLCSSSLEHRYHRHCPAEWAAEEHREKLLKKMQSLWEKVCENQRNLNVETTRISHWKAFGDILHRSESVLLHMPQPLNLELRAGPITGLRDRLNQFRVDITLPHNEANSHIFRRGDLRSICIGCDRQNAPHITATPTSFLAWGAQTFTSGKYYWEVHVGDSWNWAFGVCNKYWKGTNQNGNIHGEEGLFSLGCVKNDIQCSLFTTSPLTLQYVPRPTNHVGLFLDCEARTVSFVDVNQSSPIHTIPNCSFSPPLRPIFCCVHL

SEQ ID NO: 92635 - protein, 452 aa, Homo sapiens; identical to SEQ ID NO: 92632
  Payload ID: 18514
  Gene Name: tripartite motif containing 49D2
  Uniprot ID: C9J1S8
  ENSP ID: ENSP00000485097

SEQ ID NO: 92636 - protein, 452 aa, Homo sapiens; identical to SEQ ID NO: 92632
  Payload ID: 18514
  Gene Name: tripartite motif containing 49D2
  Uniprot ID: C9J1S8
  ENSP ID: ENSP00000485325

SEQ ID NO: 92637 - protein, 326 aa, Homo sapiens
  Payload ID: 18515
  Gene Name: tripartite motif containing 5
  Uniprot ID: Q9C035
  ENSP ID: ENSP00000369366
MASGILVNVKEEVTCPICLELLTQPLSLDCGHSFCQACLTANHKKSMLDKGESSCPVCRISYQPENIRPNRHVANIVEKLREVKLSPEGQKVDHCARHGEKLLLFCQEDGKVICWLCERSQEHRGHHTFLTEEVAREYQVKLQAALEMLRQKQQEAEELEADIREEKASWKTQIQYDKTNVLADFEQLRDILDWEESNELQNLEKEEEDILKSLTNSETEMVQQTQSLRELISDLEHRLQGSVMELLQGVDGVIKRTENVTLKKPETFPKNQRRVFRAPDLKGMLEVFRELTDVRRYWGWSAMARSRFTATSTSQIQAILLPQPPK

SEQ ID NO: 92638 - protein, 493 aa, Homo sapiens
  Payload ID: 18515
  Gene Name: tripartite motif containing 5
  Uniprot ID: Q9C035
  ENSP ID: ENSP00000369373
MASGILVNVKEEVTCPICLELLTQPLSLDCGHSFCQACLTANHKKSMLDKGESSCPVCRISYQPENIRPNRHVANIVEKLREVKLSPEGQKVDHCARHGEKLLLFCQEDGKVICWLCERSQEHRGHHTFLTEEVAREYQVKLQAALEMLRQKQQEAEELEADIREEKASWKTQIQYDKTNVLADFEQLRDILDWEESNELQNLEKEEEDILKSLTNSETEMVQQTQSLRELISDLEHRLQGSVMELLQGVDGVIKRTENVTLKKPETFPKNQRRVFRAPDLKGMLEVFRELTDVRRYWVDVTVAPNNISCAVISEDKRQVSSPKPQIIYGARGTRYQTFVNFNYCTGILGSQSITSGKHYWEVDVSKKTAWILGVCAGFQPDAMCNIEKNENYQPKYGYWVIGLEEGVKCSAFQDSSFHTPSVPFIVPLSVIICPDRVGVFLDYEACTVSFFNITNHGFLIYKFSHCSFSQPVFPYLNPRKCGVPMTLCSPSS

SEQ ID NO: 92639 - protein, 347 aa, Homo sapiens
  Payload ID: 18515
  Gene Name: tripartite motif containing 5
  Uniprot ID: Q9C035
  ENSP ID: ENSP00000380058
MASGILVNVKEEVTCPICLELLTQPLSLDCGHSFCQACLTANHKKSMLDKGESSCPVCRISYQPENIRPNRHVANIVEKLREVKLSPEGQKVDHCARHGEKLLLFCQEDGKVICWLCERSQEHRGHHTFLTEEVAREYQVKLQAALEMLRQKQQEAEELEADIREEKASWKTQIQYDKTNVLADFEQLRDILDWEESNELQNLEKEEEDILKSLTNSETEMVQQTQSLRELISDLEHRLQGSVMELLQGVDGVIKRTENVTLKKPETFPKNQRRVFRAPDLKGMLEVFRELTDVRRYWGKEKSHYHKPPCGLSLLLSLSFRILCSLLGSCFKIYDSPSKTHITYPSL

SEQ ID NO: 92640 - protein, 209 aa, Homo sapiens
  Payload ID: 18515
  Gene Name: tripartite motif containing 5
  ENSP ID: ENSP00000388031
MASGILVNVKEEVTCPICLELLTQPLSLDCGHSFCQACLTANHKKSMLDKGESSCPVCRISYQPENIRPNRHVANIVEKLREVKLSPEGQKVDHCARHGEKLLLFCQEDGKVICWLCERSQEHRGHHTFLTEEVAREYQVKLQAALEMLRQKQQEAEELEADIREEKASWKTQIQYDKTNVLADFEQLRDILDWEESNELQNLEKEEED

SEQ ID NO: 92641 - protein, 72 aa, Homo sapiens
  Payload ID: 18515
  Gene Name: tripartite motif containing 5
  ENSP ID: ENSP00000388150
MASGILVNVKEEVTCPICLELLTQPLSLDCGHSFCQACLTANHKKSMLDKGESSCPVCRISYQPENIRPNRH

SEQ ID NO: 92642 - protein, 271 aa, Homo sapiens
  Payload ID: 18515
  Gene Name: tripartite motif containing 5
  Uniprot ID: Q9C035
  ENSP ID: ENSP00000393052
MASGILVNVKEEVTCPICLELLTQPLSLDCGHSFCQACLTANHKKSMLDKGESSCPVCRISYQPENIRPNRHVANIVEKLREVKLSPEGQKVDHCARHGEKLLLFCQEDGKVICWLCERSQEHRGHHTFLTEEVAREYQVKLQAALEMLRQKQQEAEELEADIREEKASWKTQIQYDKTNVLADFEQLRDILDWEESNELQNLEKEEEDILKSLTNSETEMVQQTQSLRELISDLEHRLQGSVMELLQDGERDLEEARNFSKKSKESVSSS

SEQ ID NO: 92643 - protein, 187 aa, Homo sapiens
  Payload ID: 18515
  Gene Name: tripartite motif containing 5
  ENSP ID: ENSP00000398196
  MOD_RES (1)..(1): Any amino acid
XGHHTFLTEEVAREYQVKLQAALEMLRQKQQEAEELEADIREEKASWKTQIQYDKTNVLADFEQLRDILDWEESNELQNLEKEEEDILKSLTNSETEMVQQTQSLRELISDLEHRLQGSVMELLQGVDGVIKRADRCPTLLGLECNGTISVHCNLHLSDSSNSPASASQVAGITGAHHHPWLNLYFQ

SEQ ID NO: 92644 - protein, 487 aa, Homo sapiens
  Payload ID: 18516
  Gene Name: tripartite motif containing 50
  Uniprot ID: Q86XT4
  ENSP ID: ENSP00000327994
MAWQVSLPELEDRLQCPICLEVFKEPLMLQCGHSYCKGCLVSLSCHLDAELRCPVCRQAVDGSSSLPNVSLARVIEALRLPGDPEPKVCVHHRNPLSLFCEKDQELICGLCGLLGSHQHHPVTPVSTVYSRMKEELAALISELKQEQKKVDELIAKLVNNRTRIVNESDVFSWVIRREFQELHHLVDEEKARCLEGIGGHTRGLVASLDMQLEQAQGTRERLAQAECVLEQFGNEDHHKFIRKFHSMASRAEMPQARPLEGAFSPISFKPGLHQADIKLTVWKRLFRKVLPAPEPLKLDPATAHPLLELSKGNTVVQCGLLAQRRASQPERFDYSTCVLASRGFSCGRHYWEVVVGSKSDWRLGVIKGTASRKGKLNRSPEHGVWLIGLKEGRVYEAFACPRVPLPVAGHPHRIGLYLHYEQGELTFFDADRPDDLRPLYTFQADFQGKLYPILDTCWHERGSNSLPMVLPPPSGPGPLSPEQPTKL

SEQ ID NO: 92645 - protein, 487 aa, Homo sapiens; identical to SEQ ID NO: 92644
  Payload ID: 18516
  Gene Name: tripartite motif containing 50
  Uniprot ID: Q86XT4
  ENSP ID: ENSP00000413875

SEQ ID NO: 92646 - protein, 297 aa, Homo sapiens
  Payload ID: 18517
  Gene Name: tripartite motif containing 52
  Uniprot ID: Q96A61
  ENSP ID: ENSP00000483005
MAGYATTPSPMQTLQEEAVCAICLDYFKDPVSISCGHNFCRGCVTQLWSKEDEEDQNEEEDEWEEEEDEEAVGAMDGWDGSIREVLYRGNADEELFQDQDDDELWLGDSGITNWDNVDYMWDEEEEEEEEDQDYYLGGLRPDLRIDVYREEEILEAYDEDEDEELYPDIHPPPSLPLPGQFTCPQCRKSFTRRSFRPNLQLANMVQIIRQMCPTPYRGNRSNDQGMCFKHQEALKLFCEVDKEAICVVCRESRSHKQHSVLPLEEVVQEYQEIKLETTLVGILQIEQESIHSKAYNQ

SEQ ID NO: 92647 - protein, 400 aa, Homo sapiens
  Payload ID: 18518
  Gene Name: tripartite motif containing 54
  Uniprot ID: Q9BYV2
  ENSP ID: ENSP00000296098
MNFTVGFKPLLGDAHSMDNLEKQLICPICLEMFSKPVVILPCQHNLCRKCANDVFQASNPLWQSRGSTTVSSGGRFRCPSCRHEVVLDRHGVYGLQRNLLVENIIDIYKQESSRPLHSKAEQHLMCEEHEEEKINIYCLSCEVPTCSLCKVFGAHKDCEVAPLPTIYKRQKKQDLTLLPRLECSGTNTTYCSLDLPSSSDPPILASQNTKIIDSELSDGIAMLVAGNDRVQAVITQMEEVCQTIEDNSRRQKQLLNQRFESLCAVLEERKGELLQALAREQEEKLQRVRGLIRQYGDHLEASSKLVESAIQSMEEPQMALYLQQAKELINKVGAMSKVELAGRPEPGYESMEQFTVRVEHVAEMLRTIDFQPGASGEEEEVAPDGEEGSAGPEEERPDGP

SEQ ID NO: 92648 - protein, 358 aa, Homo sapiens
  Payload ID: 18518
  Gene Name: tripartite motif containing 54
  Uniprot ID: Q9BYV2
  ENSP ID: ENSP00000369415
MNFTVGFKPLLGDAHSMDNLEKQLICPICLEMFSKPVVILPCQHNLCRKCANDVFQASNPLWQSRGSTTVSSGGRFRCPSCRHEVVLDRHGVYGLQRNLLVENIIDIYKQESSRPLHSKAEQHLMCEEHEEEKINIYCLSCEVPTCSLCKVFGAHKDCEVAPLPTIYKRQKSELSDGIAMLVAGNDRVQAVITQMEEVCQTIEDNSRRQKQLLNQRFESLCAVLEERKGELLQALAREQEEKLQRVRGLIRQYGDHLEASSKLVESAIQSMEEPQMALYLQQAKELINKVGAMSKVELAGRPEPGYESMEQFTVRVEHVAEMLRTIDFQPGASGEEEEVAPDGEEGSAGPEEERPDGP

SEQ ID NO: 92649 - protein, 540 aa, Homo sapiens
  Payload ID: 18519
  Gene Name: tripartite motif containing 55
  Uniprot ID: Q9BYV6
  ENSP ID: ENSP00000276573
MSASLNYKSFSKEQQTMDNLEKQLICPICLEMFTKPVVILPCQHNLCRKCASDIFQASNPYLPTRGGTTMASGGRFRCPSCRHEVVLDRHGVYGLQRNLLVENIIDIYKQESTRPEKKSDQPMCEEHEEERINIYCLNCEVPTCSLCKVFGAHKDCQVAPLTHVFQRQKSELSDGIAILVGSNDRVQGVISQLEDTCKTIEECCRKQKQELCEKFDYLYGILEERKNEMTQVITRTQEEKLEHVRALIKKYSDHLENVSKLVESGIQFMDEPEMAVFLQNAKTLLKKISEASKAFQMEKIEHGYENMNHFTVNLNREEKIIREIDFYREDEDEEEEEGGEGEKEGEGEVGGEAVEVEEVENVQTEFPGEDENPEKASELSQVELQAAPGALPVSSPEPPPALPPAADAPVTQGEVVPTGSEQTTESETPVPAAAETADPLFYPSWYKGQTRKATTNPPCTPGSEGLGQIGPPGSEDSNVRKAEVAAAAASERAAVSGKETSAPAATSQELVICLALLAFLILHYIWSQIQCLIFTLMDWI

SEQ ID NO: 92650 - protein, 452 aa, Homo sapiens
  Payload ID: 18519
  Gene Name: tripartite motif containing 55
  Uniprot ID: Q9BYV6
  ENSP ID: ENSP00000297348
MSASLNYKSFSKEQQTMDNLEKQLICPICLEMFTKPVVILPCQHNLCRKCASDIFQASNPYLPTRGGTTMASGGRFRCPSCRHEVVLDRHGVYGLQRNLLVENIIDIYKQESTRPEKKSDQPMCEEHEEERINIYCLNCEVPTCSLCKVFGAHKDCQVAPLTHVFQRQKSELSDGIAILVGSNDRVQGVISQLEDTCKTIEECCRKQKQELCEKFDYLYGILEERKNEMTQVITRTQEEKLEHVRALIKKYSDHLENVSKLVESGIQFMDEPEMAVFLQNAKTLLKKISEASKAFQMEKIEHGYENMNHFTVNLNREEKIIREIDFYREDEDEEEEEGGEGEKEGEGEVGGEAVEVEEVENVQTEFPGEDENPEKASELSQVELQAAPGALPVSSPEPPPALPPAADAPVTQIGFEAPPLQGQAAAPASGSGADSEPARHIFSFSWLNSLNE

SEQ ID NO: 92651 - protein, 548 aa, Homo sapiens
  Payload ID: 18519
  Gene Name: tripartite motif containing 55
  Uniprot ID: Q9BYV6
  ENSP ID: ENSP00000323913
MSASLNYKSFSKEQQTMDNLEKQLICPICLEMFTKPVVILPCQHNLCRKCASDIFQASNPYLPTRGGTTMASGGRFRCPSCRHEVVLDRHGVYGLQRNLLVENIIDIYKQESTRPEKKSDQPMCEEHEEERINIYCLNCEVPTCSLCKVFGAHKDCQVAPLTHVFQRQKSELSDGIAILVGSNDRVQGVISQLEDTCKTIEECCRKQKQELCEKFDYLYGILEERKNEMTQVITRTQEEKLEHVRALIKKYSDHLENVSKLVESGIQFMDEPEMAVFLQNAKTLLKKISEASKAFQMEKIEHGYENMNHFTVNLNREEKIIREIDFYREDEDEEEEEGGEGEKEGEGEVGGEAVEVEEVENVQTEFPGEDENPEKASELSQVELQAAPGALPVSSPEPPPALPPAADAPVTQGEVVPTGSEQTTESETPVPAAAETADPLFYPSWYKGQTRKATTNPPCTPGSEGLGQIGPPGSEDSNVRKAEVAAAAASERAAVSGKETSAPAATSQIGFEAPPLQGQAAAPASGSGADSEPARHIFSFSWLNSLNE

SEQ ID NO: 92652 - protein, 241 aa, Homo sapiens
  Payload ID: 18519
  Gene Name: tripartite motif containing 55
  Uniprot ID: Q9BYV6
  ENSP ID: ENSP00000332302
MSASLNYKSFSKEQQTMDNLEKQLICPICLEMFTKPVVILPCQHNLCRKCASDIFQASNPYLPTRGGTTMASGGRFRCPSCRHEVVLDRHGVYGLQRNLLVENIIDIYKQESTRPEKKSDQPMCEEHEEERINIYCLNCEVPTCSLCKVFGAHKDCQVAPLTHVFQRQKSELSDGIAILVGSNDRVQGVISQLEDTCKTIEIGFEAPPLQGQAAAPASGSGADSEPARHIFSFSWLNSLNE

SEQ ID NO: 92653 - protein, 755 aa, Homo sapiens
  Payload ID: 18520
  Gene Name: tripartite motif containing 56
  Uniprot ID: Q9BRZ2
  ENSP ID: ENSP00000305161
MVSHGSSPSLLEALSSDFLACKICLEQLRAPKTLPCLHTYCQDCLAQLADGGRVRCPECRETVPVPPEGVASFKTNFFVNGLLDLVKARACGDLRAGKPACALCPLVGGTSTGGPATARCLDCADDLCQACADGHRCTRQTHTHRVVDLVGYRAGWYDEEARERQAAQCPQHPGEALRFLCQPCSQLLCRECRLDPHLDHPCLPLAEAVRARRPGLEGLLAGVDNNLVELEAARRVEKEALARLREQAARVGTQVEEAAEGVLRALLAQKQEVLGQLRAHVEAAEEAARERLAELEGREQVARAAAAFARRVLSLGREAEILSLEGAIAQRLRQLQGCPWAPGPAPCLLPQLELHPGLLDKNCHLLRLSFEEQQPQKDGGKDGAGTQGGEESQSRREDEPKTERQGGVQPQAGDGAQTPKEEKAQTTREEGAQTLEEDRAQTPHEDGGPQPHRGGRPNKKKKFKGRLKSISREPSPALGPNLDGSGLLPRPIFYCSFPTRMPGDKRSPRITGLCPFGPREILVADEQNRALKRFSLNGDYKGTVPVPEGCSPCSVAALQSAVAFSASARLYLINPNGEVQWRRALSLSQASHAVAALPSGDRVAVSVAGHVEVYNMEGSLATRFIPGGKASRGLRALVFLTTSPQGHFVGSDWQQNSVVICDGLGQVVGEYKGPGLHGCQPGSVSVDKKGYIFLTLREVNKVVILDPKGSLLGDFLTAYHGLEKPRVTTMVDGRYLVVSLSNGTIHIFRVRSPDS

SEQ ID NO: 92654 - protein, 305 aa, Homo sapiens
  Payload ID: 18520
  Gene Name: tripartite motif containing 56
  ENSP ID: ENSP00000404186
MVSHGSSPSLLEALSSDFLACKICLEQLRAPKTLPCLHTYCQDCLAQLADGGRVRCPECRETVPVPPEGVASFKTNFFVNGLLDLVKARACGDLRAGKPACALCPLVGGTSTGGPATARCLDCADDLCQACADGHRCTRQTHTHRVVDLVGYRAGWYDEEARERQAAQCPQHPGEALRFLCQPCSQLLCRECRLDPHLDHPCLPLAEAVRARRPGLEGLLAGVDNNLVELEAARRVEKEALARLREQAARVGTQVEEAAEGVLRALLAQKQENHLNPGGGSCSELRSHHCTPAWVTRMKLHLKKK

SEQ ID NO: 92655 - protein, 65 aa, Homo sapiens
  Payload ID: 18520
  Gene Name: tripartite motif containing 56
  ENSP ID: ENSP00000486217
MVSHGSSPSLLEALSSDFLACKICLEQLRAPKTLPCLHTYCQDCLAQLADGGRVRCPECRETVPV

SEQ ID NO: 92656 - protein, 486 aa, Homo sapiens
  Payload ID: 18521
  Gene Name: tripartite motif containing 58
  Uniprot ID: Q8NG06
  ENSP ID: ENSP00000355437
MAWAPPGERLREDARCPVCLDFLQEPVSVDCGHSFCLRCISEFCEKSDGAQGGVYACPQCRGPFRPSGFRPNRQLAGLVESVRRLGLGAGPGARRCARHGEDLSRFCEEDEAALCWVCDAGPEHRTHRTAPLQEAAGSYQVKLQMALELMRKELEDALTQEANVGKKTVIWKEKVEMQRQRFRLEFEKHRGFLAQEEQRQLRRLEAEERATLQRLRESKSRLVQQSKALKELADELQERCQRPALGLLEGVRGVLSRSKAVTRLEAENIPMELKTACCIPGRRELLRKFQVDVKLDPATAHPSLLLTADLRSVQDGEPWRDVPNNPERFDTWPCILGLQSFSSGRHYWEVLVGEGAEWGLGVCQDTLPRKGETTPSPENGVWALWLLKGNEYMVLASPSVPLLQLESPRCIGIFLDYEAGEISFYNVTDGSYIYTFNQLFSGLLRPYFFICDATPLILPPTTIAGSGNWASRDHLDPASDVRDDHL

SEQ ID NO: 92657 - protein, 403 aa, Homo sapiens
  Payload ID: 18522
  Gene Name: tripartite motif containing 59
  Uniprot ID: Q8IWR1
  ENSP ID: ENSP00000311219
MHNFEEELTCPICYSIFEDPRVLPCSHTFCRNCLENILQASGNFYIWRPLRIPLKCPNCRSITEIAPTGIESLPVNFALRAIIEKYQQEDHPDIVTCPEHYRQPLNVYCLLDKKLVCGHCLTIGQHHGHPIDDLQSAYLKEKDTPQKLLEQLTDTHWTDLTHLIEKLKEQKSHSEKMIQGDKEAVLQYFKELNDTLEQKKKSFLTALCDVGNLINQEYTPQIERMKEIREQQLELMALTISLQEESPLKFLEKVDDVRQHVQILKQRPLPEVQPVEIYPRVSKILKEEWSRTEIGQIKNVLIPKMKISPKRMSCSWPGKDEKEVEFLKILNIVVVTLISVILMSILFFNQHIITFLSEITLIWFSEASLSVYQSLSNSLHKVKNILCHIFYLLKEFVWKIVSH

SEQ ID NO: 92658 - protein, 177 aa, Homo sapiens
  Payload ID: 18522
  Gene Name: tripartite motif containing 59
  ENSP ID: ENSP00000417081
MHNFEEELTCPICYSIFEDPRVLPCSHTFCRNCLENILQASGNFYIWRPLRIPLKCPNCRSITEIAPTGIESLPVNFALRAIIEKYQQEDHPDIVTCPEHYRQPLNVYCLLDKKLVCGHCLTIGQHHGHPIDDLQSAYLKEKDTPQKLLEQLTDTHWTDLTHLIEKLKEQKSHSEKM

SEQ ID NO: 92659 - protein, 111 aa, Homo sapiens
  Payload ID: 18522
  Gene Name: tripartite motif containing 59
  ENSP ID: ENSP00000417605
MHNFEEELTCPICYSIFEDPRVLPCSHTFCRNCLENILQASGNFYIWRPLRIPLKCPNCRSITEIAPTGIESLPVNFALRAIIEKYQQEDHPDIVTCPEHYRQPLNVYCLL

SEQ ID NO: 92660 - protein, 114 aa, Homo sapiens
  Payload ID: 18522
  Gene Name: tripartite motif containing 59
  ENSP ID: ENSP00000418699
MHNFEEELTCPICYSIFEDPRVLPCSHTFCRNCLENILQASGNFYIWRPLRIPLKCPNCRSITEIAPTGIESLPVNFALRAIIEKYQQEDHPDIVTCPEHYRQPLNVYCLLDKK

SEQ ID NO: 92661 - protein, 179 aa, Homo sapiens
  Payload ID: 18522
  Gene Name: tripartite motif containing 59
  ENSP ID: ENSP00000418856
MRRRIRIKDSGGVGEECIQPPNHEINKEMHNFEEELTCPICYSIFEDPRVLPCSHTFCRNCLENILQASGNFYIWRPLRIPLKCPNCRSITEIAPTGIESLPVNFALRAIIEKYQQEDHPDIVTCPEHYRQPLNVYCLLDKKLVCGHCLTIGQHHGHPIDDLQSAYLKEKDTPQKLLEQ

SEQ ID NO: 92662 - protein, 68 aa, Homo sapiens
  Payload ID: 18522
  Gene Name: tripartite motif containing 59
  ENSP ID: ENSP00000420451
MVQPSLEMHNFEEELTCPICYSIFEDPRVLPCSHTFCRNCLENILQASGNFYIWRPLRIPLKCPNCRS

SEQ ID NO: 92663 - protein, 155 aa, Homo sapiens
  Payload ID: 18522
  Gene Name: tripartite motif containing 59
  ENSP ID: ENSP00000420520
MHNFEEELTCPICYSIFEDPRVLPCSHTFCRNCLENILQASGNFYIWRPLRIPLKCPNCRSITEIAPTGIESLPVNFALRAIIEKYQQEDHPDIVTCPEHYRQPLNVYCLLDKKLVCGHCLTIGQHHGHPIDDLQSAYLKEKDTPQKLLEQLTDT

SEQ ID NO: 92664 - protein, 323 aa, Homo sapiens
  Payload ID: 18522
  Gene Name: tripartite motif containing 59
  ENSP ID: ENSP00000444313
MHNFEEELTCPICYSIFEDPRVLPCSHTFCRNCLENILQASGNFYIWRPLRIPLKCPNCRSITEIAPTGIESLPVNFALRAIIEKYQQEDHPDIVTCPEHYRQPLNVYCLLDKKLVCGHCLTIGQHHGHPIDDLQSAYLKEKDTPQKLLEQLTDTHWTDLTHLIEKLKEQKSHSEKMIQGDKEAVLQYFKELNDTLEQKKKSFLTALCDVGNLINQEYTPQIERMKEIREQQLELMALTISLQEESPLKFLEKVDDVRQHVQILKQRPLPEVQPVEIYPRVSKILKEEWSRTEIGQIKNVLIPKMKISPKRMSCSWPDEGTDK

SEQ ID NO: 92665 - protein, 488 aa, Homo sapiens
  Payload ID: 18523
  Gene Name: tripartite motif containing 6
  Uniprot ID: Q9C030
  ENSP ID: ENSP00000278302
MTSPVLVDIREEVTCPICLELLTEPLSIDCGHSFCQACITPNGRESVIGQEGERSCPVCQTSYQPGNLRPNRHLANIVRRLREVVLGPGKQLKAVLCADHGEKLQLFCQEDGKVICWLCERSQEHRGHHTFLVEEVAQEYQEKFQESLKKLKNEEQEAEKLTAFIREKKTSWKNQMEPERCRIQTEFNQLRNILDRVEQRELKKLEQEEKKGLRIIEEAENDLVHQTQSLRELISDLERRCQGSTMELLQDVSDVTERSEFWTLRKPEALPTKLRSMFRAPDLKRMLRVCRELTDVQSYWVDVTLNPHTANLNLVLAKNRRQVRFVGAKVSGPSCLEKHYDCSVLGSQHFSSGKHYWEVDVAKKTAWILGVCSNSLGPTFSFNHFAQNHSAYSRYQPQSGYWVIGLQHNHEYRAYEDSSPSLLLSMTVPPRRVGVFLDYEAGTVSFYNVTNHGFPIYTFSKYYFPTTLCPYFNPCNCVIPMTLRRPSS

SEQ ID NO: 92666 - protein, 516 aa, Homo sapiens
  Payload ID: 18523
  Gene Name: tripartite motif containing 6
  Uniprot ID: Q9C030
  ENSP ID: ENSP00000369440
MCGSERILQAGNILEIRVGQAGARRVATMTSPVLVDIREEVTCPICLELLTEPLSIDCGHSFCQACITPNGRESVIGQEGERSCPVCQTSYQPGNLRPNRHLANIVRRLREVVLGPGKQLKAVLCADHGEKLQLFCQEDGKVICWLCERSQEHRGHHTFLVEEVAQEYQEKFQESLKKLKNEEQEAEKLTAFIREKKTSWKNQMEPERCRIQTEFNQLRNILDRVEQRELKKLEQEEKKGLRIIEEAENDLVHQTQSLRELISDLERRCQGSTMELLQDVSDVTERSEFWTLRKPEALPTKLRSMFRAPDLKRMLRVCRELTDVQSYWVDVTLNPHTANLNLVLAKNRRQVRFVGAKVSGPSCLEKHYDCSVLGSQHFSSGKHYWEVDVAKKTAWILGVCSNSLGPTFSFNHFAQNHSAYSRYQPQSGYWVIGLQHNHEYRAYEDSSPSLLLSMTVPPRRVGVFLDYEAGTVSFYNVTNHGFPIYTFSKYYFPTTLCPYFNPCNCVIPMTLRRPSS

SEQ ID NO: 92667 - protein, 462 aa, Homo sapiens
  Payload ID: 18523
  Gene Name: tripartite motif containing 6
  ENSP ID: ENSP00000369450
MTSPVLVDIREEVTCPICLELLTEPLSIDCGHSFCQACITPNGRESVIGQEGERSCPVCQTSYQPGNLRPNRHLANIVRRLREEDGKVICWLCERSQEHRGHHTFLVEEVAQEYQEKFQESLKKLKNEEQEAEKLTAFIREKKTSWKNQMEPERCRIQTEFNQLRNILDRVEQRELKKLEQEEKKGLRIIEEAENDLVHQTQSLRELISDLERRCQGSTMELLQDVSDVTERSEFWTLRKPEALPTKLRSMFRAPDLKRMLRVCRELTDVQSYWVDVTLNPHTANLNLVLAKNRRQVRFVGAKVSGPSCLEKHYDCSVLGSQHFSSGKHYWEVDVAKKTAWILGVCSNSLGPTFSFNHFAQNHSAYSRYQPQSGYWVIGLQHNHEYRAYEDSSPSLLLSMTVPPRRVGVFLDYEAGTVSFYNVTNHGFPIYTFSKYYFPTTLCPYFNPCNCVIPMTLRRPSS

SEQ ID NO: 92668 - protein, 313 aa, Homo sapiens
  Payload ID: 18523
  Gene Name: tripartite motif containing 6
  Uniprot ID: Q9C030
  ENSP ID: ENSP00000399215
MEPERCRIQTEFNQLRNILDRVEQRELKKLEQEEKKGLRIIEEAENDLVHQTQSLRELISDLERRCQGSTMELLQDVSDVTERSEFWTLRKPEALPTKLRSMFRAPDLKRMLRVCRELTDVQSYWVDVTLNPHTANLNLVLAKNRRQVRFVGAKVSGPSCLEKHYDCSVLGSQHFSSGKHYWEVDVAKKTAWILGVCSNSLGPTFSFNHFAQNHSAYSRYQPQSGYWVIGLQHNHEYRAYEDSSPSLLLSMTVPPRRVGVFLDYEAGTVSFYNVTNHGFPIYTFSKYYFPTTLCPYFNPCNCVIPMTLRRPSS

SEQ ID NO: 92669 - protein, 98 aa, Homo sapiens
  Payload ID: 18523
  Gene Name: tripartite motif containing 6
  ENSP ID: ENSP00000414108
MEPERCRIQTEFNQLRNILDRVEQRELKKLEQEEKKGLRIIEEAENDLVHQTQSLRELISDLERRCQGSTMELLQDVSDVTERSEFWTLRKPEALPTK

SEQ ID NO: 92670 - protein, 313 aa, Homo sapiens; identical to SEQ ID NO: 92668
  Payload ID: 18523
  Gene Name: tripartite motif containing 6
  Uniprot ID: Q9C030
  ENSP ID: ENSP00000421079

SEQ ID NO: 92671 - protein, 313 aa, Homo sapiens; identical to SEQ ID NO: 92668
  Payload ID: 18523
  Gene Name: tripartite motif containing 6
  Uniprot ID: Q9C030
  ENSP ID: ENSP00000421802

SEQ ID NO: 92672 - protein, 313 aa, Homo sapiens; identical to SEQ ID NO: 92668
  Payload ID: 18523
  Gene Name: tripartite motif containing 6
  Uniprot ID: Q9C030
  ENSP ID: ENSP00000427704

SEQ ID NO: 92673 - protein, 395 aa, Homo sapiens
  Payload ID: 18523
  Gene Name: tripartite motif containing 6
  ENSP ID: ENSP00000480315
MCGSERPWRKTAALLSGGWEGHLLACERSQEHRGHHTFLVEEVAQEYQEKFQESLKKLKNEEQEAEKLTAFIREKKTSWKNQMEPERCRIQTEFNQLRNILDRVEQRELKKLEQEEKKGLRIIEEAENDLVHQTQSLRELISDLERRCQGSTMELLQDVSDVTERSEFWTLRKPEALPTKLRSMFRAPDLKRMLRVCRELTDVQSYWVDVTLNPHTANLNLVLAKNRRQVRFVGAKVSGPSCLEKHYDCSVLGSQHFSSGKHYWEVDVAKKTAWILGVCSNSLGPTFSFNHFAQNHSAYSRYQPQSGYWVIGLQHNHEYRAYEDSSPSLLLSMTVPPRRVGVFLDYEAGTVSFYNVTNHGFPIYTFSKYYFPTTLCPYFNPCNCVIPMTLRRPSS

SEQ ID NO: 92674 - protein, 462 aa, Homo sapiens; identical to SEQ ID NO: 92667
  Payload ID: 18523
  Gene Name: tripartite motif containing 6
  ENSP ID: ENSP00000484009

SEQ ID NO: 92675 - protein, 471 aa, Homo sapiens
  Payload ID: 18524
  Gene Name: tripartite motif containing 60
  Uniprot ID: Q495X7
  ENSP ID: ENSP00000343765
MEFVTALVNLQEESSCPICLEYLKDPVTINCGHNFCRSCLSVSWKDLDDTFPCPVCRFCFPYKSFRRNPQLRNLTEIAKQLQIRRSKRKRQKENAMCEKHNQFLTLFCVKDLEILCTQCSFSTKHQKHYICPIKKAASYHREILEGSLEPLRNNIERVEKVIILQGSKSVELKKKVEYKREEINSEFEQIRLFLQNEQEMILRQIQDEEMNILAKLNENLVELSDYVSTLKHLLREVEGKSVQSNLELLTQAKSMHHKYQNLKCPELFSFRLTKYGFSLPPQYSGLDRIIKPFQVDVILDLNTAHPQLLVSEDRKAVRYERKKRNICYDPRRFYVCPAVLGSQRFSSGRHYWEVEVGNKPKWILGVCQDCLLRNWQDQPSVLGGFWAIGRYMKSGYVASGPKTTQLLPVVKPSKIGIFLDYELGDLSFYNMNDRSILYTFNDCFTEAVWPYFYTGTDSEPLKICSVSDSER

SEQ ID NO: 92676 - protein, 471 aa, Homo sapiens; identical to SEQ ID NO: 92675
  Payload ID: 18524
  Gene Name: tripartite motif containing 60
  Uniprot ID: Q495X7
  ENSP ID: ENSP00000421142

SEQ ID NO: 92677 - protein, 90 aa, Homo sapiens
  Payload ID: 18524
  Gene Name: tripartite motif containing 60
  ENSP ID: ENSP00000421784
MEFVTALVNLQEESSCPICLEYLKDPVTINCGHNFCRSCLSVSWKDLDDTFPCPVCRFCFPYKSFRRNPQLRNLTEIAKQLQIRRSKRKR

SEQ ID NO: 92678 - protein, 471 aa, Homo sapiens; identical to SEQ ID NO: 92675
  Payload ID: 18524
  Gene Name: tripartite motif containing 60
  Uniprot ID: Q495X7
  ENSP ID: ENSP00000426496

SEQ ID NO: 92679 - protein, 209 aa, Homo sapiens
  Payload ID: 18525
  Gene Name: tripartite motif containing 61
  Uniprot ID: Q5EBN2
  ENSP ID: ENSP00000332288
MEFVTALADLRAEASCPICLDYLKDPVTISCGHNFCLSCIIMSWKDLHDSFPCPFCHFCCPERKFISNPQLGSLTEIAKQLQIRSKKRKRQEEKHVCKKHNQVLTFFCQKDLELLCPRCSLSTDHQHHCVWPIKKAASYHRKKLEEYNAPWKERVELIEKVITMQTRKSLELKKKMESPSVTRLECSCTISAHFNLRLPGSSDSSASGS

SEQ ID NO: 92680 - protein, 209 aa, Homo sapiens; identical to SEQ ID NO: 92679
  Payload ID: 18525
  Gene Name: tripartite motif containing 61
  Uniprot ID: Q5EBN2
  ENSP ID: ENSP00000482389

SEQ ID NO: 92681 - protein, 475 aa, Homo sapiens
  Payload ID: 18526
  Gene Name: tripartite motif containing 62
  Uniprot ID: Q9BVG3
  ENSP ID: ENSP00000291416
MACSLKDELLCSICLSIYQDPVSLGCEHYFCRRCITEHWVRQEAQGARDCPECRRTFAEPALAPSLKLANIVERYSSFPLDAILNARRAARPCQAHDKVKLFCLTDRALLCFFCDEPALHEQHQVTGIDDAFDELQRELKDQLQALQDSEREHTEALQLLKRQLAETKSSTKSLRTTIGEAFERLHRLLRERQKAMLEELEADTARTLTDIEQKVQRYSQQLRKVQEGAQILQERLAETDRHTFLAGVASLSERLKGKIHETNLTYEDFPTSKYTGPLQYTIWKSLFQDIHPVPAALTLDPGTAHQRLILSDDCTIVAYGNLHPQPLQDSPKRFDVEVSVLGSEAFSSGVHYWEVVVAEKTQWVIGLAHEAASRKGSIQIQPSRGFYCIVMHDGNQYSACTEPWTRLNVRDKLDKVGVFLDYDQGLLIFYNADDMSWLYTFREKFPGKLCSYFSPGQSHANGKNVQPLRINTVRI

SEQ ID NO: 92682 - protein, 354 aa, Homo sapiens
  Payload ID: 18526
  Gene Name: tripartite motif containing 62
  Uniprot ID: Q9BVG3
  ENSP ID: ENSP00000441173
MPEKTAVDQPWTQALRELKDQLQALQDSEREHTEALQLLKRQLAETKSSTKSLRTTIGEAFERLHRLLRERQKAMLEELEADTARTLTDIEQKVQRYSQQLRKVQEGAQILQERLAETDRHTFLAGVASLSERLKGKIHETNLTYEDFPTSKYTGPLQYTIWKSLFQDIHPVPAALTLDPGTAHQRLILSDDCTIVAYGNLHPQPLQDSPKRFDVEVSVLGSEAFSSGVHYWEVVVAEKTQWVIGLAHEAASRKGSIQIQPSRGFYCIVMHDGNQYSACTEPWTRLNVRDKLDKVGVFLDYDQGLLIFYNADDMSWLYTFREKFPGKLCSYFSPGQSHANGKNVQPLRINTVRI

SEQ ID NO: 92683 - protein, 353 aa, Homo sapiens
  Payload ID: 18527
  Gene Name: tripartite motif containing 63, E3 ubiquitin protein ligase
  Uniprot ID: Q969Q1
  ENSP ID: ENSP00000363390
MDYKSSLIQDGNPMENLEKQLICPICLEMFTKPVVILPCQHNLCRKCANDIFQAANPYWTSRGSSVSMSGGRFRCPTCRHEVIMDRHGVYGLQRNLLVENIIDIYKQECSSRPLQKGSHPMCKEHEDEKINIYCLTCEVPTCSMCKVFGIHKACEVAPLQSVFQGQKTELNNCISMLVAGNDRVQTIITQLEDSRRVTKENSHQVKEELSQKFDTLYAILDEKKSELLQRITQEQEKKLSFIEALIQQYQEQLDKSTKLVETAIQSLDEPGGATFLLTAKQLIKSIVEASKGCQLGKTEQGFENMDFFTLDLEHIADALRAIDFGTDEEEEEFIEEEDQEEEESTEGKEEGHQ

SEQ ID NO: 92684 - protein, 449 aa, Homo sapiens
  Payload ID: 18528
  Gene Name: tripartite motif containing 64
  Uniprot ID: A6NGJ6
  ENSP ID: ENSP00000483764
MDSDDLQVFQNELICCICVNYFIDPVTIDCGHSFCRPCLCLCSEEGRAPMRCPSCRKISEKPNFNTNVVLKKLSSLARQTRPQNINSSDNICVLHEETKELFCEADKRLLCGPCSESPEHMAHSHSPIGWAAEECREKLIKEMDYLWEINQETRNNLNQETRTFHSLKDYVSVRKRIITIQYQKMPIFLDEEEQRHLQALEREAEELFQQLQDSQVRMTQHLERMKDMYRELWETCHVPDVELLQDVRNVSARTDLAQMQKPQPVNPELTSWCITGVLDMLNNFRVDSALSTEMIPCYISLSEDVRYVIFGDDHLSAPTDPQGVDSFAVWGAQAFTSGKHYWEVDVTLSSNWILGVCQDSRTADANFVIDSDERFFLISSKRSNHYSLSTNSPPLIQYVQRPLGQVGVFLDYDNGSVSFFDVSKGSLIYGFPPSSFSSPLRPFFCFGCT

SEQ ID NO: 92685 - protein, 449 aa, Homo sapiens
  Payload ID: 18529
  Gene Name: tripartite motif containing 64B
  Uniprot ID: A6NI03
  ENSP ID: ENSP00000332969
MDSDDLQVFQNELICCICVNYFIDPVTIDCGHSFCRPCLCLCSEEGRAPMRCPSCRKTSEKPNFNTNLVLKKLSSLARQTRPQNINSSDNICVLHEETKELFCEADKRLLCGPCSESPEHMAHSHSPIGWAAEECREKLIKEMDYLWEINQETRNNLNQETSTFHSLKDYVSVRKRIITIQYQKMPIFLDEEEQRHLQALEREAEELFQQLQDSQVRMTQHLERMKDMYRELWETCHMPDVVLLQDVRNVSARTDLAQMQKPQPVNPELTSWCITGVLDMLNNFRVDSALSTEMIPCYISLSEDVRYVIFGDDHLSAPTDPQGVDSFAVWGAQAFTSGKHYWEVDVTLSSNWILGVCRDSRTADANFVIDSDERFFLISSKRSNHYSLSTNSPPLIQYVQRPLGRVGVFLDYDNGSVSFFDVSKGSLIYGFPPSSFSSPLRPFFCFGCT

SEQ ID NO: 92686 - protein, 447 aa, Homo sapiens
  Payload ID: 18530
  Gene Name: tripartite motif containing 64C
  ENSP ID: ENSP00000431987
MDSDTLRVFQNELICCICVNYFIDPVTTDCVHSFCRPCLCLCSEEGRAPMRCPLCRKISEKPNFNTNVALKKLASLARQTRPQNINSSDNICVLHEETKELFCEADKRLLCGPCSESPEHMAHSHSPIGWAAEECRVQKLIKEMDYLWKINQETQNNLNQETSKFCSLVEDKRNRIVYRYQKMHIFLDEEEQRHLQALEREAKELFQQLQDSQVRMTQHLEGMKDMYRELWETYHMPDVELLQDVGNISARTDLAQMPKPQPVNPELTSWCITGVLDMLNNFRVDNALSTEMTPCYISLSEDVRRVIFGDDHRSAPMDPQGVESFAVWCAQAFTSGKHYWEVDVTHSSNWILGVCRDSRTADTNIVIDSDKTFFSISSKTSNHYSLSTNSPPLIQYVQRPLGWVGVFLDYDNGSVSFFDVSKGSLIYGFPPSSFSSPLRPFFCFGCT

SEQ ID NO: 92687 - protein, 450 aa, Homo sapiens
  Payload ID: 18530
  Gene Name: tripartite motif containing 64C
  ENSP ID: ENSP00000481815
MDSDTLRVFQNELICCICVNYFIDPVTTDCVHSFCRPCLCLCSEEGRAPMRCPLCRKISEKPNFNTNVALKKLASLARQTRPQNINSSDNICVLHEETKELFCEADKRLLCGPCSESPEHMAHSHSPIGWAAEECRVQKLIKEMDYLWKINQETQNNLNQETSKFCSLVDYVSLRKVIITIQYQKMHIFLDEEEQRHLQALEREAKELFQQLQDSQVRMTQHLEGMKDMYRELWETYHMPDVELLQDVGNISARTDLAQMPKPQPVNPELTSWCITGVLDMLNNFRVDNALSTEMTPCYISLSEDVRRVIFGDDHRSAPMDPQGVESFAVWCAQAFTSGKHYWEVDVTHSSNWILGVCRDSRTADTNIVIDSDKTFFSISSKTSNHYSLSTNSPPLIQYVQRPLGWVGVFLDYDNGSVSFFDVSKGSLIYGFPPSSFSSPLRPFFCFGCT

SEQ ID NO: 92688 - protein, 517 aa, Homo sapiens
  Payload ID: 18531
  Gene Name: tripartite motif containing 65
  Uniprot ID: Q6PJ69
  ENSP ID: ENSP00000269383
MAAQLLEEKLTCAICLGLYQDPVTLPCGHNFCGACIRDWWDRCGKACPECREPFPDGAELRRNVALSGVLEVVRAGPARDPGPDPGPGPDPAARCPRHGRPLELFCRTEGRCVCSVCTVRECRLHERALLDAERLKREAQLRASLEVTQQQATQAEGQLLELRKQSSQIQNSACILASWVSGKFSSLLQALEIQHTTALRSIEVAKTQALAQARDEEQRLRVHLEAVARHGCRIRELLEQVDEQTFLQESQLLQPPGPLGPLTPLQWDEDQQLGDLKQLLSRLCGLLLEEGSHPGAPAKPVDLAPVEAPGPLAPVPSTVCPLRRKLWQNYRNLTFDPVSANRHFYLSRQDQQVKHCRQSRGPGGPGSFELWQVQCAQSFQAGHHYWEVRASDHSVTLGVSYPQLPRCRLGPHTDNIGRGPCSWGLCVQEDSLQAWHNGEAQRLPGVSGRLLGMDLDLASGCLTFYSLEPQTQPLYTFHALFNQPLTPVFWLLEGRTLTLCHQPGAVFPLGPQEEVLS

SEQ ID NO: 92689 - protein, 288 aa, Homo sapiens
  Payload ID: 18531
  Gene Name: tripartite motif containing 65
  ENSP ID: ENSP00000441480
  MOD_RES (1)..(1): Any amino acid
XALLDAERLKREAQLRASLEVTQQQATQAEGQLLELRKQSSQIQNSACILASWVSGKFSSLLQALEIQHTTALRSIEVAKTQALAQARDEEQRLRVHLEAVARHGCRIRELLEQVDEQTFLQESQLLQPPGPLGPLTPLQWDEDQQLGDLKQLLSRLCGLLLEEGSHPGAPAKPVDLAPVDYRNLTFDPVSANRHFYLSRQDQQVKHCRQSRGPGGPGSFELWQVQCAQSFQAGHHYWEVRASDHSVTLGVSYPQLPRCRLGPHTDNIGRGPCSWGLCVQEDSLQAWH

SEQ ID NO: 92690 - protein, 244 aa, Homo sapiens
  Payload ID: 18531
  Gene Name: tripartite motif containing 65
  ENSP ID: ENSP00000444607
  MOD_RES (1)..(1): Any amino acid
XLTCAICLGLYQDPVTLPCGHNFCGACIRDWWDRCGKACPECREPFPDGAELRRNVALSGVLEVVRAGPARDPGPDPGPGPDPAARCPRHGRPLELFCRTEGRCVCSVCTVRECRLHERALLDAERLKREAQLRASLEVTQQQATQAEGQLLELRKQSSQIQNSACILASWVSGKFSSLLQALEIQHTTALRSIEVAKTQALAQARDEEQRLRVHLEAVARHGCRIRELLEQVDEQTFLQIIAI

SEQ ID NO: 92691 - protein, 137 aa, Homo sapiens
  Payload ID: 18531
  Gene Name: tripartite motif containing 65
  ENSP ID: ENSP00000465034
  MOD_RES (1)..(1): Any amino acid
XLLEQVDEQTFLQESQLLQPPGPLGPLTPLQWDEDQQLGDLKQLLSRLCGLLLEEGSHPGAPAKPVDLAPVEAPGPLAPVPSTVCPLRRKLWQNYRNLTFDPVSANRHFYLSRQDQQVESCSLKKTYSDPNPQDLWL

SEQ ID NO: 92692 - protein, 90 aa, Homo sapiens
  Payload ID: 18531
  Gene Name: tripartite motif containing 65
  ENSP ID: ENSP00000466353
PLTPLQWDEDQQLGDLKQLLSRLCGLLLEEGSHPGAPAKPVDLAPVDYRNLTFDPVSANRHFYLSRQDQQVESCSLKKTYSDPNPQDLWL

SEQ ID NO: 92693 - protein, 1216 aa, Homo sapiens
  Payload ID: 18532
  Gene Name: tripartite motif containing 66
  Uniprot ID: O15016
  ENSP ID: ENSP00000299550
MARNCSECKEKRAAHILCTYCNRWLCSSCTEEHRHSPVPGGPFFPRAQKGSPGVNGGPGDFTLYCPLHTQEVLKLFCETCDMLTCHSCLVVEHKEHRCRHVEEVLQNQRMLLEGVTTQVAHKKSSLQTSAKQIEDRIFEVKHQHRKVENQIKMAKMVLMNELNKQANGLIEELEGITNERKRKLEQQLQSIMVLNRQFEHVQNFINWAVCSKTSVPFLFSKELIVFQMQRLLETSCNTDPGSPWSIRFTWEPNFWTKQLASLGCITTEGGQMSRADAPAYGGLQGSSPFYQSHQSPVAQQEALSHPSHKFQSPAVCSSSVCCSHCSPVSPSLKGQVPPPSIHPAHSFRQPPEMVPQQLGSLQCSALLPREKELACSPHPPKLLQPWLETQPPVEQESTSQRLGQQLTSQPVCIVPPQDVQQGAHAQPTLQTPSIQVQFGHHQKLKLSHFQQQPQQQLPPPPPPLPHPPPPLPPPPQQPHPPLPPSQHLASSQHESPPGPACSQNMDIMHHKFELEEMQKDLELLLQAQQPSLQLSQTKSPQHLQQTIVGQINYIVRQPAPVQSQSQEETLQATDEPPASQGSKPALPLDKNTAAALPQASGEETPLSVPPVDSTIQHSSPNVVRKHSTSLSIMGFSNTLEMELSSTRLERPLEPQIQSVSNLTAGAPQAVPSLLSAPPKMVSSLTSVQNQAMPSLTTSHLQTVPSLVHSTFQSMPNLISDSPQAMASLASDHPQAGPSLMSGHTQAVPSLATCPLQSIPPVSDMQPETGSSSSSGRTSGSLCPRDGADPSLENALCKVKLEEPINLSVKKPPLAPVVSTSTALQQYQNPKECENFEQGALELDAKENQSIRAFNSEHKIPYVRLERLKICAASSGEMPVFKLKPQKNDQDGSFLLIIECGTESSSMSIKVSQDRLSEATQAPGLEGRKVTVTSLAGQRPPEVEGTSPEEHRLIPRTPGAKKGPPAPIENEDFCAVCLNGGELLCCDRCPKVFHLSCHVPALLSFPGGEWVCTLCRSLTQPEMEYDCENACYNQPGMRASPGLSMYDQKKCEKLVLSLCCNNLSLPFHEPVSPLARHYYQIIKRPMDLSIIRRKLQKKDPAHYTTPEEVVSDVRLMFWNCAKFNYPDSEVAEAGRCLEVFFEGWLKEIYPEKRFAQPRQEDSDSEEVSSESGCSTPQGFPWPPYMQEGIQPKRRRRHMENERAKRMSFRLANSISQV

SEQ ID NO: 92694 - protein, 1245 aa, Homo sapiens
  Payload ID: 18532
  Gene Name: tripartite motif containing 66
  ENSP ID: ENSP00000384876
MARNCSECKEKRAAHILCTYCNRWLCSSCTEEHRHSPVPGGPFFPRAQKGSPGVNGGPGDFTLYCPLHTQEVLKLFCETCDMLTCHSCLVVEHKEHRHVEEVLQNQRMLLEGVTTQVAHKKSSLQTSAKQIEDRIFEVKHQHRKVENQIKMAKMVLMNELNKQANGLIEELEGITNERKRKLEQQLQSIMVLNRQFEHVQNFINWAVCSKTSVPFLFSKELIVFQMQRLLETSCNTDPGSPWSIRFTWEPNFWTKQLASLGCITTEGGQMSRADAPAYGGLQGSSPFYQSHQSPVAQQEALSHPSHKFQSPAVCSSSVCCSHCSPVSPSLKGQVPPPSIHPAHSFRQPPEMVPQQLGSLQCSALLPREKELACSPHPPKLLQPWLETQPPVEQESTSQRLGQQLTSQPVCIVPPQDVQQGAHAQPTLQTPSIQVQFGHHQKLKLSHFQQQPQQQLPPPPPPLPHPPPPLPPPPQQPHPPLPPSQHLASSQHESPPGPACSQNMDIMHHKFELEEMQKDLELLLQAQQPSLQLSQTKSPQHLQQTIVGQINYIVRQPAPVQSQSQEETLQATDEPPASQGSKPALPLDKNTAAALPQASGEETPLSVPPVDSTIQHSSPNVVRKHSTSLSIMGFSNTLEMELSSTRLERPLEPQIQSVSNLTAGAPQAVPSLLSAPPKMVSSLTSVQNQAMPSLTTSHLQTVPSLVHSTFQSMPNLISDSPQAMASLASDHPQAGPSLMSGHTQAVPSLATCPLQSIPPVSDMQPETGSSSSSGRTSGSLCPRDGADPSLENALCKMESEDSTRFTDLLGQGPIVPGLDAPKDLAIPSELEEPINLSVKKPPLAPVVSTSTALQQYQNPKECENFEQGALELDAKENQSIRAFNSEHKIPYVRLERLKICAASSGEMPVFKLKPQKNDQDGSFLLIIECGTESSSMSIKVSQDRLSEATQAPGLEGRKVTVTSLAGQRPPEVEGTSPEEHRLIPRTPGAKKGPPAPIENEDFCAVCLNGGELLCCDRCPKVFHLSCHVPALLSFPGGEWVCTLCRSLTQPEMEYDCENACYNQPGMRASPGLSMYDQKKCEKLVLSLCCNNLSLPFHEPVSPLARHYYQIIKRPMDLSIIRRKLQKKDPAHYTTPEEVVSDVRLMFWNCAKFNYPDSEVAEAGRCLEVFFEGWLKEIYPEKRFAQPRQEDSDSEEVSSESGCSTPQGFPWPPYMQEGIQPKRRRRHMENERAKRMSFRLANSISQV

SEQ ID NO: 92695 - protein, 286 aa, Homo sapiens
  Payload ID: 18532
  Gene Name: tripartite motif containing 66
  ENSP ID: ENSP00000437234
  MOD_RES (1)..(1): Any amino acid
XLDAKENQSIRAFNSEHKIPYVRLERLKICAASSGEMPVFKLKPQKNDQDGSFLLIIECGTESSSMSIKRPPEVEGTSPEEHRLIPRTPGAKKGPPAPIENEDFCAVCLNGGELLCCDRCPKVFHLSCHVPALLSFPGGEWVCTLCRSLTQPEMEYDCENACYNQPGMRASPGLSMYDQKKCEKLVLSLCCNNLSLPFHEPVSPLARHYYQIIKRPMDLSIIRRKLQKKDPAHYTTPEEVVSDVRLMFWNCAKFNYPDSEVAEAGRCLEVFFEGWLKEIYPEKRFA

SEQ ID NO: 92696 - protein, 783 aa, Homo sapiens
  Payload ID: 18533
  Gene Name: tripartite motif containing 67
  Uniprot ID: Q6ZTA4
  ENSP ID: ENSP00000355613
MEEELKCPVCGSLFREPIILPCSHNVCLPCARTIAVQTPDGEQHLPQPLLLSRGSGLQAGAAAAASLEHDAAAGPACGGAGGSAAGGLGGGAGGGGDHADKLSLYSETDSGYGSYTPSLKSPNGVRVLPMVPAPPGSSAAAARGAACSSLSSSSSSITCPQCHRSASLDHRGLRGFQRNRLLEAIVQRYQQGRGAVPGTSAAAAVAICQLCDRTPPEPAATLCEQCDVLYCSACQLKCHPSRGPFAKHRLVQPPPPPPPPAEAASGPTGTAQGAPSGGGGCKSPGGAGAGATGGSTARKFPTCPEHEMENYSMYCVSCRTPVCYLCLEEGRHAKHEVKPLGAMWKQHKAQLSQALNGVSDKAKEAKEFLVQLKNILQQIQENGLDYEACLVAQCDALVDALTRQKAKLLTKVTKEREHKLKMVWDQINHCTLKLRQSTGLMEYCLEVIKENDPSGFLQISDALIKRVQVSQEQWVKGALEPKVSAEFDLTLDSEPLLQAIHQLDFIQMKCRVPPVPLLQLEKCCTRNNSVTLAWRMPPFTHSPVDGYILELDDGAGGQFREVYVGKETLCTIDGLHFNSTYNARVKAFNSSGVGPYSKTVVLQTSDVAWFTFDPNSGHRDIILSNDNQTATCSSYDDRVVLGTAAFSKGVHYWELHVDRYDNHPDPAFGVARASVVKDMMLGKDDKAWAMYVDNNRSWFMHCNSHTNRTEGGVCKGATVGVLLDLNKHTLTFFINGQQQGPTAFSHVDGVFMPALSLNRNVQVTLHTGLEVPTNLGRPKLSGN

SEQ ID NO: 92697 - protein, 721 aa, Homo sapiens
  Payload ID: 18533
  Gene Name: tripartite motif containing 67
  Uniprot ID: Q6ZTA4
  ENSP ID: ENSP00000400163
MEEELKCPVCGSLFREPIILPCSHNVCLPCARTIAVQTPDGGSAAGGLGGGAGGGGDHADKLSLYSETDSGYGSYTPSLKSPNGVRVLPMVPAPPGSSAAAARGAACSSLSSSSSSITCPQCHRSASLDHRGLRGFQRNRLLEAIVQRYQQGRGAVPGTSAAAAVAICQLCDRTPPEPAATLCEQCDVLYCSACQLKCHPSRGPFAKHRLGAPSGGGGCKSPGGAGAGATGGSTARKFPTCPEHEMENYSMYCVSCRTPVCYLCLEEGRHAKHEVKPLGAMWKQHKAQLSQALNGVSDKAKEAKEFLVQLKNILQQIQENGLDYEACLVAQCDALVDALTRQKAKLLTKVTKEREHKLKMVWDQINHCTLKLRQSTGLMEYCLEVIKENDPSGFLQISDALIKRVQVSQEQWVKGALEPKVSAEFDLTLDSEPLLQAIHQLDFIQMKCRVPPVPLLQLEKCCTRNNSVTLAWRMPPFTHSPVDGYILELDDGAGGQFREVYVGKETLCTIDGLHFNSTYNARVKAFNSSGVGPYSKTVVLQTSDVAWFTFDPNSGHRDIILSNDNQTATCSSYDDRVVLGTAAFSKGVHYWELHVDRYDNHPDPAFGVARASVVKDMMLGKDDKAWAMYVDNNRSWFMHCNSHTNRTEGGVCKGATVGVLLDLNKHTLTFFINGQQQGPTAFSHVDGVFMPALSLNRNVQVTLHTGLEVPTNLGRPKLSGN

SEQ ID NO: 92698 - protein, 781 aa, Homo sapiens
  Payload ID: 18533
  Gene Name: tripartite motif containing 67
  ENSP ID: ENSP00000412124
MEEELKCPVCGSLFREPIILPCSHNVCLPCARTIAVQTPDGEQHLPQPLLLSRGSGLQAGAAAAASLEHDAAAGPACGGAGGSAAGGLGGGAGGGGDHADKLSLYSETDSGYGSYTPSLKSPNGVRVLPMVPAPPGSSAAAARGAACSSLSSSSSSITCPQCHRSASLDHRGLRGFQRNRLLEAIVQRYQQGRGAVPGTSAAAAVAICQLCDRTPPEPAATLCEQCDVLYCSACQLKCHPSRGPFAKHRLVQPPPPPPPPAEAASGPTGTAQGAPSGGGGCKSPGGAGAGATGGSTARKFPTCPEHEMENYSMYCVSCRTPVCYLCLEEGRHAKHEVKPLGAMWKQHKAQLSQALNGVSDKAKEAKEFLVQLKNILQQIQENGLDYEACLVAQCDALVDALTRQKAKLLTKVTKEREHKLKMVWDQINHCTLKLRQSTGLMEYCLEVIKENDPSGFLQISDALIKRVQVSQEQWVKGALEPKVSAEFDLTLDSEPLLQAIHQLDFIQMKLPPVPLLQLEKCCTRNNSVTLAWRMPPFTHSPVDGYILELDDGAGGQFREVYVGKETLCTIDGLHFNSTYNARVKAFNSSGVGPYSKTVVLQTSDVAWFTFDPNSGHRDIILSNDNQTATCSSYDDRVVLGTAAFSKGVHYWELHVDRYDNHPDPAFGVARASVVKDMMLGKDDKAWAMYVDNNRSWFMHCNSHTNRTEGGVCKGATVGVLLDLNKHTLTFFINGQQQGPTAFSHVDGVFMPALSLNRNVQVTLHTGLEVPTNLGRPKLSGN

SEQ ID NO: 92699 - protein, 485 aa, Homo sapiens
  Payload ID: 18534
  Gene Name: tripartite motif containing 68
  Uniprot ID: Q6AZZ1
  ENSP ID: ENSP00000300747
MDPTALVEAIVEEVACPICMTFLREPMSIDCGHSFCHSCLSGLWEIPGESQNWGYTCPLCRAPVQPRNLRPNWQLANVVEKVRLLRLHPGMGLKGDLCERHGEKLKMFCKEDVLIMCEACSQSPEHEAHSVVPMEDVAWEYKWELHEALEHLKKEQEEAWKLEVGERKRTATWKIQVETRKQSIVWEFEKYQRLLEKKQPPHRQLGAEVAAALASLQREAAETMQKLELNHSELIQQSQVLWRMIAELKERSQRPVRWMLQDIQEVLNRSKSWSLQQPEPISLELKTDCRVLGLREILKTYAADVRLDPDTAYSRLIVSEDRKRVHYGDTNQKLPDNPERFYRYNIVLGSQCISSGRHYWEVEVGDRSEWGLGVCKQNVDRKEVVYLSPHYGFWVIRLRKGNEYRAGTDEYPILSLPVPPRRVGIFVDYEAHDISFYNVTDCGSHIFTFPRYPFPGRLLPYFSPCYSIGTNNTAPLAICSLDGED

SEQ ID NO: 92700 - protein, 187 aa, Homo sapiens
  Payload ID: 18534
  Gene Name: tripartite motif containing 68
  ENSP ID: ENSP00000431783
MDPTALVEAIVEEVACPICMTFLREPMSIDCGHSFCHSCLSGLWEIPGESQNWGYTCPLCRAPVQPRNLRPNWQLANVVEKVRLLRLHPGMGLKGDLCERHGEKLKMFCKEDVLIMCEACSQSPEHEAHSVVPMEDVAWEYKWELHEALEHLKKEQEEAWKLEVGERKRTATWKAGGNPKTEYCMGV

SEQ ID NO: 92701 - protein, 142 aa, Homo sapiens
  Payload ID: 18534
  Gene Name: tripartite motif containing 68
  ENSP ID: ENSP00000434681
MQKLELNHSELIQQSQVLWRMIAELKERSQRPVRWMLQDIQEVLNRSKSWSLQQPEPISLELKTDCRVLGLREILKTYAADVRLDPDTAYSRLIVSEDRKRVHYGDTNQKLPDNPERFYRYNIVLGSQCISSGRHYWEVEVG

SEQ ID NO: 92702 - protein, 198 aa, Homo sapiens
  Payload ID: 18534
  Gene Name: tripartite motif containing 68
  ENSP ID: ENSP00000436112
MDPTALVEAIVEEVACPICMTFLREPMSIDCGHSFCHSCLSGLWEIPGESQNWGYTCPLCRAPVQPRNLRPNWQLANVVEKVRLLRLHPGMGLKGDLCERHGEKLKMFCKEDVLIMCEACSQSPEHEAHSVVPMEDVAWEYKIQVETRKQSIVWEFEKYQRLLEKKQPPHRQLGAEVAAALASLQREAAETMQKLELN

SEQ ID NO: 92703 - protein, 500 aa, Homo sapiens
  Payload ID: 18535
  Gene Name: tripartite motif containing 69
  Uniprot ID: Q86WT6
  ENSP ID: ENSP00000332284
MEVSTNPSSNIDPGDYVEMNDSITHLPSKVVIQDITMELHCPLCNDWFRDPLMLSCGHNFCEACIQDFWRLQAKETFCPECKMLCQYNNCTFNPVLDKLVEKIKKLPLLKGHPQCPEHGENLKLFSKPDGKLICFQCKDARLSVGQSKEFLQISDAVHFFTEELAIQQGQLETTLKELQTLRNMQKEAIAAHKENKLHLQQHVSMEFLKLHQFLHSKEKDILTELREEGKALNEEMELNLSQLQEQCLLAKDMLVSIQAKTEQQNSFDFLKDITTLLHSLEQGMKVLATRELISRKLNLGQYKGPIQYMVWREMQDTLCPGLSPLTLDPKTAHPNLVLSKSQTSVWHGDIKKIMPDDPERFDSSVAVLGSRGFTSGKWYWEVEVAKKTKWTVGVVRESIIRKGSCPLTPEQGFWLLRLRNQTDLKALDLPSFSLTLTNNLDKVGIYLDYEGGQLSFYNAKTMTHIYTFSNTFMEKLYPYFCPCLNDGGENKEPLHILHPQ

SEQ ID NO: 92704 - protein, 341 aa, Homo sapiens
  Payload ID: 18535
  Gene Name: tripartite motif containing 69
  Uniprot ID: Q86WT6
  ENSP ID: ENSP00000342922
MEEELAIQQGQLETTLKELQTLRNMQKEAIAAHKENKLHLQQHVSMEFLKLHQFLHSKEKDILTELREEGKALNEEMELNLSQLQEQCLLAKDMLVSIQAKTEQQNSFDFLKDITTLLHSLEQGMKVLATRELISRKLNLGQYKGPIQYMVWREMQDTLCPGLSPLTLDPKTAHPNLVLSKSQTSVWHGDIKKIMPDDPERFDSSVAVLGSRGFTSGKWYWEVEVAKKTKWTVGVVRESIIRKGSCPLTPEQGFWLLRLRNQTDLKALDLPSFSLTLTNNLDKVGIYLDYEGGQLSFYNAKTMTHIYTFSNTFMEKLYPYFCPCLNDGGENKEPLHILHPQ

SEQ ID NO: 92705 - protein, 130 aa, Homo sapiens
  Payload ID: 18535
  Gene Name: tripartite motif containing 69
  ENSP ID: ENSP00000452739
EQCLLAKDMLDITTLLHSLEQGMKVLATRELISRKLNLGQYKGPIQYMVWREMQDTLCPGLSPLTLDPKTAHPNLVLSKSQTSVWHGDIKKIMPDDPERFDSSVAVLGSRGFTSGKWYWEVEVAKKTKWT

SEQ ID NO: 92706 - protein, 263 aa, Homo sapiens
  Payload ID: 18535
  Gene Name: tripartite motif containing 69
  ENSP ID: ENSP00000453077
MEEELAIQQGQLETTLKELQTLRNMQKEAIAAHKDITTLLHSLEQGMKVLATRELISRKLNLGQYKGPIQYMVWREMQDTLCPGLSPLTLDPKTAHPNLVLSKSQTSVWHGDIKKIMPDDPERFDSSVAVLGSRGFTSGKWYWEVEVAKKTKWTVGVVRESIIRKGSCPLTPEQGFWLLRLRNQTDLKALDLPSFSLTLTNNLDKVGIYLDYEGGQLSFYNAKTMTHIYTFSNTFMEKLYPYFCPCLNDGGENKEPLHILHPQ

SEQ ID NO: 92707 - protein, 500 aa, Homo sapiens; identical to SEQ ID NO: 92703
  Payload ID: 18535
  Gene Name: tripartite motif containing 69
  Uniprot ID: Q86WT6
  ENSP ID: ENSP00000453177

SEQ ID NO: 92708 - protein, 279 aa, Homo sapiens
  Payload ID: 18535
  Gene Name: tripartite motif containing 69
  Uniprot ID: Q86WT6
  ENSP ID: ENSP00000453332
MEFLKLHQFLHSKEKDILTELREEGKALNEEMELNLSQLQEQCLLAKDMLDITTLLHSLEQGMKVLATRELISRKLNLGQYKGPIQYMVWREMQDTLCPGLSPLTLDPKTAHPNLVLSKSQTSVWHGDIKKIMPDDPERFDSSVAVLGSRGFTSGKWYWEVEVAKKTKWTVGVVRESIIRKGSCPLTPEQGFWLLRLRNQTDLKALDLPSFSLTLTNNLDKVGIYLDYEGGQLSFYNAKTMTHIYTFSNTFMEKLYPYFCPCLNDGGENKEPLHILHPQ

SEQ ID NO: 92709 - protein, 296 aa, Homo sapiens
  Payload ID: 18535
  Gene Name: tripartite motif containing 69
  Uniprot ID: Q86WT6
  ENSP ID: ENSP00000453549
MEFLKLHQFLHSKEKDILTELREEGKALNEEMELNLSQLQEQCLLAKDMLVSIQAKTEQQNSFDFLKDITTLLHSLEQGMKVLATRELISRKLNLGQYKGPIQYMVWREMQDTLCPGLSPLTLDPKTAHPNLVLSKSQTSVWHGDIKKIMPDDPERFDSSVAVLGSRGFTSGKWYWEVEVAKKTKWTVGVVRESIIRKGSCPLTPEQGFWLLRLRNQTDLKALDLPSFSLTLTNNLDKVGIYLDYEGGQLSFYNAKTMTHIYTFSNTFMEKLYPYFCPCLNDGGENKEPLHILHPQ

SEQ ID NO: 92710 - protein, 341 aa, Homo sapiens; identical to SEQ ID NO: 92704
  Payload ID: 18535
  Gene Name: tripartite motif containing 69
  Uniprot ID: Q86WT6
  ENSP ID: ENSP00000479720

SEQ ID NO: 92711 - protein, 500 aa, Homo sapiens
  Payload ID: 18535
  Gene Name: tripartite motif containing 69
  ENSP ID: ENSP00000483739
MEVSTNPSSNINPGDYVEMNDSITHLPSKVVIQDITMELHCPLCNDWFRDPLMLSCGHNFCEACIQDFWRLQAKETFCPECKMLCQYNNCTFNPVLDKLVEKIKKLPLLKGHPQCPEHGENLKLFSKPDGKLICFQCKDARLSVGQSKEFLQISDAVHFFTEELAIQQGQLETTLKELQTLRNMQKEAIAAHKENKLHLQQHVSMEFLKLHQFLHSKEKDILTELREEGKALNEEMELNLSQLQEQCLLAKDMLVSIQAKTEQQNSFDFLKDITTLLHSLEQGMKVLATRELISRKLNLGQYKGPIQYMVWREMQDTLCPGLSPLTLDPKTAHPNLVLSKSQTSVWHGDIKKIMPDDPERFDSSVAVLGSRGFTSGKWYWEVEVAKKTKWTVGVVRESIIRKGSCPLTPEQGFWLLRLRNQTDLKALDLPSFSLTLTNNLDKVGIYLDYEGGQLSFYNAKTMTHIYTFSNTFMEKLYPYFCPCLNDGGENKEPLHILHPQ

SEQ ID NO: 92712 - protein, 263 aa, Homo sapiens; identical to SEQ ID NO: 92706
  Payload ID: 18535
  Gene Name: tripartite motif containing 69
  ENSP ID: ENSP00000487832

SEQ ID NO: 92713 - protein, 296 aa, Homo sapiens; identical to SEQ ID NO: 92709
  Payload ID: 18535
  Gene Name: tripartite motif containing 69
  Uniprot ID: Q86WT6
  ENSP ID: ENSP00000488084

SEQ ID NO: 92714 - protein, 500 aa, Homo sapiens; identical to SEQ ID NO: 92711
  Payload ID: 18535
  Gene Name: tripartite motif containing 69
  ENSP ID: ENSP00000488323

SEQ ID NO: 92715 - protein, 279 aa, Homo sapiens; identical to SEQ ID NO: 92708
  Payload ID: 18535
  Gene Name: tripartite motif containing 69
  Uniprot ID: Q86WT6
  ENSP ID: ENSP00000488341

SEQ ID NO: 92716 - protein, 130 aa, Homo sapiens; identical to SEQ ID NO: 92705
  Payload ID: 18535
  Gene Name: tripartite motif containing 69
  ENSP ID: ENSP00000488671

SEQ ID NO: 92717 - protein, 511 aa, Homo sapiens
  Payload ID: 18536
  Gene Name: tripartite motif containing 7
  Uniprot ID: Q9C029
  ENSP ID: ENSP00000274773
MAAVGPRTGPGTGAEALALAAELQGEATCSICLELFREPVSVECGHSFCRACIGRCWERPGAGSVGAATRAPPFPLPCPQCREPARPSQLRPNRQLAAVATLLRRFSLPAAAPGEHGSQAAAARAAAARCGQHGEPFKLYCQDDGRAICVVCDRAREHREHAVLPLDEAVQEAKELLESRLRVLKKELEDCEVFRSTEKKESKELLKQMAAEQEKVGAEFQALRAFLVEQEGRLLGRLEELSREVAQKQNENLAQLGVEITQLSKLSSQIQETAQKPDLDFLQEFKSTLSRCSNVPGPKPTTVSSEMKNKVWNVSLKTFVLKGMLKKFKEDLRGELEKEEKVELTLDPDTANPRLILSLDLKGVRLGERAQDLPNHPCRFDTNTRVLASCGFSSGRHHWEVEVGSKDGWAFGVARESVRRKGLTPFTPEEGVWALQLNGGQYWAVTSPERSPLSCGHLSRVRVALDLEVGAVSFYAVEDMRHLYTFRVNFQERVFPLFSVCSTGTYLRIWP

SEQ ID NO: 92718 - protein, 221 aa, Homo sapiens
  Payload ID: 18536
  Gene Name: tripartite motif containing 7
  Uniprot ID: Q9C029
  ENSP ID: ENSP00000334666
MAAVGPRTGPGTGAEALALAAELQGEATCSICLELFREPVSVECGHSFCRACIGRCWERPGAGSVGAATRAPPFPLPCPQCREPARPSQLRPNRQLAAVATLLRRFSLPAAAPGEHGSQAAAARAAAARCGQHGEPFKLYCQDDGRAICVVCDRAREHREHAVLPLDEAVQEAKELLESRLRVLKKELEDCEVFRSTEKKESKELLVSQAPAGPPWDITEA

SEQ ID NO: 92719 - protein, 303 aa, Homo sapiens
  Payload ID: 18536
  Gene Name: tripartite motif containing 7
  Uniprot ID: Q9C029
  ENSP ID: ENSP00000376991
MAAEQEKVGAEFQALRAFLVEQEGRLLGRLEELSREVAQKQNENLAQLGVEITQLSKLSSQIQETAQKPDLDFLQEFKSTLSRCSNVPGPKPTTVSSEMKNKVWNVSLKTFVLKGMLKKFKEDLRGELEKEEKVELTLDPDTANPRLILSLDLKGVRLGERAQDLPNHPCRFDTNTRVLASCGFSSGRHHWEVEVGSKDGWAFGVARESVRRKGLTPFTPEEGVWALQLNGGQYWAVTSPERSPLSCGHLSRVRVALDLEVGAVSFYAVEDMRHLYTFRVNFQERVFPLFSVCSTGTYLRIWP

SEQ ID NO: 92720 - protein, 329 aa, Homo sapiens
  Payload ID: 18536
  Gene Name: tripartite motif containing 7
  Uniprot ID: Q9C029
  ENSP ID: ENSP00000376994
MTQATGQMLCLHVQVPLQLLLLGQKQMAAEQEKVGAEFQALRAFLVEQEGRLLGRLEELSREVAQKQNENLAQLGVEITQLSKLSSQIQETAQKPDLDFLQEFKSTLSRCSNVPGPKPTTVSSEMKNKVWNVSLKTFVLKGMLKKFKEDLRGELEKEEKVELTLDPDTANPRLILSLDLKGVRLGERAQDLPNHPCRFDTNTRVLASCGFSSGRHHWEVEVGSKDGWAFGVARESVRRKGLTPFTPEEGVWALQLNGGQYWAVTSPERSPLSCGHLSRVRVALDLEVGAVSFYAVEDMRHLYTFRVNFQERVFPLFSVCSTGTYLRIWP

SEQ ID NO: 92721 - protein, 303 aa, Homo sapiens; identical to SEQ ID NO: 92719
  Payload ID: 18536
  Gene Name: tripartite motif containing 7
  Uniprot ID: Q9C029
  ENSP ID: ENSP00000391458

SEQ ID NO: 92722 - protein, 868 aa, Homo sapiens
  Payload ID: 18537
  Gene Name: tripartite motif containing 71, E3 ubiquitin protein ligase
  Uniprot ID: Q2Q1W2
  ENSP ID: ENSP00000373272
MASFPETDFQICLLCKEMCGSPAPLSSNSSASSSSSQTSTSSGGGGGGPGAAARRLHVLPCLHAFCRPCLEAHRLPAAGGGAAGEPLKLRCPVCDQKVVLAEAAGMDALPSSAFLLSNLLDAVVATADEPPPKNGRAGAPAGAGGHSNHRHHAHHAHPRASASAPPLPQAPQPPAPSRSAPGGPAASPSALLLRRPHGCSSCDEGNAASSRCLDCQEHLCDNCVRAHQRVRLTKDHYIERGPPGPGAAAAAQQLGLGPPFPGPPFSILSVFPERLGFCQHHDDEVLHLYCDTCSVPICRECTMGRHGGHSFIYLQEALQDSRALTIQLLADAQQGRQAIQLSIEQAQTVAEQVEMKAKVVQSEVKAVTARHKKALEERECELLWKVEKIRQVKAKSLYLQVEKLRQNLNKLESTISAVQQVLEEGRALDILLARDRMLAQVQELKTVRSLLQPQEDDRVMFTPPDQALYLAIKSFGFVSSGAFAPLTKATGDGLKRALQGKVASFTVIGYDHDGEPRLSGGDLMSAVVLGPDGNLFGAEVSDQQNGTYVVSYRPQLEGEHLVSVTLCNQHIENSPFKVVVKSGRSYVGIGLPGLSFGSEGDSDGKLCRPWGVSVDKEGYIIVADRSNNRIQVFKPCGAFHHKFGTLGSRPGQFDRPAGVACDASRRIVVADKDNHRIQIFTFEGQFLLKFGEKGTKNGQFNYPWDVAVNSEGKILVSDTRNHRIQLFGPDGVFLNKYGFEGALWKHFDSPRGVAFNHEGHLVVTDFNNHRLLVIHPDCQSARFLGSEGTGNGQFLRPQGVAVDQEGRIIVADSRNHRVQMFESNGSFLCKFGAQGSGFGQMDRPSGIAITPDGMIVVVDFGNNRILVF

SEQ ID NO: 92723 - protein, 477 aa, Homo sapiens
  Payload ID: 18538
  Gene Name: tripartite motif containing 72, E3 ubiquitin protein ligase
  Uniprot ID: Q6ZMU5
  ENSP ID: ENSP00000312675
MSAAPGLLHQELSCPLCLQLFDAPVTAECGHSFCRACLGRVAGEPAADGTVLCPCCQAPTRPQALSTNLQLARLVEGLAQVPQGHCEEHLDPLSIYCEQDRALVCGVCASLGSHRGHRLLPAAEAHARLKTQLPQQKLQLQEACMRKEKSVAVLEHQLVEVEETVRQFRGAVGEQLGKMRVFLAALEGSLDREAERVRGEAGVALRRELGSLNSYLEQLRQMEKVLEEVADKPQTEFLMKYCLVTSRLQKILAESPPPARLDIQLPIISDDFKFQVWRKMFRALMPALEELTFDPSSAHPSLVVSSSGRRVECSEQKAPPAGEDPRQFDKAVAVVAHQQLSEGEHYWEVDVGDKPRWALGVIAAEAPRRGRLHAVPSQGLWLLGLREGKILEAHVEAKEPRALRSPERRPTRIGLYLSFGDGVLSFYDASDADALVPLFAFHERLPRPVYPFFDVCWHDKGKNAQPLLLVGPEGAEA

SEQ ID NO: 92724 - protein, 269 aa, Homo sapiens
  Payload ID: 18538
  Gene Name: tripartite motif containing 72, E3 ubiquitin protein ligase
  Uniprot ID: Q6ZMU5
  ENSP ID: ENSP00000481813
MSAAPGLLHQELSCPLCLQLFDAPVTAECGHSFCRACLGRVAGEPAADGTVLCPCCQAPTRPQALSTNLQLARLVEGLAQVPQGHCEEHLDPLSIYCEQDRALVCGVCASLGSHRGHRLLPAAEAHARLKTQLPQQKLQLQEACMRKEKSVAVLEHQLVEVEETVRQFRGAVGEQLGKMRVFLAALEGSLDREAERVRGEAGVALRRELGSLNSYLEQLRQMEKVLEEVADKPQTEFLMKYCLVTSRLQKILAESPPPARLDIQLPIIS

SEQ ID NO: 92725 - protein, 250 aa, Homo sapiens
  Payload ID: 18539
  Gene Name: tripartite motif containing 73
  Uniprot ID: Q86UV7
  ENSP ID: ENSP00000318615
MAWQVSLLELEDRLQCPICLEVFKESLMLQCGHSYCKGCLVSLSYHLDTKVRCPMCWQVVDGSSSLPNVSLAWVIEALRLPGDPEPKVCVHHRNPLSLFCEKDQELICGLCGLLGSHQHHPVTPVSTVCSRMKEELAALFSELKQEQKKVDELIAKLVKNRTRIVNESDVFSWVIRREFQELRHPVDEEKARCLEGIGGHTRGLVASLDMQLEQAQGTRERLAQAECVLEQFGNEDHHEFIWKFHSMASR

SEQ ID NO: 92726 - protein, 119 aa, Homo sapiens
  Payload ID: 18539
  Gene Name: tripartite motif containing 73
  ENSP ID: ENSP00000394718
MKEELAALFSELKQEQKKVDELIAKLVKNRTRIVNESDVFSWVIRREFQELRHPVDEEKARCLEGIGGHTRGLVASLDMQLEQAQGTRERLAQAECVLEQFGNEDHHEFIWKFHSMASR

SEQ ID NO: 92727 - protein, 249 aa, Homo sapiens
  Payload ID: 18539
  Gene Name: tripartite motif containing 73
  ENSP ID: ENSP00000407135
MAWQVSLLELEDRLQCPICLEVFKESLMLQCGHSYCKGCLVSLSYHLDTKVRCPMCWQVVDGSSSLPNVSLAWVIEALRLPGDPEPKVCVHHRNPLSLFCEKDQELICGLCGLLGSHQHHPVTPVSTVCSRMKEELAALFSELKQEQKKVDELIAKLVKNRTRIVNESDVFSWVIRREFQELRHPVDEEKARCLEGIGGHTRGLVASLDMQLEQAQGTRERLAQAECVLEQFGNEDHHEFIWFHSMASR

SEQ ID NO: 92728 - protein, 282 aa, Homo sapiens
  Payload ID: 18539
  Gene Name: tripartite motif containing 73
  ENSP ID: ENSP00000410121
MAWQVSLLELEDRLQCPICLEVFKESLMLQCGHSYCKGCLVSLSYHLDTKVRCPMCWQVVDGSSSLPNVSLAWVIEALRLPGDPEPKVCVHHRNPLSLFCEKDQELICGLCGLLGSHQHHPVTPVSTVCSRMKEELAALFSELKQEQKKVDELIAKLVKNRTRIVNESDVFSWVIRREFQELRHPVDEEKARCLEGIGGHTRGLVASLDMQLEQAQGTRERLAQAECVLEQFGNEDHHEFIWKFHSMASRLTKTEELEKKWRNGLAASHSLPQQVRPQRRTP

SEQ ID NO: 92729 - protein, 250 aa, Homo sapiens; identical to SEQ ID NO: 92725
  Payload ID: 18539
  Gene Name: tripartite motif containing 73
  Uniprot ID: Q86UV7
  ENSP ID: ENSP00000417040

SEQ ID NO: 92730 - protein, 250 aa, Homo sapiens
  Payload ID: 18540
  Gene Name: tripartite motif containing 74
  Uniprot ID: Q86UV6
  ENSP ID: ENSP00000285805
MAWQVSLLELEDWLQCPICLEVFKESLMLQCGHSYCKGCLVSLSYHLDTKVRCPMCWQVVDGSSSLPNVSLAWVIEALRLPGDPEPKVCVHHRNPLSLFCEKDQELICGLCGLLGSHQHHPVTPVSTVCSRMKEELAALFSELKQEQKKVDELIAKLVKNRTRIVNESDVFSWVIRREFQELRHPVDEEKARCLEGIGGHTRGLVASLDMQLEQAQGTRERLAQAECVLEQFGNEDHHEFIWKFHSMASR

SEQ ID NO: 92731 - protein, 249 aa, Homo sapiens
  Payload ID: 18540
  Gene Name: tripartite motif containing 74
  Uniprot ID: Q86UV6
  ENSP ID: ENSP00000378665
MAWQVSLLELEDWLQCPICLEVFKESLMLQCGHSYCKGCLVSLSYHLDTKVRCPMCWQVVDGSSSLPNVSLAWVIEALRLPGDPEPKVCVHHRNPLSLFCEKDQELICGLCGLLGSHQHHPVTPVSTVCSRMKEELAALFSELKQEQKKVDELIAKLVKNRTRIVNESDVFSWVIRREFQELRHPVDEEKARCLEGIGGHTRGLVASLDMQLEQAQGTRERLAQAECVLEQFGNEDHHEFIWFHSMASR

SEQ ID NO: 92732 - protein, 450 aa, Homo sapiens
  Payload ID: 18541
  Gene Name: tripartite motif containing 77
  Uniprot ID: I1YAP6
  ENSP ID: ENSP00000474003
MASAITQCSTSELTCSICTDYLTDPVTICCGHRFCSPCLCLLWEDTLTPNCCPVCREISQQMYFKRIIFAEKQVIPTRESVPCQLSSSAMLICRRHQEIKNLICETDRSLLCFLCSQSPRHATHKHYMTREADEYYRKKLLIQMKSIWKKKQKNQRNLNRETNIIGTWEVFINLRSMMISAEYPKVCQYLREEEQKHVESLAREGRIIFQQLKRSQTRMAKMGILLREMYEKLKEMSCKADVNLPQDLGDVMKRNEFLRLAMPQPVNPQLSAWTITGVSERLNFFRVYITLDRKICSNHKLLFEDLRHLQCSLDDTDMSCNPTSTQYTSSWGAQILSSGKHYWEVDVKDSCNWVIGLCREAWTKRNDMRLDSEGIFLLLCLKVDDHFSLFSTSPLLPHYIPRPQGWLGVFLDYECGIVSFVNVAQSSLICSFLSRIFYFPLRPFICHGSK

SEQ ID NO: 92733 - protein, 235 aa, Homo sapiens
  Payload ID: 18541
  Gene Name: tripartite motif containing 77
  ENSP ID: ENSP00000474353
SPRHATHKHYMTREADEYYRKKLLIQMKSIWKKKQKNQRNLNRETNIIGTWEDLGDVMKRNEFLRLAMPQPVNPQLSAWTITGVSERLNFFRVYITLDRKICSNHKLLFEDLRHLQCSLDDTDMSCNPTSTQYTSSWGAQILSSGKHYWEVDVKDSCNWVIGLCREAWTKRNDMRLDSEGIFLLLCLKVDDHFSLFSTSPLLPHYIPRPQGWLGVFLDYECGIVSFVNVAQSSLI

SEQ ID NO: 92734 - protein, 551 aa, Homo sapiens
  Payload ID: 18542
  Gene Name: tripartite motif containing 8
  Uniprot ID: Q9BZR9
  ENSP ID: ENSP00000302120
MAENWKNCFEEELICPICLHVFVEPVQLPCKHNFCRGCIGEAWAKDSGLVRCPECNQAYNQKPGLEKNLKLTNIVEKFNALHVEKPPAALHCVFCRRGPPLPAQKVCLRCEAPCCQSHVQTHLQQPSTARGHLLVEADDVRAWSCPQHNAYRLYHCEAEQVAVCQYCCYYSGAHQGHSVCDVEIRRNEIRKMLMKQQDRLEEREQDIEDQLYKLESDKRLVEEKVNQLKEEVRLQYEKLHQLLDEDLRQTVEVLDKAQAKFCSENAAQALHLGERMQEAKKLLGSLQLLFDKTEDVSFMKNTKSVKILMDRTQTCTSSSLSPTKIGHLNSKLFLNEVAKKEKQLRKMLEGPFSTPVPFLQSVPLYPCGVSSSGAEKRKHSTAFPEASFLETSSGPVGGQYGAAGTASGEGQSGQPLGPCSSTQHLVALPGGAQPVHSSPVFPPSQYPNGSAAQQPMLPQYGGRKILVCSVDNCYCSSVANHGGHQPYPRSGHFPWTVPSQEYSHPLPPTPSVPQSLPSLAVRDWLDASQQPGHQDFYRVYGQPSTKHYVTS

SEQ ID NO: 92735 - protein, 297 aa, Homo sapiens
  Payload ID: 18542
  Gene Name: tripartite motif containing 8
  ENSP ID: ENSP00000473428
  MOD_RES (1)..(1): Any amino acid
XHCVFCRRGPPLPAQKVCLRCEAPCCQSHVQTHLQQPSTARGHLLVEADDVRAWSCPQHNAYRLYHCEAEQVAVCQYCCYYSGAHQGHSVCDVEIRRNEIREKVNQLKEEVRLQYEKLHQLLDEDLRQTVEVLDKAQAKFCSENAAQALHLGERMQEAKKLLGSLQLLFDKTEDVSFMKNTKSVKILMDRTQTCTSSSLSPTKIGHLNSKLFLNEVAKKEKQLRKMLEGPFSTPVPFLQSVPLYPCGVSSSGAEKRKHSTAFPEASFLETSSGPVGGQYGAAGTASGEGQSGQPLGP

SEQ ID NO: 92736 - protein, 710 aa, Homo sapiens
  Payload ID: 18543
  Gene Name: tripartite motif containing 9
  Uniprot ID: Q9C026
  ENSP ID: ENSP00000298355
MEEMEEELKCPVCGSFYREPIILPCSHNLCQACARNILVQTPESESPQSHRAAGSGVSDYDYLDLDKMSLYSEADSGYGSYGGFASAPTTPCQKSPNGVRVFPPAMPPPATHLSPALAPVPRNSCITCPQCHRSLILDDRGLRGFPKNRVLEGVIDRYQQSKAAALKCQLCEKAPKEATVMCEQCDVFYCDPCRLRCHPPRGPLAKHRLVPPAQGRVSRRLSPRKVSTCTDHELENHSMYCVQCKMPVCYQCLEEGKHSSHEVKALGAMWKLHKSQLSQALNGLSDRAKEAKEFLVQLRNMVQQIQENSVEFEACLVAQCDALIDALNRRKAQLLARVNKEHEHKLKVVRDQISHCTVKLRQTTGLMEYCLEVIKENDPSGFLQISDALIRRVHLTEDQWGKGTLTPRMTTDFDLSLDNSPLLQSIHQLDFVQVKASSPVPATPILQLEECCTHNNSATLSWKQPPLSTVPADGYILELDDGNGGQFREVYVGKETMCTVDGLHFNSTYNARVKAFNKTGVSPYSKTLVLQTSEVAWFAFDPGSAHSDIILSNDNLTVTCSSYDDRVVLGKTGFSKGIHYWELTVDRYDNHPDPAFGVARMDVMKDVMLGKDDKAWAMYVDNNRSWFMHNNSHTNRTEGGITKGATIGVLLDLNRKNLTFFINDEQQGPIAFDNVEGLFFPAVSLNRNVQVTLHTGLPVPDFYSSRASIA

SEQ ID NO: 92737 - protein, 802 aa, Homo sapiens
  Payload ID: 18543
  Gene Name: tripartite motif containing 9
  Uniprot ID: Q9C026
  ENSP ID: ENSP00000342970
MEEMEEELKCPVCGSFYREPIILPCSHNLCQACARNILVQTPESESPQSHRAAGSGVSDYDYLDLDKMSLYSEADSGYGSYGGFASAPTTPCQKSPNGVRVFPPAMPPPATHLSPALAPVPRNSCITCPQCHRSLILDDRGLRGFPKNRVLEGVIDRYQQSKAAALKCQLCEKAPKEATVMCEQCDVFYCDPCRLRCHPPRGPLAKHRLVPPAQGRVSRRLSPRKVSTCTDHELENHSMYCVQCKMPVCYQCLEEGKHSSHEVKALGAMWKLHKSQLSQALNGLSDRAKEAKEFLVQLRNMVQQIQENSVEFEACLVAQCDALIDALNRRKAQLLARVNKEHEHKLKVVRDQISHCTVKLRQTTGLMEYCLEVIKENDPSGFLQISDALIRRVHLTEDQWGKGTLTPRMTTDFDLSLDNSPLLQSIHQLDFVQVKVPATPILQLEECCTHNNSATLSWKQPPLSTVPADGYILELDDGNGGQFREVYVGKETMCTVDGLHFNSTYNARVKAFNKTGVSPYSKTLVLQTSEDTDSEEQTLPFPVPSERLPLRRMSPFSSTLNLQPSFPGRSYFDFRSSPHQLSLHSSLQSLNAPGCNFETQSAPYSQLVDIKKLLAVAWFAFDPGSAHSDIILSNDNLTVTCSSYDDRVVLGKTGFSKGIHYWELTVDRYDNHPDPAFGVARMDVMKDVMLGKDDKAWAMYVDNNRSWFMHNNSHTNRTEGGITKGATIGVLLDLNRKNLTFFINDEQQGPIAFDNVEGLFFPAVSLNRNVQVSTLPLRLNSCCWLPVQRLPRAVQSNRREGS

SEQ ID NO: 92738 - protein, 550 aa, Homo sapiens
  Payload ID: 18543
  Gene Name: tripartite motif containing 9
  Uniprot ID: Q9C026
  ENSP ID: ENSP00000353561
MEEMEEELKCPVCGSFYREPIILPCSHNLCQACARNILVQTPESESPQSHRAAGSGVSDYDYLDLDKMSLYSEADSGYGSYGGFASAPTTPCQKSPNGVRVFPPAMPPPATHLSPALAPVPRNSCITCPQCHRSLILDDRGLRGFPKNRVLEGVIDRYQQSKAAALKCQLCEKAPKEATVMCEQCDVFYCDPCRLRCHPPRGPLAKHRLVPPAQGRVSRRLSPRKVSTCTDHELENHSMYCVQCKMPVCYQCLEEGKHSSHEVKALGAMWKLHKSQLSQALNGLSDRAKEAKEFLVQLRNMVQQIQENSVEFEACLVAQCDALIDALNRRKAQLLARVNKEHEHKLKVVRDQISHCTVKLRQTTGLMEYCLEVIKENDPSGFLQISDALIRRVHLTEDQWGKGTLTPRMTTDFDLSLDNSPLLQSIHQLDFVQVKASSPVPATPILQLEECCTHNNSATLSWKQPPLSTVPADGYILELDDGNGGQFREVYVGKETMCTVDGLHFNSTYNARVKAFNKTGVSPYSKTLVLQTSEGKALQQYPSERELRGI

SEQ ID NO: 92739 - protein, 468 aa, Homo sapiens
  Payload ID: 18544
  Gene Name: tripartite motif family-like 1
  Uniprot ID: Q8N9V2
  ENSP ID: ENSP00000327738
MSTADLMENLREELTCFICLDYFSSPVTTECGHSFCLVCLLRSWEEHNTPLSCPECWRTLEGPHFQSNERLGRLASIARQLRSQVLQSEDEQGSYGRMPTTAKALSDDEQGGSAFVAQSHGANRVHLSSEAEEHHREKLQEILNLLRVRRKEAQAVLTHEKERVKLCQEETKTCKQVVVSEYMKMHQFLKEEEQLQLQLLEQEEKENMRKLRNNEIKLTQQIRSLSKMIAQIESSSQSSAFESLEEVRGALERSEPLLLQCPEATTTELSLCRITGMKEMLRKFSTEITLDPATANAYLVLSEDLKSVKYGGSRQQLPDNPERFDQSATVLGTQIFTSGRHYWEVEVGNKTEWEVGICKDSVSRKGNLPKPPGDLFSLIGLKIGDDYSLWVSSPLKGQHVREPVCKVGVFLDYESGHIAFYNGTDESLIYSFPQASFQEALRPIFSPCLPNEGTNTDPLTICSLNSHV

SEQ ID NO: 92740 - protein, 422 aa, Homo sapiens
  Payload ID: 18545
  Gene Name: tripartite motif family-like 2
  ENSP ID: ENSP00000317498
CFQSQEHKHHMVCGIQEAAENYRKLFQEILNTSREKLEAAKSILTDEQERMAMIQEEEQNFKKMIESEYSMRLRLLNEECEQNLQRQQECISDLNLRETLLNQAIKLATELEEMFQEMLQRLGRVGRENMEKLKESEARASEQVRSLLKLIVELEKKCGEGTLALLKCLDLEIRPPELREMNFCCAEATQSMNAKYSLERSKSLLLEHLEPAHITDLSLCHIRGLSSMFRVLQRHLTLDPETAHPCLALSEDLRTMRLRHGQQDGAGNPERLDFSAMVLAAESFTSGRHYWEVDVEKATRWQVGIYHGSADAKGSTARASGEKVLLTGSVMGTEWTLWVFPPLKRLFLEKKLDTVGVFLDCEHGQISFYNVTEMSLIYNFSHCAFQGALRPVFSLCIPNGDTSPDSLTILQHGPSCDATVSP

SEQ ID NO: 92741 - protein, 118 aa, Homo sapiens
  Payload ID: 18545
  Gene Name: tripartite motif family-like 2
  ENSP ID: ENSP00000421575
EEEQNFKKMIESEYSMRLRLLNEECEQNLQRQQECISDLNLRETLLNQAIKLATELEEMFQEMLQRLGRVGRENMEKLKESEARASEQVRSLLKLIVELEKKCGEGTLALLKEQVTAA

SEQ ID NO: 92742 - protein, 437 aa, Homo sapiens
  Payload ID: 18545
  Gene Name: tripartite motif family-like 2
  Uniprot ID: Q8N7C3
  ENSP ID: ENSP00000422581
MSKRLSPQLQHNITEDAYCETHLEPTRLFCDVDQITLCSKCFQSQEHKHHMVCGIQEAAENYRKLFQEILNTSREKLEAAKSILTDEQERMAMIQEEEQNFKKMIESEYSMRLRLLNEECEQNLQRQQECISDLNLRETLLNQAIKLATELEEMFQEMLQRLGRVGRENMEKLKESEARASEQVRSLLKLIVELEKKCGEGTLALLKNAKYSLERSKSLLLEHLEPAHITDLSLCHIRGLSSMFRVLQRHLTLDPETAHPCLALSEDLRTMRLRHGQQDGAGNPERLDFSAMVLAAESFTSGRHYWEVDVEKATRWQVGIYHGSADAKGSTARASGEKVLLTGSVMGTEWTLWVFPPLKRLFLEKKLDTVGVFLDCEHGQISFYNVTEMSLIYNFSHCAFQGALRPVFSLCIPNGDTSPDSLTILQHGPSCDATVSP

SEQ ID NO: 92743 - protein, 118 aa, Homo sapiens; identical to SEQ ID NO: 92741
  Payload ID: 18545
  Gene Name: tripartite motif family-like 2
  ENSP ID: ENSP00000426074

SEQ ID NO: 92744 - protein, 309 aa, Homo sapiens
  Payload ID: 18546
  Gene Name: tripartite motif-containing 51
  Uniprot ID: Q9BSJ1
  ENSP ID: ENSP00000244891
MQSLWEKACENLRNLNMETTRTRCWKDYVSLRIEAIRAEYQKMPAFLHEEEQHHLERLRKEGEDIFQQLNESKARMEHSRELLRGMYEDLKQMCHKADVELLQAFGDILHRYESLLLQVSEPVNPELSAGPITGLLDSLSGFRVDFTLQPERANSHIFLCGDLRSMNVGCDPQDDPDITGKSECFLVWGAQAFTSGKYYWEVHMGDSWNWAFGVCNNYWKEKRQNDKIDGEEGLFLLGCVKEDTHCSLFTTSPLVVQYVPRPTSTVGLFLDCEGRTVSFVDVDQSSLIYTIPNCSFSPPLRPIFCCSHF

SEQ ID NO: 92745 - protein, 452 aa, Homo sapiens
  Payload ID: 18546
  Gene Name: tripartite motif-containing 51
  Uniprot ID: Q9BSJ1
  ENSP ID: ENSP00000395086
MNSGILQVFQRALTCPICMNYFLDPVTIDCGHSFCRPCLYLNWQDTAVLAQCSECKKTTRQRNLNTDICLKNMAFIARKASLRQFLSSEEQICGMHRETKKMFCEVDKSLLCLPCSNSQEHRNHIHCPIEWAAEERREELLKKMQSLWEKACENLRNLNMETTRTRCWKDYVSLRIEAIRAEYQKMPAFLHEEEQHHLERLRKEGEDIFQQLNESKARMEHSRELLRGMYEDLKQMCHKADVELLQAFGDILHRYESLLLQVSEPVNPELSAGPITGLLDSLSGFRVDFTLQPERANSHIFLCGDLRSMNVGCDPQDDPDITGKSECFLVWGAQAFTSGKYYWEVHMGDSWNWAFGVCNNYWKEKRQNDKIDGEEGLFLLGCVKEDTHCSLFTTSPLVVQYVPRPTSTVGLFLDCEGRTVSFVDVDQSSLIYTIPNCSFSPPLRPIFCCSHF

SEQ ID NO: 92746 - protein, 563 aa, Homo sapiens
  Payload ID: 18547
  Gene Name: tripeptidyl peptidase I
  Uniprot ID: O14773
  ENSP ID: ENSP00000299427
MGLQACLLGLFALILSGKCSYSPEPDQRRTLPPGWVSLGRADPEEELSLTFALRQQNVERLSELVQAVSDPSSPQYGKYLTLENVADLVRPSPLTLHTVQKWLLAAGAQKCHSVITQDFLTCWLSIRQAELLLPGAEFHHYVGGPTETHVVRSPHPYQLPQALAPHVDFVGGLHRFPPTSSLRQRPEPQVTGTVGLHLGVTPSVIRKRYNLTSQDVGSGTSNNSQACAQFLEQYFHDSDLAQFMRLFGGNFAHQASVARVVGQQGRGRAGIEASLDVQYLMSAGANISTWVYSSPGRHEGQEPFLQWLMLLSNESALPHVHTVSYGDDEDSLSSAYIQRVNTELMKAAARGLTLLFASGDSGAGCWSVSGRHQFRPTFPASSPYVTTVGGTSFQEPFLITNEIVDYISGGGFSNVFPRPSYQEEAVTKFLSSSPHLPPSSYFNASGRAYPDVAALSDGYWVVSNRVPIPWVSGTSASTPVFGGILSLINEHRILSGRPPLGFLNPRLYQQHGAGLFDVTRGCHESCLDEEVEGQGFCSGPGWDPVTGWGTPNFPALLKTLLNP

SEQ ID NO: 92747 - protein, 177 aa, Homo sapiens
  Payload ID: 18547
  Gene Name: tripeptidyl peptidase I
  ENSP ID: ENSP00000398136
MGLQACLLGLFALILSGKCSYSPEPDQRRTLPPGWVSLGRADPEEELSLTFALRQQNVERLSELVQAVSDPSSPQYGKYLTLENVADLVRPSPLTLHTVQKWLLAAGAQKCHSVITQDFLTCWLSIRQAELLLPGAEFHHYVGGPTETHVAGMRDRSPSCSGSCCSVMSQPCHMCIL

SEQ ID NO: 92748 - protein, 39 aa, Homo sapiens
  Payload ID: 18547
  Gene Name: tripeptidyl peptidase I
  ENSP ID: ENSP00000434647
MGLQACLLGLFALILSGKCSYSPEPDQRRTKIPDPRECG

SEQ ID NO: 92749 - protein, 30 aa, Homo sapiens
  Payload ID: 18547
  Gene Name: tripeptidyl peptidase I
  ENSP ID: ENSP00000435001
MGLQACLLGLFALILSGKCSYSPEPDQRRT

SEQ ID NO: 92750 - protein, 320 aa, Homo sapiens
  Payload ID: 18547
  Gene Name: tripeptidyl peptidase I
  Uniprot ID: O14773
  ENSP ID: ENSP00000437066
MRLFGGNFAHQASVARVVGQQGRGRAGIEASLDVQYLMSAGANISTWVYSSPGRHEGQEPFLQWLMLLSNESALPHVHTVSYGDDEDSLSSAYIQRVNTELMKAAARGLTLLFASGDSGAGCWSVSGRHQFRPTFPASSPYVTTVGGTSFQEPFLITNEIVDYISGGGFSNVFPRPSYQEEAVTKFLSSSPHLPPSSYFNASGRAYPDVAALSDGYWVVSNRVPIPWVSGTSASTPVFGGILSLINEHRILSGRPPLGFLNPRLYQQHGAGLFDVTRGCHESCLDEEVEGQGFCSGPGWDPVTGWGTPNFPALLKTLLNP

SEQ ID NO: 92751 - protein, 556 aa, Homo sapiens
  Payload ID: 18547
  Gene Name: tripeptidyl peptidase I
  ENSP ID: ENSP00000484546
MGLQACLLGLFALILSGKCSYSPEPDQRRTLPPGWVSLGRADPEEELSLTFALRQQNVERLSELVQAVSDPSSPQYGKYLTLENVADLVRPSPLTLHTVQKWLLAAGAQKCHSVITQDFLTCWLSIRQAELLLPGAEFHHYVGGPTETHVVRSPHPYQLPQALAPHVDFVGGLHRFPPTSSLRQRPEPQVTGTVGLHLGVTPSVIRKRYNLTSQDVGSGTSNNSQACAQFLEQYFHDSDLAQFMRLFGGNFAHQASVARVVGQQGRGRAGIEASLDVQYLMSAGANISTWVYSSPGRHEGQEPFLQWLMLLSNESALPHVHTVSYGDDEDSLSSAYIQRVNTELMKAAARGLTLLFASGDSGAGCWSVSGRHQFRPTFPASSPYVTTVGGTSFQEPFLITNEIVDYISGGGFSNVFPRPSYQEEAVTKFLSSSPHLPPSSYFNASGRAYPDVAALSDGYWVVSNRVPIPWVSGTSASTPVFGGILSLINEHRILSGRPPLGFLNPRLYQQHGAGLFDVTRGCHESCLDEEVEGQGFCSGPGWDPVTGWGTPTSQLC

SEQ ID NO: 92752 - protein, 1262 aa, Homo sapiens
  Payload ID: 18548
  Gene Name: tripeptidyl peptidase II
  ENSP ID: ENSP00000365220
MATAATEEPFPFHGLLPKKETGAASFLCRYPEYDGRGVLIAVLDTGVDPGAPGMQVTTDGKPKIVDIIDTTGSGDVNTATEVEPKDGEIVGLSGRVLKIPASWTNPSGKYHIGIKNGYDFYPKALKERIQKERKEKIWDPVHRVALAEACRKQEEFDVANNGSSQANKLIKEELQSQVELLNSFEKKYSDPGPVYDCLVWHDGEVWRACIDSNEDGDLSKSTVLRNYKEAQEYGSFGTAEMLNYSVNIYDDGNLLSIVTSGGAHGTHVASIAAGHFPEEPERNGVAPGAQILSIKIGDTRLSTMETGTGLIRAMIEVINHKCDLVNYSYGEATHWPNSGRICEVINEAVWKHNIIYVSSAGNNGPCLSTVGCPGGTTSSVIGVGAYVSPDMMVAEYSLREKLPANQYTWSSRGPSADGALGVSISAPGGAIASVPNWTLRGTQLMNGTSMSSPNACGGIALILSGLKANNIDYTVHSVRRALENTAVKADNIEVFAQGHGIIQVDKAYDYLVQNTSFANKLGFTVTVGNNRGIYLRDPVQVAAPSDHGVGIEPVFPENTENSEKISLQLHLALTSNSSWVQCPSHLELMNQCRHINIRVDPRGLREGLHYTEVCGYDIASPNAGPLFRVPITAVIAAKVNESSHYDLAFTDVHFKPGQIRRHFIEVPEGATWAEVTVCSCSSEVSAKFVLHAVQLVKQRAYRSHEFYKFCSLPEKGTLTEAFPVLGGKAIEFCIARWWASLSDVNIDYTISFHGIVCTAPQLNIHASEGINRFDVQSSLKYEDLAPCITLKNWVQTLRPVSAKTKPLGSRDVLPNNRQLYEMVLTYNFHQPKSGEVTPSCPLLCELLYESEFDSQLWIIFDQNKRQMGSGDAYPHQYSLKLEKGDYTIRLQIRHEQISDLERLKDLPFIVSHRLSNTLSLDIHENHSFALLGKKKSSNLTLPPKYNQPFFVTSLPDDKIPKGAGPGCYLAGSLTLSKTELGKKAGQSAAKRQGKFKKDVIPVHYYLIPPPTKTKNGSKDKEKDSEKEKDLKEEFTEALRDLKIQWMTKLDSSDIYNELKETYPNYLPLYVARLHQLDAEKERMKRLNEIVDAANAVISHIDQTALAVYIAMKTDPRPDAATIKNDMDKQKSTLVDALCRKGCALADHLLHTQAQDGAISTDAEGKEEEGESPLDSLAETFWETTKWTDLFDNKVLTFAYKHALVNKMYGRGLKFATKLVEEKPTKENWKNCIQLMKLLGWTHCASFTENWLPIMYPPDYCVF

SEQ ID NO: 92753 - protein, 1249 aa, Homo sapiens
  Payload ID: 18548
  Gene Name: tripeptidyl peptidase II
  Uniprot ID: P29144
  ENSP ID: ENSP00000365233
MATAATEEPFPFHGLLPKKETGAASFLCRYPEYDGRGVLIAVLDTGVDPGAPGMQVTTDGKPKIVDIIDTTGSGDVNTATEVEPKDGEIVGLSGRVLKIPASWTNPSGKYHIGIKNGYDFYPKALKERIQKERKEKIWDPVHRVALAEACRKQEEFDVANNGSSQANKLIKEELQSQVELLNSFEKKYSDPGPVYDCLVWHDGEVWRACIDSNEDGDLSKSTVLRNYKEAQEYGSFGTAEMLNYSVNIYDDGNLLSIVTSGGAHGTHVASIAAGHFPEEPERNGVAPGAQILSIKIGDTRLSTMETGTGLIRAMIEVINHKCDLVNYSYGEATHWPNSGRICEVINEAVWKHNIIYVSSAGNNGPCLSTVGCPGGTTSSVIGVGAYVSPDMMVAEYSLREKLPANQYTWSSRGPSADGALGVSISAPGGAIASVPNWTLRGTQLMNGTSMSSPNACGGIALILSGLKANNIDYTVHSVRRALENTAVKADNIEVFAQGHGIIQVDKAYDYLVQNTSFANKLGFTVTVGNNRGIYLRDPVQVAAPSDHGVGIEPVFPENTENSEKISLQLHLALTSNSSWVQCPSHLELMNQCRHINIRVDPRGLREGLHYTEVCGYDIASPNAGPLFRVPITAVIAAKVNESSHYDLAFTDVHFKPGQIRRHFIEVPEGATWAEVTVCSCSSEVSAKFVLHAVQLVKQRAYRSHEFYKFCSLPEKGTLTEAFPVLGGKAIEFCIARWWASLSDVNIDYTISFHGIVCTAPQLNIHASEGINRFDVQSSLKYEDLAPCITLKNWVQTLRPVSAKTKPLGSRDVLPNNRQLYEMVLTYNFHQPKSGEVTPSCPLLCELLYESEFDSQLWIIFDQNKRQMGSGDAYPHQYSLKLEKGDYTIRLQIRHEQISDLERLKDLPFIVSHRLSNTLSLDIHENHSFALLGKKKSSNLTLPPKYNQPFFVTSLPDDKIPKGAGPGCYLAGSLTLSKTELGKKADVIPVHYYLIPPPTKTKNGSKDKEKDSEKEKDLKEEFTEALRDLKIQWMTKLDSSDIYNELKETYPNYLPLYVARLHQLDAEKERMKRLNEIVDAANAVISHIDQTALAVYIAMKTDPRPDAATIKNDMDKQKSTLVDALCRKGCALADHLLHTQAQDGAISTDAEGKEEEGESPLDSLAETFWETTKWTDLFDNKVLTFAYKHALVNKMYGRGLKFATKLVEEKPTKENWKNCIQLMKLLGWTHCASFTENWLPIMYPPDYCVF

SEQ ID NO: 92754 - protein, 86 aa, Homo sapiens
  Payload ID: 18549
  Gene Name: triple QxxK/R motif containing
  Uniprot ID: Q629K1
  ENSP ID: ENSP00000368138
MGRKDAATIKLPVDQYRKQIGKQDYKKTKPILRATKLKAEAKKTAIGIKEVGLVLAAILALLLAFYAFFYLRLTTDVDPDLDQDED

SEQ ID NO: 92755 - protein, 54 aa, Homo sapiens
  Payload ID: 18549
  Gene Name: triple QxxK/R motif containing
  ENSP ID: ENSP00000427850
MGRKDAATIKLPVDQYRKQIGKQDYKKTKPILRATKLKAEAKKTAIGIKTHHGC

SEQ ID NO: 92756 - protein, 54 aa, Homo sapiens; identical to SEQ ID NO: 92755
  Payload ID: 18549
  Gene Name: triple QxxK/R motif containing
  ENSP ID: ENSP00000428757

SEQ ID NO: 92757 - protein, 54 aa, Homo sapiens; identical to SEQ ID NO: 92755
  Payload ID: 18549
  Gene Name: triple QxxK/R motif containing
  ENSP ID: ENSP00000428759

SEQ ID NO: 92758 - protein, 86 aa, Homo sapiens; identical to SEQ ID NO: 92754
  Payload ID: 18549
  Gene Name: triple QxxK/R motif containing
  Uniprot ID: Q629K1
  ENSP ID: ENSP00000428822

SEQ ID NO: 92759 - protein, 7 aa, Homo sapiens
  Payload ID: 18549
  Gene Name: triple QxxK/R motif containing
  ENSP ID: ENSP00000429302
MGRKDAA

SEQ ID NO: 92760 - protein, 86 aa, Homo sapiens; identical to SEQ ID NO: 92754
  Payload ID: 18549
  Gene Name: triple QxxK/R motif containing
  Uniprot ID: Q629K1
  ENSP ID: ENSP00000429381

SEQ ID NO: 92761 - protein, 86 aa, Homo sapiens; identical to SEQ ID NO: 92754
  Payload ID: 18549
  Gene Name: triple QxxK/R motif containing
  Uniprot ID: Q629K1
  ENSP ID: ENSP00000429517

SEQ ID NO: 92762 - protein, 86 aa, Homo sapiens; identical to SEQ ID NO: 92754
  Payload ID: 18549
  Gene Name: triple QxxK/R motif containing
  Uniprot ID: Q629K1
  ENSP ID: ENSP00000429742

SEQ ID NO: 92763 - protein, 86 aa, Homo sapiens; identical to SEQ ID NO: 92754
  Payload ID: 18549
  Gene Name: triple QxxK/R motif containing
  Uniprot ID: Q629K1
  ENSP ID: ENSP00000429822

SEQ ID NO: 92764 - protein, 80 aa, Homo sapiens
  Payload ID: 18549
  Gene Name: triple QxxK/R motif containing
  ENSP ID: ENSP00000430123
MGRKDAATIKLPVDQYRKQIGKQDYKKTKPILRATKLKAEAKKTAIGIKSTFFFFPGSWPCTCSYIGTTTGFLCFLLSQT

SEQ ID NO: 92765 - protein, 75 aa, Homo sapiens
  Payload ID: 18549
  Gene Name: triple QxxK/R motif containing
  ENSP ID: ENSP00000430683
MGRKDAATIKLPVDQYRKQIGKQDYKKTKPILRATKLKAEAKKTAIGIKEVGLVLAAILALLLAFYAFFYLRLTT

SEQ ID NO: 92766 - protein, 86 aa, Homo sapiens; identical to SEQ ID NO: 92754
  Payload ID: 18549
  Gene Name: triple QxxK/R motif containing
  Uniprot ID: Q629K1
  ENSP ID: ENSP00000430837

SEQ ID NO: 92767 - protein, 54 aa, Homo sapiens; identical to SEQ ID NO: 92755
  Payload ID: 18549
  Gene Name: triple QxxK/R motif containing
  ENSP ID: ENSP00000430915

SEQ ID NO: 92768 - protein, 86 aa, Homo sapiens; identical to SEQ ID NO: 92754
  Payload ID: 18549
  Gene Name: triple QxxK/R motif containing
  Uniprot ID: Q629K1
  ENSP ID: ENSP00000430992

SEQ ID NO: 92769 - protein, 86 aa, Homo sapiens; identical to SEQ ID NO: 92754
  Payload ID: 18549
  Gene Name: triple QxxK/R motif containing
  Uniprot ID: Q629K1
  ENSP ID: ENSP00000442030

SEQ ID NO: 92770 - protein, 400 aa, Homo sapiens
  Payload ID: 18550
  Gene Name: TRK-fused gene
  Uniprot ID: Q92734
  ENSP ID: ENSP00000240851
MNGQLDLSGKLIIKAQLGEDIRRIPIHNEDITYDELVLMMQRVFRGKLLSNDEVTIKYKDEDGDLITIFDSSDLSFAIQCSRILKLTLFVNGQPRPLESSQVKYLRRELIELRNKVNRLLDSLEPPGEPGPSTNIPENDTVDGREEKSASDSSGKQSTQVMAASMSAFDPLKNQDEINKNVMSAFGLTDDQVSGPPSAPAEDRSGTPDSIASSSSAAHPPGVQPQQPPYTGAQTQAGQIEGQMYQQYQQQAGYGAQQPQAPPQQPQQYGIQYSASYSQQTGPQQPQQFQGYGQQPTSQAPAPAFSGQPQQLPAQPPQQYQASNYPAQTYTAQTSQPTNYTVAPASQPGMAPSQPGAYQPRPGFTSLPGSTMTPPPSGPNPYARNRPPFGQGYTQPGPGYR

SEQ ID NO: 92771 - protein, 396 aa, Homo sapiens
  Payload ID: 18550
  Gene Name: TRK-fused gene
  Uniprot ID: Q92734
  ENSP ID: ENSP00000397182
MNGQLDLSGKLIIKAQLGEDIRRIPIHNEDITYDELVLMMQRVFRGKLLSNDEVTIKYKDEDGDLITIFDSSDLSFAIQCSRILKLTLFVNGQPRPLESSQVKYLRRELIELRNKVNRLLDSLEPPGEPGPSTNIPENDTVDGREEKSASDSSGKQSTQVMAASMSAFDPLKNQDEINKNVMSAFGLTDDQVSGPPSAPAEDRSGTPDSIASSSSAAHPPGVQPQQPPYTGAQTQAGQMYQQYQQQAGYGAQQPQAPPQQPQQYGIQYSASYSQQTGPQQPQQFQGYGQQPTSQAPAPAFSGQPQQLPAQPPQQYQASNYPAQTYTAQTSQPTNYTVAPASQPGMAPSQPGAYQPRPGFTSLPGSTMTPPPSGPNPYARNRPPFGQGYTQPGPGYR
